United States Patent Application Publication US 2011/0182862 A1 - sequence listing, part 24

SEQ ID NO: 34804 - DNA, 1377 bp, Muscodor strobelii
  misc_feature: SGI cDNA ID NO. 572037
  misc_feature: Encodes the peptide sequence at SEQ ID NO 34805
atggcgttaaaacgcttccctgctcccgacttcgatccttcccctcttgcacagccgctccgtttcgagttcagcaaaaagactgctaataatcgcttcttgaaagcttctatgacggaacaactgtcgtcatgggacccaaaagatttgacggaaagagggatcccatctcaggaacttgtaaacgtgtaccgccgctggggcgaaggaggtttgggtctaatcctgactggaaatgtcatgctttattatgaccagctcgaggcatccggaaatgctataatcaccaaaaattcaccgttttcggatgagaggttccggagattccaaagtctagcaagccaagctaaagctcatggaagcttagtagtggcccagctttctcatccaggccgacaggtcaccgcagatatccaacccaacccgatctccgcgagcgacgtccagctagtaactaaatatggtaccgctaccttcggcaagccgcgtccaatgggtaggggtgatattaaggatgtgatcgaaagttgggcatttgcagcggagtatttgcacaaggcaggctatgacggcatacaaatacatggggcccatggatatctgctcgcacagtttttatcgcaaacaacaaacaaaaggactgatgagtacgggggctcgctattgaatagagcgcggatcatttttgagataatagacgcaattcgccaccgtgtgtctgatgaatcctttatcatcggtgtaaagctcaattctgtagaatttcaggaaggaggcttcacgcctgaggattgtagggaactttgtgtcgagctcgaaaagaaccgcatcgattttgttgagctatctggtggcaactatcaagagcgcgctttctcgcataggcgcgaatccactcgacagcgagagtcttattttctcgactttgcagaaatcatcgtaccacttctaaagaagacgaagatctatgtaacaggcggatttcggacaggatatgcaatggtaaaagcacttaaaacagtggatggagttgggctggcacgtccattggcacatgactttaatcttgccagaaacatactcgaagggaaagccaagagcgcagtgcatgacaatctggacgagcaagactttgcagttagcaatcatgctgccggtacccagattcgactggtaggcagcgatatggaaccgcttgttttaagcttgccagagcatatgaaggctttcaacgagacactggacaaacatttgaagagcatggcggacaacaaggatggctccaaatttggatacatggacgttgagagcgttcagcttcatccttacggggtaccgtatgagacgagatcatcgtcaccggacagtgatctatga

SEQ ID NO: 34805 - protein, 458 aa, Muscodor strobelii
  misc_feature: SGI Peptide ID NO. 572037
  misc_feature (15)..(367): Pfam Id: PF00724 Pfam Desc: NADH:flavin oxidoreductase / NADH oxidase family
  misc_feature (15)..(248): Pfam Id: PF00724 Pfam Desc: NADH:flavin oxidoreductase / NADH oxidase family
  misc_feature (1)..(447): NCBI GI: 46115736 Blast Desc: FG03710.1 [Gibberella zeae PH-1]
  misc_feature (1)..(444): NCBI GI: 169626359 Blast Desc: SNOG_16466 [Phaeosphaeria nodorum SN15] gi|111055044|gb|EAT76164.1| SNOG_16466 [Phaeosphaeria nodorum SN15]
  misc_feature (1)..(444): NCBI GI: 189195914 Blast Desc: NADH oxidase [Pyrenophora tritici-repentis Pt-1C-BFP] gi|187980174|gb|EDU46800.1| NADH oxidase [Pyrenophora tritici-repentis Pt-1C-BFP]
  misc_feature (1)..(449): NCBI GI: 256728260 Blast Desc: NECHADRAFT_87871 [Nectria haematococca mpVI 77-13-4]
  misc_feature (5)..(445): NCBI GI: 154294266 Blast Desc: BC1G_13819 [Botryotinia fuckeliana B05.10] gi|150844829|gb|EDN20022.1| BC1G_13819 [Botryotinia fuckeliana B05.10]
  misc_feature (1)..(435): NCBI GI: 119495510 Blast Desc: NADH oxidase [Neosartorya fischeri NRRL 181] gi|119412700|gb|EAW22641.1| NADH oxidase [Neosartorya fischeri NRRL 181]
  misc_feature (5)..(449): NCBI GI: 255939350 Blast Desc: Pc16g00190 [Penicillium chrysogenum Wisconsin 54-1255] gi|211585067|emb|CAP92689.1| Pc16g00190 [Penicillium chrysogenum Wisconsin 54-1255]
  misc_feature (1)..(435): NCBI GI: 70995668 Blast Desc: NADH oxidase [Aspergillus fumigatus Af293] gi|19309402|emb|CAD27301.1| NADH oxidase [Aspergillus fumigatus] gi|41581299|emb|CAE47948.1| NADH oxidase, [Aspergillus fumigatus]
  misc_feature (5)..(435): NCBI GI: 121701545 Blast Desc: NADH oxidase [Aspergillus clavatus NRRL 1] gi|119397180|gb|EAW07611.1| NADH oxidase [Aspergillus clavatus NRRL 1]
  misc_feature (5)..(435): NCBI GI: 169786431 Blast Desc: [Aspergillus oryzae RIB40] gi|83776424|dbj|BAE66543.1| protein product [Aspergillus oryzae]
MALKRFPAPDFDPSPLAQPLRFEFSKKTANNRFLKASMTEQLSSWDPKDLTERGIPSQELVNVYRRWGEGGLGLILTGNVMLYYDQLEASGNAIITKNSPFSDERFRRFQSLASQAKAHGSLVVAQLSHPGRQVTADIQPNPISASDVQLVTKYGTATFGKPRPMGRGDIKDVIESWAFAAEYLHKAGYDGIQIHGAHGYLLAQFLSQTTNKRTDEYGGSLLNRARIIFEIIDAIRHRVSDESFIIGVKLNSVEFQEGGFTPEDCRELCVELEKNRIDFVELSGGNYQERAFSHRRESTRQRESYFLDFAEIIVPLLKKTKIYVTGGFRTGYAMVKALKTVDGVGLARPLAHDFNLARNILEGKAKSAVHDNLDEQDFAVSNHAAGTQIRLVGSDMEPLVLSLPEHMKAFNETLDKHLKSMADNKDGSKFGYMDVESVQLHPYGVPYETRSSSPDSDL

SEQ ID NO: 34806 - DNA, 1900 bp, Muscodor strobelii
  misc_feature: SGI EST ID NO. CUFF.82797.1
  misc_feature: Variant of the nucleotide sequence at SEQ ID NO 34804
ggcgaaggaggtttgggtctaatcctgactggaaatgtcatgctttattatgaccagctcgaggcatccggaaatgctataatcaccaaaaattcaccgttttcggatgagaggttccggagattccaaagtctagcaagccaagctaaagctcatggaagcttagtagtggcccagctttctcatccaggccgacaggtcaccgcagatatccaacccaacccgatctccgcgagcgacgtccagctagtaactaaatatggtaccgctaccttcggcaagccgcgtccaatgggtaggggtgatattaaggatgtgatcgaaagttgggcatttgcagcggagtatttgcacaaggcaggctatgacggcatacaaatacatggggcccatggatatctgctcgcacagtttttatcgcaaacaacaaacaaaaggactgatgagtacgggggctcgctattgaatagagcgcggatcatttttgagataatagacgcaattcgccaccgtgtgtctgatgaatcctttatcatcggtgtaaagctcaattctgtagaatttcaggaaggaggcttcacgcctgaggattgtagggaactttgtgtcgagctcgaaaagaaccgcatcgattttgttgagctatctggtggcaactatcaagagcgcgctttctcgcataggcgcgaatccactcgacagcgagagtcttattttctcgactttgcagaaatcatcgtaccacttctaaagaagacgaagatctatgtaacaggcggatttcggacaggatatgcaatggtaaaagcacttaaaacagtggatggagttgggctggcacgtccattggcacatgactttaatcttgccagaaacatactcgaagggaaagccaagagcgcagtgcatgacaatctggacgagcaagactttgcagttagcaatcatgctgccggtacccagattcgactggtaggcagcgatatggaaccgcttgttttaagcttgccagagcatatgaaggctttcaacgagacactggacaaacatttgaagagcatggcggacaacaaggatggctccaaatttggatacatggacgttgagagcgttcagcttcatccttacggggtaccgtatgagacgagatcatcgtcaccggacagtgatctatgacagcatatacatcctactataattagcctttgatatcatcatcgctttatcgcatgatcgcgaaactatttgcacttgcgaagaatttttgcagcacttaggatcgttcatgggaatgaagaagaaagcaatagtgcacaagacatagcctagcataggatatttctatcaagaaagctgagcccacacgaagtcgtggaatgtgtgagaagccaaaaaacttaaacatgacgcgggcgcaaatataaccgctcatacagccgcatatcgtagaatggcttatgtcctgcagccacaactgagtgtgatgtacgtagacctcaaagaaaaaacaacataatctgagtgaaactctagtcagtgctagtagaaggggaaaaaagaacttatgacaagagtgggacttgaacccacgcggattgctccatgaggaaattatgctaaggtgaccttaacctcacgccataaccaactcggccatcttgccttatcgatggttgcgagacgagtcatcaaggactattatgtagtggacggcacctacatttgaataacacctatgacccgacagtttttgagacagcattgacagtctattattactagatactcgatcatgtaaaggcaaaactggtatatgcacgccgaaaataagagacgattgtgatccttgtttattgctacgtaccattagcaattgttgacgtgccaccgtaaagtttag

SEQ ID NO: 34807 - DNA, 1329 bp, Muscodor strobelii
  misc_feature: SGI cDNA ID NO. 572038
  misc_feature: Reduced expression when VOC is produced
  misc_feature: Encodes the peptide sequence at SEQ ID NO 34808
atgcttcaggtgcccgtccgcggggccaacggtgctgccaccaagaacacaaaggccgtcatcctggttggcggcccctcgcgcggcacccgtttccgacctctgtcgcttgatgtccccaagccactcttcgatgtcgctggccaccccatcatctggcactgcctcaccgccgtcgccaaggtgccctccatccaggaggttgtcatgatcggctactacgacgagtctgtcttcaaggacttcatcaaggaggctgccagcgagttttccaacctgcccatcaagtacctgcgcgagtatcaggctctgggcaccgccggcggtctgtaccacttccgcgatgccatcctcaagggccgccccgagcgcatcttcgtcctcaactcggatgtctgctgctcattccccctcaacgatatggccaagctgttcgacgacaaggacgccgaggccgtcattctcggcacccgcgtgagcgaggacgccgccaccaacttcggctgcatcgtctccgacacccactcgcgccgcgtcctccactacgtcgagaagcccgagagccacatctccaatctcatcaactgcggagtctacttgttcagcgtcgacgccatcttccccagcatccgctcggccatcaagcgtcgcaccgaccgtccccgtctcgtatcctacccctcgtccgacaacctcgaggcctctttcactgccgcccaggatgacgacgacgaggagcgccgcaacgaggtcattcgtctcgagcaagacatactcggtgacctcgccgacagcaagcagttctttgtccacgagaccaaggacttctggcgccagatcaagacagccggctctgctgtccctgccaacgccctctacctgaagcaggcccagcagactggctcccacgagctcgccactccctcgaccaatatcatcgctcccgtcttcatccacccttctgcccaggtcgatcccactgccaagctcggcccccacgtttctgtcggcccgcgtgcagtcatcggagccggtgcccgtatcaaggagtccatcgtactggaggatgccgagatcaagcacgatgcctgtgtcctgtactcgatcgtcggctggaacagccgtgtcggtgcctgggcccgtgtcgagggcagcccaactcccgtggccagtcacagcaccagcatcgtcaagaacggtgtcaaggtgcagagcatcaccatcttgggtaaggagtgtggtgtcggagacgaggtgcgcgtgcagaactgtgtctgcctgcctttcaaggagctaaagagggatgttgctaatgaggtcatcatgtga

SEQ ID NO: 34808 - protein, 442 aa, Muscodor strobelii
  misc_feature: SGI Peptide ID NO. 572038
  misc_feature (18)..(245): Pfam Id: PF00483 Pfam Desc: Nucleotidyl transferase
  misc_feature (18)..(201): Pfam Id: PF00483 Pfam Desc: Nucleotidyl transferase
  misc_feature (2)..(442): NCBI GI: 156034300 Blast Desc: GDP-mannose pyrophosphorylase [Sclerotinia sclerotiorum 1980] gi|154698856|gb|EDN98594.1| GDP-mannose pyrophosphorylase [Sclerotinia sclerotiorum 1980]
  misc_feature (2)..(442): NCBI GI: 154310901 Blast Desc: conserved [Botryotinia fuckeliana B05.10] gi|150851228|gb|EDN26421.1| conserved [Botryotinia fuckeliana B05.10]
  misc_feature (2)..(442): NCBI GI: 116203033 Blast Desc: conserved [Chaetomium globosum CBS 148.51] gi|88177919|gb|EAQ85387.1| conserved [Chaetomium globosum CBS 148.51]
  misc_feature (20)..(442): NCBI GI: 85091191 Blast Desc: NCU05937 [Neurospora crassa OR74A] gi|28920166|gb|EAA29545.1| NCU05937 [Neurospora crassa OR74A]
  misc_feature (1)..(442): NCBI GI: 119193859 Blast Desc: conserved [Coccidioides immitis RS] gi|240105543|gb|EER23736.1| mannose-1-phosphate guanyltransferase, [Coccidioides posadasii C735 delta SOWgp]
  misc_feature (1)..(442): NCBI GI: 67522909 Blast Desc: AN1911.2 [Aspergillus nidulans FGSC A4] gi|40745920|gb|EAA65076.1| AN1911.2 [Aspergillus nidulans FGSC A4]
  misc_feature (2)..(442): NCBI GI: 145603588 Blast Desc: conserved [Magnaporthe grisea 70-15] gi|145011798|gb|EDJ96454.1| conserved [Magnaporthe grisea 70-15]
  misc_feature (1)..(442): NCBI GI: 259487268 Blast Desc: TPA: GDP-mannose pyrophosphorylase A (AFU_orthologue; AFUA_6G07620) [Aspergillus nidulans FGSC A4]
  misc_feature (2)..(442): NCBI GI: 261361526 Blast Desc: mannose-1-phosphate guanyltransferase [Verticillium albo-atrum VaMs.102]
  misc_feature (1)..(442): NCBI GI: 240277932 Blast Desc: GDP-mannose pyrophosphorylase A [Ajellomyces capsulatus H143]
  misc_feature (17)..(442): SWISSPROT Homolog: EC 2.7.7.13 Mannose-1-phosphate guanylyltransferase
  misc_feature: Useful for introducing or modulating the production of volatile compounds
MLQVPVRGANGAATKNTKAVILVGGPSRGTRFRPLSLDVPKPLFDVAGHPIIWHCLTAVAKVPSIQEVVMIGYYDESVFKDFIKEAASEFSNLPIKYLREYQALGTAGGLYHFRDAILKGRPERIFVLNSDVCCSFPLNDMAKLFDDKDAEAVILGTRVSEDAATNFGCIVSDTHSRRVLHYVEKPESHISNLINCGVYLFSVDAIFPSIRSAIKRRTDRPRLVSYPSSDNLEASFTAAQDDDDEERRNEVIRLEQDILGDLADSKQFFVHETKDFWRQIKTAGSAVPANALYLKQAQQTGSHELATPSTNIIAPVFIHPSAQVDPTAKLGPHVSVGPRAVIGAGARIKESIVLEDAEIKHDACVLYSIVGWNSRVGAWARVEGSPTPVASHSTSIVKNGVKVQSITILGKECGVGDEVRVQNCVCLPFKELKRDVANEVIM

SEQ ID NO: 34809 - DNA, 2059 bp, Muscodor strobelii
  misc_feature: SGI EST ID NO. CUFF.83207.0
  misc_feature: Variant of the nucleotide sequence at SEQ ID NO 34807
attcaatggtcccctgcccgcctgcctctggcaaacaccacgtcgggactttgtggcttcgtgacttcgtgacttggtgcagctttccaccggcagccaatgaccacgtctgattggtagataatttgttgttgaggttcaccacattcacacatcttcaccgtctgttttccctctctcgttttctctgcagagcaatcaggccgtccttcgcagcttgccaccctcattccctttgccatcgagcagcagtacctccggtcgcccatcatgcttcaggtgcccgtccgcggggccaacggtgctgccaccaagaacacaaaggccgtcatcctggtgcgtgtctccgtccccgtctccgtctgcccctcgaatccactcgccgcctatgttgccatttcactagatccccatcttcaatgaccccactgcagcaatgcagcagtcaagatgtagctgtagtacttgttgttatggttgttgaattaagctggaattgcgagagagaactgacgtatccatcatgctatctaggttggcggcccctcgcgcggcacccgtttccgacctctgtcgcttgatgtccccaagccactcttcgatgtcgctggccaccccatcatctggcactgcctcaccgccgtcgccaaggtgccctccatccaggaggttgtcatgatcggctactacgacgagtctgtcttcaaggacttcatcaaggaggctgccagcgagttttccaacctgcccatcaagtacctgcgcgagtatcaggctctgggcaccgccggcggtctgtaccacttccgcgatgccatcctcaagggccgccccgagcgcatcttcgtcctcaactcggatgtctgctgctcattccccctcaacgatatggccaagctgttcgacgacaaggacgccgaggccgtcattctcggcacccgcgtgagcgaggacgccgccaccaacttcggctgcatcgtctccgacacccactcgcgccgcgtcctccactacgtcgagaagcccgagagccacatctccaatctcatcaactgcggagtctacttgttcagcgtcgacgccatcttccccagcatccgctcggccatcaagcgtcgcaccgaccgtccccgtctcgtatcctacccctcgtccgacaacctcgaggcctctttcactgccgcccaggatgacgacgacgaggagcgccgcaacgaggtcattcgtctcgagcaagacatactcggtgacctcgccgacagcaagcagttctttgtccacgagaccaaggacttctggcgccagatcaagacagccggctctgctgtccctgccaacgccctctacctgaagcaggcccagcagactggctcccacgagctcgccactccctcgaccaatatcatcgctcccgtcttcatccacccttctgcccaggtcgatcccactgccaagctcggcccccacgtttctgtcggcccgcgtgcagtcatcggagccggtgcccgtatcaaggagtccatcgtactggaggatgccgagatcaagcacgatgcctgtgtcctgtactcgatcgtcggctggaacagccgtgtcggtgcctgggcccgtgtcgagggcagcccaactcccgtggccagtcacagcaccagcatcgtcaagaacggtgtcaaggtgcagagcatcaccatcttgggtaaggagtgtggtgtcggagacgaggtgcgcgtgcagaactgtgtctgcctgcctttcaaggagctaaagagggatgttgctaatgaggtcatcatgtgagggacattcacggtttactctatgaaatctgtgggcttcgcgatagatttttttcgcttgatttttttgtcaggaaaatagattcggcggtgcattcatgcagtaggggctatggcatcatcggcttcgtgaaaagacataaacaccatcgtccagggcacggtttcgcaatttaatgcagtagaaatgctatcactacggtcaaaatatcgaatgacaaaccgaaagattttcaaatgatacaccgaataatcattcgaat

SEQ ID NO: 34810 - DNA, 756 bp, Muscodor strobelii
  misc_feature: SGI cDNA ID NO. 572039
  misc_feature: Encodes the peptide sequence at SEQ ID NO 34811
atgtctcgccgttacgactccagaacgaccatcttctcgcccgaaggccgcctataccaggtcgaatatgcccttgaggccatatcccacgccggcaccgccatcggcatcctcgccaatgacggtatcgttctcgctgccgagcgcaaggtcacttccaagctgctcgagcaggacacctccgccgagaagctgtacatcctcaacgacaacatgatctgcgccgtcgccggcatgacctcagacgccaacatcctcatcaactacgcccgccaggccgcccagcgctacctgctgacctacaacgaggacatcccctgcgagcagctcgtccgccgcttgtgcgatctcaagcagggctacactcaacacggtggtcttcgacccttcggtgtctccttcatctacgccggctgggaccctcagcgccagttccagctctacctcagcaacccctcgggcaactacggaggctggaaggctacgtcggccggcgccaacaaggccagtgccgactctctgctgaagcaggattacaaggaggactgcaccctgaaggaggcatgtggcatggcggtcaaagttctaagcaagacgatggactcgaccaagttgagcagcgagaagattgagtttgcgacggtgggacagaccaaagatggcaagatctaccaccggctgtggagtgcggatgagatcacggcgctgttgaaggagcatgacctggccaaggacgagagcgcagaagataagtga

SEQ ID NO: 34811 - protein, 251 aa, Muscodor strobelii
  misc_feature: SGI Peptide ID NO. 572039
  misc_feature (28)..(215): Pfam Id: PF00227 Pfam Desc: Proteasome A-type and B-type
  misc_feature (1)..(251): NCBI GI: 116203057 Blast Desc: conserved [Chaetomium globosum CBS 148.51] gi|88177931|gb|EAQ85399.1| conserved [Chaetomium globosum CBS 148.51]
  misc_feature (1)..(251): NCBI GI: 85091201 Blast Desc: proteasome component Y13 [Neurospora crassa OR74A] gi|28920171|gb|EAA29550.1| proteasome component Y13 [Neurospora crassa OR74A]
  misc_feature (1)..(251): NCBI GI: 46121975 Blast Desc: FG05365.1 [Gibberella zeae PH-1]
  misc_feature (1)..(251): NCBI GI: 256724835 Blast Desc: [Nectria haematococca mpVI 77-13-4]
  misc_feature (1)..(251): NCBI GI: 39946336 Blast Desc: conserved [Magnaporthe grisea 70-15] gi|59802961|gb|AAX07682.1| proteasome subunit alpha type 4-like protein [Magnaporthe grisea] gi|145020008|gb|EDK04236.1| grisea
  misc_feature (1)..(250): NCBI GI: 171682782 Blast Desc: protein product [Podospora anserina] gi|170941350|emb|CAP67000.1| protein product [Podospora anserina]
  misc_feature (1)..(251): NCBI GI: 261361469 Blast Desc: proteasome subunit alpha type-4 [Verticillium albo-atrum VaMs.102]
  misc_feature (1)..(250): NCBI GI: 156042279 Blast Desc: conserved [Sclerotinia sclerotiorum 1980] gi|154696073|gb|EDN95811.1| conserved [Sclerotinia sclerotiorum 1980]
  misc_feature (1)..(249): NCBI GI: 189201059 Blast Desc: proteasome subunit alpha type-4 [Pyrenophora tritici-repentis Pt-1C-BFP] gi|187983965|gb|EDU49453.1| proteasome subunit alpha type-4 [Pyrenophora tritici-repentis
  misc_feature (1)..(249): NCBI GI: 238842539 Blast Desc: proteasome subunit alpha type-4 [Microsporum canis CBS 113480]
  misc_feature (1)..(247): SWISSPROT Homolog: EC 3.4.25.1 Proteasome endopeptidase complex
MSRRYDSRTTIFSPEGRLYQVEYALEAISHAGTAIGILANDGIVLAAERKVTSKLLEQDTSAEKLYILNDNMICAVAGMTSDANILINYARQAAQRYLLTYNEDIPCEQLVRRLCDLKQGYTQHGGLRPFGVSFIYAGWDPQRQFQLYLSNPSGNYGGWKATSAGANKASADSLLKQDYKEDCTLKEACGMAVKVLSKTMDSTKLSSEKIEFATVGQTKDGKIYHRLWSADEITALLKEHDLAKDESAEDK

SEQ ID NO: 34812 - DNA, 1678 bp, Muscodor strobelii
  misc_feature: SGI EST ID NO. CUFF.83454.0
  misc_feature: Variant of the nucleotide sequence at SEQ ID NO 34810
tggtgctaggctgagctgtatgtacgcgtttgaagctcttgcctagcagccgcccgagctggaacttgtacccactggacctcattattgggtggtgcacccgacatcatcatcaactggaataccacaacaacaccagcaccaccaacctcacacatccgcaattcacgcaccaatcccgagaaacccaccgccatattgcatattggctcttcacccaccattgcagaatcagtgcgtcgtgtcgagcggtagagttgcagcggtatagcgggattcaacggtcgattcgcccaccatgtctcgccgttacgactccagagttagtctggccacgctcctgtctcctttgtgactgccatcgcagagatctaacatgtcttgcgccaaaacagacgaccatcttctcgcccgaaggccgcctataccaggtcgaatatgcccttgaggccatatcccacgccggcaccgccatcggcatcctcgccaatgacggtatcgttctcgctgccgagcgcaaggtcacttccaagctgctcgagcaggacacctccgccgagaagctgtacatcctcaacgacaacatgatctgcgccgtcgccggcatgacctcagacgccaacatcctcatcaactacgcccgccaggccgcccagcgctacctgctgacctacaacgaggacatcccctgcgagcagctcgtccgccgcttgtgcgatctcaagcagggctacactcaacacggtggtcttcgacccttcggtgtctccttcatctacgccggctgggaccctcagcgccagttccagctctacctcagcaacccctcgggcaactacggaggctggaaggctacgtcggccggcgccaacaaggccagtgccgactctctgctgaagcaggattacaaggaggactgcaccctgaaggaggcatgtggcatggcggtcaaagttctaagcaagacgatggactcgaccaagttgagcagcgagaagattgagtttgcgacggtgggacagaccaaagatggcaagatctaccaccggctgtggagtgcggatgagatcacggcgctgttgaaggagcatgacctggccaaggacgagagcgcagaagataagtgaagatagacaggggaggaggtccatacgcaaaaaggaacgatgatgtcgcggtggtgctgccactcgcaaggtgtacaattactacggcaagctccttagtcctccgatagatctgccacttctgatgagagagacacgaagtcacgagcatgagcatagagtagcattgcgtcagatggcctgatgtcgtgttgttgtcgggtaccagaatggttaagataccgaataacacaacggaagagtctctgagagcaatccgcatcatcaactgaattgggctttaaataattcatatctttatatataagtctaacttcggatagaatagatatctggcacctgaatgtccattcgaagggatatagacgctggtgccgttagacttaggtgggtgtgtcatttgatctattgatgggtttcgacacccctctcgactttacccttggcaatcaacgaaccttattgtatgtaccttaggtgttcattcaaggtaatgagctgtcatacaactcgatacctgatatttgacgcatgcgtggcaagttgataag

SEQ ID NO: 34813 - DNA, 2904 bp, Muscodor strobelii
  misc_feature: SGI cDNA ID NO. 572040
  misc_feature: Reduced expression when VOC is produced
  misc_feature: Encodes the peptide sequence at SEQ ID NO 34814
atgtccgagacagagcctcgccgctcggtgcgcgcgaccaagggccagcacaccaaggccttcgaccagctcgacaacggacccgagcccaagcgccgccagaccgcgaccaagaagaacaccaagaagcctgccgagaaggaggacaaggaggaggaagacgatgaggtcatccgctgcatctgcggcgcgacctcgcagaatgacgacgacgccaacgagccgtggatcgcgtgcgacaagtgcggtgcgtggcagcacaacgtctgcgtcggcatgagcgtgttccaagaggatttaactaaggattacttctgcgagcaatgcgcgccacaggaccacaaggaaacgctcgaggccatcaagcgcggcgagcggccgtgggaggcccgccgccagaagtacgaggacgagaagaagcgcaagaagggcggcaagaaggccaaggccaaacgagtcagcgacaccaaagaccgcgcatcccccagcgccgccactgctgctgctgctactgctactgccactacctcgaccaccactgctactactgctaccggtactactgacactcgtggagcccgaggagcgtctgcttctcgttcttctcatccaccaccaccaccaccacctcctcctgcaactgctagcaagacacagccctcgcccagcgccgaagtcaacaaggaagagcccacacccgctcccgctcccgctccgcaagagtcgctgcccaaggggaaacgcaagtcgcgcgaccactcccaaggccctgctagcaaacaacgcaagatcgttcccgagccaccctcctccgccactgccactgccagcaaagcatctgcggccaccgctgctgttgctactcctgctgcccccgagcttccgcagacgacagagcagccgcagccgcagtcagagacagacacggctcccgacaagctcaagtatgcaccgcccagcgacctgcccgagactatccagaagctcgaaggccccaggcgacaggctgcgctagctatccaaaagtcactcgaccatgcaattgatcagagcgagaagaagagtctcttcagcttgccgcagggcacacccaagaacaagttctcggaacgactggccatcgaaatcgaacgcgcctaccaggatacccaccccaacacctcccacaatgcttcgcagcttcgaaccttgtccttcagcctcaagaacaatgtcgagctggctgcccaagttctcagccgcacgttaccgcctaccaagttcgtcgtcatgagtggcgatgagcttgccaccaaggagctgcaacgcgagaacgctgagatgaaggccagggctgacaagcaatccattctcgtcaccgacgatggtcctcgtgtgcggcgaacgcacaagggtgaagagatcattgagtcagacaacgtgcacttgggcgcggatgaagctccagcccagctgcataagccaggcatccgcgacacaagccaggccagctctggcggagctgctggagcatccgctggcgagccgtccaccagccgacgcacctcgtctactcctctgcgagtggacacgcaggctcagcagcctgccagaccttccaatttcgacattggcaaggtcttttccagcgtgaagtcaccctcggcttcccaccagcgtcgcgcttccactcaagtgcgctctgctggccccgtcgacgatccagacgtcgatagactcctcgaggacgaggacgacggcaatgactctccgccatattctccttccgaagacattgatcctgacgtggtctggcgtggtccgctcaccatgaccaatatcgctgacatttccactgttgccaagtttgtaggcggggcagacttgagcaaagtgcgtggcatcgcatggaaggatctcatccctcctcttgtcagtgtcgccggccgcattcccgaagagaaagcagtgccctatctgtgcgggctcaggtacaacaaccaaatcgacttggtcatcaccagtctctccccagctcaccccgccgacgcaaagtctcgcaaacagttcctcgatgtcatcgactacttcaggcttaagaagcgatacggtgtcgtgggcgagaggaaactcggcaatgtccgcgacacctatctggtccccgtctccgagggagatgggccaattcctgaacccatgcagaacatcggcgaacacaacattcccgctgtacgcagcgaacccatgctcctcatggtcttcgttgtccgagacgaaaaacagaccccgatcccgctcgatcagcaacgagctgaagtacgacaaagccaatcagcaacaccaacccaagctactcctgtgccaccaccaaggcatccctccatcccagcgcccacgtggtcgcctgccacgcctcaaggtcctttcagcacttccaccttcatcccgccgacgtacagccagactccgatccctccacccaagattcccggccagccaacgccaatcgcggcaccgaggccacctccccctgctgctgctgctgcggcttcaccgactccccaggcaccgagccaagatccaaatctgctagcagtacgcgctgcccaagccgagggcgagatgaaagctcgacaagtgcttgggccactgtttggcagctcgacagtgacctttttactcccacacgctgcccgtatgaaggagggcgaatggaatgccgttcgtagatgcctagagaaggacccgcgtgctcgtgacgatctccaactgcttagtaagctcttgacggaagaaggtaacaacgcccgcaagaccagtggtccatcgccacctgcgccgcagaacccgtcgcctggtgttgtgcagacgacgcttgccgcggccacggcgggtgctcctgacggtgctcccgcaccaaagtga

SEQ ID NO: 34814 - protein, 967 aa, Muscodor strobelii
  misc_feature: SGI Peptide ID NO. 572040
  misc_feature (59)..(112): Pfam Id: PF00628 Pfam Desc: PHD-finger
  misc_feature (598)..(714): Pfam Id: PF07744 Pfam Desc: SPOC domain
  misc_feature (2)..(934): NCBI GI: 261361468 Blast Desc: conserved [Verticillium albo-atrum VaMs.102]
  misc_feature (245)..(928): NCBI GI: 85091203 Blast Desc: NCU05943 [Neurospora crassa OR74A] gi|28920172|gb|EAA29551.1| [Neurospora crassa OR74A]
  misc_feature (316)..(926): NCBI GI: 116203055 Blast Desc: CHGG_09412 [Chaetomium globosum CBS 148.51] gi|88177930|gb|EAQ85398.1| CHGG_09412 [Chaetomium globosum CBS 148.51]
  misc_feature (314)..(928): NCBI GI: 256724939 Blast Desc: NECHADRAFT_34591 [Nectria haematococca mpVI 77-13-4]
  misc_feature (305)..(925): NCBI GI: 46121973 Blast Desc: FG05364.1 [Gibberella zeae PH-1]
  misc_feature (316)..(925): NCBI GI: 171682784 Blast Desc: protein product [Podospora anserina] gi|170941351|emb|CAP67001.1| protein product [Podospora anserina]
  misc_feature (317)..(926): NCBI GI: 156060013 Blast Desc: SS1G_02143 [Sclerotinia sclerotiorum 1980] gi|154699553|gb|EDN99291.1| SS1G_02143 [Sclerotinia sclerotiorum 1980]
  misc_feature (5)..(930): NCBI GI: 115400495 Blast Desc: conserved [Aspergillus terreus NIH2624] gi|114191502|gb|EAU33202.1| conserved [Aspergillus terreus NIH2624]
  misc_feature (5)..(929): NCBI GI: 240105513 Blast Desc: Transcription factor S-II , central domain containing protein [Coccidioides posadasii C735 delta SOWgp]
  misc_feature (5)..(929): NCBI GI: 119193931 Blast Desc: CIMG_01340 [Coccidioides immitis RS]
  misc_feature: Useful for introducing or modulating the production of volatile compounds
MSETEPRRSVRATKGQHTKAFDQLDNGPEPKRRQTATKKNTKKPAEKEDKEEEDDEVIRCICGATSQNDDDANEPWIACDKCGAWQHNVCVGMSVFQEDLTKDYFCEQCAPQDHKETLEAIKRGERPWEARRQKYEDEKKRKKGGKKAKAKRVSDTKDRASPSAATAAAATATATTSTTTATTATGTTDTRGARGASASRSSHPPPPPPPPPATASKTQPSPSAEVNKEEPTPAPAPAPQESLPKGKRKSRDHSQGPASKQRKIVPEPPSSATATASKASAATAAVATPAAPELPQTTEQPQPQSETDTAPDKLKYAPPSDLPETIQKLEGPRRQAALAIQKSLDHAIDQSEKKSLFSLPQGTPKNKFSERLAIEIERAYQDTHPNTSHNASQLRTLSFSLKNNVELAAQVLSRTLPPTKFVVMSGDELATKELQRENAEMKARADKQSILVTDDGPRVRRTHKGEEIIESDNVHLGADEAPAQLHKPGIRDTSQASSGGAAGASAGEPSTSRRTSSTPLRVDTQAQQPARPSNFDIGKVFSSVKSPSASHQRRASTQVRSAGPVDDPDVDRLLEDEDDGNDSPPYSPSEDIDPDVVWRGPLTMTNIADISTVAKFVGGADLSKVRGIAWKDLIPPLVSVAGRIPEEKAVPYLCGLRYNNQIDLVITSLSPAHPADAKSRKQFLDVIDYFRLKKRYGVVGERKLGNVRDTYLVPVSEGDGPIPEPMQNIGEHNIPAVRSEPMLLMVFVVRDEKQTPIPLDQQRAEVRQSQSATPTQATPVPPPRHPSIPAPTWSPATPQGPFSTSTFIPPTYSQTPIPPPKIPGQPTPIAAPRPPPPAAAAAASPTPQAPSQDPNLLAVRAAQAEGEMKARQVLGPLFGSSTVTFLLPHAARMKEGEWNAVRRCLEKDPRARDDLQLLSKLLTEEGNNARKTSGPSPPAPQNPSPGVVQTTLAAATAGAPDGAPAPK

SEQ ID NO: 34815 - DNA, 4071 bp, Muscodor strobelii
  misc_feature: SGI EST ID NO. CUFF.82934.1
  misc_feature: Variant of the nucleotide sequence at SEQ ID NO 34813
atggcacttgatttggtcttgccctctggccgccgccgttgagaggtcttcgcctcccccaacctgcgcctcctctttttgcagcaatgagaatctcacacttccacctgccgcccaagtaacattccaaacctcccaacttccaccaccccgccgactacctactagtagtatcttcatcttgtgtccgctgtttcgcatttgttgacatgcggtcgggttgacatctcttctcactaactcactcagttgaccgtcggaactggccacatactgatccgcccctcactgagccacctttcaatctacctacgtacctaagccaggtagctgcgctgtcgaggcccgtcgacgtttccaagttctatcacgcgacacatcctgcaacgctgtaacgtctcgagaaattctagcctggaagtcagtcggctcacccggttctcacctcaacaaagctctcttggtctggcaactggaactgcccacttctcgttttcctctggatctcttggtgactgactgactgagtgcgcgacctgccaagccgggagttgggtggcaaagactgggttctctcgagtgaagtgaggtgggaaggcacacacccattgaatctccattgcatcgttccatagttgacgacgggcgctgctttcgtcgcgtcgcgtcgcttcaccttcttcttcctgcgtgattgtcggcgcctggcatcgtaaaacgttatgactgtctgatttccttccgtccttccgcctgccatcccatcgtagaccacacgcgcgcgcgtctcgccgtcttgcgcgcacaagctgtcaattaaacacgctgcatcgccgacttcgcacttactgctgcacacttattgagcagtgtctgccactccaaacatgtccgagacagagcctcgccgctcggtgcgcgcgaccaagggccagcacaccaaggccttcgaccagctcgacaacggacccgagcccaagcgccgccagaccgcgaccaagaagaacaccaagaagcctgccgagaaggaggacaaggaggaggaagacgatgaggtcatccgctgcatctgcggcgcgacctcgcagaatgacgacgacgccaacgagccgtggatcgcgtgcgacaagtgcggtgcgtggcagcacaacgtctgcgtcggcatgagcgtgttccaagaggatttaactaaggattacttctgcgagcaatgcgcgccacaggaccacaaggaaacgctcgaggccatcaagcgcggcgagcggccgtgggaggcccgccgccagaagtacgaggacgagaagaagcgcaagaagggcggcaagaaggccaaggccaaacgagtcagcgacaccaaagaccgcgcatcccccagcgccgccactgctgctgctgctactgctactgccactacctcgaccaccactgctactactgctaccggtactactgacactcgtggagcccgaggagcgtctgcttctcgttcttctcatccaccaccaccaccaccacctcctcctgcaactgctagcaagacacagccctcgcccagcgccgaagtcaacaaggaagagcccacacccgctcccgctcccgctccgcaagagtcgctgcccaaggggaaacgcaagtcgcgcgaccactcccaaggccctgctagcaaacaacgcaagatcgttcccgagccaccctcctccgccactgccactgccagcaaagcatctgcggccaccgctgctgttgctactcctgctgcccccgagcttccgcagacgacagagcagccgcagccgcagtcagagacagacacggctcccgacaagctcaagtatgcaccgcccagcgacctgcccgagactatccagaagctcgaaggccccaggcgacaggctgcgctagctatccaaaagtcactcgaccatgcaattgatcagagcgagaagaagagtctcttcagcttgccgcagggcacacccaagaacaagttctcggaacgactggccatcgaaatcgaacgcgcctaccaggatacccaccccaacacctcccacaatgcttcgcagcttcgaaccttgtccttcagcctcaagaacaatgtcgagctggctgcccaagttctcagccgcacgttaccgcctaccaagttcgtcgtcatgagtggcgatgagcttgccaccaaggagctgcaacgcgagaacgctgagatgaaggccagggctgacaagcaatccattctcgtcaccgacgatggtcctcgtgtgcggcgaacgcacaagggtgaagagatcattgagtcagacaacgtgcacttgggcgcggatgaagctccagcccagctgcataagccaggcatccgcgacacaagccaggccagctctggcggagctgctggagcatccgctggcgagccgtccaccagccgacgcacctcgtctactcctctgcgagtggacacgcaggctcagcagcctgccagaccttccaatttcgacattggcaaggtcttttccagcgtgaagtcaccctcggcttcccaccagcgtcgcgcttccactcaagtgcgctctgctggccccgtcgacgatccagacgtcgatagactcctcgaggacgaggacgacggcaatgactctccgccatattctccttccgaagacattgatcctgacgtggtctggcgtggtccgctcaccatgaccaatatcgctgacatttccactgttgccaagtttgtaggcggggcagacttgagcaaagtgcgtggcatcgcatggaaggatctcatccctcctcttgtcagtgtcgccggccgcattcccgaagagaaagcagtgccctatctgtgcgggctcaggtacaacaaccaaatcgacttggtcatcaccagtctctccccagctcaccccgccgacgcaaagtctcgcaaacagttcctcgatgtcatcgactacttcaggcttaagaagcgatacggtgtcgtgggcgagaggaaactcggcaatgtccgcgacacctatctggtccccgtctccgagggagatgggccaattcctgaacccatgcagaacatcggcgaacacaacattcccgctgtacgcagcgaacccatgctcctcatggtcttcgttgtccgagacgaaaaacagaccccgatcccgctcgatcagcaacgagctgaagtacgacaaagccaatcagcaacaccaacccaagctactcctgtgccaccaccaaggcatccctccatcccagcgcccacgtggtcgcctgccacgcctcaaggtcctttcagcacttccaccttcatcccgccgacgtacagccagactccgatccctccacccaagattcccggccagccaacgccaatcgcggcaccgaggccacctccccctgctgctgctgctgcggcttcaccgactccccaggcaccgagccaagatccaaatctgctagcagtacgcgctgcccaagccgagggcgagatgaaagctcgacaagtgcttgggccactgtttggcagctcgacagtgacctttttactcccacacgctgcccgtatgaaggagggcgaatggaatgccgttcgtagatgcctagagaaggacccgcgtgctcgtgacgatctccaactgcttagtaagctcttgacggaagaaggtaacaacgcccgcaagaccagtggtccatcgccacctgcgccgcagaacccgtcgcctggtgttgtgcagacgacgcttgccgcggccacggcgggtgctcctgacggtgctcccgcaccaaagtgagagagaaggcattgggtgacggtgggtacgggagtgggtgaatatggatactgagtactgccacactcactgggctactactgttacctggctacgcatgtatgataacgctgtgagctctgttggttcaggaagacgcttggcaactacaatattgacctttcaatgaattataatttgctaaaccatgtcgtttcccatacgacattgacttgcctgtgtagaggcagtactaataggattgcttcttactaatattgaactaccgaataaatcggcg

SEQ ID NO: 34816 - DNA, 921 bp, Muscodor strobelii
  misc_feature: SGI cDNA ID NO. 572041
  misc_feature: Encodes the peptide sequence at SEQ ID NO 34817
atggcgactgtatcgggtgtcgagagtgatctaatgatggttgatgcggagccacctcctaaacttgatgcagagcccgcaccagaacgaacacttgagacaggacagacagacggagatgatgacctagtcaaggtttgcgtggtcttctgggcgtcactttggctacttgagcgtgtcgcaatcgtagagatgggctgcgatgatcttgttgttccaggcgatccaattactattcctgagcttgccttcgtatttggagagcttttgctgcctccagatgcattggatgatgaggttgacgttgttattttggtactatctgagggcagcgaccgagtgcgactgatgctgatagttgagaaacctgcaacgccagaaactcgagacatcgatgtacgcattgtggtcgacttcggtggcagactctgggaggtcactgttccgccagcccgcgtggatgacaaagatcgtgaagtcctgagcgtcaccaaagaacttctggaagagatggtagattggcgatccgccgatgttgctatgacgctggaagtagaagaagtctgcgttgccgaggtcttaatcttgtttgtatctgtccgagttttggcgcccgcagatacacttcctccaggatcgcctgatgttgacgcgactgttatggtattcgtactctttgatgtcgcaccagccatttgcgaagctgctacaccactttgccgtgacctcaacgatgttgcagaagaggagaatgtattgactgttgaagaatgtgctatttcgccataccagaagaccgtccacaacatccagactagaagtaatggacccggaagtgattttggtgatatcgacatgcttgactccctgatctacggacaaggtcataccgaagctttgaagtcgaccgttgccctgtaa

SEQ ID NO: 34817 - protein, 306 aa, Muscodor strobelii
  misc_feature: SGI Peptide ID NO. 572041
MATVSGVESDLMMVDAEPPPKLDAEPAPERTLETGQTDGDDDLVKVCVVFWASLWLLERVAIVEMGCDDLVVPGDPITIPELAFVFGELLLPPDALDDEVDVVILVLSEGSDRVRLMLIVEKPATPETRDIDVRIVVDFGGRLWEVTVPPARVDDKDREVLSVTKELLEEMVDWRSADVAMTLEVEEVCVAEVLILFVSVRVLAPADTLPPGSPDVDATVMVFVLFDVAPAICEAATPLCRDLNDVAEEENVLTVEECAISPYQKTVHNIQTRSNGPGSDFGDIDMLDSLIYGQGHTEALKSTVAL

SEQ ID NO: 34818 - DNA, 1101 bp, Muscodor strobelii
  misc_feature: SGI cDNA ID NO. 572042
  misc_feature: Encodes the peptide sequence at SEQ ID NO 34819
atgcttgcagactttgctggcttggcttcggctgccgctgctactgcccttaatgcggggaatgatgtttatgatgctttgcgatttttggagcttggccgcggcattattgagaatttgctgatcgaaactcgcggcgacatttccgatcttgcgcacaagcaccctagtctagcagagaaattcatctctcttcgggacgagctagactcgccagagaagggccctactgttctgagctctgctgatcagccgtcttcttgggaatcactctcgagacgacgtcgcgaagcggtgcaggaactggacgagcttcgatcgcggatccgtgctcagcccggattcgagagctttcatctcccgcccactgccgacgatctgaaagctgcagcagatccaggccctatcatcgtcgtcaacctaagcccctaccgttgtgacacgttcttaatcgagcgcaatcagatcagggtattaggactacctgatctaacggtagaacaaatagccggtcgaactaaagagttgcaaacatcccgtcaactggccacttcccctacatcgctgcttgagtggctctggaacgaggtcgctcgtccggtcttggacgcactcgggtttcaaaagcctatctccgacaccagttggcctcgtgtatggtggattcccactggactccttagccagctaccgctccatgctgcgggatactacgcagagggcagcgtggacactgtactcgacagggtcatgtcgtcgtacgcctccacggtaaaatcattgatacatgggcgccaactccatcttcgcgagcctgccggaccagtctctgaccatgctctcttagttgcgatgcacaaaacaccgaaccttttcgcgaatggtagtctcccgtttactatacctgaagtaaagatagtaaaagatctttgtccgtcgcttcgtctgcgaccaatcacaccatccctgtgcaaggacgatgtacttcgggaactgcaggcctgcaagatattccactttgccggccatggatattcggatccaatagagccttcgcagagttgtctgctcttagaggattggaagaccgacccgctgacg

SEQ ID NO: 34819 - protein, 367 aa, Muscodor strobelii
  misc_feature: SGI Peptide ID NO. 572042
  misc_feature (1)..(367): NCBI GI: 46120502 Blast Desc: FG04898.1 [Gibberella zeae PH-1]
  misc_feature (2)..(367): NCBI GI: 119474523 Blast Desc: NFIA_006040 [Neosartorya fischeri NRRL 181] gi|119407290|gb|EAW17240.1| conserved [Neosartorya fischeri NRRL 181]
  misc_feature (1)..(366): NCBI GI: 240106932 Blast Desc: CPC735_017210 [Coccidioides posadasii C735 delta SOWgp]
  misc_feature (1)..(367): NCBI GI: 67516515 Blast Desc: AN0539.2 [Aspergillus nidulans FGSC A4] gi|40747482|gb|EAA66638.1| AN0539.2 [Aspergillus nidulans FGSC A4] gi|259489203|tpe|CBF89281.1| TPA: conserved [Aspergillus FGSC
  misc_feature (1)..(367): NCBI GI: 67541931 Blast Desc: AN7129.2 [Aspergillus nidulans FGSC A4] gi|40741941|gb|EAA61131.1| AN7129.2 [Aspergillus nidulans FGSC A4] gi|259483542|tpe|CBF79016.1| TPA: conserved [Aspergillus FGSC
  misc_feature (1)..(360): NCBI GI: 67516399 Blast Desc: AN0481.2 [Aspergillus nidulans FGSC A4] gi|40747424|gb|EAA66580.1| AN0481.2 [Aspergillus nidulans FGSC A4] gi|259489269|tpe|CBF89401.1| TPA: conserved [Aspergillus FGSC
  misc_feature (26)..(366): NCBI GI: 256728430 Blast Desc: NECHADRAFT_87858 [Nectria haematococca mpVI 77-13-4]
  misc_feature (6)..(364): NCBI GI: 46138267 Blast Desc: FG10648.1 [Gibberella zeae PH-1]
  misc_feature (1)..(367): NCBI GI: 256721670 Blast Desc: NECHADRAFT_44795 [Nectria haematococca mpVI 77-13-4]
  misc_feature (28)..(367): NCBI GI: 145611408 Blast Desc: MGG_11584 [Magnaporthe grisea 70-15] gi|145018703|gb|EDK02982.1| MGG_11584 [Magnaporthe grisea 70-15]
MLADFAGLASAAAATALNAGNDVYDALRFLELGRGIIENLLIETRGDISDLAHKHPSLAEKFISLRDELDSPEKGPTVLSSADQPSSWESLSRRRREAVQELDELRSRIRAQPGFESFHLPPTADDLKAAADPGPIIVVNLSPYRCDTFLIERNQIRVLGLPDLTVEQIAGRTKELQTSRQLATSPTSLLEWLWNEVARPVLDALGFQKPISDTSWPRVWWIPTGLLSQLPLHAAGYYAEGSVDTVLDRVMSSYASTVKSLIHGRQLHLREPAGPVSDHALLVAMHKTPNLFANGSLPFTIPEVKIVKDLCPSLRLRPITPSLCKDDVLRELQACKIFHFAGHGYSDPIEPSQSCLLLEDWKTDPLT

SEQ ID NO: 34820 - DNA, 1262 bp, Muscodor strobelii
  misc_feature: SGI EST ID NO. CUFF.82828.0
  misc_feature: Variant of the nucleotide sequence at SEQ ID NO 34818
ccccatcccttcgtattcgtctggctcggcaggccgctcagattcgagcctcgcagctcgactgggaaggttcaagccatctgctgcagcaggccgtcgaaacccttccggacataagtccacggtggttgaggcacaccgacaagcaacacatgcttgcagactttgctggcttggcttcggctgccgctgctactgcccttaatgcggggaatgatgtttatgatgctttgcgatttttggagcttggccgcggcattattgagaatttgctgatcgaaactcgcggcgacatttccgatcttgcgcacaagcaccctagtctagcagagaaattcatctctcttcgggacgagctagactcgccagagaagggccctactgttctgagctctgctgatcagccgtcttcttgggaatcactctcgagacgacgtcgcgaagcggtgcaggaactggacgagcttcgatcgcggatccgtgctcagcccggattcgagagctttcatctcccgcccactgccgacgatctgaaagctgcagcagatccaggccctatcatcgtcgtcaacctaagcccctaccgttgtgacacgttcttaatcgagcgcaatcagatcagggtattaggactacctgatctaacggtagaacaaatagccggtcgaactaaagagttgcaaacatcccgtcaactggccacttcccctacatcgctgcttgagtggctctggaacgaggtcgctcgtccggtcttggacgcactcgggtttcaaaagcctatctccgacaccagttggcctcgtgtatggtggattcccactggactccttagccagctaccgctccatgctgcgggatactacgcagagggcagcgtggacactgtactcgacagggtcatgtcgtcgtacgcctccacggtaaaatcattgatacatgggcgccaactccatcttcgcgagcctgccggaccagtctctgaccatgctctcttagttgcgatgcacaaaacaccgaaccttttcgcgaatggtagtctcccgtttactatacctgaagtaaagatagtaaaagatctttgtccgtcgcttcgtctgcgaccaatcacaccatccctgtgcaaggacgatgtacttcgggaactgcaggcctgcaagatattccactttgccggccatggatattcggatccaatagagccttcgcagagttgtctgctcttagaggattggaagaccgacccgctgacggtaggagac

SEQ ID NO: 34821 - DNA, 288 bp, Muscodor strobelii
  misc_feature: SGI cDNA ID NO. 572043
  misc_feature: Elevated expression when VOC is produced
  misc_feature: Encodes the peptide sequence at SEQ ID NO 34822
atgttggtcgaacggcgctttgccggcagtattctcacgcatcaggctagcaatcaagttcaccgtatccttaatgtcggcttcgctataatggaaagtttcatgcaatggagcatggggctttacctcgacgaagcggagaaggaccaaacacgcagtttgtacctctcggccggtcgtgtgatgggattgaccaacgacctctgttcatggaatgtcgagaaggcagagtcggccaagtcggtcaatcgatgttggaatgccgtgcctatcatcatgaaacagtat

SEQ ID NO: 34822 - protein, 96 aa, Muscodor strobelii
  misc_feature: SGI Peptide ID NO. 572043
  misc_feature (22)..(96): NCBI GI: 238583987 Blast Desc: MPER_10303 [Moniliophthora perniciosa FA553] gi|215453803|gb|EEB91347.1| MPER_10303 [Moniliophthora perniciosa FA553]
  misc_feature (21)..(96): NCBI GI: 154301129 Blast Desc: [Botryotinia fuckeliana B05.10] gi|150856285|gb|EDN31477.1| [Botryotinia fuckeliana B05.10]
  misc_feature (21)..(96): NCBI GI: 145243160 Blast Desc: An11g01140 [Aspergillus niger] gi|134078792|emb|CAK45851.1| protein product [Aspergillus niger]
  misc_feature: Useful for introducing or modulating the production of volatile compounds
MLVERRFAGSILTHQASNQVHRILNVGFAIMESFMQWSMGLYLDEAEKDQTRSLYLSAGRVMGLTNDLCSWNVEKAESAKSVNRCWNAVPIIMKQY

SEQ ID NO: 34823 - DNA, 232 bp, Muscodor strobelii
  misc_feature: SGI EST ID NO. CUFF.82881.0
  misc_feature: Variant of the nucleotide sequence at SEQ ID NO 34821
cgagcaccgtatccttaatgtcggcttcgctataatggaaagtttcatgcaatggagcatggggctttacctcgacgaagcggagaaggaccaaacacgcagtttgtacctctcggccggtcgtgtgatgggattgaccaacgacctctgttcatggaatgtcgagaaggcagagtcggccaagtcggtcaatcgatgttggaatgccgtgcctatcatcatgaaacagtat

SEQ ID NO: 34824 - DNA, 339 bp, Muscodor strobelii
  misc_feature: SGI cDNA ID NO. 572044
  misc_feature: Elevated expression when VOC is produced
  misc_feature: Encodes the peptide sequence at SEQ ID NO 34825
gagagcggacttggctggcgtaagcaatctatctatgccacatcacgaaatgtcaacctcgtcacccaaaagccctacctgccggatggaatggtacatgtcgcatactacagaggcgtctccggtgtcgctgcgacgggcgtgaaggggctggtcttctggtttctattcatgaaggaggacgtggccaccagcactccgaactgtcccaaatattccgaagcagatgcagaggcaacaatggagcgattcggccacctgatgcttggtcagggctacacctttcgcgatctttggaacagcagggtcaaggccgcaatgttccccatggaagagtga

SEQ ID NO: 34825 - protein, 112 aa, Muscodor strobelii
  misc_feature: SGI Peptide ID NO. 572044
  misc_feature (2)..(112): NCBI GI: 154324026 Blast Desc: BC1G_00412 [Botryotinia fuckeliana B05.10] gi|150842641|gb|EDN17834.1| BC1G_00412 [Botryotinia fuckeliana B05.10]
  misc_feature (25)..(112): NCBI GI: 119483958 Blast Desc: FAD binding domain protein [Neosartorya fischeri NRRL 181] gi|119410038|gb|EAW19985.1| FAD binding domain protein [Neosartorya fischeri NRRL 181]
  misc_feature (25)..(112): NCBI GI: 146324709 Blast Desc: FAD-dependent monooxygenase [Aspergillus fumigatus Af293] gi|129555457|gb|EBA27209.1| FAD-dependent monooxygenase, [Aspergillus fumigatus Af293] gi|159123852|gb|EDP48971.1| A1163]
  misc_feature (20)..(112): NCBI GI: 261353360 Blast Desc: FAD binding domain-containing protein [Verticillium albo-atrum VaMs.102]
  misc_feature (27)..(112): NCBI GI: 169617039 Blast Desc: SNOG_11696 [Phaeosphaeria nodorum SN15] gi|160703321|gb|EAT80740.2| SNOG_11696 [Phaeosphaeria nodorum SN15]
  misc_feature (8)..(112): NCBI GI: 115391083 Blast Desc: [Aspergillus terreus NIH2624] gi|114193970|gb|EAU35670.1| [Aspergillus terreus NIH2624]
  misc_feature (35)..(112): NCBI GI: 169779771 Blast Desc: [Aspergillus oryzae RIB40] gi|83773089|dbj|BAE63217.1| protein product [Aspergillus oryzae]
  misc_feature (35)..(112): NCBI GI: 238500449 Blast Desc: FAD-dependent monooxygenase AtmM [Aspergillus flavus NRRL3357] gi|220693212|gb|EED49558.1| FAD-dependent monooxygenase AtmM [Aspergillus flavus NRRL3357]
  misc_feature (22)..(112): NCBI GI: 115389006 Blast Desc: [Aspergillus terreus NIH2624] gi|114194404|gb|EAU36104.1| [Aspergillus terreus NIH2624]
  misc_feature (27)..(112): NCBI GI: 121711958 Blast Desc: FAD binding domain protein [Aspergillus clavatus NRRL 1] gi|119401746|gb|EAW12168.1| FAD binding domain protein [Aspergillus clavatus NRRL 1]
  misc_feature: Useful for introducing or modulating the production of volatile compounds
ESGLGWRKQSIYATSRNVNLVTQKPYLPDGMVHVAYYRGVSGVAATGVKGLVFWFLFMKEDVATSTPNCPKYSEADAEATMERFGHLMLGQGYTFRDLWNSRVKAAMFPMEE

SEQ ID NO: 34826 - DNA, 306 bp, Muscodor strobelii
  misc_feature: SGI EST ID NO. CUFF.82851.0
  misc_feature: Variant of the nucleotide sequence at SEQ ID NO 34824
caaatattccgaagcagatgcagaggcaacaatggagcgattcggccacctgatgcttggtcagggctacacctttcgcgatctttggaacagcagggtcaaggccgcaatgttccccatggaagagtgagtggtgaaggaatcgtggaacaacggggggagggttgtacttatgggtgattctgcatcgaaggtaatgtagtagcagtggtagcagagacgagatacggtacttctctccgcggaccgcttgccattgggtatttgactgagagtaaggtcacttgcaagggtactccaaatagc

SEQ ID NO: 34827 - DNA, 837 bp, Muscodor strobelii
  misc_feature: SGI cDNA ID NO. 572045
  misc_feature: Elevated expression when VOC is produced
  misc_feature: Encodes the peptide sequence at SEQ ID NO 34828
agatgtaaaccgtctggtagtgatgatgatctaccatttcctattctccacgacgacgaggctactattgttcaatcaccgaggctagcaaccgagtcagaggtacagatggcggaaggaccgcaagagctggcggagatggaaccaaacagacagaacgcaatcactatatcaatcagcaatgccgaagaagttcggaagctgtatctggattacttccagcaatgcaagcaggacatgtgcaagataattgccaaagcatgggttaaggttctcgagcctaaaaaacagtctacacatccctattcaagtggagagacatctagaccagagtggtggccgcagtcctggggtgatagagttgaccaaaaggtcccacataaagagcctgatcatatcaagaagcccgcacgtattcacttacttgtgcacattctgcgcattgtgatggaacctcctgataggcaacatttcgccatacgtgatcaaagactcaatatccaagcactcaaggataccgcttccaacgctctagttgggaaagcgattgcctcgcctgaatcttcgatgagatatctcaaccaactgtttagaatcgcgctcttagaagagcagtacaagcttggcgaaatcggtgaaataactagcatcaatgtcctgaatatagtcgatcctaaacaaaaaggacatagtgttccttgcaactataacattgagtcggacgcttgcgaccgttcaatcaagcgatcagatcgagatagggccgcctccaactaccttcctccacgactgccattggcgtacttgtcaccagggacagatctggagtcctcctaa

SEQ ID NO: 34828 - protein, 278 aa, Muscodor strobelii
  misc_feature: SGI Peptide ID NO. 572045
  misc_feature (57)..(220): NCBI GI: 46122381 Blast Desc: FG05568.1 [Gibberella zeae PH-1]
  misc_feature (55)..(219): NCBI GI: 171686294 Blast Desc: protein product [Podospora anserina] gi|170943108|emb|CAP68761.1| protein product [Podospora anserina]
  misc_feature (57)..(220): NCBI GI: 256729679 Blast Desc: NECHADRAFT_101281 [Nectria haematococca mpVI 77-13-4]
  misc_feature (54)..(220): NCBI GI: 154309822 Blast Desc: BC1G_07381 [Botryotinia fuckeliana B05.10] gi|150851842|gb|EDN27035.1| BC1G_07381 [Botryotinia fuckeliana B05.10]
  misc_feature (57)..(220): NCBI GI: 164423137 Blast Desc: NCU09010 [Neurospora crassa OR74A] gi|157069963|gb|EAA28772.2| [Neurospora crassa OR74A]
  misc_feature (54)..(220): NCBI GI: 156052096 Blast Desc: SS1G_07456 [Sclerotinia sclerotiorum 1980] gi|154705233|gb|EDO04972.1| SS1G_07456 [Sclerotinia sclerotiorum 1980]
  misc_feature (73)..(211): NCBI GI: 145613409 Blast Desc: MGG_01673 [Magnaporthe grisea 70-15] gi|145020487|gb|EDK04616.1| MGG_01673 [Magnaporthe grisea 70-15]
  misc_feature (48)..(212): NCBI GI: 225685001 Blast Desc: conserved [Paracoccidioides brasiliensis Pb03]
  misc_feature (52)..(221): NCBI GI: 119179323 Blast Desc: CIMG_08421 [Coccidioides immitis RS]
  misc_feature (13)..(213): NCBI GI: 119180190 Blast Desc: CIMG_08753 [Coccidioides immitis RS]
  misc_feature: Useful for introducing or modulating the production of volatile compounds
RCKPSGSDDDLPFPILHDDEATIVQSPRLATESEVQMAEGPQELAEMEPNRQNAITISISNAEEVRKLYLDYFQQCKQDMCKIIAKAWVKVLEPKKQSTHPYSSGETSRPEWWPQSWGDRVDQKVPHKEPDHIKKPARIHLLVHILRIVMEPPDRQHFAIRDQRLNIQALKDTASNALVGKAIASPESSMRYLNQLFRIALLEEQYKLGEIGEITSINVLNIVDPKQKGHSVPCNYNIESDACDRSIKRSDRDRAASNYLPPRLPLAYLSPGTDLESS

SEQ ID NO: 34829 - DNA, 1461 bp, Muscodor strobelii
  misc_feature: SGI EST ID NO. CUFF.82899.0
  misc_feature: Variant of the nucleotide sequence at SEQ ID NO 34827
aaaccgtctggtagtgatgatgatctaccatttcctattctccacgacgacgaggctactattgttcaatcaccgaggctagcaaccgagtcagaggtacagatggcggaaggaccgcaagagctggcggagatggaaccaaacagacagaacgcaatcactatatcaatcagcaatgccgaagaagttcggaagctgtatctggattacttccagcaatgcaagcaggacatgtgcaagataattgccaaagcatgggttaaggttctcgagcctaaaaaacagtctacacatccctattcaagtggagagacatctagaccagagtggtggccgcagtcctggggtgatagagttgaccaaaaggtcccacataaagagcctgatcatatcaagaagcccggtaagcaaagattctattccattaaaatatgtctaactcgctattgagcacgtattcacttacttgtgcacattctgcgcattgtgatggaacctcctgataggcaacatttcgccatacgtgatcaaagactcaatatccaagcactcaaggataccgcttccaacgctctagttgggaaagcgattgcctcgcctgaatcttcgatgagatatctcaaccaactgtttagaatcgcgctcttagaagagcagtacaagcttggcgaaatcggtgaaataactagcatcaatgtcctgaatatagtcgatcctaaacaaaaaggacatagtgttccttgcaactataacattgagtcggacgcttgcgaccgttcaatcaagcgatcagatcgagatagggccgcctccaactaccttcctccacgactgccattggcgtacttgtcaccagggacagatctggagtcctcctaatggtccagacgaaagtccaatcttctactataatcactgtgaaccaatctcatcacttgtaccgagtataccacagccgaattggcaaactccgaccaccacctattcccaccctatctctacttctggagactatgaaacatataatcggcaattttcaaagacctagattatccaaaaaggaacgttcaagcttagggggacggcatcactgctgttgccacagctcggttcaccggcgttaggtcaatcggttcacagcacgtgccgttaaacaggtgccggtccgaagacacttgcaagccgcgtgagcgagtaaagagtcggggtaacctgtccatgggatcatatgtatcatcaccaagtgcgtcggtgctgtctgagtgacactgggggtctagggggctttaacaaggcccgtgcaggacttgcaatgccacatgtcgtgtaccacaatcaacactaaaacccaatccgttaatagagcaagagctactgctacctagacttcgtaattgatattatctaattgcctactttggtagacagactaggaatagcactatcaaacttaaagaaagc

SEQ ID NO: 34830 - DNA, 966 bp, Muscodor strobelii
  misc_feature: SGI cDNA ID NO. 572046
  misc_feature: Encodes the peptide sequence at SEQ ID NO 34831
atggacgctgacgagatcttcgatttcatcgtcgtcggtggtggatgtattggcacgtcgacggtccacgctttgataacggaaagacccggggcgaaaatagcttggttcacagggaagcataaacgcaccgcgtcgaacgacttcatcaagatcattcgtgatgtgtacccggatgacgtggtctcggaattcgcaaaccgcgctttgcagaagcggatgagcacatcgccttatcgcgagtattttcacaagacggcgtggatccgcgcgattcgtagtgatgatgaaaacagaagcacgaggcgatcgagtgatgacgttctgaccgcatctgggatgatggaaatggtcggatctgatgccgcaccactgctagacgaaagcgaggagctcttcctgaatccgaatgtgggatatgctgattccgctcgggctgtcgagtcaatcgccgatgacgcagtaaagttgggagtgagacgacacaagatcaatgtcacgcggctgatcgttgaggatggtaagtgcctgggtgtccaagttgagggatctatcgtcaaaggagccaaccaaatcatcgtgtcggccggagcttggactccatccctcctcgcgcagtcgggcattgctttcccacccgatttcttcactgccacggctattgcagtcgcaacagttgctctttctaaccaagagttcacgaatctgaaatcaatgccaatactggctacagaaaagggcgaaatcatgctctcacatcgagaaagggtcttgaagatcaattacgcgacaagtttccgaatcagcgaccctgatcaactatccgacgcggttgatgtcactggcaatcgcgagattctggaaaagatgctgccccaattcaaaggaagagacctggagagttttatctgcccgttagccatctccttccgcgtagccttaatgaatcttaccggtctacagtga

SEQ ID NO: 34831 - protein, 321 aa, Muscodor strobelii
  misc_feature: SGI Peptide ID NO. 572046
  misc_feature (8)..(314): Pfam Id: PF01266 Pfam Desc: FAD dependent oxidoreductase
  misc_feature (133)..(212): Pfam Id: PF01266 Pfam Desc: FAD dependent oxidoreductase
  misc_feature (9)..(245): NCBI GI: 170940234 Blast Desc: protein product [Podospora anserina]
  misc_feature (9)..(241): NCBI GI: 46115148 Blast Desc: FG03416.1 [Gibberella zeae PH-1]
  misc_feature (9)..(241): NCBI GI: 7959289 Blast Desc: sarcosine oxidase [Cylindrocarpon didymum]
  misc_feature (9)..(250): NCBI GI: 154321786 Blast Desc: BC1G_01040 [Botryotinia fuckeliana B05.10] gi|150850287|gb|EDN25480.1| BC1G_01040 [Botryotinia fuckeliana B05.10]
  misc_feature (8)..(267): NCBI GI: 115386498 Blast Desc: conserved [Aspergillus terreus NIH2624] gi|114190788|gb|EAU32488.1| conserved [Aspergillus terreus NIH2624]
  misc_feature (9)..(248): NCBI GI: 240281622 Blast Desc: sarcosine oxidase [Ajellomyces capsulatus H143]
  misc_feature (8)..(267): NCBI GI: 145250443 Blast Desc: An15g01960 [Aspergillus niger] gi|134082255|emb|CAK42299.1| protein product [Aspergillus niger]
  misc_feature (9)..(241): NCBI GI: 145248820 Blast Desc: An14g01210 [Aspergillus niger] gi|134081419|emb|CAK46460.1| protein product [Aspergillus niger]
  misc_feature (9)..(241): NCBI GI: 169776257 Blast Desc: [Aspergillus oryzae RIB40] gi|238502957|ref|XP_002382712.1| sarcosine oxidase, [Aspergillus flavus NRRL3357] gi|83771330|dbj|BAE61462.1| protein product
  misc_feature (9)..(248): NCBI GI: 261197383 Blast Desc: sarcosine oxidase [Ajellomyces dermatitidis SLH14081] gi|239595724|gb|EEQ78305.1| sarcosine oxidase [Ajellomyces dermatitidis SLH14081] gi|239606716|gb|EEQ83703.1| sarcosine
MDADEIFDFIVVGGGCIGTSTVHALITERPGAKIAWFTGKHKRTASNDFIKIIRDVYPDDVVSEFANRALQKRMSTSPYREYFHKTAWIRAIRSDDENRSTRRSSDDVLTASGMMEMVGSDAAPLLDESEELFLNPNVGYADSARAVESIADDAVKLGVRRHKINVTRLIVEDGKCLGVQVEGSIVKGANQIIVSAGAWTPSLLAQSGIAFPPDFFTATAIAVATVALSNQEFTNLKSMPILATEKGEIMLSHRERVLKINYATSFRISDPDQLSDAVDVTGNREILEKMLPQFKGRDLESFICPLAISFRVALMNLTGLQ

SEQ ID NO: 34832 - DNA, 699 bp, Muscodor strobelii
  misc_feature: SGI cDNA ID NO. 572047
  misc_feature: Encodes the peptide sequence at SEQ ID NO 34833
atgacatgggcaaccaaagtcttgattctggacacgagaagaagtggcaatgccaagctagccaacgcatccatgtgtgtgacatatttgttacacatagaaccgctactcaatgagcgattgcctagcgagaagacgcggttcgagttccagagacggtttcccctcgcgcactacgccaatcatttctggatcagccgccccttcacactcccgtcggtctatagatcgtaccatagagtagaaaagttcgtgacctctgctagtgagcctggctacttcagcaacaccctcgcagcagctgaatcgttcctcaaagacgatcccgtcaccagtgtcgcgatagtagggccacagctcaagaagctagaaacagtcgatcagaagctcattcagatgacgggccagcagtccgtagacgaagttaacggcacagagctgcagaccagtgaggtgaccatcgcgacccagacccagatccagactcaatctctccctaaggaaggtcccggttccaccggcacgaaaaacgaagaaacgcgctcattagaacgatcgttctgcgattttacgctaaaagctaagcagcgtgtgctcgaagaagtggccatctacaaagcaccagatgaaaaaggtcgtattccattagacgtcgcccggggggtgatcacgcgtggtttggacactctgttcaactag

SEQ ID NO: 34833 - protein, 232 aa, Muscodor strobelii
  misc_feature: SGI Peptide ID NO. 572047
MTWATKVLILDTRRSGNAKLANASMCVTYLLHIEPLLNERLPSEKTRFEFQRRFPLAHYANHFWISRPFTLPSVYRSYHRVEKFVTSASEPGYFSNTLAAAESFLKDDPVTSVAIVGPQLKKLETVDQKLIQMTGQQSVDEVNGTELQTSEVTIATQTQIQTQSLPKEGPGSTGTKNEETRSLERSFCDFTLKAKQRVLEEVAIYKAPDEKGRIPLDVARGVITRGLDTLFN

SEQ ID NO: 34834 - DNA, 519 bp, Muscodor strobelii
  misc_feature: SGI cDNA ID NO. 572048
  misc_feature: Encodes the peptide sequence at SEQ ID NO 34835
atggcggatttccagactactctgtctgggaggatccggccgcattcgaaagcaacgacacctaagtcaatcgtcagccatcttgccaagaagcatcagattgagaagcctcccgttccgtcaacatcatccctctggagctctcgacatccacaccggcccttcccagaagtccagcgcaccttaacctcgatggtcaacgtctatcaaccacaacagcttgccctccatgccaaagcccaacttcggttcaaggtgaagctcaacaatttgttgatccttgattggttggtttcgtcgaatctaccgttctctattgtcaacgatgagcgttggcgccggcaacaactctacagcaacaacctgattaccgaagaccagcttccgagacgcaacaccatggtcaggctcctgttagccgaatatcagactgcccctgcagaaacaggaaatgccgacctctcatatcaagacaatcatttcaggctgcccttccaagttcctagactacctggttaa

SEQ ID NO: 34835 - protein, 172 aa, Muscodor strobelii
  misc_feature: SGI Peptide ID NO. 572048
MADFQTTLSGRIRPHSKATTPKSIVSHLAKKHQIEKPPVPSTSSLWSSRHPHRPFPEVQRTLTSMVNVYQPQQLALHAKAQLRFKVKLNNLLILDWLVSSNLPFSIVNDERWRRQQLYSNNLITEDQLPRRNTMVRLLLAEYQTAPAETGNADLSYQDNHFRLPFQVPRLPG

SEQ ID NO: 34836 - DNA, 4392 bp, Muscodor strobelii
  misc_feature: SGI EST ID NO. CUFF.82922.1
  misc_feature: Variant of the nucleotide sequence at SEQ ID NO 34834
agccgagcaaagaataatcgagagccaaatttacaattcatacacacacacatacatacatacatctatatgtatatatgttgatttggctatggacaatgcatgaatggactttgctcagtgttagtggtcagtagaggaagagtgccgttggcactgaaaggatcggcggacagccccgatcttatcggagcaaggcaagaaaggaacagctacagtacgtaacaaggcctcatatatacgggctaacaaatccggcacagcggaaagtcaagggcgtcgggggtctgagtggaatggattctcaggattgtagtcatattgtcggcgcgaatggagctacgccattaccattcttagacattcgatcaaatgaatgcggcaacacagctagcctgatccccacatccatacagccacatgcgactcaagacactttgcagacatcgggattaaattcgccctttaatcaaagcattgttaggcccagtgcgtcaagtatggcgtgggatcctgtgcccgatatggcgttttacgatcctgttttcttgcataacccccgcagctgctgcaacaatcggctcctctcgcattctttggccaatgctccgaccacatctcaactgcgggtgagacacctattgatcccccaatattcgactgctggttttcgttggattcgactggcagctcgatgatcccgacagtcgaggatgcggccctaagtccactcattgacacagacgccctttggttccatgggatagattgccatgaacaggcatctgcagtagcagaaactagttcctttgtctctcaggcaacatcggaacaatccaatgtagctgagcacagcaatagcagtaacaatacacagtattcagtctggacaacccgaatcaacaactccagatcattgcctcttactaccagctctaaagctacggataatactggctccgaagtttctcagaccaaatccacctgcagtgtgtccaatgcgcctacaaacagttcaatcgtaactactcagtacttgaaacatattgttgaggacttggccaagctaggcgacgatctccactcaaatacgccaagagaaatgctcaaggtccgaaatagctgtcctatgccggggagattacgagtgtaagatttggttacggcttatagcaaagcacatggacggagcacatctcctttcttcttttgctgtcgaattctctggtcattttgataacaagattgcgaaacatggagcactttagcactagcacagcgatctggagcatttaaaggcatgtcaaaataggcgttctaataatacgatgtatgatctagagattccaaatttgatttttgacttatatgggcagtttctcacccgcctcaagtttgacgtaccatatctttgtatggaatcgcggagattcatcgagatttgaacctcgagaattttgattctttcttcaagtcctagaaatatattgtataattgactgtagtcgggcttgggcgacgctcctccctgcccatggcccgttggcacatgaccgaatgatatgccgccgcaagtcgggaaagcacacccatcacgatccttccgacaagagtccacggcaaatgatcgactctctcgtatttgctttggatattactgagttcaacttttacattattgtgatcttcttcaagttttgccgtacggtcctagtcgtctcgtagaatttctcccgctgtccgaaagcatgccgagcactgcttgaaattcagtgtccacaactgtgactgcaagcctctgtgcgtcttatgtggctgtgtcttttgcttgttggcgtctttgttgccaccatgcatgcttgttccacgtacgttagacatggcggcagtcgatgttctccgtggagatgatcgaagatacggtttcagtggtaatggctgctaatgcaagttgggcgtggcatagactggataattgtgatgttctcgcacgagataggtagccgtgtcattgtaaggctcacacattcaagtctaagaaggccttgagtgcccagattgagagcacggtaaaataatggctagagagtggctcgctgaactgctgggcatggtgataacaaacgatgaatacatatttgttaaatttcgactatgtggcgccacgtgttgcgatgttggttgaccatgctgcctatctgaacctcaccttcgcagagtggttcatcgagcgggcgcccgtcgggccacccgtcgggcgtccgcccgatacccgcccgatacagatatagaggtcatcgttgcccgcccgattcgcccgattgaaatttcgggatacccggacccgatgggatgttgatgaatgcccggcgggtcgcccgtcgggtagatcgggcgtcaggggacccctgaagccacggaaaccctgggctgctagtcatcaggtgattggaaaatttgatccggtgaaccagaaaaccccagacagcctataactaatcataggcaaagctagctctaaatctgtcaagatggccaaccttatcgaagcgactaattcgcgatcccaaacttcagcaccaactctgtcgacgcatggcggatttccagactactctgtctgggaggatccggccgcattcgaaaggtatcgagggtatcatcttggtcacgaggtcgctaaagaaaaggcttggtggtggcgttttggcgcctagtcaacccgtcacggcccaagggcgatgattattcatagtcaacgacacctaagtcaatcgtcagccatcttgccaagaagcatcagattgagaagcctcccgttccgtcaacatcatccctctggagctctcgacatccacaccggcccttcccagaagtccagcgcaccttaacctcgatggtcaacgtctatcaaccacaacagcttgccctccatgccaaagcccaacttcggttcaaggtgaagctcaacaatttgttgatccttgattggttggtttcgtcgaatctaccgttctctattgtcaacgatgagcgttggcgccggcaacaactctacagcaacaacctgattaccgaagaccagcttccgagacgcaacaccatggtcaggctcctgttagccgaatatcagactgcccctgcagaaacaggaaatgccgacctctcatatcaagacaatcatttcaggctgcccttccaagttcctagactacctggttaaatcggcctattctcagagcctcatgacgtagctatggagccgagttacaatctcgcaaggcggtttttaataatctagctagtagctaatcagtagtatgtattgcggtcgaactgttgtttatttgtatttactgcgatgcaatccactgcttcttcgacagttagaggacggtcggagaaggtaagaaattgcagtatccgtatcgcataatgcttgtactcaagccgtatgctggttatgattcgagaataagtctcgtctaaagtatgcgggaggtttgcaagagcctcttgaatatcttgaggccctagacattttcctaattcatcaagttggcatgagacccatcgaaacctacatccatgttagcaacgccaagtagaagaaaagatacgttcgcctacattccatctgctttctctattagagtagattcaatctcgatctgtatatcctgtcgcgacctcaatctgttactgagttccccgtgttgttgaactctgtcgcggacataagtagctatgtcttcttgtattacatcactctgtataggaatgatattcttctcttgggcccagccttcaacagcggcttctatatcttgttctggcctgcttgtcactaggaggtgggtgctcatgtgtgtcgtggagatgggaaatccatgatagtaaggctacgcccgaggattcgcttctcgttggacactcgtcaagtgcgtcgagcacgatccaaacttccccagcttgttggaccatgtcctgcttgtcaggcccatcgcccacggtcattgaactcacaagtacatgtgcaagatcgtctttcattactacgccgacttcctgtctcgaccatgccacgacctctcctcctcctccgcctacttcttatatcacctcttcaactgtctccatcgtgccggtgggcagtataacagcatcgtcaatcagtaggtgcaaaaacactacgtctacccatctcaacccgtctgggtctccacctccatcccctgaaaaggaaagccgccgtcggcacgatctggccctgccgacctacgcaagtgcagcggcccgcagcattgtctcctcaccagcgagggatgaggaggtaggagcggggtaagggcccatacgctatatattgacaacctaacatacttaagaaag

SEQ ID NO: 34837 - DNA, 1341 bp, Muscodor strobelii
  misc_feature: SGI cDNA ID NO. 572049
  misc_feature: Elevated expression when VOC is produced
  misc_feature: Encodes the peptide sequence at SEQ ID NO 34838
atgtgggcggacggttgcagcggtctcaccctcgacgagatggaagaccttcttttcgaatatcgtctgctcgccgggttactcgaggtcgagatcaagtgtcgcatgtcacctgacgtcttccggttcgaatttaccctaggccatgacgtacgccaaaaagcggaaacgattaagcagggcgattttgactcaaatgattccaaacggatgttgaatgcttgcgacgtcggaattgccgtcatttggaatggtttagactctgtcaagaaggagctgaacacctggaagactgacgcctatgccaggttcatctggtatgtggtcaacaccaccaccgccgcccatgcacttcttatgatcgtcgccctcggcagacacaaattgatgggaaccaatttcctccagaaggcaatgctcgtgtccttccttaaacaacacgagagtgagctcgtttgcgcaaaactaagagaggccgctcactcattgtgcccaactccctttactcgagaaagcgctccgcaggatgaacaaagcagcgatgccctcggcgattccaatgttacagccccatcctctagaggaccggcttcttcctcgttcgtggcactcgttacgaccgatacagcggacgacgacgggtcattatccaacgctcaagcttacagtgccctttacgataatcatgtaggtccgaacgcaggattttttggaccgactactgcccgtctattcgatcatagtgttgtgctggactgcatcatgcagaccaagatatgtatgagcaattatgacacgtgtagtgtttttgcccaggcagggtatctgtgtgatctcttcagcggaataagcgaaccaataccccgagcctttttcctccgcctacgatgcctcccgcgtgaccgattccatctacccgacgtagtcttcgcagacgagcctgatcttcttactttactccagacaatcggcgaagtttcgcatggcaactcgtggacctggacaccgaacgggcggctaacgtctccgaggcaggagtggaatgctctcctcctaatgttgctatgtgctctattccccctggatgacctttgcgagttggtaacgtgcggcaagagtctccttcctttgctctactgcctcttgcacaaagaaacattgcagggtgttcggctacccttccataaagtaattgcatgggtagctctcgcagttgcggaattggacatgggcaaggcagtggagcagcttcacaggatcgggataacccatatcgatcagcttgtgccagagtacttggaatatcgccaaaaacatatcacgagcatcgtgtttgcgtag

SEQ ID NO: 34838 - protein, 446 aa, Muscodor strobelii
  misc_feature: SGI Peptide ID NO. 572049
  misc_feature: Useful for introducing or modulating the production of volatile compounds
MWADGCSGLTLDEMEDLLFEYRLLAGLLEVEIKCRMSPDVFRFEFTLGHDVRQKAETIKQGDFDSNDSKRMLNACDVGIAVIWNGLDSVKKELNTWKTDAYARFIWYVVNTTTAAHALLMIVALGRHKLMGTNFLQKAMLVSFLKQHESELVCAKLREAAHSLCPTPFTRESAPQDEQSSDALGDSNVTAPSSRGPASSSFVALVTTDTADDDGSLSNAQAYSALYDNHVGPNAGFFGPTTARLFDHSVVLDCIMQTKICMSNYDTCSVFAQAGYLCDLFSGISEPIPRAFFLRLRCLPRDRFHLPDVVFADEPDLLTLLQTIGEVSHGNSWTWTPNGRLTSPRQEWNALLLMLLCALFPLDDLCELVTCGKSLLPLLYCLLHKETLQGVRLPFHKVIAWVALAVAELDMGKAVEQLHRIGITHIDQLVPEYLEYRQKHITSIVFA

SEQ ID NO: 34839 - DNA, 6338 bp, Muscodor strobelii
  misc_feature: SGI EST ID NO. CUFF.83249.0
  misc_feature: Variant of the nucleotide sequence at SEQ ID NO 34837
cctaacacagagctgttatggataagctttgataggctcatcattccctttcttcgattatcaacttatctctggcagctagtgctgaacttgttttaccaaacggcaactcttgtgcgagggatcgcaaggacgtacattactctagaataatgccttccatccataaccccgaatccatgtgggcggacggttgcagcggtctcaccctcgacgagatggaagaccttcttttcgaatatcgtctgctcgccgggttactcgaggtcgagatcaagtgtcgcatgtcacctgacgtcttccggttcgaatttaccctaggccatgacgtacgccaaaaagcggaaacgattaagcagggcgattttgactcaaatgattccaaacggatgttgaatgcttgcgacgtcggaattgccgtcatttggaatggtttagactctgtcaagaaggagctgaacacctggaagactgacgcctatgccaggttcatctggtatgtggtcaacaccaccaccgccgcccatgcacttcttatgatcgtcgccctcggcagacacaaattgatgggaaccaatttcctccagaaggcaatgctcgtgtccttccttaaacaacacgagagtgagctcgtttgcgcaaaactaagagaggccgctcactcattgtgcccaactccctttactcgagaaagcgctccgcaggatgaacaaagcagcgatgccctcggcgattccaatgttacagccccatcctctagaggaccggcttcttcctcgttcgtggcactcgttacgaccgatacagcggacgacgacgggtcattatccaacgctcaagcttacagtgccctttacgataatcatgtaggtccgaacgcaggattttttggaccgactactgcccgtctattcgatcatagtgttgtgctggactgcatcatgcagaccaagatatgtatgagcaattatgacacgtgtagtgtttttgcccaggcagggtatctgtgtgatctcttcagcggaataagcgaaccaataccccgagcctttttcctccgcctacgatgcctcccgcgtgaccgattccatctacccgacgtagtcttcgcagacgagcctgatcttcttactttactccagacaatcggcgaagtttcgcatggcaactcgtggacctggacaccgaacgggcggctaacgtctccgaggcaggagtggaatgctctcctcctaatgttgctatgtgctctattccccctggatgacctttgcgagttggtaacgtgcggcaagagtctccttcctttgctctactgcctcttgcacaaagaaacattgcagggtgttcggctacccttccataaagtaattgcatgggtagctctcgcagttgcggaattggacatgggcaaggcagtggagcagcttcacaggatcgggataacccatatcgatcagcttgtgccagagtacttggaatatcgccaaaaacatatcacgagcatcgtgtttgcgtagcttctttcggggctccccatcgatcaaacaaatcgatctatgtcgagccctgctttcttgcgcatggctttcgtgaactatgggggtataagaggccaatgtcttggaggttggcgctaacggctatataacgagttgtggcagattgtgccattacactagtacgtctgagaaatggtcgcgtaagaagtgtgataaatatactacatacatcgacgacttcaacatcacagtatctccaacttcggcttgaagaatcgcgttggcgacaagaagactgccaaagagccaagatcgactcgtatcccttgccgctcgtattctgagccggatcgccactcacgcctggccatgcttggtctagctcaaaaacgctgcgcgtggaaataattgcctcagtcctttcattggcatgacgatccatccctttccttcctatgactatcgtctgtgtagttcctcttcgcgtcaaccccggcaagagcaagtcttaggcgaagaagtgcagagacaagagaaagaacaacagagacgcgacaggacgcagatacgggcagaggaatcacggtcccaggcaccccctgcgacgtcttcagggccgtcacctaagtcttgccatcgacgtggagacaaatctatccttgacgacacaaagcgagacaacgaagtctactggcccccgacgtatcatcttctggcatgacttcccaatacgacaagagcagatttggggcctactagtcgacgagaacgctgtccagatggtgatgtcgatgtcgacgtcactgcgggagggatctgagtctgtactttagtgaagaagatatagtgggttagaggaaagaattcatacttttgtacaaaaagctagaaagcactcggcactgtagttaaggcgttgttgcgatttctgtgcggcagacatacaagggcaaatttatctcttagtatagcgctacgtctttcattaagcactcgtcgtttaaagcaaaacacacccccgtaaataggaaggctttggactttgccattgagctataaatctgcaaatgatcacccaatatgtacaacgacaccagttatgtggccgctactatcgccacttatactctaggcaagacactgggccccaggccgagttgatagtggacgcctagattttcaaatgcctgacgctccaaggtctcgaaatcagatcgtgcaacaagaaggggctgatcttgagagatggaggtcgaaccgctccaggagaacctttcaggacctcgctccccgttcagaacactggtaatataggcaccgttcgtaggcaagtctttggctcgcgtataagaacctccgcaatcaacaagcaggttttcaaaggcaggatgtttatcaatcaaaggggcctgcgtgcttgtcacgccatcgctttatcaatcagctcagtcgtcatgtacactgaaatgtatagacctaccaatagaagcgtatcgctgtcacttgagctccacccagagctggaatcatctctcgtgcccattgtatcgccttctccagtgcctgctgagcaagggcgctacgagatacatctctaatatacgacattgcgaagggctcaatccacgtgatcttggcgctgtcgtcatcgcctgttgggggcaagaattcggctggcactattagttccggtcacaaattggggagacatcgcgaacctcggccgacctgagagaatatgggtcctcctttgaacatggctacctgttgggcgctgagtcgtaattggagagcaaatataccggtcggcacaggagtcctatgactcggaggaagctccatccccgattctctcagaactcctatagtccaggctccaatggccaggatgacatccgtgtcggtggcgtctatgaactcaccgttggcaagagcaacagccgtaactcgcttcccgctgtgcttcaaatatgcgactgtagcgtcgtactcagacccgccagactgaatgcattggtctttggtcatttgctcgtgctccaagatacaagcgcgccagtttacaattgcatcgtcagggttgtatacgaaagtcaagttcttaggtagatgggtggagccgaacatctgtcccacgaactctgtattgcagcgttgtcgagcctcaagccccatagactcgcgattccggtcaatcgctcgaagcgtggcactattttcctcgtacgcaactacgcggccacagggaacatagtaccgggcaaaggatccagtcctccactcgccctgggcggcccatgcctcacgcattctttcctggttctcataatcaattcgcacaatcttggaacaatcgtcggagggcgcaatagaagaatggtttgtaataagggacacctgtcttttgggattttgcttcgagatgtgaaggcaggcggagatgcctgccatgcctgagccgatgaccaggacaggacggttcattgtcaaacggtgccaggtctgatcaataataatcttgctcgattcaaaaaaacaacgtcgtaacagcgaagccgatagcttgcacaagggtgattacgtggtccgcgcggggttttggtggtatttctgtttggggttgctggaaatgagcatgcatgcatgccacgctgggtacaatgattggcccggctggtgcgtgaatgtgtctgttctattccgggagattaccggctggagaggttggaaattgtacttagctcgcaattccactttggcacttcttcagtgctgcctcttcgcaccgccgaatcactcgcgaaacggttcgtttgtgttagtagatgagaaattcggcatggcggcattgtcaaaatggagaatcacgaggaagaaactccacggaatgactatcagctggccacgctgcccggactcgtcatcgtccccaaaactaaccttggcggctatgcgcggacgcagcatttcttctatcatggattctgttcgtcccgcacccttctcgagggaaacccttaccggaaatccatcgctatcgcatatcagagctctactatacgtcacgcgatcatctccctatgcgccttatacacgggagaccgaccacagtacatgcagcaacgatgcctggcattagcatctgcacgtgcggatacaaatctcccccttagcaagaccaacctggagatcattctcctatcatcccttcttttgctgcaggcttcgattttagactccgcgctcaccaaggaatgggatgctcatgtaaagagtatgccgatcttgatccacagagcgattgaataccccgacacttgtcagtatcgaattaaatcggcatctcatgcaattctttcaaatgcatccgccattcggtcacaggccttcccgtcttttcattttctttccccatcggaaaaggaacttgatcaagtcgactgtttaacaggcatctctccaaacgtcatgtggatactgcaggtcgcaaatgacctttccttctcaaatgcgactgataagataaccaacgcacaaagtcttcttgaccgtctcgacaaattaagacaactcgtgactgaagatcaaatagatgacagcgtggctagaaaatgcgaggcgcgattctgtgtggcaatgacggcggaagcttatcgtctcgctgccatcatctatattcgatgtagggttctcggaaccccgacatcagatgattcgctcgcctcgacacaaacctctttattaagtattctcaacttacttccttgtggcggggagtactacaaggccatttggcccttgtaccctcttttcatcctctcggttgccaacggttcggagtcatgtcgagagggtttgcacaagatctggaataacctaagtcgtgtatcttctcgcagtaatgttagccccgcgctagaagcagcacgaatcctgctcgcagaaagccaagaacaggactgggatagtttgatcgctcgatgtggacggatcagtctcacttagattgtgccacacttcaccaggatgcccacaaacgtttctagcggcatttcgagtattcaagggccccactctccctctggtggttcaaatggtcatgatcatcattaaccatcatttctctataactttcagagtcatctgcgataactgtcgtacaatatttgattcaactacgtatacctaatccgctggatatattggaagtgtgactagacgtgcttttccgctctacaaggcactgtacaacaagcgggtatgcggttcgggcaacaccgcgtcaattgtttaggaaatacagctacattcctgttgtcttttggatcttttcccctgtaatgtaatagctccagctgttgaaaataaaccttaattgttccatggagtgattgggattatctggtgatttatttacggccttatattataaggcgtccgaccactatcgtgcttgtgccgcaacgaaggaacggggaacggatgattggaatgcgaagagttattcggatgagaatgggtgggttacgcgatggatctagacgatggcttcgaggatcagctgtcaaagctggggaaaaggagtgattccgcctgggccagctagctacagcttgcctagattgttctgtcgagggggctttagtggaggtggggggtggctgtggagcaggctcgttgcactgaccattcgtgcgcaagggtgtgtgagccaccaacaatcatctggggaaccaactgcgcgagtagctttagtcaccctaggacctccatggtgagaaacccctccatgcaggtggacctcttatgtgatcacttatcacgtcatgtgcacga

SEQ ID NO: 34840 - DNA, 1248 bp, Muscodor strobelii
  misc_feature: SGI cDNA ID NO. 572050
  misc_feature: Elevated expression when VOC is produced
  misc_feature: Encodes the peptide sequence at SEQ ID NO 34841
atgaaccgtcctgtcctggtcatcggctcaggcatggcaggcatctccgcctgccttcacatctcgaagcaaaatcccaaaagacaggtgtcccttattacaaaccattcttctattgcgccctccgacgattgttccaagattgtgcgaattgattatgagaaccaggaaagaatgcgtgaggcatgggccgcccagggcgagtggaggactggatcctttgcccggtactatgttccctgtggccgcgtagttgcgtacgaggaaaatagtgccacgcttcgagcgattgaccggaatcgcgagtctatggggcttgaggctcgacaacgctgcaatacagagttcgtgggacagatgttcggctccacccatctacctaagaacttgactttcgtatacaaccctgacgatgcaattgtaaactggcgcgcttgtatcttggagcacgagcaaatgaccaaagaccaatgcattcagtctggcgggtctgagtacgacgctacagtcgcatatttgaagcacagcgggaagcgagttacggctgttgctcttgccaacggtgagttcatagacgccaccgacacggatgtcatcctggccattggagcctggactataggagttctgagagaatcggggatggagcttcctccgagtcataggactcctgtgccgaccggtatatttgctctccaattacgactcagcgcccaacaggtagccatgttcaaaggaggacccatattctctcaggtcggccgaggcgatgacgacagcgccaagatcacgtggattgagcccttcgcaatgtcgtatattagagatgtatctcgtagcgcccttgctcagcaggcactggagaaggcgatacaatgggcacgagagatgattccagctctgggtggagctcaagtgacagcgatacgcttctattgcgatggcgtgacaagcacgcaggcccctttgattgataaacatcctgcctttgaaaacctgcttgttgattgcggaggttcttatacgcgagccaaagacttgcctacgaacggtgcctatattaccagtgttctgaacggggagcgaggtcctgaaaggttctcctggagcggttcgacctccatctctcaagatcagccccttcttgttgcacgatctgatttcgagaccttggagcgtcaggcatttgaaaatctaggcgtccactatcaactcggcctggggcccagtgtcttgcctagagtataa

SEQ ID NO: 34841 - protein, 415 aa, Muscodor strobelii
  misc_feature: SGI Peptide ID NO. 572050
  misc_feature (4)..(345): Pfam Id: PF01266 Pfam Desc: FAD dependent oxidoreductase
  misc_feature (4)..(340): Pfam Id: PF01266 Pfam Desc: FAD dependent oxidoreductase
  misc_feature (5)..(360): NCBI GI: 145250443 Blast Desc: An15g01960 [Aspergillus niger] gi|134082255|emb|CAK42299.1| protein product [Aspergillus niger]
  misc_feature (3)..(360): NCBI GI: 169765099 Blast Desc: [Aspergillus oryzae RIB40] gi|83764875|dbj|BAE55019.1| protein product [Aspergillus oryzae]
  misc_feature (6)..(372): NCBI GI: 240281622 Blast Desc: sarcosine oxidase [Ajellomyces capsulatus H143]
  misc_feature (2)..(369): NCBI GI: 255946578 Blast Desc: Pc22g00060 [Penicillium chrysogenum Wisconsin 54-1255] gi|211591073|emb|CAP97294.1| Pc22g00060 [Penicillium chrysogenum Wisconsin 54-1255]
  misc_feature (6)..(369): NCBI GI: 261197383 Blast Desc: sarcosine oxidase [Ajellomyces dermatitidis SLH14081] gi|239595724|gb|EEQ78305.1| sarcosine oxidase [Ajellomyces dermatitidis SLH14081] gi|239606716|gb|EEQ83703.1| sarcosine
  misc_feature (2)..(376): NCBI GI: 145239203 Blast Desc: An08g01300 [Aspergillus niger] gi|134076752|emb|CAK39811.1| protein product [Aspergillus niger]
  misc_feature (2)..(369): NCBI GI: 169776257 Blast Desc: [Aspergillus oryzae RIB40] gi|238502957|ref|XP_002382712.1| sarcosine oxidase, [Aspergillus flavus NRRL3357] gi|83771330|dbj|BAE61462.1| protein product
  misc_feature (5)..(369): NCBI GI: 256733960 Blast Desc: [Nectria haematococca mpVI 77-13-4]
  misc_feature (3)..(365): NCBI GI: 170940234 Blast Desc: protein product [Podospora anserina]
  misc_feature (5)..(392): NCBI GI: 145252386 Blast Desc: An16g03950 [Aspergillus niger] gi|134083255|emb|CAK46826.1| protein product [Aspergillus niger]
  misc_feature (2)..(353): SWISSPROT Homolog: EC 1.5.3.7 L-pipecolate oxidase
  misc_feature: Useful for introducing or modulating the production of volatile compounds
MNRPVLVIGSGMAGISACLHISKQNPKRQVSLITNHSSIAPSDDCSKIVRIDYENQERMREAWAAQGEWRTGSFARYYVPCGRVVAYEENSATLRAIDRNRESMGLEARQRCNTEFVGQMFGSTHLPKNLTFVYNPDDAIVNWRACILEHEQMTKDQCIQSGGSEYDATVAYLKHSGKRVTAVALANGEFIDATDTDVILAIGAWTIGVLRESGMELPPSHRTPVPTGIFALQLRLSAQQVAMFKGGPIFSQVGRGDDDSAKITWIEPFAMSYIRDVSRSALAQQALEKAIQWAREMIPALGGAQVTAIRFYCDGVTSTQAPLIDKHPAFENLLVDCGGSYTRAKDLPTNGAYITSVLNGERGPERFSWSGSTSISQDQPLLVARSDFETLERQAFENLGVHYQLGLGPSVLPRV

SEQ ID NO: 34842 - DNA, 5327 bp, Muscodor strobelii
  misc_feature: SGI EST ID NO. CUFF.83250.2
  misc_feature: Variant of the nucleotide sequence at SEQ ID NO 34840
cgataagcttccgccgtcattgccacacagaatcgcgcctcgcattttctagccacgctgtcatctatttgatcttcagtcacgagttgtcttaatttgtcgagacggtcaagaagactttgtgcgttggttatcttatcagtcgcatttgagaaggaaaggtcatttgcgacctgcagtatccacatgacgtttggagagatgcctgttaaacagtcgacttgatcaagttccttttccgatggggaaagaaaatgaaaagacgggaaggcctgtgaccgaatggcggatgcatttgaaagaattgcatgagatgccgatttaattcgatactgacaagtgtcggggtattcaatcgctctgtggatcaagatcggcatactctttacatgagcatcccattccttggtgagcgcggagtctaaaatcttcctcggcgtcagaaaacaatcattaggggcagtagcaatttacataccgaagcctgcagcaaaagaagggatgataggagaatgatctccaggttggtcttgctaagggggagatttgtatccgcacgtgcagatgctaatgccaggcatcgttgctgcatgtactgtggtcggtctcccgtgtataaggcgcatagggagatgatcgcgtgacgtatagtagagctctgatatgcgatagcgatggatttccggtaagggtttccctcgagaagggtgcgggacgaacagaatccatgatagactaatcgatcagcatgccatccgagagcgcgaggagcaatcacggtacgaacagaaatgctgcgtccgcgcatagccgccaaggttagttttggggacgatgacgagtccgggcagcgtggccagctgatagtcattccgtggagtttcttcctcgtgattctccattttgacaatgccgccatgccgaatttctcatctactaacacaaacgaaccgtttcgcgagtgattcggcggtgcgaagaggcagcactgaagaagtgccaaagtggaattgcgagctaagtacaatttccaacctctccagccggtaatctcccggaatagaacagacacattcacgcaccagccgggccaatcattgtacccagcgtggcatgcatgcatgctcatttccagcaaccccaaacagaaataccaccaaaaccccgcgcggaccacgtaatcacccttgtgcaagctatcggcttcgctgttacgacgttgtttttttgaatcgagcaagattattattgatcagacctggcaccgtttgacaatgaaccgtcctgtcctggtcatcggctcaggcatggcaggcatctccgcctgccttcacatctcgaagcaaaatcccaaaagacaggtgtcccttattacaaaccattcttctattgcgccctccgacgattgttccaagattgtgcgaattgattatgagaaccaggaaagaatgcgtgaggcatgggccgcccagggcgagtggaggactggatcctttgcccggtactatgttccctgtggccgcgtagttgcgtacgaggaaaatagtgccacgcttcgagcgattgaccggaatcgcgagtctatggggcttgaggctcgacaacgctgcaatacagagttcgtgggacagatgttcggctccacccatctacctaagaacttgactttcgtatacaaccctgacgatgcaattgtaaactggcgcgcttgtatcttggagcacgagcaaatgaccaaagaccaatgcattcagtctggcgggtctgagtacgacgctacagtcgcatatttgaagcacagcgggaagcgagttacggctgttgctcttgccaacggtgagttcatagacgccaccgacacggatgtcatcctggccattggagcctggactataggagttctgagagaatcggggatggagcttcctccgagtcataggactcctgtgccgaccggtatatttgctctccaattacgactcagcgcccaacaggtagccatgttcaaaggaggacccatattctctcaggtcggccgagccgaattcttgcccccaacaggcgatgacgacagcgccaagatcacgtggattgagcccttcgcaatgtcgtatattagagatgtatctcgtagcgcccttgctcagcaggcactggagaaggcgatacaatgggcacgagagatgattccagctctgggtggagctcaagtgacagcgatacgcttctattgcgatggcgtgacaagcacgcaggcccctttgattgataaacatcctgcctttgaaaacctgcttgttgattgcggaggttcttatacgcgagccaaagacttgcctacgaacggtgcctatattaccagtgttctgaacggggagcgaggtcctgaaaggttctcctggagcggttcgacctccatctctcaagatcagccccttcttgttgcacgatctgatttcgagaccttggagcgtcaggcatttgaaaatctaggcgtccactatcaactcggcctggggcccagtgtcttgcctagagtataagtggcgatagtagcggccacataactggtgtcgttgtacatattgggtgatcatttgcagatttatagctcaatggcaaagtccaaagccttcctatttacgggggtgtgttttgctttaaacgacgagtgcttaatgaaagacgtagcgctatactaagagataaatttgcccttgtatgtctgccgcacagaaatcgcaacaacgccttaactacagtgccgagtgctttctagctttttgtacaaaagtatgaattctttcctctaacccactatatcttcttcactaaagtacagactcagatccctcccgcagtgacgtcgacatcgacatcaccatctggacagcgttctcgtcgactagtaggccccaaatctgctcttgtcgtattgggaagtcatgccagaagatgatacgtcgggggccagtagacttcgttgtctcgctttgtgtcgtcaaggatagatttgtctccacgtcgatggcaagacttaggtgacggccctgaagacgtcgcagggggtgcctgggaccgtgattcctctgcccgtatctgcgtcctgtcgcgtctctgttgttctttctcttgtctctgcacttcttcgcctaagacttgctcttgccggggttgacgcgaagaggaactacacagacgatagtcataggaaggaaagggatggatcgtcatgccaatgaaaggactgaggcaattatttccacgcgcagcgtttttgagctagaccaagcatggccaggcgtgagtggcgatccggctcagaatacgagcggcaagggatacgagtcgatcttggctctttggcagtcttcttgtcgccaacgcgattcttcaagccgaagttggagatactgtgatgttgaagtcgtcgatgtatgtagtatatttatcacacttcttacgcgaccatttctcagacgtactagtgtaatggcacaatctgccacaactcgttatatagccgttagcgccaacctccaagacattggcctcttatacccccatagttcacgaaagccatgcgcaagaaagcagggctcgacatagatcgatttgtttgatcgatggggagccccgaaagaagctacgcaaacacgatgctcgtgatatgtttttggcgatattccaagtactctggcacaagctgatcgatatgggttatcccgatcctgtgaagctgctccactgccttgcccatgtccaattccgcaactgcgagagctacccatgcaattactttatggaagggtagccgaacaccctgcaatgtttctttgtgcaagaggcagtagagcaaaggaaggagactcttgccgcacgttaccaacctataggtggccattagattagccgaaacaaaagtcgttgcacttactcgcaaaggtcatccagggggaatagagcacatagcaacattaggaggagagcattccactcctgcctcggagacgttagccgcccgttcggtgtccaggtccacgagttgccatgcgaaacttcgccgattgtctggagtaaagtaagaagatcaggctcgtctgcgaagactacgtcgggtagatggaatcggtcacgcgggaggcatcgtaggcggaggaaaaaggctcggggtattggttcgcttattccgctgaagagatcacacagataccctgcctgggcaaaaacactacacgtgtcataattgctcatacatatcttggtctgcatgatgcagtccagcacaacactatgatcgaatagacgggcagtagtcggtccaaaaaatcctgcgttcggacctacatgattatcgtaaagggcactgtctattgtcggggtcaagtgtcagtactcggagtcaacttgagtggagcttgtatggtactaacaagcttgagcgttggataatgacccgtcgtcgtccgctgtatcggtcgtaacgagtgccacgaacgaggaagaagccggtcctctagaggatggggctgtaacattggaatcgccgagggcatcgctgctttgttcatcctgcggagcgctttctcgagcttagatttgttagtttatgtagtagaattcatccccggttcttcacttgctaaagggagttgggcacaatgagtgagcggcctctcttagttttgcgcaaacgagctcactctcgtgttgtttaaggaaggacacgagcattgccttctggaggaaattggttcccatcaatttgtgtctgccgagggcgacgatcataagaagtgcatgggcggcggtggtggtgttgaccacataccagatgaacctggcataggcgtcagtcttccaggtgttcagctccttcttgacagagtctaaaccattccaaatgacggcaattccgacgtcgcaagcattcaacatccgtttggaatcatttgagtcaaaatcgccctgcttaatcgtttccgctttttggcgtacgtcatggcctagggtaaattcgaaccggaagacgtcaggtgacatgcgacacttgatctcgacctcgagtaacccggcgagcagacgatattcgaaaagaaggtcttccatctcgtcgagggtgagaccgctgcaaccgtccgcccacatggattcggggttatggatggaaggcattattctagagtaatgtacgtccttgcgatccctcgcacaagagttgccgtttggtaaaacaagttcagcactagctgccagagataagttgataatcgaagaaagggaatgatgagcctatcaaagcttatccataacagctctgtgttagg

SEQ ID NO: 34843 - DNA, 876 bp, Muscodor strobelii
  misc_feature: SGI cDNA ID NO. 572051
  misc_feature: Encodes the peptide sequence at SEQ ID NO 34844
atggagaatcacgaggaagaaactccacggaatgactatcagctggccacgctgcccggactcgtcatcgtccccaaaactaaccttggcggctatgcgcggacgcagcatttcttctatcatggattctgttcgtcccgcacccttctcgagggaaacccttaccggaaatccatcgctatcgcatatcagagctctactatacgtcacgcgatcatctccctatgcgccttatacacgggagaccgaccacagtacatgcagcaacgatgcctggcattagcatctgcacgtgcggatacaaatctcccccttagcaagaccaacctggagatcattctcctatcatcccttcttttgctgcaggcttcgattttagactccgcgctcaccaaggaatgggatgctcatgtaaagagtatgccgatcttgatccacagagcgattgaataccccgacacttatgacagcgtggctagaaaatgcgaggcgcgattctgtgtggcaatgacggcggaagcttatcgtctcgctgccatcatctatattcgatgtagggttctcggaaccccgacatcagatgattcgctcgcctcgacacaaacctctttattaagtattctcaacttacttccttgtggcggggagtactacaaggccatttggcccttgtaccctcttttcatcctctcggttgccaacggttcggagtcatgtcgagagggtttgcacaagatctggaataacctaagtcgtgtatcttctcgcagtaatgttagccccgcgctagaagcagcacgaatcctgctcgcagaaagccaagaacaggactgggatagtttgatcgctcgatgtggacggatcagtctcacttag

SEQ ID NO: 34844 - protein, 291 aa, Muscodor strobelii
  misc_feature: SGI Peptide ID NO. 572051
  misc_feature (170)..(267): NCBI GI: 46128165 Blast Desc: FG08460.1 [Gibberella zeae PH-1]
  misc_feature (142)..(271): NCBI GI: 256733469 Blast Desc: NECHADRAFT_67175 [Nectria haematococca mpVI 77-13-4]
MENHEEETPRNDYQLATLPGLVIVPKTNLGGYARTQHFFYHGFCSSRTLLEGNPYRKSIAIAYQSSTIRHAIISLCALYTGDRPQYMQQRCLALASARADTNLPLSKTNLEIILLSSLLLLQASILDSALTKEWDAHVKSMPILIHRAIEYPDTYDSVARKCEARFCVAMTAEAYRLAAIIYIRCRVLGTPTSDDSLASTQTSLLSILNLLPCGGEYYKAIWPLYPLFILSVANGSESCREGLHKIWNNLSRVSSRSNVSPALEAARILLAESQEQDWDSLIARCGRISLT

SEQ ID NO: 34845 - DNA, 6338 bp, Muscodor strobelii; identical to SEQ ID NO: 34839
  misc_feature: SGI EST ID NO. CUFF.83249.0
  misc_feature: Variant of the nucleotide sequence at SEQ ID NO 34843

SEQ ID NO: 34846 - DNA, 384 bp, Muscodor strobelii
  misc_feature: SGI cDNA ID NO. 572052
  misc_feature: Elevated expression when VOC is produced
  misc_feature: Encodes the peptide sequence at SEQ ID NO 34847
atgacagaagtcggctttcccgccatcaatttgaacgacatcgagcgatgggctaacaaagccatgaccttgtccaaccccgcccgccttggtcaagtcctgctcgcaaccgaggcccaacagaaagctgtcgccagttcatggcccgaatatcgcaagatcaatcaggagcagggtcgttgggtctctctggtccgtctcgatgctggaagctcgggacgcacgcagtggtgcaccagagcttgcagcaaggatacaagaggtgccgatcaagagcgctcgactgccctgccgtatgcaagggttgtatatgagcaggatgggagagatgactatatactaccgataacagagctggtcggcggtgaacgagaggcgctttag

SEQ ID NO: 34847 - protein, 127 aa, Muscodor strobelii
  misc_feature: SGI Peptide ID NO. 572052
  misc_feature: Useful for introducing or modulating the production of volatile compounds
MTEVGFPAINLNDIERWANKAMTLSNPARLGQVLLATEAQQKAVASSWPEYRKINQEQGRWVSLVRLDAGSSGRTQWCTRACSKDTRGADQERSTALPYARVVYEQDGRDDYILPITELVGGEREAL

SEQ ID NO: 34848 - DNA, 597 bp, Muscodor strobelii
  misc_feature: SGI cDNA ID NO. 572053
  misc_feature: Elevated expression when VOC is produced
  misc_feature: Encodes the peptide sequence at SEQ ID NO 34849
atggcctctccaaatcccatcgaaaccgtagtggttcacgagtctgtcaatcttcatctcctcaacttgtcaggtaacgagttccgaaacctcagagtacctgcttccggcaagcagtacgacaaaatcgtcgtaggagctgccacttttcggtatcccacagcccccaccaaggctagaaagccaagcattttacttctgaagagggcaccccacgagccttatttccccaacatcttcgagctgcctagcggcaaagtcgaccctaatgaccccaccctcaagcatgctcttgtccgcgaagtacgggaggaaacgggtctagatgtcaccgaaatccttgtcgagctagagccgatgatctacaccaccgacaagaagattattgacggagccgaccgggaagtcgtcgtctccaagactgctatccagctaaattacatcgtacagatatcgcctggcgacgtgatggttaatagcgacgaacattcggaaagccgttgggccagcgaggaagagttgcactcgctagacattactgcatctatgaaatcaatcatccaggaagcattcgcgcgtgcagttcctcgccagtga

SEQ ID NO: 34849 - protein, 198 aa, Muscodor strobelii
  misc_feature: SGI Peptide ID NO. 572053
  misc_feature (45)..(193): Pfam Id: PF00293 Pfam Desc: NUDIX domain
  misc_feature (64)..(193): Pfam Id: PF00293 Pfam Desc: NUDIX domain
  misc_feature (42)..(194): NCBI GI: 255937101 Blast Desc: Pc13g11600 [Penicillium chrysogenum Wisconsin 54-1255] gi|211584197|emb|CAP92229.1| Pc13g11600 [Penicillium chrysogenum Wisconsin 54-1255]
  misc_feature (42)..(192): NCBI GI: 46107972 Blast Desc: FG00868.1 [Gibberella zeae PH-1]
  misc_feature (39)..(174): NCBI GI: 189210195 Blast Desc: conserved [Pyrenophora tritici-repentis Pt-1C-BFP] gi|187977522|gb|EDU44148.1| conserved [Pyrenophora tritici-repentis Pt-1C-BFP]
  misc_feature (38)..(173): NCBI GI: 46111721 Blast Desc: FG02742.1 [Gibberella zeae PH-1]
  misc_feature (28)..(168): NCBI GI: 257054277 Blast Desc: ADP-ribose pyrophosphatase [Saccharomonospora viridis DSM 43017] gi|256584149|gb|ACU95282.1| ADP-ribose pyrophosphatase [Saccharomonospora viridis DSM 43017]
  misc_feature (64)..(174): NCBI GI: 85096465 Blast Desc: NCU07101 [Neurospora crassa OR74A] gi|28921747|gb|EAA31026.1| [Neurospora crassa OR74A]
  misc_feature (61)..(176): NCBI GI: 145230559 Blast Desc: An01g11780 [Aspergillus niger] gi|134055707|emb|CAK44080.1| protein product [Aspergillus niger]
  misc_feature (61)..(174): NCBI GI: 283846991 Blast Desc: NUDIX hydrolase [Bacillus cellulosilyticus DSM 2522] gi|283565271|gb|EFC15728.1| NUDIX hydrolase [Bacillus cellulosilyticus DSM 2522]
  misc_feature (58)..(189): NCBI GI: 148643429 Blast Desc: MutT-related protein NUDIX family [Methanobrevibacter smithii ATCC 35061] gi|148552446|gb|ABQ87574.1| MutT-related protein, NUDIX family [Methanobrevibacter smithii ATCC 35061]
  misc_feature (61)..(178): NCBI GI: 152212395 Blast Desc: lipase [Aspergillus awamori]
  misc_feature: Useful for introducing or modulating the production of volatile compounds
MASPNPIETVVVHESVNLHLLNLSGNEFRNLRVPASGKQYDKIVVGAATFRYPTAPTKARKPSILLLKRAPHEPYFPNIFELPSGKVDPNDPTLKHALVREVREETGLDVTEILVELEPMIYTTDKKIIDGADREVVVSKTAIQLNYIVQISPGDVMVNSDEHSESRWASEEELHSLDITASMKSIIQEAFARAVPRQ

SEQ ID NO: 34850 - DNA, 1941 bp, Muscodor strobelii
  misc_feature: SGI cDNA ID NO. 572054
  misc_feature: Elevated expression when VOC is produced
  misc_feature: Encodes the peptide sequence at SEQ ID NO 34851
atgcgagagtggattcccttgattggcaagatccgaaatgccgaaggagtagcgagaatctcagctgacgatcttggtgatggctggagagcgagtagagtcctctcgggcggtggtgttctcattgaccttgggtggcatttggttgatatcactctgcatcttctaggtgatggtaccattccaatcgtcaaacacgcccactgtttgcagaaccgccctttgcaagaatatgactgcgaagatacggcaacagcaatgctgagtatcaataacgatcaactggccgcgcagaatggcacaatttcgtgcaatttgttgatgagtcgactcggaccaacgaaagtcacgaaactcgtcgtttttggagaagccggatcacttgagctagacaatgattctgtcgaactatgtctgtcgagtagaccagagaaaaggcgatttgacactaactcgtcctcattccaactggcaatggaagaaatttatacaagactttcagactcctctcgcgacggtgagaccagatcatatatccaggacgatatggccgtcatgcagacgattgatgaaatctattctaccagtagagcacatgaagatgacactgtcaacaacagttcgccaagactaagcgatagtcaggatcctcttgatttggcattccactggcctccgatcgacgagatttgtagaagcgtggtgtcgaagcagatgagcaatagtgtctcaatatatgacaacagtggagtcttcgggcaattcgagacgatttggagggattatcatggcatgcctaactcattttctttactccacaactccggaacaaatgcacttcaatcattgtactttggagccgaattccaaccaggtgacgagatcatattccccgtgtacagcttccatgcaaccagttctccggcaatgcactttggcgtccacccgatcttctgtgatgcttcagatgacgggaacatatccccatcttccatattgtcttgtatcactacacgtaccaaggcagtagtagtaacacacatgtgggggatgccttgcaatatggaggaaatatgccgtcttctcaaggatcaccctaacatactcctttttgaggattgctctcatgcacatggagcaagaatcgacggaaaactagtaggcacgtttggcgatggcgctgcgtggtcacttcaaggacaaaagatcataagtggcggcgagggtggcatcacacttaccaaacatcccgagctatattacaggcagctcatctggggccattataataagcgatgcaaagccgagattcccaatgaccaccccctgcgttcattttgtctgactggagccggtgccaaaaaccgtgcgcatcccctcgcagttgctctggctcttccccagctgcaacgtctcgacagtatcttacgcttcaaaacattatacgcttttcagatgctgtctagactgaaagaaatctcctttcttaaggtcccggatattgccatgttgcatgggacccaagtgcagcctgcatggtatgctttggtcttacggtttctcaattctgaagcccccaatggactcagcagggaatcattcgtcagcaaattacataaacgggggctctgcgaagtcgatattcctagatcaactggcctacttcatcgggaagcattgtatacgactccgttcaagctattcccacatttgtatccaaatggaacagctcggacaatccaaataaacatggatttcccgacagcacagagtttctacaatgaagctatcaaactcccggtctggacaagtcggggggaccagccagtggtggatcattatcttgatgtgatatgcgatgtggcgcgccagtgttacaacccaacggggatagaagccaataatcttgacgcaactataacgccctcatttagtacgtaa

SEQ ID NO: 34851 - protein, 646 aa, Muscodor strobelii
  misc_feature: SGI Peptide ID NO. 572054
  misc_feature (225)..(623): Pfam Id: PF01041 Pfam Desc: DegT/DnrJ/EryC1/StrS aminotransferase family
  misc_feature (274)..(420): Pfam Id: PF01041 Pfam Desc: DegT/DnrJ/EryC1/StrS aminotransferase family
  misc_feature (2)..(57): Pfam Id: PF02894 Pfam Desc: Oxidoreductase family, C-terminal alpha/beta domain
  misc_feature (1)..(622): NCBI GI: 238839286 Blast Desc: UDP-bacillosamine synthetase [Microsporum canis CBS 113480]
  misc_feature (7)..(625): NCBI GI: 255937103 Blast Desc: Pc13g11610 [Penicillium chrysogenum Wisconsin 54-1255] gi|211584198|emb|CAP92230.1| Pc13g11610 [Penicillium chrysogenum Wisconsin 54-1255]
  misc_feature (204)..(621): NCBI GI: 257054276 Blast Desc: PLP-dependent enzyme possibly involved in cell wall biogenesis [Saccharomonospora viridis DSM 43017] gi|256584148|gb|ACU95281.1| PLP-dependent enzyme possibly in cell
  misc_feature (215)..(624): NCBI GI: 254392231 Blast Desc: amino-transferase [Streptomyces clavuligerus ATCC 27064] gi|197705904|gb|EDY51716.1| amino-transferase [Streptomyces clavuligerus ATCC 27064]
  misc_feature (224)..(624): NCBI GI: 1045229 Blast Desc: Amino-transferase [Streptomyces alboniger]
  misc_feature (238)..(624): NCBI GI: 19571714 Blast Desc: AtaP4 protein [Saccharothrix mutabilis subsp. capreolus]
  misc_feature (218)..(543): NCBI GI: 73539199 Blast Desc: DegT/DnrJ/EryC1/StrS aminotransferase:aromatic amino acid beta-eliminating lyase/threonine aldolase [Ralstonia eutropha JMP134] gi|72122536|gb|AAZ64722.1| DegT/DnrJ/EryC1/StrS
  misc_feature (189)..(600): NCBI GI: 253989872 Blast Desc: PAU_02392 [Photorhabdus asymbiotica] gi|253781322|emb|CAQ84484.1| conserved [Photorhabdus asymbiotica]
  misc_feature (224)..(542): NCBI GI: 85375488 Blast Desc: eps aminotransferase protein [Erythrobacter litoralis HTCC2594] gi|84788571|gb|ABC64753.1| eps aminotransferase protein [Erythrobacter litoralis HTCC2594]
  misc_feature (254)..(626): NCBI GI: 150400859 Blast Desc: glutamine--scyllo-inositol transaminase [Methanococcus aeolicus Nankai-3] gi|150013562|gb|ABR56013.1| Glutamine--scyllo-inositol transaminase [Methanococcus aeolicus
  misc_feature: Useful for introducing or modulating the production of volatile compounds
MREWIPLIGKIRNAEGVARISADDLGDGWRASRVLSGGGVLIDLGWHLVDITLHLLGDGTIPIVKHAHCLQNRPLQEYDCEDTATAMLSINNDQLAAQNGTISCNLLMSRLGPTKVTKLVVFGEAGSLELDNDSVELCLSSRPEKRRFDTNSSSFQLAMEEIYTRLSDSSRDGETRSYIQDDMAVMQTIDEIYSTSRAHEDDTVNNSSPRLSDSQDPLDLAFHWPPIDEICRSVVSKQMSNSVSIYDNSGVFGQFETIWRDYHGMPNSFSLLHNSGTNALQSLYFGAEFQPGDEIIFPVYSFHATSSPAMHFGVHPIFCDASDDGNISPSSILSCITTRTKAVVVTHMWGMPCNMEEICRLLKDHPNILLFEDCSHAHGARIDGKLVGTFGDGAAWSLQGQKIISGGEGGITLTKHPELYYRQLIWGHYNKRCKAEIPNDHPLRSFCLTGAGAKNRAHPLAVALALPQLQRLDSILRFKTLYAFQMLSRLKEISFLKVPDIAMLHGTQVQPAWYALVLRFLNSEAPNGLSRESFVSKLHKRGLCEVDIPRSTGLLHREALYTTPFKLFPHLYPNGTARTIQINMDFPTAQSFYNEAIKLPVWTSRGDQPVVDHYLDVICDVARQCYNPTGIEANNLDATITPSFST

SEQ ID NO: 34852 - DNA, 3839 bp, Muscodor strobelii
  misc_feature: SGI EST ID NO. CUFF.83704.0
  misc_feature: Variant of the nucleotide sequence at SEQ ID NO 34850
acctgcactagattttgcggctcagcgagcccactcagtatttattagagtcgtatgggttgtgaaagcagccttgttcactcgcttgacccagtaatgaccatgtttcaagttgctgttattggtgttgggagccgaagccaacgtcatgctattccttattttgttcaagacagtgatcgctggcagttgaatgcagtttgtgaatcttctagctcgtcgctagagaggttcagagatatctctggccacatcgcccacgttccctcttttcgaagtgtgtcctcgatgcttgcatctacggcaatcgattgtgcttatatagcagttccacaccttcaaagctctgcgatcaccaaacaacttctgtcatcgggtattcatgttatcaaggaaaaaccagctgcgatgacagctgccgaacttaacttatttcaaggtctcgcaaacttaaacggtgtaacttttagcaccgcaagccaatggcgatatagcgagcaagttcgagtcatgcgagagtggattcccttgattggcaagatccgaaatgccgaaggagtagcgagaatctcagctgacgatcttggtgatggctggagagcgagtagagtcctctcgggcggtggtgttctcattgaccttgggtggcatttggttgatatcactctgcatcttctaggtgatggtaccattccaatcgtcaaacacgcccactgtttgcagaaccgccctttgcaagaatatgactgcgaagatacggcaacagcaatgctgagtatcaataacgatcaactggccgcgcagaatggcacaatttcgtgcaatttgttgatgagtcgactcggaccaacgaaagtcacgaaactcgtcgtttttggagaagccggatcacttgagctagacaatgattctgtcgaactatgtctgtcgagtagaccagagaaaaggcgatttggtaagcaggacagtgttaaagctgaaaaaagactaaagtaacgttaatttagacactaactcgtcctcattccaactggcaatggaagaaatttatacaagactttcagactcctctcgcgacggtgagaccagatcatatatccaggacgatatggccgtcatgcagacgattgatgaaatctattctaccagtagagcacatgaagatgacactgtcaacaacagttcgccaagactaagcgatagtcaggatcctcttgatttggcattccactggcctccgatcgacgagatttgtagaagcgtggtgtcgaagcagatgagcaatagtgtctcaatatatgacaacagtggagtcttcgggcaattcgagacgatttggagggattatcatggcatgcctaactcattttctttactccacaactccggaacaaatgcacttcaatcattgtactttggagccgaattccaaccaggtgacgagatcatattccccgtgtacagcttccatgcaaccagttctccggcaatgcactttggcgtccacccgatcttctgtgatgcttcagatgacgggaacatatccccatcttccatattgtcttgtatcactacacgtaccaaggcagtagtagtaacacacatgtgggggatgccttgcaatatggaggaaatatgccgtcttctcaaggatcaccctaacatactcctttttgaggattgctctcatgcacatggagcaagaatcgacggaaaactagtaggcacgtttggcgatggcgctgcgtggtcacttcaaggacaaaagatcataagtggcggcgagggtggcatcacacttaccaaacatcccgagctatattacaggcagctcatctggggccattataataagcgatgcaaagccgagattcccaatgaccaccccctgcgttcattttgtctgactggagccggtgccaaaaaccgtgcgcatcccctcgcagttgctctggctcttccccagctgcaacgtctcgacagtatcttacgcttcaaaacattatacgcttttcagatgctgtctagactgaaagaaatctcctttcttaaggtcccggatattgccatgttgcatgggacccaagtgcagcctgcatggtatgctttggtcttacggtttctcaattctgaagcccccaatggactcagcagggaatcattcgtcagcaaattacataaacgggggctctgcgaagtcgatattcctagatcaactggcctacttcatcgggaagcattgtatacgactccgttcaagctattcccacatttgtatccaaatggaacagctcggacaatccaaataaacatggatttcccgacagcacagagtttctacaatgaagctatcaaactcccggtctggacaagtcggggggaccagccagtggtggatcattatcttgatgtgatatgcgatgtggcgcgccagtgttacaacccaacggggatagaagccaataatcttgacgcaactataacgccctcatttagtacgtaacacattacgtacataagaaacagaactcggagggatcgcacatcgagtctatcgatccaacgtcacagagaaggagaaggataacttatacagagtcgcatctctgtagctagtcactcattttgtttcgctccctagctagcaaactaagcatacacccactcaaatacatgcttaagggcatgcccatgtgttgattgagaccgtgtctaattatggaggagcagactgacaggaaaacaatacgagcttataatagcaaacaaatgcgaatagatgaagttaagtgtatgctgctgataacaactatggggagaagtgcagggtgacgtgaacttatattctcggcaagttcaaccacttattagtattgataatcgaaatgaccaggctacaacaagattccgtcctactcatgcccactacccgtgtaggtttctgacattcatgctccatcgcacttatcggctagcccaactggaatatcattttcatcactggcgaggaactgcacgcgcgaatgcttcctggatgattgatttcatagatgcagtaatgtctagcgagtgcaactcttcctcgctggcccaacggctttccgaatgttcgtcgctattaaccatcacgtcgccaggcgatatctgtacgatgtaatttagctggatagcagtcttggagacgacgacttcccggtcggctccgtcaataatcttcttgtcggtggtgtagatcatcggctctagctcgacaaggatttcggtgacatctagacccgtttcctcccgtacttcgcggacaagagcatgcttgagggtggggtcattagggtcgactttgccgctaggcagctcgaagatgttggggaaataaggctcgtggggtgccctcttcagaagtaaaatgcttggctttctagccttggtgggggctgtgggataccgaaaagtggcagctcctacgacgattttgtcgtactgcttgccggaagcaggtactctgaggtttcggaactcgttacctgacaagttgaggagatgaagattgacagactcgtgaaccactacggtttcgatgggatttggagaggccatagtcttctcaagaaaagtataagattgaggccaattgactgggccctgagaacccgaatgatcctgatattcttcgggtgaacgatgaaaagttttctcaaggatggttcgtatttgttttagagcagttctgcgtttaaagtcatgagtcaggccccgcaggctggagtatctggtccggtggtcccttttcgggtttgttacaacctttcttgatgtgtactttaagattacatacagcggcc

SEQ ID NO: 34853 - DNA, 385 bp, Muscodor strobelii
  misc_feature: SGI cDNA ID NO. 572055
  misc_feature: Elevated expression when VOC is produced
  misc_feature: Encodes the peptide sequence at SEQ ID NO 34854
atggaggttgatattcaagacgaggacccagccagtgtcaagcccgaccttttcgtaagccaaaagcgagagttagatgaagcatccaagtcccaggaatccgcgtctgaagccaaggatagtggcgatgatgatgcgggtatcgatatcgaagatatcatgcaagctttgaacctcggttctagctatcaagatgagagcgaccaacgctatgtaggctgggccaaggccggactcgggcacccattcgtcatcgtccagtacggaccggagaatataggcaaataccgaatgaaacgatcggccgacgttgttacgaccattaccaacgatcgcaagatgaacgtcgcacgcaataatctcggtgaagagaaagatgacgatg

SEQ ID NO: 34854 - protein, 128 aa, Muscodor strobelii
  misc_feature: SGI Peptide ID NO. 572055
  misc_feature: Useful for introducing or modulating the production of volatile compounds
MEVDIQDEDPASVKPDLFVSQKRELDEASKSQESASEAKDSGDDDAGIDIEDIMQALNLGSSYQDESDQRYVGWAKAGLGHPFVIVQYGPENIGKYRMKRSADVVTTITNDRKMNVARNNLGEEKDDD

SEQ ID NO: 34855 - DNA, 517 bp, Muscodor strobelii
  misc_feature: SGI EST ID NO. CUFF.82943.0
  misc_feature: Variant of the nucleotide sequence at SEQ ID NO 34853
gaagctcaaagagaaactttccgaactacaggacaagtcaaagaccgatccagaggcccaaaaagaggcagatgcactccagaaaagcatcgacgcaatggaggttgatattcaagacgaggacccagccagtgtcaagcccgaccttttcgtaagccaaaagcgagagttagatgaagcatccaagtcccaggaatccgcgtctgaagccaaggatagtggcgatgatgatgcgggtatcgatatcgaagatatcatgcaagctttgaacctcggttctagctatcaagatgagagcgaccaacgctatgtaggctgggccaaggccggactcgggcacccattcgtcatcgtccagtacggaccggagaatataggcaaataccgaatgaaacgatcggccgacgttgttacgaccattaccaacgatcgcaagatgaacgtcgcacgcaataatctcggtgaagagaaagatgacgatggtaaatatattttacaaaaaggctgcatcaagtct

SEQ ID NO: 34856 - DNA, 2676 bp, Muscodor strobelii
  misc_feature: SGI cDNA ID NO. 572056
  misc_feature: Elevated expression when VOC is produced
  misc_feature: Encodes the peptide sequence at SEQ ID NO 34857
atgccgaatccttccgactacacggttggatggatgtgcgctgtcgaagaggagctcgtcgccgctcaggccttccttgacgaaaagcacgacgcaccggaccatatccccgccaacgatatcaacacgtataccctaggacgggtcggcaagcacaatgttgtgattgccgcaatgccgcattggcagtatggtctcgtcaatgcggccatcgtcgccagcaacatggtacgcagcttcccgggtgtgagaatcggcctcatggtgggcattgccggaggtgcacctagtcctcgacatgatattcgcctcggcgacattgtcgtgagctcgcccggctattcgaatggcggcgtgtttcaatacgactacggaatggcgatccagaattccgagtttaagaccacagggtatctcaatcagccaccgctcttcatggcgactgcactcgctgccctcaaggccgaatatgaagctgatggccatactctcgacatggctatcgaaaacatcctccagaaaaaaacgaggctgcgagcgaaatattgtcggccagaccctagcactgataggttgtatgaaaccaattggccacatgcaggagacgacagagatgactgtcatatggtttgtagggacggaaaattggtgtctagacccaatcgatcagatgacgaggacaaccctgccattcattacggtctcattgcttccgccaatcagctcatgaaggacgcctcgcttcgcgatcgattatcaacggagaaggacgtcctgtgctttgagatggaggccgccgggttgatgaaccacttcccctgccttgttatacggggcatttgcgactattccgacacccacaagaatctgcgctggcagggctacgcggcgatggccgcggcggcgtatgcgaaggatctcatgtctaagatcgcgcccaacaaggttgaggctgagagaagattaggcgagatattacaagacgtgcaaggagatatcaaagaagtaaagtcgggagtagaaagcctaagagcagaagcgcattttgatcatatcagaaaatggctatcgcctcccgatccgtcaactaacctgaataacgctttaaaaagccgccatgcaggctcaggcaggtggtttctcgaccacacagcctactcaggctggaaatcggaaaagaactcctttttgtggctacatggcattcccggatgtggtaaaactgtgctgtcctctactatcatcacagatctaggcgagaacaaacttatttcgaaccttctctacttttacttcgactttaacgacaccagcaaacagaacctggacatgatgcttcgatcccttatcagccaactgtatggtaactgtaagaatgtacgaagccgtgtggagtcgctctactccgcgttcgatcaagggaaaaaacagccgcctttagagtcgctccgtgcaacctttcaggacatggtccaacaagctggggaagtttggatcgtgctcgacgcacttgacgagtgtccaacgagaagcgaatcctcgggcgtagccttactctcgtggatgtcccatctccacgacacaaatatgaatatccacctcttagtcacaagcaggccagaacaagacatagaagctgctgtcaaaaactgggcccaggagcaaagcatcattcctatacagagtgatctaatacaggaagacatcgccgcctatgttcgcgacagagttcgacaacacggggaactcagtaacagattgaggtcgcgaccagatatccaagtcgagattgaatccactctgataaaaaaggcagatggaatgtttcgatgggtctcatgccaacttgatgaattaggacaatgtctagggcctgaagacattcaagcggctcttgcaaacctcccgcgcaccttagacgagacttattctcgaatcataacgaccatacggcccgagtacaagcgtcatgcaatgaggatactgcaatttcttaccttctccgaccgccctccaaccgtcgaagaagcagtggattgcattgcagtaaacacaaatgatcaacagttcgaccgcaaaaacagaatgtttgttccaagagagatagcaagatactgttcgagcctcgttgttgtcaccgaacgacaaggcagctataaagaagcggacagagtgacagagatacaacttgctcacttctcagtgaaggaataccttgtttcagaccggctagagcctgttattgcccaagaccttaacgccttcaccgccagatcaacacttgcaaacgtatgcctagtatatctgctccagctagagcataatcatcccattaaagtgagacaaaaattccacttagcatcatatgctgcacaatactggacaaatcatgctacggcagccaacaacaattgtttgctacatgccaagttagtaacagatttctttaccaataaaatggcatataagacctgctatcaactttaccctgtagatacgccttggcatcttgataaaactagggatattccgcctatactttactatgcatcatatacaggccttaccgaggctatttctatgctcctagctgaaggttccgacgtcaatgcccagggcggattctacggcaatgctctgcaggccgcttcgtctgggggcatgaagagatcgtaa

SEQ ID NO: 34857 - protein, 891 aa, Muscodor strobelii
  misc_feature: SGI Peptide ID NO. 572056
  misc_feature (4)..(890): NCBI GI: 119473749 Blast Desc: Ankyrin repeat protein [Neosartorya fischeri NRRL 181] gi|119406903|gb|EAW16853.1| Ankyrin repeat protein [Neosartorya fischeri NRRL 181]
  misc_feature (7)..(887): NCBI GI: 212532817 Blast Desc: multiple ankyrin repeats single kh domain protein, [Penicillium marneffei ATCC 18224] gi|210071929|gb|EEA26018.1| multiple ankyrin repeats single kh domain protein, [Penicillium
  misc_feature (1)..(889): NCBI GI: 119467286 Blast Desc: Ankyrin repeat protein [Neosartorya fischeri NRRL 181] gi|119405601|gb|EAW15552.1| Ankyrin repeat protein [Neosartorya fischeri NRRL 181]
  misc_feature (7)..(887): NCBI GI: 159122813 Blast Desc: Pfs, NACHT and Ankyrin domain protein [Aspergillus fumigatus A1163]
  misc_feature (1)..(889): NCBI GI: 159122770 Blast Desc: Pfs, NACHT and Ankyrin domain protein [Aspergillus fumigatus A1163]
  misc_feature (1)..(887): NCBI GI: 116181690 Blast Desc: CHGG_01473 [Chaetomium globosum CBS 148.51] gi|88185770|gb|EAQ93238.1| CHGG_01473 [Chaetomium globosum CBS 148.51]
  misc_feature (1)..(887): NCBI GI: 169784486 Blast Desc: [Aspergillus oryzae RIB40] gi|83775451|dbj|BAE65571.1| protein product [Aspergillus oryzae]
  misc_feature (1)..(887): NCBI GI: 238508362 Blast Desc: vps9-ankyrin repeat-containing protein, [Aspergillus flavus NRRL3357] gi|220688895|gb|EED45247.1| vps9-ankyrin repeat-containing protein, [Aspergillus flavus NRRL3357]
  misc_feature (1)..(879): NCBI GI: 212528994 Blast Desc: Pfs, NACHT and Ankyrin domain protein [Penicillium marneffei ATCC 18224] gi|210074052|gb|EEA28139.1| Pfs, NACHT and Ankyrin domain protein [Penicillium marneffei ATCC 18224]
  misc_feature (1)..(794): NCBI GI: 145601767 Blast Desc: MGG_08651 [Magnaporthe grisea 70-15] gi|145010276|gb|EDJ94932.1| MGG_08651 [Magnaporthe grisea 70-15]
  misc_feature: Useful for introducing or modulating the production of volatile compounds
MPNPSDYTVGWMCAVEEELVAAQAFLDEKHDAPDHIPANDINTYTLGRVGKHNVVIAAMPHWQYGLVNAAIVASNMVRSFPGVRIGLMVGIAGGAPSPRHDIRLGDIVVSSPGYSNGGVFQYDYGMAIQNSEFKTTGYLNQPPLFMATALAALKAEYEADGHTLDMAIENILQKKTRLRAKYCRPDPSTDRLYETNWPHAGDDRDDCHMVCRDGKLVSRPNRSDDEDNPAIHYGLIASANQLMKDASLRDRLSTEKDVLCFEMEAAGLMNHFPCLVIRGICDYSDTHKNLRWQGYAAMAAAAYAKDLMSKIAPNKVEAERRLGEILQDVQGDIKEVKSGVESLRAEAHFDHIRKWLSPPDPSTNLNNALKSRHAGSGRWFLDHTAYSGWKSEKNSFLWLHGIPGCGKTVLSSTIITDLGENKLISNLLYFYFDFNDTSKQNLDMMLRSLISQLYGNCKNVRSRVESLYSAFDQGKKQPPLESLRATFQDMVQQAGEVWIVLDALDECPTRSESSGVALLSWMSHLHDTNMNIHLLVTSRPEQDIEAAVKNWAQEQSIIPIQSDLIQEDIAAYVRDRVRQHGELSNRLRSRPDIQVEIESTLIKKADGMFRWVSCQLDELGQCLGPEDIQAALANLPRTLDETYSRIITTIRPEYKRHAMRILQFLTFSDRPPTVEEAVDCIAVNTNDQQFDRKNRMFVPREIARYCSSLVVVTERQGSYKEADRVTEIQLAHFSVKEYLVSDRLEPVIAQDLNAFTARSTLANVCLVYLLQLEHNHPIKVRQKFHLASYAAQYWTNHATAANNNCLLHAKLVTDFFTNKMAYKTCYQLYPVDTPWHLDKTRDIPPILYYASYTGLTEAISMLLAEGSDVNAQGGFYGNALQAASSGGMKRS

SEQ ID NO: 34858 - DNA, 4566 bp, Muscodor strobelii
  misc_feature: SGI EST ID NO. CUFF.82958.0
  misc_feature: Variant of the nucleotide sequence at SEQ ID NO 34856
ctaaaccatcatttcagatgatgcgcttctcgccttcaaccaaatcatgtccatggagacggtctcactcctagacgatgaaaagcagtccagcatgcgtaccgatcttagtctatacgagaaatataacacgcgactagtgaggacggatctcggtatgcggacccgtacagatcctttccaacgccgattgcacaaatacttgcgtgcctttcggtattggcgactgtcgaaaaagcaagacaacgtagaaacatcccggtcggcccaggaacggacgcggtggtctcaccagaacacaatcgctatagccgagattgtcgggcgcgctatctcggcggttatcatcggtgtcttcgtcgtcattccactggcattgtttccataccgatccaagagcacccaaaccatcgtatcttccattctggtcctcgcgtttgcccctctcgtgacggtcctgttcaaggtctcgaacttggagatgatggtagtgacggcggcctatgcggcagtgctcgcgacgtttgtgtcgacgaacctgaactgggacagcctagcgttctgccccgcgcggaaactagcaaggccatgcggcatgggctgacggaggtggtttagcggcgtgcatatcgcgtccgatcctgatgcaggctgaattgtgatcctcgcagattataccatatatgtacgtcgtgcactttatgcatattcatcactcgaactacccaaggcgcgcacgagactagggaccaacgcgtcgcatccgtgtcattttgatccacgtcgacccactacacgatcaaatcttaacatcaagcacttgatacgtaaatgacccagatggtcgcgtcgtatatggtacatcatgaggccgaaacgcaccgacaaggcgcactgggtaggcatttcctggccatctaaccacgacgccacaggatgcgagctgaagcacacgtagccccgcccgttgctgttcttcttggcgacgagagcatatgtactccgtctagtgcattatcagatccgatgtcctgattgtagggatactgcatcaccatgtacactctatttcttcctaaaaagggagaaaaagagagagagaaaatcagaaggaatggatgcagtatcctgatctgcagttatatacagatgctgcctacactgattccgaacttagcccctcccagatgtcttcgtctacctcctcgcagcctgcattgattgcgcccgccacgttgaggcggggcaatgcgactcacgtcgccatgatcttcccggccgccagatgcaaggaaatgcgtcgccaccgctaccaccttgcatacagtatagatagtctcgatttgttcattggctggtcttttcggtgaaccgcccccatgcggtgtcggcgcttgggtagcagaactcgaggaaacggaaagtgcactttctcggacacagccagccaataatgaatgtacacactactatggcaaggcccattttcagctctcctgcacaccgtcagaagcagatgcccccctctttggaatgtcatcgccttcgccatcgcagtgggctacgcctgggtgtcacgaacagcctctcatttcccagtcgagtgttttaagcgttagaaaacctgctctacttaccacccacaacagacttgcttacaacctcaagccgaccgacatagatatctcaagcactgaactcatcattcgaagcaaagacccgcatacgaatcacacaacctacggcacagtcaagtgtgcctatcgtatcagatgtgctcccgtcaaggcgctccgggtagtgatctgatcaaggccctctttcgaacttaatcgtccatatccataatgccgaatccttccgactacacggttggatggatgtgcgctgtcgaagaggagctcgtcgccgctcaggccttccttgacgaaaagcacgacgcaccggaccatatccccgccaacgatatcaacacgtataccctaggacgggtcggcaagcacaatgttgtgattgccgcaatgccgcattggcagtatggtctcgtcaatgcggccatcgtcgccagcaacatggtacgcagcttcccgggtgtgagaatcggcctcatggtgggcattgccggaggtgcacctagtcctcgacatgatattcgcctcggcgacattgtcgtgagctcgcccggctattcgaatggcggcgtgtttcaatacgactacggaatggcgatccagaattccgagtttaagaccacagggtatctcaatcagccaccgctcttcatggcgactgcactcgctgccctcaaggccgaatatgaagctgatggccatactctcgacatggctatcgaaaacatcctccagaaaaaaacgaggctgcgagcgaaatattgtcggccagaccctagcactgataggttgtatgaaaccaattggccacatgcaggagacgacagagatgactgtcatatggtttgtagggacggaaaattggtgtctagacccaatcgatcagatgacgaggacaaccctgccattcattacggtctcattgcttccgccaatcagctcatgaaggacgcctcgcttcgcgatcgattatcaacggagaaggacgtcctgtgctttgagatggaggccgccgggttgatgaaccacttcccctgccttgttatacggggcatttgcgactattccgacacccacaagaatctgcgctggcagggctacgcggcgatggccgcggcggcgtatgcgaaggatctcatgtctaagatcgcgcccaacaaggttgaggctgagagaagattaggcgagatattacaagacggttagttctcgattaatataaatcaaaagcattagtagaatacattaagtaacaggcatagtgcaaggagatatcaaagaagtaaagtcgggagtagaaagcctaagagcagaagcgcattttgatcatatcagaaaatggctatcgcctcccgatccgtcaactaacctgaataacgctttaaaaagccgccatgcaggctcaggcaggtggtttctcgaccacacagcctactcaggctggaaatcggaaaagaactcctttttgtggctacatggcattcccggatgtggtaaaactgtgctgtcctctactatcatcacagatctaggcgagaacaaacttatttcgaaccttctctacttttacttcgactttaacgacaccagcaaacagaacctggacatgatgcttcgatcccttatcagccaactgtatggtaactgtaagaatgtacgaagccgtgtggagtcgctctactccgcgttcgatcaagggaaaaaacagccgcctttagagtcgctccgtgcaacctttcaggacatggtccaacaagctggggaagtttggatcgtgctcgacgcacttgacgagtgtccaacgagaagcgaatcctcgggcgtagccttactctcgtggatgtcccatctccacgacacaaatatgaatatccacctcttagtcacaagcaggccagaacaagacatagaagctgctgtcaaaaactgggcccaggagcaaagcatcattcctatacagagtgatctaatacaggaagacatcgccgcctatgttcgcgacagagttcgacaacacggggaactcagtaacagattgaggtcgcgaccagatatccaagtcgagattgaatccactctgataaaaaaggcagatggaatgtttcgatgggtctcatgccaacttgatgaattaggacaatgtctagggcctgaagacattcaagcggctcttgcaaacctcccgcgcaccttagacgagacttattctcgaatcataacgaccatacggcccgagtacaagcgtcatgcaatgaggatactgcaatttcttaccttctccgaccgccctccaaccgtcgaagaagcagtggattgcattgcagtaaacacaaatgatcaacagttcgaccgcaaaaacagaatgtttgttccaagagagatagcaagatactgttcgagcctcgttgttgtcaccgaacgacaaggcagctataaagaagcggacagagtgacagagatacaacttgctcacttctcagtgaaggaataccttgtttcagaccggctagagcctgttattgcccaagaccttaacgccttcaccgccagatcaacacttgcaaacgtatgcctagtatatctgctccagctagagcataatcatcccattaaagtgagacaaaaattccacttagcatcatatgctgcacaatactggacaaatcatgctacggcagccaacaacaattgtttgctacatgccaagttagtaacagatttctttaccaataaaatggcatataagacctgctatcaactttaccctgtagatacgccttggcatcttgataaaactagggatattccgcctatactttactatgcatcatatacaggccttaccgaggctatttctatgctcctagctgaaggttccgacgtcaatgcccagggcggattctacggcaatgctctgcaggccgcttcgtctggg

SEQ ID NO: 34859 - DNA, 450 bp, Muscodor strobelii
  misc_feature: SGI cDNA ID NO. 572057
  misc_feature: Elevated expression when VOC is produced
  misc_feature: Encodes the peptide sequence at SEQ ID NO 34860
tccgatgttggcctcgtagagattctcacaactctagttaacggtggttgcgtctgcgtgccctcgccctcggaaaagggttcggattacgccggcgccgtcgagcagatgcaggtgaactggacgtacttgacgccggccctgtcccgaaggttgaagccagaggacatgcctagtctgaaagttgtctgcttccggtcgcgataccttgaagtagactgtcgccaacactggctgggcaaagtccagatcctacttgtctacgggccagcgggcgcctgtcctttagggctttccgcggtagaaatatcggacgccgacgccacgccgtgctttccgagaccctttatgggaaacttctggatagtgagcccaggagatcaccaaagattgatgcccatcggggctgctggcgaactcttgattggctcagctgacaagatagattaa

SEQ ID NO: 34860 - protein, 149 aa, Muscodor strobelii
  misc_feature: SGI Peptide ID NO. 572057
  misc_feature (2)..(145): Pfam Id: PF00501 Pfam Desc: AMP-binding enzyme
  misc_feature (2)..(142): NCBI GI: 39942642 Blast Desc: MGG_03401 [Magnaporthe grisea 70-15] gi|145015580|gb|EDK00070.1| MGG_03401 [Magnaporthe grisea 70-15]
  misc_feature (2)..(142): NCBI GI: 171678561 Blast Desc: protein product [Podospora anserina] gi|170937350|emb|CAP62008.1| protein product [Podospora anserina]
  misc_feature (2)..(144): NCBI GI: 261360420 Blast Desc: conserved [Verticillium albo-atrum VaMs.102]
  misc_feature (2)..(142): NCBI GI: 116205980 Blast Desc: CHGG_02283 [Chaetomium globosum CBS 148.51] gi|88182880|gb|EAQ90348.1| CHGG_02283 [Chaetomium globosum CBS 148.51]
  misc_feature (2)..(144): NCBI GI: 256734955 Blast Desc: NECHADRAFT_31971 [Nectria haematococca mpVI 77-13-4]
  misc_feature (2)..(144): NCBI GI: 46138017 Blast Desc: FG10523.1 [Gibberella zeae PH-1]
  misc_feature (2)..(142): NCBI GI: 154278866 Blast Desc: [Ajellomyces capsulatus NAm1] gi|150412189|gb|EDN07576.1| [Ajellomyces capsulatus NAm1]
  misc_feature (2)..(142): NCBI GI: 225554362 Blast Desc: peptide synthetase [Ajellomyces capsulatus G186AR]
  misc_feature (2)..(142): NCBI GI: 240273206 Blast Desc: peptide synthetase [Ajellomyces capsulatus H143]
  misc_feature (2)..(142): NCBI GI: 258572364 Blast Desc: UREG_04461 [Uncinocarpus reesii 1704] gi|237905214|gb|EEP79615.1| UREG_04461 [Uncinocarpus reesii 1704]
  misc_feature: Useful for introducing or modulating the production of volatile compounds
SDVGLVEILTTLVNGGCVCVPSPSEKGSDYAGAVEQMQVNWTYLTPALSRRLKPEDMPSLKVVCFRSRYLEVDCRQHWLGKVQILLVYGPAGACPLGLSAVEISDADATPCFPRPFMGNFWIVSPGDHQRLMPIGAAGELLIGSADKID

SEQ ID NO: 34861 - DNA, 408 bp, Muscodor strobelii
  misc_feature: SGI EST ID NO. CUFF.82949.0
  misc_feature: Variant of the nucleotide sequence at SEQ ID NO 34859
actcatggagctctagcaaccacttgcgtaggccagggccaaattctccgaatcaatacttctagtagagtgatgcaactttcttcacatagctccgatgttggcctcgtagagattctcacaactctagttaacggtggttgcgtctgcgtgccctcgccctcggaaaagggttcggattacgccggcgccgtcgagcagatgcaggtgaactggacgtacttgacgccggccctgtcccgaaggttgaagccagaggacatgcctagtctgaaagttgtctgcttccggtcgcgataccttgaagtagactgtcgccaacactggctgggcaaagtccagatcctacttgtctacgggccagcgggcgcctgtcctttagggctttccgcggtagaaatatcggac

SEQ ID NO: 34862 - DNA, 915 bp, Muscodor strobelii
  misc_feature: SGI cDNA ID NO. 572058
  misc_feature: Elevated expression when VOC is produced
  misc_feature: Encodes the peptide sequence at SEQ ID NO 34863
atgattgcgtccgcaaaccaactcatgaaagacgcttcgatccgagatcatctcgcatcagagaaagaagtcctgtgcttcgaaatggaggcagcgggactcatgaatcatttcccatgccttgtcattcgtggcatatgtgattactccgacacgcacaagaacaagcagtggcaaggttatgcagcaatgacagccgctgcgtacgcgaaagatctgctcctgcgcattccgctgaatcaagtcgaagccgagaggaagatcagccagatttttgtagaaataaagcaggattttaatgatgcaagtcgtaaaatagacacagtaaaaaatgctctagttctcaatcggctcgctgttgccgaaggagcggcttttgattcacacgccgaagaacacaactcggcctgccttcctgacacgagggtcgacctgctgtgcgaaatatcgaggtggacagaggaccctaccggcaaagccctcttctggttgaacggcatggcgggtacggggaaatcaaccatctcacgaaccctggcccgttcgtcgtgcgatcgagaccggctcggtggcagcttcttcttcaaacggggcgagggcgacagaggcgaggtgtccaagttcttttccactatcgccgctcaattgattgggtgcgagccagccctagcgaagtacatacaagatgccatcgagatgggtaaggcgatttgcgacaggccgatgcgggagcagtgcggaaagctcatcttcaaacctctttcggggttacctttacgggatcgaaaaaccgacatcattattattgtcgtcgatgcattagacgaatgcaacaatgaagagaatgtcaagcggctcattcatctactatctcaagccaattccttaaagttagccatagctgcggatgaatag

SEQ ID NO: 34863 - protein, 304 aa, Muscodor strobelii
  misc_feature: SGI Peptide ID NO. 572058
  misc_feature (3)..(297): NCBI GI: 145614851 Blast Desc: MGG_11080 [Magnaporthe grisea 70-15] gi|145021779|gb|EDK05856.1| MGG_11080 [Magnaporthe grisea 70-15]
  misc_feature (3)..(297): NCBI GI: 149209207 Blast Desc: MGCH7_ch7g96 [Magnaporthe grisea 70-15] gi|86196051|gb|EAQ70689.1| MGCH7_ch7g96 [Magnaporthe grisea 70-15]
  misc_feature (1)..(293): NCBI GI: 242801985 Blast Desc: WD-repeat protein, [Talaromyces stipitatus ATCC 10500] gi|218717229|gb|EED16650.1| WD-repeat protein, [Talaromyces stipitatus ATCC 10500]
  misc_feature (1)..(302): NCBI GI: 212547173 Blast Desc: WD-repeat protein, [Penicillium marneffei ATCC 18224] gi|210064395|gb|EEA18492.1| WD-repeat protein, [Penicillium marneffei ATCC 18224]
  misc_feature (1)..(294): NCBI GI: 242804736 Blast Desc: wd40 protein, [Talaromyces stipitatus ATCC 10500] gi|218717781|gb|EED17202.1| wd40 protein, [Talaromyces stipitatus ATCC 10500]
  misc_feature (1)..(293): NCBI GI: 119474353 Blast Desc: WD domain protein [Neosartorya fischeri NRRL 181] gi|119407205|gb|EAW17155.1| WD domain protein [Neosartorya fischeri NRRL 181]
  misc_feature (1)..(295): NCBI GI: 46138235 Blast Desc: FG10632.1 [Gibberella zeae PH-1]
  misc_feature (1)..(293): NCBI GI: 212534082 Blast Desc: Pfs, NACHT and WD domain protein [Penicillium marneffei ATCC 18224] gi|210069596|gb|EEA23686.1| Pfs, NACHT and WD domain protein [Penicillium marneffei ATCC 18224]
  misc_feature (1)..(300): NCBI GI: 256729581 Blast Desc: NECHADRAFT_83562 [Nectria haematococca mpVI 77-13-4]
  misc_feature (1)..(293): NCBI GI: 242771589 Blast Desc: G-protein beta WD-40 repeats containing protein, [Talaromyces stipitatus ATCC 10500] gi|218721492|gb|EED20910.1| G-protein beta WD-40 repeats containing protein, [Talaromyces
  misc_feature: Useful for introducing or modulating the production of volatile compounds
MIASANQLMKDASIRDHLASEKEVLCFEMEAAGLMNHFPCLVIRGICDYSDTHKNKQWQGYAAMTAAAYAKDLLLRIPLNQVEAERKISQIFVEIKQDFNDASRKIDTVKNALVLNRLAVAEGAAFDSHAEEHNSACLPDTRVDLLCEISRWTEDPTGKALFWLNGMAGTGKSTISRTLARSSCDRDRLGGSFFFKRGEGDRGEVSKFFSTIAAQLIGCEPALAKYIQDAIEMGKAICDRPMREQCGKLIFKPLSGLPLRDRKTDIIIIVVDALDECNNEENVKRLIHLLSQANSLKLAIAADE

SEQ ID NO: 34864 - DNA, 5134 bp, Muscodor strobelii
  misc_feature: SGI EST ID NO. CUFF.82981.0
  misc_feature: Variant of the nucleotide sequence at SEQ ID NO 34862
ccatttagcgcattattcgcatctcgaaacaactccggatattagaaatgtccagcactcaattaccgaaactattgaatagagcctacgacgaggagtttgcgttcccgcagttcgcgcgactaccgtgggaactcagaaatcagatatggatatcagcggcacaaacgagacgtctaatccgggctgatctacaacgtttcgacccggacagccctcctggggatgcccaggaagtcattagacatggtctggtatatctagtcatcagggtttccaagtactgcctgtgctgctacgcgtgaattccgagtctcgacttgcggcttttgacttctacagaatgcgattgccttgtttgctgaggcatccgaccgtgaagaactcaaagcccactcctggatttctcttcttcaatcccgagcacgacattttttgggttgattactttcataacgaaagcgctctcgctcgaatattgcagaatatgattagacatgacacactagggatcggactctgcaatttggcaataaccgcttcgaaagactcgcatctaccggtaattgaacgtagagacgattttgagtatgtcgcgcttcaatcgccattcggacccatgcaaactcaagcttccagaaagattcgcgaactttacctagtgcaagagatccaatcatatcgtgtacgggcagtgaaagagcaatacaacgacccggccaggttatgggccaggacgacgccttcagcgccctatcaatatcggaaagcaataactcaggaatatacgccaattgcatctcgaataccgtccttcagcttattgccgcacgatcctcggcctattgcggatgaccttgagcagctctttatcaacgactcgttattacagacacggtcattttcaacccaacaatgaaactaaaggggttgacaagcatttttgatgcggaaccagtccgtcagcaaccgagttggcgtgatgtgtacttagatagactgcggcggctgtgggaaagcgactaccaatcccgacgtgtcaaagtccgtgaatccaaccgggtaagaccccaagctgcgctggcctatacagaacgccggaaacgcttcctgagcaatgctgccgatagtcccgactggcaggatacacaggtctaattatataccagttagccgccgaagaagaagagcaggacgaagcaagccataagaaggtcgtgtcaataagctctaaggctgccaacactagcaaacgagctagatcaatatttatcggagccattaattgaggtcgagcgatatgccagagatcccatagcctggtgggaaaaggttgggttatatcgattactgaggctctcttatatggctgtggactttttcacaatacattcgtcaacggccgaaacggagcgccagtttaatagcgctagagcaatggattcaccaaaaagattacgcactttacggcatgtttttgctgccttttcatgcataaagttacaatgtagtctagggcgggaatatatcaactaagattgccgctcgaacttctcgacaggaccgacgatagttggcttgaaaatctggaccaaaagcttcggcacatgggattatccgattacataggacactttgtctgtcagaccgaaagccgttgatcacccgacacacccgacggatcacccgacgggcgctcacccgttgcccgcccgatgtatgttctgagacaatcgtggcccgcccgattcgcccgatgattatctcacatccacccggacccgggctcgtcgggcaccaaaagtctcgcccgcccgcccgatgaaccactctggatccgctccgttgaaggatacggcgtgatcgtaaagtcgattcgcatcagccttgaattagccgtaattcgcatattgaccttcgcgcagcttgaactccataagagatatgtcgacggggctctccactttggtcaaataatgaggccaaatatcaggccataggtcctccacagatcgactgaagttgactatgcttgctcttcttcgctttagcaagaatcatttagaggttcttaatttgacagtatggaatgaagcgattgtctgggacggtgtcgtttagtgtgatatttgtctccggataagaaggaggagctgggctcggctgagcaacaccaatgagcgagactccccaggctccgacttcctcattgctggctctcgttgtagaaagttcgtgcatgggtgatctactaagttggcctaggatgaacactaactaactcggatgaagcaggacaaaacagaagaagtgagatttgggaatgaaacagacagatgcggatgagagtgattaaagacatgtgtgataatcccggcggcaacaaaacgatgctagctaagtgaaccggaaaatggacaaaagggacagagccatttgttcggatttaaatttggctgtttattgagtcactcctgccacccctgcctaataatcaaacgaaacgctgataagtgcccagtaagaagatgtgactcatctctaacttacaatcgtatcgagcttgtttctaccgcttcaaagcaagacgagatgaatcgctattaatagttacttcgacgctgcagatgactcggtcccatcgagccttgtgcatcggccgtcgcgaacagaagacgaagatgatccaacgatccactatggtatgattgcgtccgcaaaccaactcatgaaagacgcttcgatccgagatcatctcgcatcagagaaagaagtcctgtgcttcgaaatggaggcagcgggactcatgaatcatttcccatgccttgtcattcgtggcatatgtgattactccgacacgcacaagaacaagcagtggcaaggttatgcagcaatgacagccgctgcgtacgcgaaagatctgctcctgcgcattccgctgaatcaagtcgaagccgagaggaagatcagccagatttttgtagaaagattttaatgatgcaagtcgtaaaatagacacagtaaaaaatgctctagttctcaatcggctcgctgttgccgaaggagcggcttttgattcacacgccgaagaacacaactcggcctgccttcctgacacgagggtcgacctgctgtgcgaaatatcgaggtggacagaggaccctaccggcaaagccctcttctggttgaacggcatggcgggtacggggaaatcaaccatctcacgaaccctggcccgttcgtcgtgcgatcgagaccggctcggtggcagcttcttcttcaaacggggcgagggcgacagaggcgaggtgtccaagttcttttccactatcgccgctcaattgattgggtgcgagccagccctagcgaagtacatacaagatgccatcgagatgggtaaggcgatttgcgacaggccgatgcgggagcagtgcggaaagctcatcttcaaacctctttcggggttacctttacgggatcgaaaaaccgacatcattattattgtcgtcgatgcattagacgaatgcaacaatgaagagaatgtcaagcggctcattcatctactatctcaagccaattccttaaagttagccatagctgcggatgaatagagcggccaaaacttagtaggaattaatcaatcaatcaatcatggctgcaggaaagggggggggggaataaacatcttcaatatcgagtacaaagtactcggaatttcacaacgatcaagagcttatacacaacctcaaagggttaatcgaatagcctagtgtgcggcgcatcgccgagtgcgcctaaaaggcacaatggcgaccttatggccctaagcgagggtatggccgaccgaagcacgcaagcatgcgggataccttaacaagtactttcaagacgtcctcacttacgtatatggagatgaagaccaaatgcacatctgttcattagtgaaatcttttgacctcatggcgctatggttactccattcgcattgtaacaccattgaggagctgcactttcgacaattggtctcttcaagaggattctgtatatccgtgataactgacaaatgagaatgccttctcatcggaacttcgcagactgaacagtagccacatcgctgttctgcgtagttgggactgaccctaacacgctaacgccagtactcatcattatatgtcacatatgttgcttcatgattaatcttgaccacaatttctcaactctctcttgatataatcattgtttgatattcggatcctgccttagtttaattaacatcttaacggcctttggaaaccctggacgctttgaagcagaatttattcatcattttcttcgagcctttgcgtaattacatcaacatattcattaatggcagcttcacctgccgcgacaaatttgcagtcgttcaatagagacatcaaaatactatcgactacagatgactggatcccagcaatagccctcctagatacaggatgcgagcaaggaaattggatatccccccgactggtggatcgcctgggaaagactacctcgatttctacccaatttttgtcgcctggactggtcgatgtgaatggtaatccaattgaagcccatggcgttgtcgatcttcactggaagttctaccctcaggcaaatcgtgtccacacatgccaattcttcatcttgcctccttcttcgccctccgacgtcgtgattggttgtgactatattgtggccaaccagtttttgctcgttagcccatctgccatttgccccatggtcaagcacaagaaaaatgacaaagacgaagcagcaaaaaaagaatgcagagagtgagaaccaacaacagaaagcctccctcgaggcgaaaaggaagcaagagaagaaagaagcactcaaaggcgagggttctaagcatgtatcaaagcactagagaacgacttgatactctctgcgtcatattaggatcgtgttattgagtttccactgctcacaaatacccctgaaccgccgcaaatctagttacattagagtagttctgtcaattttattgtcgaggtgccttacgcagttgaagcagagaagatctctatcgtcctagcatttgtgagtagccctaatcccgtcgggaagaggaacgtgaaaagcc

SEQ ID NO: 34865 - DNA, 651 bp, Muscodor strobelii
  misc_feature: SGI cDNA ID NO. 572059
  misc_feature: Encodes the peptide sequence at SEQ ID NO 34866
atgtgcaaagagagagactggttgattactctaatcaccaagatcggagtacccttctacgtcaaagaggtgcaccccggctcatgtgctggtggcagcatcaatccctccacgctaactagcatggccaacctggccgcgacgcgctggaatcagggccgctggaacgaggcccagtcgctcttggtgcaggtgatggagacgagcaagacggtgctaggactcgagcatccggacacgctgattaatacgcgtcatgcaaatattacgatagattggttttgctggtgcgcgttccacgtcacccccagcgaggtccccactttcccttgcaggtctagaggcgaacaagtaatcctcgagtcgggtgaaagtgcacctggctcgtccccattctcgtacaccatcacatggaagctgcattcacgtaaggggagacttgcgaaactaaccgaagacactgtagaagacgttcgactcgcgcctagtgcttattgggaacatgtccttaaatccgaagtggcaagtcttgtagctagcagattgcccgagcccgaatacctccccgatgagacgttggttaccgtttccacttccaaacacggcgagtctcccttccttaagcgctttaatgagtttgcgatcaactga

SEQ ID NO: 34866 - protein, 216 aa, Muscodor strobelii
  misc_feature: SGI Peptide ID NO. 572059
  misc_feature (19)..(93): NCBI GI: 242799395 Blast Desc: kinesin, [Talaromyces stipitatus ATCC 10500] gi|218716714|gb|EED16135.1| kinesin, [Talaromyces stipitatus ATCC 10500]
  misc_feature (32)..(93): NCBI GI: 242773172 Blast Desc: kinesin, [Talaromyces stipitatus ATCC 10500] gi|218721805|gb|EED21223.1| kinesin, [Talaromyces stipitatus ATCC 10500]
  misc_feature (32)..(93): NCBI GI: 242816776 Blast Desc: kinesin light chain, [Talaromyces stipitatus ATCC 10500] gi|218713279|gb|EED12703.1| kinesin light chain, [Talaromyces stipitatus ATCC 10500]
  misc_feature (19)..(89): NCBI GI: 242799395 Blast Desc: kinesin, [Talaromyces stipitatus ATCC 10500] gi|218716714|gb|EED16135.1| kinesin, [Talaromyces stipitatus ATCC 10500]
  misc_feature (32)..(89): NCBI GI: 242773172 Blast Desc: kinesin, [Talaromyces stipitatus ATCC 10500] gi|218721805|gb|EED21223.1| kinesin, [Talaromyces stipitatus ATCC 10500]
  misc_feature (32)..(93): NCBI GI: 242826065 Blast Desc: kinesin light chain, [Talaromyces stipitatus ATCC 10500] gi|218712384|gb|EED11810.1| kinesin light chain, [Talaromyces stipitatus ATCC 10500]
  misc_feature (19)..(81): NCBI GI: 242816129 Blast Desc: kinesin light chain, [Talaromyces stipitatus ATCC 10500] gi|218715048|gb|EED14471.1| kinesin light chain, [Talaromyces stipitatus ATCC 10500]
  misc_feature (21)..(93): NCBI GI: 242811279 Blast Desc: kinesin light chain, [Talaromyces stipitatus ATCC 10500] gi|218714054|gb|EED13477.1| kinesin light chain, [Talaromyces stipitatus ATCC 10500]
  misc_feature (19)..(81): NCBI GI: 242799395 Blast Desc: kinesin, [Talaromyces stipitatus ATCC 10500] gi|218716714|gb|EED16135.1| kinesin, [Talaromyces stipitatus ATCC 10500]
  misc_feature (19)..(89): NCBI GI: 242799395 Blast Desc: kinesin, [Talaromyces stipitatus ATCC 10500] gi|218716714|gb|EED16135.1| kinesin, [Talaromyces stipitatus ATCC 10500]
MCKERDWLITLITKIGVPFYVKEVHPGSCAGGSINPSTLTSMANLAATRWNQGRWNEAQSLLVQVMETSKTVLGLEHPDTLINTRHANITIDWFCWCAFHVTPSEVPTFPCRSRGEQVILESGESAPGSSPFSYTITWKLHSRKGRLAKLTEDTVEDVRLAPSAYWEHVLKSEVASLVASRLPEPEYLPDETLVTVSTSKHGESPFLKRFNEFAIN

SEQ ID NO: 34867 - DNA, 5616 bp, Muscodor strobelii
  misc_feature: SGI EST ID NO. CUFF.83013.1
  misc_feature: Variant of the nucleotide sequence at SEQ ID NO 34865
gcgcggggtaattgaatgatcgaccaaccaaccacattatcactatcctatacatcagctctcacttcagaccgccgaccatgtgcaaagagagagactggttgattactctaatcaccaagatcggagtacccttctacgtcaaagaggtgcaccccggctcatgtgctggtggcagcatcaatccctccacgctaactagcatggccaacctggccgcgacgcgctggaatcagggccgctggaacgaggcccagtcgctcttggtgcaggtgatggagacgagcaagacggtgctaggactcgagcatccggacacgctgattagtatgaacaatcttgcatttacatggcattctcaaagacgcatttccgatgctattcaactcttagaggactgcatgcaaacccgcagtcgagttctggggccggatcatccagacaccctatcgtcgcagtctgccttgaatgactggcgcgggacttcatcgtcagtactttaaaatacgcgtcatgcaaatattacgatagattggttttgctggtgcgcgttccacgtcacaagacgttcgactcgcgcctagtgcttattgggaacatgtccttaaatccgaagtggcaagtcttgtagctagcagattgcccgagcccgaatacctccccgatgagacgttggttaccgtttccacttccaaacacggcgagtctcccttccttaagcgctttaatgagtttgcgatcaactgaacggtcatcgagaattaattacagtcttggagcagcttgggcagcagcctgaaagtgtctatatcgttcatatacaaagagggccgcactccaaacggagatggtaaggcggggcggggcgcgacgaagcattccgccgcactaaacagactcgttgctcagcaagaggcattcgggacgcgtgctgtgtgttgagaggcggccagcatcgtaatagctacaaatttgattcgctgacttatcataggtacctctttcctatttaccacagactgtacctaatcattgcccttgactacctcctcacgtacaacgagagcatgctcctagtggctaccgtgatcttacgtgtagcatgcagaatcgtattgaaaattagtctggcttctgtctggcatttgccacttatagatagctcggccatctgttaccaaaagattctaaacacagagacatattttctacttttctatctatggtgagtgatttttaaggagcagtagactaagtagagtctagaaattgctttgacagactggcatccccaaagcctccggcatgtctggttaggtctgcgctgtggtagtcttgcgattcagcatctccagctctaacgcgtagatgcgcggggcctgggcgatctagctcgtctaagaaccattattgcggaaacaagctgagccgtttgggttgtttttcgggttgcagctatctggattggtgttagttgtggaactaaagctggatggcgtatgctgaatattgtcttggcaagacagactagcagtagtcccgatggtagtcattcagctccgcaaaactacctgcatttgattcgtcgtcgggtgctttcagacgatgatcattttacaatagttgccaaagcggctcttgacgtgtttgcatcgttgttttgatatatgctatatgtacgctattgcacccgccatctaacatgttttctttggcacattttcctcaattcattgttcgtttcacattctcggtgcagtcaggatgatgcatttgaagtcattcgttttgtggctcaacttggctgctgccgctgtaatcgtcaacgtcgaagaactgacgtcgacttctaccaatgcagtcattaccgcacctccacttgctccatcagtaggggacgggcatgaaacattgtacaatgggctggatggagagctcaagcgacgtaatgaggacctcgagcccaggaacgcgtgcagagcagatgattgttgtctgaaggcactcggcagacatagtgcgaccgttttttgtgcaggctatactgcaaaacaagggcaacatactacccgacgttcagtccccagctacctatacatgccgccagaatgcaaccctttccggatctcaactgcttgctcgtgcctgccaacaactacaacatctactaggaccacgaaaaccagaacaactacgaaatgtactacaacttccagcaagacaacaaccaagacaactagcaagacaacaaccaagacaaccagcaagacaactaccaggccaactacaacttcgaccactcggcccacgacgacaaccatgattacaagacccacaattactaccacaactacaactctttccaccactactacgccaactacaactacttctactaccactactataacgcctacaacgaccacgactagtacaacgacgaccacgatcacaacgcccacaacgaccacgaccactaccaccaccacaactcctagtcctaccacaacgacgactaccacgacaactgctgcgccccaacccactatctgtgcccagtgtaccactctcagcggagaagtcggtctgtacataacgagtgatgatggtttgacatgtgtggaatatgatctggctgaactcatctgtggccccgtcgtaacaaccgcaactacaactacgacgacggccccatctacaaccaccactacgaccacgcccacaacaacaacaacaacaacaacaacaacgacgacgacgacgacgatgacgacgacgacaacagctgccccacagcctacctgtgtcgtgccgcctccagatacaaacactcaatgtggtcaagtcgtccaaggcacaggaatctatggataccgctatgccgttgtttgcggggagggctatgccgatacctttgccgatgccggcgtgatctctgcagtcaacttcgacacatgtgtgaacgcttgcgataactccgacacctgtctctcattcgactacgactgcagcaagacagtgagcaactgccgcctcttcaatgctggcaactctccgaacacggcctccagtccagttctttataggggatatgcttccaattaagatttaatagatattaggggatgtttctaggcgtggtgttataatcagcttgttatcgagaagatggataaaaaccatatttgatatagaataaacataatatactcacgaaatgggggcactttgcgctaaccagcaagatcaagacggcattccgttctacgaagagctaagttatctttaaatacaatcctgaccaggttatacgacctagaagtagcaggaatattgaccagttgaattataatactgttccaaaaatatgcaatagtctatgttccatcataccaaacttaaatccaacttgaagccctagttaaaacctctttcgtcttctaactgcagccttccttggtttatgttcctctactaaccctgcgctcattagtctttcgggaacccatgtatcctcgtcttccgaacggcccacccaacgaatacggtacgacttttccatgtcgcttccgggtcgccagcaccttttttaccccgaggccaaatcttgcatcatccttttcaaagctccgaaccatgtcagcattaatgtcttttctatgaacccaccagcagcttctgtcttctttccttctcaaaaggaaaacgctcttgttccatcgctcgagtaaacagtcaacttcgtggtgtttatcggcatccataggctgaggctcttcgagcgcaaggtttagatgagttgctctcttttggatatcttccattgggtacgtcagatcttggttatcgcataaggctggatcaaccagttctatcgggatagctgttggctgtaacgctgtctagatgacaaaggtatcaaatgcagttactgatggtttcgactccccaagtgcagcaccatcagcagcaaggcttgcctagaaatgtcaagatccggtgtcatatgattgtcgctttcaagctccaaaatctcattgtcgggagattttgatgatacactcgtaaccgtgctcaactcggagattgaaaatagactcccaggcgtacttgaagaagtcgaagaatgatcctgttgtctgttctcgttaagatagtattggttcgatgtcttttgaaccgagagcgaatcgatttccgacgacgagctcaacgtaatgtcgcctccaggatcttgtttcgggcacataagtaaatattcgcaactatcactccaaccgagataagcccattcgttgtgagtcgccattaagtgcacgcgccaggtcgagattccattgatggtatgaacaacttcgttaccatcgcgctcacaaataggacattggaaagggtaacggaagttattagtatgacttgaagtaaagtgcctcgttagtccgctggcggcagagcagatataactgcacatgggacatatctggacagacggtacgtggttggttttcaagtgctgaagccagacccctacatcatcaaaagagacgtcagggcagattcggcaagctagaggccatatgagagatccgcttcggacatggcgatttagatggctgattaatcctgcttcaccagcgagctcagaagggcagagacagcagagtcgtgcgggagggttctgttgaggattccagttgggcgtgtgcgctttcccatgcaccctctcaacatgattgctacagtgctgagcactggtgatcaacatctccgctaattctaatgtctgacactcggggcatgagaatggccggctaaacgtcgtctcgtccgtatgcgaggccttataaagtcgcgttagggcgctgcggttcgcgaatgtctttttacacaggagacatcgggacaggccatttctagagacgggactagagtcagaacaaacattctgtatttctttagtttctaactcgtctgatacacttaggggcgtattagtgaggtaggccagaagaaaagagataagcgtctcgaacgacgcgtataactagtagcctgctcttcgacgtgaaaatcgaataagagagagatcctcccaatggccggtttaagcgacgtcttcttctcgtcgggcatgcagattccattagtagaatgcccttgggctcgaaggtagtcggcttgtttaaaatacttggttcggttaagttgtatttgaagctggctaagcgttttaagaagacctttcagctttatacggaggcctgcccgttgcttcgaatcggttgtcgcttttatagtgttccgcagctaaattatgtctttccggttttcgaactgaagttcatattctcggttctgtagaaagttctaggccgccaacaagatcgatgtatccggtgtcccccgggcccagaggtctttcctggcttcccggaggctgtgatgttgatgataggcttcgttggctgtcattcttcccgtcttcgaggagccgtctcctttttggtggcggcgaaattttccgggccatggccgtagtagcagaagtagaaggagcgggaacagaggcacgatggctttttttggtttggggagctagcgtcgcgatgatgacag

SEQ ID NO: 34868 - DNA, 318 bp, Muscodor strobelii
  misc_feature: SGI cDNA ID NO. 572060
  misc_feature: Encodes the peptide sequence at SEQ ID NO 34869
atgatgcatttgaagtcattcgttttgtggctcaacttggctgctgccgctgtaatcgtcaacgtcgaagaactgacgtcgacttctaccaatgcagtcattaccgcacctccacttgctccatcacaagacaacaaccaagacaaccagcaagacaactaccaggccaactacaacttcgaccactcggcccacgacgacaaccatgattacaagacccacaattactaccacaactacaactctttccaccactactacgccaactacaactacttctactaccactactataacgcctacaacgaccacgactag

SEQ ID NO: 34869 - protein, 105 aa, Muscodor strobelii
  misc_feature: SGI Peptide ID NO. 572060
MMHLKSFVLWLNLAAAAVIVNVEELTSTSTNAVITAPPLAPSQDNNQDNQQDNYQANYNFDHSAHDDNHDYKTHNYYHNYNSFHHYYANYNYFYYHYYNAYNDHD

SEQ ID NO: 34870 - DNA, 5616 bp, Muscodor strobelii; identical to SEQ ID NO: 34867
  misc_feature: SGI EST ID NO. CUFF.83013.1
  misc_feature: Variant of the nucleotide sequence at SEQ ID NO 34868

SEQ ID NO: 34871 - DNA, 720 bp, Muscodor strobelii
  misc_feature: SGI cDNA ID NO. 572061
  misc_feature: Encodes the peptide sequence at SEQ ID NO 34872
atgatttcagaggatctcgttcctttcagagaatcagaagaagatactaaggaattcatcgagaaaatgcaagctaggattccacttaccgttcctgccgagggtatgctgcggctaccttatgtctctctcagatttatagatcaagacggtgttcctgataagaatatgcctgaacgggttattcaaagattcctagtgcataaccagcgagatcttttaaatatatggcgcctatatgagcacgatatactgtccgacaatccaccaataggctttgttctattcagtacgggtgtgggcgtctctaaggaagtattgtatatttatcaccagcttcttgatgagttcgcgacgagccatttgaatgagacaggtgccattgaggacgacaccatgttcgactatcaccgtcaattatcctcaacggtagaatcgttgcttccatcatcttatcatcaagatgttcgcaaacagtcgatgttaggcggcaatgatcatagcgatccgaatttacaagatggagacagccaaggagacgtaaatctcgacacagagtctggtttaggcgcaggcacctcaggtattccaggcgctccagacgcttcagacgagccagacgagccagacgcagcctttgacgacgatgttggacacacagatcgtatcgctgataatgagaaagggaatgttgacaccgaagacagtgttttgacgtag

SEQ ID NO: 34872 - protein, 239 aa, Muscodor strobelii
  misc_feature: SGI Peptide ID NO. 572061
MISEDLVPFRESEEDTKEFIEKMQARIPLTVPAEGMLRLPYVSLRFIDQDGVPDKNMPERVIQRFLVHNQRDLLNIWRLYEHDILSDNPPIGFVLFSTGVGVSKEVLYIYHQLLDEFATSHLNETGAIEDDTMFDYHRQLSSTVESLLPSSYHQDVRKQSMLGGNDHSDPNLQDGDSQGDVNLDTESGLGAGTSGIPGAPDASDEPDEPDAAFDDDVGHTDRIADNEKGNVDTEDSVLT

SEQ ID NO: 34873 - DNA, 559 bp, Muscodor strobelii
  misc_feature: SGI EST ID NO. CUFF.82990.0
  misc_feature: Variant of the nucleotide sequence at SEQ ID NO 34871
gttggatttagtctcgtgctcattagaaagagtacgggttccaaacaggcgcaggcggcagtcaaacacatgatgatttcagaggatctcgttcctttcagagaatcagaagaagatactaaggaattcatcgagaaaatgcaagctaggattccacttaccgttcctgccgagggtatgctgcggctaccttatgtctctctcagatttatagatcaagacggtgttcctgataagaatatgcctgaacgggttattcaaagattcctagtgcataaccagcgagatcttttaaatatatggcgcctatatgagcacgatatactgtccgacaatccaccaataggctttgttctattcagtacgggtgtgggcgtctctaaggaagtattgtatatttatcaccagcttcttgatgagttcgcgacggtacgacagcagctcaaggacgtgaaatcggcatcgcttaaagaaacggagtgatgtccatggagtttataccgtagtctttactactttgtattatagagtctcctctatttatttatttttgttttta

SEQ ID NO: 34874 - DNA, 408 bp, Muscodor strobelii
  misc_feature: SGI cDNA ID NO. 572062
  misc_feature: Encodes the peptide sequence at SEQ ID NO 34875
gacggtctggccgcggcgaagaaggagcagacaaaatgggggcgcgtcgcctatgccgatttcatttggttagtacaagagaccacgacggcagcccatgcgcttcttctcgtcatatgcttcggcagacaaaggcttgagaaactcaatttccgccagaaggcaatgcttgtgtctttcatcaaacaacacgaacgtgcgcttgcttgcgcggacttggaagaggaggctgactccctgcgtccacctcgtgccgcacaatacaatgccccgcaagatgaacaggcccgcgatggcctaagcaatctcggtcttacggctcaatcgtccagtggccctgcttcttcctcgttcgtagcattggttacgattgataccttaaaagatagaccgtcgccagcgcagtag

SEQ ID NO: 34875 - protein, 135 aa, Muscodor strobelii
  misc_feature: SGI Peptide ID NO. 572062
DGLAAAKKEQTKWGRVAYADFIWLVQETTTAAHALLLVICFGRQRLEKLNFRQKAMLVSFIKQHERALACADLEEEADSLRPPRAAQYNAPQDEQARDGLSNLGLTAQSSSGPASSSFVALVTIDTLKDRPSPAQ

SEQ ID NO: 34876 - DNA, 962 bp, Muscodor strobelii
  misc_feature: SGI EST ID NO. CUFF.82996.0
  misc_feature: Variant of the nucleotide sequence at SEQ ID NO 34874
gggactaaggtggaatttgatttaggaggtgagatacagcaaaaagcgatcgaaattcagcagggggggttaagcagtcacgaccacgagctgatatcggatcccacgagtcttgcaatcctcgtcattagggacggtctggccgcggcgaagaaggagcagacaaaatgggggcgcgtcgcctatgccgatttcatttggttagtacaagagaccacgacggcagcccatgcgcttcttctcgtcatatgcttcggcagacaaaggcttgagaaactcaatttccgccagaaggcaatgcttgtgtctttcatcaaacaacacgaacgtgcgcttgcttgcgcggacttggaagaggaggctgactccctgcgtccacctcgtgccgcacaatacaatgccccgcaagatgaacaggcccgcgatggcctaagcaatctcggtcttacggctcaatcgtccagtggccctgcttcttcctcgttcgtagcattggttacgattgataccttaaaagatagaccgtcgccagcgcagtagttgcataattgctgccctatctaggacctgcgatgtaacgccaaaacatgactctgtccgggccagtcactgctagaacggacctggtgattcgaggtgcagcctccgtggttcagacggggcgcgaatggaggcttgcaagggttctgccagggactcatggcagaattcttagtacagcctgcgagtctattcggtactgtatatactgccaatgcgatttcatataactactcaagtaacatgtgccaagggttcgtgttccatagacttcccacggccaggatgccatccgtgccgcttgacgctgttgaactcggcagatcccggctgcactgagtttatttgacaaacaatggctcagcatataataacatgttaccttgtcacgtagcgccgggaaagcttccgctttgcaaatg

SEQ ID NO: 34877 - DNA, 1104 bp, Muscodor strobelii
  misc_feature: SGI cDNA ID NO. 572063
  misc_feature: Elevated expression when VOC is produced
  misc_feature: Encodes the peptide sequence at SEQ ID NO 34878
atgctagacccgcctctccacgcaatttgggtggactttactgcttatactatggccttgaaacaacatcacctcactgcgcgagctggaattcagtacggtgatggctcgcgccagttcgccgtatatggcgcctcagtcaccttggtcgcggtcatcgccgtgataatatcggtgcgcatgtacgtccgaattcgattgatccaagcggtcggcgtcgatgatgttctaatgttgctgggtactgctgcagcatttgggctttcggtcgcgagcttagtagctgcgtattacggcgttggactacatcttcccgacatccccctcgaggactacgcaccgatgctccaagccatatactctacccgtctcctatacgtcaccgccatgctcttcgtcaaacaaagcctcttggtgttctacctacgcctggatagccacggtgccatgcgatgggtagtttacggtctcatgttcgcccacgtcggcttcaatattgcaagcttcgtcatactagctgcctcatgcgtaccggcttctctgttctgggatacaacaggcactgttgtgggcaaatgtctcgaccctgtttcgcagcaggccttctacgatgccaatggcgctctcaatatcattttcgacctagcaatctacctcgccccgatgcccatgctagctaagctccagataaacagacgccagaagttagttttgttcggcgtcttctctcttggatttttgtctgttgctgctggcggtgtcaggttggggtacgtccgcctcctagctaacgagaaggacatgtacttctacctggccgattctctcatctggtgccagatcgagatctatgtcgcaatcttttgcggttctgcacccgccttaaaggttctgctcaaagactggttcccacgcgtatttggctcgtcggccagaaatccacccctctacccgatcgccaggaattcgagatacggcaccatcggtgatcagagtggcggcggagggagcaatttctcccccaacggttatgggctgtcaagcgacagcaaggaaaacgggattgtcaagaatatagagttcataatggaagtggaagaatag

SEQ ID NO: 34878 - protein, 367 aa, Muscodor strobelii
  misc_feature: SGI Peptide ID NO. 572063
  misc_feature (38)..(324): NCBI GI: 145253551 Blast Desc: An17g00590 [Aspergillus niger] gi|134083856|emb|CAK42987.1| protein product [Aspergillus niger]
  misc_feature (35)..(327): NCBI GI: 255941498 Blast Desc: Pc16g12190 [Penicillium chrysogenum Wisconsin 54-1255] gi|211586141|emb|CAP93889.1| Pc16g12190 [Penicillium chrysogenum Wisconsin 54-1255]
  misc_feature (105)..(310): NCBI GI: 189201465 Blast Desc: [Pyrenophora tritici-repentis Pt-1C-BFP] gi|187984168|gb|EDU49656.1| [Pyrenophora tritici-repentis Pt-1C-BFP]
  misc_feature (41)..(340): NCBI GI: 115383676 Blast Desc: conserved [Aspergillus terreus NIH2624] gi|114196077|gb|EAU37777.1| conserved [Aspergillus terreus NIH2624]
  misc_feature (37)..(329): NCBI GI: 145242916 Blast Desc: An11g00060 [Aspergillus niger] gi|134078677|emb|CAK48239.1| protein product [Aspergillus niger]
  misc_feature (44)..(340): NCBI GI: 67901574 Blast Desc: AN7774.2 [Aspergillus nidulans FGSC A4] gi|40742372|gb|EAA61562.1| AN7774.2 [Aspergillus nidulans FGSC A4] gi|259484126|tpe|CBF80080.1| TPA: integral membrane protein
  misc_feature (42)..(313): NCBI GI: 145241986 Blast Desc: An09g03230 [Aspergillus niger] gi|134078182|emb|CAK40262.1| protein product [Aspergillus niger]
  misc_feature (36)..(315): NCBI GI: 119501204 Blast Desc: MFS transporter, [Neosartorya fischeri NRRL 181] gi|119415524|gb|EAW25462.1| MFS transporter, [Neosartorya fischeri NRRL 181]
  misc_feature (35)..(336): NCBI GI: 239612727 Blast Desc: conserved [Ajellomyces dermatitidis ER-3]
  misc_feature (37)..(326): NCBI GI: 255932455 Blast Desc: Pc12g09570 [Penicillium chrysogenum Wisconsin 54-1255] gi|211582403|emb|CAP80584.1| Pc12g09570 [Penicillium chrysogenum Wisconsin 54-1255]
  misc_feature: Useful for introducing or modulating the production of volatile compounds
MLDPPLHAIWVDFTAYTMALKQHHLTARAGIQYGDGSRQFAVYGASVTLVAVIAVIISVRMYVRIRLIQAVGVDDVLMLLGTAAAFGLSVASLVAAYYGVGLHLPDIPLEDYAPMLQAIYSTRLLYVTAMLFVKQSLLVFYLRLDSHGAMRWVVYGLMFAHVGFNIASFVILAASCVPASLFWDTTGTVVGKCLDPVSQQAFYDANGALNIIFDLAIYLAPMPMLAKLQINRRQKLVLFGVFSLGFLSVAAGGVRLGYVRLLANEKDMYFYLADSLIWCQIEIYVAIFCGSAPALKVLLKDWFPRVFGSSARNPPLYPIARNSRYGTIGDQSGGGGSNFSPNGYGLSSDSKENGIVKNIEFIMEVEE

SEQ ID NO: 34879 - DNA, 1792 bp, Muscodor strobelii
  misc_feature: SGI EST ID NO. CUFF.83001.0
  misc_feature: Variant of the nucleotide sequence at SEQ ID NO 34877
gaagaacgtcgagattcctcgagttgtgtatgtaggtcaaactaaggcaaatagacagtgagatgaatctaagcgatcagtgtaatgaattctaaatcccttttcaaggcttactatcggcttgatgcttgcaggggatcgcggggacgaaccagagcgaacttttgtttcggcgttatgcagttataacacgaacctgatggttcgtaccaacttcctagggttgcgatcaacaatctaatatatcgacttgtagatactaaaaccgagtcaagacgggagtcaaaattctactggtgatatacgacatacaaagaggcaatccaggttccagactgctccagttcgaccttcaatgctagacccgcctctccacgcaatttgggtggactttactgcttatactatggccttgaaacaacatcacctcactgcgcgagctggaattcagtacggtgatggctcgcgccagttcgccgtatatggcgcctcagtcaccttggtcgcggtcatcgccgtgataatatcggtgcgcatgtacgtccgaattcgattgatccaagcggtcggcgtcgatgatgttctaatgttgctgggtactgctgcagcatttgggctttcggtcgcgagcttagtagctgcgtattacggcgttggactacatcttcccgacatccccctcgaggactacgcaccgatgctccaagccatatactctacccgtctcctatacgtcaccgccatgctcttcgtcaaacaaagcctcttggtgttctacctacgcctggatagccacggtgccatgcgatgggtagtttacggtctcatgttcgcccacgtcggcttcaatattgcaagcttcgtcatactagctgcctcatgcgtaccggcttctctgttctgggatacaacaggcactgttgtgggcaaatgtctcgaccctgtttcgcagcaggccttctacgatgccaatggcgctctcaatatcattttcgacctagcaatctacctcgccccgatgcccatgctagctaagctccagataaacagacgccagaagttagttttgttcggcgtcttctctcttggatttttgtctgttgctgctggcggtgtcaggttggggtacgtccgcctcctagctaacgagaaggacatgtacttctacctggccgattctctcatctggtgccagatcgagatctatgtcgcaatcttttgcggttctgcacccgccttaaaggttctgctcaaagactggttcccacgcgtatttggctcgtcggccagaaatccacccctctacccgatcgccaggaattcgagatacggcaccatcggtgatcagagtggcggcggagggagcaatttctcccccaacggttatgggctgtcaagcgacagcaaggaaaacgggattgtcaagaatatagagttcataatggaagtggaagaataggtttctgaaccaatttcactgtcctgtttggtccgacaggccgtgcactgagaagcgaacccccccttttttttttgtcattacacgcatggaatatacatggttgcaataactagaggtgggaggaaaagccttgagagtttgctactgcttaagacttggaaattttcctctggtgttgtcaaaattaggtaactccattagggtgtgccatccgggcaatcctctaccagatattagttcagaggggtttgtgttctctttccctgtattttagtttataattactccttaagcactcagaatagtagttctagcctgatttcctccgaa

SEQ ID NO: 34880 - DNA, 444 bp, Muscodor strobelii
  misc_feature: SGI cDNA ID NO. 572064
  misc_feature: Elevated expression when VOC is produced
  misc_feature: Encodes the peptide sequence at SEQ ID NO 34881
ttcgacgtatctactctccacggccacatggataagcaaagcagtacccaccccaaaggccaaaaggacaaggccaggaagcgcggcacctctctccagaggaaggcggtggagctaggccagaaagcaaatgtcttcgcggctgtggtctactggaatccgacccatcaacaattcgaggctgcggtgcatattcctaagggccagacgctgcccagtggcgaagaccttcggagagttctggcgtcttgttctcaaaagactcgatcgaatccgccaagacgagctcgaaaggacgtcaagtgtcgcctagccctggctggcaccgaaaatgcctctgctagctccagtcctcaacctgaatggcacctcggcagccctgcgactgctggacacgacagcgattgcgggcacgtcgacagcaacgttggcgacgacaccatt

SEQ ID NO: 34881 - protein, 148 aa, Muscodor strobelii
  misc_feature: SGI Peptide ID NO. 572064
  misc_feature: Useful for introducing or modulating the production of volatile compounds
FDVSTLHGHMDKQSSTHPKGQKDKARKRGTSLQRKAVELGQKANVFAAVVYWNPTHQQFEAAVHIPKGQTLPSGEDLRRVLASCSQKTRSNPPRRARKDVKCRLALAGTENASASSSPQPEWHLGSPATAGHDSDCGHVDSNVGDDTI

SEQ ID NO: 34882 - DNA, 597 bp, Muscodor strobelii
  misc_feature: SGI EST ID NO. CUFF.83116.1
  misc_feature: Variant of the nucleotide sequence at SEQ ID NO 34880
ggaaacctttctggccgtatggacgtctatattcaggctctgcacttagttcgacgtatctactctccacggccacatggataagcaaagcagtacccaccccaaaggccaaaaggacaaggccaggaagcgcggcacctctctccagaggaaggcggtggagctaggccagaaagcaaatgtcttcgcggctgtggtctactggaatccgacccatcaacaattcgaggctgcggtgcatattcctaagggccagacgctgcccagtggcgaagaccttcggagagttctggcgtcttgttctcaaaagactcgatcgaatccgccaagacgagctcgaaaggacgtcaagtgtcgcctagccctggctggcaccgaaaatgcctctgctagctccagtcctcaacctgaatggcacctcggcagccctgcgactgctggacacgacagcgattgcgggcacgtcgacagcaacgttggcgacgacaccattgtgctgcacaaaagccaaacaacgacgacgacgctattccaaccggacgatcgtattattggcagtgaacaagcaacagatggacactccgacgagagacgaac

SEQ ID NO: 34883 - DNA, 1167 bp, Muscodor strobelii
  misc_feature: SGI cDNA ID NO. 572065
  misc_feature: Encodes the peptide sequence at SEQ ID NO 34884
atggacacttcctccgaatcgaggtcacctcaggttccgcctctgccaccgatctctcgcaggaagcaggccgtcgtccttttgtctgcgttcgctactatagcacttaccattggttacaaccaatgttttggtgtcttccaagaatactatctctccgagagtcaggatattctgacgcccgcccctgctacacaaagcaatcccccaacagcattgctaagcttcgtgggcaccttgtgctacggtctaacatggggaggcggtatcctagtaaacccggtgatatcacggattgaacatggtacgtgggctccgacaacgccttcgacgcgattatggcgtcgcaaggcgctgcgtctcttagcgccaagaacaatcacaattgttggtgtgcttatgatgtctgccggatttgctttggcgtcgttgagtacctcaatatggcatttgctacttacacaaggctttttggctgggcttggaatgtcattgttgtacttcccgcttttggctcccgcgcccgagtattttacgacgcatcgagcgacggcaatgggctttattctcgcagggggaggagcaggaggcttaatcttctctcctctcatcagaactctgcttagttctgttggcgggcgttggacacttcgaattgtcgccttcttttatatagtcgccgggctgccaattgcttgggcggtaccgcgcagtcgctttgctggtatctcaagcgcagatggccccgagagacgtgacacccatgtctcacgctccttggcagcacgccccgcattcatcttctcggctgtggctgcattcttacaggcagctggcgctcagcttccattggctttcattccctcgtacaccgtcgtgctcggtcagagtgcatctgaaggcgcaaatctcttagctgccagcaatgctatcaacgctgtgtcgcgagtcttaacaggctatgcaggcgatcgcctcggtcgccaaaaccttgttgtcctcactctgcttctatccggatctagcgttttcgctttctggctatctagcgttctagccacgtctacatcattctccctgtggctggctttcattgtattctatagcttctctgcgggtggatactatgctttattcccagctctgatcgccgaagtgttcggcata

SEQ ID NO: 34884 - protein, 389 aa, Muscodor strobelii
  misc_feature: SGI Peptide ID NO. 572065
  misc_feature (30)..(389): Pfam Id: PF07690 Pfam Desc: Major Facilitator Superfamily
  misc_feature (124)..(388): Pfam Id: PF07690 Pfam Desc: Major Facilitator Superfamily
  misc_feature (15)..(389): NCBI GI: 240111655 Blast Desc: Major Facilitator Superfamily protein [Coccidioides posadasii C735 delta SOWgp]
  misc_feature (1)..(389): NCBI GI: 154322883 Blast Desc: BC1G_00784 [Botryotinia fuckeliana B05.10] gi|150848118|gb|EDN23311.1| BC1G_00784 [Botryotinia fuckeliana B05.10]
  misc_feature (36)..(389): NCBI GI: 261205070 Blast Desc: monocarboxylate transporter [Ajellomyces dermatitidis SLH14081] gi|239592331|gb|EEQ74912.1| monocarboxylate transporter [Ajellomyces dermatitidis SLH14081] gi|239611513|gb|EEQ88500.1|
  misc_feature (2)..(342): NCBI GI: 238842989 Blast Desc: monocarboxylate transporter [Microsporum canis CBS 113480]
  misc_feature (15)..(316): NCBI GI: 119172591 Blast Desc: CIMG_09909 [Coccidioides immitis RS]
  misc_feature (2)..(389): NCBI GI: 145248910 Blast Desc: An14g01680 [Aspergillus niger] gi|134081467|emb|CAK46480.1| protein product [Aspergillus niger]
  misc_feature (18)..(388): NCBI GI: 256720659 Blast Desc: NECHADRAFT_96655 [Nectria haematococca mpVI 77-13-4]
  misc_feature (18)..(388): NCBI GI: 212546737 Blast Desc: MFS monocarboxylate transporter, [Penicillium marneffei ATCC 18224] gi|210065042|gb|EEA19137.1| MFS monocarboxylate transporter, [Penicillium marneffei ATCC 18224]
  misc_feature (2)..(389): NCBI GI: 119473521 Blast Desc: monocarboxylate transporter [Neosartorya fischeri NRRL 181] gi|119406789|gb|EAW16739.1| monocarboxylate transporter [Neosartorya fischeri NRRL 181]
  misc_feature (17)..(389): NCBI GI: 255946383 Blast Desc: Pc20g14840 [Penicillium chrysogenum Wisconsin 54-1255] gi|211588694|emb|CAP86813.1| Pc20g14840 [Penicillium chrysogenum Wisconsin 54-1255]
MDTSSESRSPQVPPLPPISRRKQAVVLLSAFATIALTIGYNQCFGVFQEYYLSESQDILTPAPATQSNPPTALLSFVGTLCYGLTWGGGILVNPVISRIEHGTWAPTTPSTRLWRRKALRLLAPRTITIVGVLMMSAGFALASLSTSIWHLLLTQGFLAGLGMSLLYFPLLAPAPEYFTTHRATAMGFILAGGGAGGLIFSPLIRTLLSSVGGRWTLRIVAFFYIVAGLPIAWAVPRSRFAGISSADGPERRDTHVSRSLAARPAFIFSAVAAFLQAAGAQLPLAFIPSYTVVLGQSASEGANLLAASNAINAVSRVLTGYAGDRLGRQNLVVLTLLLSGSSVFAFWLSSVLATSTSFSLWLAFIVFYSFSAGGYYALFPALIAEVFGI

SEQ ID NO: 34885 - DNA, 1400 bp, Muscodor strobelii
  misc_feature: SGI EST ID NO. CUFF.83026.0
  misc_feature: Variant of the nucleotide sequence at SEQ ID NO 34883
caggaaaactgttctcgtcatacgccggtttattttcgggcccactaagctagattctagggttgatgtcagcatgaagatgccctgcatcgctctattgatcatctcacatatccattccgttcatttgatgataacttaacatttccgctgcctggttctttctcgttttttatttctcttagcatagagcacaatggtaacacagaccgagttgcagagttctccgacccgacttgccggagatatggacacttcctccgaatcgaggtcacctcaggttccgcctctgccaccgatctctcgcaggaagcaggccgtcgtccttttgtctgcgttcgctactatagcacttaccattggttacaaccaatgttttggtgtcttccaagaatactatctctccgagagtcaggatattctgacgcccgcccctgctacacaaagcaatcccccaacagcattgctaagcttcgtgggcaccttgtgctacggtctaacatggggaggcggtatcctagtaaacccggtgatatcacggattgaacatggtacgtgggctccgacaacgccttcgacgcgattatggcgtcgcaaggcgctgcgtctcttagcgccaagaacaatcacaattgttggtgtgcttatgatgtctgccggatttgctttggcgtcgttgagtacctcaatatggcatttgctacttacacaaggctttttggctgggcttggaatgtcattgttgtacttcccgcttttggctcccgcgcccgagtattttacgacgcatcgagcgacggcaatgggctttattctcgcagggggaggagcaggaggcttaatcttctctcctctcatcagaactctgcttagttctgttggcgggcgttggacacttcgaattgtcgccttcttttatatagtcgccgggctgccaattgcttgggcggtaccgcgcagtcgctttgctggtatctcaagcgcagatggccccgagagacgtgacacccatgtctcacgctccttggcagcacgccccgcattcatcttctcggctgtggctgcattcttacaggcagctggcgctcagcttccattggctttcattccctcgtacaccgtcgtgctcggtcagagtgcatctgaaggcgcaaatctcttagctgccagcaatgctatcaacgctgtgtcgcgagtcttaacaggctatgcaggcgatcgcctcggtcgccaaaaccttgttgtcctcactctgcttctatccggatctagcgttttcgctttctggctatctagcgttctagccacgtctacatcattctccctgtggctggctttcattgtattctatagcttctctgcgggtggatactatgctttattcccagctctgatcgccg

SEQ ID NO: 34886 - DNA, 924 bp, Muscodor strobelii
  misc_feature: SGI cDNA ID NO. 572066
  misc_feature: Encodes the peptide sequence at SEQ ID NO 34887
atgggctggatatatcgctgcaggtgtgttggtcttgtccgtgtgacagttgataacagccaaaaggtttgcgtcgttgctattgcgggcaccccaccaaactcagctgcagatatctatcaagatatcactgtctccaaagtcgtcgatttcgatgcttgggtcaaactgtggtccccagctgggattccggagccacatcagtcgacaccgactaaggagagtgcctccacgcttccattctgctctaaaggcacatgcattggcgtttggaatgtaatgaacaattctagcacgcgatacggccaagtcatccgcatcgaccaatatctgcggagcttagacccgagctataccatcgtcgttactggccacagcctaggcggagctctggcgccattggttgccttaggcttggctaagtcgggactaattaataccaacaacttgaagaccttaccatctgctggcgtctctcctggaaacgagatattcgctgccgaatatgcctcgaccttcccaaaggaccctgaatcggccaaagattacaaagtatacaacatggactactataatgaattcgatattgtccctcaggcttggtctctacactcagagcacgacaggaatatagacattattctagacaagattattcatattagtgacttcggactcggacttgaggccactggcactgtatttgcagctaagttggcatcacactattcccgaatacggtatactcctcttccagggcagagattcaccggtccagcaccacaagatccgattcatgataaggatgaactggccaatgtgattggcaacgggcacgtgttttcctactgggacgaaatagggattactgatttcatgaagaatttcgacgaaacgatttcgaagcggatggaggcccaatga

SEQ ID NO: 34887 - protein, 307 aa, Muscodor strobelii
  misc_feature: SGI Peptide ID NO. 572066
  misc_feature (116)..(144): Pfam Id: PF01764 Pfam Desc: Lipase (class 3)
  misc_feature (9)..(258): NCBI GI: 285017224 Blast Desc: XALc_0412 [Xanthomonas albilineans] gi|283472442|emb|CBA14947.1| [Xanthomonas albilineans]
  misc_feature (23)..(260): NCBI GI: 227366915 Blast Desc: lipase [Chryseobacterium gleum ATCC 35910] gi|227110399|gb|EEI45361.1| lipase [Chryseobacterium gleum ATCC 35910]
  misc_feature (18)..(201): NCBI GI: 163755395 Blast Desc: KAOT1_08243 [Kordia algicida OT-1] gi|161324815|gb|EDP96144.1| KAOT1_08243 [Kordia algicida OT-1]
  misc_feature (12)..(304): NCBI GI: 108761745 Blast Desc: MXAN_3434 [Myxococcus xanthus DK 1622] gi|108465625|gb|ABF90810.1| MXAN_3434 [Myxococcus xanthus DK 1622]
  misc_feature (69)..(202): NCBI GI: 32188218 Blast Desc: [Sphingomonas elodea]
  misc_feature (12)..(283): NCBI GI: 115371870 Blast Desc: conserved [Stigmatella aurantiaca DW4/3-1] gi|115371105|gb|EAU70027.1| conserved [Stigmatella aurantiaca DW4/3-1]
  misc_feature (115)..(290): NCBI GI: 37525468 Blast Desc: plu1517 [Photorhabdus luminescens subsp. laumondii TTO1] gi|36784896|emb|CAE13810.1| protein product [Photorhabdus luminescens subsp. laumondii TTO1]
  misc_feature (120)..(290): NCBI GI: 253990393 Blast Desc: similar to lipase/esterase [Photorhabdus asymbiotica] gi|253781843|emb|CAQ85006.1| similar to lipase/esterase [Photorhabdus asymbiotica]
  misc_feature (25)..(204): NCBI GI: 166365362 Blast Desc: lipase [Microcystis aeruginosa NIES-843] gi|166087735|dbj|BAG02443.1| lipase [Microcystis aeruginosa NIES-843]
  misc_feature (120)..(286): NCBI GI: 37525469 Blast Desc: plu1518 [Photorhabdus luminescens subsp. laumondii TTO1] gi|36784897|emb|CAE13811.1| protein product [Photorhabdus luminescens subsp. laumondii TTO1]
MGWIYRCRCVGLVRVTVDNSQKVCVVAIAGTPPNSAADIYQDITVSKVVDFDAWVKLWSPAGIPEPHQSTPTKESASTLPFCSKGTCIGVWNVMNNSSTRYGQVIRIDQYLRSLDPSYTIVVTGHSLGGALAPLVALGLAKSGLINTNNLKTLPSAGVSPGNEIFAAEYASTFPKDPESAKDYKVYNMDYYNEFDIVPQAWSLHSEHDRNIDIILDKIIHISDFGLGLEATGTVFAAKLASHYSRIRYTPLPGQRFTGPAPQDPIHDKDELANVIGNGHVFSYWDEIGITDFMKNFDETISKRMEAQ

SEQ ID NO: 34888 - DNA, 279 bp, Muscodor strobelii
  misc_feature: SGI EST ID NO. CUFF.83032.0
  misc_feature: Variant of the nucleotide sequence at SEQ ID NO 34886
ctagcacgcgatacggccaagtcatccgcatcgaccaatatctgcggagcttagacccgagctataccatcgtcgttactggccacagcctaggcggagctctggcgccattggttgccttaggcttggctaagtcgggactaattaataccaacaacttgaagaccttaccatctgctggcgtctctcctggaaacgagatattcgctgccgaatatgcctcgaccttcccaaaggaccctgaatcggccaaagattacaaagtatacaacatggact

SEQ ID NO: 34889 - DNA, 1608 bp, Muscodor strobelii
  misc_feature: SGI cDNA ID NO. 572067
  misc_feature: Encodes the peptide sequence at SEQ ID NO 34890
atggcacccagaaagaggacgagatctagtaacgcgggtggggtgaagaagcagaagactgctcaaggtgccaagccttcgcagccctcgattccagtcgatgagggtttcaaagagggtggagatgtgcacgtctacatagacgataatgacacaccttatgatgcttccctgaacctaagcaacgtctcaggcaataacaataagttctacatgctgcaattgctcgccgacgacaagaaagggaaatactttgcgcatgcccgctggggacgggtcggtgagacgggtcaagtgaagactgtgggctttgatgacctagaatctgcggagaaagaatacgacaagaggttcaagagcaagaccggtctcaagtgggacgaaagggccgacgaccccaaagataataagtatacctttgtcgagcgatcctatgaagaggatggagatgccgccagtgcatctgatgaaggttacggtagtagcagctctgtcaagagtgaattggacatatctacgcagagacttatggagctcatcttcaatgaaaaccacttcaactctgtgctggaagaaattggatacaataaggataagatgcccctaggaaagctcgggaaggcaagtttgcagaagggattcgagcagttgaaagagctgtcgagtctcatcaagcacccttctttggcgaagaacaaatacaacaaagatcgtgaagaggtcatcgaggaatggaccaacaagtactattccaccatccctcatgtgtttggtcgcgaccgtcctcccctgattgataacgatgacatcttacgtcgcgaagttgcgatgcttgacaccctcactgacatggaagttgccaataccatcatgaactcgacatctaagtcgaaggatgcagcgtcagtgcacaaactcgatgcgcacttcaatgatctgaagctcaaagaacttgcaccacttgaacacaagtcaaatgagtatcaagaaattcagaaatatctcatcgattcttctgcggaggcacacggtcggaagtatcgcctccaggatattttccgggtcgagagaccgggagagaaggagcgattcgagaagagcaccaagaccattaaggactccaagagattgctgctctggcatgggtcccgaaccaccaattttggcggtatcctgtcgcaaggattaagaatcgcgccacctgaggcgccagtcaatggctatgccttcggtaagggcgtgtacctcgctgatctgtcttccaagtctgccaactattgtgtgtcatcggccagtggaggcgttggcatattgctccttgtagaagctgaactctcaaacccgatgtacgaaattcacacgggagatagcggagctgctgaggctgcgaaaaagaacaactgcatcgcgacaaagggcattggtcgtatgggtcctgaaaagtggaaagacgcaagctgccttaatgaccagttgaaaggcgtgatgatgcctgatggaaagcccggcaacacaaaggaccacaatggttacttacagtataatgagtacatttcgtacaacgttgagcatctgaagatccgctacctgttgaaggttgctatgtaa

SEQ ID NO: 34890 - protein, 535 aa, Muscodor strobelii
  misc_feature: SGI Peptide ID NO. 572067
  misc_feature (313)..(535): Pfam Id: PF00644 Pfam Desc: Poly(ADP-ribose) polymerase catalytic domain
  misc_feature (166)..(311): Pfam Id: PF02877 Pfam Desc: Poly(ADP-ribose) polymerase, regulatory domain
  misc_feature (49)..(133): Pfam Id: PF05406 Pfam Desc: WGR domain
  misc_feature (7)..(531): NCBI GI: 226278251 Blast Desc: poly polymerase family [Paracoccidioides brasiliensis Pb01]
  misc_feature (16)..(535): NCBI GI: 225562013 Blast Desc: polymerase [Ajellomyces capsulatus G186AR]
  misc_feature (7)..(531): NCBI GI: 225679359 Blast Desc: poly(ADP)-ribose polymerase PARP [Paracoccidioides brasiliensis Pb03]
  misc_feature (25)..(535): NCBI GI: 67525343 Blast Desc: AN3129.2 [Aspergillus nidulans FGSC A4] gi|33621227|gb|AAQ23182.1| poly(ADP)-ribose polymerase [Emericella nidulans] gi|40744524|gb|EAA63700.1| AN3129.2 FGSC ;
  misc_feature (16)..(535): NCBI GI: 238487478 Blast Desc: poly(ADP)-ribose polymerase PARP, [Aspergillus flavus NRRL3357] gi|220699856|gb|EED56195.1| poly(ADP)-ribose polymerase PARP, [Aspergillus flavus NRRL3357]
  misc_feature (16)..(535): NCBI GI: 169770147 Blast Desc: [Aspergillus oryzae RIB40] gi|83767402|dbj|BAE57541.1| protein product [Aspergillus oryzae]
  misc_feature (25)..(535): NCBI GI: 34495245 Blast Desc: poly(ADP)-ribose polymerase [Emericella nidulans]
  misc_feature (2)..(535): NCBI GI: 145254271 Blast Desc: An18g01170 [Aspergillus niger] gi|134084160|emb|CAK47193.1| protein product [Aspergillus niger]
  misc_feature (15)..(535): NCBI GI: 154283793 Blast Desc: HCAG_02863 [Ajellomyces capsulatus NAm1] gi|150410872|gb|EDN06260.1| HCAG_02863 [Ajellomyces capsulatus NAm1]
  misc_feature (16)..(535): NCBI GI: 70998360 Blast Desc: poly(ADP)-ribose polymerase PARP [Aspergillus fumigatus Af293] gi|66851538|gb|EAL91864.1| poly(ADP)-ribose polymerase PARP, [Aspergillus fumigatus Af293] poly(ADP)-ribose
  misc_feature (51)..(533): SWISSPROT Homolog: EC 2.4.2.30 NAD(+) ADP-ribosyltransferase
MAPRKRTRSSNAGGVKKQKTAQGAKPSQPSIPVDEGFKEGGDVHVYIDDNDTPYDASLNLSNVSGNNNKFYMLQLLADDKKGKYFAHARWGRVGETGQVKTVGFDDLESAEKEYDKRFKSKTGLKWDERADDPKDNKYTFVERSYEEDGDAASASDEGYGSSSSVKSELDISTQRLMELIFNENHFNSVLEEIGYNKDKMPLGKLGKASLQKGFEQLKELSSLIKHPSLAKNKYNKDREEVIEEWTNKYYSTIPHVFGRDRPPLIDNDDILRREVAMLDTLTDMEVANTIMNSTSKSKDAASVHKLDAHFNDLKLKELAPLEHKSNEYQEIQKYLIDSSAEAHGRKYRLQDIFRVERPGEKERFEKSTKTIKDSKRLLLWHGSRTTNFGGILSQGLRIAPPEAPVNGYAFGKGVYLADLSSKSANYCVSSASGGVGILLLVEAELSNPMYEIHTGDSGAAEAAKKNNCIATKGIGRMGPEKWKDASCLNDQLKGVMMPDGKPGNTKDHNGYLQYNEYISYNVEHLKIRYLLKVAM

SEQ ID NO: 34891 - DNA, 1797 bp, Muscodor strobelii
  misc_feature: SGI EST ID NO. CUFF.83074.0
  misc_feature: Variant of the nucleotide sequence at SEQ ID NO 34889
cggtagtagcagctctgtcaagagtgaattggacatatctacgcagagacttatggagctcatcttcaatgaaaaccacttcaactctgtgctggaagaaattggatacaataaggataagatgcccctaggaaagctcgggaaggcaagtttgcagaagggattcgagcagttgaaagagctgtcgagtctcatcaagcacccttctttggcgaagaacaaatacaacaaagatcgtgaagaggtcatcgaggaatggaccaacaagtactattccaccatccctcatgtgtttggtcgcgaccgtcctcccctgattgataacgatgacatcttacgtcgcgaagttgcgatgcttgacaccctcactgacatggaagttgccaataccatcatgaactcgacatctaagtcgaaggatgcagcgtcagtgcacaaactcgatgcgcacttcaatgatctgaagctcaaagaacttgcaccacttgaacacaagtcaaatgagtatcaagaaattcagaaatatctcatcgattcttctgcggaggcacacggtcggaagtatcgcctccaggatattttccgggtcgagagaccgggagagaaggagcgattcgagaagagcaccaagaccattaaggactccaagagattgctgctctggcatgggtcccgaaccaccaattttggcggtatcctgtcgcaaggattaagaatcgcgccacctgaggcgccagtcaatggctatgccttcggtaagggcgtgtacctcgctgatctgtcttccaagtctgccaactattgtgtgtcatcggccagtggaggcgttggcatattgctccttgtagaagctgaactctcaaacccgatgtacgaaattcacacgggagatagcggagctgctgaggctgcgaaaaagaacaactgcatcgcgacaaagggcattggtcgtatgggtcctgaaaagtggaaagacgcaagctgccttaatgaccagttgaaaggcgtgatgatggtgagtgtctcattgctattcctctttgtgcgattgaagatgataactgatatctgagggaatgtagcctgatggaaagcccggcaacacaaaggaccacaatggttacttacagtataatgagtacatttcgtacaacgttgagcatctgaagatccgctacctgttgaaggttgctatgtaacgattatgacgactttatgatagcattatgagcgactgcgcaactgaatttgttacctgaagaaataccaaatatgagatctttgtgattataacctgctgttactctctaaggtagtttgcgttaacgtagttgtatctgtcctcatgtcgtgcgcaagtggatgcgatctcatcgtctcaaaggcgacccgtgtcataagtagatgggatgatctgcatttagctcaagctgcccttcatctccaccattgagatcagcttcatttctagatgagtcttccgtgaacgtgtttatatatgtcggcattgatagacaaagcaaagccaagcgattggtcgctgcggcttgcgatatgtagattcatctcatcgttacagcggcattgaagattccgagcagggatgaaacgcgatggctcctgctaagataccggaatgattgggctggatgcactgaacctgagacaccacttgacaggctagtacttcggcaatgatcaaaacggcgcttcgcgatgcagctgattggctcgctgtgattctcactcgcgttggttttcatcccagcgcttgtttcgcaactcattgactgccgg

SEQ ID NO: 34892 - DNA, 1740 bp, Muscodor strobelii
  misc_feature: SGI cDNA ID NO. 572068
  misc_feature: Elevated expression when VOC is produced
  misc_feature: Encodes the peptide sequence at SEQ ID NO 34893
atgaagctcgcggtgctgctgctcgcaaccttgagttgcgccaatgctgcctggttacgatggtccgtaaaccgggaaccagtttgggcagcgcaagaaactggtcttgctactgcagttgacgaaattggttggacaccaataccgacccctgcacctggactgagaaaagacggcgaggatgtgttagagttactgagacgcggctcaacaacagattgggagacatcaaacacttgcggttggttcgctggtatatcttcttctgccgtcgtgtgtggtaataacttcacctgcgcaacgaactctgatcacgtcgttgcttgcgcttcgggtaccatctcaccattctatactgcttgcctggactacaaggcatttcaagccggttcctgttctaaccttgatgctgcgactggttgctgtgacaattcgaagcagccggcgtgcggcacctacatctggacaggctcccctgaacgctacatgtacaaatgctttgagacagcatcagcactctcgatccttgatgttccacaattcgttcttgacgcatctctgttctcaaagacgcatacaacctccacgccaaccattacgtctgatgcctccgatgctaacggtgacaaaccgacttctgctggcgagagcaatgacccttcaggaacaggagccgctgggtctggttctggatcaggatctgagtctggatctccagacagcaataactccagctccaccaatagctcgggtcccaacacacctgtcattgtaggtgctgcggttggtggcacgatctctctactactactcctccttctcttatggtatttgaaacgcaagatgaagaacaagttcggactttctttcaaccgcaagaagaagactaagacagaggacaattcgactacacactatcatacgaccaacgttgccgctgctaagggtaggaactcttcagtcagcgaggctacaacggcacggcctcctactgcacaacctcaagagagccattatcatcaagaacactaccattatcaaggtccgccacagcagaaaccgatcccagccaaccaggaagcaagcaggggacaatctgtatcggccgccgctgcgcactatcaagagtcaggtagaggacaacccatttcaatgtccactacagtgaacgacaactcatccagctctcgcgctccgttgttttcatatacatccaacaagacaacagcaccagcctcgtcggatgcaccatcaagcaatgttgttggaggtattgcgtcaaaatcaggcgacaaggagcagccgaaggaacagtcgagacagcaggagggagttcctgcactactccaacccatcaaccacatccacatttaccatgcaccgcctatgcaccagcgcgaggatcgatcgcctccgcgctccgaggtgcattctagcgacagaggaacacagaacaatccgggagtcgcagtccctaaccatgcccgttatcccaacgaccgcgaatcctgggctatcaaccacacacgcgaacagcagtgccgctcaggtgagccgagccaggagagagagccgagccaggagagagagcgaagcccgtcgccacctcagcattacgacccgcgagaccacggacatactagagatatctccactgtcacgacagggactaataatgactggtcggctattccggcttatctggagaatgcgggacccggatacagacagagtatgtga

SEQ ID NO: 34893 - protein, 579 aa, Muscodor strobelii
  misc_feature: SGI Peptide ID NO. 572068
  misc_feature (14)..(285): NCBI GI: 256734580 Blast Desc: NECHADRAFT_98851 [Nectria haematococca mpVI 77-13-4]
  misc_feature (28)..(285): NCBI GI: 46126307 Blast Desc: FG07531.1 [Gibberella zeae PH-1]
  misc_feature (28)..(285): NCBI GI: 39945016 Blast Desc: [Magnaporthe grisea 70-15] gi|145011402|gb|EDJ96058.1| [Magnaporthe grisea 70-15]
  misc_feature (8)..(286): NCBI GI: 156049761 Blast Desc: SS1G_08587 [Sclerotinia sclerotiorum 1980] gi|154692986|gb|EDN92724.1| SS1G_08587 [Sclerotinia sclerotiorum 1980]
  misc_feature (33)..(285): NCBI GI: 171677398 Blast Desc: protein product [Podospora anserina] gi|170936767|emb|CAP61425.1| protein product [Podospora anserina]
  misc_feature: Useful for introducing or modulating the production of volatile compounds
MKLAVLLLATLSCANAAWLRWSVNREPVWAAQETGLATAVDEIGWTPIPTPAPGLRKDGEDVLELLRRGSTTDWETSNTCGWFAGISSSAVVCGNNFTCATNSDHVVACASGTISPFYTACLDYKAFQAGSCSNLDAATGCCDNSKQPACGTYIWTGSPERYMYKCFETASALSILDVPQFVLDASLFSKTHTTSTPTITSDASDANGDKPTSAGESNDPSGTGAAGSGSGSGSESGSPDSNNSSSTNSSGPNTPVIVGAAVGGTISLLLLLLLLWYLKRKMKNKFGLSFNRKKKTKTEDNSTTHYHTTNVAAAKGRNSSVSEATTARPPTAQPQESHYHQEHYHYQGPPQQKPIPANQEASRGQSVSAAAAHYQESGRGQPISMSTTVNDNSSSSRAPLFSYTSNKTTAPASSDAPSSNVVGGIASKSGDKEQPKEQSRQQEGVPALLQPINHIHIYHAPPMHQREDRSPPRSEVHSSDRGTQNNPGVAVPNHARYPNDRESWAINHTREQQCRSGEPSQEREPSQERERSPSPPQHYDPRDHGHTRDISTVTTGTNNDWSAIPAYLENAGPGYRQSM

SEQ ID NO: 34894 - DNA, 2431 bp, Muscodor strobelii
  misc_feature: SGI EST ID NO. CUFF.83038.0
  misc_feature: Variant of the nucleotide sequence at SEQ ID NO 34892
gccgagcccactgccgcgcttacgtgcgggtaccgtgaacttatacacccaattgcccaccaagccatattgccgattcactctctttaacactgctttcgccgtctcagccgcgtggtccttcctcctccttttttgctatacttgccattttgattttgtgttttcgtagctttcctttgttgacgtttatttttcctcttaacatttctggtgtttcgtttacccattcgtttaccaaccccagagacgtccccctttagatctgcaatacatccttgagagtgcgggcactcccgcatcttcagaaataatatttgcgtttcaacctggtattaggaggaacacactagctttgcgacaacacagctcactctcatctaccatgaagctcgcggtgctgctgctcgcaaccttgagttgcgccaatgctgcctggttacgatggtccgtaaaccgggaaccagtttgggcagcgcaagaaactggtcttgctactgcagttgacgaaattggttggacaccaataccgacccctgcacctggactgagaaaagacggcgaggatgtgttagagttactgagacgcggctcaacaacagattgggagacatcaaacacttgcggttggttcgctggtatatcttcttctgccgtcgtgtgtggtaataacttcacctgcgcaacgaactctgatcacgtcgttgcttgcgcttcgggtaccatctcaccattctatactgcttgcctggactacaaggcatttcaagccggttcctgttctaaccttgatgctgcgactggttgctgtgacaattcgaagcagccggcgtgcggcacctacatctggacaggctcccctgaacgctacatgtacaaatgctttgagacagcatcagcactctcgatccttgatgttccacaattcgttcttgacgcatctctgttctcaaagacgcatacaacctccacgccaaccattacgtctgatgcctccgatgctaacggtgacaaaccgacttctgctggcgagagcaatgacccttcaggaacaggagccgctgggtctggttctggatcaggatctgagtctggatctccagacagcaataactccagctccaccaatagctcgggtcccaacacacctgtcattgtaggtgctgcggttggtggcacgatctctctactactactcctccttctcttatggtatttgaaacgcaagatgaagaacaagttcggactttctttcaaccgcaagaagaagactaagacagaggacaattcgactacacactatcatacgaccaacgttgccgctgctaagggtaggaactcttcagtcagcgaggctacaacggcacggcctcctactgcacaacctcaagagagccattatcatcaagaacactaccattatcaaggtccgccacagcagaaaccgatcccagccaaccaggaagcaagcaggggacaatctgtatcggccgccgctgcgcactatcaagagtcaggtagaggacaacccatttcaatgtccactacagtgaacgacaactcatccagctctcgcgctccgttgttttcatatacatccaacaagacaacagcaccagcctcgtcggatgcaccatcaagcaatgttgttggaggtattgcgtcaaaatcaggcgacaaggagcagccgaaggaacagtcgagacagcaggagggagttcctgcactactccaacccatcaaccacatccacatttaccatgcaccgcctatgcaccagcgcgaggatcgatcgcctccgcgctccgaggtgcattctagcgacagaggaacacagaacaatccgggagtcgcagtccctaaccatgcccgttatcccaacgaccgcgaatcctgggctatcaaccacacacgcgaacagcagtgccgctcaggtgagccgagccaggagagagagccgagccaggagagagagcgaagcccgtcgccacctcagcattacgacccgcgagaccacggacatactagagatatctccactgtcacgacagggactaataatgactggtcggctattccggcttatctggagaatgcgggacccggatacagacagagtatgtgagaaataaaagtctgggggtctctttgatgtctacatatagattgatgcattagtggcgtttggagatttgcgcggctggtccttattgaggagccgtagcacttgactgtttgagtagatctgtttattgaacgagtctaggaaagatcgtgacccatatcgtgtcagagtatataggaaatgaatgaagtagtcgcacgatagttactccatcttcaatggagttctgcgatcggcaattgtcaatatcatggtcttgaattctacgatgtcagagcctgattttcttttcaagaccgtatacca

SEQ ID NO: 34895 - DNA, 1104 bp, Muscodor strobelii
  misc_feature: SGI cDNA ID NO. 572069
  misc_feature: Encodes the peptide sequence at SEQ ID NO 34896
atggtgtccgttgacatacctgaaggcgataacattgccaaactcacagctattgacaatggcgcacgcattttcggacctctttccttcttcatggagcccgtgcccgactatattagtcatgagagcttgggagcgccagcttttgttttcttaatcgaagaccagaaatctggacgccgtgttgttttcgatctcgggatgcgcaaggaccccgagaatttggcgccatttatcttgaagtatcacaacgaattcaaaatcaagggcggtgaggacatttccgagttcttgcggacgagaggtgttgaccttacaacaattgagtcagtgatctggagtcatcaccaccttgaccacactggaaatccagctggattccctgctgctacggacctcgtagttggaccggggtttaaggaggatattatgccgggctatccggaaaatcccgatgctcaaatcttagagacggactatagcgcgagaaacgtccgccaaatagactttgaaaaggaggcgaggggcttggaaattggcggctttcgggcgtatgattactttgacgacggcagtttctacttacttgaggcacctggccacaccgacaaccacatgatcggtctagtgcgaaccagcatctcgccatcgcgtttcgtgcttctcggagcagacacagcacaccatgcatctcaactgcgcccgaccaaggataacccgctcccgaaagaactaataccctctcctctcggtacagagcatgaattcaatctccggaccaacgtctgccccagtcatctctacgttgaccatgtgcacccagagcactcggatagcaccccattcacacgggccaaaaccggtcatcacaaggatatcgagttgacgcgacaagctatagataagttgaaggtatttgatgccgatgagaagattttggttatcactgcccatgactacacactgttgcctgtcatcgacttttggcctaagactttgaacagttggcacgagtcgggttggaaagaacaagggcggtggatgttcttgagttatttttaccaggttttagagaagaacctggaagcacagaagaaagcatga

SEQ ID NO: 34896 - protein, 367 aa, Muscodor strobelii
  misc_feature: SGI Peptide ID NO. 572069
  misc_feature (47)..(266): Pfam Id: PF00753 Pfam Desc: Metallo-beta-lactamase superfamily
  misc_feature (1)..(357): NCBI GI: 256722260 Blast Desc: NECHADRAFT_52365 [Nectria haematococca mpVI 77-13-4]
  misc_feature (3)..(353): NCBI GI: 256723295 Blast Desc: NECHADRAFT_51868 [Nectria haematococca mpVI 77-13-4]
  misc_feature (3)..(357): NCBI GI: 159122259 Blast Desc: conserved [Aspergillus fumigatus A1163]
  misc_feature (35)..(353): NCBI GI: 258564684 Blast Desc: [Uncinocarpus reesii 1704] gi|237908594|gb|EEP82995.1| [Uncinocarpus reesii 1704]
  misc_feature (3)..(353): NCBI GI: 154323454 Blast Desc: BC1G_00126 [Botryotinia fuckeliana B05.10] gi|150842355|gb|EDN17548.1| BC1G_00126 [Botryotinia fuckeliana B05.10]
  misc_feature (4)..(367): NCBI GI: 169774169 Blast Desc: [Aspergillus oryzae RIB40] gi|83769415|dbj|BAE59550.1| protein product [Aspergillus oryzae]
  misc_feature (4)..(357): NCBI GI: 259486453 Blast Desc: TPA: conserved [Aspergillus nidulans FGSC A4]
  misc_feature (4)..(367): NCBI GI: 238497333 Blast Desc: AFLA_138910 [Aspergillus flavus NRRL3357] gi|220694782|gb|EED51126.1| AFLA_138910 [Aspergillus flavus NRRL3357]
  misc_feature (4)..(357): NCBI GI: 67524363 Blast Desc: AN2639.2 [Aspergillus nidulans FGSC A4] gi|40743857|gb|EAA63041.1| AN2639.2 [Aspergillus nidulans FGSC A4]
  misc_feature (4)..(353): NCBI GI: 46103148 Blast Desc: FG00079.1 [Gibberella zeae PH-1]
MVSVDIPEGDNIAKLTAIDNGARIFGPLSFFMEPVPDYISHESLGAPAFVFLIEDQKSGRRVVFDLGMRKDPENLAPFILKYHNEFKIKGGEDISEFLRTRGVDLTTIESVIWSHHHLDHTGNPAGFPAATDLVVGPGFKEDIMPGYPENPDAQILETDYSARNVRQIDFEKEARGLEIGGFRAYDYFDDGSFYLLEAPGHTDNHMIGLVRTSISPSRFVLLGADTAHHASQLRPTKDNPLPKELIPSPLGTEHEFNLRTNVCPSHLYVDHVHPEHSDSTPFTRAKTGHHKDIELTRQAIDKLKVFDADEKILVITAHDYTLLPVIDFWPKTLNSWHESGWKEQGRWMFLSYFYQVLEKNLEAQKKA

SEQ ID NO: 34897 - DNA, 274 bp, Muscodor strobelii
  misc_feature: SGI EST ID NO. CUFF.83042.0
  misc_feature: Variant of the nucleotide sequence at SEQ ID NO 34895
gacgacggcagtttctacttacttgaggcacctggccacaccgacaaccacatgatcggtctagtgcgaaccagcatctcgccatcgcgtttcgtgcttctcggagcagacacagcacaccatgcatctcaactgcgcccgaccaaggataacccgctcccgaaagaactaataccctctcctctcggtacagagcatgaattcaatctccggaccaacgtctgccccagtcatctctacgttgaccatgtgcacccagagcactcggatagca

SEQ ID NO: 34898 - DNA, 699 bp, Muscodor strobelii
  misc_feature: SGI cDNA ID NO. 572070
  misc_feature: Encodes the peptide sequence at SEQ ID NO 34899
atgtcgaactcctccaatcctttgcggataggatatgtcctattccctgccctaacagcgttggacgtgtttggccctctgaacgcgctgaactacctctcaatccagcatccaatgacattgtcgcttctatctacagatatggctccagtcagcatcgatcgaacgatagttgggggagtagcgcaaggcatgttggcgaactcttcctcgccgtacttctcggagttcatcttgccgacacacacgtttgcgaactcgccagagctagatgtcgtgattgtacccggagggtcaggcactcgcaacctgaatgacactcaacctcatgttgactggcttcgggagcatgcaactctggaccagctagacttcctcatgtcagtatgtacaggaacatcgatgttagcccgctcaggcaatatcgcaggacggaatgctacgacgaacaaggcagcttataaatgggtaacctctgttgaaaatgcggacaaggtgaattgggttccaaaagcgcgttgggtagtagatgggaacctctggacaagctcgggtgtcagcgctggcactgacatgatattggcatggattggtcactattacggtgcatctgaacaggagagagtgcgtgtgaatatggaatggatctcgacaaaccagactgacgatccgttcgctagttactatgggcttgcatag

SEQ ID NO: 34899 - protein, 232 aa, Muscodor strobelii
  misc_feature: SGI Peptide ID NO. 572070
  misc_feature (54)..(201): Pfam Id: PF01965 Pfam Desc: DJ-1/PfpI family
  misc_feature (86)..(195): Pfam Id: PF01965 Pfam Desc: DJ-1/PfpI family
  misc_feature (3)..(231): NCBI GI: 255947488 Blast Desc: Pc22g04730 [Penicillium chrysogenum Wisconsin 54-1255] gi|211591528|emb|CAP97761.1| Pc22g04730 [Penicillium chrysogenum Wisconsin 54-1255]
  misc_feature (5)..(230): NCBI GI: 256724293 Blast Desc: NECHADRAFT_72943 [Nectria haematococca mpVI 77-13-4]
  misc_feature (5)..(229): NCBI GI: 169867102 Blast Desc: CC1G_02595 [Coprinopsis cinerea okayama7#130] gi|116498684|gb|EAU81579.1| CC1G_02595 [Coprinopsis cinerea okayama7#130]
  misc_feature (4)..(231): NCBI GI: 238597573 Blast Desc: MPER_05757 [Moniliophthora perniciosa FA553] gi|215463283|gb|EEB95292.1| MPER_05757 [Moniliophthora perniciosa FA553]
  misc_feature (3)..(227): NCBI GI: 119193436 Blast Desc: CIMG_01095 [Coccidioides immitis RS]
  misc_feature (3)..(227): NCBI GI: 240105712 Blast Desc: DJ-1/PfpI family protein [Coccidioides posadasii C735 delta SOWgp]
  misc_feature (2)..(227): NCBI GI: 225563211 Blast Desc: DJ-1/PfpI family protein [Ajellomyces capsulatus G186AR]
  misc_feature (13)..(231): NCBI GI: 238586677 Blast Desc: MPER_09354 [Moniliophthora perniciosa FA553] gi|215455657|gb|EEB92175.1| MPER_09354 [Moniliophthora perniciosa FA553]
  misc_feature (2)..(227): NCBI GI: 240275793 Blast Desc: DJ-1/PfpI protein [Ajellomyces capsulatus H143]
  misc_feature (2)..(231): NCBI GI: 39973537 Blast Desc: MGG_01085 [Magnaporthe grisea 70-15] gi|145017956|gb|EDK02235.1| MGG_01085 [Magnaporthe grisea 70-15]
MSNSSNPLRIGYVLFPALTALDVFGPLNALNYLSIQHPMTLSLLSTDMAPVSIDRTIVGGVAQGMLANSSSPYFSEFILPTHTFANSPELDVVIVPGGSGTRNLNDTQPHVDWLREHATLDQLDFLMSVCTGTSMLARSGNIAGRNATTNKAAYKWVTSVENADKVNWVPKARWVVDGNLWTSSGVSAGTDMILAWIGHYYGASEQERVRVNMEWISTNQTDDPFASYYGLA

SEQ ID NO: 34900 - DNA, 474 bp, Muscodor strobelii
  misc_feature: SGI EST ID NO. CUFF.83056.0
  misc_feature: Variant of the nucleotide sequence at SEQ ID NO 34898
cgccattgcaacaccgcccttctttctatacacaaaatcgagttggctctcctactattgtaaccaccctatcttattcaaaatgtcgaactcctccaatcctttgcggataggatatgtcctattccctgccctaacagcgttggacgtgtttggccctctgaacgcgctgaactacctctcaatccagcatccaatgacattgtcgcttctatctacagatatggctccagtcagcatcgatcgaacgatagttgggggagtagcgcaaggcatgttggcgaactcttcctcgccgtacttctcggagttcatcttgccgacacacacgtttgcgaactcgccagagctagatgtcgtgattgtacccggagggtcaggcactcgcaacctgaatgacactcaacctcatgttgactggcttcgggagcatgcaactctggaccagctagacttcctcatgtcagtatgtac

SEQ ID NO: 34901 - DNA, 870 bp, Muscodor strobelii
  misc_feature: SGI cDNA ID NO. 572071
  misc_feature: Encodes the peptide sequence at SEQ ID NO 34902
atgcagctgtctcatatgcgacgatgtgctctactagcccttgtgacctcagctgaagctcatgtagtgatcacctacccaggatggcggggcaacaatctcgggctcagcggttcagtggaggatacaaacggtctcggcgtgggaatctcagactcgggcctcacatatccatacggaatgcaatggatatacccttgtggtggcatggctatttccactaaccgtactaaatggcctgtcactggcggtgctgtcgcgtttcagcctggatggttcacgggccatcaagatgcgctcatctatgtgaacatgggattcggttcggttccgcagaattattctgtgccgattgtagctggcttccagatcgagggaccgaccgactctgcatatccgggagcgctttgtctgccacagatcccaattccagaaggctacagtgtgaaagctggggatgaggccactattcaagtcgttgaaatcgcgaaacatggcgccgcaatgtatagttgcgtagatgtcacattcgctgacgcagccgatgtcgaagagattagcgcgaccaactgctttaactcaagtacgatcaagatcggtggacgcgctgtcaccacgagcgccaccactgcacccacgccgaccacaacgggtaccgacgtgtggggatgggcgtgtgtcgacaacaaccgctccgaaatcttttccggcgtagactattcaagccaatgctccagccaaagtgcagtcacatcgactggaacccctgcagcgactgagaccccaggcgtggcagtaagagtccgagagggtggtctatggatgcttggacctgtcgtaattgctggcctagctcaggtttggtcatag

SEQ ID NO: 34902 - protein, 289 aa, Muscodor strobelii
  misc_feature: SGI Peptide ID NO. 572071
  misc_feature (1)..(214): NCBI GI: 119479557 Blast Desc: NFIA_078500 [Neosartorya fischeri NRRL 181] gi|119407961|gb|EAW17910.1| conserved [Neosartorya fischeri NRRL 181]
  misc_feature (10)..(221): NCBI GI: 146324121 Blast Desc: conserved [Aspergillus fumigatus Af293] gi|129558058|gb|EAL91719.2| conserved [Aspergillus fumigatus Af293] gi|159126506|gb|EDP51622.1| conserved [Aspergillus A1163]
  misc_feature (19)..(211): NCBI GI: 145237794 Blast Desc: An07g04620 [Aspergillus niger] gi|134076020|emb|CAK39380.1| protein product [Aspergillus niger]
  misc_feature (12)..(197): NCBI GI: 119183682 Blast Desc: CIMG_06742 [Coccidioides immitis RS] gi|240109674|gb|EER27843.1| conserved [Coccidioides posadasii C735 delta SOWgp]
  misc_feature (11)..(197): NCBI GI: 238844208 Blast Desc: conserved [Microsporum canis CBS 113480]
  misc_feature (11)..(210): NCBI GI: 169780588 Blast Desc: [Aspergillus oryzae RIB40] gi|238505238|ref|XP_002383848.1| conserved [Aspergillus flavus NRRL3357] gi|83773498|dbj|BAE63625.1| protein product oryzae]
  misc_feature (11)..(197): NCBI GI: 225554511 Blast Desc: conserved [Ajellomyces capsulatus G186AR]
  misc_feature (18)..(197): NCBI GI: 255952805 Blast Desc: Pc21g00820 [Penicillium chrysogenum Wisconsin 54-1255] gi|211588866|emb|CAP94979.1| Pc21g00820 [Penicillium chrysogenum Wisconsin 54-1255]
  misc_feature (11)..(197): NCBI GI: 240277818 Blast Desc: conserved [Ajellomyces capsulatus H143]
  misc_feature (11)..(197): NCBI GI: 239612085 Blast Desc: conserved [Ajellomyces dermatitidis ER-3]
MQLSHMRRCALLALVTSAEAHVVITYPGWRGNNLGLSGSVEDTNGLGVGISDSGLTYPYGMQWIYPCGGMAISTNRTKWPVTGGAVAFQPGWFTGHQDALIYVNMGFGSVPQNYSVPIVAGFQIEGPTDSAYPGALCLPQIPIPEGYSVKAGDEATIQVVEIAKHGAAMYSCVDVTFADAADVEEISATNCFNSSTIKIGGRAVTTSATTAPTPTTTGTDVWGWACVDNNRSEIFSGVDYSSQCSSQSAVTSTGTPAATETPGVAVRVREGGLWMLGPVVIAGLAQVWS

SEQ ID NO: 34903 - DNA, 3594 bp, Muscodor strobelii
  misc_feature: SGI EST ID NO. CUFF.83215.0
  misc_feature: Variant of the nucleotide sequence at SEQ ID NO 34901
ccgcgctcaactccaatgagtaatcttgctttctcaagtgacgatgcagctgtctcatatgcgacgatgtgctctactagcccttgtgacctcagctgaagctcatgtagtgatcacctacccaggatggcggggcaacaatctcgggctcagcggttcagtggaggatacaaacggtctcggcgtgggaatctcagactcgggcctcacatatccatacggaatgcaatggatatacccttgtggtggcatggctatttccactaaccgtactaaatggcctgtcactggcggtgctgtcgcgtttcagcctggatggttcacgggccatcaagatgcgctcatctatgtgaacatgggattcggttcggttccgcagaattattctgtgccgattgtagctggcttccagatcgagggaccgaccgactctgcatatccgggagcgctttgtctgccacagatcccaattccagaaggctacagtgtgaaagctggggatgaggccactattcaagtcgttgaaatcgcgaaacatggcgccgcaatgtatagttgcgtagatgtcacattcgctgacgcagccgatgtcgaagagattagcgcgaccaactgctttaactcaagtacgatcaagatcggtggacgcgctgtcaccacgagcgccaccactgcacccacgccgaccacaacgggtaccgacgtgtggggatgggcgtgtgtcgacaacaaccgctccgaaatcttttccggcgtagactattcaagccaatgctccagccaaagtgcagtcacatcgactggaacccctgcagcgactgagaccccaggcgtggcagtaagagtccgagagggtggtctatggatgcttggacctgtcgtaattgctggcctagctcaggtttggtcatagaaacttgtggcaacatgatctcttacattggaatgagctaagatttactgagctactatctaaccatgataaaaattcaggctatttgactactgtctattttgctttttaacgcaacttatcattgcataaatcgagcgtatttccaaatagagagcatgcaaggtcagaattgggtcactccggcatgcagttagtcctcgtgttcgccagattcatgacacaaatgcttctgttacgtgaatcttatccgacagggataccatcacaactttcgaaaatagcaaaattgtttctctatcagatatgcagactactcgcccaagctcctcgctgtgctcattgaatcgttaacgtacctcccctaacatgcatacacgcgcctatctccagtagttgtaacgtaagtatgaaatcggcaaatagccgatggctgctccacagctctgctttcattctcttagtgtcgcttcgcttggggtaaattcaatgccgaagtaggctctctaccactcagtatcgcgatgacattgcgcatgcaaagctcctcggtgccggcgtatgtttctatcgtatcagcagcatcttcatatgtaagtaatgctttcgtgccgacgaatttcgacagcgtcccatgagtctcgggttcatcaccgtgggcatcaagtgcgacaaagctcagtgcgtcttgctctagtgcatgggcaaggactgacccgtcgataagttggctaccaccgacattcacaagacgcgcccctggtctaaattcgccgatgttctgttcgtttattagttggttctgcccttgcgacgacgttgagcacaagacaacgcagtcagaactatgaagtagcagatcaagcgtcggacaaaagcgtgcacgcgatccgacctcgatagaagcacttcttcgctttgcgtcgtagtagacgatgtccatgccgaatgccgcatggcacttatgcgcaatctgctggccaacgtggtcaaaccccacgattccgagcacgtgaccgcgagggctgtgagatcgcggtcctagtttgctagttggcgcttggccttgtgttgacgaaggatagtgcgccagaggacgaaatgtgccaagaatcaatgttacagcaaagtcggcaatggcttcagcggacgctgcctctgagttgcagaagacgatgcctacgagcttcttagtttggactcgttcagcatatttattgtgttgccaaatcacccaatattgccatagcattttgaacgagaaaaacggaatcggtcttaccacgttccgtgagtaatttcacatcaacccattgacaatcgacgcctgcactaacgaaagcgcgtagactgttgggcaatagcgagataatctcatcattccaatcgcccatctcgagaccggagcccagagatgggcggaagacagccgcgatgtcgccccatttcttatctttcaaggcattgatgaaagcaggacgacttcggtcttctgcgctaggaaccacgacatcaaatagtaccgagaactcggcaaacagctcgggagcatgctttatcgggtctcctaggtgtagcacgatttgcttagggccatgcgtattaataggcacggtcaccagcgagcccgctctggagtgggtttgtgagtgcggatgaggccatgctggtgatctagttgaagttggcgaagaggcaagggaggtgggcagaggtggtgcgggggagccggcgcgggttggcggcgctgtgggcatgggggtgttagtcggttcggccatgatgccgccggtctcaggtcttgagcctgacagataaccatgaaattattccaacactatttctccgcggctcaggtcaagtaatgatagttagaatgatgttgatatgatgaggagcaatggaatgatccgaagtaagccaattatgtcatcgctgagttagttggctggctcatgtgggttgtacacgttggctataaacagtcgcgaaaaagcgcacgcgatccaatgccttgccgtgaagttgtttgtcgatatgctcaccgctgaaagacaaaaagaaagaaacgatgaccctcgtcgcatgacgcagcccaacgagaagcccagtcagagcccagtctgggtcttacgatcttcaagtgggggaacgggcggctgagagttgcggggacagaaccacgaagacgaccggccgctagggcacttgtcctgtatcagaacggcacggggtccatcacttgagataacgagacacggcacttcacactggagtcctatttactctgtccaagtaggaatgacggcgcccggcggcgaatgtagaaagaaataaagatgaagaataatacactgctaagtccattttgaactaggatttaaggttagctcaaatcgacacaatcagtttgcttcatgcacgtcaagctgaaagacaaagaagatagtagagaatgtgtcttctctgagcaagtcaatttatatgaacgaaaatggcaatgagatatacaacgaaatcatgaattgccccagctggaggctctttgagcagtaggatcctcacgactcgtgggacagcatgccgttagcgcaatagctgtgtttatcactaaatatatctcgaatttcgtctgaaagcaagcgcgacgagttctactacgactccagggtagatggctg

SEQ ID NO: 34904 - DNA, 1218 bp, Muscodor strobelii
  misc_feature: SGI cDNA ID NO. 572072
  misc_feature: Encodes the peptide sequence at SEQ ID NO 34905
atggccgaaccgactaacacccccatgcccacagcgccgccaacccgcgccggctcccccgcaccacctctgcccacctcccttgcctcttcgccaacttcaactagatcaccagcatggcctcatccgcactcacaaacccactccagagcgggctcgctggtgaccgtgcctattaatacgcatggccctaagcaaatcgtgctacacctaggagacccgataaagcatgctcccgagctgtttgccgagttctcggtactatttgatgtcgtggttcctagcgcagaagaccgaagtcgtcctgctttcatcaatgccttgaaagataagaaatggggcgacatcgcggctgtcttccgcccatctctgggctccggtctcgagatgggcgattggaatgatgagattatctcgctattgcccaacagtctacgcgctttcgttagtgcaggcgtcgattgtcaatgggttgatgtgaaattactcacggaacgtggcatcgtcttctgcaactcagaggcagcgtccgctgaagccattgccgactttgctgtaacattgattcttggcacatttcgtcctctggcgcactatccttcgtcaacacaaggccaagcgccaactagcaaactaggaccgcgatctcacagccctcgcggtcacgtgctcggaatcgtggggtttgaccacgttggccagcagattgcgcataagtgccatgcggcattcggcatggacatcgtctactacgacgcaaagcgaagaagtgcttctatcgaggtcggatcgcgtgcacgcttttgtccgacgcttgatctgctacttcatagttctgactgcgttgtcttgtgctcaacgtcgtcgcaagggcagaaccaactaataaacgaacagaacatcggcgaatttagaccaggggcgcgtcttgtgaatgtcggtggtagccaacttatcgacgggtcagtccttgcccatgcactagagcaagacgcactgagctttgtcgcacttgatgcccacggtgatgaacccgagactcatgggacgctgtcgaaattcgtcggcacgaaagcattacttacatatgaagatgctgctgatacgatagaaacatacgccggcaccgaggagctttgcatgcgcaatgtcatcgcgatactgagtggtagagagcctacttcggcattgaatttaccccaagcgaagcgacactaa

SEQ ID NO: 34905 - protein, 405 aa, Muscodor strobelii
  misc_feature: SGI Peptide ID NO. 572072
  misc_feature (87)..(398): Pfam Id: PF00389 Pfam Desc: D-isomer specific 2-hydroxyacid dehydrogenase, catalytic domain
  misc_feature (186)..(356): Pfam Id: PF02826 Pfam Desc: D-isomer specific 2-hydroxyacid dehydrogenase, NAD binding domain
  misc_feature (158)..(398): Pfam Id: PF00389 Pfam Desc: D-isomer specific 2-hydroxyacid dehydrogenase, catalytic domain
  misc_feature (186)..(345): Pfam Id: PF02826 Pfam Desc: D-isomer specific 2-hydroxyacid dehydrogenase, NAD binding domain
  misc_feature (1)..(404): NCBI GI: 116198657 Blast Desc: CHGG_07484 [Chaetomium globosum CBS 148.51] gi|88178763|gb|EAQ86231.1| CHGG_07484 [Chaetomium globosum CBS 148.51]
  misc_feature (1)..(399): NCBI GI: 171693409 Blast Desc: protein product [Podospora anserina] gi|170946653|emb|CAP73456.1| protein product [Podospora anserina]
  misc_feature (1)..(399): NCBI GI: 46130878 Blast Desc: FG08994.1 [Gibberella zeae PH-1]
  misc_feature (16)..(404): NCBI GI: 256727864 Blast Desc: NECHADRAFT_95283 [Nectria haematococca mpVI 77-13-4]
  misc_feature (65)..(394): NCBI GI: 67901352 Blast Desc: AN7663.2 [Aspergillus nidulans FGSC A4] gi|40742659|gb|EAA61849.1| AN7663.2 [Aspergillus nidulans FGSC A4] gi|259484002|tpe|CBF79854.1| TPA: D-mandelate dehydrogenase,
  misc_feature (65)..(403): NCBI GI: 119497863 Blast Desc: D-mandelate dehydrogenase, [Neosartorya fischeri NRRL 181] gi|119413853|gb|EAW23792.1| D-mandelate dehydrogenase, [Neosartorya fischeri NRRL 181]
  misc_feature (65)..(398): NCBI GI: 212545380 Blast Desc: D-mandelate dehydrogenase, [Penicillium marneffei ATCC 18224] gi|210065813|gb|EEA19907.1| D-mandelate dehydrogenase, [Penicillium marneffei ATCC 18224]
  misc_feature (65)..(403): NCBI GI: 70988821 Blast Desc: D-mandelate dehydrogenase [Aspergillus fumigatus Af293] gi|66846895|gb|EAL87226.1| D-mandelate dehydrogenase, [Aspergillus fumigatus Af293] gi|159128678|gb|EDP53792.1| A1163]
  misc_feature (65)..(398): NCBI GI: 154313051 Blast Desc: BC1G_05527 [Botryotinia fuckeliana B05.10] gi|150849612|gb|EDN24805.1| BC1G_05527 [Botryotinia fuckeliana B05.10]
  misc_feature (64)..(403): NCBI GI: 145235495 Blast Desc: An03g05150 [Aspergillus niger] gi|134058081|emb|CAK49167.1| protein product [Aspergillus niger]
  misc_feature (134)..(398): SWISSPROT Homolog: EC 1.1.1.26 Glyoxylate reductase
MAEPTNTPMPTAPPTRAGSPAPPLPTSLASSPTSTRSPAWPHPHSQTHSRAGSLVTVPINTHGPKQIVLHLGDPIKHAPELFAEFSVLFDVVVPSAEDRSRPAFINALKDKKWGDIAAVFRPSLGSGLEMGDWNDEIISLLPNSLRAFVSAGVDCQWVDVKLLTERGIVFCNSEAASAEAIADFAVTLILGTFRPLAHYPSSTQGQAPTSKLGPRSHSPRGHVLGIVGFDHVGQQIAHKCHAAFGMDIVYYDAKRRSASIEVGSRARFCPTLDLLLHSSDCVVLCSTSSQGQNQLINEQNIGEFRPGARLVNVGGSQLIDGSVLAHALEQDALSFVALDAHGDEPETHGTLSKFVGTKALLTYEDAADTIETYAGTEELCMRNVIAILSGREPTSALNLPQAKRH

SEQ ID NO: 34906 - DNA, 2924 bp, Muscodor strobelii
  misc_feature: SGI EST ID NO. CUFF.83216.1
  misc_feature: Variant of the nucleotide sequence at SEQ ID NO 34904
cagccatctaccctggagtcgtagtagaactcgtcgcgcttgctttcagacgaaattcgagatatatttagtgataaacacagctattgcgctaacggcatgctgtcccacgagtcgtgaggatcctactgctcaaagagcctccagctggggcaattcatgatttcgttgtatatctcattgccattttcgttcatataaattgacttgctcagagaagacacattctctactatcttctttgtctttcagcttgacgtgcatgaagcaaactgattgtgtcgatttgagctaaccttaaatcctagttcaaaatggacttagcagtgtattattcttcatctttatttctttctacattcgccgccgggcgccgtcattcctacttggacagagtaaataggactccagtgtgaagtgccgtgtctcgttatctcaagtgatggaccccgtgccgttctgatacaggacaagtgccctagcggccggtcgtcttcgtggttctgtccccgcaactctcagccgcccgttcccccacttgaagatcgtaagacccagactgggctctgactgggcttctcgttgggctgcgtcatgcgacgagggtcatcgtttctttctttttgtctttcagcggtgagcatatcgacaaacaacttcacggcaaggcattggatcgcgtgcgctttttcgcgactgtttatagccaacgtgtacaacccacatgagccagccaactaactcagcgatgacataattggcttacttcggatcattccattgctcctcatcatatcaacatcattctaactatcattacttgacctgagccgcggagaaatagtgttggaataatttcatggttatctgtcaggctcaagacctgagaccggcggcatcatggccgaaccgactaacacccccatgcccacagcgccgccaacccgcgccggctcccccgcaccacctctgcccacctcccttgcctcttcgccaacttcaactagatcaccagcatggcctcatccgcactcacaaacccactccagagcgggctcgctggtgaccgtgcctattaatacgcatggccctaagcaaatcgtgctacacctaggagacccgataaagcatgctcccgagctgtttgccgagttctcggtactatttgatgtcgtggttcctagcgcagaagaccgaagtcgtcctgctttcatcaatgccttgaaagataagaaatggggcgacatcgcggctgtcttccgcccatctctgggctccggtctcgagatgggcgattggaatgatgagattatctcgctattgcccaacagtctacgcgctttcgttagtgcaggcgtcgattgtcaatgggttgatgtgaaattactcacggaacgtggcatcgtcttctgcaactcagaggcagcgtccgctgaagccattgccgactttgctgtaacattgattcttggcacatttcgtcctctggcgcactatccttcgtcaacacaaggccaagcgccaactagcaaactaggaccgcgatctcacagccctcgcggtcacgtgctcggaatcgtggggtttgaccacgttggccagcagattgcgcataagtgccatgcggcattcggcatggacatcgtctactacgacgcaaagcgaagaagtgcttctatcgaggtcggatcgcgtgcacgcttttgtccgacgcttgatctgctacttcatagttctgactgcgttgtcttgtgctcaacgtcgtcgcaagggcagaaccaactaataaacgaacagaacatcggcgaatttagaccaggggcgcgtcttgtgaatgtcggtggtagccaacttatcgacgggtcagtccttgcccatgcactagagcaagacgcactgagctttgtcgcacttgatgcccacggtgatgaacccgagactcatgggacgctgtcgaaattcgtcggcacgaaagcattacttacatatgaagatgctgctgatacgatagaaacatacgccggcaccgaggagctttgcatgcgcaatgtcatcgcgatactgagtggtagagagcctacttcggcattgaatttaccccaagcgaagcgacactaagagaatgaaagcagagctgtggagcagccatcggctatttgccgatttcatacttacgttacaactactggagataggcgcgtgtatgcatgttaggggaggtacgttaacgattcaatgagcacagcgaggagcttgggcgagtagtctgcatatctgatagagaaacaattttgctattttcgaaagttgtgatggtatccctgtcggataagattcacgtaacagaagcatttgtgtcatgaatctggcgaacacgaggactaactgcatgccggagtgacccaattctgaccttgcatgctctctatttggaaatacgctcgatttatgcaatgataagttgcgttaaaaagcaaaatagacagtagtcaaatagcctgaatttttatcatggttagatagtagctcagtaaatcttagctcattccaatgtaagagatcatgttgccacaagtttctatgaccaaacctgagctaggccagcaattacgacaggtccaagcatccatagaccaccctctcggactcttactgccacgcctggggtctcagtcgctgcaggggttccagtcgatgtgactgcactttggctggagcattggcttgaatagtctacgccggaaaagatttcggagcggttgttgtcgacacacgcccatccccacacgtcggtacccgttgtggtcggcgtgggtgcagtggtggcgctcgtggtgacagcgcgtccaccgatcttgatcgtacttgagttaaagcagttggtcgcgctaatctcttcgacatcggctgcgtcagcgaatgtg

SEQ ID NO: 34907 - DNA, 3567 bp, Muscodor strobelii
  misc_feature: SGI cDNA ID NO. 572073
  misc_feature: Encodes the peptide sequence at SEQ ID NO 34908
atggatatgcctgagaagcaacctcctttcgctgagagcgcggagccgccgatgatggattgtcaatctgcatgctgtagcgctgccatcgaatcagcggagcctctgaccgatagctgcactcctcttggacctgaggaaatggcggcgtcttgtgccgacgcgaccgagggccggaatgaaatcaaatcctctaccactgctgtttccactgtatctgattgctgttctggttgcttttctttttccgacaaccaaccaaccgcggtttctgaccctgagcccacctgcgctgctggtattgccctttcatcttgttccgaccatggtgatgctgagtcttcgaagaagaatctcgcttgctgctccgatgaaggctcgtgctatgatatcaagggtaaggccgcggttaacgacacaactcggatcactacacagggttgtcaagatgtctactgcgatttttcgaaggaagacaatgtttgcggccccgcatgcgaggatcagtgctgcacacttgactcgcccgccaatgcgacgccatcttgctgcgaagggaagccagctccatgctgtgacgaaacttgcattgagcgactcgtttcccgcgagcgagttgcgggaaccaaacgtactgccgctggctccgtttcctcaaggagtagtgcgtcaatccgagaggaatatggcatacgacttgccgcattgggttgtctgtgtcgagccctcatagccctagggcaagaatcctgctgcacgactaagaaaccctcttccgcctccaagaggcagagctctgctgctaggaagaaaagcagcaagaaggtggctgcggttcacaatcagtcctgtggtgcctcttcgacttgcaaagcgtcaggttctcagggagattgcgcagatggagtccaaaagcggaataagagtcaatgtagcgaccgtgaaacatcgacttccaagcgaccacgcagccctgcatgtaccaaaggctgttgtggcagtccgcagatcgcagctgcttctaagcccgtcaacccttccaagcgcgaccgtaagaatgcaacggttacggacagtggggctttaacgattgcatcggacttgccagatcctgacctggaaattggtgccaacgtcgagcatgttgctctcggaatttcgggcatgacatgcacgggttgcgagacaaagctccaagccacactgggaaagttgccagccattagcaatttgaagtccagtcttgtcctaggccgcgttgagtttgaactgaggcgtgcctctgtgtcgaacatcatcaaacacattgagaaaacaaccgagtttaaatgcgatgtactcatggctgatgggtcttccattgatgttctcccaacccagggagccaaggattttctcaagcaatctccaccccgcggtgtgagcgagatgtccatggttgacgaaaagactgtgtgcattgtctttgatccgaaaattattggtgctcgagacctcaccgaacgcggcttcgatgcgccgcttcccctcgcatccctagaaaatgatctagctctagcggctggaggcaaacatgtacgatacttgggtctcatgactttgctttccgttattctaacgattcccgtgcttgttctggcatatgctcccctacgggaacggccgatcgtttatgggagcatctctcttgccttggcaaccatcatccaggtcgttattgctgggccattttatccgacagcgatcaagtcactcatattctctcgtgtcatcgagatggatctgctcatcgtactcagtacaagtgccgcctacatattttccgttgttgccttcggtcatctagttcatggtaacaaactatcacccggggagttctttgagacccagacgttactggtgaccctgatcatggtcggacgatgggttagcgcattagcccgccagaaggccatggaatcgtttcccattcaatccttacaagcatcgacagcacttctagcctcgccgacatctgatgggacggaaactacgattgacacacgactattacaatatggtgatgtcttcaaagtgatgcccgatagcctcgttccgacggatggcatagtcctgtccggtatatcagagttggatgagtcgatgttgaccggcgagtcgcggcaaatcgagaaagcgccaggatctactgttatcggcgggtcgttgaacggatctggtgtactcacgatccgactcaccaaacttccatgtgagaacacaataagtacaattgcgagcatggtcgatgctgccaagttatccaagccgaggctccagggtctagctgatcgcgtcgcgtcctatttcgtgcctgccgtccttggccttaccctcatcgtgtttgtggcgtgggttgttgtcggcatccgcagtgaaggaaggtctgcatcagactcggttgttcaagcagtcatgtatgccattaccgtgcttattgtgtcgtgtccatgcgcaatcggcttagcagtccccatggttgttgtcattgccactggggtttccgctgataagggtgttgtattcaaatccgccgaggcaatagaaaatgcgtataagacgaaacacgtcgtctttgacaagacgggaacattgacagaggggaaaatgtcagtcgtggtggaacgttactgcttggaagaccagcacgctgtcgcgtcgagagcccttggtttgcttgcaaacattaaacaccccgtctctatggcggttgcagcttatctaaaggaacgagatgtcactccttatgaaatcttcgatattaaggttatccccggaaaaggagtcgaaggttatataaacggcgtacacctccgggctggcaattcgcgatggctcgccatgaccgaccatccctctgtgcaaccaatactggcagatggcttgactgtgttctgcgttacgatcgactccaagctagaagccgtctttggactaaaagatcagttgcgtgctgactctgcctccgtggttgcagagctgaagaaacgcaatatttccgtctcgatcctcagcggcgacgatgatatggctgtgcgcaccgtggcatcaaccttggccatcgatcgcgagaacgtcaggtcacgatgctcgcctgctgacaagcaggcttatatacagaagctcctcgagcatgacagtggcaagaacggaagtcccgtcgtcgtctttgttggcgacggtaccaacgatgccgttgcgctgacacaagcgaccatcggcgtgcacatcaactcgggcacagatgtcgcgcagtcggcggccgatgtggtcctcatgcgaccctcgcttgaaaacatcatcaccatagtggacatttcccgcgcctctgtgcgccggattctgttcaacttcgcatggagcttcgtctataatgtgttctcgatcttgctttccgcgggcgcctttgcatcttcgccccagatgcgcaatgttaagattccgcccgagttcgcagggctgggtgagctagtcagtgtcctgccagttattgttgtcggagttagtatgcgatgggttaagttctag

SEQ ID NO: 34908 - protein, 1188 aa, Muscodor strobelii
  misc_feature: SGI Peptide ID NO. 572073
  misc_feature (383)..(446): Pfam Id: PF00403 Pfam Desc: Heavy-metal-associated domain
  misc_feature (867)..(1094): Pfam Id: PF00702 Pfam Desc: haloacid dehalogenase-like hydrolase
  misc_feature (632)..(863): Pfam Id: PF00122 Pfam Desc: E1-E2 ATPase
  misc_feature (148)..(1188): NCBI GI: 256727360 Blast Desc: NECHADRAFT_33309 [Nectria haematococca mpVI 77-13-4]
  misc_feature (126)..(1188): NCBI GI: 255930541 Blast Desc: Pc06g02280 [Penicillium chrysogenum Wisconsin 54-1255] gi|211581443|emb|CAP79221.1| Pc06g02280 [Penicillium chrysogenum Wisconsin 54-1255]
  misc_feature (145)..(1188): NCBI GI: 70996450 Blast Desc: copper-transporting ATPase [Aspergillus fumigatus Af293] gi|66850615|gb|EAL90942.1| copper-transporting ATPase, [Aspergillus fumigatus Af293]
  misc_feature (183)..(1188): NCBI GI: 255954687 Blast Desc: Pc21g10640 [Penicillium chrysogenum Wisconsin 54-1255] gi|211589807|emb|CAP95961.1| Pc21g10640 [Penicillium chrysogenum Wisconsin 54-1255]
  misc_feature (148)..(1170): NCBI GI: 255939209 Blast Desc: Pc15g01540 [Penicillium chrysogenum Wisconsin 54-1255] gi|211584996|emb|CAP83040.1| Pc15g01540 [Penicillium chrysogenum Wisconsin 54-1255]
  misc_feature (270)..(1187): NCBI GI: 115388359 Blast Desc: ATEG_02507 [Aspergillus terreus NIH2624] gi|114195769|gb|EAU37469.1| ATEG_02507 [Aspergillus terreus NIH2624]
  misc_feature (180)..(1187): NCBI GI: 242805762 Blast Desc: copper-transporting ATPase, [Talaromyces stipitatus ATCC 10500] gi|218715224|gb|EED14646.1| copper-transporting ATPase, [Talaromyces stipitatus ATCC 10500]
  misc_feature (258)..(1187): NCBI GI: 169606234 Blast Desc: SNOG_06154 [Phaeosphaeria nodorum SN15] gi|160706943|gb|EAT85985.2| SNOG_06154 [Phaeosphaeria nodorum SN15]
  misc_feature (250)..(1188): NCBI GI: 156536662 Blast Desc: copper transporting P-type ATPase protein [Penicillium janthinellum]
  misc_feature (380)..(1188): NCBI GI: 46136331 Blast Desc: FG09681.1 [Gibberella zeae PH-1]
  misc_feature (372)..(1188): SWISSPROT Homolog: EC 3.6.3.4 Copper-exporting ATPase
MDMPEKQPPFAESAEPPMMDCQSACCSAAIESAEPLTDSCTPLGPEEMAASCADATEGRNEIKSSTTAVSTVSDCCSGCFSFSDNQPTAVSDPEPTCAAGIALSSCSDHGDAESSKKNLACCSDEGSCYDIKGKAAVNDTTRITTQGCQDVYCDFSKEDNVCGPACEDQCCTLDSPANATPSCCEGKPAPCCDETCIERLVSRERVAGTKRTAAGSVSSRSSASIREEYGIRLAALGCLCRALIALGQESCCTTKKPSSASKRQSSAARKKSSKKVAAVHNQSCGASSTCKASGSQGDCADGVQKRNKSQCSDRETSTSKRPRSPACTKGCCGSPQIAAASKPVNPSKRDRKNATVTDSGALTIASDLPDPDLEIGANVEHVALGISGMTCTGCETKLQATLGKLPAISNLKSSLVLGRVEFELRRASVSNIIKHIEKTTEFKCDVLMADGSSIDVLPTQGAKDFLKQSPPRGVSEMSMVDEKTVCIVFDPKIIGARDLTERGFDAPLPLASLENDLALAAGGKHVRYLGLMTLLSVILTIPVLVLAYAPLRERPIVYGSISLALATIIQVVIAGPFYPTAIKSLIFSRVIEMDLLIVLSTSAAYIFSVVAFGHLVHGNKLSPGEFFETQTLLVTLIMVGRWVSALARQKAMESFPIQSLQASTALLASPTSDGTETTIDTRLLQYGDVFKVMPDSLVPTDGIVLSGISELDESMLTGESRQIEKAPGSTVIGGSLNGSGVLTIRLTKLPCENTISTIASMVDAAKLSKPRLQGLADRVASYFVPAVLGLTLIVFVAWVVVGIRSEGRSASDSVVQAVMYAITVLIVSCPCAIGLAVPMVVVIATGVSADKGVVFKSAEAIENAYKTKHVVFDKTGTLTEGKMSVVVERYCLEDQHAVASRALGLLANIKHPVSMAVAAYLKERDVTPYEIFDIKVIPGKGVEGYINGVHLRAGNSRWLAMTDHPSVQPILADGLTVFCVTIDSKLEAVFGLKDQLRADSASVVAELKKRNISVSILSGDDDMAVRTVASTLAIDRENVRSRCSPADKQAYIQKLLEHDSGKNGSPVVVFVGDGTNDAVALTQATIGVHINSGTDVAQSAADVVLMRPSLENIITIVDISRASVRRILFNFAWSFVYNVFSILLSAGAFASSPQMRNVKIPPEFAGLGELVSVLPVIVVGVSMRWVKF

SEQ ID NO: 34909 - DNA, 915 bp, Muscodor strobelii
  misc_feature: SGI EST ID NO. CUFF.83081.0
  misc_feature: Variant of the nucleotide sequence at SEQ ID NO 34907
cagtagagcaatgaataactgtattaaacttccttttctttagagccaggcatggtaattgacaccataacacggtcggtgtgctgtgctccagcaggacttggcaaagtgccacaacaagaaccccggctgccagctcccccttcttccttttctctctccaccctgcctcttataaggaaaacaccaaggcctttaacttgcatatactatcatcaccgagcggtcacgccactatggatatgcctgagaagcaacctcctttcgctgagagcgcggagccgccgatgatggattgtcaatctgcatgctgtagcgctgccatcgaatcagcggagcctctgaccgatagctgcactcctcttggacctgaggaaatggcggcgtcttgtgccgacgcgaccgagggccggaatgaaatcaaatcctctaccactgctgtttccactgtatctgattgctgttctggttgcttttctttttccgacaaccaaccaaccgcggtttctgaccctgagcccacctgcgctgctggtattgccctttcatcttgttccgaccatggtgatgctgagtcttcgaagaagaatctcgcttgctgctccgatgaaggctcgtgctatgatatcaagggtaaggccgcggttaacgacacaactcggatcactacacagggttgtcaagatgtctactgcgatttttcgaaggaagacaatgtttgcggccccgcatgcgaggatcagtgctgcacacttgactcgcccgccaatgcgacgccatcttgctgcgaagggaagccagctccatgctgtgacgaaacttgcattgagcgactcgtttcccgcgagcgagttgcgggaaccaaacgtactgccgctggctccgtttcctcaaggagtagtgcgtcaatccgag

SEQ ID NO: 34910 - DNA, 978 bp, Muscodor strobelii
  misc_feature: SGI cDNA ID NO. 572074
  misc_feature: Encodes the peptide sequence at SEQ ID NO 34911
atggatttttactctcagcctcaaaatctgctaggtgatgactggtcttcgagaccgcagcgaatagaatatgggccccagagcatccagaatttctctcctcctggccctgcacagttgacacagtacccgcttggagatatcccagattctgcagcctttccccagaaatcaaattcagcttcaggtatgccggccgataatcactttcagaacatcgaaaatgttgcaccacctatgctattccctaatccgctattccagacagagggtacagatggtgagagtagtaggtatagtccaagtgtagacgaatcagagctacatgccaccccggaagggattgccaggaatgatactcccaggtggaatgccagaaactccactctgtctccagagtgcgactctgaggacatcactcctgacaggaacgatgagaatgatgttgaagttagcatacttgacatgcctaatccggttgaggatgatgactttcttgcacctctcagatttgaagcgatgcaggaggggatcttcttctcgcagaccgacactccttttgacggcccttcgaactatatccggggatttgagaaaacacccggcacacagcctgatacgctttgtgacgaagacgggtctggtggtatgaatagtttctttgattttctttctgcttccaaccttcttgaaagcgatactgaggattcaaagtcgcaggagcagagaaggaagtcctttgatcttgacgagttcaacagcatgaaccctgctggaactccgattccagagctgacaccaagatacttggcatgggtcgacacgattcggggtacaaaggacttcgaaattctcatcaacgatgctactttgtacattcagactttaacaactgcggttcccggaaaaatccccaagatggcgcgcgttcagctagagcgcctcgagacactggaacatccgagcggtgactgttag

SEQ ID NO: 34911 - protein, 325 aa, Muscodor strobelii
  misc_feature: SGI Peptide ID NO. 572074
MDFYSQPQNLLGDDWSSRPQRIEYGPQSIQNFSPPGPAQLTQYPLGDIPDSAAFPQKSNSASGMPADNHFQNIENVAPPMLFPNPLFQTEGTDGESSRYSPSVDESELHATPEGIARNDTPRWNARNSTLSPECDSEDITPDRNDENDVEVSILDMPNPVEDDDFLAPLRFEAMQEGIFFSQTDTPFDGPSNYIRGFEKTPGTQPDTLCDEDGSGGMNSFFDFLSASNLLESDTEDSKSQEQRRKSFDLDEFNSMNPAGTPIPELTPRYLAWVDTIRGTKDFEILINDATLYIQTLTTAVPGKIPKMARVQLERLETLEHPSGDC

SEQ ID NO: 34912 - DNA, 1425 bp, Muscodor strobelii
  misc_feature: SGI cDNA ID NO. 572075
  misc_feature: Encodes the peptide sequence at SEQ ID NO 34913
atgcttgctcttcgagatcttcaatcgcaaatcccgcatcaaaagagacgtctacctagttcggctacgttatctaatgagaacgttagcttaatgcttgggtggattgatgactgcgtgaagagccattctctgtgtttgaatgccaattctggagttaaatcatggatacctgatcggcttttagaagttcaacacgaagagaaccgcatgcgagttcgacttgttgacaaatccgagacagacacgcttgggaatattagatacgctgcactaagccacgtctggggtgattggaacaccgcgccgtctcttcgtttgttgagggagaatcacactaaattccaagtcggaatatatgagtcgactctaccagggaacttctttaatgcatgtcaagtctgtttgcgcctcggtatacgatatctttggattgactcgctttgcatcatacaagattcacctgcagactggaatgaacaagctatactgatgcatctcatataccgccacgcgctagtcacaatcgtggctacatcggctaaatcttgtcatgatggatttctcgaccgcaacattggtcgtgtatccgccatcaagattccctatgcttcttcaacgcttgacaagggcacagggctccgtcggcattggcaactgttcctaggcgaatacaccggccgtggactaactgtcccgtcggacaagctcattgccatacaaagcgtagcggaggatatggctgcgacaacaaaaggcgattacattcgctacgctggcatgtggcgtgacaatcttcggaacgagatgatctggtatccgtcatctagtaacccttggcgaccctccgaatggcgtgcacctagctggtcatgggcttctgtcgatggccaagtgcttttctggcatcgagacttccgtacgtcgggacgtagcagcccaggcactctacttcactcattagcccaacatcctctcgaggtgctatctatagatcaagataatcctgatccgacgtcagcgctccggggattcatcgagctcaaaggactaatcatacaaatagatctcattgagaagacaaatgccagcgacagagttttcttcccttatgatctagcaactaatgaaagtcaagtggagccaatgacgaccgcagcgaggcaagtctttgcacatgggcgggttgactttgaggatttcgatctagattgtcaacacggcaggttcatctacttgcatgtgaatgatgatgcgcgagctactggccttatactagtcggttcgcctacagcaaacaatttagaaacgcctgcttggaagagagtcggtatcgcaacactgttttttgatcggtcagacaagccgattctagaatctttcgctctcagaagagctgttagtcaacaagtccgtgtcatttga

SEQ ID NO: 34913 - protein, 474 aa, Muscodor strobelii
  misc_feature: SGI Peptide ID NO. 572075
  misc_feature (89)..(220): Pfam Id: PF06985 Pfam Desc: Heterokaryon incompatibility protein (HET)
  misc_feature (89)..(180): Pfam Id: PF06985 Pfam Desc: Heterokaryon incompatibility protein (HET)
  misc_feature (15)..(299): NCBI GI: 145608084 Blast Desc: MGG_03391 [Magnaporthe grisea 70-15] gi|145015592|gb|EDK00082.1| MGG_03391 [Magnaporthe grisea 70-15]
  misc_feature (16)..(301): NCBI GI: 238487926 Blast Desc: ankyrin repeat-containing protein, [Aspergillus flavus NRRL3357] gi|220700080|gb|EED56419.1| ankyrin repeat-containing protein, [Aspergillus flavus NRRL3357]
  misc_feature (31)..(201): NCBI GI: 189206854 Blast Desc: conserved [Pyrenophora tritici-repentis Pt-1C-BFP] gi|187975854|gb|EDU42480.1| conserved [Pyrenophora tritici-repentis Pt-1C-BFP]
  misc_feature (23)..(198): NCBI GI: 149210825 Blast Desc: MGCH7_ch7g885 [Magnaporthe grisea 70-15] gi|86196840|gb|EAQ71478.1| MGCH7_ch7g885 [Magnaporthe grisea 70-15]
  misc_feature (124)..(204): NCBI GI: 256727565 Blast Desc: NECHADRAFT_76523 [Nectria haematococca mpVI 77-13-4]
  misc_feature (15)..(218): NCBI GI: 39955223 Blast Desc: MGG_08988 [Magnaporthe grisea 70-15] gi|145021053|gb|EDK05182.1| MGG_08988 [Magnaporthe grisea 70-15]
  misc_feature (24)..(189): NCBI GI: 116193251 Blast Desc: CHGG_06343 [Chaetomium globosum CBS 148.51] gi|88182256|gb|EAQ89724.1| CHGG_06343 [Chaetomium globosum CBS 148.51]
  misc_feature (19)..(191): NCBI GI: 116206180 Blast Desc: CHGG_02383 [Chaetomium globosum CBS 148.51] gi|88182980|gb|EAQ90448.1| CHGG_02383 [Chaetomium globosum CBS 148.51]
  misc_feature (25)..(209): NCBI GI: 46126545 Blast Desc: FG07650.1 [Gibberella zeae PH-1]
  misc_feature (29)..(189): NCBI GI: 256720306 Blast Desc: NECHADRAFT_89173 [Nectria haematococca mpVI 77-13-4]
MLALRDLQSQIPHQKRRLPSSATLSNENVSLMLGWIDDCVKSHSLCLNANSGVKSWIPDRLLEVQHEENRMRVRLVDKSETDTLGNIRYAALSHVWGDWNTAPSLRLLRENHTKFQVGIYESTLPGNFFNACQVCLRLGIRYLWIDSLCIIQDSPADWNEQAILMHLIYRHALVTIVATSAKSCHDGFLDRNIGRVSAIKIPYASSTLDKGTGLRRHWQLFLGEYTGRGLTVPSDKLIAIQSVAEDMAATTKGDYIRYAGMWRDNLRNEMIWYPSSSNPWRPSEWRAPSWSWASVDGQVLFWHRDFRTSGRSSPGTLLHSLAQHPLEVLSIDQDNPDPTSALRGFIELKGLIIQIDLIEKTNASDRVFFPYDLATNESQVEPMTTAARQVFAHGRVDFEDFDLDCQHGRFIYLHVNDDARATGLILVGSPTANNLETPAWKRVGIATLFFDRSDKPILESFALRRAVSQQVRVI

SEQ ID NO: 34914 - DNA, 1635 bp, Muscodor strobelii
  misc_feature: SGI EST ID NO. CUFF.83095.0
  misc_feature: Variant of the nucleotide sequence at SEQ ID NO 34912
attaacttgcctatgcttacaatgcttgctcttcgagatcttcaatcgcaaatcccgcatcaaaagagacgtctacctagttcggctacgttatctaatgagaacgttagcttaatgcttgggtggattgatgactgcgtgaagagccattctctgtgtttgaatgccaattctggagttaaatcatggatacctgatcggcttttagaagttcaacacgaagagaaccgcatgcgagttcgacttgttgacaaatccgagacagacacgcttgggaatattagatacgctgcactaagccacgtctggggtgattggaacaccgcgccgtctcttcgtttgttgagggagaatcacactaaattccaagtcggaatatatgagtcgactctaccagggaacttctttaatgcatgtcaagtctgtttgcgcctcggtatacgatatctttggattgactcgctttgcatcatacaagattcacctgcagactggaatgaacaagctatactgatgcatctcatataccgccacgcgctagtcacaatcgtggctacatcggctaaatcttgtcatgatggatttctcgaccgcaacattggtcgtgtatccgccatcaagattccctatgcttcttcaacgcttgacaagggcacagggctccgtcggcattggcaactgttcctaggcgaatacaccggccgtggactaactgtcccgtcggacaagctcattgccatacaaagcgtagcggaggatatggctgcgacaacaaaaggcgattacattcgctacgctggcatgtggcgtgacaatcttcggaacgagatgatctggtatccgtcatctagtaacccttggcgaccctccgaatggcgtgcacctagctggtcatgggcttctgtcgatggccaagtgcttttctggcatcgagacttccgtacgtcgggacgtagcagcccaggcactctacttcactcattagcccaacatcctctcgaggtgctatctatagatcaagataatcctgatccgacgtcagcgctccggggattcatcgagctcaaaggactaatcatacaaatagatctcattgagaagacaaatgccagcgacagagttttcttcccttatgatctagcaactaatgaaagtcaagtggagccaatgacgaccgcagcgaggcaagtctttgcacatgggcgggttgactttgaggatttcgatctagattgtcaacacggcaggttcatctacttgcatgtgaatgatgatgcgcgagctactggccttatactagtcggttcgcctacagcaaacaatttagaaacgcctgcttggaagagagtcggtatcgcaacactgttttttgatcggtcagacaagccgattctagaatctttcgctctcagaagagctgttagtcaacaagtccgtgtcatttgaccagatgtcaattgtggcaatctcagtatcgtgaatacgcaatgcaacaggtattacactagtggctcacgtattcagattttacaccatcataatccgcgacggacaaagtcatgtggatcacgtaggtgaattgcttgtgacgcatcatctcacagaggtgagactggtgatcgtggaagcttccga

SEQ ID NO: 34915 - DNA, 1140 bp, Muscodor strobelii
  misc_feature: SGI cDNA ID NO. 572076
  misc_feature: Encodes the peptide sequence at SEQ ID NO 34916
atgagaatgaagttcgaagttcgcgatgcggccatcacattgctcatatttgcccggctctatgctagcttggcagactctattccaatcccgccaccaacgggaccatactctgtaggtatcacgaaacagacaatcccatacgacaatttgcatgatcctgtgtcgccaaatggtacgagcacgcgcttcttagctaccatcttctatcccacagcacaaaaattccaaggcgaacctaagccatatctaaaccccgagacggccgcgttctatgagcagcaaaataactacagcacagatgtgcttgcttctatgacatcgatactccaaaaggatgcaccttttctcacgggctatgatactgaaggatcgcgccatccgacgctcatctataattcatgtggcattggcccgccgacagaggcgaacactatcctgctgtcagacttagcgtcgtacggatacgtcgtcatcggccttgatcacccatttgaacagcccttcatacgatttcctgatggcacagctgtgaagggggttccactcaactcacagaataacacgctcgttgagcaaatctacgagcttaggctacttgataacagtgtctttctcgattacttgcctgagcttgcggcacagttaaacgcgccgtttaagacaagtcagctcggcatcttcggctgctcactcggtggcgcttctgctttgggatcactgcaggtccggcccgagctcgtttcgggtctcaatgccgacgggtcattctggggcagactaacgacgaatacctctgcggccgacgtgaagaagccggtctttcttctgggtatggagggtcacgggggtgactggtttactttccccctatggcagactggcagttacttcaggaaggttcttgtgcaaggcgcgcttcatcacgactttcgtgatgccgctttttggaagaccgtcgatcgaggatcagacatggcgcttgggacgattgacggctttagagcgatgcaaatcgtgaaaacagtcgtgagggcattctttgattatacattacttggacagccatcgcctattctggaggggccctcggaggaatggcctcagcttcagtattggaacaaaacgagccagcaatga

SEQ ID NO: 34916 - protein, 379 aa, Muscodor strobelii
  misc_feature: SGI Peptide ID NO. 572076
  misc_feature (10)..(354): NCBI GI: 39977415 Blast Desc: MGG_06610 [Magnaporthe grisea 70-15] gi|145015942|gb|EDK00432.1| MGG_06610 [Magnaporthe grisea 70-15]
  misc_feature (15)..(370): NCBI GI: 71002852 Blast Desc: PAF acetylhydrolase family protein [Aspergillus fumigatus Af293] gi|66853745|gb|EAL94069.1| PAF acetylhydrolase family protein [Aspergillus fumigatus Af293]
  misc_feature (15)..(370): NCBI GI: 121704577 Blast Desc: PAF acetylhydrolase family protein [Aspergillus clavatus NRRL 1] gi|119398697|gb|EAW09126.1| PAF acetylhydrolase family protein [Aspergillus clavatus NRRL 1]
  misc_feature (15)..(370): NCBI GI: 159130162 Blast Desc: PAF acetylhydrolase family protein [Aspergillus fumigatus A1163]
  misc_feature (15)..(370): NCBI GI: 119482435 Blast Desc: PAF acetylhydrolase family protein [Neosartorya fischeri NRRL 181] gi|119409400|gb|EAW19349.1| PAF acetylhydrolase family protein [Neosartorya fischeri NRRL 181]
  misc_feature (16)..(374): NCBI GI: 154313952 Blast Desc: BC1G_04919 [Botryotinia fuckeliana B05.10] gi|150849065|gb|EDN24258.1| BC1G_04919 [Botryotinia fuckeliana B05.10]
  misc_feature (35)..(373): NCBI GI: 271968446 Blast Desc: Sros_7209 [Streptosporangium roseum DSM 43021] gi|270511621|gb|ACZ89899.1| conserved [Streptosporangium roseum DSM 43021]
  misc_feature (15)..(370): NCBI GI: 242805475 Blast Desc: PAF acetylhydrolase family protein [Talaromyces stipitatus ATCC 10500] gi|218715163|gb|EED14585.1| PAF acetylhydrolase family protein [Talaromyces stipitatus ATCC
  misc_feature (30)..(372): NCBI GI: 169763002 Blast Desc: [Aspergillus oryzae RIB40] gi|83770429|dbj|BAE60562.1| protein product [Aspergillus oryzae]
  misc_feature (30)..(372): NCBI GI: 238488837 Blast Desc: PAF acetylhydrolase family protein [Aspergillus flavus NRRL3357] gi|220698044|gb|EED54384.1| PAF acetylhydrolase family protein [Aspergillus flavus NRRL3357]
MRMKFEVRDAAITLLIFARLYASLADSIPIPPPTGPYSVGITKQTIPYDNLHDPVSPNGTSTRFLATIFYPTAQKFQGEPKPYLNPETAAFYEQQNNYSTDVLASMTSILQKDAPFLTGYDTEGSRHPTLIYNSCGIGPPTEANTILLSDLASYGYVVIGLDHPFEQPFIRFPDGTAVKGVPLNSQNNTLVEQIYELRLLDNSVFLDYLPELAAQLNAPFKTSQLGIFGCSLGGASALGSLQVRPELVSGLNADGSFWGRLTTNTSAADVKKPVFLLGMEGHGGDWFTFPLWQTGSYFRKVLVQGALHHDFRDAAFWKTVDRGSDMALGTIDGFRAMQIVKTVVRAFFDYTLLGQPSPILEGPSEEWPQLQYWNKTSQQ

SEQ ID NO: 34917 - DNA, 1575 bp, Muscodor strobelii
  misc_feature: SGI EST ID NO. CUFF.83099.0
  misc_feature: Variant of the nucleotide sequence at SEQ ID NO 34915
gcctagcctgcaatgaggctgcctgtcgttatgcccgaggacagggattaaaacaagaatattgtcgttccgccctctctcttattcgtaatgagccagtccttaccctctcaatcactacgcgagagccgtcgtggcaatgagaatgaagttcgaagttcgcgatgcggccatcacattgctcatatttgcccggctctatgctagcttggcagactctattccaatcccgccaccaacgggaccatactctgtaggtatcacgaaacagacaatcccatacgacaatttgcatgatcctgtgtcgccaaatggtacgagcacgcgcttcttagctaccatcttctatcccacagcacaaaaattccaaggcgaacctaagccatatctaaaccccgagacggccgcgttctatgagcagcaaaataactacagcacagatgtgcttgcttctatgacatcgatactccaaaaggatgcaccttttctcacgggctatgatactgaaggatcgcgccatccgacgctcatctataattcatgtggcattggcccgccgacagaggcgaacactatcctgctgtcagacttagcgtcgtacggatacgtcgtcatcggccttgatcacccatttgaacagcccttcatacgatttcctgatggcacagctgtgaagggggttccactcaactcacagaataacacgctcgttgagcaaatctacgagcttaggctacttgataacagtgtctttctcgattacttgcctgagcttgcggcacagttaaacgcgccgtttaagacaagtcagctcggcatcttcggctgctcactcggtggcgcttctgctttgggatcactgcaggtccggcccgagctcgtttcgggtctcaatgccgacgggtcattctggggcagactaacgacgaatacctctgcggccgacgtgaagaagccggtctttcttctgggtatggagggtcacgggggtgactggtttactttccccctatggcagactggcagttacttcaggaaggttcttgtgcaaggcgcgcttcatcacgactttcgtgatgccgctttttggaagaccgtcgatcgaggatcagacatggcgcttgggacgattgacggctttagagcgatgcaaatcgtgaaaacagtcgtgagggcattctttgattatacattacttggacagccatcgcctattctggaggggccctcggaggaatggcctcagcttcagtattggaacaaaacgagccagcaatgattcctatattaggacagcgccatcaagattgtcgcagtggaaattcatttcgattatgcgtataaatcaaactattcgtcgccccacgcgccatctgaggactacgggtgatcctagggtgattgagttgaggcgtcgtagcaaccacagcgttgcccacaacaccaccccacagacacaaagccatatcaatcccagtaacacggtcgctcattacccgtagtgggtttatacaagtgggtgatttaatggtgtactttattactagaatgcatctttagaatacctattcgaat

SEQ ID NO: 34918 - DNA, 1794 bp, Muscodor strobelii
  misc_feature: SGI cDNA ID NO. 572077
  misc_feature: Encodes the peptide sequence at SEQ ID NO 34919
atgcctgatctctctctctcatcattcactcatctcctgttcagtcaagtgcccgaaaactgcaaatctatctcatctcatagcgtgcatgatcatacctccttaatcctgttcctcaacatcaaccctatcctacgccgagagcgcaagatgttcaatttctgggcaaatcccacgcccatctcaacaccaggatgcacctccccatcaacaccaacaagcacaacaccctcacaaatcctccagacaacactagcccagcacgccgcagagctgaagcgtcggcgccgcccgcgaataatcctcggctccctcataacactcttcctcacatcctccggtgggatctcactggcaatagccctgctcgtaaaccccgttgaggtgcaagcagcctgtctttcacgggacttgatactatttgcatctatcttcgctatgttatatatatgcctacacattcgaggtgctcggaaagactacacgagagtagcaccagggccgccgcagctatacgggcagtatctgcatgccactgcgctgatagtcagccgactcgccattggagtctggatctcggccctcattagcacggcggtgatgatcagtaaagcattgcatttcacgggtttcccaggaacacttccgtatctgtacttacttgtttgtattggtgctattccctcattcataataatatcagcaacaatagaaacccaccccaagcccttcgcaacagcctcaatatcccaaccctcattcctaacctgtcgcgtttccgagttcgcagacgacttagcagcagacatgtccgtatcacgccgtgcctcacttcagcgcaaaaacagcgatcaaagcatcccaggatccgtcttaacagttcccacagaagaaatcttccgtctcggggccgcaaagatggaggaattactcgctgcgaaacaagcgaagaaactcgccgagtcaaaaacagagcttcccgctgaagccgtgccagctgttcctggggcatttcctactgaacccgttgtcgtaccgccagcaccaaaaacaccagatgctatcccaaagccccaaccgacgtatagcccgggaagctggcgcacagaatggaacaacgtagcgcaagaagtcggcatgtcacaaatcccacctacatcatcaacaggctcgtcaaccagcaccagtacacaaacgactccgccctcctcatcaatctactcatcccactacacttcaacttcaacatccacaccgccatcccagccctactacaggccgtctcaaagcccttattaccctccccaaaattaccctctccaaattccaacagcagcttcaagatcagcaccttcgccttcacaccctataccccacccatcccacccatcacttccaccacacccaaacgggccccgaaaacccccaacagcaagcacgagcatagcatccacatccgcccgctcccgtctctccaccgtacgatatgcgtcagagcccgaagtcgctgtctgtcagccgatgaccgttgttcctaatcctgcgtatgtcgctttttaccacaatgggaagagcgtagaagtaactgcagagaaaaatggcaacgggagcgggaatgtaagtgcaagtgcgggtggaagtgcggctgtaggtacaggaggaaacgtaaacggcccaaggccggagcccgtagcgatattaagaggtgctcaggaggcgcagcggcgagctgctgagggcgtgagagaggatgagagggtgagcagggttcctggggcgttcattgagggctga

SEQ ID NO: 34919 - protein, 597 aa, Muscodor strobelii
  misc_feature: SGI Peptide ID NO. 572077
MPDLSLSSFTHLLFSQVPENCKSISSHSVHDHTSLILFLNINPILRRERKMFNFWANPTPISTPGCTSPSTPTSTTPSQILQTTLAQHAAELKRRRRPRIILGSLITLFLTSSGGISLAIALLVNPVEVQAACLSRDLILFASIFAMLYICLHIRGARKDYTRVAPGPPQLYGQYLHATALIVSRLAIGVWISALISTAVMISKALHFTGFPGTLPYLYLLVCIGAIPSFIIISATIETHPKPFATASISQPSFLTCRVSEFADDLAADMSVSRRASLQRKNSDQSIPGSVLTVPTEEIFRLGAAKMEELLAAKQAKKLAESKTELPAEAVPAVPGAFPTEPVVVPPAPKTPDAIPKPQPTYSPGSWRTEWNNVAQEVGMSQIPPTSSTGSSTSTSTQTTPPSSSIYSSHYTSTSTSTPPSQPYYRPSQSPYYPPQNYPLQIPTAASRSAPSPSHPIPHPSHPSLPPHPNGPRKPPTASTSIASTSARSRLSTVRYASEPEVAVCQPMTVVPNPAYVAFYHNGKSVEVTAEKNGNGSGNVSASAGGSAAVGTGGNVNGPRPEPVAILRGAQEAQRRAAEGVREDERVSRVPGAFIEG

SEQ ID NO: 34920 - DNA, 2424 bp, Muscodor strobelii
  misc_feature: SGI cDNA ID NO. 572078
  misc_feature: Reduced expression when VOC is produced
  misc_feature: Encodes the peptide sequence at SEQ ID NO 34921
atggatgatccatggggttcaccgtgggctacgacagacacgcctacaccccacgatgcgccgaagcaatccgagccagatcacagctttctgagcccgccgcccaaggctttcttcggcactgtcaccggtccatcccccacacaatcaccctgggccaatgccgacgatgacgatgaatttggtgggtggtcgactgctgaccgtcccgaggcttccaacagccagacagcgtggggactgtggccggattctaatgcacaaatacctcgacttagcccgaggttgagcgtttccagcaaagacagtgccctcgcctggcccaacaatgccgtcccgtcacctgcactgaagtcgcgcagcggctcgcggactccctcgatattgcgtcagcactctccagacccttgggccacccaattttcactcaacaacaattccgaatctgaactcccatctcccccgatatttaccgtcaaccctgccgcgaaagccgagacgccatttgtggacgagcccctttcattcgcctcttcaagtgccgcagacaagacatcagagattgaacaagacagcagaacacgagcttcgaacggcgagcatagcaccgacaatgcggaaacaattcgcgataacgacaacaccacagacacaatcaagattgtcaacgatgatgtgcagatacggcccaagccagccatcaacaccctagagcctccgtctaggtcctcctcattactgtcagaggatagccacaatgcactagagggacaggagtcgccaatcacatcgatagacgaagagcgagggttccgcttgccagatacctcccgcaagtcttctggcaaggtccaagagctcgttggtgtctacgatcggctatccagatctacctcagaagagcccccagctgctgaatcgcgaggggacgtcggcactaccagccggagcacatcgcgtagacgatctgatcttgagagagatgaccaagtagagcctagtgatctcgagactgctgaaagcaccctcgctaaagaggctcgtctgtcgcttgacacgacagcatcaccggactcatcctcaactttagaggcgccatctattgatatcgctggccgtactcgtcgtcaagaaaccagagacattatagacaccccaatctcgggttctcgaactccctcggcccaaattcgaagcattgttgagaagtacggagagattcagttcactcctaatttagagctcctcgaaaagttatttcccagggacgacacattacccgcggccgacgatggcgagtatgtggacgtttcagatcatatactacgcgacagctttgcgtcaatatcggaacgaaaggcctggtataggatatcccggtttgggtctatgcgacaacacaattctggcgacgcggagaactaccgtagggtcacttggctcacgtccaatctccacgacgacgtagtcaagattgcgcgtcgttggatggaacaggatgcatatgcagggcgagctgtcctgggaggcacaaagcgcacaggattcttcgactgggattcggaggccgcccccgtgagtctcgatgaagtgttccggcgtaaagaagcccccaaacatgcgcgtacggcgtctattccagtcaatcctgtcgtcgctcgcgccgcatccctggaccgtccgtataggaattcgacgggtatctccattgctgaaaagctgcattcgccgattgcatctgctgcgccgacacctgatttcggatggaaccttggcaatgatcagaattcaacgcgaccaaactcaagctcttcgatccctccgccagcgccagtatcccgaccttcgcctgtgcagattacaatcgcggatgacgacgaggatgattggggcgagatggtatcatcaccggttgttgctaacggccctagtcctgctcatgcacagccaataataccggataaaagagtgtctgaatccgaacctatacctcaaaagatgccaaaggtggctgagatagcacggccacacatattcgaccagagagagtttagaccaaccgcgccggtaccagactcattgccaggaaatggattgttattactcgagaagccggcgcaagtggcatcatcgacatcgaatgaagacgtctggcaactggaagacttttcagcctttggggcgccacagtcacaggcgaaacaaaacatttcgaacggagccacaaaaatcacggttccccccgtcagctttactgagaccgggcaagtgatacctgcggaggacaacctcactaatttcagtcttgctccgaccacaaagacacctcacgaaatgaatgaagttacaaatgacgttgaagaggctgctattgtggaaagtatcctgaagaacctccctgacttctcatacatgcttcggtga

SEQ ID NO: 34921 - protein, 807 aa, Muscodor strobelii
  misc_feature: SGI Peptide ID NO. 572078
  misc_feature (1)..(807): NCBI GI: 85104216 Blast Desc: NCU01085 [Neurospora crassa OR74A] gi|18376190|emb|CAD21306.1| related to glucan 1, 4-alpha-glucosidase [Neurospora crassa] [Neurospora crassa OR74A]
  misc_feature (1)..(807): NCBI GI: 39970059 Blast Desc: MGG_10638 [Magnaporthe grisea 70-15] gi|145010057|gb|EDJ94713.1| MGG_10638 [Magnaporthe grisea 70-15]
  misc_feature (256)..(807): NCBI GI: 116198707 Blast Desc: CHGG_07509 [Chaetomium globosum CBS 148.51] gi|88178788|gb|EAQ86256.1| CHGG_07509 [Chaetomium globosum CBS 148.51]
  misc_feature (269)..(610): NCBI GI: 256731054 Blast Desc: [Nectria haematococca mpVI 77-13-4]
  misc_feature (379)..(643): NCBI GI: 156063224 Blast Desc: SS1G_01728 [Sclerotinia sclerotiorum 1980] gi|154697064|gb|EDN96802.1| SS1G_01728 [Sclerotinia sclerotiorum 1980]
  misc_feature (1)..(569): NCBI GI: 154294428 Blast Desc: BC1G_13734 [Botryotinia fuckeliana B05.10] gi|150844743|gb|EDN19936.1| BC1G_13734 [Botryotinia fuckeliana B05.10]
  misc_feature (290)..(649): NCBI GI: 261357891 Blast Desc: [Verticillium albo-atrum VaMs.102]
  misc_feature (415)..(526): NCBI GI: 189210144 Blast Desc: [Pyrenophora tritici-repentis Pt-1C-BFP] gi|187977497|gb|EDU44123.1| [Pyrenophora tritici-repentis Pt-1C-BFP]
  misc_feature (1)..(80): NCBI GI: 116198707 Blast Desc: CHGG_07509 [Chaetomium globosum CBS 148.51] gi|88178788|gb|EAQ86256.1| CHGG_07509 [Chaetomium globosum CBS 148.51]
  misc_feature: Useful for introducing or modulating the production of volatile compounds
MDDPWGSPWATTDTPTPHDAPKQSEPDHSFLSPPPKAFFGTVTGPSPTQSPWANADDDDEFGGWSTADRPEASNSQTAWGLWPDSNAQIPRLSPRLSVSSKDSALAWPNNAVPSPALKSRSGSRTPSILRQHSPDPWATQFSLNNNSESELPSPPIFTVNPAAKAETPFVDEPLSFASSSAADKTSEIEQDSRTRASNGEHSTDNAETIRDNDNTTDTIKIVNDDVQIRPKPAINTLEPPSRSSSLLSEDSHNALEGQESPITSIDEERGFRLPDTSRKSSGKVQELVGVYDRLSRSTSEEPPAAESRGDVGTTSRSTSRRRSDLERDDQVEPSDLETAESTLAKEARLSLDTTASPDSSSTLEAPSIDIAGRTRRQETRDIIDTPISGSRTPSAQIRSIVEKYGEIQFTPNLELLEKLFPRDDTLPAADDGEYVDVSDHILRDSFASISERKAWYRISRFGSMRQHNSGDAENYRRVTWLTSNLHDDVVKIARRWMEQDAYAGRAVLGGTKRTGFFDWDSEAAPVSLDEVFRRKEAPKHARTASIPVNPVVARAASLDRPYRNSTGISIAEKLHSPIASAAPTPDFGWNLGNDQNSTRPNSSSSIPPPAPVSRPSPVQITIADDDEDDWGEMVSSPVVANGPSPAHAQPIIPDKRVSESEPIPQKMPKVAEIARPHIFDQREFRPTAPVPDSLPGNGLLLLEKPAQVASSTSNEDVWQLEDFSAFGAPQSQAKQNISNGATKITVPPVSFTETGQVIPAEDNLTNFSLAPTTKTPHEMNEVTNDVEEAAIVESILKNLPDFSYMLR

SEQ ID NO: 34922 - DNA, 2947 bp, Muscodor strobelii
  misc_feature: SGI EST ID NO. CUFF.83119.0
  misc_feature: Variant of the nucleotide sequence at SEQ ID NO 34920
ctgcctgcagcacctatgcccctgaaacatcaacacttgacaacctggatttgcgcaactcatcactctccatcacgcgatcacgacgaggacgacgacatatatcacgtgaagacgaaaaacaatactgtgcataaggagtgacacatgttcaattgggtttatgcgatgcgccgacgccattatatcgacttttctcagtaatcgcaagccgacgaacccgggcatcgccaagggcttcaaacatgaacactgcgccccggagagatggatgatccatggggttcaccgtgggctacgacagacacgcctacaccccacgatgcgccgaagcaatccgagccagatcacagctttctgagcccgccgcccaaggctttcttcggcactgtcaccggtccatcccccacacaatcaccctgggccaatgccgacgatgacgatgaatttggtgggtggtcgactgctgaccgtcccgaggcttccaacagccagacagcgtggggactgtggccggattctaatgcacaaatacctcgacttagcccgaggttgagcgtttccagcaaagacagtgccctcgcctggcccaacaatgccgtcccgtcacctgcactgaagtcgcgcagcggctcgcggactccctcgatattgcgtcagcactctccagacccttgggccacccaattttcactcaacaacaattccgaatctgaactcccatctcccccgatatttaccgtcaaccctgccgcgaaagccgagacgccatttgtggacgagcccctttcattcgcctcttcaagtgccgcagacaagacatcagagattgaacaagacagcagaacacgagcttcgaacggcgagcatagcaccgacaatgcggaaacaattcgcgataacgacaacaccacagacacaatcaagattgtcaacgatgatgtgcagatacggcccaagccagccatcaacaccctagagcctccgtctaggtcctcctcattactgtcagaggatagccacaatgcactagagggacaggagtcgccaatcacatcgatagacgaagagcgagggttccgcttgccagatacctcccgcaagtcttctggcaaggtccaagagctcgttggtgtctacgatcggctatccagatctacctcagaagagcccccagctgctgaatcgcgaggggacgtcggcactaccagccggagcacatcgcgtagacgatctgatcttgagagagatgaccaagtagagcctagtgatctcgagactgctgaaagcaccctcgctaaagaggctcgtctgtcgcttgacacgacagcatcaccggactcatcctcaactttagaggcgccatctattgatatcgctggccgtactcgtcgtcaagaaaccagagacattatagacaccccaatctcgggttctcgaactccctcggcccaaattcgaagcattgttgagaagtacggagagattcagttcactcctaatttagagctcctcgaaaagttatttcccagggacgacacattacccgcggccgacgatggcgagtatgtggacgtttcagatcatatactacgcgacagctttgcgtcaatatcggaacgaaaggcctggtataggatatcccggtttgggtctatgcgacaacacaattctggcgacgcggagaactaccgtagggtcacttggctcacgtccaatctccacgacgacgtagtcaagattgcgcgtcgttggatggaacaggatgcatatgcagggcgagctgtcctgggaggcacaaagcgcacaggattcttcgactgggattcggaggccgcccccgtgagtctcgatgaagtgttccggcgtaaagaagcccccaaacatgcgcgtacggcgtctattccagtcaatcctgtcgtcgctcgcgccgcatccctggaccgtccgtataggaattcgacgggtatctccattgctgaaaagctgcattcgccgattgcatctgctgcgccgacacctgatttcggatggaaccttggcaatgatcagaattcaacgcgaccaaactcaagctcttcgatccctccgccagcgccagtatcccgaccttcgcctgtgcagattacaatcgcggatgacgacgaggatgattggggcgagatggtatcatcaccggttgttgctaacggccctagtcctgctcatgcacagccaataataccggataaaagagtgtctgaatccgaacctatacctcaaaagatgccaaaggtggctgagatagcacggccacacatattcgaccagagagagtttagaccaaccgcgccggtaccagactcattgccaggaaatggattgttattactcgagaagccggcgcaagtggcatcatcgacatcgaatgaagacgtctggcaactggaagacttttcagcctttggggcgccacagtcacaggcgaaacaaaacatttcgaacggagccacaaaaatcacggttccccccgtcagctttactgagaccgggcaagtgatacctgcggaggacaacctcactaatttcagtcttgctccgaccacaaagacacctcacgaaatgaatgaagttacaaatgacgttgaagaggctgctattgtggaaagtatcctgaagaacctccctgacttctcatacatgcttcggtgatcatgaactctggaaagaatattgaaatacttggagaaagttgtcgtcactcattggacagagtggcgaaatgtaacacaatgagagaagaattgtatcattaccttgcatggcgcatggcgttggcatgaagtgttggatacatgcaatattggtaccgcacttggatatacatggcattggcgtacttgaataaactacacatttcggccttttgatatactgttcatggaatatatgcgacacctagaaattt

SEQ ID NO: 34923 - DNA, 924 bp, Muscodor strobelii
  misc_feature: SGI cDNA ID NO. 572079
  misc_feature: Reduced expression when VOC is produced
  misc_feature: Encodes the peptide sequence at SEQ ID NO 34924
atgtcgctctcgaaaataaagcatatcgtactggttctgtccggaaagggaggcgttggcaaatcgtccgtcactacgcaactggctctctcgctatccctgtctggtcattccgttggcgtgcttgatgtcgatctcacgggaccttcgatgccacgaatgttcaatatagaaaatgcaaaagtcacacaagccccaggcggctggcttcccgtcaccgtccacccggccaacccggatgctggtgtcggtgaactgcgttgtatgagtctggggttcctgttgcaagccagaggagatgccgtcgtctggcgcggacccaagaagacggccatgattcgacagtttctttccgatgtgctctggggagacgttgactatctcctgatcgacacgccgccgggaacatctgacgagcacatttccctcgctgagaccttgggcaacgttgcaaggccaggccagctcgccggagcagtagttgtcacgacgcctcaggccatagctacggcggatgtcaggaaagagttgaacttctgcgtcaagactgggattcccgttattggtgttgttgagaacatggctggatttgtctgccccttctgtgccgaatgcagtgacctattcggaaaggggggtgggcaggtaatggccaacgattttaatgtcccgttcttaggtcgggtccccatcgaccctcaattcgtcacacttgtcgaggaaggacggaaaccagaatatcccgaagggactgtcatcaacggccatgattactcaaaaccaacacagaatggccacgacagcaagatcaatggaacggagtcgactaaagatgccagcctgttggctgagaagtacagggattgctcacttgaagcagtcttccgaaagatgacacaggatatcgttgcagctatcgggtga

SEQ ID NO: 34924 - protein, 307 aa, Muscodor strobelii
  misc_feature: SGI Peptide ID NO. 572079
  misc_feature (1)..(306): NCBI GI: 85104212 Blast Desc: NCU01084 [Neurospora crassa OR74A] gi|74622707|sp|Q8X0F1.1|CFD1_NEUCR RecName: Full=Cytosolic Fe-S cluster assembly factor CFD1; AltName: Full=Cytosolic Fe-S 1 to
  misc_feature (1)..(306): NCBI GI: 171693287 Blast Desc: protein product [Podospora anserina] gi|170946592|emb|CAP73394.1| protein product [Podospora anserina]
  misc_feature (1)..(306): NCBI GI: 116198709 Blast Desc: CHGG_07510 [Chaetomium globosum CBS 148.51] gi|121781135|sp|Q2GWZ4.1|CFD1_CHAGB RecName: Full=Cytosolic Fe-S cluster assembly factor CFD1; AltName: Full=Cytosolic Fe-S 1 CBS
  misc_feature (1)..(306): NCBI GI: 156063226 Blast Desc: SS1G_01729 [Sclerotinia sclerotiorum 1980] gi|154697065|gb|EDN96803.1| SS1G_01729 [Sclerotinia sclerotiorum 1980]
  misc_feature (1)..(306): NCBI GI: 154294430 Blast Desc: BC1G_13735 [Botryotinia fuckeliana B05.10] gi|150844744|gb|EDN19937.1| BC1G_13735 [Botryotinia fuckeliana B05.10]
  misc_feature (1)..(304): NCBI GI: 256728003 Blast Desc: [Nectria haematococca mpVI 77-13-4]
  misc_feature (1)..(306): NCBI GI: 261357892 Blast Desc: cytosolic Fe-S cluster assembling factor cfd-1 [Verticillium albo-atrum VaMs.102]
  misc_feature (1)..(307): NCBI GI: 46133789 Blast Desc: FG09034.1 [Gibberella zeae PH-1] gi|121811451|sp|Q4I174.1|CFD1_GIBZE RecName: Full=Cytosolic Fe-S cluster assembly factor CFD1; AltName: Full=Cytosolic Fe-S 1
  misc_feature (1)..(306): NCBI GI: 39970055 Blast Desc: MGG_10636 [Magnaporthe grisea 70-15] gi|145010060|gb|EDJ94716.1| MGG_10636 [Magnaporthe grisea 70-15]
  misc_feature (1)..(302): NCBI GI: 189209812 Blast Desc: cytosolic Fe-S cluster assembling factor cfd1 [Pyrenophora tritici-repentis Pt-1C-BFP] gi|187977331|gb|EDU43957.1| cytosolic Fe-S cluster assembling
  misc_feature: Useful for introducing or modulating the production of volatile compounds
MSLSKIKHIVLVLSGKGGVGKSSVTTQLALSLSLSGHSVGVLDVDLTGPSMPRMFNIENAKVTQAPGGWLPVTVHPANPDAGVGELRCMSLGFLLQARGDAVVWRGPKKTAMIRQFLSDVLWGDVDYLLIDTPPGTSDEHISLAETLGNVARPGQLAGAVVVTTPQAIATADVRKELNFCVKTGIPVIGVVENMAGFVCPFCAECSDLFGKGGGQVMANDFNVPFLGRVPIDPQFVTLVEEGRKPEYPEGTVINGHDYSKPTQNGHDSKINGTESTKDASLLAEKYRDCSLEAVFRKMTQDIVAAIG

SEQ ID NO: 34925 - DNA, 4956 bp, Muscodor strobelii
  misc_feature: SGI EST ID NO. CUFF.83764.1
  misc_feature: Variant of the nucleotide sequence at SEQ ID NO 34923
tgctgataaatgcaggtccgatccaggcgcattttcgtcccttcctacgaatctgggagaggaaggccaaatttcgtggacagcctgcgaaaatgattttgacccaacctccgtgacccgtaaatcacaaaaggtgacattcgcttgatcataccgatcactacccaccaagctattcctcaaaaacacacgcccacaatgtcgctctcgaaaataaagcatatcgtactggttctgtccggaaagggaggcgttggcaaatcgtccgtcactacgcaactggctctctcgctatccctgtctggtcattccgttggcgtgcttgatgtcgatctcacgggaccttcgatgccacgaatgttcaatatagaaaatgcaaaagtcacacaagccccaggcggctggcttcccgtcaccgtccacccggccaacccggatgctggtgtcggtgaactgcgttgtatgagtctggggttcctgttgcaagccagaggagatgccgtcgtctggcgcggacccaagaagacggccatgattcgacagtttctttccgatgtgctctggggagacgttgactatctcctgatcgacacgccgccgggaacatctgacgagcacatttccctcgctgagaccttgggcaacgttgcaaggccaggccagctcgccggagcagtagttgtcacgacgcctcaggccatagctacggcggatgtcaggaaagagttgaacttctgcgtcaagactgggattcccgttattggtgttgttgagaacatggctggatttgtctgccccttctgtgccgaatgcagtgacctattcggaaaggggggtgggcaggtaatggccaacgattttaatgtcccgttcttaggtcgggtccccatcgaccctcaattcgtcacacttgtcgaggaaggacggaaaccagaatatcccgaagggactgtcatcaacggccatgattactcaaaaccaacacagaatggccacgacagcaagatcaatggaacggagtcgactaaagatgccagcctgttggctgagaagtacagggattgctcacttgaagcagtcttccgaaagatgacacaggatatcgttgcagctatcgggtgacaaagcgatactttagggatctgcaggtatctatagagccgtcttaatgatctctcacgcccgtctatcagctacgcaaactcaaagtagcacgtcaagtggctcgctagattgtcatgtcagctggaataatccgtgtgactatacgatcgaccatgccccagaaactgttctgacaatccgaaataaacgacgcttcttgatacttaggctgttatcagaagcgacaagtggcatcgacagacagtgcacagggtggcaggcagcatctgcatgcccgatacgcaaggttggcctatcaaagggtacggcaacacgcatctacatgacagctaggtacacagcagcatagcacagacagctccagctcgccaggcacaaaccacggtcggcaacccaagctccaaaattgagcggtgtgttatacaacgatagacacagaatcaacatggaccaaaattacaagcgcattctttgacttgaagacttgatcgaaccagcatgagccattagatgtgccatgcgtggctatgaggcataaaatcagcaatatcgccattgattgtgacgctgcaagatcacatgctccaatgcaacgacgtgagatatcatctcataatctgtagacaagagactatggagacgagggggcgcgcgttcccggtcagaaaagattccgggatccccctgttgacgaggtgggatgggtagcattgaccaatgggacaaatagaaaaggcgaaatcttgcccctcttcgacgcattttcccgcagcgagacaagaagagcgagaaaaaaaagcccagacaatcgagaaattgaggcgtagctggataatggacctgtgacctcactttatttggatggatcaatcttttgggacctgcagagtcataaaatttgcccttaggcacacacaaaaaccctcgcgcttttcccaggctagatagcccaaccagaaccttgtttatcgtcataaaccaaagctttctccactgctgcttcccgtcgtctatttgtgccctacgaacctagagcaggcccgtgttgtcttccgcgccagctcaacaactcctcaccgacttcaacttttcctgtcgtcacgcacttaagccaccaagggtatgtaggctttattcccccagcggccaacaagctatcatccaaggttgcaacaactgttcgacaccagactattgctgagcacggcactaatcagcgtggtccaggcaaatttgttgtcacacgacactgcaccaccgcagagacggttgctattcttgatgccagaacataatcgccacttcccataaacaacaaccacgcttcggcgcatcgactactctacccagtccgacgcctgtcgtcttccatgagcccagtcgaccttctacgcttcctctctaagcccgcaaagcctcgatagcacccctttcggtcagatcgcttcatatcacatcttcggattattctttccgaacttcttcaccacttatttgcagatatcctcgtctgctaggtccgatactcccccataggtatcggtgtctgccagatcgaggccaaccactcccgatcaccattccgtggtcaaaggacgtcctcctcccccttcgcggccggcctccctagcgtccccttcgtgagacgttacagcatctatatcgacacctgcagctggcttccgccagcacacgatccctcccaccgacctgtgggccttctccctcagacgaacaccgcaaggttcgtttgggcggcagtcagcgctccgcggtagctacagcacatcgcctgcagccaggtacactcgcctcttcgatcccgagccagtagtccgcttctctgctccgagcttttcgtctggagatgtcgaacatcgggattcctaccaactatacattttcgccatctgagggcaccccacacttgactatcaatcatgatgtggccgccgacctagattctagcaatgccttcgagggacctgagaaactgctggaggtctggtttgctcccggtccaaaatgcttgccacccggcgccaagccgaatggcttgaaggcggtcgctagcgacatatgggttcccatgctcgacatggtcaactgcaagattctgtccgtgttggaggctgagcatatggatgcctacctgctttccgaatctagcatgtttgtcttcccccacaagctcatcttgaagacttgcgggaccacgacattgctgcttggccttcgtaggctcttacgcattgctgccgaacatgcgggcttccctttctacaacaccaagtccttggacgacatccatacagcagcttcgccgttccgagtgttttactctagaaagaatttcctcttcccggacaagcagcaaggaccacacaagagctggaagcaggaggtcaagtttctcgacgacatgttcgagggtggcagtgcctacatggtgggcaaaatgaatggtgatcattggtacctgtacatgacttcacctgagacaccactcaccccacctcgctctccagagggtcacaagaccatcgctgggacagcaaaggcgtgcaagatccccaccagtgcttcgtccactttcagcggagggccagagagcaacgatgagactcttgagatcctcatgacggacctcgatcccgagaatgcgaagcagttctatttggagcatgcgagtgcggtcgcaaactccaggcttctgccacaggctcaggaagcacgtaaagaggcggcgtacgctgtcggggacttgtcgggtagtacggcgaccatcaagaccaacagcactgtagagagtgtctcagatgaaattgacgtattcgacaacgggagcgactccgacctccacagctcctacactcccgtctctgagcagatggatgtagatgctatgagcaccgagggtcacgcattggggacggtggtttcagatgcttgcggtctttctgaagtctatccatcctccaagtaccccgaggctcgtgtcgatgctttcctcttcaccccatgtggattctcagcaaacggcattattcctgcgcccctgaaccaggaagagagcgagcctaccaaatcaacccattatttcacggttcacgttacgcccgaacctatttgctcatttgcgtcatttgagaccaacgtgcctggcgggcaaaacggccgcgagacatcggagatcgttgaacatgtcgtgagtatcttcaaacctggtcgtttcagcgtcacccttttcgaggcgaagactccccaaggactcaacggcgaagaagctcctcccggattagctcacaagaagcgtatggagaagatccaaggctacagacgcattgatcggattgtgcacgactttgatgactacgagttggtcttccggttcttcgagcgagatggctggaccggcggaagtggcgttcgagttggagaagagttgtagggaaccgtccgacttcgtttctgaactttcgtcctcagcctggagtctttcattttcgtctcttcgacattcgtgcgacagatgcatacatagtgccaagagaggagcctgtgagattgcaaggcttcacaagaacttaccttcagcgtcactcattcagtcctgtttctcagcgatgtagcacgagggtcttttatatacacaatgtgtcttcataatagcttagtgccgtcgttcattgtgtatcatctgatgcatttctgacagaacttgtctctgatcgccttatatcggctcaatatttagttgtagaatttggtcaatactacctatcatttactcataaccaagacgccactggctatttgagtttcgcgata

SEQ ID NO: 34926 - DNA, 591 bp, Muscodor strobelii
  misc_feature: SGI cDNA ID NO. 572080
  misc_feature: Encodes the peptide sequence at SEQ ID NO 34927
atgattcgacagtttctttccgatgtgctctggggagacgttgactatctcctgatcgacacgccgccgggaacatctgacgagcacatttccctcgctgagaccttgggcaacgttgcaaggccaggccagctcgccggagcagtagttgtcacgacgcctcaggccatagctacggcggatgtcaggaaagagttgaacttctgcgtcaagactgggattcccgttattggtgttgttgagaacatggctggatttgtctgccccttctgtgccgaatgcagtgacctattcggaaaggggggtgggcaggtaatggccaacgattttaatgtcccgttcttaggtcgggtccccatcgaccctcaattcgtcacacttgtcgaggaaggacggaaaccagaatatcccgaagggactgtcatcaacggccatgattactcaaaaccaacacagaatggccacgacagcaagatcaatggaacggagtcgactaaagatgccagcctgttggctgagaagtacagggattgctcacttgaagcagtcttccgaaagatgacacaggatatcgttgcagctatcgggtga

SEQ ID NO: 34927 - protein, 196 aa, Muscodor strobelii
  misc_feature: SGI Peptide ID NO. 572080
  misc_feature (1)..(195): NCBI GI: 156063226 Blast Desc: SS1G_01729 [Sclerotinia sclerotiorum 1980] gi|154697065|gb|EDN96803.1| SS1G_01729 [Sclerotinia sclerotiorum 1980]
  misc_feature (1)..(195): NCBI GI: 85104212 Blast Desc: NCU01084 [Neurospora crassa OR74A] gi|74622707|sp|Q8X0F1.1|CFD1_NEUCR RecName: Full=Cytosolic Fe-S cluster assembly factor CFD1; AltName: Full=Cytosolic Fe-S 1 to
  misc_feature (1)..(195): NCBI GI: 116198709 Blast Desc: CHGG_07510 [Chaetomium globosum CBS 148.51] gi|121781135|sp|Q2GWZ4.1|CFD1_CHAGB RecName: Full=Cytosolic Fe-S cluster assembly factor CFD1; AltName: Full=Cytosolic Fe-S 1 CBS
  misc_feature (1)..(195): NCBI GI: 154294430 Blast Desc: BC1G_13735 [Botryotinia fuckeliana B05.10] gi|150844744|gb|EDN19937.1| BC1G_13735 [Botryotinia fuckeliana B05.10]
  misc_feature (1)..(195): NCBI GI: 171693287 Blast Desc: protein product [Podospora anserina] gi|170946592|emb|CAP73394.1| protein product [Podospora anserina]
  misc_feature (1)..(193): NCBI GI: 256728003 Blast Desc: [Nectria haematococca mpVI 77-13-4]
  misc_feature (1)..(196): NCBI GI: 46133789 Blast Desc: FG09034.1 [Gibberella zeae PH-1] gi|121811451|sp|Q4I174.1|CFD1_GIBZE RecName: Full=Cytosolic Fe-S cluster assembly factor CFD1; AltName: Full=Cytosolic Fe-S 1
  misc_feature (1)..(195): NCBI GI: 261357892 Blast Desc: cytosolic Fe-S cluster assembling factor cfd-1 [Verticillium albo-atrum VaMs.102]
  misc_feature (1)..(184): NCBI GI: 169616029 Blast Desc: SNOG_11186 [Phaeosphaeria nodorum SN15] gi|160703097|gb|EAT81685.2| SNOG_11186 [Phaeosphaeria nodorum SN15]
  misc_feature (1)..(184): NCBI GI: 189209812 Blast Desc: cytosolic Fe-S cluster assembling factor cfd1 [Pyrenophora tritici-repentis Pt-1C-BFP] gi|187977331|gb|EDU43957.1| cytosolic Fe-S cluster assembling
MIRQFLSDVLWGDVDYLLIDTPPGTSDEHISLAETLGNVARPGQLAGAVVVTTPQAIATADVRKELNFCVKTGIPVIGVVENMAGFVCPFCAECSDLFGKGGGQVMANDFNVPFLGRVPIDPQFVTLVEEGRKPEYPEGTVINGHDYSKPTQNGHDSKINGTESTKDASLLAEKYRDCSLEAVFRKMTQDIVAAIG

SEQ ID NO: 34928 - DNA, 4956 bp, Muscodor strobelii; identical to SEQ ID NO: 34925
  misc_feature: SGI EST ID NO. CUFF.83764.1
  misc_feature: Variant of the nucleotide sequence at SEQ ID NO 34926

SEQ ID NO: 34929 - DNA, 1584 bp, Muscodor strobelii
  misc_feature: SGI cDNA ID NO. 572081
  misc_feature: Reduced expression when VOC is produced
  misc_feature: Encodes the peptide sequence at SEQ ID NO 34930
atgtcgaacatcgggattcctaccaactatacattttcgccatctgagggcaccccacacttgactatcaatcatgatgtggccgccgacctagattctagcaatgccttcgagggacctgagaaactgctggaggtctggtttgctcccggtccaaaatgcttgccacccggcgccaagccgaatggcttgaaggcggtcgctagcgacatatgggttcccatgctcgacatggtcaactgcaagattctgtccgtgttggaggctgagcatatggatgcctacctgctttccgaatctagcatgtttgtcttcccccacaagctcatcttgaagacttgcgggaccacgacattgctgcttggccttcgtaggctcttacgcattgctgccgaacatgcgggcttccctttctacaacaccaagtccttggacgacatccatacagcagcttcgccgttccgagtgttttactctagaaagaatttcctcttcccggacaagcagcaaggaccacacaagagctggaagcaggaggtcaagtttctcgacgacatgttcgagggtggcagtgcctacatggtgggcaaaatgaatggtgatcattggtacctgtacatgacttcacctgagacaccactcaccccacctcgctctccagagggtcacaagaccatcgctgggacagcaaaggcgtgcaagatccccaccagtgcttcgtccactttcagcggagggccagagagcaacgatgagactcttgagatcctcatgacggacctcgatcccgagaatgcgaagcagttctatttggagcatgcgagtgcggtcgcaaactccaggcttctgccacaggctcaggaagcacgtaaagaggcggcgtacgctgtcggggacttgtcgggtagtacggcgaccatcaagaccaacagcactgtagagagtgtctcagatgaaattgacgtattcgacaacgggagcgactccgacctccacagctcctacactcccgtctctgagcagatggatgtagatgctatgagcaccgagggtcacgcattggggacggtggtttcagatgcttgcggtctttctgaagtctatccatcctccaagtaccccgaggctcgtgtcgatgctttcctcttcaccccatgtggattctcagcaaacggcattattcctgcgcccctgaaccaggaagagagcgagcctaccaaatcaacccattatttcacggttcacgttacgcccgaacctatttgctcatttgcgtcatttgagaccaacgtgcctggcgggcaaaacggccgcgagacatcggagatcgttgaacatgtcgtgagtatcttcaaacctggtcgtttcagcgtcacccttttcgaggcgaagactccccaaggactcaacggcgaagaagctcctcccggattagctcacaagaagcgtatggagaagatccaaggctacagacgcattgatcggattgtgcacgactttgatgactacgagttggtcttccggttcttcgagcgagatggctggaccggcggaagtggcgttcgagttggagaagagttgtag

SEQ ID NO: 34930 - protein, 527 aa, Muscodor strobelii
  misc_feature: SGI Peptide ID NO. 572081
  misc_feature (32)..(514): Pfam Id: PF01536 Pfam Desc: Adenosylmethionine decarboxylase
  misc_feature (32)..(461): Pfam Id: PF01536 Pfam Desc: Adenosylmethionine decarboxylase
  misc_feature (1)..(527): NCBI GI: 46133791 Blast Desc: FG09035.1 [Gibberella zeae PH-1]
  misc_feature (6)..(525): NCBI GI: 256728002 Blast Desc: [Nectria haematococca mpVI 77-13-4]
  misc_feature (1)..(525): NCBI GI: 156063258 Blast Desc: SS1G_01745 [Sclerotinia sclerotiorum 1980] gi|154697081|gb|EDN96819.1| SS1G_01745 [Sclerotinia sclerotiorum 1980]
  misc_feature (1)..(525): NCBI GI: 154294464 Blast Desc: BC1G_13752 [Botryotinia fuckeliana B05.10] gi|150844761|gb|EDN19954.1| BC1G_13752 [Botryotinia fuckeliana B05.10]
  misc_feature (1)..(527): NCBI GI: 85104208 Blast Desc: NCU01083 [Neurospora crassa OR74A] gi|4929540|gb|AAD34030.1|AF151380_1 S-adenosylmethionine decarboxylase [Neurospora crassa] gi|18376192|emb|CAD21308.1|
  misc_feature (1)..(526): NCBI GI: 116198713 Blast Desc: CHGG_07512 [Chaetomium globosum CBS 148.51] gi|88178791|gb|EAQ86259.1| CHGG_07512 [Chaetomium globosum CBS 148.51]
  misc_feature (6)..(527): NCBI GI: 261357893 Blast Desc: S-adenosylmethionine decarboxylase proenzyme [Verticillium albo-atrum VaMs.102]
  misc_feature (19)..(526): NCBI GI: 145616498 Blast Desc: MGG_14297 [Magnaporthe grisea 70-15] gi|145010061|gb|EDJ94717.1| MGG_14297 [Magnaporthe grisea 70-15]
  misc_feature (1)..(525): NCBI GI: 226277660 Blast Desc: S-adenosylmethionine decarboxylase proenzyme [Paracoccidioides brasiliensis Pb01]
  misc_feature (1)..(525): NCBI GI: 189210054 Blast Desc: S-adenosylmethionine decarboxylase proenzyme 2 [Pyrenophora tritici-repentis Pt-1C-BFP] gi|187977452|gb|EDU44078.1| S-adenosylmethionine decarboxylase 2
  misc_feature (18)..(510): SWISSPROT Homolog: EC 4.1.1.50 Adenosylmethionine decarboxylase
  misc_feature: Useful for introducing or modulating the production of volatile compounds
MSNIGIPTNYTFSPSEGTPHLTINHDVAADLDSSNAFEGPEKLLEVWFAPGPKCLPPGAKPNGLKAVASDIWVPMLDMVNCKILSVLEAEHMDAYLLSESSMFVFPHKLILKTCGTTTLLLGLRRLLRIAAEHAGFPFYNTKSLDDIHTAASPFRVFYSRKNFLFPDKQQGPHKSWKQEVKFLDDMFEGGSAYMVGKMNGDHWYLYMTSPETPLTPPRSPEGHKTIAGTAKACKIPTSASSTFSGGPESNDETLEILMTDLDPENAKQFYLEHASAVANSRLLPQAQEARKEAAYAVGDLSGSTATIKTNSTVESVSDEIDVFDNGSDSDLHSSYTPVSEQMDVDAMSTEGHALGTVVSDACGLSEVYPSSKYPEARVDAFLFTPCGFSANGIIPAPLNQEESEPTKSTHYFTVHVTPEPICSFASFETNVPGGQNGRETSEIVEHVVSIFKPGRFSVTLFEAKTPQGLNGEEAPPGLAHKKRMEKIQGYRRIDRIVHDFDDYELVFRFFERDGWTGGSGVRVGEEL

SEQ ID NO: 34931 - DNA, 4956 bp, Muscodor strobelii; identical to SEQ ID NO: 34925
  misc_feature: SGI EST ID NO. CUFF.83764.1
  misc_feature: Variant of the nucleotide sequence at SEQ ID NO 34929

SEQ ID NO: 34932 - DNA, 1500 bp, Muscodor strobelii
  misc_feature: SGI cDNA ID NO. 572082
  misc_feature: Encodes the peptide sequence at SEQ ID NO 34933
atgcacgacgtgaaacgcccacatgagcaacacgagctgtcttgctctgccgaagaagcatatacaaccttctcacataaaattcagaccttccttgtcatacttcttggcgtagtaatgatactgtcaactctcactgcaacgatttacttccccctcatccctatgctcagcgaccaactctcagtctcgatccaggcaatcgacttgacagtcacagtctatgtcatattccaagcacttacaccggcgatttttgcatctttatcagactcattcggtcgtcgacccgttctacttggtgtcacattgatatatgcctccgccagtctcgggctagccatcaatagtcatagttaccctgtgcttattgttctcagagcacttcagagcattggcggttctgcgacaccaccactctcgtatggaatagtggcggatgttgccgtgacatcgcagcgcggcaagatgttaggaccaatgcttgcgatttgcaatggcatatcagctttcggtcccgtaataggaggggcgattgctttggggtctggcagcgtgagttgggtattcgctgcgctgttgatactatcggtagcatatcttttagctatcggtttcttcatgccagaaacagcgcgttgtattgcgggaaatggcagcgagtctgccgtcggtttttacaagacatggtgggctgtcctaaggggcgctcagagcaagaacatcgacatcgaaaatgcttcaacagaagaccaccctcgactacagatcaaaagacaaagttggcgcttctattcgcttctgggtacatttcggatccttgtgatccgtgacgctgcccccgtactatgggtgataggcgtgtcttatggagtgtattacactttccaagtcgcgattcccgtcattttcgatgagatatatcattacaaccagttacaaatcggtctcgtcctcttgccgggattagtgggcatgacgataggcggcctcattgcagggaaactgctagatcggaattacgagcacgtggcgagagaaaatggcatgactatcgacaagaagtcggctcaagacctcttctgctttccggtagaacacgcaaggtacaggaactgcctgtggttctttggcttggaactggccttgatcgtgggatatggatgggcaatagcatatcgtgcgcaccctgcggtccctattattttgcaattcttcatctgtggcatctcgacgcttctcagtcataccgccagtgcactgctggtggacattttccccgatcggtccagcaccgcatatgctgctgcgcaggctgttcgatgcgggctgagcgccgtatcctccgcgaccatcgagccgttgatatatgtacttggtaggggctggtacttcacggctcttgcggtattcgtgagtgtcaatgggaccgttgctgttctcgttagtctaagatggggtatgaagtggcgacaagctagatgctcgaatatgatttga

SEQ ID NO: 34933 - protein, 499 aa, Muscodor strobelii
  misc_feature: SGI Peptide ID NO. 572082
  misc_feature (36)..(449): Pfam Id: PF07690 Pfam Desc: Major Facilitator Superfamily
  misc_feature (7)..(494): NCBI GI: 39944636 Blast Desc: MGG_04329 [Magnaporthe grisea 70-15] gi|145015068|gb|EDJ99636.1| MGG_04329 [Magnaporthe grisea 70-15]
  misc_feature (9)..(480): NCBI GI: 259483376 Blast Desc: TPA: conserved [Aspergillus nidulans FGSC A4]
  misc_feature (8)..(480): NCBI GI: 67900580 Blast Desc: AN7277.2 [Aspergillus nidulans FGSC A4] gi|40741958|gb|EAA61148.1| AN7277.2 [Aspergillus nidulans FGSC A4]
  misc_feature (2)..(498): NCBI GI: 121707893 Blast Desc: MFS transporter, [Aspergillus clavatus NRRL 1] gi|119400118|gb|EAW10544.1| MFS transporter, [Aspergillus clavatus NRRL 1]
  misc_feature (5)..(494): NCBI GI: 242769557 Blast Desc: MFS transporter, [Talaromyces stipitatus ATCC 10500] gi|218724985|gb|EED24402.1| MFS transporter, [Talaromyces stipitatus ATCC 10500]
  misc_feature (19)..(498): NCBI GI: 119500304 Blast Desc: MFS transporter, [Neosartorya fischeri NRRL 181] gi|119415074|gb|EAW25012.1| MFS transporter, [Neosartorya fischeri NRRL 181]
  misc_feature (12)..(494): NCBI GI: 115391291 Blast Desc: conserved [Aspergillus terreus NIH2624] gi|114194074|gb|EAU35774.1| conserved [Aspergillus terreus NIH2624]
  misc_feature (20)..(498): NCBI GI: 70993750 Blast Desc: MFS transporter [Aspergillus fumigatus Af293] gi|66849356|gb|EAL89684.1| MFS transporter, [Aspergillus fumigatus Af293] gi|159125356|gb|EDP50473.1| MFS transporter,
  misc_feature (16)..(494): NCBI GI: 255947864 Blast Desc: Pc22g06710 [Penicillium chrysogenum Wisconsin 54-1255] gi|211591716|emb|CAP97959.1| Pc22g06710 [Penicillium chrysogenum Wisconsin 54-1255]
  misc_feature (21)..(494): NCBI GI: 156031347 Blast Desc: SS1G_14095 [Sclerotinia sclerotiorum 1980] gi|154699497|gb|EDN99235.1| SS1G_14095 [Sclerotinia sclerotiorum 1980]
MHDVKRPHEQHELSCSAEEAYTTFSHKIQTFLVILLGVVMILSTLTATIYFPLIPMLSDQLSVSIQAIDLTVTVYVIFQALTPAIFASLSDSFGRRPVLLGVTLIYASASLGLAINSHSYPVLIVLRALQSIGGSATPPLSYGIVADVAVTSQRGKMLGPMLAICNGISAFGPVIGGAIALGSGSVSWVFAALLILSVAYLLAIGFFMPETARCIAGNGSESAVGFYKTWWAVLRGAQSKNIDIENASTEDHPRLQIKRQSWRFYSLLGTFRILVIRDAAPVLWVIGVSYGVYYTFQVAIPVIFDEIYHYNQLQIGLVLLPGLVGMTIGGLIAGKLLDRNYEHVARENGMTIDKKSAQDLFCFPVEHARYRNCLWFFGLELALIVGYGWAIAYRAHPAVPIILQFFICGISTLLSHTASALLVDIFPDRSSTAYAAAQAVRCGLSAVSSATIEPLIYVLGRGWYFTALAVFVSVNGTVAVLVSLRWGMKWRQARCSNMI

SEQ ID NO: 34934 - DNA, 689 bp, Muscodor strobelii
  misc_feature: SGI EST ID NO. CUFF.83140.0
  misc_feature: Variant of the nucleotide sequence at SEQ ID NO 34932
cagcgtgagttgggtattcgctgcgctgttgatactatcggtagcatatcttttagctatcggtttcttcatgccagaaacagcgcgttgtattgcgggaaatggcagcgagtctgccgtcggtttttacaagacatggtgggctgtcctaaggggcgctcagagcaagaacatcgacatcgaaaatgcttcaacagaagaccaccctcgactacagatcaaaagacaaagttggcgcttctattcgcttctgggtacatttcggatccttgtgatccgtgacgctgcccccgtactatgggtgataggcgtgtcttatggagtgtattacactttccaagtcgcgattcccgtcattttcgatgagatatatcattacaaccagttacaaatcggtctcgtcctcttgccgggattagtgggcatgacgataggcggcctcattgcagggaaactgctagatcggaattacgagcacgtggcgagagaaaatggcatgactatcgacaagaagtcggctcaagacctcttctgctttccggtagaacacgcaaggtacaggaactgcctgtggttctttggcttggaactggccttgatcgtgggatatggatgggcaatagcatatcgtgcgcaccctgcggtccctattattttgcaattcttcatctgtggcatctcgacgcttc

SEQ ID NO: 34935 - DNA, 1071 bp, Muscodor strobelii
  misc_feature: SGI cDNA ID NO. 572083
  misc_feature: Elevated expression when VOC is produced
  misc_feature: Encodes the peptide sequence at SEQ ID NO 34936
atgtcggtgctgaggatcaatcaaaagcgggttcagaacggcgagcggtttcccttcgatgcagacgccttaaccaaattcttgccatcggacacaacgattttgtcagttcaattcacgtcagagggcccagggaaggattgtttcctcaaggtcgcgtatgaagaaaatgggcgcattatgctacttggcgagtatgaatcctccaagttaatatacgagaatcagccagactttatctccgaaccattaggatttggaaagtatcatgatggttcatcgcctgagacctacttctatcttacaagattcattgacatgaatgtcatcgcgcaaccaaacccgcaaccaaacccgatcgagttcacgactagactggcagagatgcatagacttagccaatctcctacaggaatgtttggctttcatgttccaacctgtgatggcgatagaccacatacggtggagtgggagaaaaactgggcggtgttttataagaagctgcttcttggtgtttgcaagcttgatttcgcaacaaatgggccatggccaaagtttgaacgcgctttagatcaaattacttcaaaagttatacccagactcctagaccctctccagagcggtgacaaagtactcaagccctgtctgattcatggcgacttatgggagggtaacgtggggatcaactcaatgacggggagaacattcctgtttgacgcagggtcctattttgcacacaatgaaatggaattgggacattggcggtgcgaattcagttcggtctttagagacgatatctacaccaaagcatacttgaagaactatcctccagctgatccagctgaggagttcgatgaccgtaatagactttatagtctaaaagggagactcaactactccgccggtcacccgaatagcccgttgagaatgtctgcatataacgacatgtgctacctctgcgagaagtacgcaccggttgacgggatcgacaagtatgatccatctctaacgggtgcaaccatcgttccgcattctgaggtggactttttggagggacagaatgagacgtag

SEQ ID NO: 34936 - protein, 356 aa, Muscodor strobelii
  misc_feature: SGI Peptide ID NO. 572083
  misc_feature (14)..(344): NCBI GI: 116214451 Blast Desc: CHGG_11066 [Chaetomium globosum CBS 148.51] gi|88175421|gb|EAQ82890.1| CHGG_11066 [Chaetomium globosum CBS 148.51]
  misc_feature (97)..(350): NCBI GI: 171678070 Blast Desc: protein product [Podospora anserina] gi|170937104|emb|CAP61762.1| protein product [Podospora anserina]
  misc_feature (11)..(327): NCBI GI: 145228563 Blast Desc: An01g01490 [Aspergillus niger] gi|134054681|emb|CAK43522.1| protein product [Aspergillus niger]
  misc_feature (43)..(329): NCBI GI: 240110347 Blast Desc: CPC735_063790 [Coccidioides posadasii C735 delta SOWgp]
  misc_feature (43)..(329): NCBI GI: 119180471 Blast Desc: CIMG_08864 [Coccidioides immitis RS]
  misc_feature (23)..(323): NCBI GI: 116206070 Blast Desc: CHGG_02328 [Chaetomium globosum CBS 148.51] gi|88182925|gb|EAQ90393.1| CHGG_02328 [Chaetomium globosum CBS 148.51]
  misc_feature (42)..(309): NCBI GI: 258563734 Blast Desc: [Uncinocarpus reesii 1704] gi|237908119|gb|EEP82520.1| [Uncinocarpus reesii 1704]
  misc_feature (8)..(325): NCBI GI: 261356147 Blast Desc: conserved [Verticillium albo-atrum VaMs.102]
  misc_feature (58)..(281): NCBI GI: 116202955 Blast Desc: CHGG_09362 [Chaetomium globosum CBS 148.51] gi|88177880|gb|EAQ85348.1| CHGG_09362 [Chaetomium globosum CBS 148.51]
  misc_feature (42)..(327): NCBI GI: 145603980 Blast Desc: MGG_10482 [Magnaporthe grisea 70-15] gi|145012092|gb|EDJ96748.1| MGG_10482 [Magnaporthe grisea 70-15]
  misc_feature: Useful for introducing or modulating the production of volatile compounds
MSVLRINQKRVQNGERFPFDADALTKFLPSDTTILSVQFTSEGPGKDCFLKVAYEENGRIMLLGEYESSKLIYENQPDFISEPLGFGKYHDGSSPETYFYLTRFIDMNVIAQPNPQPNPIEFTTRLAEMHRLSQSPTGMFGFHVPTCDGDRPHTVEWEKNWAVFYKKLLLGVCKLDFATNGPWPKFERALDQITSKVIPRLLDPLQSGDKVLKPCLIHGDLWEGNVGINSMTGRTFLFDAGSYFAHNEMELGHWRCEFSSVFRDDIYTKAYLKNYPPADPAEEFDDRNRLYSLKGRLNYSAGHPNSPLRMSAYNDMCYLCEKYAPVDGIDKYDPSLTGATIVPHSEVDFLEGQNET

SEQ ID NO: 34937 - DNA, 2003 bp, Muscodor strobelii
  misc_feature: SGI EST ID NO. CUFF.83144.0
  misc_feature: Variant of the nucleotide sequence at SEQ ID NO 34935
gtccatcatacaatacaagtcaggatcataccgttcgaattactcgcatcagtgaactacaacgttacggttaagcaagtacacattagatctagcttcaagactatatctcgaatagatcattgccggttttcgttttggcaagattcttgataattacctcattaggcgtaccacttatttcggtcgtgacctagggcacgttcacacaaagcacctcacctacgtagttacagtttagtacgagtcaatctagagggagaaaggcatttcctgattattgagcaaacaaaatgtcggtgctgaggatcaatcaaaagcgggttcagaacggcgagcggtttcccttcgatgcagacgccttaaccaaattcttgccatcggacacaacgattttgtcagttcaattcacgtcagagggcccagggaaggattgtttcctcaaggtcgcgtatgaagaaaatgggcgcattatgctacttggcgagtatgaatcctccaagttaatatacgagaatcagccagactttatctccgaaccattaggatttggaaagtatcatgatggttcatcgcctgagacctacttctatcttacaagattcattgacatgaatgtcatcgcgcaaccaaacccgcaaccaaacccgatcgagttcacgactagactggcagagatgcatagacttagccaatctcctacaggaatgtttggctttcatgttccaacctgtgatggcgatagaccacatacggtggagtgggagaaaaactgggcggtgttttataagaagctgcttcttggtgtttgcaagcttgatttcgcaacaaatgggccatggccaaagtttgaacgcgctttagatcaaattacttcaaaagttatacccagactcctagaccctctccagagcggtgacaaagtactcaagccctgtctgattcatggcgacttatgggagggtaacgtggggatcaactcaatgacggggagaacattcctgtttgacgcagggtcctattttgcacacaatgaaatggaattgggacattggcggtgcgaattcagttcggtctttagagacgatatctacaccaaagcatacttgaagaactatcctccagctgatccagctgaggagttcgatgaccgtaatagactttatagtctaaaagggagactcaactactccgccggtcacccgaatagcccgttgagaatgtctgcatataacgacatgtgctacctctgcgagaagtacgcaccggttgacgggatcgacaagtatgatccatctctaacgggtgcaaccatcgttccgcattctgaggtggactttttggagggacagaatgagacgtaggattgaaaatagacgacagtcaagttggaattttcaaatatagtcgccctcaagaatctggactcaatactttggaattatcctgtgtgttcatcattgattttctctggaatgtgatgtcaatgccacatgcagatgcacccgatcaccggccaacttgaccccaaccctcaatccctgctcgtcacttattacgtgcttgacatgtattgacattctcaacgcttctgttttcatattacaatttaatccctaagtcgttttcgcctttgactttttgtttcattgagaatcactaaagaaaatgtctaattacgacaccgaatctaagctcaaggagccaacaagcaccatgcacgacgtgaaacgcccacatgagcaacacgagctgtcttgctctgccgaagaagcatatacaaccttctcacataaaattcagaccttccttgtcatacttcttggcgtagtaatgatactgtcaactctcactgcaacgatttacttccccctcatccctatgctcagcgaccaactctcagtctcgatccaggcaatcgacttgacagtcacagtctatgtcatattccaagcacttacaccggcgatttttgcatctttatcagactcattcggtcgtcg

SEQ ID NO: 34938 - DNA, 2292 bp, Muscodor strobelii
  misc_feature: SGI cDNA ID NO. 572084
  misc_feature: Encodes the peptide sequence at SEQ ID NO 34939
atgatagcaagcgagatggccgatgacggcgacgacgctgccgggctttcaaactcgcagcgtgaaatgaaagttcgactggcaagcctggaacctgcaaacagttacgatgccccagtcaatgtcactacaatggacgccctgctgagggatgcattgtatgaatgtatatcgtatgatggagctgcgaatgacgacacggtcaagatctctttgaacggtaacgaacacgatattccacgaacattggagaatgctttgcgtaatctacgtcgaagaggcaatgctcgcatcttatgggccgacttcttgatcgggcgcacaaccgaagagcgaaatagagaggcagtggaattgcgagaaaacctcgcaaatgctcacaaatctttgtgttggctaggtcctgagaaagactcgacctcgagagcatttgatattattcacgatatggcaagtcggtggagtcaagcctgtgaacatgtcaacctttcgcgcgacactagcctcggtcgcgttactatggagcagatgagaggcattcgagaacagctagatcaatgctctcacgacgatcttgaatcatcagaccttgccttgtggagtgatatatacaatatctttggctcgccctattggagttcaatccgatgcattgcggacattgtgctggcaaagatgccaatgatcgtctgtggacagaatagcattagatggcaaagctttgtcggcgcttctcgtgcattgccattcgtccagaataaactattcaaaacatcgttacccgacggcgtaatgaaaggcttcagtctgatccactcgatcgagcttgcggagcggcgacaccgcctcggtgaaagtacagagttattcccaatgatccagacggccagagactcaggcggccatgatccgagagaattcatattctcaatgataccaattgcaacaccctctactcgcattgagtaccacggcgcagggccccagccccttccgtccattgactattccaaatctgctcatgaggtcttcatcgacgcagcgcgttatacagtattagagcgccaagatctcatgttttggttcaacgagcgccctccctgcgcaaagaaactacgaggtctacctacttgggtgccggattttagtgctgccgcgccaaagcatgtcaatatgtcgcccgaaaacaacctacggaattggtgggagactgtggactcccgcaagaatattcgagtgtctgatgacaacaagcttctgctccaagcctctttcattgacgtcatcgagcatgtgtctcctgtgctcaatttagccaatttcgccgcgatctgcttagaagagcttgagaatcttccagaaccaccctggggtactattgagatgagagacgagcgcttctggagaacattgctgctcaatacaggtggtgagggtaagattatccgagagaaatctgaggcgccagctgctgtgggcaagagctttcgaagcatgatcgcacgtatgcgcatcttaaaaatactcgagtgtggtattgaagagctacatgatccagaggtgcaggcgcgcatggaagagataccggaagttcaagagttgctaccgcacgctaataagggcagtgagttcgccctgttgttgagtaaagtttctatgggcagaagattcttcagaacgcctcatggccggtttggcatgacagctatcgaggacgttgatgctacgaattccgagttccagggcggagaaagcgaagaagatgcgcccagcgaccagaggaaaacgctaatttctccgatgaaacaaatgcagttaagcgaatctcaaaaggcctcaaggtcaaaggagtccaagtcagcaatcgatgggattgggcaaaagagccaaaaagagggtgtcaaagaaggagacatgatttttgccgtgatcggcggcttcttcccatacatccttcgacctgcagaaggtgtaaatattacaacgaccgaaccggatgatgacaacgaggacgatggagacgatgattctaatgagagcgacaaaagcgaaggaggcgaggaagataacggtgttgaaagcaacagcggcgagaaagaatatgaggaaggagaacatgaagaatccgatgattctgaaggtatacctttcgaatttgttggcgaatgttatcttcacgacgccatggatggtgagacgttctgggacagagagcggatgatgaaagaaggcactggaaatatacatttcaagaccgaggagtcttcaattatacccatcgctatcatttga

SEQ ID NO: 34939 - protein, 763 aa, Muscodor strobelii
  misc_feature: SGI Peptide ID NO. 572084
  misc_feature (25)..(459): NCBI GI: 226287224 Blast Desc: conserved [Paracoccidioides brasiliensis Pb18]
  misc_feature (25)..(440): NCBI GI: 239612306 Blast Desc: conserved [Ajellomyces dermatitidis ER-3]
  misc_feature (25)..(440): NCBI GI: 261202540 Blast Desc: conserved [Ajellomyces dermatitidis SLH14081] gi|239590581|gb|EEQ73162.1| conserved [Ajellomyces dermatitidis SLH14081]
  misc_feature (25)..(441): NCBI GI: 46135655 Blast Desc: FG09350.1 [Gibberella zeae PH-1]
  misc_feature (25)..(433): NCBI GI: 115401102 Blast Desc: [Aspergillus terreus NIH2624] gi|114190080|gb|EAU31780.1| [Aspergillus terreus NIH2624]
  misc_feature (24)..(383): NCBI GI: 256721368 Blast Desc: NECHADRAFT_82369 [Nectria haematococca mpVI 77-13-4]
  misc_feature (17)..(437): NCBI GI: 39975543 Blast Desc: MGG_00082 [Magnaporthe grisea 70-15] gi|145019080|gb|EDK03359.1| MGG_00082 [Magnaporthe grisea 70-15]
  misc_feature (24)..(474): NCBI GI: 168042194 Blast Desc: [Physcomitrella patens subsp. patens] gi|162675113|gb|EDQ61612.1| [Physcomitrella patens subsp. patens]
  misc_feature (16)..(382): NCBI GI: 256724356 Blast Desc: NECHADRAFT_87552 [Nectria haematococca mpVI 77-13-4]
  misc_feature (19)..(393): NCBI GI: 256722259 Blast Desc: NECHADRAFT_86864 [Nectria haematococca mpVI 77-13-4]
MIASEMADDGDDAAGLSNSQREMKVRLASLEPANSYDAPVNVTTMDALLRDALYECISYDGAANDDTVKISLNGNEHDIPRTLENALRNLRRRGNARILWADFLIGRTTEERNREAVELRENLANAHKSLCWLGPEKDSTSRAFDIIHDMASRWSQACEHVNLSRDTSLGRVTMEQMRGIREQLDQCSHDDLESSDLALWSDIYNIFGSPYWSSIRCIADIVLAKMPMIVCGQNSIRWQSFVGASRALPFVQNKLFKTSLPDGVMKGFSLIHSIELAERRHRLGESTELFPMIQTARDSGGHDPREFIFSMIPIATPSTRIEYHGAGPQPLPSIDYSKSAHEVFIDAARYTVLERQDLMFWFNERPPCAKKLRGLPTWVPDFSAAAPKHVNMSPENNLRNWWETVDSRKNIRVSDDNKLLLQASFIDVIEHVSPVLNLANFAAICLEELENLPEPPWGTIEMRDERFWRTLLLNTGGEGKIIREKSEAPAAVGKSFRSMIARMRILKILECGIEELHDPEVQARMEEIPEVQELLPHANKGSEFALLLSKVSMGRRFFRTPHGRFGMTAIEDVDATNSEFQGGESEEDAPSDQRKTLISPMKQMQLSESQKASRSKESKSAIDGIGQKSQKEGVKEGDMIFAVIGGFFPYILRPAEGVNITTTEPDDDNEDDGDDDSNESDKSEGGEEDNGVESNSGEKEYEEGEHEESDDSEGIPFEFVGECYLHDAMDGETFWDRERMMKEGTGNIHFKTEESSIIPIAII

SEQ ID NO: 34940 - DNA, 3273 bp, Muscodor strobelii
  misc_feature: SGI EST ID NO. CUFF.83149.0
  misc_feature: Variant of the nucleotide sequence at SEQ ID NO 34938
atcagattacctcaaatcattctgtacagtctcaaaatgctcacaccgcgaatcgggaaacctcacaggtccatatgtggagagtgcgctgaatttgcatacgatctaaaccgggattttcaaagtatagcgcggatgaccgaatacactttcgaattctctcaaattagccagtcctacctatacatcttgaaaatttcattgtctcaatggacgagttttgcaagccggctcattcgttgcacgagtaagagtttggctgcgaaagtttgcttctagaagtttgcttgccatcactgcatccatgaccctggtcgctgcgccccaaaagcgtccagtccacctccttggaggtctacaaattccaggggattacagaggcgcagtattccttcacgcagcgcaaatcaactagcatgcgctattaccttaatcctccccaccacatcggtactatcacgtactttcgttttcttaccctaccaccagtttgctgcttgacaaacggaagagaggttctatccatgacgaggatcatgatgacttaagcaccgaggcgtcttctgcggtgtttccaagatccatttcattgctggccagaaacattgcgtcctgaagaagttcgttccaaggtgcatgcggacgaagacctggcatattttcgcgccagcttccaataattcaagatgatagcaagcgagatggccgatgacggcgacgacgctgccgggctttcaaactcgcagcgtgaaatgaaagttcgactggcaagcctggaacctgcaaacagttacgatgccccagtcaatgtcactacaatggacgccctgctgagggatgcattgtatgaatgtatatcgtatgatggagctgcgaatgacgacacggtcaagatctctttgaacggtaacgaacacgatattccacgaacattggagaatgctttgcgtaatctacgtcgaagaggcaatgctcgcatcttatgggccgacttcttgatcgggcgcacaaccgaagagcgaaatagagaggcagtggaattgcgagaaaacctcgcaaatgctcacaaatctttgtgttggctaggtcctgagaaagactcgacctcgagagcatttgatattattcacgatatggcaagtcggtggagtcaagcctgtgaacatgtcaacctttcgcgcgacactagcctcggtcgcgttactatggagcagatgagaggcattcgagaacagctagatcaatgctctcacgacgatcttgaatcatcagaccttgccttgtggagtgatatatacaatatctttggctcgccctattggagttcaatccgatgcattgcggacattgtgctggcaaagatgccaatgatcgtctgtggacagaatagcattagatggcaaagctttgtcggcgcttctcgtgcattgccattcgtccagaataaactattcaaaacatcgttacccgacggcgtaatgaaaggcttcagtctgatccactcgatcgagcttgcggagcggcgacaccgcctcggtgaaagtacagagttattcccaatgatccagacggccagagactcaggcggccatgatccgagagaattcatattctcaatgataccaattgcaacaccctctactcgcattgagtaccacggcgcagggccccagccccttccgtccattgactattccaaatctgctcatgaggtcttcatcgacgcagcgcgttatacagtattagagcgccaagatctcatgttttggttcaacgagcgccctccctgcgcaaagaaactacgaggtctacctacttgggtgccggattttagtgctgccgcgccaaagcatgtcaatatgtcgcccgaaaacaacctacggaattggtgggagactgtggactcccgcaagaatattcgagtgtctgatgacaacaagcttctgctccaagcctctttcattgacgtcatcgagcatgtgtctcctgtgctcaatttagccaatttcgccgcgatctgcttagaagagcttgagaatcttccagaaccaccctggggtactattgagatgagagacgagcgcttctggagaacattgctgctcaatacaggtggtgagggtaagattatccgagagaaatctgaggcgccagctgctgtgggcaagagctttcgaagcatgatcgcacgtatgcgcatcttaaaaatactcgagtgtggtattgaagagctacatgatccagaggtgcaggcgcgcatggaagagataccggaagttcaagagttgctaccgcacgctaataagggcagtgagttcgccctgttgttgagtaaagtttctatgggcagaagattcttcagaacgcctcatggccggtttggcatgacagctatcgaggacgttgatgctacgaattccgagttccagggcggagaaagcgaagaagatgcgcccagcgaccagaggaaaacgctaatttctccgatgaaacaaatgcagttaagcgaatctcaaaaggcctcaaggtcaaaggagtccaagtcagcaatcgatgggattgggcaaaagagccaaaaagagggtgtcaaagaaggagacatgatttttgccgtgatcggcggcttcttcccatacatccttcgacctgcagaaggtgtaaatattacaacgaccgaaccggatgatgacaacgaggacgatggagacgatgattctaatgagagcgacaaaagcgaaggaggcgaggaagataacggtgttgaaagcaacagcggcgagaaagaatatgaggaaggagaacatgaagaatccgatgattctgaaggtatacctttcgaatttgttggcgaatgttatcttcacgacgccatggatggtgagacgttctgggacagagagcggatgatgaaagaaggcactggaaatatacatttcaagaccgaggagtcttcaattatacccatcgctatcatttgaccaatgaaaaacaattcaattgtttccagctgcaagatttcgatagcttctgacaagcacaatgtgctttcatcacccgtacaaatctcaacggcctttaatttaagtcgcactatcccgatgagttataattaatgtcaaaggggggaggaccttgattggttatagctcctgctgtctcctgccctctcgtgatcttatgcgtgcttttcagtcatttgtttaaatctcatagtctcattctacatgagtgtgcgacaccacaattcccctccttttccgggacaactcgccc

SEQ ID NO: 34941 - DNA, 1113 bp, Muscodor strobelii
  misc_feature: SGI cDNA ID NO. 572085
  misc_feature: Encodes the peptide sequence at SEQ ID NO 34942
atgttctatttccacttcgctttggccccggtcatcatcggccatgttctcgctcaggcagcaggaagctacaatgggagcgacttggacgccccgatgttgaggggtggaggcaatcgaggacctggagcgatgttgcgatttggttgttctcaggtcgttattgaacgtctcgatcctcttgtaaatccggacctcaatccttcggcgcacatgcatcaagttgtgggaggaaatgccttcaacgcgtcgatgccttccagcgatatctcaaaacttgcgtcgtgcactacgtgccactttacgcaggataaatcgaactactggaccgccaacttgtacttcaaagcccgaaacggtacctacaagcgcgtcccacaaatggcgaaccagtttaacgatggcgacaacgccggaatcaccatatactacacttcgccggggcgcaatgaaacaacagcgttcaaaccagggttccgtatgttaacgggtgactcgatgcgacgcacatcggagggccttggaaagaacatgcagcagtgctatcggtgtttctcgcagcccgactttggagggagcatgtattcaccgtgctttgatcctgtgtacgatacggaccactttcccgagacgccttgtgcgggcggtatacgatccaacattatctttcccctctgttgggatgggaagaaccttgatagcgtcgaccaccgcacacacgtagctcatccagtgggcggtgcgccgtcgttctctactgtgggcggcagctgtcccgaaagccacccgatcaagatcccacaggttatgttggaggtaatgtgggacactagagcgttcaatgatccgaatgagtggcctgaggacggaagccaaccatttgtgctttcgaccggagacgaaaccgggtacggtcagcatggcgactatgtttttggttggcaagacgactcgcttcagcttgcgatggacaatcagtgctaccttcgcaactgttcgcttctcccgtctcagatgcctccggacaagaacacatgccaagtccctgttactgcattggaagacatcgatggctggatgagcaatcttccaggaggcggaagcggcgtctag

SEQ ID NO: 34942 - protein, 370 aa, Muscodor strobelii
  misc_feature: SGI Peptide ID NO. 572085
  misc_feature (59)..(314): Pfam Id: PF09362 Pfam Desc: Domain of function (DUF1996)
  misc_feature (45)..(364): NCBI GI: 171685462 Blast Desc: protein product [Podospora anserina] gi|170942692|emb|CAP68345.1| protein product [Podospora anserina]
  misc_feature (44)..(366): NCBI GI: 116201237 Blast Desc: CHGG_08503 [Chaetomium globosum CBS 148.51] gi|88177021|gb|EAQ84489.1| CHGG_08503 [Chaetomium globosum CBS 148.51]
  misc_feature (45)..(365): NCBI GI: 85090100 Blast Desc: NCU07763 [Neurospora crassa OR74A] gi|28919599|gb|EAA29021.1| conserved [Neurospora crassa OR74A]
  misc_feature (37)..(365): NCBI GI: 189205016 Blast Desc: conserved [Pyrenophora tritici-repentis Pt-1C-BFP] gi|187985942|gb|EDU51430.1| conserved [Pyrenophora tritici-repentis Pt-1C-BFP]
  misc_feature (45)..(367): NCBI GI: 145609071 Blast Desc: MGG_09109 [Magnaporthe grisea 70-15] gi|145016512|gb|EDK00942.1| MGG_09109 [Magnaporthe grisea 70-15]
  misc_feature (45)..(365): NCBI GI: 164427037 Blast Desc: NCU02341 [Neurospora crassa OR74A] gi|157071579|gb|EAA30531.2| conserved [Neurospora crassa OR74A]
  misc_feature (44)..(365): NCBI GI: 171677610 Blast Desc: protein product [Podospora anserina] gi|170936873|emb|CAP61531.1| protein product [Podospora anserina]
  misc_feature (46)..(365): NCBI GI: 116205357 Blast Desc: CHGG_10562 [Chaetomium globosum CBS 148.51] gi|88176690|gb|EAQ84158.1| CHGG_10562 [Chaetomium globosum CBS 148.51]
  misc_feature (45)..(365): NCBI GI: 40804600 Blast Desc: conserved [Neurospora crassa]
  misc_feature (44)..(365): NCBI GI: 116197483 Blast Desc: CHGG_06897 [Chaetomium globosum CBS 148.51] gi|88178176|gb|EAQ85644.1| CHGG_06897 [Chaetomium globosum CBS 148.51]
MFYFHFALAPVIIGHVLAQAAGSYNGSDLDAPMLRGGGNRGPGAMLRFGCSQVVIERLDPLVNPDLNPSAHMHQVVGGNAFNASMPSSDISKLASCTTCHFTQDKSNYWTANLYFKARNGTYKRVPQMANQFNDGDNAGITIYYTSPGRNETTAFKPGFRMLTGDSMRRTSEGLGKNMQQCYRCFSQPDFGGSMYSPCFDPVYDTDHFPETPCAGGIRSNIIFPLCWDGKNLDSVDHRTHVAHPVGGAPSFSTVGGSCPESHPIKIPQVMLEVMWDTRAFNDPNEWPEDGSQPFVLSTGDETGYGQHGDYVFGWQDDSLQLAMDNQCYLRNCSLLPSQMPPDKNTCQVPVTALEDIDGWMSNLPGGGSGV

SEQ ID NO: 34943 - DNA, 980 bp, Muscodor strobelii
  misc_feature: SGI EST ID NO. CUFF.83158.0
  misc_feature: Variant of the nucleotide sequence at SEQ ID NO 34941
acaagcgcgtcccacaaatggcgaaccagtttaacgatggcgacaacgccggaatcaccatatactacacttcgccggggcgcaatgaaacaacagcgttcaaaccagggttccgtatgttaacgggtgactcgatgcgacgcacatcggagggccttggaaagaacatgcagcagtgctatcggtgtttctcgcagcccgactttggagggagcatgtattcaccgtgctttgatcctgtgtacgatacggaccactttcccgagacgccttgtgcgggcggtatacgatccaacattatctttcccctctgttgggatgggaagaaccttgatagcgtcgaccaccgcacacacgtagctcatccagtgggcggtgcgccgtcgttctctactgtgggcggcagctgtcccgaaagccacccgatcaagatcccacaggttatgttggaggtaatgtgggacactagagcgttcaatgatccgaatgagtggcctgaggacggaagccaaccatttgtgctttcgaccggagacgaaaccgggtacggtcagcatggcgactatgtttttggttggcaagacgactcgcttcagcttgcgatggacaatcagtgctaccttcgcaactgttcgcttctcccgtctcagatgcctccggacaagaacacatgccaagtccctgttactgcattggaagacatcgatggctggatgagcaatcttccaggaggcggaagcggcgtctagcatcgccaagaggtcgaaatgacttgtatgctattgaatcccatgtatggggatgaaacagcgggcattactggagttggttgctggccttactcgatctaataggctcaccgacgagcgatggagcgctacggagaaatcgatcgcagtacagaaaatgatatgtagaatatgttgtctttttcgcaggtttgaaattgtgaaataactgaataataatttttgcctggc

SEQ ID NO: 34944 - DNA, 1548 bp, Muscodor strobelii
  misc_feature: SGI cDNA ID NO. 572086
  misc_feature: Encodes the peptide sequence at SEQ ID NO 34945
atgggaaagctcaacttgatgctggtatccgccttggcctctacggccctggctgtaagtgtgcagcgccgtcagaccacgacctttacatcaacggggaacccaatactagctgatgggtccgtatactcagctgacccggcgcccttagtcgttaatgacacggtttacatcttgtcaggacatgataccgccggcgctacagtcaacagcttcgtcatgcctgactggcagatttttgaagcgcaaaacccaagtcccacgggcagtagcagctggactctgcatcgaaacatagcacaaccacagactttattcagctgggctgcagccggcaccgcctacgctggacaaattgtacagggcgcagataagaggtactatctctacgcgcctgtgacgcagaagaatccgggaactacggatccattcggcatcggtgtaggagtgtctagtagtccactcggaccgtttaccgatgcacatccgtccgggccaatcatctcgcagaaggtacctacgccggggaacaacatccaaaacattgatcccactgtgctcgttgataccgacgggcgcgtgtacatatactttggcactttcggtcagctgaaagcgtacgaactgaatagtgacatggtaaccatcaagagcgcagtgacgacagtaacgtcattaacgggattctttgaggccccatggctaatgaaaagaggctcgacatactacatgctctatgcgggtaacaatgcagggccgaattccctttgcactcctacaagctaccatgcgtgcattgcgtacggtacggcgtcgagcccacttggcccctggacctaccgggggacgattttggatattgtaagctcgacgacatcacatccgggtgtgtatacgctgggcggaaagtactatttaacctatcacacgcgtgatgccgtgggcggcacgcatttccgtcgcagcatcgctttcgacgagctagtgtggaacgacagcacaagtcccccaagcatcaataaagtcatacagacaaaaagaccagcaggcacaccagcgccaagtcgcaacgtcgcacccaaagcaaagattacatccgcgaacacgacacccatccagtactggactgaggccgtgcatgacctgcgtgttgagcctaacccgctgcctcccgactattggagttcttacgcggctgaaagctcgccacagacgaacacactgacttatacttggagtcaggcggtaacacttaacgggactgccatggccttcttcgccgatcaaccggcggggtccaatatcggcgttcctccgccgtcatcgtggcgcgtcgagtacttgaactcagcaggatcgtggactgcggtttcgctaacagggtcaggagggtaccccacggctgcaaccaattcgcccccggaaattggcttccaagcggtcactacgacgtcgattcgtgcgatcatcaccgcgtcaggggctagtggtcagtatggcggtgttggtgtgaaagaatggtatgcgtacgcgactactgcccagtga

SEQ ID NO: 34945 - protein, 515 aa, Muscodor strobelii
  misc_feature: SGI Peptide ID NO. 572086
  misc_feature (44)..(335): Pfam Id: PF04616 Pfam Desc: Glycosyl hydrolases family 43
  misc_feature (123)..(286): Pfam Id: PF04616 Pfam Desc: Glycosyl hydrolases family 43
  misc_feature (4)..(515): NCBI GI: 256728366 Blast Desc: NECHADRAFT_87724 [Nectria haematococca mpVI 77-13-4]
  misc_feature (1)..(511): NCBI GI: 261361665 Blast Desc: glycosyl hydrolase family 43 protein [Verticillium albo-atrum VaMs.102]
  misc_feature (7)..(515): NCBI GI: 119482481 Blast Desc: glycosyl hydrolase family 43 protein [Neosartorya fischeri NRRL 181] gi|119409423|gb|EAW19372.1| glycosyl hydrolase family 43 protein [Neosartorya fischeri NRRL 181]
  misc_feature (28)..(513): NCBI GI: 169785241 Blast Desc: [Aspergillus oryzae RIB40] gi|83775829|dbj|BAE65948.1| protein product [Aspergillus oryzae]
  misc_feature (28)..(513): NCBI GI: 238506217 Blast Desc: endo xylanase, [Aspergillus flavus NRRL3357] gi|220689023|gb|EED45374.1| endo xylanase, [Aspergillus flavus NRRL3357]
  misc_feature (6)..(515): NCBI GI: 58582744 Blast Desc: xylosidase; arabinosidase [Xanthomonas oryzae pv. oryzae KACC10331] gi|58427338|gb|AAW76375.1| xylosidase; arabinosidase [Xanthomonas oryzae pv. oryzae KACC10331]
  misc_feature (6)..(515): NCBI GI: 84624623 Blast Desc: xylosidase [Xanthomonas oryzae pv. oryzae MAFF 311018] gi|188577529|ref|YP_001914458.1| xylosidase; arabinosidase [Xanthomonas oryzae pv. oryzae PXO99A] xylosidase [Xanthomonas
  misc_feature (6)..(515): NCBI GI: 188991164 Blast Desc: xylosidase [Xanthomonas campestris pv. campestris str. B100] gi|167732924|emb|CAP51120.1| xylosidase [Xanthomonas campestris pv. campestris]
  misc_feature (25)..(515): NCBI GI: 21231835 Blast Desc: xylosidase/arabinosidase [Xanthomonas campestris pv. campestris str. ATCC 33913] gi|66768038|ref|YP_242800.1| xylosidase/arabinosidase [Xanthomonas campestris pv. campestris
  misc_feature (20)..(509): NCBI GI: 241774378 Blast Desc: glycoside hydrolase family 43 [Asticcacaulis excentricus CB 48] gi|241213066|gb|EER49079.1| glycoside hydrolase family 43 [Asticcacaulis excentricus CB 48]
  misc_feature (43)..(331): SWISSPROT Homolog: EC 3.2.1.55 Alpha-N-arabinofuranosidase
  misc_feature (43)..(331): SWISSPROT Homolog: EC 3.2.1.37 Xylan 1,4-beta-xylosidase
MGKLNLMLVSALASTALAVSVQRRQTTTFTSTGNPILADGSVYSADPAPLVVNDTVYILSGHDTAGATVNSFVMPDWQIFEAQNPSPTGSSSWTLHRNIAQPQTLFSWAAAGTAYAGQIVQGADKRYYLYAPVTQKNPGTTDPFGIGVGVSSSPLGPFTDAHPSGPIISQKVPTPGNNIQNIDPTVLVDTDGRVYIYFGTFGQLKAYELNSDMVTIKSAVTTVTSLTGFFEAPWLMKRGSTYYMLYAGNNAGPNSLCTPTSYHACIAYGTASSPLGPWTYRGTILDIVSSTTSHPGVYTLGGKYYLTYHTRDAVGGTHFRRSIAFDELVWNDSTSPPSINKVIQTKRPAGTPAPSRNVAPKAKITSANTTPIQYWTEAVHDLRVEPNPLPPDYWSSYAAESSPQTNTLTYTWSQAVTLNGTAMAFFADQPAGSNIGVPPPSSWRVEYLNSAGSWTAVSLTGSGGYPTAATNSPPEIGFQAVTTTSIRAIITASGASGQYGGVGVKEWYAYATTAQ

SEQ ID NO: 34946 - DNA, 705 bp, Muscodor strobelii
  misc_feature: SGI EST ID NO. CUFF.83164.0
  misc_feature: Variant of the nucleotide sequence at SEQ ID NO 34944
ggacatgataccgccggcgctacagtcaacagcttcgtcatgcctgactggcagatttttgaagcgcaaaacccaagtcccacgggcagtagcagctggactctgcatcgaaacatagcacaaccacagactttattcagctgggctgcagccggcaccgcctacgctggacaaattgtacagggcgcagataagaggtactatctctacgcgcctgtgacgcagaagaatccgggaactacggatccattcggcatcggtgtaggagtgtctagtagtccactcggaccgtttaccgatgcacatccgtccgggccaatcatctcgcagaaggtacctacgccggggaacaacatccaaaacattgatcccactgtgctcgttgataccgacgggcgcgtgtacatatactttggcactttcggtcagctgaaagcgtacgaactgaatagtgacatggtaaccatcaagagcgcagtgacgacagtaacgtcattaacgggattctttgaggccccatggctaatgaaaagaggctcgacatactacatgctctatgcgggtaacaatgcagggccgaattccctttgcactcctacaagctaccatgcgtgcattgcgtacggtacggcgtcgagcccacttggcccctggacctaccgggggacgattttggatattgtaagctcgacgacatcacatccg

SEQ ID NO: 34947 - DNA, 1005 bp, Muscodor strobelii
  misc_feature: SGI cDNA ID NO. 572087
  misc_feature: Elevated expression when VOC is produced
  misc_feature: Encodes the peptide sequence at SEQ ID NO 34948
atgccagccatagattcttcaagcgaaccgcttctatacggcaccgattttaagctcgattgtgggtttgcagcatgtagggaggacagagtcccaacggattcatactcagcatggcagtatactgtgtactccacggaggaactgggcactcttcccacccatcttcatctccacaacactgaagggtgctgcattcccgactcattccgtactagccagatgatcgttcgacatcgtcggcgcaatgaagttgaccatcactacttctatgtcactgcaagcgtgcatcctaccggcttccacacggcaactgagaaaaggggctgcgtggccgtgggagtcatcccttcgtatgaaagaatgatcctatcacctgaggagcgtcgcgacatgttatatcatcttggctacgaagatagtggtgagcctgaagatcaagatgaattctcgccagtgatgctagaacttgtccacattcaccaaccccaaggccatgcttctaagacattggacagtatattagacgagaaatgcgacaatgatccggcacagacacagtgcgtgagcctctcttttttgaaaaacaactacgaaaacaggacagagaatacccgttccctgttgatacgtacggtcgaggagcttgcttctcctcagaatccggagtctcaaactctgctttttcctctataccggaagccagaggcacacatgtttcatgcaaagacaatatctgcaaaacgtttcgattccacagtgctgcatatcacagagcacaatgaaacgacaactggcgctcttgatcaaagtgatgttggctgccttgtgaaaagcgccgtcggcggcaccggagtcggaatactgacaaatcttgaggaggtctcgggagtggaaggcgacaattcaatcagacatgtcgggcatgtacagctgatggatcgtgttgtgagagacatagataatcgaatccatcgcattgtacgtaatccatctaggaagtga

SEQ ID NO: 34948 - protein, 334 aa, Muscodor strobelii
  misc_feature: SGI Peptide ID NO. 572087
  misc_feature: Useful for introducing or modulating the production of volatile compounds
MPAIDSSSEPLLYGTDFKLDCGFAACREDRVPTDSYSAWQYTVYSTEELGTLPTHLHLHNTEGCCIPDSFRTSQMIVRHRRRNEVDHHYFYVTASVHPTGFHTATEKRGCVAVGVIPSYERMILSPEERRDMLYHLGYEDSGEPEDQDEFSPVMLELVHIHQPQGHASKTLDSILDEKCDNDPAQTQCVSLSFLKNNYENRTENTRSLLIRTVEELASPQNPESQTLLFPLYRKPEAHMFHAKTISAKRFDSTVLHITEHNETTTGALDQSDVGCLVKSAVGGTGVGILTNLEEVSGVEGDNSIRHVGHVQLMDRVVRDIDNRIHRIVRNPSRK

SEQ ID NO: 34949 - DNA, 1482 bp, Muscodor strobelii
  misc_feature: SGI cDNA ID NO. 572088
  misc_feature: Encodes the peptide sequence at SEQ ID NO 34950
atggtcggcggtaatggaggtgagcccttttgggacggcgagcatctatctaacttgcgacaaattaacatacgatgtgccgctcgcgtcgacagcctgcagtacatttacgcagacggtagcagtacggcaaagcatgggggtgatggcggcagagatgaaatcttcgcgctcgatccagacgaagcaatcattacggtctggatatggtctggcaccgagatcgatgccattcagttccaaaccaccaaaggccggctgtcccccaaatacggcggcggcggcggtgacgcaaatattttccgaggccatgatggcacgcgggaacgagcattgatggcctttacaggccgatcaggggatataattgattccttggagccagtgtggtcgaacacgcgcgacatggatagtgaacatgtcttagtgggaagttccgaaggcggcgacggaggtgatgcattcgacatgctgaccaccgtcagcaacgcattttcctacgtcctgaaggctatccacattcgttcgggtagtaccatagacgcgattgagtgtaccttcaccgatatcgacggtcgcgaagtccgaacgggccgtcagggaggaggcggaggcgatgcccacaccttcacactggaaaataatgagcgcatcatacgtattgagggccgtgcagataaaatgattgatagattgcagttcttcacgaacaagggccgtgccagcaacagattcggcggcgatggaggtcacgcattcatctggacacctccattttctggcaataactcggccgccgatgccaacatgtccctgatgtgtttccaaggccgatccgctgcccgtgtagaccgtctagccccggtatggtcccccgatccgcccgtcaactttgccctgaacatcgattggttcgaggatatcggatcggcgatctccagtaacccggagagtgcccggacgaccgttcagaccgccgttaacacaagtcaagacgacatgtcgcacaaattcgtgtggacaatggaagcgtccaagtcctcgaccctcgcgctatccgaggagagtcgcaagaaggtcggaggcaaggtggccttcgaggttagcgtccgaggcaagcgcggcatcccctacgtcgccgagggtgagctcgaggccaaggccagcgtcgaagccagtgccgagaaagaatggggcaacaccgcgacagatagccagactgtgtcgcgcacgtacaccgagactatcgaggagaccctcaccgtgcgacccggcatggagctagagggcaagggcgtagcatacgagatgactgtccataacctcaagtggaagggtcaggtcacagtcacgtatgccggaggtgggaagaggactattccggtcgaaggtacctttgatagtgccagtgcgactaggtaccataccgcctacgaaactaaacctgtgcatatacgcgctcgcgcctggtcgaagctctga

SEQ ID NO: 34950 - protein, 493 aa, Muscodor strobelii
  misc_feature: SGI Peptide ID NO. 572088
  misc_feature (168)..(253): Pfam Id: PF01419 Pfam Desc: Jacalin-like lectin domain
  misc_feature (141)..(390): NCBI GI: 188501592 Blast Desc: natterin-like protein [Adineta vaga]
  misc_feature (42)..(286): NCBI GI: 258513724 Blast Desc: Dtox_0374 [Desulfotomaculum acetoxidans DSM 771] gi|257777429|gb|ACV61323.1| Dtox_0374 [Desulfotomaculum acetoxidans DSM 771]
  misc_feature (2)..(292): NCBI GI: 2373405 Blast Desc: protein product [Arabidopsis thaliana]
  misc_feature (2)..(292): NCBI GI: 1655830 Blast Desc: myrosinase-binding protein related protein [Brassica napus]
  misc_feature (2)..(287): NCBI GI: 5360792 Blast Desc: myrosinase binding protein [Arabidopsis thaliana]
  misc_feature (2)..(287): NCBI GI: 6760447 Blast Desc: AF222537_1 myrosinase-binding protein-like protein [Arabidopsis thaliana]
  misc_feature (2)..(287): NCBI GI: 15218116 Blast Desc: MBP2 (MYROSINASE-BINDING PROTEIN 2); sugar binding / thioglucosidase binding [Arabidopsis thaliana] gi|30695121|ref|NP_849794.1| MBP2 (MYROSINASE-BINDING PROTEIN 2);
  misc_feature (20)..(131): NCBI GI: 188501592 Blast Desc: natterin-like protein [Adineta vaga]
  misc_feature (11)..(237): NCBI GI: 107597846 Blast Desc: lectin [Cycas revoluta]
  misc_feature (2)..(287): NCBI GI: 5913975 Blast Desc: myrosinase binding protein [Arabidopsis thaliana]
MVGGNGGEPFWDGEHLSNLRQINIRCAARVDSLQYIYADGSSTAKHGGDGGRDEIFALDPDEAIITVWIWSGTEIDAIQFQTTKGRLSPKYGGGGGDANIFRGHDGTRERALMAFTGRSGDIIDSLEPVWSNTRDMDSEHVLVGSSEGGDGGDAFDMLTTVSNAFSYVLKAIHIRSGSTIDAIECTFTDIDGREVRTGRQGGGGGDAHTFTLENNERIIRIEGRADKMIDRLQFFTNKGRASNRFGGDGGHAFIWTPPFSGNNSAADANMSLMCFQGRSAARVDRLAPVWSPDPPVNFALNIDWFEDIGSAISSNPESARTTVQTAVNTSQDDMSHKFVWTMEASKSSTLALSEESRKKVGGKVAFEVSVRGKRGIPYVAEGELEAKASVEASAEKEWGNTATDSQTVSRTYTETIEETLTVRPGMELEGKGVAYEMTVHNLKWKGQVTVTYAGGGKRTIPVEGTFDSASATRYHTAYETKPVHIRARAWSKL

SEQ ID NO: 34951 - DNA, 1263 bp, Muscodor strobelii
  misc_feature: SGI cDNA ID NO. 572089
  misc_feature: Encodes the peptide sequence at SEQ ID NO 34952
atggctaccaccactcgccaacctttcgcacctctcaatgagtcgcgccttcagagtctgactagtttgaagaaccgacagaatgctttctcgagcccctcgccggtgaaacggaaagctgccgatgtgattgatttcgacaactcggagaatgtcgaccctatctctttttctaagcgggcaaagggaagcgacgggttctttccttccaaggactccttcatcaagccatctaacttcgttctcaccaagtcggctagcaccaatgacgtggctctcttcagcactcccacggccatcacacctcgctcacggtctgtcttgaaccccaagtcccaagccgccaagttgaacacgacccttgctcgctcttcgcctctgtcagcacctgctggacgatctcccactcgtggaaagcgcgccggtatcctttcgtccaggcggcgtactgccggctcctactcccgtgttgagcctcctgtcttcggccttcccacgagctctgcatccgcgcctttctcattggacgcagccctgaaaggctctatctcaagctacgctagccgcagtgagctatcgtcatccaagaagtcctcgtcgactggtctatcgagccttggtgatctacatgagcctgactcgaagtcctcatggttcttcgatattcacgaagacaccccggagcaggaaatgacgaatcttctccagcatagcacctgtgttctggatatcagctcagatgaggagagcgaaagccgacggcagcgtgaacgagccgagggcaaagagaacgttcctcccgttgatgatgtgtcgcagacttctcgcccgcgagctgctcggcttgctgctggcttggatgacatgattattgagaaggagcggaacccgctcggcgagatggatccgaaggagtactactcagagggttgtgatgagaactctgtcatcattatcccaggcgatgaagatgaagaggccccgacagaggccgacttcaacttcagtgttcctgtcgatactgtcgagcccgttgtgtcagcaccaactgatgaagcccaagtccccgtcgtgggtagcgagtcggagccgggagtccatgtcgaggagacggtgaagacagttgaagagcttatgcaaaagaccgacgagcctgcgcctggtgctgcggtactcgagccgatggagggcactggcgagagcttcgaggtttgggaaagtggaagcacaaaagatgagaatgaagcacttgtggagtgctga

SEQ ID NO: 34952 - protein, 420 aa, Muscodor strobelii
  misc_feature: SGI Peptide ID NO. 572089
  misc_feature (1)..(417): NCBI GI: 261357900 Blast Desc: conserved [Verticillium albo-atrum VaMs.102]
  misc_feature (1)..(415): NCBI GI: 256728014 Blast Desc: NECHADRAFT_101180 [Nectria haematococca mpVI 77-13-4]
  misc_feature (1)..(416): NCBI GI: 171676380 Blast Desc: protein product [Podospora anserina] gi|170936256|emb|CAP60915.1| protein product [Podospora anserina]
  misc_feature (1)..(415): NCBI GI: 145602542 Blast Desc: MGG_12986 [Magnaporthe grisea 70-15] gi|145010949|gb|EDJ95605.1| MGG_12986 [Magnaporthe grisea 70-15]
  misc_feature (1)..(414): NCBI GI: 46130828 Blast Desc: FG08969.1 [Gibberella zeae PH-1]
  misc_feature (1)..(413): NCBI GI: 85091009 Blast Desc: NCU07771 [Neurospora crassa OR74A] gi|16945441|emb|CAD11786.1| [Neurospora crassa] gi|28920073|gb|EAA29456.1| conserved [Neurospora crassa OR74A]
  misc_feature (34)..(415): NCBI GI: 156063254 Blast Desc: SS1G_01743 [Sclerotinia sclerotiorum 1980] gi|154697079|gb|EDN96817.1| SS1G_01743 [Sclerotinia sclerotiorum 1980]
  misc_feature (36)..(414): NCBI GI: 116200464 Blast Desc: CHGG_10777 [Chaetomium globosum CBS 148.51] gi|88175491|gb|EAQ82959.1| CHGG_10777 [Chaetomium globosum CBS 148.51]
  misc_feature (1)..(337): NCBI GI: 169615609 Blast Desc: SNOG_10964 [Phaeosphaeria nodorum SN15] gi|111060343|gb|EAT81463.1| SNOG_10964 [Phaeosphaeria nodorum SN15]
  misc_feature (1)..(319): NCBI GI: 189209726 Blast Desc: conserved [Pyrenophora tritici-repentis Pt-1C-BFP] gi|187977288|gb|EDU43914.1| conserved [Pyrenophora tritici-repentis Pt-1C-BFP]
MATTTRQPFAPLNESRLQSLTSLKNRQNAFSSPSPVKRKAADVIDFDNSENVDPISFSKRAKGSDGFFPSKDSFIKPSNFVLTKSASTNDVALFSTPTAITPRSRSVLNPKSQAAKLNTTLARSSPLSAPAGRSPTRGKRAGILSSRRRTAGSYSRVEPPVFGLPTSSASAPFSLDAALKGSISSYASRSELSSSKKSSSTGLSSLGDLHEPDSKSSWFFDIHEDTPEQEMTNLLQHSTCVLDISSDEESESRRQRERAEGKENVPPVDDVSQTSRPRAARLAAGLDDMIIEKERNPLGEMDPKEYYSEGCDENSVIIIPGDEDEEAPTEADFNFSVPVDTVEPVVSAPTDEAQVPVVGSESEPGVHVEETVKTVEELMQKTDEPAPGAAVLEPMEGTGESFEVWESGSTKDENEALVEC

SEQ ID NO: 34953 - DNA, 2690 bp, Muscodor strobelii
  misc_feature: SGI EST ID NO. CUFF.83402.1
  misc_feature: Variant of the nucleotide sequence at SEQ ID NO 34951
gggagacatccgcatctgtgcttgtgctccctgtatccactcgccctccccgtccgatgcccccctttccatggaaagtggtggtgctcattggcggcgacgccctctacgccaacaccacgcgtccgcaacacgccaatctactgcccacagtgcaccagagctgcatctccgccccgtttgagaccagaccgtgtcactgccagtgctttcgccgctctctcatatgcacctgcatttgcacctgcagttctccagcgcaattgccatcgtccctcctcagtcgttcctactcgtccctcccgcttggttaatccagtcccctcgttctcttaaatgctgcagacctgcattctgccttctccaatcccgattcagtctcttgttcggccactcagctctcttcctcttactccagtagtcccgttttctcgtccttctcttggtcgctaacaccgggcgcttgttgacactaccattgtctgctaatctcgacgtgcatcattccacacaactacttgcacctcagacgccaatcttgcccttctcctctggtaggccgtcaagtccgcgaccaccctcctttctcctctgctgctggagaacagccgagcatgcaataagacctgcccacgccctcccagcacactgtttcgccacttttcctctcgttcccctctttcgacgctgccgctgcctttcgcttctggcacctggattgaggacatcacatacacttcgaattgggatcaaaataaacaaacaattcggccacttgtgctcttacactttgccttgggttgatcacctatcaactgctcttggcccagtattgccatagtagtcattggcaactaactctcaattgctgtcgacttggattcgttggtcagtcttgttgaaatcagtcgtcgctgccacgaagcttcattgggcattcgcagcaccttctccaacaccagcaagtcgacgacgaattctctcgaaatggctaccaccactcgccaacctttcgcacctctcaatgagtcgcgccttcagagtctgactagtttgaagaaccgacagaatgctttctcgagcccctcgccggtgaaacggaaagctgccgatgtgattgatttcgacaactcggagaatgtcgaccctatctctttttctaagcgggcaaagggaagcgacgggttctttccttccaaggactccttcatcaagccatctaacttcgttctcaccaagtcggctagcaccaatgacgtggctctcttcagcactcccacggccatcacacctcgctcacggtctgtcttgaaccccaagtcccaagccgccaagttgaacacgacccttgctcgctcttcgcctctgtcagcacctgctggacgatctcccactcgtggaaagcgcgccggtatcctttcgtccaggcggcgtactgccggctcctactcccgtgttgagcctcctgtcttcggccttcccacgagctctgcatccgcgcctttctcattggacgcagccctgaaaggctctatctcaagctacgctagccgcagtgagctatcgtcatccaagaagtcctcgtcgactggtctatcgagccttggtgatctacatgagcctgactcgaagtcctcatggttcttcgatattcacgaagacaccccggagcaggaaatgacgaatcttctccagcatagcacctgtgttctggatatcagctcagatgaggagagcgaaagccgacggcagcgtgaacgagccgagggcaaagagaacgttcctcccgttgatgatgtgtcgcagacttctcgcccgcgagctgctcggcttgctgctggcttggatgacatgattattgagaaggagcggaacccgctcggcgagatggatccgaaggagtactactcagagggttgtgatgagaactctgtcatcattatcccaggcgatgaagatgaagaggccccgacagaggccgacttcaacttcagtgttcctgtcgatactgtcgagcccgttgtgtcagcaccaactgatgaagcccaagtccccgtcgtgggtagcgagtcggagccgggagtccatgtcgaggagacggtgaagacagttgaagagcttatgcaaaagaccgacgagcctgcgcctggtgctgcggtactcgagccgatggagggcactggcgagagcttcgaggtttgggaaagtggaagcacaaaagatgagaatgaagcacttgtggagtgctgatgaataagagtctgagctgctcaagctcatttgatgtgatacgggatgattacgtgagtggttcgtcactcgataatacatgattacgttctggcagaggagtcgtcggagttcaaggcgttccgatcagctcaagggtccgggctactacggaatcggtttcggcgtacgaatggtattgatttgatgcctttctcacttgtctcgcgcaagtatttctgtgtgctgtatatacacgatggctagagattcctattttgcaccggtaaaagacgtttttacttctgttcacaattatgtccagctcaactgttcttgtatcgtgattctcttgctcacggatgcatgcatcaattatctcgctagagcagcgtgagtgagacattacatagcatcgctacaggcagctgatcatatattggctttttgtcctaaacgat

SEQ ID NO: 34954 - DNA, 1170 bp, Muscodor strobelii
  misc_feature: SGI cDNA ID NO. 572090
  misc_feature: Reduced expression when VOC is produced
  misc_feature: Encodes the peptide sequence at SEQ ID NO 34955
atgaacaactcgtctcctgagtcgtcgctgcttgatccgactactcctgtgtcgccctccccttctgcacagctccaggagcaggctagagaggcgcatgaacagcagaatcaaccggcgaatagggcgctgtcggaaggacctgcaagtcctaggtcggaggccaggagtattcatgtcaaagctggtggggagagaacggcgacacaatcgcctgcgccagcactagaacctgttttagctgcaccgcagatttcgccccaaaatccggcacaggctacgattccgccgaagctttcgccaggaacggcgtctggaggcggagatggaatggatggtgttgagtatgaggatgagaaaaatggtgtgaagagaccgccggtgagaggcgcattggtaatcttcgaggggatggatcgcgcgggaaagactacgcaggccaaattgttacagttgagatgcattgagagtgggagagaggtcaaatttatgagattccctgacaggacaacggtcatcgggaaaatgatcgactcatatctaaagggtgaatctggtattgaagatcacgtcatccatctcctgttcaccgcaaatcgctgggaagctgctgaaacaataaaagccgagctagcagcaggccacattgtaatctgcgaccggtactaccacagtggcattgtctacagcgctgccaaacaactcccctctctcagtctatcatgggccaaagcacccgaagtcggcttaccacgtccagacatggtcctcttcctagatctcgaggagtcagttgctcgctcgcgtggcggctggggaggagaggtctacgagaagggcgagatgcagagacgtgtgcgtgaattattttggggtctgagtatgggggatttgggcacagctgttaagtccagcaaacctccttcatcctcgagaagcgagagaatgtcctttggcaatggcacgaatagtagcaacgctagggaccgggaaagaccgggccctggggctgatgaggaggagggtgagttcagacaggaagaggaggatattcaaatcgtggatgcggatttgggggtcgaggagctttcggataaggtatgggaagtcgtgcttcctcgtctgttggctgttgagagggggaggttgggaagagtgttaggattgtga

SEQ ID NO: 34955 - protein, 389 aa, Muscodor strobelii
  misc_feature: SGI Peptide ID NO. 572090
  misc_feature (135)..(315): Pfam Id: PF02223 Pfam Desc: Thymidylate kinase
  misc_feature (135)..(290): Pfam Id: PF02223 Pfam Desc: Thymidylate kinase
  misc_feature (129)..(384): NCBI GI: 261357902 Blast Desc: thymidylate kinase [Verticillium albo-atrum VaMs.102]
  misc_feature (119)..(387): NCBI GI: 85091013 Blast Desc: thymidylate kinase [Neurospora crassa OR74A] gi|12718338|emb|CAC28573.1| related to thymidylate kinase [Neurospora crassa] gi|28920075|gb|EAA29458.1| thymidylate kinase
  misc_feature (127)..(387): NCBI GI: 171676382 Blast Desc: protein product [Podospora anserina] gi|170936257|emb|CAP60916.1| protein product [Podospora anserina]
  misc_feature (129)..(383): NCBI GI: 256727853 Blast Desc: [Nectria haematococca mpVI 77-13-4]
  misc_feature (129)..(383): NCBI GI: 46130830 Blast Desc: FG08970.1 [Gibberella zeae PH-1]
  misc_feature (128)..(387): NCBI GI: 39960728 Blast Desc: thymidylate kinase, [Magnaporthe grisea 70-15] gi|145010950|gb|EDJ95606.1| thymidylate kinase, [Magnaporthe grisea 70-15]
  misc_feature (129)..(387): NCBI GI: 116200466 Blast Desc: CHGG_10778 [Chaetomium globosum CBS 148.51] gi|88175492|gb|EAQ82960.1| CHGG_10778 [Chaetomium globosum CBS 148.51]
  misc_feature (129)..(290): NCBI GI: 259480991 Blast Desc: TPA: thymidylate and uridylate kinase (Eurofung) [Aspergillus nidulans FGSC A4]
  misc_feature (125)..(384): NCBI GI: 156044845 Blast Desc: SS1G_09611 [Sclerotinia sclerotiorum 1980] gi|154694006|gb|EDN93744.1| SS1G_09611 [Sclerotinia sclerotiorum 1980]
  misc_feature (126)..(290): NCBI GI: 255955699 Blast Desc: Pc21g15930 [Penicillium chrysogenum Wisconsin 54-1255] gi|211590313|emb|CAP96490.1| Pc21g15930 [Penicillium chrysogenum Wisconsin 54-1255]
  misc_feature: Useful for introducing or modulating the production of volatile compounds
MNNSSPESSLLDPTTPVSPSPSAQLQEQAREAHEQQNQPANRALSEGPASPRSEARSIHVKAGGERTATQSPAPALEPVLAAPQISPQNPAQATIPPKLSPGTASGGGDGMDGVEYEDEKNGVKRPPVRGALVIFEGMDRAGKTTQAKLLQLRCIESGREVKFMRFPDRTTVIGKMIDSYLKGESGIEDHVIHLLFTANRWEAAETIKAELAAGHIVICDRYYHSGIVYSAAKQLPSLSLSWAKAPEVGLPRPDMVLFLDLEESVARSRGGWGGEVYEKGEMQRRVRELFWGLSMGDLGTAVKSSKPPSSSRSERMSFGNGTNSSNARDRERPGPGADEEEGEFRQEEEDIQIVDADLGVEELSDKVWEVVLPRLLAVERGRLGRVLGL

SEQ ID NO: 34956 - DNA, 1872 bp, Muscodor strobelii
  misc_feature: SGI EST ID NO. CUFF.83219.0
  misc_feature: Variant of the nucleotide sequence at SEQ ID NO 34954
atgcaacgcaacccttcaacttgggtctattcacccgatctgacatccaattgatcactgcataaatcaatggtttcttatccagtccaattggctccaactacacccaattgaagctcctaccgtgattgcgagctaatcgcggggttcgaccacaaggttgtctgttcccctgcacgacatcattcgatctagaacagcaggtaattagctggtccccatcaggcgagggccgggaccagggcacacattgcataagaaaggggcgggagtacgcgcgcgcgattaaatatggcttctattaatgatcttgccactgccgcgacgatcgcgtcgagtaacacagccatgaacaactcgtctcctgagtcgtcgctgcttgatccgactactcctgtgtcgccctccccttctgcacagctccaggagcaggctagagaggcgcatgaacagcagaatcaaccggcgaatagggcgctgtcggaaggacctgcaagtcctaggtcggaggccaggagtattcatgtcaaagctggtggggagagaacggcgacacaatcgcctgcgccagcactagaacctgttttagctgcaccgcagatttcgccccaaaatccggcacaggctacgattccgccgaagctttcgccaggaacggcgtctggaggcggagatggaatggatggtgttgagtatgaggatgagaaaaatggtgtgaagagaccgccggtgagaggcgcattggtaatcttcgaggggatggatcgcgcgggaaagactacgcaggccaaattgttacagttgagatgcattgagagtgggagagaggtcaaatttatgagattccctgacaggacaacggtcatcgggaaaatgatcgactcatatctaaagggtgaatctggtattgaagatcacgtcatccatctcctgttcaccgcaaatcgctgggaagctgctgaaacaataaaagccgagctagcagcaggccacattgtaatctgcgaccggtactaccacagtggcattgtctacagcgctgccaaacaactcccctctctcagtctatcatgggccaaagcacccgaagtcggcttaccacgtccagacatggtcctcttcctagatctcgaggagtcagttgctcgctcgcgtggcggctggggaggagaggtctacgagaagggcgagatgcagagacgtgtgcgtgaattattttggggtctgagtatgggggatttgggcacagctgttaagtccagcaaacctccttcatcctcgagaagcgagagaatgtcctttggcaatggcacgaatagtagcaacgctagggaccgggaaagaccgggccctggggctgatgaggaggagggtgagttcagacaggaagaggaggatattcaaatcgtggatgcggatttgggggtcgaggagctttcggataaggtatgggaagtcgtgcttcctcgtctgttggctgttgagagggggaggttgggaagagtgttaggattgtgaggtgatggcatatttcagagactcgtgtttgaatggtcggtatgagtgacgggatgccaggtctacgagtccagagcatcattgtgttgataccaagcatatatagttcggcgtcgatgcgcattgttgagaggcgttatcagcatgatagcatttttctatcatagtgtccgctccatatcaagatcatcaagcatcatcatcctgtctctcatgctgaagttttgtgacgagtatcgacgctggatctccacgccttttgccttttcacgctagaagactcgccggtcaatgcaattggcatagaagacttatcatagactgtcctcagctgtgcagcgaggaattcggtac

SEQ ID NO: 34957 - DNA, 891 bp, Muscodor strobelii
  misc_feature: SGI cDNA ID NO. 572091
  misc_feature: Encodes the peptide sequence at SEQ ID NO 34958
atggatgcatcatctctattcagagtcgacggcatggtcgccgtgatcagcggtggtggcactggcatcggattcatgatggcaaaagccttagcgggatcaggcgcaaagaaagtttacatcctcggccgccgaaaggcagtgcttgaagaagccgcaaccgcacacccaagcatcagtcctctcgtctgcgacgtaacgtccaaggactcactgcaaagcgtcgtcgatactctaacgaaggaggtcggttacatcaatctcctaatcgcaaactcaggtgttatcggaccgggcaacacatacgactccaagctcagcatccaagacctgcggaagaacctcttcgacgacgcgagtatggatgagatgactcactgtctacacgtcaacatcaccggtgcttattttactatcgctgcatttcttgagctactcgatgcggggaacaaaaacgctgtgaagggcggatttggaaggccgtttgagggtagtaagatgccgtcgatacagagtcaagtcgtagtgactagtagcttgggagcgtattcgagggatgcacatacgccgccttcgtatgctgcggcgaaggcaggaatcttgcaggtcgcgcagcatgcggcgacgaatttggcgccgtatcagattcgtgttaatactttggctcctggttattacctatcagagatggcagctcctgttttcgccagccgtgaccctgagacggagggcatcgaccacccagcttttatgccggcgaggagatttggtgtcgaggatgagatggctggctcgatattgtatctggctagtagagccggggcatattgtgatggactggtgtttgcgtttgatggtggaagattgtccgttattccttctacgtattga

SEQ ID NO: 34958 - protein, 296 aa, Muscodor strobelii
  misc_feature: SGI Peptide ID NO. 572091
  misc_feature (12)..(212): Pfam Id: PF00106 Pfam Desc: short chain dehydrogenase
  misc_feature (12)..(135): Pfam Id: PF00106 Pfam Desc: short chain dehydrogenase
  misc_feature (13)..(82): Pfam Id: PF08659 Pfam Desc: KR domain
  misc_feature (2)..(296): NCBI GI: 171684627 Blast Desc: protein product [Podospora anserina] gi|170942274|emb|CAP67926.1| protein product [Podospora anserina]
  misc_feature (4)..(296): NCBI GI: 85083242 Blast Desc: NCU05094 [Neurospora crassa OR74A] gi|28881379|emb|CAD70420.1| related to gluconate 5-dehydrogenase [Neurospora crassa] gi|28918165|gb|EAA27844.1| conserved crassa
  misc_feature (6)..(296): NCBI GI: 39942668 Blast Desc: MGG_03414 [Magnaporthe grisea 70-15] gi|145010047|gb|EDJ94703.1| MGG_03414 [Magnaporthe grisea 70-15]
  misc_feature (1)..(296): NCBI GI: 116179138 Blast Desc: CHGG_00197 [Chaetomium globosum CBS 148.51] gi|88184494|gb|EAQ91962.1| CHGG_00197 [Chaetomium globosum CBS 148.51]
  misc_feature (3)..(296): NCBI GI: 154312001 Blast Desc: BC1G_06034 [Botryotinia fuckeliana B05.10] gi|150850684|gb|EDN25877.1| BC1G_06034 [Botryotinia fuckeliana B05.10]
  misc_feature (1)..(296): NCBI GI: 169765484 Blast Desc: [Aspergillus oryzae RIB40] gi|83765068|dbj|BAE55211.1| protein product [Aspergillus oryzae]
  misc_feature (3)..(296): NCBI GI: 256729314 Blast Desc: NECHADRAFT_95809 [Nectria haematococca mpVI 77-13-4]
  misc_feature (1)..(296): NCBI GI: 212535152 Blast Desc: short chain dehydrogenase/reductase family [Penicillium marneffei ATCC 18224] gi|210070131|gb|EEA24221.1| short chain dehydrogenase/reductase family [Penicillium marneffei
  misc_feature (1)..(296): NCBI GI: 242792187 Blast Desc: short chain dehydrogenase/reductase family [Talaromyces stipitatus ATCC 10500] gi|218718490|gb|EED17910.1| short chain dehydrogenase/reductase family [Talaromyces ATCC
  misc_feature (1)..(296): NCBI GI: 115387385 Blast Desc: conserved [Aspergillus terreus NIH2624] gi|114195282|gb|EAU36982.1| conserved [Aspergillus terreus NIH2624]
  misc_feature (5)..(290): SWISSPROT Homolog: EC 1.1.1.127 2-dehydro-3-deoxy-D-gluconate 5-dehydrogenase
MDASSLFRVDGMVAVISGGGTGIGFMMAKALAGSGAKKVYILGRRKAVLEEAATAHPSISPLVCDVTSKDSLQSVVDTLTKEVGYINLLIANSGVIGPGNTYDSKLSIQDLRKNLFDDASMDEMTHCLHVNITGAYFTIAAFLELLDAGNKNAVKGGFGRPFEGSKMPSIQSQVVVTSSLGAYSRDAHTPPSYAAAKAGILQVAQHAATNLAPYQIRVNTLAPGYYLSEMAAPVFASRDPETEGIDHPAFMPARRFGVEDEMAGSILYLASRAGAYCDGLVFAFDGGRLSVIPSTY

SEQ ID NO: 34959 - DNA, 942 bp, Muscodor strobelii
  misc_feature: SGI EST ID NO. CUFF.83222.0
  misc_feature: Variant of the nucleotide sequence at SEQ ID NO 34957
gcactggtacggctacctcacgatcaaataagaattctcataaatattgacatgtctcaggcatcggattcatgatggcaaaagccttagcgggatcaggcgcaaagaaagtttacatcctcggccgccgaaaggcagtgcttgaagaagccgcaaccgcacacccaagcatcagtcctctcgtctgcgacgtaacgtccaaggactcactgcaaagcgtcgtcgatactctaacgaaggaggtcggttacatcaatctcctaatcgcaaactcaggtgttatcggaccgggcaacacatacgactccaagctcagcatccaagacctgcggaagaacctcttcgacgacgcgagtatggatgagatgactcactgtctacacgtcaacatcaccggtgcttattttactatcgctgcatttcttgagctactcgatgcggggaacaaaaacgctgtgaagggcggatttggaaggccgtttgagggtagtaagatgccgtcgatacagagtcaagtcgtagtgactagtagcttgggagcgtattcgagggatgcacatacgccgccttcgtatgctgcggcgaaggcaggaatcttgcaggtcgcgcagcatgcggcgacgaatttggcgccgtatcagattcgtgttaatactttggctcctggttattacctatcagagatggcagctcctgttttcgccagccgtgaccctgagacggagggcatcgaccacccagcttttatgccggcgaggagatttggtgtcgaggatgagatggctggctcgatattgtatctggctagtagagccggggcatattgtgatggactggtgtttgcgtttgatggtggaagattgtccgttattccttctacgtattgaagagagcgcacagagcgaagagaacccggaaacgaagggggattatcgtcacgat

SEQ ID NO: 34960 - DNA, 981 bp, Muscodor strobelii
  misc_feature: SGI cDNA ID NO. 572092
  misc_feature: Encodes the peptide sequence at SEQ ID NO 34961
atgcctggagtcatcagcgcatctcatcaactggtctgcccagcaaagccaacaataatcgaagacaatgtccccgatctcacaggcaaggtggtcgtagtcactggatcaaatgctggtctcggcaagaaaatcgtagagatcctctactctaagaatgcgaaagtgtacatgcttgcccgttcagaagagaagaacaatcaagcaattcgagatatcaagactgccgtgccaagctcaaaaggcgagctaattcatattcacctcgatctcgccgatcttcccagcgtgaaagtagcagcagaagaattcttgcgtcgcgagtcgcaactgcatcttctcttcaacagtgccggtcttggatggaccgatctcagcttaaaaacgaaacaaggctacgaacttcaattcggtgttaattgtctcggcaacttcgcgcttgctaagctcctcactcccacgcttgtatcaacagcgaaggtctcgataccaggaagcgtacgtgtcatctgggtctcatcaaatgcggcagagggaatctcgccaaaaggcttcatgaaccatgtcgacgattcggctagtttgggcgcatccggatcatacaactattctaagctcggcaactatcttcacggtgccgagttcgcaaatcgctacacagctgatggtgtgctttcagtgcctctcaacccaggtgcacttgactcggagttctggcgcgacgccaataaatacgttgtggcatccttgagggcaactgttctatatcccaccgtatacggtgcctacacctgtctcttcgcggcattttctcccgaaatcacgccgaagacatctggcacctttgtcgctccatggggcaagctatggaaggtcgccaaagaaatggtaattgcaggaaagagtgaatcggaaggtggcgacgggacggcaagggaattctgggagtggtctgatgcacaggtttcgaagtacttgtaa

SEQ ID NO: 34961 - protein, 326 aa, Muscodor strobelii
  misc_feature: SGI Peptide ID NO. 572092
  misc_feature (9)..(322): NCBI GI: 256723235 Blast Desc: NECHADRAFT_51931 [Nectria haematococca mpVI 77-13-4]
  misc_feature (4)..(326): NCBI GI: 239610907 Blast Desc: short-chain dehydrogenase [Ajellomyces dermatitidis ER-3]
  misc_feature (12)..(326): NCBI GI: 225560611 Blast Desc: short-chain dehydrogenase [Ajellomyces capsulatus G186AR]
  misc_feature (4)..(326): NCBI GI: 261206248 Blast Desc: short-chain dehydrogenase [Ajellomyces dermatitidis SLH14081] gi|239592920|gb|EEQ75501.1| short-chain dehydrogenase [Ajellomyces dermatitidis SLH14081]
  misc_feature (1)..(326): NCBI GI: 256730375 Blast Desc: NECHADRAFT_95027 [Nectria haematococca mpVI 77-13-4]
  misc_feature (12)..(326): NCBI GI: 240280835 Blast Desc: short-chain dehydrogenase [Ajellomyces capsulatus H143]
  misc_feature (14)..(326): NCBI GI: 46122791 Blast Desc: FG05773.1 [Gibberella zeae PH-1]
  misc_feature (14)..(326): NCBI GI: 242801946 Blast Desc: estradiol 17 beta-dehydrogenase, [Talaromyces stipitatus ATCC 10500] gi|218717219|gb|EED16640.1| estradiol 17 beta-dehydrogenase, [Talaromyces stipitatus ATCC 10500]
  misc_feature (14)..(326): NCBI GI: 212545773 Blast Desc: short-chain dehydrogenase, [Penicillium marneffei ATCC 18224] gi|210064560|gb|EEA18655.1| short-chain dehydrogenase, [Penicillium marneffei ATCC 18224]
  misc_feature (14)..(326): NCBI GI: 256727198 Blast Desc: NECHADRAFT_32256 [Nectria haematococca mpVI 77-13-4]
  misc_feature (2)..(234): SWISSPROT Homolog: EC 1.3.1.33 Protochlorophyllide reductase
MPGVISASHQLVCPAKPTIIEDNVPDLTGKVVVVTGSNAGLGKKIVEILYSKNAKVYMLARSEEKNNQAIRDIKTAVPSSKGELIHIHLDLADLPSVKVAAEEFLRRESQLHLLFNSAGLGWTDLSLKTKQGYELQFGVNCLGNFALAKLLTPTLVSTAKVSIPGSVRVIWVSSNAAEGISPKGFMNHVDDSASLGASGSYNYSKLGNYLHGAEFANRYTADGVLSVPLNPGALDSEFWRDANKYVVASLRATVLYPTVYGAYTCLFAAFSPEITPKTSGTFVAPWGKLWKVAKEMVIAGKSESEGGDGTAREFWEWSDAQVSKYL

SEQ ID NO: 34962 - DNA, 484 bp, Muscodor strobelii
  misc_feature: SGI EST ID NO. CUFF.83229.0
  misc_feature: Variant of the nucleotide sequence at SEQ ID NO 34960
cgcatccggatcatacaactattctaagctcggcaactatcttcacggtgccgagttcgcaaatcgctacacagctgatggtgtgctttcagtgcctctcaacccaggtgcacttgactcggagttctggcgcgacgccaataaatacgttgtggcatccttgagggcaactgttctatatcccaccgtatacggtgcctacacctgtctcttcgcggcattttctcccgaaatcacgccgaagacatctggcacctttgtcgctccatggggcaagctatggaaggtcgccaaagaaatggtaattgcaggaaagagtgaatcggaaggtggcgacgggacggcaagggaattctgggagtggtctgatgcacaggtttcgaagtacttgtaaaactacacgatgatctcagagttttatggcgttgatagagggacagcgtaattcaatagataataagaatatgaatatcgacgatcgcaa

SEQ ID NO: 34963 - DNA, 1908 bp, Muscodor strobelii
  misc_feature: SGI cDNA ID NO. 572093
  misc_feature: Encodes the peptide sequence at SEQ ID NO 34964
atggagcacccagggtccgagggctcgggcgggaggtcttcatggaaccctgcgccctacggacaggcttgtatcggttgtgttcgtgctaaatgcaagtgtttcttccagcaaggcggctcaacatgtgaacggtgccatcgtctgggcaaggggtgtgagccttctgtcgcagttcgtaagcgacgggttcgcaagcaacagcagtccgatccaccatcgtcttccagccgactggagaaaaaacttgacgaagtggtcgctatgttgcgctctcagggaattgagaaagtggtcacaacacccgagtcatccaatactggtgagcaaagcaagcgcacaccatcaagtacaggcacccacgccgacaatgattctcggtctaagtcgcctactcggccgccccatgtcaaactagacacaaacaacagccacatacatctattacgtgcaaatcctgatgctgcctcttcccaggggccatgtcatcattctccaatctttgatgaagacgccctgagacatagtgtgccggatgatgaagctgataggcggctatggaattttcgcgagcattttctttctgtctttcccttcgtttacataccggacaacatgaggtccaacgaactacgtcagcatcgtccacttctatggcttgtgataatgtgtcttgcagccaatatcaccgccgagcagttcaaaattgaagcgatgatctgggacattattgcgaagagagttgtcgttgagcatttggcaaatctcgacatattattaggtatcatcgcattttcggcatggtctcattatttcaagaatgacagaccattcatgacgcagctggcaggtcttgcgatcccaattgcgtacgagctcaacatcaacaaaagaccacaagcgccttctcgggactcgagctatcgcaatctatctgactcttctgatcaaagtgaatgctcgcttgagcaacgacgaacctacgtcgctcttttccatctctcttcagccacttggactgcctataggaagatcgatcctgttcggtgtacttctttcctcgaggaatgcattcgcattctcagtgaaggaaaggagactcctcgcgacattcaactggccactcaagttagatgtcagatgatcacaaatcaactgacatgctattctgacgaagtcggcattgacgaaggtacctcagctggcccgacggcaatggtgtttagtgcgatgctctcgaagctacgggaaattgaaggaaacctgcccgccgacttgagaagcgatactgtgacgcaattgtacctgttgggaacggaaattgttgtaagagacttcaaacttcgtgctgttcctcgcaagaacagtgcggataatgtacgctaccaaaggctccaagaccttggttcgaccttgacgttagtcgagacatggattggaacatggcttggaatgtctacgttcaacacagttggcaccaccgtcgacatctttacacactatctgcactgccttgctgtactattcaaactgacaaccctcgatgagcctggatgggatatcgtggaggtcagaaggcgagtcgacgtctttgagatacttgataggacttccgaaaagatggatcgcatcgctgaagacttgcacatggttgatgcagtaggaccacgtcacgggatctatttcaagacgggctatctcctgcatgcgttgaaagcgttaatgctgactgagatggaggcattaaaccagcctcatgctattgacaacacgataccgggcttcgatgaggtactcaatagtgaggcatctatacccgatgaagttatgaacgccgtttcgcatgaaccgtggatctcagacatatatatgaacacatgggatctagatctcgatgttcagttttga

SEQ ID NO: 34964 - protein, 635 aa, Muscodor strobelii
  misc_feature: SGI Peptide ID NO. 572093
  misc_feature (16)..(628): NCBI GI: 145614172 Blast Desc: MGG_11311 [Magnaporthe grisea 70-15] gi|145021124|gb|EDK05253.1| MGG_11311 [Magnaporthe grisea 70-15]
  misc_feature (17)..(628): NCBI GI: 171681732 Blast Desc: protein product [Podospora anserina] gi|170940825|emb|CAP66474.1| protein product [Podospora anserina]
  misc_feature (15)..(337): NCBI GI: 256723323 Blast Desc: NECHADRAFT_51952 [Nectria haematococca mpVI 77-13-4]
  misc_feature (1)..(545): NCBI GI: 242795372 Blast Desc: TSTA_123110 [Talaromyces stipitatus ATCC 10500] gi|218719161|gb|EED18581.1| TSTA_123110 [Talaromyces stipitatus ATCC 10500]
  misc_feature (13)..(546): NCBI GI: 146324657 Blast Desc: AFUA_8G00950 [Aspergillus fumigatus Af293] gi|129555483|gb|EAL85073.2| AFUA_8G00950 [Aspergillus fumigatus Af293] gi|159123995|gb|EDP49114.1| conserved [Aspergillus A1163]
  misc_feature (13)..(579): NCBI GI: 261357092 Blast Desc: conserved [Verticillium albo-atrum VaMs.102]
  misc_feature (17)..(546): NCBI GI: 255942615 Blast Desc: Pc18g02320 [Penicillium chrysogenum Wisconsin 54-1255] gi|211586809|emb|CAP94456.1| Pc18g02320 [Penicillium chrysogenum Wisconsin 54-1255]
  misc_feature (1)..(536): NCBI GI: 145253563 Blast Desc: An17g00650 [Aspergillus niger] gi|134083862|emb|CAK42993.1| protein product [Aspergillus niger]
  misc_feature (20)..(544): NCBI GI: 154303398 Blast Desc: BC1G_09270 [Botryotinia fuckeliana B05.10] gi|150854581|gb|EDN29773.1| BC1G_09270 [Botryotinia fuckeliana B05.10]
  misc_feature (18)..(628): NCBI GI: 145245211 Blast Desc: An11g09150 [Aspergillus niger] gi|134079569|emb|CAK97045.1| protein product [Aspergillus niger]
MEHPGSEGSGGRSSWNPAPYGQACIGCVRAKCKCFFQQGGSTCERCHRLGKGCEPSVAVRKRRVRKQQQSDPPSSSSRLEKKLDEVVAMLRSQGIEKVVTTPESSNTGEQSKRTPSSTGTHADNDSRSKSPTRPPHVKLDTNNSHIHLLRANPDAASSQGPCHHSPIFDEDALRHSVPDDEADRRLWNFREHFLSVFPFVYIPDNMRSNELRQHRPLLWLVIMCLAANITAEQFKIEAMIWDIIAKRVVVEHLANLDILLGIIAFSAWSHYFKNDRPFMTQLAGLAIPIAYELNINKRPQAPSRDSSYRNLSDSSDQSECSLEQRRTYVALFHLSSATWTAYRKIDPVRCTSFLEECIRILSEGKETPRDIQLATQVRCQMITNQLTCYSDEVGIDEGTSAGPTAMVFSAMLSKLREIEGNLPADLRSDTVTQLYLLGTEIVVRDFKLRAVPRKNSADNVRYQRLQDLGSTLTLVETWIGTWLGMSTFNTVGTTVDIFTHYLHCLAVLFKLTTLDEPGWDIVEVRRRVDVFEILDRTSEKMDRIAEDLHMVDAVGPRHGIYFKTGYLLHALKALMLTEMEALNQPHAIDNTIPGFDEVLNSEASIPDEVMNAVSHEPWISDIYMNTWDLDLDVQF

SEQ ID NO: 34965 - DNA, 2421 bp, Muscodor strobelii
  misc_feature: SGI EST ID NO. CUFF.83234.0
  misc_feature: Variant of the nucleotide sequence at SEQ ID NO 34963
cccgaattcatttgcacaatcgagatcgtggctcctttctctagttgggaccagtgttatctattgttgcctctatcctagcttgcagggcaacaagaatggagcacccagggtccgagggctcgggcgggaggtcttcatggaaccctgcgccctacggacaggcttgtatcggttgtgttcgtgctaaatgcaagtgtttcttccagcaaggcggctcaacatgtgaacggtgccatcgtctgggcaaggggtgtgagccttctgtcgcagttcgtaagcgacgggttcgcaagcaacagcagtccgatccaccatcgtcttccagccgactggagaaaaaacttgacgaagtggtcgctatgttgcgctctcagggaattgagaaagtggtcacaacacccgagtcatccaatactggtgagcaaagcaagcgcacaccatcaagtacaggcacccacgccgacaatgattctcggtctaagtcgcctactcggccgccccatgtcaaactagacacaaacaacagccacatacatctattacgtgcaaatcctgatgctgcctcttcccaggggccatgtcatcattctccaatctttgatgaagacgccctgagacatagtgtgccggatgatgaagctgataggcggctatggaattttcgcgagcattttctttctgtctttcccttcgtttacataccggacaacatgaggtccaacgaactacgtcagcatcgtccacttctatggcttgtgataatgtgtcttgcagccaatatcaccgccgagcagttcaaaattgaagcgatgatctgggacattattgcgaagagagttgtcgttgagcatttggcaaatctcgacatattattaggtatcatcgcattttcggcatggtctcattatttcaagaatgacagaccattcatgacgcagctggcaggtcttgcgatcccaattgcgtacgagctcaacatcaacaaaagaccacaagcgccttctcgggactcgagctatcgcaatctatctgactcttctgatcaaagtgaatgctcgcttgagcaacgacgaacctacgtcgctcttttccatctctcttcagccacttggactgcctataggaagatcgatcctgttcggtgtacttctttcctcgaggaatgcattcgcattctcagtgaaggaaaggagactcctcgcgacattcaactggccactcaagttagatgtcagatgatcacaaatcaactgacatgctattctgacgaagtcggcattgacgaaggtacctcagctggcccgacggcaatggtgtttagtgcgatgctctcgaagctacgggaaattgaaggaaacctgcccgccgacttgagaagcgatagtaagtggcttttatggttgactgaacgatgtgaggctgatgtggcactagctgtgacgcaattgtacctgttgggaacggaaattgttgtaagagacttcaaacttcgtgctgttcctcgcaagaacagtgcggataatgtacgctaccaaaggctccaagaccttggttcgaccttgacgttagtcgagacatggattggaacatggcttggaatgtctacgttcaacacagttggcaccaccgtcgacatctttacacactatctgcactgccttgctgtactattcaaactgacaaccctcgatgagcctggatgggatatcgtggaggtcagaaggcgagtcgacgtctttgagatacttgataggacttccgaaaagatggatcgcatcgctgaagacttgcacatggttgatgcagtaggaccacgtcacgggatctatttcaagacgggctatctcctgcatgcgttgaaagcgttaatgctgactgagatggaggcattaaaccagcctcatgctattgacaacacgataccgggcttcgatgaggtactcaatagtgaggcatctatacccgatgaagttatgaacgccgtttcgcatgaaccgtggatctcagacatatatatgaacacatgggatctagatctcgatgttcagttttgatttctttcgatcatcgaataattgaagacaaaacctatatttcatcagtccagatcgcgggatcgccaattcattattagcccgatacatggacgtgaaccatgctgtaaactacggcaccaacttccgctgccatgcagctttacttcttcggcttcgtatctagtttaattatgatgaacgctggcaaggtaaattccattctacaccgatgtcggccacacgacggcatgagcctgagaagatcagtgcatggatggagcaagcgtagaattgacacacaaacaggattgaatggcctactcgagacaccaagttttattagttctggcgcggcatgatgctttaccatgatgcgttgctt

SEQ ID NO: 34966 - DNA, 630 bp, Muscodor strobelii
  misc_feature: SGI cDNA ID NO. 572094
  misc_feature: Elevated expression when VOC is produced
  misc_feature: Encodes the peptide sequence at SEQ ID NO 34967
atggctacagagtcttccagtactagcaagaagcttcccgatgaagtcacttttggcttgggatgggacaaagcttcatctgaggatgccacgaacaccggggaatttgacttggacattcttgctatcctgaagccgaagtctggaccttccgccgacatatgctattggggtagcgtcgtcaaagacgatgatttcaatttttcttgtagcaagtgtaaatccattactctttcagaggatagcaaggatggtgaaggagacggcgatgacgagcgactctggttgagcttgaacaaagtgccagagcatgtcgcggatgtggaaatttggatcttgattcatcaagcagtatgcaaaaaccagaactttggtcaagtcaagcaaggcaaatgccaattcttttcacaaactcgtggacagccggacaaaaacatcgaggcattcgaaataccgagtggggacgacagctcggcgaccatgcacgttttgactgtctcccgaaccgacaatggctgggagcatgcagttaagcgggaatattcgcaattggatcttgatggactgctcaatgccaacggcttcaccgacacagagctctatccgcgtataaagccgacagatgcatga

SEQ ID NO: 34967 - protein, 209 aa, Muscodor strobelii
  misc_feature: SGI Peptide ID NO. 572094
  misc_feature (75)..(129): Pfam Id: PF02342 Pfam Desc: Bacterial stress protein
  misc_feature (15)..(174): NCBI GI: 89100583 Blast Desc: YceE [Bacillus sp. NRRL B-14911] gi|89084687|gb|EAR63829.1| YceE [Bacillus sp. NRRL B-14911]
  misc_feature (4)..(182): NCBI GI: 113460778 Blast Desc: stress response protein [Haemophilus somnus 129PT] gi|112822821|gb|ABI24910.1| stress response protein [Haemophilus somnus 129PT]
  misc_feature (7)..(182): NCBI GI: 50085095 Blast Desc: tellurium resistance protein [Acinetobacter sp. ADP1] gi|49531071|emb|CAG68783.1| tellurium resistance protein [Acinetobacter sp. ADP1]
  misc_feature (4)..(127): NCBI GI: 77164515 Blast Desc: stress protein [Nitrosococcus oceani ATCC 19707] gi|254434469|ref|ZP_05047977.1| Bacterial stress protein [Nitrosococcus oceani AFC27] gi|76882829|gb|ABA57510.1| stress
  misc_feature (7)..(140): NCBI GI: 50085093 Blast Desc: tellurium resistance protein [Acinetobacter sp. ADP1] gi|49531069|emb|CAG68781.1| tellurium resistance protein [Acinetobacter sp. ADP1]
  misc_feature (7)..(182): NCBI GI: 256779694 Blast Desc: ShygA5_32931 [Streptomyces hygroscopicus ATCC 53653]
  misc_feature (7)..(182): NCBI GI: 254375834 Blast Desc: tellurium resistance protein [Streptomyces sp. SPB74] gi|197695652|gb|EDY42585.1| tellurium resistance protein [Streptomyces sp. SPB74]
  misc_feature (7)..(176): NCBI GI: 255323265 Blast Desc: tellurium resistance protein TerD [Campylobacter showae RM3277] gi|255299788|gb|EET79070.1| tellurium resistance protein TerD [Campylobacter showae RM3277]
  misc_feature (9)..(182): NCBI GI: 71065323 Blast Desc: tellurium resistance TerD [Psychrobacter arcticus 273-4] gi|93005599|ref|YP_580036.1| stress protein [Psychrobacter cryohalolentis K5] gi|71038308|gb|AAZ18616.1| tellurium TerD K5]
  misc_feature (7)..(196): NCBI GI: 187940062 Blast Desc: tellurium resistance protein [Pseudomonas aeruginosa] gi|265509455|gb|ACY75542.1| tellurium-resistance protein [Pseudomonas aeruginosa]
  misc_feature: Useful for introducing or modulating the production of volatile compounds
MATESSSTSKKLPDEVTFGLGWDKASSEDATNTGEFDLDILAILKPKSGPSADICYWGSVVKDDDFNFSCSKCKSITLSEDSKDGEGDGDDERLWLSLNKVPEHVADVEIWILIHQAVCKNQNFGQVKQGKCQFFSQTRGQPDKNIEAFEIPSGDDSSATMHVLTVSRTDNGWEHAVKREYSQLDLDGLLNANGFTDTELYPRIKPTDA

SEQ ID NO: 34968 - DNA, 1160 bp, Muscodor strobelii
  misc_feature: SGI EST ID NO. CUFF.83240.0
  misc_feature: Variant of the nucleotide sequence at SEQ ID NO 34966
gcgacattccagtgactcgtgtcaaagatagcgcgctgtcacattctcacattcgcgcatcatataccaatgagtagatgttgtctctgtgcctactatcacgttccgtacatttctcagctttcagtattaatgctgagctggcaacccttttccgacaatcaatctttcttccgtcggcgttgtcagctcatcgagactgacatcttcgagtaccaacaagcctacattattcaattttctgccacccggcgaacatctctcgaactacagcagatcattaccagctcagaatggctacagagtcttccagtactagcaagaagcttcccgatgaagtcacttttggcttgggatgggacaaagcttcatctgaggatgccacgaacaccggggaatttgacttggacattcttgctatcctgaagccgaagtctggaccttccgccgacatatgctattggggtagcgtcgtcaaagacgatgatttcaatttttcttgtagcaagtgtaaatccattactctttcagaggatagcaaggatggtgaaggagacggcgatgacgagcgactctggttgagcttgaacaaagtgccagagcatgtcgcggatgtggaaatttggatcttgattcatcaagcagtatgcaaaaaccagaactttggtcaagtcaagcaaggcaaatgccaattcttttcacaaactcgtggacagccggacaaaaacatcgaggcattcgaaataccgagtggggacgacagctcggcgaccatgcacgttttgactgtctcccgaaccgacaatggctgggagcatgcagttaagcgggaatattcgcaattggatcttgatggactgctcaatgccaacggcttcaccgacacagagctctatccgcgtataaagccgacagatgcatgaagtagtcgacgcagaaggtttcgagtcgatatcagcacaaaggtcgctaatcatccggcctcagccaagccatgtccagtctttaccctgtgttttctggctcagcacttcatttattcatgtttaccctagtcgctcattatgtattactcatagtcgatcgttatctatacaggcaatacacttgagttaggacagatgctcgcccttgcggcagggtctgccatgtctcgccag

SEQ ID NO: 34969 - DNA, 624 bp, Muscodor strobelii
  misc_feature: SGI cDNA ID NO. 572095
  misc_feature: Encodes the peptide sequence at SEQ ID NO 34970
atgttcgcgaaggtattagttgccaatgcccttctgagcggcgtcttagcaggtcttagccatcccgggtctgctactcacgaagcctatcgatatcgacttgtggcgaatgtccttggcacggatattgacccttcagttcaaggaaatggcgtcatcttcaatccatatggttgctttggtcctttgaccgtagccacaaatatcggaggctctccattctactttaatagcacagaaagtactatgacctatcccggaacttggagtagcgaaccccatttcgcaggaatcgtcataacaccgggaggcacaacgacggaacccagtaaagacaaatcgatggttcagtgcgacacggcgagcccgggcttcagttgggtctcaagtccaggcgacaacgttccgcatctggtttatgaagatggctcttggatggtgtgtcccggtgacgtgctcggagatggatatagtctctaccttgcttatagaaagactggtcagagcgtattaaaggggtgtgcagatgtggaattgctgcctgtatgcgcagatgacgtggaatccgagccatttgagggtgtcaagatggtgacttgtttgtcagactggacatggggctaa

SEQ ID NO: 34970 - protein, 207 aa, Muscodor strobelii
  misc_feature: SGI Peptide ID NO. 572095
MFAKVLVANALLSGVLAGLSHPGSATHEAYRYRLVANVLGTDIDPSVQGNGVIFNPYGCFGPLTVATNIGGSPFYFNSTESTMTYPGTWSSEPHFAGIVITPGGTTTEPSKDKSMVQCDTASPGFSWVSSPGDNVPHLVYEDGSWMVCPGDVLGDGYSLYLAYRKTGQSVLKGCADVELLPVCADDVESEPFEGVKMVTCLSDWTWG

SEQ ID NO: 34971 - DNA, 229 bp, Muscodor strobelii
  misc_feature: SGI EST ID NO. CUFF.83246.0
  misc_feature: Variant of the nucleotide sequence at SEQ ID NO 34969
cggtgacgtgctcggagatggatatagtctctaccttgcttatagaaagactggtcagagcgtattaaaggggtgtgcagatgtggaattgctgcctgtatgcgcagatgacgtggaatccgagccatttgagggtgtcaagatggtgacttgtttgtcagactggacatggggctaataatgtgcttgggcaaatgtttcgcggacctgcaacttacccctaacaagg

SEQ ID NO: 34972 - DNA, 654 bp, Muscodor strobelii
  misc_feature: SGI cDNA ID NO. 572096
  misc_feature: Elevated expression when VOC is produced
  misc_feature: Encodes the peptide sequence at SEQ ID NO 34973
atgtcactcaaccggcatgaaaatcgcgcccgtcgtcaagagaaattcgacgcaatggtgaaacaaatggatgatgacgctgaccgaagacgcaaagaggcccgagatctccagagactcggccgagcaatgcagctcaaccagaatatgccgaatgaggatgatgagtctgacatttgcaataaccgtcaactgcttacggctctacttttggcctcattaccaggtgtgacttacgcattccctaaactaggctctaacgaagagtccgctctccatattggtctgccatacgggtttcaacttcacatcggaaaaaagggcaactcgaaggatgatttagcgtctctgtaccaaaagcttaattggaggtcctggtccggtttggaggcgcttggggtcgttggagattcctgctccgctactaatgatgacgatgatactccacgcttcgattttggatcaatttcaatgaccctttggcgtagaaaagacatcgaaaaaaatgagcaagaacgtaaacttggggagcaagagcttggacttgacaagtttggaggcgatctgtactgtgacggttgtaaaaaaccggtcagagtgtatggaattgatgagatgagagaattcgggaagcaaagtagtgcaaggtcctaa

SEQ ID NO: 34973 - protein, 217 aa, Muscodor strobelii
  misc_feature: SGI Peptide ID NO. 572096
  misc_feature: Useful for introducing or modulating the production of volatile compounds
MSLNRHENRARRQEKFDAMVKQMDDDADRRRKEARDLQRLGRAMQLNQNMPNEDDESDICNNRQLLTALLLASLPGVTYAFPKLGSNEESALHIGLPYGFQLHIGKKGNSKDDLASLYQKLNWRSWSGLEALGVVGDSCSATNDDDDTPRFDFGSISMTLWRRKDIEKNEQERKLGEQELGLDKFGGDLYCDGCKKPVRVYGIDEMREFGKQSSARS

SEQ ID NO: 34974 - DNA, 3177 bp, Muscodor strobelii
  misc_feature: SGI EST ID NO. CUFF.83284.1
  misc_feature: Variant of the nucleotide sequence at SEQ ID NO 34972
caccggatgagaagttatgttgcaaatacagttttgactatgttgatcgcggcctctcaatacttaactagtgtagtactctgccgaaggctaatcccctctagtcacattgattgtgctcgacttcggacatggctcaaatacatattgggcccatcccctccggtctcatctctgacttgtcgaagcatatatcaagctcctacacttttggtccactgacctttcagtccgacggaaactttcaaatatctatatttgaagatctacatttcggcgaaaatagctgggagcgctggggacatcaacaagaccttacctccatcaaggttattaacaaggttctcgacaaagagtctcctggccttgttatattgaacggcgacttgatcaccggcgaaaatactttcttagagaatagcacgcactacatcgatcagattgttcagcctctcgttgatcgtggattaagctgggcgtctacgtatgggaatcacgacagcgacttcaacatatcaggccaaagcatccttcaacgtgagaggatatggcccaatagtcgtacaactaccatggtaactgatccagacgtcggcgtgtcgaattatttcctacccatctacaaacacggttgctcacaaccagactcttccacacctgagcttcttctctgattcttcgacagtagaggaggtttcaaagaacaggtgaaagatgctgagggcaataagattggtcgaccaaattgggtcgacgacagagtagctgaatggttcaaaagcacaaacagtaagatggtcgacaaatacaagaagatcatcccatctttaggcttcgttcacatcccaacgtatgcttcatatgctcttcaacaggctggtgtcgatccgaatgagcagcccggtatcaacgacgatttaccgcttgcccctcaggctcagggatggtgtccagatgggaaatcggacggatcctgcccatttggtcagctctttatggaagcaatctcccacaccccaggtatgatggcactcttctccggccacgatcatggagatacatggtgctataagtgggataagaagttaccgaacatgactgttacgccatcgaataatgtcacactctgcttcggtcaacattcgggatacgggggatatggccgttgggaaagaggctcgcggcagatcttagtatcggaaaagaagctcgcgaatagggagatcgacacttggattcgactggagtcaggtaacgtcgtagggagcgtgtcgctaaatggtacctatggccaggacaaatatcccaagacgaagaacacgaagacattttgcccgacatgcttgtcaaaatgacgaacacgggccttacaagatatgggggagaaaaaaaacaagcagggcttttctgctttgcacttcttatcatggtcgatagtgctcccttgcataggagcaaggcgcccgcaaatcgcggagccaatcaaactgacgttcgttggtacactcggataccacgcttataattagatagacaacaaaaaaagccggcaaaacgtagctggatgtacagtagcatcgactgatcaaaatggactagttggggaggcaggagtgacatttctgaccgcaaggcatgtttactcaacggcacgcattcctgttaaagcagttgctctctccttgcaactcacccggatgcgggtatgatccttaggctggaatgaagtcaggcatgtgcataatgtatatgaaaccgatcaaatgcagagactctaggtgtgcatctattaccaagtcacgattcaacttgactccagataactaacgtgccccaagtcaatgcttgggcaccgtcgccagctggagccctagcacttttcagttgccagaatggtcgtgcgcaaaatgcttcgtgcataaagttatgcgtagttcacagctctatctaatattacacagctatccagtctgcgattgttccatgaaggccatttcgaatacatataacagtaacaacgaatgcagcaccttatgcagtggtgagtgcacgcaatatcagccagctactatgcagtccgccgatccaactacatagaagcaagacgggcatggtgacggtgccgataaaagatggccgcaccccaggttggaatggaccaaagagctaacatgccaggcaccttggaattcttattcatgtccatgatcatttggacaaagaatatttgatctataagtagggaatttcccgcaaagacagcaagaagatagatatcgcctctgatacaattcctcatcttcttatatcaattcgcctctcctgttccaagtaatctaaaatcatcgacttgcggccatcagtttgacactcaaaacatgtcactcaaccggcatgaaaatcgcgcccgtcgtcaagagaaattcgacgcaatggtgaaacaaatggatgatgacgctgaccgaagacgcaaagaggcccgagatctccagagactcggccgagcaatgcagctcaaccagaatatgccgaatgaggatgatgagtctgacatttgcaataaccgtcaactgcttacggctctacttttggcctcattaccaggtgtgacttacgcattccctaaactaggctctaacgaagagtccgctctccatattggtctgccatacgggtttcaacttcacatcggaaaaaagggcaactcgaaggatgatttagcgtctctgtaccaaaagcttaattggaggtcctggtccggtttggaggcgcttggggtcgttggagattcctgctccgctactaatgatgacgatgatactccacgcttcgattttggatcaatttcaatgaccctttggcgtagaaaagacatcgaaaaaaatgagcaagaacgtaaacttggggagcaagagcttggacttgacaagtttggaggcgatctgtactgtgacggttgtaaaaaaccggtcagagtgtatggaattgatgagatgagagaattcgggaagcaaagtagtgcaaggtcctaactccaagcatcaaagttactatgtagcctgcttagcaagatgtatcagcaagggttttgcgagacaatctatgaaccaatctgatcaacatttttctcatcgtactgaactcggcagatcatctagaatgcatattataacaagg

SEQ ID NO: 34975 - DNA, 1023 bp, Muscodor strobelii
  misc_feature: SGI cDNA ID NO. 572097
  misc_feature: Elevated expression when VOC is produced
  misc_feature: Encodes the peptide sequence at SEQ ID NO 34976
atggctcaaatacatattgggcccatcccctccggtctcatctctgacttgtcgaagcatatatcaagctcctacacttttggtccactgacctttcagtccgacggaaactttcaaatatctatatttgaagatctacatttcggcgaaaatagctgggagcgctggggacatcaacaagaccttacctccatcaaggttattaacaaggttctcgacaaagagtctcctggccttgttatattgaacggcgacttgatcaccggcgaaaatactttcttagagaatagcacgcactacatcgatcagattgttcagcctctcgttgatcgtggattaagctgggcgtctactagaggaggtttcaaagaacaggtgaaagatgctgagggcaataagattggtcgaccaaattgggtcgacgacagagtagctgaatggttcaaaagcacaaacagtaagatggtcgacaaatacaagaagatcatcccatctttaggcttcgttcacatcccaacgtatgcttcatatgctcttcaacaggctggtgtcgatccgaatgagcagcccggtatcaacgacgatttaccgcttgcccctcaggctcagggatggtgtccagatgggaaatcggacggatcctgcccatttggtcagctctttatggaagcaatctcccacaccccaggtatgatggcactcttctccggccacgatcatggagatacatggtgctataagtgggataagaagttaccgaacatgactgttacgccatcgaataatgtcacactctgcttcggtcaacattcgggatacgggggatatggccgttgggaaagaggctcgcggcagatcttagtatcggaaaagaagctcgcgaatagggagatcgacacttggattcgactggagtcaggtaacgtcgtagggagcgtgtcgctaaatggtacctatggccaggacaaatatcccaagacgaagaacacgaagacattttgcccgacatgcttgtcaaaatga

SEQ ID NO: 34976 - protein, 340 aa, Muscodor strobelii
  misc_feature: SGI Peptide ID NO. 572097
  misc_feature (118)..(337): NCBI GI: 39977877 Blast Desc: MGG_06823 [Magnaporthe grisea 70-15] gi|145013621|gb|EDJ98262.1| MGG_06823 [Magnaporthe grisea 70-15]
  misc_feature (30)..(332): NCBI GI: 145254065 Blast Desc: An18g00410 [Aspergillus niger] gi|134084088|emb|CAK43117.1| protein product [Aspergillus niger]
  misc_feature (29)..(333): NCBI GI: 256729989 Blast Desc: NECHADRAFT_70641 [Nectria haematococca mpVI 77-13-4]
  misc_feature (30)..(332): NCBI GI: 238486454 Blast Desc: conserved [Aspergillus flavus NRRL3357] gi|220699344|gb|EED55683.1| conserved [Aspergillus flavus NRRL3357]
  misc_feature (86)..(338): NCBI GI: 261354589 Blast Desc: conserved [Verticillium albo-atrum VaMs.102]
  misc_feature (30)..(332): NCBI GI: 169771041 Blast Desc: [Aspergillus oryzae RIB40] gi|83767849|dbj|BAE57988.1| protein product [Aspergillus oryzae]
  misc_feature (30)..(332): NCBI GI: 212541032 Blast Desc: conserved [Penicillium marneffei ATCC 18224] gi|210067970|gb|EEA22062.1| conserved [Penicillium marneffei ATCC 18224]
  misc_feature (30)..(330): NCBI GI: 242799878 Blast Desc: conserved [Talaromyces stipitatus ATCC 10500] gi|218716816|gb|EED16237.1| conserved [Talaromyces stipitatus ATCC 10500]
  misc_feature (29)..(333): NCBI GI: 46115110 Blast Desc: FG03397.1 [Gibberella zeae PH-1]
  misc_feature (29)..(333): NCBI GI: 46115840 Blast Desc: FG03762.1 [Gibberella zeae PH-1]
  misc_feature: Useful for introducing or modulating the production of volatile compounds
MAQIHIGPIPSGLISDLSKHISSSYTFGPLTFQSDGNFQISIFEDLHFGENSWERWGHQQDLTSIKVINKVLDKESPGLVILNGDLITGENTFLENSTHYIDQIVQPLVDRGLSWASTRGGFKEQVKDAEGNKIGRPNWVDDRVAEWFKSTNSKMVDKYKKIIPSLGFVHIPTYASYALQQAGVDPNEQPGINDDLPLAPQAQGWCPDGKSDGSCPFGQLFMEAISHTPGMMALFSGHDHGDTWCYKWDKKLPNMTVTPSNNVTLCFGQHSGYGGYGRWERGSRQILVSEKKLANREIDTWIRLESGNVVGSVSLNGTYGQDKYPKTKNTKTFCPTCLSK

SEQ ID NO: 34977 - DNA, 3177 bp, Muscodor strobelii; identical to SEQ ID NO: 34974
  misc_feature: SGI EST ID NO. CUFF.83284.1
  misc_feature: Variant of the nucleotide sequence at SEQ ID NO 34975

SEQ ID NO: 34978 - DNA, 648 bp, Muscodor strobelii
  misc_feature: SGI cDNA ID NO. 572098
  misc_feature: Encodes the peptide sequence at SEQ ID NO 34979
atgagttgctttaagaaactcccagagatcggaactgccaaggaagaagtctgtcgtgtattcgaaaatgacgggcaggaacaattcctgaatctgcatactagagaaaaacgatgggacaccatttgtcaacgcctggcgccgttctttataacgactcaagacaagaaactcgggcgtgctcagctcagagcaggtgaagcattcgttttcatgcgccaaagtcaagcattcgaggagtttaaccaccactacattggcgattcgtggaatagcccactggcagactacaagcaaacgcttgctcttttggaagatcctgcagtcaccgaaacgcttggtcgtgactttattgaacttgatcataacagctacaatgcgggaattgtcaacttcttcgccgcacggtttctgagaaggattctcagtgacttcagagcttcacagtatccctttcccaggacagagcctactggttcttttgacatctctgattatgatgtgtactggatgttcttccatgctttgatgtatgaacagctccgtatcatgcatctcaacgagatcaaagataagggtcctcggcttcttcagtggaagattgcccgtgaatatgccagagcaggccgaaaagatagatcggagtga

SEQ ID NO: 34979 - protein, 215 aa, Muscodor strobelii
  misc_feature: SGI Peptide ID NO. 572098
MSCFKKLPEIGTAKEEVCRVFENDGQEQFLNLHTREKRWDTICQRLAPFFITTQDKKLGRAQLRAGEAFVFMRQSQAFEEFNHHYIGDSWNSPLADYKQTLALLEDPAVTETLGRDFIELDHNSYNAGIVNFFAARFLRRILSDFRASQYPFPRTEPTGSFDISDYDVYWMFFHALMYEQLRIMHLNEIKDKGPRLLQWKIAREYARAGRKDRSE

SEQ ID NO: 34980 - DNA, 549 bp, Muscodor strobelii
  misc_feature: SGI cDNA ID NO. 572099
  misc_feature: Encodes the peptide sequence at SEQ ID NO 34981
atgcgtatgattcctgtttgttacgtcttggcagcgtccgctgcagtcaatgctgccgcggtgtccgcctcaggaggacttgcattgccgccatggcaagtcattaagctctcgacatactctccctccgggcgcccaaattcaagtcctgactactatatttccgctgcaatcaagaatccggatccgaacaagggcgacgcggcttccgatgtagaggtcgactgcaaggcaacatggcaatatcccgatcttccatataacaagatttacaattgtgtcctttcagacgggacgacttcggcatggagctggacaatggagccaatggaagcaaatagcacgagtgcatcatccaccacgaattttgagctgcatttttcagcaacgtcgaacaccgcaacctctggggagagtacggcttggtctggaacacaaagctttgcggtcggggacaatatgcaaggtacatgcgccggcagtggattctgttcatgggctttgaaaccagagaaaacgcctgtgcttgttgatgtttatgttagatga

SEQ ID NO: 34981 - protein, 182 aa, Muscodor strobelii
  misc_feature: SGI Peptide ID NO. 572099
  misc_feature (29)..(177): NCBI GI: 169624830 Blast Desc: SNOG_15679 [Phaeosphaeria nodorum SN15] gi|111055934|gb|EAT77054.1| SNOG_15679 [Phaeosphaeria nodorum SN15]
  misc_feature (29)..(177): NCBI GI: 116203215 Blast Desc: [Chaetomium globosum CBS 148.51] gi|88178010|gb|EAQ85478.1| [Chaetomium globosum CBS 148.51]
  misc_feature (27)..(177): NCBI GI: 85096437 Blast Desc: NCU07095 [Neurospora crassa OR74A] gi|28921741|gb|EAA31020.1| [Neurospora crassa OR74A]
MRMIPVCYVLAASAAVNAAAVSASGGLALPPWQVIKLSTYSPSGRPNSSPDYYISAAIKNPDPNKGDAASDVEVDCKATWQYPDLPYNKIYNCVLSDGTTSAWSWTMEPMEANSTSASSTTNFELHFSATSNTATSGESTAWSGTQSFAVGDNMQGTCAGSGFCSWALKPEKTPVLVDVYVR

SEQ ID NO: 34982 - DNA, 960 bp, Muscodor strobelii
  misc_feature: SGI EST ID NO. CUFF.83262.0
  misc_feature: Variant of the nucleotide sequence at SEQ ID NO 34980
tacgtacctagtttaatacgagcatgacaagtcagtggttctccgcttgaagttacattgatcctgccatatcgtgattcacggaaaaacttggtataaaaaggtaagctgggctcgaacgactgacatgatggttgaaaacgcccagctttcagtagacaccacgcacgctgcttcaacagtcgtatagaagaatcacttacctcagttctcattctatctttaaacgccaatatgcgtatgattcctgtttgttacgtcttggcagcgtccgctgcagtcaatgctgccgcggtgtccgcctcaggaggacttgcattgccgccatggcaagtcattaagctctcgacatactctccctccgggcgcccaaattcaagtcctgactactatatttccgctgcaatcaagaatccggatccgaacaagggcgacgcggcttccgatgtagaggtcgactgcaaggcaacatggcaatatcccgatcttccatataacaagatttacaattgtgtcctttcagacgggacgacttcggcatggagctggacaatggagccaatggaagcaaatagcacgagtgcatcatccaccacgaattttgagctgcatttttcagcaacgtcgaacaccgcaacctctggggagagtacggcttggtctggaacacaaagctttgcggtcggggacaatatgcaaggtacatgcgccggcagtggattctgttcatgggctttgaaaccagagaaaacgcctgtgcttgttgatgtttatgttagatgaagccttgtagacagattcagacaaatccggattgggagcatattcgggaaattgagataccgacacgtccgatcaccggcagccaagtgattgagaagttgtctccagcggaagactcaaataacaagaattggtgcacaggaatgatcgctgaaccgcaatactactctaatttca

SEQ ID NO: 34983 - DNA, 705 bp, Muscodor strobelii
  misc_feature: SGI cDNA ID NO. 572100
  misc_feature: Encodes the peptide sequence at SEQ ID NO 34984
atgtatcgatcaccttccgcaacatcgaaccactcatcggtaagatccaaaggtggcaatcttctaggcaaagccccgaccttcgtttgccgtcacggtactggctcgcgcttgaacactgtcttagttcagctcaacctgccactgaagacgaagaaatgcttcgaatgtcaaacagatacccctgataatgttatcaaactcatcgatgctatgattgcagccccggacctcgacaagattgattccaatattgttcgtaatgccacgcaattactcttcgagcgagtcgcaggccaacgaaagaacaccatcacgggcttcaaggagcgatggggtcaagttttgctcctttttgctttattctgttatcgccgagttccgcggcaagatctgagcaaggtgtgccagaatgtgaagatccgatacggtgcgggtgttgaccgcgagcttctcagggcgttggtcgaggctgccgctcagcacaacgggatttgggatttcattgaacctgctaactctacgttgttgtctagtatcaatgcattcgtgtccatggtccgggacaaggtgggttccgtcgactctttcgcaactgtcgcagaaatgtttactattgtggagcagctcggacagctcagtgaccagactttctcggttctatctgtagttcagactaagcttgatagcattggaccgaactaa

SEQ ID NO: 34984 - protein, 234 aa, Muscodor strobelii
  misc_feature: SGI Peptide ID NO. 572100
MYRSPSATSNHSSVRSKGGNLLGKAPTFVCRHGTGSRLNTVLVQLNLPLKTKKCFECQTDTPDNVIKLIDAMIAAPDLDKIDSNIVRNATQLLFERVAGQRKNTITGFKERWGQVLLLFALFCYRRVPRQDLSKVCQNVKIRYGAGVDRELLRALVEAAAQHNGIWDFIEPANSTLLSSINAFVSMVRDKVGSVDSFATVAEMFTIVEQLGQLSDQTFSVLSVVQTKLDSIGPN

SEQ ID NO: 34985 - DNA, 368 bp, Muscodor strobelii
  misc_feature: SGI EST ID NO. CUFF.83265.0
  misc_feature: Variant of the nucleotide sequence at SEQ ID NO 34983
cgacaagattgattccaatattgttcgtaatgccacgcaattactcttcgagcgagtcgcaggccaacgaaagaacaccatcacgggcttcaaggagcgatggggtcaagttttgctcctttttgctttattctgttatcgccgagttccgcggcaagatctgagcaaggtgtgccagaatgtgaagatccgatacggtgcgggtgttgaccgcgagcttctcagggcgttggtcgaggctgccgctcagcacaacgggatttgggatttcattgaacctgctaactctacgttgttgtctagtatcaatgcattcgtgtccatggtccgggacaaggtgggttccgtcgactctttcgcaactgtcg

SEQ ID NO: 34986 - DNA, 2727 bp, Muscodor strobelii
  misc_feature: SGI cDNA ID NO. 572101
  misc_feature: Encodes the peptide sequence at SEQ ID NO 34987
atggaggacgtttacttcattcttgttgctccttgcggatcaagctatgacgatgatttggggaacggcagtctttttttaggacgccaaatgctcgactcgagagagaagctagatttgttgaaaggctggacgaatgcatgcctccgatctcatggcaacagctgcaaacagagatacaatactgtcattgagttgatgaatcttgctacggctacatacttcggcgtgattgatgtccaagacatgaatatcaaacagcttcctgtggtcgatcaaatcccaagtcgttatgtggcattgagttacgtctggggcaagcagtcggcccacggatttcccaactacgtaacaacaagatccaacatcatggaacgcatcaaaccgggtgctctgagatcttgctggaatgagcttcccaagactattcaagacgcaatgcttttgacagaggccatgggcgagcgctatatctggattgattgcctttgtattgtgcaggacagcaggatatcgtggagattaaacgcaaaagccatgcatctggtgtatggcaatgcacatttcacgatctgtgctgctgatggggattgtgcaactgggttagaggcgatcaggtcaatattacgcccggacaaagtcgattcagctcctattaatggcagacctacctcaccattatgtgttagctctccatatgaagctgatttctcgctccaagctgaatgtttgcctggaatcaaacttctcgcgtcacgtccgccagaagtagctgttcagcattcttcttggaaccagcgggcatggacttttcaggaacgacttctttcgccaatttgtctaatttttgtagaaggccagatgtattttcaatgccgctcaaccaccgaatctgaggatactatcactaatccccactcccatcattggtctttaaatcataccaactcgaaccttcgaactttaggacaccttcaatatcgcgcattctggttctatatgaactgcgtccgtttctatactggccgtgacttgacaaaaccaagcgacatcctcgatgctttccagggaacctcctggttattgaaaaagcatctcaaagcaccccttttccaaggactaccaacctcgcattttgatctggcattattatgggccccgcttcaagatgtccaacgtcgaaagtcaacccgtcgcaatgatttcgactcacgagcatatgtacaagacaaaattggcagctctagacacgagctccaagacgatcaccaaggcaaggagtttccgagttggtcgtggaccggctgggttgaaggcaagctagcgtatcataatgagatgattgatggctgccttctgaacgtacaggaatggcttcgctctcatacttggattctttggtacgttcgtgactctgaaggtaatctattacctctctgggacaaaactatgaggacggaggatccaagcgaggagagtcgctggaagggctacaaaggtagagtttcccgggtccaatcaccgaagcagaatggagtttcattcgccccgagaactgagttgataagcccggctgcagacgcccctaacagcagaggaagacaccaatcaaactatcggggctctcgcggtgttcttcaacgacaggaacaaggggctagaaagcacgagagaaaaggaagacaacaagcacgcactcaagaagacgagagacactcgagggcaagtactccgggatggtcgataaagagcaactctgaatatgttcagcggcccccatcgtttagagctcctgatcccactgaccagtatccttcaacaatgacttacccctccaatgggacgcaagtcggtgacgaagagacaagagaattcaatggacgtatgcgcaggcgcttgacgcgaaacatttcgtctcccaatgaaaacgaactagataagacttcacaacgtggttcccacagctcagatagtgaaagtagtgactggggaagcgatgacttcgtcgattctgacgaagacgacgatgggaagcttgatgatgataatgacggccaaaataatgttatgaaatcgaacgcacctaagatatcaaaatcggggagacacaataagagcaacaagggtcagggagactcgatcgtggaggaagattgttatggccgccgtaagagatataaccacccaggatcggcaacgcacttcaatggaataattccggaccatccgttcggtgtagcgcgcggaccttactgcattgaagagaaacacctcgtcaaagccctgccgattcttcagttctggacatggcacgccgcctttttcgtccatcctcgcctcgaaggtctagataatgaaagaggcgcatcttcggccggcgaagtaggtgaaggtctttgtccgtgcgatatcattgacaaagttggagactggtgcggctttatcacggtctccagaagttggataaaacagtacgaccgtcaggccacgctacataatttcatagccatcagtgacgccaggagcttctcagaccgagagtgtccagtatggaactactatatcccaagggaaaaagacgagagcgaatgggacctttactacgtcctactactggagcgcaacgttgagagagcggtctgggaaagagttgcgcttggaaaggtctttcaagtggcgttcaaaccgttcagaccagaatgctggattgaggtgaagttaggctga

SEQ ID NO: 34987 - protein, 908 aa, Muscodor strobelii
  misc_feature: SGI Peptide ID NO. 572101
  misc_feature (98)..(273): Pfam Id: PF06985 Pfam Desc: Heterokaryon incompatibility protein (HET)
  misc_feature (3)..(500): NCBI GI: 242821785 Blast Desc: TSTA_001680 [Talaromyces stipitatus ATCC 10500] gi|218712672|gb|EED12097.1| TSTA_001680 [Talaromyces stipitatus ATCC 10500]
  misc_feature (3)..(499): NCBI GI: 256727839 Blast Desc: NECHADRAFT_83370 [Nectria haematococca mpVI 77-13-4]
  misc_feature (18)..(480): NCBI GI: 156031301 Blast Desc: SS1G_14072 [Sclerotinia sclerotiorum 1980] gi|154699474|gb|EDN99212.1| SS1G_14072 [Sclerotinia sclerotiorum 1980]
  misc_feature (40)..(498): NCBI GI: 256720870 Blast Desc: NECHADRAFT_85603 [Nectria haematococca mpVI 77-13-4]
  misc_feature (718)..(908): NCBI GI: 115443106 Blast Desc: [Aspergillus terreus NIH2624] gi|114188229|gb|EAU29929.1| [Aspergillus terreus NIH2624]
  misc_feature (30)..(443): NCBI GI: 115402181 Blast Desc: [Aspergillus terreus NIH2624] gi|114189013|gb|EAU30713.1| [Aspergillus terreus NIH2624]
  misc_feature (41)..(501): NCBI GI: 256720404 Blast Desc: NECHADRAFT_89098 [Nectria haematococca mpVI 77-13-4]
  misc_feature (35)..(471): NCBI GI: 39946810 Blast Desc: MGG_08495 [Magnaporthe grisea 70-15] gi|145012335|gb|EDJ96991.1| MGG_08495 [Magnaporthe grisea 70-15]
  misc_feature (44)..(508): NCBI GI: 256724998 Blast Desc: NECHADRAFT_77046 [Nectria haematococca mpVI 77-13-4]
  misc_feature (81)..(437): NCBI GI: 169600389 Blast Desc: SNOG_03028 [Phaeosphaeria nodorum SN15] gi|111068639|gb|EAT89759.1| SNOG_03028 [Phaeosphaeria nodorum SN15]
MEDVYFILVAPCGSSYDDDLGNGSLFLGRQMLDSREKLDLLKGWTNACLRSHGNSCKQRYNTVIELMNLATATYFGVIDVQDMNIKQLPVVDQIPSRYVALSYVWGKQSAHGFPNYVTTRSNIMERIKPGALRSCWNELPKTIQDAMLLTEAMGERYIWIDCLCIVQDSRISWRLNAKAMHLVYGNAHFTICAADGDCATGLEAIRSILRPDKVDSAPINGRPTSPLCVSSPYEADFSLQAECLPGIKLLASRPPEVAVQHSSWNQRAWTFQERLLSPICLIFVEGQMYFQCRSTTESEDTITNPHSHHWSLNHTNSNLRTLGHLQYRAFWFYMNCVRFYTGRDLTKPSDILDAFQGTSWLLKKHLKAPLFQGLPTSHFDLALLWAPLQDVQRRKSTRRNDFDSRAYVQDKIGSSRHELQDDHQGKEFPSWSWTGWVEGKLAYHNEMIDGCLLNVQEWLRSHTWILWYVRDSEGNLLPLWDKTMRTEDPSEESRWKGYKGRVSRVQSPKQNGVSFAPRTELISPAADAPNSRGRHQSNYRGSRGVLQRQEQGARKHERKGRQQARTQEDERHSRASTPGWSIKSNSEYVQRPPSFRAPDPTDQYPSTMTYPSNGTQVGDEETREFNGRMRRRLTRNISSPNENELDKTSQRGSHSSDSESSDWGSDDFVDSDEDDDGKLDDDNDGQNNVMKSNAPKISKSGRHNKSNKGQGDSIVEEDCYGRRKRYNHPGSATHFNGIIPDHPFGVARGPYCIEEKHLVKALPILQFWTWHAAFFVHPRLEGLDNERGASSAGEVGEGLCPCDIIDKVGDWCGFITVSRSWIKQYDRQATLHNFIAISDARSFSDRECPVWNYYIPREKDESEWDLYYVLLLERNVERAVWERVALGKVFQVAFKPFRPECWIEVKLG

SEQ ID NO: 34988 - DNA, 886 bp, Muscodor strobelii
  misc_feature: SGI EST ID NO. CUFF.83274.0
  misc_feature: Variant of the nucleotide sequence at SEQ ID NO 34986
gtcggaaacacgccgtaacgccagagacagtactctctatcacgtgggaaatggatggaagacaagtcagccacgacacgcacaatcaccaaactagacgaattcatttatcttggcgcgacacagacaatcaaatggaggacgtttacttcattcttgttgctccttgcggatcaagctatgacgatgatttggggaacggcagtctttttttaggacgccaaatgctcgactcgagagagaagctagatttgttgaaaggctggacgaatgcatgcctccgatctcatggcaacagctgcaaacagagatacaatactgtcattgagttgatgaatcttgctacggctacatacttcggcgtgattgatgtccaagacatgaatatcaaacagcttcctgtggtcgatcaaatcccaagtcgttatgtggcattgagttacgtctggggcaagcagtcggcccacggatttcccaactacgtaacaacaagatccaacatcatggaacgcatcaaaccgggtgctctgagatcttgctggaatgagcttcccaagactattcaagacgcaatgcttttgacagaggccatgggcgagcgctatatctggattgattgcctttgtattgtgcaggacagcaggatatcgtggagattaaacgcaaaagccatgcatctggtgtatggcaatgcacatttcacgatctgtgctgctgatggggattgtgcaactgggttagaggcgatcaggtcaatattacgcccggacaaagtcgattcagctcctattaatggcagacctacctcaccattatgtgttagctctccatatgaagctgatttctcgctccaagctgaatgtttgcctggaatcaaacttctcgc

SEQ ID NO: 34989 - DNA, 1554 bp, Muscodor strobelii
  misc_feature: SGI cDNA ID NO. 572102
  misc_feature: Elevated expression when VOC is produced
  misc_feature: Encodes the peptide sequence at SEQ ID NO 34990
atggagtctttcctatcgaatacaagtcaaagaattacgcagcattttgcagcaacaatactcttagccagcgcagtgtctctgctgctctggctggtaggaaacgaattcgtccgatcccgggcgagaattccaggattaaaaggcccaagaggttggccagtaataggcaactacctcgacatcagaagcaatgcggccattcagtatgaggcttgggggaagaagtacggcgatgtataccaggtgcagcttggaaatagcacggtggtcattgtaaacacgccaacggctgccaagacactgttcatgggaaactcgcaagctctaagctcacgaccggtcatgtatacctttcacaaggtggcatccactacagctggactgacgataggggcctctccgtatgacgatactctaaagcgaaagaaaaaggggatagcgtctgcactcaaccgccctgcagtgcaaacatatgtgccttattttgacttggaatcgaagacttttattaaggacttaatggactatggacaagcaggagcggttgccatcgacccgatacatatgattcagagactaagtctatctttggtcatgacaatcaattggggagttcgaattccttcagcagaggacgaattgttcaaagagatcgttgctgtcgaagaagagttaaacaggacaaggtcaactgttggaaacccccaagatcacatccctctacttcggcttaatcctttcaatcccacatctactaaagcgcgagtaatgcgggaacggcgtgatcggtatcttgcgaagctaaacaccgaccttgcagaaaaaatggccaacggaacaaacaaaccgtgcatacaagccagcgtcatcaagttcaaagaggtagagcttagtgatacggagttgactgccatcagcctgtcagtcttaggcggcggctttgagacagtctcaaacacaatgcagtggtccatcgcttatttatcacaacacccagagttgcagaataaagcatacgaggaaatttgcaaatttcaagggtcggatgagcctctgtgcgatgctgctgatgatcagaagtgcgagtacatcttgggtctcgccaaagagtctctacgatacttcagtgtcatccctctggccctaccaagagcatctatcaaggatatcgactacgaaggtgtgagaattccaagtggtagtacggtttatatgaacgcttgggcttgcaatcatgacgccgaaatgtttccagatccctaccgatttgagccagagagatgggctgaacgacctgatgcgccgattttcgggtttgggctgggatatcgcatgtgcgcaggacaccttcttgcaatgcgagaactctatctcattttcatgcgtctcctttccagcttcagtatagaagcagcaggaaagatcgcttgcgacccaagcaaggacatggttgtaccaacggacctcatcatggcaccaaagtcatataaggttgtgtttaggccccgaaaccctcagaaactgacaggcgctttagccagagaggaataa

SEQ ID NO: 34990 - protein, 517 aa, Muscodor strobelii
  misc_feature: SGI Peptide ID NO. 572102
  misc_feature (47)..(501): Pfam Id: PF00067 Pfam Desc: Cytochrome P450
  misc_feature (47)..(343): Pfam Id: PF00067 Pfam Desc: Cytochrome P450
  misc_feature (370)..(501): Pfam Id: PF00067 Pfam Desc: Cytochrome P450
  misc_feature (8)..(513): NCBI GI: 258568538 Blast Desc: conserved [Uncinocarpus reesii 1704] gi|237906459|gb|EEP80860.1| conserved [Uncinocarpus reesii 1704]
  misc_feature (1)..(513): NCBI GI: 119184909 Blast Desc: CIMG_07204 [Coccidioides immitis RS]
  misc_feature (5)..(514): NCBI GI: 115402017 Blast Desc: conserved [Aspergillus terreus NIH2624] gi|114188931|gb|EAU30631.1| conserved [Aspergillus terreus NIH2624]
  misc_feature (1)..(513): NCBI GI: 240110025 Blast Desc: Cytochrome P450 family protein [Coccidioides posadasii C735 delta SOWgp]
  misc_feature (23)..(515): NCBI GI: 255939564 Blast Desc: Pc16g01770 [Penicillium chrysogenum Wisconsin 54-1255] gi|211585174|emb|CAP92847.1| Pc16g01770 [Penicillium chrysogenum Wisconsin 54-1255]
  misc_feature (19)..(514): NCBI GI: 169768154 Blast Desc: [Aspergillus oryzae RIB40] gi|83766403|dbj|BAE56546.1| protein product [Aspergillus oryzae]
  misc_feature (29)..(514): NCBI GI: 78097996 Blast Desc: 3-hydroxyphenylacetate 6 hydroxylase [Emericella nidulans]
  misc_feature (1)..(514): NCBI GI: 46124139 Blast Desc: FG06447.1 [Gibberella zeae PH-1]
  misc_feature (1)..(516): NCBI GI: 256724216 Blast Desc: [Nectria haematococca mpVI 77-13-4]
  misc_feature (5)..(514): NCBI GI: 119496229 Blast Desc: cytochrome P450 phenylacetate hydroxylase, [Neosartorya fischeri NRRL 181] gi|119413050|gb|EAW22991.1| cytochrome P450 phenylacetate hydroxylase, [Neosartorya fischeri
  misc_feature (41)..(472): SWISSPROT Homolog: EC 1.14.14.1 Unspecific monooxygenase
  misc_feature: Useful for introducing or modulating the production of volatile compounds
MESFLSNTSQRITQHFAATILLASAVSLLLWLVGNEFVRSRARIPGLKGPRGWPVIGNYLDIRSNAAIQYEAWGKKYGDVYQVQLGNSTVVIVNTPTAAKTLFMGNSQALSSRPVMYTFHKVASTTAGLTIGASPYDDTLKRKKKGIASALNRPAVQTYVPYFDLESKTFIKDLMDYGQAGAVAIDPIHMIQRLSLSLVMTINWGVRIPSAEDELFKEIVAVEEELNRTRSTVGNPQDHIPLLRLNPFNPTSTKARVMRERRDRYLAKLNTDLAEKMANGTNKPCIQASVIKFKEVELSDTELTAISLSVLGGGFETVSNTMQWSIAYLSQHPELQNKAYEEICKFQGSDEPLCDAADDQKCEYILGLAKESLRYFSVIPLALPRASIKDIDYEGVRIPSGSTVYMNAWACNHDAEMFPDPYRFEPERWAERPDAPIFGFGLGYRMCAGHLLAMRELYLIFMRLLSSFSIEAAGKIACDPSKDMVVPTDLIMAPKSYKVVFRPRNPQKLTGALAREE

SEQ ID NO: 34991 - DNA, 2004 bp, Muscodor strobelii
  misc_feature: SGI EST ID NO. CUFF.83299.1
  misc_feature: Variant of the nucleotide sequence at SEQ ID NO 34989
gtagaccccattgaaaatgacagcatctacggccactcgcagtagcgcctcacataccgttagtcttttatcacaatgaaaagtggcgctctatgtcagtgagacgagctatgctcactgccgagcgccgaatcgcgaagaacacgtttggggccatgacctcacagtctactaaacattccatctctcctgcacaaatcagcaggccacgaatacaatggagtctttcctatcgaatacaagtcaaagaattacgcagcattttgcagcaacaatactcttagccagcgcagtgtctctgctgctctggctggtaggaaacgaattcgtccgatcccgggcgagaattccaggattaaaaggcccaagaggttggccagtaataggcaactacctcgacatcagaagcaatgcggccattcagtatgaggcttgggggaagaagtacggcgatgtataccaggtgcagcttggaaatagcacggtggtcattgtaaacacgccaacggctgccaagacactgttcatgggaaactcgcaagctctaagctcacgaccggtcatgtatacctttcacaaggtggcatccactacagctggactgacgataggggcctctccgtatgacgatactctaaagcgaaagaaaaaggggatagcgtctgcactcaaccgccctgcagtgcaaacatatgtgccttattttgacttggaatcgaagacttttattaaggacttaatggactatggacaagcaggagcggttgccatcgacccgatacatatgattcagagactaagtctatctttggtcatgacaatcaattggggagttcgaattccttcagcagaggacgaattgttcaaagagatcgttgctgtcgaagaagagttaaacaggacaaggtcaactgttggaaacccccaagatcacatccctctacttcggcttaatcctttcaatcccacatctactaaagcgcgagtaatgcgggaacggcgtgatcggtatcttgcgaagctaaacaccgaccttgcagaaaaaatggccaacggaacaaacaaaccgtgcatacaagccagcgtcatcaagttcaaagaggtagagcttagtgatacggagttgactgccatcagcctgtcagtcttaggcggcggctttgagacagtctcaaacacaatgcagtggtccatcgcttatttatcacaacacccagagttgcagaataaagcatacgaggaaatttgcaaatttcaagggtcggatgagcctctgtgcgatgctgctgatgatcagaagtgcgagtacatcttgggtctcgccaaagagtctctacgatacttcagtgtcatccctctggccctaccaagagcatctatcaaggatatcgactacgaaggtgtgagaattccaagtggtagtacggtttatatgaacgcttgggcttgcaatcatgacgccgaaatgtttccagatccctaccgatttgagccagagagatgggctgaacgacctgatgcgccgattttcgggtttgggctgggatatcgcatgtgcgcaggacaccttcttgcaatgcgagaactctatctcattttcatgcgtctcctttccagcttcagtatagaagcagcaggaaagatcgcttgcgacccaagcaaggacatggttgtaccaacggacctcatcatggcaccaaagtcatataaggttgtgtttaggccccgaaaccctcagaaactgacaggcgctttagccagagaggaataaagcaagtctgggtttggtacaaaggtgactcaaaatgtacaaagaacttcaagacgatctgtctggactgatcgggtttccccgtgagatccgatcgatcaattcagagatatgatgcatcgtgtgaaaaaatgaggaaaatagcgatggagccaccacagctctaaaccgagtgcaaggaaataaaagcatgaacgtaaatatatataagtaccttacctatgtaaacttcg

SEQ ID NO: 34992 - DNA, 1971 bp, Muscodor strobelii
  misc_feature: SGI cDNA ID NO. 572103
  misc_feature: Reduced expression when VOC is produced
  misc_feature: Encodes the peptide sequence at SEQ ID NO 34993
atgttcgcactctacacacttatggggctggtgactctgtatacccagccagcccaaagcgatgagctgataacagactacgaaggctacaatgccgccgactacggcgtcttcccacgcctaaaattcaaatctatcgacctagacgctcccatgctacaagtaagcacctggaacaaagaactcatgtcaaaatccggttcccatatcttcatccgccacgacgggaaccacaacacagtcgaagacgctgcgcccctcatacttagcgcccaggatctcagcgtagtgtacatcaaccggactttcgatgccgtcttcgacgtccgagttcaacaaaacgggaatcagtcatacctaacattttacggtggtcctatgacggaagttggattgggaaatggatacgcccatgcttatgatgaccagtataacgaagtttatacgatcgcgccgcaacatcttagcgtgaagggggacttacacgagtgtcagttcaccgggaaagggacggcgttggtcactgcttatgaagcgcgaacttatgatctgtcgaggtatggcggttggaggactgcgcagattgtggactctgtgttccaggagattgacttggagacgaatgaggtattgttcgagtggagggcaagcaaacatatcgatatggcgggttcgttccaaggtgtggggatgaagtgggactttttccatctgaatagtattgagaagacaaaagaaggaaactacctcctctcagcgcggcacatgcacgcaatctacctcatctccggaaaagacggacacgtactctggaccctaggcgggaaacacaacgacttcatcgaactccccccttacaactcaaacagcacacatatatctgccaccccaaacccagtcctatcaatgtcctggcaacaccacgcacgtttctaccgcggaaacgaaaacgaaataacactcttcgacaaccacgtactagactacaacggcgtagactgcttacaaaactgctcacgaggcatccacttctccataaacaccacatccgtgcctcccacggttcgcctactaaaagagtatctccaccccaacggcatgctctcgcaatcccaaggcagcgttcaagtcctagataacaagaacatattcataggatggggtcgcaacccgtctttcaccgagcacacgccggatggcgagacggtgcttagtgtgcagttctcaccctggagaagtccaaggacggcaggcgagggattggataattacagggcgtttagaatggattggaaggctacgccgtactggccaccggatatacatgtccataggatgggaggcaatggtagtgatgttgcgtatttgagttggaatggtgctacggaggtgaggtcttgggttttgtttgcgagtgactcaccctgggacctcgatggagcggagaaagtcgtcgcaagattgcctcgtgctggctttgagacgacgattccggtggggtcggggaattacacgcactaccgtgccgcggcgctcgatattaacgagtcaattattggatcgacgcgcatcgtggatatgatcacgggaaatttgacagaagctaattacacgatcacggacttcggtgtactggtgacgagcgatcaggcagatgtgtatgccgcaggtgtatcatacgctctgggttggggcatgttgctcggcgctgttttattcagcgcctttgcacttggttgtgtacatggggctcgcacggcatggtgggagacgcatgcgcaaatgatgaggcatcagggtttcaagcttcgtgagcatggccatagattctggacgaagggcgagtcttggcgaaggggtcagctttggacgagagtccggagtgaggacccgggtgccgacctagaggacggtgaagtggatgatgacgatgagccgttggatctgaaactccttaagcaggaggagtga

SEQ ID NO: 34993 - protein, 656 aa, Muscodor strobelii
  misc_feature: SGI Peptide ID NO. 572103
  misc_feature (7)..(538): NCBI GI: 145237878 Blast Desc: An07g05030 [Aspergillus niger] gi|134076063|emb|CAK39422.1| protein product [Aspergillus niger]
  misc_feature (19)..(539): NCBI GI: 67538590 Blast Desc: AN5465.2 [Aspergillus nidulans FGSC A4] gi|40743435|gb|EAA62625.1| AN5465.2 [Aspergillus nidulans FGSC A4] gi|259485087|tpe|CBF81860.1| TPA: conserved [Aspergillus FGSC
  misc_feature (23)..(527): NCBI GI: 154297697 Blast Desc: BC1G_12260 [Botryotinia fuckeliana B05.10] gi|150858389|gb|EDN33581.1| BC1G_12260 [Botryotinia fuckeliana B05.10]
  misc_feature (2)..(522): NCBI GI: 119499051 Blast Desc: NFIA_039620 [Neosartorya fischeri NRRL 181] gi|119414447|gb|EAW24386.1| conserved [Neosartorya fischeri NRRL 181]
  misc_feature (30)..(522): NCBI GI: 159125981 Blast Desc: conserved [Aspergillus fumigatus A1163]
  misc_feature (30)..(522): NCBI GI: 70985180 Blast Desc: conserved [Aspergillus fumigatus Af293] gi|66845724|gb|EAL86058.1| conserved [Aspergillus fumigatus Af293]
  misc_feature (30)..(525): NCBI GI: 238502863 Blast Desc: conserved [Aspergillus flavus NRRL3357] gi|220691475|gb|EED47823.1| conserved [Aspergillus flavus NRRL3357]
  misc_feature (30)..(525): NCBI GI: 169776173 Blast Desc: [Aspergillus oryzae RIB40] gi|83771288|dbj|BAE61420.1| protein product [Aspergillus oryzae]
  misc_feature (23)..(532): NCBI GI: 256728970 Blast Desc: NECHADRAFT_93399 [Nectria haematococca mpVI 77-13-4]
  misc_feature (1)..(532): NCBI GI: 46138467 Blast Desc: FG10748.1 [Gibberella zeae PH-1]
  misc_feature: Useful for introducing or modulating the production of volatile compounds
MFALYTLMGLVTLYTQPAQSDELITDYEGYNAADYGVFPRLKFKSIDLDAPMLQVSTWNKELMSKSGSHIFIRHDGNHNTVEDAAPLILSAQDLSVVYINRTFDAVFDVRVQQNGNQSYLTFYGGPMTEVGLGNGYAHAYDDQYNEVYTIAPQHLSVKGDLHECQFTGKGTALVTAYEARTYDLSRYGGWRTAQIVDSVFQEIDLETNEVLFEWRASKHIDMAGSFQGVGMKWDFFHLNSIEKTKEGNYLLSARHMHAIYLISGKDGHVLWTLGGKHNDFIELPPYNSNSTHISATPNPVLSMSWQHHARFYRGNENEITLFDNHVLDYNGVDCLQNCSRGIHFSINTTSVPPTVRLLKEYLHPNGMLSQSQGSVQVLDNKNIFIGWGRNPSFTEHTPDGETVLSVQFSPWRSPRTAGEGLDNYRAFRMDWKATPYWPPDIHVHRMGGNGSDVAYLSWNGATEVRSWVLFASDSPWDLDGAEKVVARLPRAGFETTIPVGSGNYTHYRAAALDINESIIGSTRIVDMITGNLTEANYTITDFGVLVTSDQADVYAAGVSYALGWGMLLGAVLFSAFALGCVHGARTAWWETHAQMMRHQGFKLREHGHRFWTKGESWRRGQLWTRVRSEDPGADLEDGEVDDDDEPLDLKLLKQEE

SEQ ID NO: 34994 - DNA, 3589 bp, Muscodor strobelii
  misc_feature: SGI EST ID NO. CUFF.83520.0
  misc_feature: Variant of the nucleotide sequence at SEQ ID NO 34992
acggaagttggattgggaaatggatacgcccatgcttatgatgaccagtataacgaagtttatacgatcgcgccgcaacatcttagcgtgaagggggacttacacgagtgtcagttcaccgggaaagggacggcgttggtcactgcttatgaagcgcgaacttatgatctgtcgaggtatggcggttggaggactgcgcagattgtggactctgtgttccaggagattgacttggagacgaatgaggtattgttcgagtggagggcaagcaaacatatcgatatggcgggttcgttccaaggtgtggggatgaagtgggactttttccatctgaatagtattgagaagacaaaagaaggaaactacctcctctcagcgcggcacatgcacgcaatctacctcatctccggaaaagacggacacgtactctggaccctaggcgggaaacacaacgacttcatcgaactccccccttacaactcaaacagcacacatatatctgccaccccaaacccagtcctatcaatgtcctggcaacaccacgcacgtttctaccgcggaaacgaaaacgaaataacactcttcgacaaccacgtactagactacaacggcgtagactgcttacaaaactgctcacgaggcatccacttctccataaacaccacatccgtgcctcccacggttcgcctactaaaagagtatctccaccccaacggcatgctctcgcaatcccaaggcagcgttcaagtcctagataacaagaacatattcataggatggggtcgcaacccgtctttcaccgagcacacgccggatggcgagacggtgcttagtgtgcagttctcaccctggagaagtccaaggacggcaggcgagggattggataattacagggcgtttagaatggattggaaggctacgccgtactggccaccggatatacatgtccataggatgggaggcaatggtagtgatgttgcgtatttgagttggaatggtgctacggaggtgaggtcttgggttttgtttgcgagtgactcaccctgggacctcgatggagcggagaaagtcgtcgcaagattgcctcgtgctggctttgagacgacgattccggtggggtcggggaattacacgcactaccgtgccgcggcgctcgatattaacgagtcaattattggatcgacgcgcatcgtggatatgatcacgggaaatttgacagaagctaattacacgatcacggacttcggtgtactggtgacgagcgatcaggcagatgtgtatgccgcaggtgtatcatacgctctgggttggggcatgttgctcggcgctgttttattcagcgcctttgcacttggttgtgtacatggggctcgcacggcatggtgggagacgcatgcgcaaatgatgaggcatcagggtttcaagcttcgtgagcatggccatagattctggacgaagggcgagtcttggcgaaggggtcagctttggacgagagtccggagtgaggacccgggtgccgacctagaggacggtgaagtggatgatgacgatgagccgttggatctgaaactccttaagcaggaggagtgatcgagagatacccgatttggctttggtgctatttagactgtgtatatattttggtatcgtgtaaatatcctgctgttcaatgtctatgatccggtctgttagtgcctggatcattcttacttagatccgtctaattacgccgttactattgtcaacgtccagacatgatttcacagcaagaatactaattgaataggtagagatataagtggagaagatgattgctccgaaagcaagtcgatggattaagatgagtaattttcttttccctgaggagaccagtgcgtttgttgatatcgtcacactgctgttgaataactccatgccgcccataaaagtaatgcaccactttgcccagtatgctgagatatccatccattgccctgatgaaggatgcacatatgccgcatttatccagcctaccaatgagccgatgttgagatcccaaatgctctaaatccgtgtaacgcctacgcctgccatgcatgctaaatttttgaatcgctgactctagatttttgaagcttctttcctttcccacttttcgtagattaggctacctgttcacgccaacaagactcaaaaactcatttctggtcttctctttacgctcaaagcagccaagaacacaagaagtgatggtggtagccgtagtcttctgaacgcctcgcatgaccatgcaaagatgggcagactccattactaccgcgacaccctgaggttgaagcacctccatgattgcatttgcgacttctcgtgttaatcgctcttgtacctgcagtctgcgagcgaacatctcggcaatgcgcggcaacttggaaatgccgatgacattgttcttgggaatgtagccgatatgcatctgagtcgagttagtttggcaatcaggccgaggatcagatacggcatcgggctcacctttccggtaaagggcaccatgtggtgttcgcacatgctgaagatctcaatatccttaacaatgaccatctcattgtggccttcgtggaatatggcgttgttgacaatgtccttgacgttttgctggtagcctttggtgaagtatagcatggctttggcatatcggctgggagtgtcgagtacaccctctcggtcgggatcttctccaacgcattcgagcagagttcgcactgctcctcgcattttctccagacgtgcggccgcttgctcggtgctctcctcaagccgttctcgggtgcctagacctaaaccaacagtgtaagtacacatgtgtgtaggtcggggattgtaacaaaatcaggagcttcttactaggtcggcttagaccatcgaagtcaatgacgggactgggggatctggtttctgttccttccgacttggtgctctcggcctttgcggccctcgcggccttcctcctgcgtttcctctcgggcttgtctctgggatctcttgcagccaagctcaggctgttgcgacgcttggaggacgtctggtcggcatcgaactcggagatgccgccatccttggcgcgtcttctcttcttcttcttgtctgctttcttctcgtctctcgaattaagggtgacagacctgtgggtgccattgacggagtcgtcggcgtcggacagccccgtagttgagccgctggagcttcccatggcggagtctcggttgtagtaatctgtttgggcgaaggtgaccatactggcagttcgtgttaaaggaggtaattaatgggtataagggggactagcagtcatgggtgtgcctacaagtgaaaatgagtatagttattgacaggtatgcaaactggtgcgagtcaatgagggtggaaacaggagatatatctaggatttccgtccccgccggctatcaggactgaggttgactttgaagagtcaccggcaagccgcaagtaaaggccaattggcgtatgaaagagttcaggtcaacactcatggtccctccgggcgaagtgattgggagcaatggagtaagcaggtaaaataaagccagccgtt

SEQ ID NO: 34995 - DNA, 1002 bp, Muscodor strobelii
  misc_feature: SGI cDNA ID NO. 572104
  misc_feature: Encodes the peptide sequence at SEQ ID NO 34996
atggtcaccttcgcccaaacagattactacaaccgagactccgccatgggaagctccagcggctcaactacggggctgtccgacgccgacgactccgtcaatggcacccacaggtctgtcacccttaattcgagagacgagaagaaagcagacaagaagaagaagagaagacgcgccaaggatggcggcatctccgagttcgatgccgaccagacgtcctccaagcgtcgcaacagcctgagcttggctgcaagagatcccagagacaagcccgagaggaaacgcaggaggaaggccgcgagggccgcaaaggccgagagcaccaagtcggaaggaacagaaaccagatcccccagtcccgtcattgacttcgatggtctaagccgacctagtctaggcacccgagaacggcttgaggagagcaccgagcaagcggccgcacgtctggagaaaatgcgaggagcagtgcgaactctgctcgaatgcgttggagaagatcccgaccgagagggtgtactcgacactcccagccgatatgccaaagccatgctatacttcaccaaaggctaccagcaaaacgtcaaggacattgtcaacaacgccatattccacgaaggccacaatgagatggtcattgttaaggatattgagatcttcagcatgtgcgaacaccacatggtgccctttaccggaaagatgcatatcggctacattcccaagaacaatgtcatcggcatttccaagttgccgcgcattgccgagatgttcgctcgcagactgcaggtacaagagcgattaacacgagaagtcgcaaatgcaatcatggaggtgcttcaacctcagggtgtcgcggtagtaatggagtctgcccatctttgcatggtcatgcgaggcgttcagaagactacggctaccaccatcacttcttgtgttcttggctgctttgagcgtaaagagaagaccagaaatgagtttttgagtcttgttggcgtgaacaggtag

SEQ ID NO: 34996 - protein, 333 aa, Muscodor strobelii
  misc_feature: SGI Peptide ID NO. 572104
  misc_feature (209)..(313): Pfam Id: PF01227 Pfam Desc: GTP cyclohydrolase I
  misc_feature (73)..(333): NCBI GI: 145602544 Blast Desc: GTP cyclohydrolase I, [Magnaporthe grisea 70-15] gi|145010951|gb|EDJ95607.1| GTP cyclohydrolase I, [Magnaporthe grisea 70-15]
  misc_feature (74)..(333): NCBI GI: 256731156 Blast Desc: NECHADRAFT_85123 [Nectria haematococca mpVI 77-13-4]
  misc_feature (71)..(333): NCBI GI: 30316363 Blast Desc: GCH1_NEUCR RecName: Full=GTP cyclohydrolase 1; AltName: Full=GTP cyclohydrolase I; Short=GTP-CH-I gi|12718339|emb|CAC28574.1| GTP cyclohydrolase I [Neurospora
  misc_feature (41)..(333): NCBI GI: 171676384 Blast Desc: protein product [Podospora anserina] gi|170936258|emb|CAP60917.1| protein product [Podospora anserina]
  misc_feature (69)..(333): NCBI GI: 156044843 Blast Desc: GTP cyclohydrolase [Sclerotinia sclerotiorum 1980] gi|154694005|gb|EDN93743.1| GTP cyclohydrolase [Sclerotinia sclerotiorum 1980]
  misc_feature (76)..(333): NCBI GI: 154308902 Blast Desc: BC1G_07979 [Botryotinia fuckeliana B05.10] gi|150852605|gb|EDN27797.1| BC1G_07979 [Botryotinia fuckeliana B05.10]
  misc_feature (62)..(329): NCBI GI: 119183093 Blast Desc: GTP cyclohydrolase I [Coccidioides immitis RS] gi|240109490|gb|EER27659.1| GTP cyclohydrolase I, [Coccidioides posadasii C735 delta SOWgp]
  misc_feature (152)..(333): NCBI GI: 164423877 Blast Desc: GTP cyclohydrolase I [Neurospora crassa OR74A] gi|157070269|gb|EAA29459.2| GTP cyclohydrolase I [Neurospora crassa OR74A]
  misc_feature (77)..(329): NCBI GI: 255955769 Blast Desc: Pc21g16300 [Penicillium chrysogenum Wisconsin 54-1255] gi|211590348|emb|CAP96527.1| Pc21g16300 [Penicillium chrysogenum Wisconsin 54-1255]
  misc_feature (70)..(329): NCBI GI: 258571179 Blast Desc: GTP cyclohydrolase I [Uncinocarpus reesii 1704] gi|237904663|gb|EEP79064.1| GTP cyclohydrolase I [Uncinocarpus reesii 1704]
  misc_feature (115)..(333): SWISSPROT Homolog: EC 3.5.4.16 GTP cyclohydrolase I
MVTFAQTDYYNRDSAMGSSSGSTTGLSDADDSVNGTHRSVTLNSRDEKKADKKKKRRRAKDGGISEFDADQTSSKRRNSLSLAARDPRDKPERKRRRKAARAAKAESTKSEGTETRSPSPVIDFDGLSRPSLGTRERLEESTEQAAARLEKMRGAVRTLLECVGEDPDREGVLDTPSRYAKAMLYFTKGYQQNVKDIVNNAIFHEGHNEMVIVKDIEIFSMCEHHMVPFTGKMHIGYIPKNNVIGISKLPRIAEMFARRLQVQERLTREVANAIMEVLQPQGVAVVMESAHLCMVMRGVQKTTATTITSCVLGCFERKEKTRNEFLSLVGVNR

SEQ ID NO: 34997 - DNA, 2359 bp, Muscodor strobelii
  misc_feature: SGI EST ID NO. CUFF.83521.2
  misc_feature: Variant of the nucleotide sequence at SEQ ID NO 34995
aacggctggctttattttacctgcttactccattgctcccaatcacttcgcccggagggaccatgagtgttgacctgaactctttcatacgccaattggcctttacttgcggcttgccggtgactcttcaaagtcaacctcagtcctgatagccggcggggacggaaatcctagatatatctcctgtttccaccctcattgactcgcaccagtttgcatacctgtcaataactatactcattttcactttatggtcaccttcgcccaaacagattactacaaccgagactccgccatgggaagctccagcggctcaactacggggctgtccgacgccgacgactccgtcaatggcacccacaggtctgtcacccttaattcgagagacgagaagaaagcagacaagaagaagaagagaagacgcgccaaggatggcggcatctccgagttcgatgccgaccagacgtcctccaagcgtcgcaacagcctgagcttggctgcaagagatcccagagacaagcccgagaggaaacgcaggaggaaggccgcgagggccgcaaaggccgagagcaccaagtcggaaggaacagaaaccagatcccccagtcccgtcattgacttcgatggtctaagccgacctagtctaggcacccgagaacggcttgaggagagcaccgagcaagcggccgcacgtctggagaaaatgcgaggagcagtgcgaactctgctcgaatgcgttggagaagatcccgaccgagagggtgtactcgacactcccagccgatatgccaaagccatgctatacttcaccaaaggctaccagcaaaacgtcaaggacattgtcaacaacgccatattccacgaaggccacaatgagatggtcattgttaaggatattgagatcttcagcatgtgcgaacaccacatggtgccctttaccggaaagatgcatatcggctacattcccaagaacaatgtcatcggcatttccaagttgccgcgcattgccgagatgttcgctcgcagactgcaggtacaagagcgattaacacgagaagtcgcaaatgcaatcatggaggtgcttcaacctcagggtgtcgcggtagtaatggagtctgcccatctttgcatggtcatgcgaggcgttcagaagactacggctaccaccatcacttcttgtgttcttggctgctttgagcgtaaagagaagaccagaaatgagtttttgagtcttgttggcgtgaacaggtagcctaatctacgaaaagtgggaaaggaaagaagcttcaaaaatctagagtcagcgattcaaaaatttagcatgcatggcaggcgtaggcgttacacggatttagagcatttgggatctcaacatcggctcattggtaggctggataaatgcggcatatgtgcatccttcatcagggcaatggatggatatctcagcatactgggcaaagtggtgcattacttttatgggcggcatggagttattcaacagcagtgtgacgatatcaacaaacgcactggtctcctcagggaaaagaaaattactcatcttaatccatcgacttgctttcggagcaatcatcttctccacttatatctctacctattcaattagtattcttgctgtgaaatcatgtctggacgttgacaatagtaacggcgtaattagacggatctaagtaagaatgatccaggcactaacagaccggatcatagacattgaacagcaggatatttacacgataccaaaatatatacacagtctaaatagcaccaaagccaaatcgggtatctctcgatcactcctcctgcttaaggagtttcagatccaacggctcatcgtcatcatccacttcaccgtcctctaggtcggcacccgggtcctcactccggactctcgtccaaagctgaccccttcgccaagactcgcccttcgtccagaatctatggccatgctcacgaagcttgaaaccctgatgcctcatcatttgcgcatgcgtctcccaccatgccgtgcgagccccatgtacacaaccaagtgcaaaggcgctgaataaaacagcgccgagcaacatgccccaacccagagcgtatgatacacctgcggcatacacatctgcctgatcgctcgtcaccagtacaccgaagtccgtgatcgtgtaattagcttctgtcaaatttcccgtgatcatatccacgatgcgcgtcgatccaataattgactcgttaatatcgagcgccgcggcacggtagtgcgtgtaattccccgaccccaccggaatcgtcgtctcaaagccagcacgaggcaatcttgcgacgactttctccgctccatcgaggtcccagggtg

SEQ ID NO: 34998 - DNA, 1005 bp, Muscodor strobelii
  misc_feature: SGI cDNA ID NO. 572105
  misc_feature: Encodes the peptide sequence at SEQ ID NO 34999
atggcatcgcctccgcacaacagctcgcccgcgggctctccgccgtacccgccccacgcacagcttcccaacaagaagcgatcctctgccgccggcgatctctccatccagccgcctgcgctgaagcgacgcaaggcctcgaccatgtctattgcatccgccgggtccgcacatccactccgacagacatctttcccgcccgatgagaccaacggccgaagctactcgccctcatatcagcgttctcctagtgtcgacaacatgagtctggtcagcggcagccaggtcagcggcgcccccgtcaagaagaagcgcggtcgcaagtccaaggcccagctagccagagaagaggctgccgccatgcgcgacggcaccccgggcatcgctggaggtcgcgccgccactatcattagcaatgctagcggcaataccggcagagacggtgatgcagatggaggaggcgggggcgagaacgacggctctttcgagctgcccgagaccatggcaagcacctctgcagctaggactaaggagcagctggaagaggagaaggagctgcttgccctgctgaagtcgcagatggaccccgtgcagttcgagcgctatgagatctggcacagagctctcctaaagtctcaagatgtcaaaagacatatcaacagcgtcacatctcaatcatgtcctaccaacgtccatcagatgatgcaggtggtctgcaagatgtatctcggcgacattgtcgaggctgcacgcgatgtacagcaggagtggatcgagcagggcgaggagcaagttgacgccgacgccgacatacaacctggcgatgagctgtccaaattccgccgacaggctcccctacgacccgaccatctccgagaagcatatcaacgacgcaaggcggagaacggtggcgctacaggaagcctcatgttctggaaccagcagacgcataatggcgccgagagatttgcgccacgcgcaggagggcgacgtgtatttcgttaa

SEQ ID NO: 34999 - protein, 334 aa, Muscodor strobelii
  misc_feature: SGI Peptide ID NO. 572105
  misc_feature (187)..(298): Pfam Id: PF04719 Pfam Desc: hTAFII28-like protein conserved region
  misc_feature (187)..(261): Pfam Id: PF04719 Pfam Desc: hTAFII28-like protein conserved region
  misc_feature (1)..(334): NCBI GI: 256731558 Blast Desc: NECHADRAFT_63811 [Nectria haematococca mpVI 77-13-4]
  misc_feature (1)..(333): NCBI GI: 46122951 Blast Desc: FG05853.1 [Gibberella zeae PH-1]
  misc_feature (24)..(334): NCBI GI: 116200470 Blast Desc: CHGG_10780 [Chaetomium globosum CBS 148.51] gi|88175494|gb|EAQ82962.1| CHGG_10780 [Chaetomium globosum CBS 148.51]
  misc_feature (23)..(334): NCBI GI: 171676386 Blast Desc: protein product [Podospora anserina] gi|170936259|emb|CAP60918.1| protein product [Podospora anserina]
  misc_feature (1)..(266): NCBI GI: 85091017 Blast Desc: NCU07775 [Neurospora crassa OR74A] gi|12718340|emb|CAC28575.1| related to transcription initiation factor IID beta chain [Neurospora crassa] [Neurospora crassa
  misc_feature (1)..(263): NCBI GI: 145602546 Blast Desc: MGG_09459 [Magnaporthe grisea 70-15] gi|145010952|gb|EDJ95608.1| MGG_09459 [Magnaporthe grisea 70-15]
  misc_feature (174)..(334): NCBI GI: 261357943 Blast Desc: conserved [Verticillium albo-atrum VaMs.102]
  misc_feature (164)..(334): NCBI GI: 154308904 Blast Desc: BC1G_07980 [Botryotinia fuckeliana B05.10] gi|150852606|gb|EDN27798.1| BC1G_07980 [Botryotinia fuckeliana B05.10]
  misc_feature (41)..(257): NCBI GI: 115433056 Blast Desc: conserved [Aspergillus terreus NIH2624] gi|114189517|gb|EAU31217.1| conserved [Aspergillus terreus NIH2624]
  misc_feature (177)..(334): NCBI GI: 259481013 Blast Desc: TPA: transcription initiation factor TFIID subunit beta, (AFU_orthologue; AFUA_5G03660) [Aspergillus nidulans FGSC A4]
MASPPHNSSPAGSPPYPPHAQLPNKKRSSAAGDLSIQPPALKRRKASTMSIASAGSAHPLRQTSFPPDETNGRSYSPSYQRSPSVDNMSLVSGSQVSGAPVKKKRGRKSKAQLAREEAAAMRDGTPGIAGGRAATIISNASGNTGRDGDADGGGGGENDGSFELPETMASTSAARTKEQLEEEKELLALLKSQMDPVQFERYEIWHRALLKSQDVKRHINSVTSQSCPTNVHQMMQVVCKMYLGDIVEAARDVQQEWIEQGEEQVDADADIQPGDELSKFRRQAPLRPDHLREAYQRRKAENGGATGSLMFWNQQTHNGAERFAPRAGGRRVFR

SEQ ID NO: 35000 - DNA, 4387 bp, Muscodor strobelii
  misc_feature: SGI EST ID NO. CUFF.83302.0
  misc_feature: Variant of the nucleotide sequence at SEQ ID NO 34998
tctcactcagttcaccccgcattgctcgcgttgcctgcctgccatctgcaaatctatctgcattcaattctagcttgcatagcttggtaccagctgctgcaccattggtgacgtgactcgcgctaggggcgtagctaagcgttgttaagcggcctttcaatatcactcccatcgcagttggctcatcttttgcctcgacttaattgtcctgagctcaacagacatcatcgtcaagctatgcttatggcttgtccagaagaatattcgcggcatgattccaatacgcatgagctgttgtcattgcaaggattctaagctcctaaaaattgtgagagaggggaagaccaattcgccaatgatcgtgtctgatggccggcatccatggatgctccgcctactgtaggaaatccgtcggaacctcggaacgatggatccaatcagagcaggcctagattctagctctgtcgccccacttcaagctccccgaaagagattgcagccacttttacagtccctggaagtggaaggcggtcgggcgagttgtggcttccatctcccaacccaactgtacctaccggcagaattcaatagtactgaagtttccaggcgcaagtgcaacccagaagctacagctatttttggggagcaatggtgcattacggatagcttccgactcacaagtatctggtacaactaggcttttcaacatcctcgtccttctcctgcgctctcaggtctccgcgtgtggtctcgtcagacttgtactgcatcgcgtcgcgacgacccaatatcagtacactgcgaacacggagaacacggtttccacggcatcgcatccatcaagatggcatcgcctccgcacaacagctcgcccgcgggctctccgccgtacccgccccacgcacagcttcccaacaagaagcgatcctctgccgccggcgatctctccatccagccgcctgcgctgaagcgacgcaaggcctcgaccatgtctattgcatccgccgggtccgcacatccactccgacagacatctttcccgcccgatgagaccaacggccgaagctactcgccctcatatcagcgttctcctagtgtcgacaacatgagtctggtcagcggcagccaggtcagcggcgcccccgtcaagaagaagcgcggtcgcaagtccaaggcccagctagccagagaagaggctgccgccatgcgcgacggcaccccgggcatcgctggaggtcgcgccgccactatcattagcaatgctagcggcaataccggcagagacggtgatgcagatggaggaggcgggggcgagaacgacggctctttcgagctgcccgagaccatggcaagcacctctgcagctaggactaaggagcagctggaagaggagaaggagctgcttgccctgctgaagtcgcagatggaccccgtgcagttcgagcgctatgagatctggcacagagctctcctaaagtctcaagatgtcaaaagacatatcaacagcgtcacatctcaatcatgtcctaccaacgtccatcagatgatgcaggtggtctgcaagatgtatctcggcgacattgtcgaggctgcacgcgatgtacagcaggagtggatcgagcagggcgaggagcaagttgacgccgacgccgacatacaacctggcgatgagctgtccaaattccgccgacaggctcccctacgacccgaccatctccgagaagcatatcaacgacgcaaggcggagaacggtggcgctacaggaagcctcatgttctggaaccagcagacgcataatggcgccgagagatttgcgccacgcgcaggagggcgacgtgtatttcgttaaggacgttttgactttatgaaattctgagcaaggcgttggagggagcattatggtggtgatacacatcgcccaaggacggtttcggcatagcagcaagtgcgttcggagttcatgggcttgttgacgagatgctggtgctattattatctgacctaacagcatggaattgctggctgtaagatcatcactggctttgccaacagacgcatttacaaggctgcagacttgacgcacagccatgacgcaaagctagctagtaaaaaatacgttcaagtgcgcggtcgaggggctataagaatcgctattactctgatcgattttctcaagtgcacatcctacaggaatgcaacgcatcgtctgagaccaaaagggccagcagcgaggccatgaacggaatcaacgatacgccactcaagttaaaatagccagaacggtcgcgacctattcgaaacctagcattgagaccaaagctttcgttttgtccaacagctatccggagatttgatgaaacatctatccgaaatgttgtcggctgtttgttcacggtctagcaggacgagaatccgtcgaacagtaacgacctctatcctgtccttcgtctaggagagtagcaagacgcagcgagaaagcatcttctgctcttcttgtaactgtagatacttgtgacagtgacagtgatgaaggcacttaggtactagaagccacgcaagggagttacggtcattttgctgccattgaaggacctgctagaccgcgtacataggtttcctacccagtttttcgaacctatgcttaacgtctcgcatcttggtatttacccaagaagcgagaaattttgcagatttcaatgcgaaaatgagatacgattctcacagaaaccccctccaatttcaagtcggagatgaggtatacctgcgcctacatcggggatatagattgccaggaaaacctcataggaaatgatcccaacaacgtactggaccattcacaatagttaagaaaataggagaattagcatacgagctgaacttccctcggcactggcaggccggaagagttgtatcggtggcacatctcttccggcgccgggccgacaaatgagtctttgttctcaataggcttgcatacttgacctaacagaaaaagatcttcagaaagccggattttaccgtacgagatcttctcctgttgccagagatcccgaatccgtgcatacactggcttgtgtatgcagacgtcgttacagaggtgcccttggaagccgtcaagcgagtgccaaacccgtttgctaaggatccgagccgagcgaaagaaatatagggggctcagcagggccaaacggcccttgccgggagggaaaaaacttcgcgagctaccaattggtaggcgcataagaggtctgatgaagtgatctgattgagttgatctagctaagtcttcctatcgccgtgttttgccagaagccttctatagtatggctttacatctgcatgataggcttgagatcgaactctcgggtgctttgcccaagtattcccagttgccctcacgggacatgacgagaaatgaggtcaccagaatcatcgtcaaagtagttctaactgagatccgacacgctctaagcaactctggcggcaataggctccagcttattgcttcaattacgagagctgtaaacagtatcacacctcaggttgagcctgccaagcaatccatcagggagaaatacctgctcaaaacagcggaggcacttgtctcaattttctccgagaagacgttggacgatgtttcatcttcaacgagatcatcgtttctattccgctgaatgcccagcggattctgggcaaggacaatcttgagagggaggaatacagatgtggtgatgaacctcagaacgatcgcgctgttccgggacgacgcgaaaaggagaacgggatttcacgcagggacgctagataagcctgtcttccagaaggccccatcatttagtacctagataatatgtaccctatgaaggagagttatggatggcgaggcaaagctcgcgaagactaaacgaagaggtctgtcgccatacgaagatttctgtgtctttccgcgagcattggctgaacagtgcatggctgagcagtctattaggcgggagtgaaaatgcgtggcaccaccgaataacataacagagacaataccgattaatgcagcgattaatgttctgatcatcgcctgacagctgaccaagattgactttcgagaattacatgtatataacttcaattctgagatgatattctagagatgtgttaatagagcaatcagacttaggtgaaggcaagcgtgccagttattctgtgagtaccctgtttgtggccttactggtgtcggggactggaaccttgaccatgagcacttggagaagagtatatttcacgctcacagtggtcaaaaatcgaaagaaaataccaagagctaccaaataaattagtttctcgtcagatgcaaatgatggcatgaaaaatcctctaaaggcctaaggcgcac

SEQ ID NO: 35001 - DNA, 1203 bp, Muscodor strobelii
  misc_feature: SGI cDNA ID NO. 572106
  misc_feature: Encodes the peptide sequence at SEQ ID NO 35002
atggactcactcaattaccagatgccctcaggcgtccacgcaattcccacacaggaactagacttacgtcccgactcggaaatagaccatgatctcctgaactcagcaccgatcactgactcagaaaagaacatctggttcttctggcactcaggcttcgccaacatgcatccctacacccagcgcaacgtccgggcctggcacagacggttctcaaaagcaggctgggtaattcgagtcatggacaggcagccaaactcacccctcaatatcgtgaatttcctcgacatctcagaccctgatacattccccaaggcgtttctcgacggtattattggcggtgactacgcaccacagcatacctcagatctcgtgcgctggccattgttgttgaagtacggcggcgtgtatgcggatgtgggtatgatgcaaatcggcgaccttgatcatctctggaataccacggtcgccaacccggattcaccttatgaagttctgacttacaatgcgggagacgtcaatgacagggacttgacgaattacttcctctgcgcacgtcgcaataatcccttattcttacgatcccatcaattgttcctcgctctgtgggccgaggacggcggcaaatcaagcacggaggggatgcacaaaagtctcttactcaaaggcctccgcatgatgggcgtgcgcttcggagagaagatcagtgccgagttgacagactacatcattcaaggtcagagcatcaacatggtctgtggtctcatagatgaggaggggggttggaatggaccgcagtattgctccgagaagatctacgccattgagtatatggaagggtcgcagcttatcaatgagtacacgagctgggatgggcctgaggcttatagactcattagtctaaagatgccgaaggaaggagaggaggagagtgcagatcagatgaaggcgagggagattgtcgaagggtgcttgagcaggagttttggtttcaagttggcgcatgggattattattaaagtgcttggtgatacactgggcagtctttggaggaagaatgttggggctgatgacgttcctgggacttatgcgcattggttgaggtatggtatggttcattggtgtcccgacaaagtgccagagaggttggacttcaaaatccttgatccggtgaaaacgggaccgttgttgagagaagcttag

SEQ ID NO: 35002 - protein, 400 aa, Muscodor strobelii
  misc_feature: SGI Peptide ID NO. 572106
  misc_feature (6)..(397): NCBI GI: 154315204 Blast Desc: BC1G_04641 [Botryotinia fuckeliana B05.10] gi|150847604|gb|EDN22797.1| BC1G_04641 [Botryotinia fuckeliana B05.10]
  misc_feature (1)..(398): NCBI GI: 212538613 Blast Desc: conserved [Penicillium marneffei ATCC 18224] gi|210069204|gb|EEA23295.1| conserved [Penicillium marneffei ATCC 18224]
  misc_feature (3)..(398): NCBI GI: 145228389 Blast Desc: An01g00570 [Aspergillus niger] gi|134054590|emb|CAK43445.1| protein product [Aspergillus niger]
  misc_feature (1)..(398): NCBI GI: 242806316 Blast Desc: conserved [Talaromyces stipitatus ATCC 10500] gi|218715344|gb|EED14766.1| conserved [Talaromyces stipitatus ATCC 10500]
  misc_feature (5)..(397): NCBI GI: 256722752 Blast Desc: NECHADRAFT_53107 [Nectria haematococca mpVI 77-13-4]
  misc_feature (14)..(397): NCBI GI: 189193827 Blast Desc: [Pyrenophora tritici-repentis Pt-1C-BFP] gi|187978816|gb|EDU45442.1| [Pyrenophora tritici-repentis Pt-1C-BFP]
  misc_feature (62)..(397): NCBI GI: 169625694 Blast Desc: SNOG_16123 [Phaeosphaeria nodorum SN15] gi|160705709|gb|EAT76495.2| SNOG_16123 [Phaeosphaeria nodorum SN15]
  misc_feature (11)..(379): NCBI GI: 242804552 Blast Desc: capsule polysaccharide biosynthesis protein, [Talaromyces stipitatus ATCC 10500] gi|218717743|gb|EED17164.1| capsule polysaccharide biosynthesis protein, [Talaromyces ATCC
  misc_feature (11)..(374): NCBI GI: 212539426 Blast Desc: conserved [Penicillium marneffei ATCC 18224] gi|210067167|gb|EEA21259.1| conserved [Penicillium marneffei ATCC 18224]
  misc_feature (14)..(368): NCBI GI: 70985642 Blast Desc: capsule polysaccharide biosynthesis protein [Aspergillus fumigatus Af293] gi|66845955|gb|EAL86289.1| capsule polysaccharide biosynthesis protein, [Aspergillus fumigatus
MDSLNYQMPSGVHAIPTQELDLRPDSEIDHDLLNSAPITDSEKNIWFFWHSGFANMHPYTQRNVRAWHRRFSKAGWVIRVMDRQPNSPLNIVNFLDISDPDTFPKAFLDGIIGGDYAPQHTSDLVRWPLLLKYGGVYADVGMMQIGDLDHLWNTTVANPDSPYEVLTYNAGDVNDRDLTNYFLCARRNNPLFLRSHQLFLALWAEDGGKSSTEGMHKSLLLKGLRMMGVRFGEKISAELTDYIIQGQSINMVCGLIDEEGGWNGPQYCSEKIYAIEYMEGSQLINEYTSWDGPEAYRLISLKMPKEGEEESADQMKAREIVEGCLSRSFGFKLAHGIIIKVLGDTLGSLWRKNVGADDVPGTYAHWLRYGMVHWCPDKVPERLDFKILDPVKTGPLLREA

SEQ ID NO: 35003 - DNA, 1663 bp, Muscodor strobelii
  misc_feature: SGI EST ID NO. CUFF.83305.0
  misc_feature: Variant of the nucleotide sequence at SEQ ID NO 35001
gcgcagtctcagatgcgagggaaattttgcgacgatggcttttcctgcgttccaggagtgaattctaggtaaaaggtatttgaactatgcgcctcaatcccgggctgcacgtctccacttcttaagttgagtcaacacttgtgttctgtgaaacttcggcttcgcgtaagacctcacgatgaagttgccatgatgtcgactacgcagtgtatatatataatatgtccctttccctcgtcaattggatctcatatctcatccacagcgacatcagcatttgttttaattgataccctagacgcatcttctcttgtatcttatcatcccattaatgctatcgctaacaaacacaacaactcaaaccaccacctcatcaatgatggactcactcaattaccagatgccctcaggcgtccacgcaattcccacacaggaactagacttacgtcccgactcggaaatagaccatgatctcctgaactcagcaccgatcactgactcagaaaagaacatctggttcttctggcactcaggcttcgccaacatgcatccctacacccagcgcaacgtccgggcctggcacagacggttctcaaaagcaggctgggtaattcgagtcatggacaggcagccaaactcacccctcaatatcgtgaatttcctcgacatctcagaccctgatacattccccaaggcgtttctcgacggtattattggcggtgactacgcaccacagcatacctcagatctcgtgcgctggccattgttgttgaagtacggcggcgtgtatgcggatgtgggtatgatgcaaatcggcgaccttgatcatctctggaataccacggtcgccaacccggattcaccttatgaagttctgacttacaatgcgggagacgtcaatgacagggacttgacgaattacttcctctgcgcacgtcgcaataatcccttattcttacgatcccatcaattgttcctcgctctgtgggccgaggacggcggcaaatcaagcacggaggggatgcacaaaagtctcttactcaaaggcctccgcatgatgggcgtgcgcttcggagagaagatcagtgccgagttgacagactacatcattcaaggtcagagcatcaacatggtctgtggtctcatagatgaggaggggggttggaatggaccgcagtattgctccgagaagatctacgccattgagtatatggaagggtcgcagcttatcaatgagtacacgagctgggatgggcctgaggcttatagactcattagtctaaagatgccgaaggaaggagaggaggagagtgcagatcagatgaaggcgagggagattgtcgaagggtgcttgagcaggagttttggtttcaagttggcgcatgggattattattaaagtgcttggtgatacactgggcagtctttggaggaagaatgttggggctgatgacgttcctgggacttatgcgcattggttgaggtatggtatggttcattggtgtcccgacaaagtgccagagaggttggacttcaaaatccttgatccggtgaaaacgggaccgttgttgagagaagcttagtaatagagaaggtagagcatagaatatagacgatagatacaatatttagatttttcttaactcttagttacatgatattcg

SEQ ID NO: 35004 - DNA, 1134 bp, Muscodor strobelii
  misc_feature: SGI cDNA ID NO. 572107
  misc_feature: Encodes the peptide sequence at SEQ ID NO 35005
atgtcaatctcaaatccaggcccaacaataacccagcgctcagatctctcaagactctacaaagtcttccgaaagaccgcccgcccactacgctcacacattctcatcgttagcggtaactatcccgctggctcacctcgaatagaaaaacaccctaaacgcataggaaaggtagaaatcaaagagcgacaaatcatactctcttcacacacaacttcaagttcgtcaagctcctccaactcttccaactcatcaccagattcagggccggcggggacaaaggaaacactatggacatactcattccacccgccaatagagccaccgcgtggtaggctgaagcccggagaagaagaaaaaggaaaacacatagtctatttcttcgcaggcggtggatttgtccaacccgcggaatctgaacagtggaagctatgcgcttatctcgcttctgcgctcgcccaatctgatgtgcagattattctcgtttcgtacccgttagcgcctaattccccggctaaggactcactgccgatccttaggcgctggttgagacaggcgcttgctgatgccgaaagggagaatagcgttgtgagcttggttggggatagtgcaggtgggaatattgcgctttctttggcgctgtggtgggtggatggtattgccaggcggaaggggatgaatgagtcgacgagggattgggagagaagcgacaagcgtgtgttgagatcggtgttgatggtctcgccgcccctggatatgcgtgtcacgaatcccgacattgatcgtacagatcaagtcgatcccattcttgggaaaggcaacgcggagactgcggcaaaggcctggtccaaagggtccgatacagatgacccttacttaagcccggtgctagcggatttgacgaacttgaaggagagtggtatagaggtgcattgcgctgttggaacttatgatgtgttggcacccgatgtcatggcatttcttgagcgatgcaaagaagttagtcttccggggaattggttgatttgggaaggtttgatgcatgattttcctcttgctgcttgttacggacttaaggagggaaaggagggaagggtttggataatgaagatattggacggcgttcgttggtga

SEQ ID NO: 35005 - protein, 377 aa, Muscodor strobelii
  misc_feature: SGI Peptide ID NO. 572107
  misc_feature (125)..(352): Pfam Id: PF07859 Pfam Desc: alpha/beta hydrolase fold
  misc_feature (197)..(352): Pfam Id: PF07859 Pfam Desc: alpha/beta hydrolase fold
  misc_feature (10)..(372): NCBI GI: 154293794 Blast Desc: BC1G_14225 [Botryotinia fuckeliana B05.10] gi|150845198|gb|EDN20391.1| BC1G_14225 [Botryotinia fuckeliana B05.10]
  misc_feature (125)..(372): NCBI GI: 156061723 Blast Desc: SS1G_03007 [Sclerotinia sclerotiorum 1980] gi|154700408|gb|EDO00147.1| SS1G_03007 [Sclerotinia sclerotiorum 1980]
  misc_feature (9)..(372): NCBI GI: 256723619 Blast Desc: NECHADRAFT_52205 [Nectria haematococca mpVI 77-13-4]
  misc_feature (95)..(372): NCBI GI: 46114478 Blast Desc: FG03081.1 [Gibberella zeae PH-1]
  misc_feature (10)..(372): NCBI GI: 189207118 Blast Desc: esterase/lipase [Pyrenophora tritici-repentis Pt-1C-BFP] gi|187975986|gb|EDU42612.1| esterase/lipase [Pyrenophora tritici-repentis Pt-1C-BFP]
  misc_feature (119)..(375): NCBI GI: 169615859 Blast Desc: SNOG_11095 [Phaeosphaeria nodorum SN15] gi|111060474|gb|EAT81594.1| SNOG_11095 [Phaeosphaeria nodorum SN15]
  misc_feature (119)..(352): NCBI GI: 269124083 Blast Desc: Alpha/beta hydrolase fold-3 domain protein [Streptobacillus moniliformis DSM 12112] gi|268315409|gb|ACZ01783.1| Alpha/beta hydrolase fold-3 domain
  misc_feature (119)..(372): NCBI GI: 269124090 Blast Desc: Alpha/beta hydrolase fold-3 domain protein [Streptobacillus moniliformis DSM 12112] gi|268315416|gb|ACZ01790.1| Alpha/beta hydrolase fold-3 domain
  misc_feature (125)..(375): NCBI GI: 223042362 Blast Desc: esterase [Staphylococcus capitis SK14] gi|222444025|gb|EEE50121.1| esterase [Staphylococcus capitis SK14]
  misc_feature (125)..(372): NCBI GI: 256668628 Blast Desc: esterase/lipase [Streptomyces sp. AA4]
MSISNPGPTITQRSDLSRLYKVFRKTARPLRSHILIVSGNYPAGSPRIEKHPKRIGKVEIKERQIILSSHTTSSSSSSSNSSNSSPDSGPAGTKETLWTYSFHPPIEPPRGRLKPGEEEKGKHIVYFFAGGGFVQPAESEQWKLCAYLASALAQSDVQIILVSYPLAPNSPAKDSLPILRRWLRQALADAERENSVVSLVGDSAGGNIALSLALWWVDGIARRKGMNESTRDWERSDKRVLRSVLMVSPPLDMRVTNPDIDRTDQVDPILGKGNAETAAKAWSKGSDTDDPYLSPVLADLTNLKESGIEVHCAVGTYDVLAPDVMAFLERCKEVSLPGNWLIWEGLMHDFPLAACYGLKEGKEGRVWIMKILDGVRW

SEQ ID NO: 35006 - DNA, 2390 bp, Muscodor strobelii
  misc_feature: SGI EST ID NO. CUFF.83308.0
  misc_feature: Variant of the nucleotide sequence at SEQ ID NO 35004
atcgtcgcaagcacacttttgtaattttataggaattactctctcacaatctgtctcgtactatataaggtaccctgtaataagtgacgatgtcaatctcaaatccaggcccaacaataacccagcgctcagatctctcaagactctacaaagtcttccgaaagaccgcccgcccactacgctcacacattctcatcgttagcggtaactatcccgctggctcacctcgaatagaaaaacaccctaaacgcataggaaaggtagaaatcaaagagcgacaaatcatactctcttcacacacaacttcaagttcgtcaagctcctccaactcttccaactcatcaccagattcagggccggcggggacaaaggaaacactatggacatactcattccacccgccaatagagccaccgcgtggtaggctgaagcccggagaagaagaaaaaggaaaacacatagtctatttcttcgcaggcggtggatttgtccaacccgcggaatctgaacagtggaagctatgcgcttatctcgcttctgcgctcgcccaatctgatgtgcagattattctcgtttcgtacccgttagcgcctaattccccggctaaggactcactgccgatccttaggcgctggttgagacaggcgcttgctgatgccgaaagggagaatagcgttgtgagcttggttggggatagtgcaggtgggaatattgcgctttctttggcgctgtggtgggtggatggtattgccaggcggaaggggatgaatgagtcgacgagggattgggagagaagcgacaagcgtgtgttgagatcggtgttgatggtctcgccgcccctggatatgcgtgtcacgaatcccgacattgatcgtacagatcaagtcgatcccattcttgggaaaggcaacgcggagactgcggcaaaggcctggtccaaagggtccgatacagatgacccttacttaagcccggtgctagcggatttgacgaacttgaaggagagtggtatagaggtgcattgcgctgttggaacttatgatgtgttggcacccgatgtcatggcatttcttgagcgatgcaaagaagttagtcttccggggaattggttgatttgggaaggtttgatgcatgattttcctcttgctgcttgttacggacttaaggagggaaaggagggaagggtttggataatgaagatattggacggcgttcgttggtgatcatgagctatgtcagtctgtatagttaaatgcgacacttcatgtatgcccaatggcttcaacttcgtagagtactgccgtagataacacgttcacattgatattgaacgtcgtttccttcaacttggtttcgtccgccgtggcgtctggtgctacgcaattacttgctgggctgtgtatacggaaccctgggccgcgcgtgtatccggggagaacttcagacgctgatgaatcctaagtgctaatatttgtcggaagaagaacttagtagaccatccagcacccgagagctatttttatccggcgtcggctgcctttgagcctttgagactctatagaggtttttccatctttgctttcttcctgagagtgcttgttccgtccatctcacccaaagctccgaactttcttttgcccattgcttctgatgagcgttctgtcgtttgtttcaggtgttccgtcatttgttccatttgttccgtcacttgctcagcgagttctagcgcctgttcagcatgcattgtcgtctgtcttacagggtccgtccccgtttcaatcttttcttgggtagaggcaatgtttatagtccctttgaaacgctgcttgcgctgatcgtgggtggtttgcgtctctacccgcggtgttttgagttggtcgtggtcgtaatccaatgccctcatgaggcactcagagatgtctttcttcgtgctttgcttgaagaattttcctttttcgatcagctcactgaaattctcccgacatggtataaggtggcgccgctgccacagagctttgcccgattgcctttcctcccagttgatcctattgagcccctcgacaagatccttcgcataagccccatcgcaatgccaatattgacgctcttcttccatcatcttgctcaagtaccttgttttaaaccaaattaggaactcttcaccacttttaaatgccgtccggccctgtttctccaagcacttttccagacactcttccagttctctcagcatgatgtcagtcgtgattgcaagaccattgatggaatcgattatgcgcttcatggtctgcgtagcaacaatattgtcgggatttttataaataatattgtgttgcacttcagcccaagcttgtgttaccaccgtaccgatttggatctcgaccctgagc

SEQ ID NO: 35007 - DNA, 1647 bp, Muscodor strobelii
  misc_feature: SGI cDNA ID NO. 572108
  misc_feature: Encodes the peptide sequence at SEQ ID NO 35008
atggcccaatcggacaatttcgaagcacgagagaaaattgagatacagcagcgcgaggatttgtttcacgaagaggttcgaatcgctctggacgagtacagaaagcgcgaaactaggcggctgtatgaagaactcactaggttcgcatgcgctgaatgcgagcaattgatgaaaaatatcgaaaaaaagattacctacatcgtccatggaagaacgaaggattatgcctctttagaaaagaagctgaaagatttgcaagtccaagccaattccgaagacttgaaaaaggacccgcaccataaaatacaagaatattttcgcagacggaaaatgttgaatgacctaaaagcgaatccttgcagagttcccaaagaataccaatttctcgtgaccaagattgagaatatacaacaggaactcaaacaacctcgggaagtccctaacttcaatgcctggattggttggggcgccaatgtttatgagcatccggagatgggggaccttgccggggtccgcattggactttatctccccgatcagatcccaatggtcgcgagggcggtcgatgagcgcttcaacaggaaatggctatttggcacagtcaccggcggtcgaaatatcactatggacagaaacctagacgttcagaaacacttgaatggtcgatggcaatccgatggtctggacgggaccgttgaacactgggaacattatggttataggtcatggcaagtcgtggttgaagtaaaagagcctctatgtgataaactcgcatcgttcagagataccatgaagaaactacgtctcaaatcgctcagggtcgagatccaaatcggtacggtggtaacacaagcttgggctgaagtgcaacacaatattatttataaaaatcccgacaatattgttgctacgcagaccatgaagcgcataatcgattccatcaatggtcttgcaatcacgactgacatcatgctgagagaactggaagagtgtctggaaaagtgcttggagaaacagggccggacggcatttaaaagtggtgaagagttcctaatttggtttaaaacaaggtacttgagcaagatgatggaagaagagcgtcaatattggcattgcgatggggcttatgcgaaggatcttgtcgaggggctcaataggatcaactgggaggaaaggcaatcgggcaaagctctgtggcagcggcgccaccttataccatgtcgggagaatttcagtgagctgatcgaaaaaggaaaattcttcaagcaaagcacgaagaaagacatctctgagtgcctcatgagggcattggattacgaccacgaccaactcaaaacaccgcgggtagagacgcaaaccacccacgatcagcgcaagcagcgtttcaaagggactataaacattgcctctacccaagaaaagattgaaacggggacggaccctgtaagacagacgacaatgcatgctgaacaggcgctagaactcgctgagcaagtgacggaacaaatggaacaaatgacggaacacctgaaacaaacgacagaacgctcatcagaagcaatgggcaaaagaaagttcggagctttgggtgagatggacggaacaagcactctcaggaagaaagcaaagatggaaaaacctctatag

SEQ ID NO: 35008 - protein, 548 aa, Muscodor strobelii
  misc_feature: SGI Peptide ID NO. 572108
  misc_feature (70)..(299): Pfam Id: PF04607 Pfam Desc: Region found in RelA / SpoT proteins
  misc_feature (164)..(299): Pfam Id: PF04607 Pfam Desc: Region found in RelA / SpoT proteins
  misc_feature (164)..(347): NCBI GI: 256722284 Blast Desc: NECHADRAFT_87973 [Nectria haematococca mpVI 77-13-4]
  misc_feature (165)..(361): NCBI GI: 154302262 Blast Desc: BC1G_09914 [Botryotinia fuckeliana B05.10] gi|150855403|gb|EDN30595.1| BC1G_09914 [Botryotinia fuckeliana B05.10]
  misc_feature (239)..(340): NCBI GI: 242763403 Blast Desc: TSTA_066310 [Talaromyces stipitatus ATCC 10500] gi|218723764|gb|EED23181.1| TSTA_066310 [Talaromyces stipitatus ATCC 10500]
  misc_feature (274)..(361): NCBI GI: 116179048 Blast Desc: [Chaetomium globosum CBS 148.51] gi|88184449|gb|EAQ91917.1| [Chaetomium globosum CBS 148.51]
  misc_feature (162)..(366): NCBI GI: 239623527 Blast Desc: conserved [Clostridiales bacterium 1_7_47_FAA] gi|239521558|gb|EEQ61424.1| conserved [Clostridiales bacterium 1_7_47_FAA]
  misc_feature (164)..(385): NCBI GI: 229916036 Blast Desc: RelA/SpoT domain protein [Exiguobacterium sp. AT1b] gi|229467465|gb|ACQ69237.1| RelA/SpoT domain protein [Exiguobacterium sp. AT1b]
  misc_feature (159)..(331): NCBI GI: 266624941 Blast Desc: ChatD1_29994 [Clostridium hathewayi DSM 13479]
  misc_feature (162)..(342): NCBI GI: 239987218 Blast Desc: SrosN1_07932 [Streptomyces roseosporus NRRL 11379]
  misc_feature (162)..(342): NCBI GI: 239940740 Blast Desc: SrosN15_07073 [Streptomyces roseosporus NRRL 15998]
  misc_feature (159)..(366): NCBI GI: 225390270 Blast Desc: CLOSTASPAR_04021 [Clostridium asparagiforme DSM 15981] gi|225043666|gb|EEG53912.1| CLOSTASPAR_04021 [Clostridium asparagiforme DSM 15981]
MAQSDNFEAREKIEIQQREDLFHEEVRIALDEYRKRETRRLYEELTRFACAECEQLMKNIEKKITYIVHGRTKDYASLEKKLKDLQVQANSEDLKKDPHHKIQEYFRRRKMLNDLKANPCRVPKEYQFLVTKIENIQQELKQPREVPNFNAWIGWGANVYEHPEMGDLAGVRIGLYLPDQIPMVARAVDERFNRKWLFGTVTGGRNITMDRNLDVQKHLNGRWQSDGLDGTVEHWEHYGYRSWQVVVEVKEPLCDKLASFRDTMKKLRLKSLRVEIQIGTVVTQAWAEVQHNIIYKNPDNIVATQTMKRIIDSINGLAITTDIMLRELEECLEKCLEKQGRTAFKSGEEFLIWFKTRYLSKMMEEERQYWHCDGAYAKDLVEGLNRINWEERQSGKALWQRRHLIPCRENFSELIEKGKFFKQSTKKDISECLMRALDYDHDQLKTPRVETQTTHDQRKQRFKGTINIASTQEKIETGTDPVRQTTMHAEQALELAEQVTEQMEQMTEHLKQTTERSSEAMGKRKFGALGEMDGTSTLRKKAKMEKPL

SEQ ID NO: 35009 - DNA, 2390 bp, Muscodor strobelii
  misc_feature: SGI EST ID NO. CUFF.83308.0
  misc_feature: Variant of the nucleotide sequence at SEQ ID NO 35007
gctcagggtcgagatccaaatcggtacggtggtaacacaagcttgggctgaagtgcaacacaatattatttataaaaatcccgacaatattgttgctacgcagaccatgaagcgcataatcgattccatcaatggtcttgcaatcacgactgacatcatgctgagagaactggaagagtgtctggaaaagtgcttggagaaacagggccggacggcatttaaaagtggtgaagagttcctaatttggtttaaaacaaggtacttgagcaagatgatggaagaagagcgtcaatattggcattgcgatggggcttatgcgaaggatcttgtcgaggggctcaataggatcaactgggaggaaaggcaatcgggcaaagctctgtggcagcggcgccaccttataccatgtcgggagaatttcagtgagctgatcgaaaaaggaaaattcttcaagcaaagcacgaagaaagacatctctgagtgcctcatgagggcattggattacgaccacgaccaactcaaaacaccgcgggtagagacgcaaaccacccacgatcagcgcaagcagcgtttcaaagggactataaacattgcctctacccaagaaaagattgaaacggggacggaccctgtaagacagacgacaatgcatgctgaacaggcgctagaactcgctgagcaagtgacggaacaaatggaacaaatgacggaacacctgaaacaaacgacagaacgctcatcagaagcaatgggcaaaagaaagttcggagctttgggtgagatggacggaacaagcactctcaggaagaaagcaaagatggaaaaacctctatagagtctcaaaggctcaaaggcagccgacgccggataaaaatagctctcgggtgctggatggtctactaagttcttcttccgacaaatattagcacttaggattcatcagcgtctgaagttctccccggatacacgcgcggcccagggttccgtatacacagcccagcaagtaattgcgtagcaccagacgccacggcggacgaaaccaagttgaaggaaacgacgttcaatatcaatgtgaacgtgttatctacggcagtactctacgaagttgaagccattgggcatacatgaagtgtcgcatttaactatacagactgacatagctcatgatcaccaacgaacgccgtccaatatcttcattatccaaacccttccctcctttccctccttaagtccgtaacaagcagcaagaggaaaatcatgcatcaaaccttcccaaatcaaccaattccccggaagactaacttctttgcatcgctcaagaaatgccatgacatcgggtgccaacacatcataagttccaacagcgcaatgcacctctataccactctccttcaagttcgtcaaatccgctagcaccgggcttaagtaagggtcatctgtatcggaccctttggaccaggcctttgccgcagtctccgcgttgcctttcccaagaatgggatcgacttgatctgtacgatcaatgtcgggattcgtgacacgcatatccaggggcggcgagaccatcaacaccgatctcaacacacgcttgtcgcttctctcccaatccctcgtcgactcattcatccccttccgcctggcaataccatccacccaccacagcgccaaagaaagcgcaatattcccacctgcactatccccaaccaagctcacaacgctattctccctttcggcatcagcaagcgcctgtctcaaccagcgcctaaggatcggcagtgagtccttagccggggaattaggcgctaacgggtacgaaacgagaataatctgcacatcagattgggcgagcgcagaagcgagataagcgcatagcttccactgttcagattccgcgggttggacaaatccaccgcctgcgaagaaatagactatgtgttttcctttttcttcttctccgggcttcagcctaccacgcggtggctctattggcgggtggaatgagtatgtccatagtgtttcctttgtccccgccggccctgaatctggtgatgagttggaagagttggaggagcttgacgaacttgaagttgtgtgtgaagagagtatgatttgtcgctctttgatttctacctttcctatgcgtttagggtgtttttctattcgaggtgagccagcgggatagttaccgctaacgatgagaatgtgtgagcgtagtgggcgggcggtctttcggaagactttgtagagtcttgagagatctgagcgctgggttattgttgggcctggatttgagattgacatcgtcacttattacagggtaccttatatagtacgagacagattgtgagagagtaattcctataaaattacaaaagtgtgcttgcgacgat

SEQ ID NO: 35010 - DNA, 618 bp, Muscodor strobelii
  misc_feature: SGI cDNA ID NO. 572109
  misc_feature: Encodes the peptide sequence at SEQ ID NO 35011
atgtcgcaaagcatagcgcattggcctcagttgacagcccccactacagtcgacaatccatccgagtttcagtataacccctctctagaggaatttgccgttcccaagcgatcttatttcgccgctcacccaaacgcaccctttgactacatagcaacaagtgcgctggttgtagatgcaacattgacggctagtccccgtattctcctgctccaacgtgcagcaaatgacgatgaccctaacaaatgggaacccgcgggcggcgcttgtgacgatagtgacggaagtattctttacgcggctgctcgagagctctgggaggagactggtctccaagtagcgcaaattaatgggctcgttggcgacccgcacttctttactctcagtgacgggatgatcgtgtgccaattcaatttcgctgtgcgtgtggtgatgagaaaggagccgtccccgttaccaataaggctaaatgccgatgagcaccagtgttttgtttgggcaaccgaagaagatgtcaaacagaagaaggtacacggcatcgagttggacttcacaagagaagaagttgagcgtaccgtacgtatggcttttagctactttgaaaggcaaatggattga

SEQ ID NO: 35011 - protein, 205 aa, Muscodor strobelii
  misc_feature: SGI Peptide ID NO. 572109
  misc_feature (49)..(191): Pfam Id: PF00293 Pfam Desc: NUDIX domain
  misc_feature (22)..(198): NCBI GI: 46111721 Blast Desc: FG02742.1 [Gibberella zeae PH-1]
  misc_feature (22)..(198): NCBI GI: 256726126 Blast Desc: NECHADRAFT_44269 [Nectria haematococca mpVI 77-13-4]
  misc_feature (8)..(181): NCBI GI: 261359231 Blast Desc: conserved [Verticillium albo-atrum VaMs.102]
  misc_feature (32)..(205): NCBI GI: 39948630 Blast Desc: MGG_08699 [Magnaporthe grisea 70-15] gi|145009242|gb|EDJ93953.1| MGG_08699 [Magnaporthe grisea 70-15]
  misc_feature (54)..(198): NCBI GI: 261353272 Blast Desc: conserved [Verticillium albo-atrum VaMs.102]
  misc_feature (11)..(188): NCBI GI: 189210195 Blast Desc: conserved [Pyrenophora tritici-repentis Pt-1C-BFP] gi|187977522|gb|EDU44148.1| conserved [Pyrenophora tritici-repentis Pt-1C-BFP]
  misc_feature (29)..(198): NCBI GI: 171682736 Blast Desc: protein product [Podospora anserina] gi|170941327|emb|CAP66977.1| protein product [Podospora anserina]
  misc_feature (23)..(197): NCBI GI: 171680934 Blast Desc: protein product [Podospora anserina] gi|170940425|emb|CAP65652.1| protein product [Podospora anserina]
  misc_feature (21)..(201): NCBI GI: 169619140 Blast Desc: SNOG_12764 [Phaeosphaeria nodorum SN15] gi|160703755|gb|EAT80062.2| SNOG_12764 [Phaeosphaeria nodorum SN15]
  misc_feature (51)..(203): NCBI GI: 85090076 Blast Desc: NCU09154 [Neurospora crassa OR74A] gi|28919586|gb|EAA29010.1| conserved [Neurospora crassa OR74A]
MSQSIAHWPQLTAPTTVDNPSEFQYNPSLEEFAVPKRSYFAAHPNAPFDYIATSALVVDATLTASPRILLLQRAANDDDPNKWEPAGGACDDSDGSILYAAARELWEETGLQVAQINGLVGDPHFFTLSDGMIVCQFNFAVRVVMRKEPSPLPIRLNADEHQCFVWATEEDVKQKKVHGIELDFTREEVERTVRMAFSYFERQMD

SEQ ID NO: 35012 - DNA, 806 bp, Muscodor strobelii
  misc_feature: SGI EST ID NO. CUFF.83323.0
  misc_feature: Variant of the nucleotide sequence at SEQ ID NO 35010
ccaagttagtcagcattttgtcaatgtttcttggtcattatttctgggttgtattcaccgatctattttctgcgaatgcagtcttcaattgcaataactaagctatgtcgcaaagcatagcgcattggcctcagttgacagcccccactacagtcgacaatccatccgagtttcagtataacccctctctagaggaatttgccgttcccaagcgatcttatttcgccgctcacccaaacgcaccctttgactacatagcaacaagtgcgctggttgtagatgcaacattgacggctagtccccgtattctcctgctccaacgtgcagcaaatgacgatgaccctaacaaatgggaacccgcgggcggcgcttgtgacgatagtgacggaagtattctttacgcggctgctcgagagctctgggaggagactggtctccaagtagcgcaaattaatgggctcgttggcgacccgcacttctttactctcagtgacgggatgatcgtgtgccaattcaatttcgctgtgcgtgtggtgatgagaaaggagccgtccccgttaccaataaggctaaatgccgatgagcaccagtgttttgtttgggcaaccgaagaagatgtcaaacagaagaaggtacacggcatcgagttggacttcacaagagaagaagttgagcgtaccgtacgtatggcttttagctactttgaaaggcaaatggattgagtcctagttctttactattagacagcaattgctacgatgcgataagttctccggatgccagtctattggggtccggacgatcac

SEQ ID NO: 35013 - DNA, 393 bp, Muscodor strobelii
  misc_feature: SGI cDNA ID NO. 572110
  misc_feature: Elevated expression when VOC is produced
  misc_feature: Encodes the peptide sequence at SEQ ID NO 35014
atgttcgaccaatttgagtatcgacacattcccgcactgctcaccgcattcgtaaatgcgaccggtatcatctggccaacgaccaacgctcggcggtcactttcagccttcgggtttccaccgcacatcgcagactcggctgcggctgcgcccgtgatggtagtcgccatggtacgcacaacaacgattggacttatcatattcgcgttgtacttcaagggctactacgaagcaatcgatatcgtgctagctgtttttggcacattctcgggtgtcgtcgatagctatactgtctggaaatatggcgagaagaacagggctctctatcgtgttcttacgtcgagtattggggcagcgtgtgggttcgctggcgtcacagccggccagcgatag

SEQ ID NO: 35014 - protein, 130 aa, Muscodor strobelii
  misc_feature: SGI Peptide ID NO. 572110
  misc_feature (5)..(127): NCBI GI: 171679928 Blast Desc: protein product [Podospora anserina] gi|170939590|emb|CAP64817.1| protein product [Podospora anserina]
  misc_feature (1)..(129): NCBI GI: 154305874 Blast Desc: [Botryotinia fuckeliana B05.10] gi|150853053|gb|EDN28245.1| [Botryotinia fuckeliana B05.10]
  misc_feature (1)..(127): NCBI GI: 238840893 Blast Desc: conserved [Microsporum canis CBS 113480]
  misc_feature (1)..(127): NCBI GI: 238842459 Blast Desc: conserved [Microsporum canis CBS 113480]
  misc_feature (1)..(128): NCBI GI: 225683802 Blast Desc: [Paracoccidioides brasiliensis Pb03]
  misc_feature (1)..(128): NCBI GI: 226293180 Blast Desc: conserved [Paracoccidioides brasiliensis Pb18]
  misc_feature (1)..(130): NCBI GI: 242766628 Blast Desc: efflux pump antibiotic resistance protein, [Talaromyces stipitatus ATCC 10500] gi|218724405|gb|EED23822.1| efflux pump antibiotic resistance protein, [Talaromyces ATCC
  misc_feature (1)..(129): NCBI GI: 169612656 Blast Desc: SNOG_09452 [Phaeosphaeria nodorum SN15] gi|111061597|gb|EAT82717.1| SNOG_09452 [Phaeosphaeria nodorum SN15]
  misc_feature (2)..(127): NCBI GI: 256734198 Blast Desc: NECHADRAFT_35144 [Nectria haematococca mpVI 77-13-4]
  misc_feature (1)..(98): NCBI GI: 226277902 Blast Desc: conserved [Paracoccidioides brasiliensis Pb01]
  misc_feature: Useful for introducing or modulating the production of volatile compounds
MFDQFEYRHIPALLTAFVNATGIIWPTTNARRSLSAFGFPPHIADSAAAAPVMVVAMVRTTTIGLIIFALYFKGYYEAIDIVLAVFGTFSGVVDSYTVWKYGEKNRALYRVLTSSIGAACGFAGVTAGQR

SEQ ID NO: 35015 - DNA, 1165 bp, Muscodor strobelii
  misc_feature: SGI EST ID NO. CUFF.83326.0
  misc_feature: Variant of the nucleotide sequence at SEQ ID NO 35013
gacgactttaaatagcagagatataagaaacgtttcattattggagcggaactgatagtatcgacagcgagagttagaagtaatgaggaaaagagtattcagcaaacgtttcgagcacgtcctttggcagtctggttcttcccccgctacttatagtagatctttgctttaaagtattcgaaaggatacctaaatctgcttgaaaataaaagcgcaataaccgagtaacctcatcatgtatgtatcaggacgtttagatagctttatcggagaacggttcatcgcaagttgcgggctgcaaccccttgcttcgaagtactgaggtctactccgaacctgccgctctgatgaatatcatgaaagcttgatcctattttaaagcatccttataatcatacacaaaaacacttatccctcgtaacattcaggccgtctcttaaggtttctccatcatgttcgaccaatttgagtatcgacacattcccgcactgctcaccgcattcgtaaatgcgaccggtatcatctggccaacgaccaacgctcggcggtcactttcagccttcgggtttccaccgcacatcgcagactcggctgcggctgcgcccgtgatggtagtcgccatggtacgcacaacaacgattggacttatcatattcgcgttgtacttcaagggctactacgaagcaatcgatatcgtgctagctgtttttggcacattctcgggtgtcgtcgatagctatactgtctggaaatatggcgagaagaacagggctctctatcgtgttcttacgtcgagtattggggcagcgtgtgggttcgctggcgtcacagccggccagcgatagaggcgaaggggatcctgggctgtgtggcatggaaatatgtaggggtgttagtgagggactcgggtgccgcgcttcttagtcgatgcttggcaccaagtgatgtcacaacaataagtccggaaggatttccttttcgactcagcgttcgtagggtgagagaatcttaaacacatacaattgaaatcctcaattatatatttagtaaaagctgtcattgacatctgcagtgatgagatcgtactgaaacaatcgttgtaaagcagctacctatggtgccaggaaatccaagctgctgaatcgagccctgaggctgcctgggc

SEQ ID NO: 35016 - DNA, 1533 bp, Muscodor strobelii
  misc_feature: SGI cDNA ID NO. 572111
  misc_feature: Encodes the peptide sequence at SEQ ID NO 35017
atgaagatccctgtaactatcgtcctagccctcgtggccgctacggctgcggcggctaccgtcgtgagtatgcccaaagcacaaccacccacggccaagctcacagatgccaacttcattggcgtgtcgcttgagtttcaatactggcctgtatatgccggtaatgccaccggccagccgaacaaatatttcaatcagctgctcgataacttgagcgacttgaccggcaagccaccggcagtccgtgttggaggtacaagtgagaatttggcctttgttgactcggaatttcagctctggaactccagtcaacttgcagaggtttatgggcctttcagtaaccgctcgccagcggcaataggccgcgactggtacgctgtagcgggaaatttgccaaagggtactgagttcacctttggtctcaatctgtacgacaaagctgaggtcattgctcaaacgaagatgatcaacgacgctttctttggctcccgtgcggcactgacgaaagacgtcaaattgaagtacattcagattggcaacgagcccaatttctacttcaacagtgcgcttgagtacgtccaatcatggcagccgcttgtccacgcagctttgaagcacattaagcttggaggtaaaggcgagccaagcctctggattggatctgagactctgggtttcaacagcaaatggggcttgcgcggcaccctcgacgctggcgttctcgaagacgctgcattcgataacgcctgcaaggtcatggaggagcatatttactctggcgctctgaccattggcgccatccctggtggtccctcacccggtacgcttatgaacaaagctactatccgaagtaaccttacgtttctctacgatggcaaagttgcaacagaagactacggcaagacatactatatgggcgaaaccagttcctatgctagcgaaggtatcttcggtctctcaaataccggcgaatctgcagtctgggccgttgactatttgctcaagatggcatcgatgggaatcgagcgtgtgtacttgcacagcactccaaaccgcatgttcgcatcattccaacccggttggaattttccgaacggtactgacatccaacgcccgcatatcatgccgatgtacaacggcatcgtcattgtgaatgagtttatcggtaagtcgggtagcactaggattgccgagatcgaaaataatgacaagggtctcgcaacgtacggtgcctgggagaacggtaagctcgcacgtcttgtgcttatcaactcgaatgtatacactggatccgagaaagcaggcagatccaatatcactgtcgacttggatagcgggtacggcgatgcgcccgttacggtcaagcggttggctattcctaataccttgtcaacacagggcataacttggggtggtcagtccttcgagacagaaagcggtgtgccatcaggcaccatcatcgctccgaagctaaagggtcgcacggtcgtagtcgatgcttcggaagtagttatgttgatattctcatcctga

SEQ ID NO: 35017 - protein, 510 aa, Muscodor strobelii
  misc_feature: SGI Peptide ID NO. 572111
  misc_feature (1)..(508): NCBI GI: 134114784 Blast Desc: CNBH1450 [Cryptococcus neoformans var. neoformans B-3501A] gi|50256318|gb|EAL19043.1| CNBH1450 [Cryptococcus neoformans var. neoformans B-3501A]
  misc_feature (1)..(508): NCBI GI: 58271620 Blast Desc: [Cryptococcus neoformans var. neoformans JEC21] gi|57229225|gb|AAW45659.1| expressed protein [Cryptococcus neoformans var. neoformans JEC21]
  misc_feature (1)..(508): NCBI GI: 134114826 Blast Desc: CNBH1660 [Cryptococcus neoformans var. neoformans B-3501A] gi|50256339|gb|EAL19064.1| CNBH1660 [Cryptococcus neoformans var. neoformans B-3501A]
  misc_feature (22)..(508): NCBI GI: 170099433 Blast Desc: glycoside hydrolase family 79 protein [Laccaria bicolor S238N-H82] gi|164644460|gb|EDR08710.1| glycoside hydrolase family 79 protein [Laccaria bicolor S238N-H82]
  misc_feature (111)..(510): NCBI GI: 238578353 Blast Desc: MPER_12261 [Moniliophthora perniciosa FA553] gi|215450197|gb|EEB89621.1| MPER_12261 [Moniliophthora perniciosa FA553]
  misc_feature (22)..(508): NCBI GI: 169851548 Blast Desc: [Coprinopsis cinerea okayama7#130] gi|116506317|gb|EAU89212.1| [Coprinopsis cinerea okayama7#130]
  misc_feature (25)..(506): NCBI GI: 145248842 Blast Desc: An14g01330 [Aspergillus niger] gi|134081431|emb|CAK41913.1| protein product [Aspergillus niger]
  misc_feature (132)..(510): NCBI GI: 238584146 Blast Desc: MPER_10243 [Moniliophthora perniciosa FA553] gi|215453909|gb|EEB91400.1| MPER_10243 [Moniliophthora perniciosa FA553]
  misc_feature (30)..(506): NCBI GI: 169778435 Blast Desc: [Aspergillus oryzae RIB40] gi|83772420|dbj|BAE62550.1| protein product [Aspergillus oryzae]
  misc_feature (5)..(502): NCBI GI: 169621584 Blast Desc: SNOG_14003 [Phaeosphaeria nodorum SN15] gi|111057508|gb|EAT78628.1| SNOG_14003 [Phaeosphaeria nodorum SN15]
MKIPVTIVLALVAATAAAATVVSMPKAQPPTAKLTDANFIGVSLEFQYWPVYAGNATGQPNKYFNQLLDNLSDLTGKPPAVRVGGTSENLAFVDSEFQLWNSSQLAEVYGPFSNRSPAAIGRDWYAVAGNLPKGTEFTFGLNLYDKAEVIAQTKMINDAFFGSRAALTKDVKLKYIQIGNEPNFYFNSALEYVQSWQPLVHAALKHIKLGGKGEPSLWIGSETLGFNSKWGLRGTLDAGVLEDAAFDNACKVMEEHIYSGALTIGAIPGGPSPGTLMNKATIRSNLTFLYDGKVATEDYGKTYYMGETSSYASEGIFGLSNTGESAVWAVDYLLKMASMGIERVYLHSTPNRMFASFQPGWNFPNGTDIQRPHIMPMYNGIVIVNEFIGKSGSTRIAEIENNDKGLATYGAWENGKLARLVLINSNVYTGSEKAGRSNITVDLDSGYGDAPVTVKRLAIPNTLSTQGITWGGQSFETESGVPSGTIIAPKLKGRTVVVDASEVVMLIFSS

SEQ ID NO: 35018 - DNA, 1872 bp, Muscodor strobelii
  misc_feature: SGI cDNA ID NO. 572112
  misc_feature: Encodes the peptide sequence at SEQ ID NO 35019
atgtctgattctaaggcaaggaatcataatcgtccgaacgtcttattcgttctcgccgatgatcttgggtattcagatatcggatgctatggcgctgaaatccagacgcccgtcattgaccgtctcgccgccgagggcatccgaatgctcaatcaccacgccgcggccgcatgttctcccactcgtgcgatgcttatgagtggtaccgatgcacatctcggcggactaggcgttttaatcgagtataaagatagcgagaagggcatggcaagatggtcaggtaaggccggttatgagggctatcttaaccgtgatgttgctactctgcctgagattctagaagataatgactgtttcactgcaatggctggcaagtggcatcttggactccgtgcctgccaagggccgtgggagcgcggatttcaaaaggcattcgctatgcttccaggttgttgcaatcactacggatgggagccagtccaagagagattccccgtcggcggacgaccaattcacgctgagatgggaatgaaagttgacataaccccaaacaagaccgaagacccgaaaggcttctactcaacagactcgtataccgacaagctcttggagttccttaaaggtcgctctgacagtgataaagcaaagccattctttgcgtttcttccatttacagcaccccattggcctttgcaatgctctaaggcgcagcgcgacaaatataaaggcatttacagcgatggaccatatgcattacgcgagcggagattgaagagactcgcggagatgggcatcatcgacaagtcggttatcccgcataagatggagacgacgactcagggtgtggaagagtgggacgacctcacatcagaagaaaagagattgtccagcagagcaatggaggcttatgcgggcatggtagactccattgatgtcaatgtaggcaaagttgtcgactatctgaagagcacgagtgaatacgacaacaccctcatcgtctttatgagcgacaatggagccgaaggcgctgcacttgaagctgcccccgtcatgggcgacaacatactgcgtgctattcatcagtattacgacaattcgtatgacaacataggatcatggaactcatttacatggcttggtccgctttgggcacaggcatcgactgctccttctcgactcttcaagtgctacccatccgaaggtggaatacttgtgccatgtatcattaaaccgccagtcaacacgttctcttttcagccagactcctttaaccgctcattcacgactgtgatggatttcgttcctacgattctcgaaatggccggcatagctcttcccccggtctccgaaaatgagctctcagtcacttcaaccgaacaaactccggcaaggccaatgactacgttccgcgggaaaagagtccacgctgtgcgtgggaaatcttggatgcctttctttgccgaggggaagagagtcgaagatgatgagaaatgggcgatacactcatctactgaggctataggttgggagctctttgctcgtggtgcgctacggaaaggggattggaagatcgtccacttttcaaagaagagaggtggcgtaggtgttggtgatgagggatgggagttgttcaacatcgccgttgaccccggcgagatcaacgacttggcctcgtctgagccggagaagctgcaagagctgttagcttgttggcatgaatacgtcgtcgaatgtggcgttgtttggggagagacagctattgctcctggtctgagtaaggatgaggcgccggagttctgggaggatgagctggatctgcagaagtcttggatgggggctaagggtggtgaatgccctgcgacttgtgcgtga

SEQ ID NO: 35019 - protein, 623 aa, Muscodor strobelii
  misc_feature: SGI Peptide ID NO. 572112
  misc_feature (10)..(555): Pfam Id: PF00884 Pfam Desc: Sulfatase
  misc_feature (10)..(341): Pfam Id: PF00884 Pfam Desc: Sulfatase
  misc_feature (1)..(620): NCBI GI: 46127351 Blast Desc: FG08053.1 [Gibberella zeae PH-1]
  misc_feature (1)..(581): NCBI GI: 242799205 Blast Desc: sulfatase, [Talaromyces stipitatus ATCC 10500] gi|218716675|gb|EED16096.1| sulfatase, [Talaromyces stipitatus ATCC 10500]
  misc_feature (10)..(611): NCBI GI: 256727569 Blast Desc: NECHADRAFT_33781 [Nectria haematococca mpVI 77-13-4]
  misc_feature (9)..(581): NCBI GI: 256722829 Blast Desc: NECHADRAFT_97519 [Nectria haematococca mpVI 77-13-4]
  misc_feature (11)..(581): NCBI GI: 256723099 Blast Desc: NECHADRAFT_42498 [Nectria haematococca mpVI 77-13-4]
  misc_feature (10)..(581): NCBI GI: 70997211 Blast Desc: arylsulfatase [Aspergillus fumigatus Af293] gi|66850995|gb|EAL91321.1| arylsulfatase, [Aspergillus fumigatus Af293]
  misc_feature (1)..(581): NCBI GI: 115397923 Blast Desc: arylsulfatase [Aspergillus terreus NIH2624] gi|114192744|gb|EAU34444.1| arylsulfatase [Aspergillus terreus NIH2624]
  misc_feature (10)..(581): NCBI GI: 159126916 Blast Desc: arylsulfatase, [Aspergillus fumigatus A1163]
  misc_feature (11)..(344): NCBI GI: 212533829 Blast Desc: arylsulfatase, [Penicillium marneffei ATCC 18224] gi|210072435|gb|EEA26524.1| arylsulfatase, [Penicillium marneffei ATCC 18224]
  misc_feature (10)..(611): NCBI GI: 145229559 Blast Desc: An01g06640 [Aspergillus niger] gi|134055196|emb|CAK43783.1| protein product [Aspergillus niger]
  misc_feature (10)..(585): SWISSPROT Homolog: EC 3.1.6.1 Arylsulfatase
MSDSKARNHNRPNVLFVLADDLGYSDIGCYGAEIQTPVIDRLAAEGIRMLNHHAAAACSPTRAMLMSGTDAHLGGLGVLIEYKDSEKGMARWSGKAGYEGYLNRDVATLPEILEDNDCFTAMAGKWHLGLRACQGPWERGFQKAFAMLPGCCNHYGWEPVQERFPVGGRPIHAEMGMKVDITPNKTEDPKGFYSTDSYTDKLLEFLKGRSDSDKAKPFFAFLPFTAPHWPLQCSKAQRDKYKGIYSDGPYALRERRLKRLAEMGIIDKSVIPHKMETTTQGVEEWDDLTSEEKRLSSRAMEAYAGMVDSIDVNVGKVVDYLKSTSEYDNTLIVFMSDNGAEGAALEAAPVMGDNILRAIHQYYDNSYDNIGSWNSFTWLGPLWAQASTAPSRLFKCYPSEGGILVPCIIKPPVNTFSFQPDSFNRSFTTVMDFVPTILEMAGIALPPVSENELSVTSTEQTPARPMTTFRGKRVHAVRGKSWMPFFAEGKRVEDDEKWAIHSSTEAIGWELFARGALRKGDWKIVHFSKKRGGVGVGDEGWELFNIAVDPGEINDLASSEPEKLQELLACWHEYVVECGVVWGETAIAPGLSKDEAPEFWEDELDLQKSWMGAKGGECPATCA

SEQ ID NO: 35020 - DNA, 647 bp, Muscodor strobelii
  misc_feature: SGI EST ID NO. CUFF.83342.0
  misc_feature: Variant of the nucleotide sequence at SEQ ID NO 35018
tgactgtttcactgcaatggctggcaagtggcatcttggactccgtgcctgccaagggccgtgggagcgcggatttcaaaaggcattcgctatgcttccaggttgttgcaatcactacggatgggagccagtccaagagagattccccgtcggcggacgaccaattcacgctgagatgggaatgaaagttgacataaccccaaacaagaccgaagacccgaaaggcttctactcaacagactcgtataccgacaagctcttggagttccttaaaggtcgctctgacagtgataaagcaaagccattctttgcgtttcttccatttacagcaccccattggcctttgcaatgctctaaggcgcagcgcgacaaatataaaggcatttacagcgatggaccatatgcattacgcgagcggagattgaagagactcgcggagatgggcatcatcgacaagtcggttatcccgcataagatggagacgacgactcagggtgtggaagagtgggacgacctcacatcagaagaaaagagattgtccagcagagcaatggaggcttatgcgggcatggtagactccattgatgtcaatgtaggcaaagttgtcgactatctgaagagcacgagtgaatacgacaacaccctca

SEQ ID NO: 35021 - DNA, 1572 bp, Muscodor strobelii
  misc_feature: SGI cDNA ID NO. 572113
  misc_feature: Encodes the peptide sequence at SEQ ID NO 35022
atggcgaaaacacgatcaacgtggcgcctcgcaaccccgatgctcctgtactcatgcttctgcttgctcgttggagacgtcctatttggatacgatacggcaagttttggcggtattcttgcgaacatgggttttgtaagccaatttggcacatataatcctaaaaccggcacctacgcatttggctcgttgcgaacctctctcttatctgccctggccttcatagggaagttcataggttgtatcgttgcagctccagcgatcgagaaattcggtcatcgaatcgtcttttatgccttatctatcgtttcggtgatcggtatcatcctggaaataacaagcgccggttggacgaatggaagtggacgatacgcacagtttatcgtcgggcgaatcatcgtttatatctccgttggtctcgtagaggtcgatgtcactacgtaccaagccgagatcgtgccagcttccttccgtggcctggtagttgtctcacttcagctcttcctcaatatcggctcacttctcgcgacgggtatcaatcgggcgttttctacctacacaactgccctcggctggaaaacggtcacaggaattcagttcatcttccctgtcttaatcattacattcacaattttcattcctaattcacctcgatggctcctttccaagggccgcgaggaagaagccgtcgcttgtcttcagcgcctccgcccaaaggacgacaccgctggcgtccagtgcgtggccgaagttcaggctatcaaagaggcactcaagcaacgtgttgaaaaagccccatggcttgatcttgtgcgcggtggaaacctgcgacgaacgatgatcgtaatagtgtactactttttccaacagactactggtcaagcatttgtttccacgtaccaaacgacgttcctcaaggagaatggcttcgaagcacacgctttcacatatccggttatcaactactccctcagtgtcgtggctgtgattcccgggatgtatcttgttgataaaatcggacgtcgctatacccttctgacaacgttcttcttccaaggtctatggatatttgtcttggccggcgttggaagcagggcgaataagagccagacttccttaaacgcggtggtggccgcgttcattctctattggttctcgtacaatatgggcggagcctccattccatatcttctcggaggcgaaatccctacagcagccatccgagagaagacgcagtcattaggcgcagcgtggaacgtgctgtgggcgttcgcgagcaacttcagcatcccatacctgataaaagccctgaaattccaaatcggctgggtctttgggagcatagctctgattgcatttgtgttcacgttcttcgctctgccggagacgaagggactcgctctcgaggagattgacgccgtgttcgcgaaaccttacaatccgttccgccctcaggatgcagttctcgcggatgctgagcgggaggtcgcactgaaagccgaagagataacaaaccacaacaatgggaaggcgaatggagcacatcaagagatggcgaggggtccaagctag

SEQ ID NO: 35022 - protein, 523 aa, Muscodor strobelii
  misc_feature: SGI Peptide ID NO. 572113
  misc_feature (34)..(431): Pfam Id: PF07690 Pfam Desc: Major Facilitator Superfamily
  misc_feature (18)..(475): Pfam Id: PF00083 Pfam Desc: Sugar (and other) transporter
  misc_feature (1)..(486): NCBI GI: 242799200 Blast Desc: sugar transporter, [Talaromyces stipitatus ATCC 10500] gi|218716674|gb|EED16095.1| sugar transporter, [Talaromyces stipitatus ATCC 10500]
  misc_feature (1)..(497): NCBI GI: 46127349 Blast Desc: FG08052.1 [Gibberella zeae PH-1]
  misc_feature (15)..(516): NCBI GI: 169772863 Blast Desc: [Aspergillus oryzae RIB40] gi|83768761|dbj|BAE58898.1| protein product [Aspergillus oryzae]
  misc_feature (15)..(516): NCBI GI: 238490766 Blast Desc: sugar transporter, [Aspergillus flavus NRRL3357] gi|220697033|gb|EED53374.1| sugar transporter, [Aspergillus flavus NRRL3357]
  misc_feature (9)..(518): NCBI GI: 242822996 Blast Desc: sugar transporter, [Talaromyces stipitatus ATCC 10500] gi|218712922|gb|EED12347.1| sugar transporter, [Talaromyces stipitatus ATCC 10500]
  misc_feature (9)..(475): NCBI GI: 212541144 Blast Desc: sugar transporter, [Penicillium marneffei ATCC 18224] gi|210068026|gb|EEA22118.1| sugar transporter, [Penicillium marneffei ATCC 18224]
  misc_feature (12)..(521): NCBI GI: 242791879 Blast Desc: sugar transporter, [Talaromyces stipitatus ATCC 10500] gi|218718432|gb|EED17852.1| sugar transporter, [Talaromyces stipitatus ATCC 10500]
  misc_feature (15)..(511): NCBI GI: 258570979 Blast Desc: [Uncinocarpus reesii 1704] gi|237904563|gb|EEP78964.1| [Uncinocarpus reesii 1704]
  misc_feature (29)..(493): NCBI GI: 256721699 Blast Desc: NECHADRAFT_82450 [Nectria haematococca mpVI 77-13-4]
  misc_feature (12)..(475): NCBI GI: 212535038 Blast Desc: sugar transporter, [Penicillium marneffei ATCC 18224] gi|210070074|gb|EEA24164.1| sugar transporter, [Penicillium marneffei ATCC 18224]
MAKTRSTWRLATPMLLYSCFCLLVGDVLFGYDTASFGGILANMGFVSQFGTYNPKTGTYAFGSLRTSLLSALAFIGKFIGCIVAAPAIEKFGHRIVFYALSIVSVIGIILEITSAGWTNGSGRYAQFIVGRIIVYISVGLVEVDVTTYQAEIVPASFRGLVVVSLQLFLNIGSLLATGINRAFSTYTTALGWKTVTGIQFIFPVLIITFTIFIPNSPRWLLSKGREEEAVACLQRLRPKDDTAGVQCVAEVQAIKEALKQRVEKAPWLDLVRGGNLRRTMIVIVYYFFQQTTGQAFVSTYQTTFLKENGFEAHAFTYPVINYSLSVVAVIPGMYLVDKIGRRYTLLTTFFFQGLWIFVLAGVGSRANKSQTSLNAVVAAFILYWFSYNMGGASIPYLLGGEIPTAAIREKTQSLGAAWNVLWAFASNFSIPYLIKALKFQIGWVFGSIALIAFVFTFFALPETKGLALEEIDAVFAKPYNPFRPQDAVLADAEREVALKAEEITNHNNGKANGAHQEMARGPS

SEQ ID NO: 35023 - DNA, 2070 bp, Muscodor strobelii
  misc_feature: SGI EST ID NO. CUFF.83344.0
  misc_feature: Variant of the nucleotide sequence at SEQ ID NO 35021
tgcgaacataacgcaccctgatcttgttacttgctcgaataagcaggggtccccatgagtggaccacaacaagtgtctcggacctatgcctcctgggtctggggaaaatttgaaggcctgggcttgagagggtagacaactaaatcgaatggcacgtgatgatataatcatttagatgcatggcgcaataatccaaaggagagctatattgacttataacaaggcgctacacgacagcgtcccatgaacgtcgagtactctaatatttacctttcagttattctctcgatagaaatcggcaacatcgtacaaataatggcgaaaacacgatcaacgtggcgcctcgcaaccccgatgctcctgtactcatgcttctgcttgctcgttggagacgtcctatttggatacgatacggcaagttttggcggtattcttgcgaacatgggttttgtaagccaatttggcacatataatcctaaaaccggcacctacgcatttggctcgttgcgaacctctctcttatctgccctggccttcatagggaagttcataggttgtatcgttgcagctccagcgatcgagaaattcggtcatcgaatcgtcttttatgccttatctatcgtttcggtgatcggtatcatcctggaaataacaagcgccggttggacgaatggaagtggacgatacgcacagtttatcgtcgggcgaatcatcgtttatatctccgttggtctcgtagaggtcgatgtcactacgtaccaagccgagatcgtgccagcttccttccgtggcctggtagttgtctcacttcagctcttcctcaatatcggctcacttctcgcgacgggtatcaatcgggcgttttctacctacacaactgccctcggctggaaaacggtcacaggaattcagttcatcttccctgtcttaatcattacattcacaattttcattcctaattcacctcgatggctcctttccaagggccgcgaggaagaagccgtcgcttgtcttcagcgcctccgcccaaaggacgacaccgctggcgtccagtgcgtggccgaagttcaggctatcaaagaggcactcaagcaacgtgttgaaaaagccccatggcttgatcttgtgcgcggtggaaacctgcgacgaacgatgatcgtaatagtgtactactttttccaacagactactggtcaagcatttgtttccacgtaccaaacgacgttcctcaaggagaatggcttcgaagcacacgctttcacatatccggttatcaactactccctcagtgtcgtggctgtgattcccgggatgtatcttgttgataaaatcggacgtcgctatacccttctgacaacgttcttcttccaaggtctatggatatttgtcttggccggcgttggaagcagggcgaataagagccagacttccttaaacgcggtggtggccgcgttcattctctattggttctcgtacaatatgggcggagcctccattccatatcttctcggaggcgaaatccctacagcagccatccgagagaagacgcagtcattaggcgcagcgtggaacgtgctgtgggcgttcgcgagcaacttcagcatcccatacctgataaaagccctgaaattccaaatcggctgggtctttgggagcatagctctgattgcatttgtgttcacgttcttcgctctgccggagacgaagggactcgctctcgaggagattgacgccgtgttcgcgaaaccttacaatccgttccgccctcaggatgcagttctcgcggatgctgagcgggaggtcgcactgaaagccgaagagataacaaaccacaacaatgggaaggcgaatggagcacatcaagagatggcgaggggtccaagctagaaaaatgaggatataaatcagcatcactcagctttgaaaaatttcgaattaagatgtcccttatcagcacctacgatcatacgttaaatctgtagaggtttcgcatgcattttacgaagcttgttacaacattctagcacttaaatcagtagctagagaccaatagagtcgaatacatcgccg

SEQ ID NO: 35024 - DNA, 1953 bp, Muscodor strobelii
  misc_feature: SGI cDNA ID NO. 572114
  misc_feature: Encodes the peptide sequence at SEQ ID NO 35025
atgccgacgtcgttgcattccgcgtcgcacaggggcaagagaactggattccagtcagccgatctcaccctctttacctctgataacgaccatttcccacctccaccagatggaccaggccgggatggaaaccatacccagggtactggcgagacgtcttggcctgccgcctctgggcagcctccaacgggcaaggagcttgagaatttgatacagctatatttctcctctgttcataatttcggcttcttcgctttcattcaccaattgcacttcgctcgcttgcttgagaaaagaaaggctccacgagagctgacactcatcatgattgccagtgcaatgcgttttgcaggtgaggcaacacctgaaaatctggcgcgggcagatgcttgggcggatgctgctatcagtggcttgctctcacgcatatatcaaggcttcggtgctgttcaattaatggcactgcttcttgctcagaattatgacctcaaccgtggcaatttcactagcgcttggttgttagggtccaactgcacacggatgatgcagatgatgtctcttcaaacatttgatagaacttattcacccaactctattgcggggatgcgcctctcgcctctgctctcgtctgaggcactgcgtcgtgtggcctggtcagtcttcttcatagacacaattgttgatggaggacgctacggttttcatattgttgatgaatcttcgtttcgcgttcagttgccttgcgaccaggccagcttcttaagcggtgacccatgtgtgacagaaccccttttctacgaccgaaatgagccgtcttcagctgctagtttcgagaatagggatcgcaatctggatgtttccgcatatctcttgcgaactgcagcagttcgtcgtcgtgctctgcattttgcgtttcgcgcctcacacagagaccagacgcgcgaccagtcacttttagagcttggtgttttagaagctgagattgagaaagttatttcttcgctgccgcgacgacttcacttcaacgcacacaacgtattgcttcatcgagatcggctcatcactttcatattcctacacgtcctgcgtcacaacctctacatagtcctaggccgcgcagccttactcatataccagcaagatccagtagacccagcatatacagatctaatttcgcagatgcgccgcaagcgaattcttcatgctatgcctatcgcaggtgtcgtgtcggaaggtcttaaagtgcacatcagctttgaccctcaaattggggtgcatgcctatgtcgctctagaaatacttctatttgaaccacgacgcctgaatgacgtcgactcactcatagatcctagtgccgctcctgtcattgaggcgatatctcaacttctcgtagttatcagagacattgccaaacgatccgaattcgtcaggcagctttatgtagaggcgatctaccgcctatttcgatgcggttacacttatctactaagccaagatgacttagcgactttttcgagcgaaaggcaacagttcggagaggacgtggctgaatatgactttcgcgacttccgatgggcgagacgggaacgtcaacgtcgatcggtcgtcaatactcccttggcaggtgatgagaccttactcgagctcaaaggtgacggcgagaccaccgcttcatccacaatcccctcgcctcgtctcgacgcgatggatatcaccgcaacaatactcccacaaaccccagtgataccgttacggccgccattgttgcccgagacgtcatcatcgagtactacagggcgtaacttaatgcctctgcagactggattgctccattctcacggaataatcgacccttgcgatgctttcacccttgactggacttcacaaatgcttggaggtgcaggaagcttcgagctcgaaagcggcgatgtattcgactctattggtctctag

SEQ ID NO: 35025 - protein, 650 aa, Muscodor strobelii
  misc_feature: SGI Peptide ID NO. 572114
  misc_feature (181)..(432): NCBI GI: 242799210 Blast Desc: TSTA_012060 [Talaromyces stipitatus ATCC 10500] gi|218716676|gb|EED16097.1| TSTA_012060 [Talaromyces stipitatus ATCC 10500]
  misc_feature (58)..(153): NCBI GI: 242799205 Blast Desc: sulfatase, [Talaromyces stipitatus ATCC 10500] gi|218716675|gb|EED16096.1| sulfatase, [Talaromyces stipitatus ATCC 10500]
  misc_feature (41)..(362): NCBI GI: 238502941 Blast Desc: conserved [Aspergillus flavus NRRL3357] gi|220691514|gb|EED47862.1| conserved [Aspergillus flavus NRRL3357]
  misc_feature (62)..(564): NCBI GI: 156037636 Blast Desc: SS1G_12532 [Sclerotinia sclerotiorum 1980] gi|154697940|gb|EDN97678.1| SS1G_12532 [Sclerotinia sclerotiorum 1980]
  misc_feature (62)..(470): NCBI GI: 256725784 Blast Desc: [Nectria haematococca mpVI 77-13-4]
  misc_feature (68)..(430): NCBI GI: 154316317 Blast Desc: BC1G_03744 [Botryotinia fuckeliana B05.10] gi|150846530|gb|EDN21723.1| BC1G_03744 [Botryotinia fuckeliana B05.10]
  misc_feature (68)..(375): NCBI GI: 115389448 Blast Desc: conserved [Aspergillus terreus NIH2624] gi|114194625|gb|EAU36325.1| conserved [Aspergillus terreus NIH2624]
  misc_feature (38)..(375): NCBI GI: 242795892 Blast Desc: conserved [Talaromyces stipitatus ATCC 10500] gi|218719273|gb|EED18693.1| conserved [Talaromyces stipitatus ATCC 10500]
  misc_feature (68)..(375): NCBI GI: 67527638 Blast Desc: AN4096.2 [Aspergillus nidulans FGSC A4] gi|40740167|gb|EAA59357.1| AN4096.2 [Aspergillus nidulans FGSC A4] gi|259481314|tpe|CBF74715.1| TPA: Zn(II)2Cys6 transcription
  misc_feature (68)..(375): NCBI GI: 238504008 Blast Desc: C6 transcription factor, [Aspergillus flavus NRRL3357] gi|220690707|gb|EED47056.1| C6 transcription factor, [Aspergillus flavus NRRL3357]
MPTSLHSASHRGKRTGFQSADLTLFTSDNDHFPPPPDGPGRDGNHTQGTGETSWPAASGQPPTGKELENLIQLYFSSVHNFGFFAFIHQLHFARLLEKRKAPRELTLIMIASAMRFAGEATPENLARADAWADAAISGLLSRIYQGFGAVQLMALLLAQNYDLNRGNFTSAWLLGSNCTRMMQMMSLQTFDRTYSPNSIAGMRLSPLLSSEALRRVAWSVFFIDTIVDGGRYGFHIVDESSFRVQLPCDQASFLSGDPCVTEPLFYDRNEPSSAASFENRDRNLDVSAYLLRTAAVRRRALHFAFRASHRDQTRDQSLLELGVLEAEIEKVISSLPRRLHFNAHNVLLHRDRLITFIFLHVLRHNLYIVLGRAALLIYQQDPVDPAYTDLISQMRRKRILHAMPIAGVVSEGLKVHISFDPQIGVHAYVALEILLFEPRRLNDVDSLIDPSAAPVIEAISQLLVVIRDIAKRSEFVRQLYVEAIYRLFRCGYTYLLSQDDLATFSSERQQFGEDVAEYDFRDFRWARRERQRRSVVNTPLAGDETLLELKGDGETTASSTIPSPRLDAMDITATILPQTPVIPLRPPLLPETSSSSTTGRNLMPLQTGLLHSHGIIDPCDAFTLDWTSQMLGGAGSFELESGDVFDSIGL

SEQ ID NO: 35026 - DNA, 526 bp, Muscodor strobelii
  misc_feature: SGI EST ID NO. CUFF.83351.0
  misc_feature: Variant of the nucleotide sequence at SEQ ID NO 35024
ggcggatgctgctatcagtggcttgctctcacgcatatatcaaggcttcggtgctgttcaattaatggcactgcttcttgctcagaattatgacctcaaccgtggcaatttcactagcgcttggttgttagggtccaactgcacacggatgatgcagatgatgtctcttcaaacatttgatagaacttattcacccaactctattgcggggatgcgcctctcgcctctgctctcgtctgaggcactgcgtcgtgtggcctggtcagtcttcttcatagacacaattgttgatggaggacgctacggttttcatattgttgatgaatcttcgtttcgcgttcagttgccttgcgaccaggccagcttcttaagcggtgacccatgtgtgacagaaccccttttctacgaccgaaatgagccgtcttcagctgctagtttcgagaatagggatcgcaatctggatgtttccgcatatctcttgcgaactgcagcagttcgtcgtcgtgctctgcattttgcgtttcgc

SEQ ID NO: 35027 - DNA, 852 bp, Muscodor strobelii
  misc_feature: SGI cDNA ID NO. 572115
  misc_feature: Elevated expression when VOC is produced
  misc_feature: Encodes the peptide sequence at SEQ ID NO 35028
atggcgactacccataaccccaccgccgtggccgtcgtgttgggccccggaggcatcggcgccgtcatcgccagacgcgtcgcaaacgggcggcacttggtcttggccgaccgctcaccccacgtcctggaaactgcagccactctcctcaggtccgaagggttcaaagtccacgagcacatcgtcgacatctgcgacgcggcttctatctcgaaattagcggcagacgcagcggcgctcgggcgtcttgataccgtcgtgcacgtcgccggactcaccccgtcttgcggagatgctgccaagatcatggaagtcgacttgctcggaaccgccatcgtcatcgacgagttcctcccgcatctcgcgccgggcgcatcgctcgtctgcatcgcgagcatggcgggccggtcctcggcgatagacaagctcgccaaatccgaagagctggacacacatctggccaaggcgcccacggcaaaactgatggaccatccggttgtccagaagctcgcggcagaccaccctggcgccgcgtacgggtttgcgaaacgagggaacgtgctgcgcgtacagggcgccgcgctagcttacggggccagagggcactgccgaattaactcgatcagccccggcgtcatcatgacgcaggccctcgagatggagctggcgagtcagcgcggcgagacgattaagggcctggtcgcgagcgcgcctgtcaatcggctcgggtcgcctagtgacatcgctaatgctgtggcctttcttgttggtcctgattcttcgttcattacgggcacggatcttttggttgatgggggctcgattgctgcgcagaattggggctcaaaataa

SEQ ID NO: 35028 - protein, 283 aa, Muscodor strobelii
  misc_feature: SGI Peptide ID NO. 572115
  misc_feature (9)..(152): Pfam Id: PF00106 Pfam Desc: short chain dehydrogenase
  misc_feature (9)..(135): Pfam Id: PF00106 Pfam Desc: short chain dehydrogenase
  misc_feature (12)..(280): NCBI GI: 256731598 Blast Desc: NECHADRAFT_85203 [Nectria haematococca mpVI 77-13-4]
  misc_feature (7)..(276): NCBI GI: 171695654 Blast Desc: protein product [Podospora anserina] gi|170948069|emb|CAP60233.1| protein product [Podospora anserina]
  misc_feature (10)..(280): NCBI GI: 51893013 Blast Desc: short chain dehydrogenase [Symbiobacterium thermophilum IAM 14863] gi|51856702|dbj|BAD40860.1| short-chain dehydrogenase/oxidoreductase [Symbiobacterium thermophilum IAM
  misc_feature (7)..(277): NCBI GI: 282861477 Blast Desc: short-chain dehydrogenase/reductase SDR [Streptomyces sp. ACTE] gi|282563293|gb|EFB68831.1| short-chain dehydrogenase/reductase SDR [Streptomyces sp. ACTE]
  misc_feature (7)..(276): NCBI GI: 116181316 Blast Desc: CHGG_01286 [Chaetomium globosum CBS 148.51] gi|88185583|gb|EAQ93051.1| CHGG_01286 [Chaetomium globosum CBS 148.51]
  misc_feature (8)..(281): NCBI GI: 256377106 Blast Desc: short-chain dehydrogenase/reductase SDR [Actinosynnema mirum DSM 43827] gi|255921409|gb|ACU36920.1| short-chain dehydrogenase/reductase SDR [Actinosynnema mirum DSM 43827]
  misc_feature (10)..(281): NCBI GI: 258634150 Blast Desc: short-chain dehydrogenase/reductase SDR [Pantoea sp. At-9b] gi|258536503|gb|EEW04852.1| short-chain dehydrogenase/reductase SDR [Pantoea sp. At-9b]
  misc_feature (7)..(281): NCBI GI: 280965372 Blast Desc: short-chain dehydrogenase/reductase SDR [Frankia sp. EuI1c] gi|270730624|gb|EFA58873.1| short-chain dehydrogenase/reductase SDR [Frankia sp. EuI1c]
  misc_feature (10)..(277): NCBI GI: 183980276 Blast Desc: short-chain type dehydrogenase/reductase [Mycobacterium marinum M] gi|183173602|gb|ACC38712.1| short-chain type dehydrogenase/reductase [Mycobacterium marinum M]
  misc_feature (10)..(282): NCBI GI: 240168041 Blast Desc: short chain dehydrogenase [Mycobacterium kansasii ATCC 12478]
  misc_feature (15)..(276): SWISSPROT Homolog: EC 1.1.1.236 Tropinone reductase II
  misc_feature: Useful for introducing or modulating the production of volatile compounds
MATTHNPTAVAVVLGPGGIGAVIARRVANGRHLVLADRSPHVLETAATLLRSEGFKVHEHIVDICDAASISKLAADAAALGRLDTVVHVAGLTPSCGDAAKIMEVDLLGTAIVIDEFLPHLAPGASLVCIASMAGRSSAIDKLAKSEELDTHLAKAPTAKLMDHPVVQKLAADHPGAAYGFAKRGNVLRVQGAALAYGARGHCRINSISPGVIMTQALEMELASQRGETIKGLVASAPVNRLGSPSDIANAVAFLVGPDSSFITGTDLLVDGGSIAAQNWGSK

SEQ ID NO: 35029 - DNA, 1841 bp, Muscodor strobelii
  misc_feature: SGI EST ID NO. CUFF.83359.0
  misc_feature: Variant of the nucleotide sequence at SEQ ID NO 35027
tgagaatgctggcttggaagaaacagctgtcacccgaagacatctcctcagagtgaaggaaattagcacaataaattctccctgtttttttatatgaatgcttttcatatacctaaccagtagttcaaaatgttgacagggccggctttacgcctgtgctgacccagatagatagcccaccgcctcgtcaacagataacacccaagccgagttgggtatgaccgtgttcatcagctcgtcatgcacgcgctggttggggtcccagcacgcatccctcacgacactgacgacgaagtccagatctgtatgatttccaacacgcttctgcaacttcatcacccatctgcccccctagggcaaagaggtgcatcattctttaaaacagtaaggaaatgggaacgagtcaatcacatcatcaccgaggcatcaacgcaatctgtgggatgcgcaccgtgttgcattagccaagacagctagtttaggatacctaattagtcctttgaattgcactcgttcttttatagttaatactggcttcctgcaacgctcgtcgacatcttaagcatttcgtatgcttttagctctttgcctataatattagttatttttataggtactactggtaacaattactatggcgactacccataaccccaccgccgtggccgtcgtgttgggccccggaggcatcggcgccgtcatcgccagacgcgtcgcaaacgggcggcacttggtcttggccgaccgctcaccccacgtcctggaaactgcagccactctcctcaggtccgaagggttcaaagtccacgagcacatcgtcgacatctgcgacgcggcttctatctcgaaattagcggcagacgcagcggcgctcgggcgtcttgataccgtcgtgcacgtcgccggactcaccccgtcttgcggagatgctgccaagatcatggaagtcgacttgctcggaaccgccatcgtcatcgacgagttcctcccgcatctcgcgccgggcgcatcgctcgtctgcatcgcgagcatggcgggccggtcctcggcgatagacaagctcgccaaatccgaagagctggacacacatctggccaaggcgcccacggcaaaactgatggaccatccggttgtccagaagctcgcggcagaccaccctggcgccgcgtacgggtttgcgaaacgagggaacgtgctgcgcgtacagggcgccgcgctagcttacggggccagagggcactgccgaattaactcgatcagccccggcgtcatcatgacgcaggccctcgagatggagctggcgagtcagcgcggcgagacgattaagggcctggtcgcgagcgcgcctgtcaatcggctcgggtcgcctagtgacatcgctaatgctgtggcctttcttgttggtcctgattcttcgttcattacgggcacggatcttttggttgatgggggctcgattgctgcgcagaattggggctcaaaataattgcttccctttctaacgttgcaaaatatgaacaagaaagttttgccgacctcctccgctgcactcgcccacgatagtcttaatgacatgagacaacgagccagaggtaaggtaggccaccagtgggcacgaccaccttcagaacctaccacagtaccgaggaccttgattttcgtggtcatgaacactctctgcctcctccacaaaagaggtttgaaaggggttaggtatcaacaggatacaaccctacccccacatggtatgattttatagacatgcagcattaaatcagtaacactacaagtagaagaagtttcttcacccgtgttcttatatacatttaattacaatccag

SEQ ID NO: 35030 - DNA, 1071 bp, Muscodor strobelii
  misc_feature: SGI cDNA ID NO. 572116
  misc_feature: Encodes the peptide sequence at SEQ ID NO 35031
atgtcttcgtggtcccagacgtgcgaagcgtctactgaggatctcgctatggacctatcaaataactccactctcatcgacgaccgccgctctaccagcattacgcggacgtttccctgcttttccgaactacctacggagctacgtctcgcggtctgggaatgtgccctagatgaagaagcctgtatcagactgattatgctctgggacatccgcgtcatccctttcaagcatttaatcagccccttgttactggtcaaccaagagagtcgacggtgtgcattgaaggtgtatacgacgaaactccaagtctacactcttcctgaaccaaagctagattttgaggaatttgtagcgccatcctcgcgccttgatgcatccgaagatcgaacgttttactggcctggcgaacgacggcaggacgatatacggctgttcggccagaacacggtcaacatgatttccaatgccgaaatgtataagcagtcaggggtcatctatatcaacaccagcagcgacacattcgtcatatttgcggatggtgccagtgattcgacgacatacttggaggacgagttaccatttctcaaaccgttctggactagtgcatccaggcggcttagaaaccacgacatagagcaattagaatggcatcatgttacctctaagctaagctcttcggctcttcagacggtcgaaatggtggtggtagccgagagaggccggtggaccgaccataatccggaacgcaactatattccaggatccatctctaaccattggcttgactttgcccactactgcgacgagtatggggagcgctggacctatgacgaggaggacaccaagaccatctggaagtcggacgtattcactggtataaaattctggggccacttgtggtttcatggttcagacacgtcgatcctagagcagctttcttccggtcatgataagtctgacttcgatattcgacaatgggaaaaagaagattgtggcgacgctggagtgatgataaatgatttcataggactcggagacatcgaggaacggtatcttgcgttgcaataa

SEQ ID NO: 35031 - protein, 356 aa, Muscodor strobelii
  misc_feature: SGI Peptide ID NO. 572116
MSSWSQTCEASTEDLAMDLSNNSTLIDDRRSTSITRTFPCFSELPTELRLAVWECALDEEACIRLIMLWDIRVIPFKHLISPLLLVNQESRRCALKVYTTKLQVYTLPEPKLDFEEFVAPSSRLDASEDRTFYWPGERRQDDIRLFGQNTVNMISNAEMYKQSGVIYINTSSDTFVIFADGASDSTTYLEDELPFLKPFWTSASRRLRNHDIEQLEWHHVTSKLSSSALQTVEMVVVAERGRWTDHNPERNYIPGSISNHWLDFAHYCDEYGERWTYDEEDTKTIWKSDVFTGIKFWGHLWFHGSDTSILEQLSSGHDKSDFDIRQWEKEDCGDAGVMINDFIGLGDIEERYLALQ

SEQ ID NO: 35032 - DNA, 1095 bp, Muscodor strobelii
  misc_feature: SGI cDNA ID NO. 572117
  misc_feature: Encodes the peptide sequence at SEQ ID NO 35033
atggctcagcaccgactatcgtactatctggccaagcgcccggaagggaacatggtaccgggagagacgtttcaagccagagttgaggcggcacccacggcgaacgatttaaaagacgatgaagtactactcgagacgttatatttgtcgcttgatccagctgcaagacggcaggttagcgccgagagatcatacgcacctcctgttgagattggggccctcagtgagtggcgagcaaagaatgaaatgcatcaagtgctgatcgctcggcatggtcacggtgcagtgagaggatatgcactcacccgcgtactcgcgagcaagactaccaaggttcaaccgggtgacgttgtatgtgctccatgcggctggacggagatttccattatgccagcatcagagcttgatattgtgacactaccggaaggatgtaaaatcacggatgcactgggtgtcctcggagggacaggactgaccgtgtacatcggaatgacgaagtacggcaagcccaagcccggtgagaccgtcattgtgtccgcagccgctggggctactggcctatgcgtagggcagattgcaaaaatattcggtgcacgcgttgttggcatcgcaggatcagacggaaaatgtagtatgctacagaaagaactcggctttgatgtcgccctgaactacaagtccccaacatttgcagaggaccttgttctggctacgccagattacgttgatctatactgggataacgtgggcggtagggtccttgatcttgtactttcacgagcagcgcagttcagccgattcgtcatttgtggggctatcagcatgtacaagggagcagagggccatctcatgcagaatattggcttcattgcctcacagaggataacgatgcaaggctttgtgatattcgatcacatggctgatatctccgcagctagagaagtgttgactcagtggttacgtgcggggaaactgataccgaaagagcacattgtgacaggagggctgagcaacgtagaggaggctattgctatgttgttcagtggcgccaatacaggaaagctgctgctggaggtaaaggcacccgaaaggtga

SEQ ID NO: 35033 - protein, 364 aa, Muscodor strobelii
  misc_feature: SGI Peptide ID NO. 572117
  misc_feature (172)..(318): Pfam Id: PF00107 Pfam Desc: Zinc-binding dehydrogenase
  misc_feature (1)..(362): NCBI GI: 116203435 Blast Desc: CHGG_09601 [Chaetomium globosum CBS 148.51] gi|88175729|gb|EAQ83197.1| CHGG_09601 [Chaetomium globosum CBS 148.51]
  misc_feature (7)..(363): NCBI GI: 171679675 Blast Desc: protein product [Podospora anserina] gi|170939463|emb|CAP64691.1| protein product [Podospora anserina]
  misc_feature (1)..(363): NCBI GI: 256728879 Blast Desc: [Nectria haematococca mpVI 77-13-4]
  misc_feature (1)..(360): NCBI GI: 154304584 Blast Desc: BC1G_08031 [Botryotinia fuckeliana B05.10] gi|150853931|gb|EDN29123.1| BC1G_08031 [Botryotinia fuckeliana B05.10]
  misc_feature (7)..(359): NCBI GI: 189203791 Blast Desc: NADP-dependent leukotriene B4 12-hydroxydehydrogenase [Pyrenophora tritici-repentis Pt-1C-BFP] gi|187985330|gb|EDU50818.1| NADP-dependent leukotriene B4
  misc_feature (6)..(362): NCBI GI: 261358021 Blast Desc: NADP-dependent leukotriene B4 12-hydroxydehydrogenase [Verticillium albo-atrum VaMs.102]
  misc_feature (1)..(360): NCBI GI: 156042518 Blast Desc: SS1G_11056 [Sclerotinia sclerotiorum 1980] gi|154695443|gb|EDN95181.1| SS1G_11056 [Sclerotinia sclerotiorum 1980]
  misc_feature (7)..(363): NCBI GI: 169602283 Blast Desc: SNOG_04138 [Phaeosphaeria nodorum SN15] gi|111066778|gb|EAT87898.1| SNOG_04138 [Phaeosphaeria nodorum SN15]
  misc_feature (1)..(363): NCBI GI: 39969607 Blast Desc: MGG_10413 [Magnaporthe grisea 70-15] gi|145015117|gb|EDJ99685.1| MGG_10413 [Magnaporthe grisea 70-15]
  misc_feature (10)..(359): NCBI GI: 67541294 Blast Desc: AN6817.2 [Aspergillus nidulans FGSC A4] gi|40739026|gb|EAA58216.1| AN6817.2 [Aspergillus nidulans FGSC A4] gi|259480412|tpe|CBF71519.1| TPA: alcohol dehydrogenase, FGSC
  misc_feature (4)..(358): SWISSPROT Homolog: EC 1.3.1.74 2-alkenal reductase
  misc_feature (4)..(358): SWISSPROT Homolog: EC 1.3.1.48 15-oxoprostaglandin 13-oxidase
MAQHRLSYYLAKRPEGNMVPGETFQARVEAAPTANDLKDDEVLLETLYLSLDPAARRQVSAERSYAPPVEIGALSEWRAKNEMHQVLIARHGHGAVRGYALTRVLASKTTKVQPGDVVCAPCGWTEISIMPASELDIVTLPEGCKITDALGVLGGTGLTVYIGMTKYGKPKPGETVIVSAAAGATGLCVGQIAKIFGARVVGIAGSDGKCSMLQKELGFDVALNYKSPTFAEDLVLATPDYVDLYWDNVGGRVLDLVLSRAAQFSRFVICGAISMYKGAEGHLMQNIGFIASQRITMQGFVIFDHMADISAAREVLTQWLRAGKLIPKEHIVTGGLSNVEEAIAMLFSGANTGKLLLEVKAPER

SEQ ID NO: 35034 - DNA, 337 bp, Muscodor strobelii
  misc_feature: SGI EST ID NO. CUFF.83371.0
  misc_feature: Variant of the nucleotide sequence at SEQ ID NO 35032
cggatgcactgggtgtcctcggagggacaggactgaccgtgtacatcggaatgacgaagtacggcaagcccaagcccggtgagaccgtcattgtgtccgcagccgctggggctactggcctatgcgtagggcagattgcaaaaatattcggtgcacgcgttgttggcatcgcaggatcagacggaaaatgtagtatgctacagaaagaactcggctttgatgtcgccctgaactacaagtccccaacatttgcagaggaccttgttctggctacgccagattacgttgatctatactgggataacgtgggcggtagggtccttgatcttgtactttc

SEQ ID NO: 35035 - DNA, 1728 bp, Muscodor strobelii
  misc_feature: SGI cDNA ID NO. 572118
  misc_feature: Elevated expression when VOC is produced
  misc_feature: Encodes the peptide sequence at SEQ ID NO 35036
atggagttttcagagaaaggttcgctgctcccgactcaacgtaatattacgtcgcagtcgcgatggagacttgtcggcaagtttctcattcacgcaattgcgatcgcagtgattttaagagggtcattccagttatatgacaggctcactgcgggtgaggacccagcaacatcgctcgcaaaatgccctcaggtcgagcctctcgtcccaggtcggcaaacagaggccctcaagtctatggaagagtttattctttccgaacaattccgtaacgaaactgtggcccggttgcaggctgcagtccgcattccgaccgtctcatacgacgatcttgcgccagtaggcgaagattcgagatgggatgctttttatgattttgctgactacctcaaaactacattcccattagtacatagccaactgaggctcgagaaagtcaacacacatgggcttttatacacttggcatggctcggatccacacgctcgcccgaccgtactcatgggtcatcaagacacggtacctgtggatggttctacaagagaccaatggacatatccaccttttgatggtcattttgatggcagatatgtctggggtcgcggttcgaacgactgcaagaatgttgtcattggcattttggaatccgtggaacttctcctccaagctgattttaagccgactcggacggtcgtcctgtctttcggatttgatgaggagatttcagggtggaacggagcaaagcaacttgctactactttggtccaccgctacggcaaagatggagcagccgttcttgtcgatgaaggagctggtacgtcctctgcgtgggggagtcttttctcccaaccaggtgtcggggaaaaaggatacatcgacgcggaaataataatacgtatgcccggaggtcactcctctatcccgccagcacacaatgggattggcgttgcctccgagctgatcactttaatcgaggccaacccctatgagcctcatttccacgccgaaaatcctttcttaggactgcttgagtgtggcaatgcgcatagcccaaaatttccctctcagctcaagaaacatcttccttggaaagagcggacctgtgcagcgaagaaagacaagcttgctcttgaagccgccaagcttggtgacgaggtgaaatacctcttcacaacttcattagccccggatatcatcagtggcggtgtgaagaccaatgctctaccagaacggactcgagttgtcgtcaatcatcgcattaatgttggtgacacggtccgcagtgtgcaatctaagatcgcttcactcgccgagcaggtagcagcaaagcacaatctcaccgttcaggcgttcaatgacgagcctgaagcaccgcgtactatcaaactcaacagcggtatacacgtgttggaacctgccccggtgacaccaaccagcgttgacggcaccacgccatactccgtactttcaggaactacccgcgctttgtacggtcccgaaatgctcgttgcgcctggtatcatgacaggcaatacagatacgaggttctactggaatctcacacagcatatctttcgctacggcccaggttgggatcctgaaggcggaagtatgttcgatgacggtattcacaccgttgatgaacgtgtctccgtggtcgcgcacacccgaggagttcagtggtattctgcctttattaggaatatggatgaagcggatcttgcctga

SEQ ID NO: 35036 - protein, 575 aa, Muscodor strobelii
  misc_feature: SGI Peptide ID NO. 572118
  misc_feature (286)..(445): Pfam Id: PF07687 Pfam Desc: Peptidase dimerisation domain
  misc_feature (166)..(568): Pfam Id: PF01546 Pfam Desc: Peptidase family M20/M25/M40
  misc_feature (49)..(571): NCBI GI: 189192755 Blast Desc: carboxypeptidase s [Pyrenophora tritici-repentis Pt-1C-BFP] gi|187978280|gb|EDU44906.1| carboxypeptidase s [Pyrenophora tritici-repentis Pt-1C-BFP]
  misc_feature (49)..(574): NCBI GI: 145611540 Blast Desc: MGG_00309 [Magnaporthe grisea 70-15] gi|145018810|gb|EDK03089.1| MGG_00309 [Magnaporthe grisea 70-15]
  misc_feature (60)..(574): NCBI GI: 164425773 Blast Desc: NCU11129 [Neurospora crassa OR74A] gi|157071059|gb|EDO65177.1| conserved [Neurospora crassa OR74A]
  misc_feature (80)..(574): NCBI GI: 261354923 Blast Desc: carboxypeptidase S [Verticillium albo-atrum VaMs.102]
  misc_feature (61)..(572): NCBI GI: 171688264 Blast Desc: protein product [Podospora anserina] gi|170944094|emb|CAP70204.1| protein product [Podospora anserina]
  misc_feature (60)..(549): NCBI GI: 116197008 Blast Desc: CHGG_05102 [Chaetomium globosum CBS 148.51] gi|88181015|gb|EAQ88483.1| CHGG_05102 [Chaetomium globosum CBS 148.51]
  misc_feature (58)..(560): NCBI GI: 46102626 Blast Desc: FG00017.1 [Gibberella zeae PH-1]
  misc_feature (61)..(445): NCBI GI: 169607092 Blast Desc: SNOG_06599 [Phaeosphaeria nodorum SN15] gi|160707152|gb|EAT86430.2| SNOG_06599 [Phaeosphaeria nodorum SN15]
  misc_feature (29)..(572): NCBI GI: 170088014 Blast Desc: [Laccaria bicolor S238N-H82] gi|164650430|gb|EDR14671.1| [Laccaria bicolor S238N-H82]
  misc_feature (6)..(572): NCBI GI: 169849574 Blast Desc: CC1G_09019 [Coprinopsis cinerea okayama7#130] gi|116507442|gb|EAU90337.1| CC1G_09019 [Coprinopsis cinerea okayama7#130]
  misc_feature (10)..(571): SWISSPROT Homolog: EC 3.4.17.4 Gly-Xaa carboxypeptidase
  misc_feature: Useful for introducing or modulating the production of volatile compounds
MEFSEKGSLLPTQRNITSQSRWRLVGKFLIHAIAIAVILRGSFQLYDRLTAGEDPATSLAKCPQVEPLVPGRQTEALKSMEEFILSEQFRNETVARLQAAVRIPTVSYDDLAPVGEDSRWDAFYDFADYLKTTFPLVHSQLRLEKVNTHGLLYTWHGSDPHARPTVLMGHQDTVPVDGSTRDQWTYPPFDGHFDGRYVWGRGSNDCKNVVIGILESVELLLQADFKPTRTVVLSFGFDEEISGWNGAKQLATTLVHRYGKDGAAVLVDEGAGTSSAWGSLFSQPGVGEKGYIDAEIIIRMPGGHSSIPPAHNGIGVASELITLIEANPYEPHFHAENPFLGLLECGNAHSPKFPSQLKKHLPWKERTCAAKKDKLALEAAKLGDEVKYLFTTSLAPDIISGGVKTNALPERTRVVVNHRINVGDTVRSVQSKIASLAEQVAAKHNLTVQAFNDEPEAPRTIKLNSGIHVLEPAPVTPTSVDGTTPYSVLSGTTRALYGPEMLVAPGIMTGNTDTRFYWNLTQHIFRYGPGWDPEGGSMFDDGIHTVDERVSVVAHTRGVQWYSAFIRNMDEADLA

SEQ ID NO: 35037 - DNA, 2161 bp, Muscodor strobelii
  misc_feature: SGI EST ID NO. CUFF.83374.0
  misc_feature: Variant of the nucleotide sequence at SEQ ID NO 35035
cccccactggcgctttaccgtcaccattgaagatccctgccagatccagcgccgctgttagataacgctatgcccctctattgcccgccttctcttgctgacaaaagcgcccatgacatcgatgacttcgactgatctgcccgcagggaaagtctccccctctcactagtgttatactcattaatatcttttataatggagttttcagagaaaggttcgctgctcccgactcaacgtaatattacgtcgcagtcgcgatggagacttgtcggcaagtttctcattcacgcaattgcgatcgcagtgattttaagagggtcattccagttatatgacaggctcactgcgggtgaggacccagcaacatcgctcgcaaaatgccctcaggtcgagcctctcgtcccaggtcggcaaacagaggccctcaagtctatggaagagtttattctttccgaacaattccgtaacgaaactgtggcccggttgcaggctgcagtccgcattccgaccgtctcatacgacgatcttgcgccagtaggcgaagattcgagatgggatgctttttatgattttgctgactacctcaaaactacattcccattagtacatagccaactgaggctcgagaaagtcaacacacatgggcttttatacacttggcatggctcggatccacacgctcgcccgaccgtactcatgggtcatcaagacacggtacctgtggatggttctacaagagaccaatggacatatccaccttttgatggtcattttgatggcagatatgtctggggtcgcggttcgaacgactgcaagaatgttgtcattggcattttggaatccgtggaacttctcctccaagctgattttaagccgactcggacggtcgtcctgtctttcggatttgatgaggagatttcagggtggaacggagcaaagcaacttgctactactttggtccaccgctacggcaaagatggagcagccgttcttgtcgatgaaggagctggtacgtcctctgcgtgggggagtcttttctcccaaccaggtgtcggggaaaaaggatacatcgacgcggaaataataatacgtatgcccggaggtcactcctctatcccgccagcacacaatgggattggcgttgcctccgagctgatcactttaatcgaggccaacccctatgagcctcatttccacgccgaaaatcctttcttaggactgcttgagtgtggcaatgcgcatagcccaaaatttccctctcagctcaagaaacatcttccttggaaagagcggacctgtgcagcgaagaaagacaagcttgctcttgaagccgccaagcttggtgacgaggtgaaatacctcttcacaacttcattagccccggatatcatcagtggcggtgtgaagaccaatgctctaccagaacggactcgagttgtcgtcaatcatcgcattaatgttggtgacacggtccgcagtgtgcaatctaagatcgcttcactcgccgagcaggtagcagcaaagcacaatctcaccgttcaggcgttcaatgacgagcctgaagcaccgcgtactatcaaactcaacagcggtatacacgtgttggaacctgccccggtgacaccaaccagcgttgacggcaccacgccatactccgtactttcaggaactacccgcgctttgtacggtcccgaaatgctcgttgcgcctggtatcatgacaggcaatacagatacgaggttctactggaatctcacacagcatatctttcgctacggcccaggttgggatcctgaaggcggaagtatgttcgatgacggtattcacaccgttgatgaacgtgtctccgtggtcgcgcacacccgaggagttcagtggtattctgcctttattaggaatatggatgaagcggatcttgcctgattcacccgaataccttaaggcttgtaagagtcataagcgcctggtaatgtctcggatggaaagcgcttgcgagctattgtagtcaggtagtcattacgtgatgtatcccatccatagtaagctcggcatcgatttgccacctcagcgatcgtaagtgtcgaagttgttgcaaagagccgcaggaaactggactttctatagaccttaagttaccgaatatatcctttcagagtgtaag

SEQ ID NO: 35038 - DNA, 1983 bp, Muscodor strobelii
  misc_feature: SGI cDNA ID NO. 572119
  misc_feature: Encodes the peptide sequence at SEQ ID NO 35039
atgcgacttctcaatgtcaagaccctcaaattggaggatttcctctccaccaagggcaggccaaaatacgccattttatcccatacctggctcgaagaggaggtcttattccaccatattcaaaacctcgaacggccagaattggagaaattgaagggattcaccaaagtgaaagcgagctgtgcccaagcccagtccgacggttacgagtacatatggatcgacacctgctgcatcgacaagtcaagtagcgcagagttgtcggaagcgataaattcaatgtggtcatggtatcgacagtcagatgtctgttacggattcctcgcagatgtgaagaaaggggaagagagggcggttcgccggagcagatggtttcagagaggatggacgctgcaggagctgatcgcgccagaaagactaaggttcttcgataaaacttggagtgaaatggatgatcggatacggatggcaccgcttctaagtgagatcacaggcattgaccaggacgtcttgacacggaactatcgacgcggacatactcacgccgtacagcctcacaatctgctatgtgtcgtatgtgggctaccaacgtcaattgacgagatactccggaagactagcgtgtctgtcaagatgtcttggagtgcgtctcgagaaacgacacggggggaagacagatcttactgtcttttgggtctattcggtttgaatatgccgctactgtatggagagggagagtcgtctgcatggatacggctcctgactgagatcatgaagcgaaccaaagaacagtcgatattggcatttgacaacagacctaagaagaactatatgaatgggcaagtagtgctcgcttcaagcacaccatttgatggcggtatttttgcagaaagctctcggcagtacatgcccaatgtcctgctcccagaaacatcccagcaaagatacatcgagctcattggcgacgatttagtactagacgtctggatttgttcattgattcccaaggaccccgacaattccagcgtcagtcggttctgggacgataccaagataggtctgcttgattgcaagatcacaggagaatcaatggcttggccagcgattgttctcagatcggtacctgaatccaattctaaatacattcgcctgcgtgacaatctcttaaaggtagatgctcaagaccctccgacagtcaaggcatgtcgtgaattgaaacatcaacaaacaatgattgtactggactctcataagcttacctatgatctaggaagtgcccgactacagaggattacaatcaccaacaaagatccgatcacaaatcttgagacatcaaacctgactaagcccctgaggatcttacccatcaagcagcctgatagcttgaagtacaagctggactcaagcttcccaaaagcgcaaggcgactacatcgagaagatacccgtattctggagcggaagacacaagatcatgggtatggcaatattcagcgatcagaacaagaacccgttcatgattacatggggacccgaaggcagtgacaaacgcagcctatggtgtaagatctcgaaactttctaaagcggaactctctgagtatgcggcatgcaaagacgatttggcagcaacgctaaggtcgaaggcttggaaaaataaccgcagtctccgacttgaagacttcggcgtcgactatagactttatgacaaggatgctgctgtgtttggagatgtctacttgtccatcgagatacaagatgtcaaggttcttgacagagaaatctggcagctttgggttaacatctcgccgatcaagcgaaaggacaatgatgatagcaagcggaagcatgatgatgagaagtggaagaaaagcgatgacaagcgaaatcacgaggatgacgacgatgacaagaagaaaaaaggcaacaataaggagaaaagaggtgacgagaagcctaagcaagcggacgtcaccaagcgctga

SEQ ID NO: 35039 - protein, 660 aa, Muscodor strobelii
  misc_feature: SGI Peptide ID NO. 572119
  misc_feature (23)..(133): Pfam Id: PF06985 Pfam Desc: Heterokaryon incompatibility protein (HET)
  misc_feature (23)..(116): Pfam Id: PF06985 Pfam Desc: Heterokaryon incompatibility protein (HET)
  misc_feature (118)..(133): Pfam Id: PF06985 Pfam Desc: Heterokaryon incompatibility protein (HET)
  misc_feature (1)..(528): NCBI GI: 189190380 Blast Desc: HET domain containing protein [Pyrenophora tritici-repentis Pt-1C-BFP] gi|187973135|gb|EDU40634.1| HET domain containing protein [Pyrenophora tritici-repentis
  misc_feature (1)..(383): NCBI GI: 256733553 Blast Desc: [Nectria haematococca mpVI 77-13-4]
  misc_feature (1)..(421): NCBI GI: 46110399 Blast Desc: FG02081.1 [Gibberella zeae PH-1]
  misc_feature (1)..(395): NCBI GI: 46128083 Blast Desc: FG08419.1 [Gibberella zeae PH-1]
  misc_feature (1)..(269): NCBI GI: 169776259 Blast Desc: [Aspergillus oryzae RIB40] gi|83771331|dbj|BAE61463.1| protein product [Aspergillus oryzae]
  misc_feature (1)..(268): NCBI GI: 169770123 Blast Desc: [Aspergillus oryzae RIB40] gi|83767390|dbj|BAE57529.1| protein product [Aspergillus oryzae]
  misc_feature (1)..(268): NCBI GI: 256732895 Blast Desc: NECHADRAFT_18070 [Nectria haematococca mpVI 77-13-4]
  misc_feature (1)..(383): NCBI GI: 171693413 Blast Desc: protein product [Podospora anserina] gi|170946655|emb|CAP73458.1| protein product [Podospora anserina]
  misc_feature (1)..(269): NCBI GI: 256722181 Blast Desc: NECHADRAFT_17698 [Nectria haematococca mpVI 77-13-4]
  misc_feature (1)..(269): NCBI GI: 261354085 Blast Desc: HET domain-containing protein [Verticillium albo-atrum VaMs.102]
MRLLNVKTLKLEDFLSTKGRPKYAILSHTWLEEEVLFHHIQNLERPELEKLKGFTKVKASCAQAQSDGYEYIWIDTCCIDKSSSAELSEAINSMWSWYRQSDVCYGFLADVKKGEERAVRRSRWFQRGWTLQELIAPERLRFFDKTWSEMDDRIRMAPLLSEITGIDQDVLTRNYRRGHTHAVQPHNLLCVVCGLPTSIDEILRKTSVSVKMSWSASRETTRGEDRSYCLLGLFGLNMPLLYGEGESSAWIRLLTEIMKRTKEQSILAFDNRPKKNYMNGQVVLASSTPFDGGIFAESSRQYMPNVLLPETSQQRYIELIGDDLVLDVWICSLIPKDPDNSSVSRFWDDTKIGLLDCKITGESMAWPAIVLRSVPESNSKYIRLRDNLLKVDAQDPPTVKACRELKHQQTMIVLDSHKLTYDLGSARLQRITITNKDPITNLETSNLTKPLRILPIKQPDSLKYKLDSSFPKAQGDYIEKIPVFWSGRHKIMGMAIFSDQNKNPFMITWGPEGSDKRSLWCKISKLSKAELSEYAACKDDLAATLRSKAWKNNRSLRLEDFGVDYRLYDKDAAVFGDVYLSIEIQDVKVLDREIWQLWVNISPIKRKDNDDSKRKHDDEKWKKSDDKRNHEDDDDDKKKKGNNKEKRGDEKPKQADVTKR

SEQ ID NO: 35040 - DNA, 1212 bp, Muscodor strobelii
  misc_feature: SGI cDNA ID NO. 572120
  misc_feature: Encodes the peptide sequence at SEQ ID NO 35041
atgaagcgaaccaaagaacagtcgatattggcatttgacaacagacctaagaagaactatatgaatgggcaagtagtgctcgcttcaagcacaccatttgatggcggtatttttgcagaaagctctcggcagtacatgcccaatgtcctgctcccagaaacatcccagcaaagatacatcgagctcattggcgacgatttagtactagacgtctggatttgttcattgattcccaaggaccccgacaattccagcgtcagtcggttctgggacgataccaagataggtctgcttgattgcaagatcacaggagaatcaatggcttggccagcgattgttctcagatcggtacctgaatccaattctaaatacattcgcctgcgtgacaatctcttaaaggtagatgctcaagaccctccgacagtcaaggcatgtcgtgaattgaaacatcaacaaacaatgattgtactggactctcataagcttacctatgatctaggaagtgcccgactacagaggattacaatcaccaacaaagatccgatcacaaatcttgagacatcaaacctgactaagcccctgaggatcttacccatcaagcagcctgatagcttgaagtacaagctggactcaagcttcccaaaagcgcaaggcgactacatcgagaagatacccgtattctggagcggaagacacaagatcatgggtatggcaatattcagcgatcagaacaagaacccgttcatgattacatggggacccgaaggcagtgacaaacgcagcctatggtgtaagatctcgaaactttctaaagcggaactctctgagtatgcggcatgcaaagacgatttggcagcaacgctaaggtcgaaggcttggaaaaataaccgcagtctccgacttgaagacttcggcgtcgactatagactttatgacaaggatgctgctgtgtttggagatgtctacttgtccatcgagatacaagatgtcaaggttcttgacagagaaatctggcagctttgggttaacatctcgccgatcaagcgaaaggacaatgatgatagcaagcggaagcatgatgatgagaagtggaagaaaagcgatgacaagcgaaatcacgaggatgacgacgatgacaagaagaaaaaaggcaacaataaggagaaaagaggtgacgagaagcctaagcaagcggacgtcaccaagcgctga

SEQ ID NO: 35041 - protein, 403 aa, Muscodor strobelii
  misc_feature: SGI Peptide ID NO. 572120
  misc_feature (1)..(271): NCBI GI: 189190380 Blast Desc: HET domain containing protein [Pyrenophora tritici-repentis Pt-1C-BFP] gi|187973135|gb|EDU40634.1| HET domain containing protein [Pyrenophora tritici-repentis
MKRTKEQSILAFDNRPKKNYMNGQVVLASSTPFDGGIFAESSRQYMPNVLLPETSQQRYIELIGDDLVLDVWICSLIPKDPDNSSVSRFWDDTKIGLLDCKITGESMAWPAIVLRSVPESNSKYIRLRDNLLKVDAQDPPTVKACRELKHQQTMIVLDSHKLTYDLGSARLQRITITNKDPITNLETSNLTKPLRILPIKQPDSLKYKLDSSFPKAQGDYIEKIPVFWSGRHKIMGMAIFSDQNKNPFMITWGPEGSDKRSLWCKISKLSKAELSEYAACKDDLAATLRSKAWKNNRSLRLEDFGVDYRLYDKDAAVFGDVYLSIEIQDVKVLDREIWQLWVNISPIKRKDNDDSKRKHDDEKWKKSDDKRNHEDDDDDKKKKGNNKEKRGDEKPKQADVTKR

SEQ ID NO: 35042 - DNA, 981 bp, Muscodor strobelii
  misc_feature: SGI cDNA ID NO. 572121
  misc_feature: Encodes the peptide sequence at SEQ ID NO 35043
atgcaagctacattcgtgactattgctgctattctcgttgctgcaacgcggctcagtaatgcgcaaggggctcccacttccactctttatataccaatcccaactgggggatcccctttcacctcaattgtcccagcctgtgaaacagtgcctgctttccaaattattggagtccccaatggcacgttcttcccgggcactactaccatattcgttcctccacaggccagtgcagcttcaagcacctatttcgatgtagctggaaatctcacagaggttgtcatagcgaaacctcttcccggcacatgcgctgatatcgcgctgccagccgatgctacagcaactattgagcccgatgacactagcccctcaggctcacctaactcaaccgccggggagtgtccgctacagggctgctcggcgggagttgataaagcggctcagacggtcattgatgtactcgacaccatagccatggcctcacagaatctgcaagcaatagctaagcagattggcggttcattctcgccatttgaagcccggggtgacgacaatgggaaagagctcaatagtcgtgcgcctggccccttcgacctcctcccgcccctgagaggtatctcagctacgctcacactgaagctgccaggtatccgggcacttccaccctttccccctggctgcgacagcgcgctactcgaaattctcatcggccgcaagggagtcattgccggaggtagccgtttgcagaagctcgattccgacgtcgacatcgatgttcacgggaacgtggcccaccaatttggcttcccgaatcccgtcggggtggctattgcgggtgtattgcgggctatcgagaccgtcgtcgacgctttagctttcgcgctgatcggtatcattccaactcatcaagagtgtctcaagcgccagaagacgagcattgatgctacgctgaacgacgctatcgctgcttatcaggcgtag

SEQ ID NO: 35043 - protein, 326 aa, Muscodor strobelii
  misc_feature: SGI Peptide ID NO. 572121
MQATFVTIAAILVAATRLSNAQGAPTSTLYIPIPTGGSPFTSIVPACETVPAFQIIGVPNGTFFPGTTTIFVPPQASAASSTYFDVAGNLTEVVIAKPLPGTCADIALPADATATIEPDDTSPSGSPNSTAGECPLQGCSAGVDKAAQTVIDVLDTIAMASQNLQAIAKQIGGSFSPFEARGDDNGKELNSRAPGPFDLLPPLRGISATLTLKLPGIRALPPFPPGCDSALLEILIGRKGVIAGGSRLQKLDSDVDIDVHGNVAHQFGFPNPVGVAIAGVLRAIETVVDALAFALIGIIPTHQECLKRQKTSIDATLNDAIAAYQA

SEQ ID NO: 35044 - DNA, 474 bp, Muscodor strobelii
  misc_feature: SGI cDNA ID NO. 572122
  misc_feature: Encodes the peptide sequence at SEQ ID NO 35045
atggatttcatgacgacggccattgccgatgcattccgctccgatcgactcgtctatcgagctattgaaaacaacgaagttgatagaaacttcattttcaaagaactcaattccgaccacgttacccgcgctttgggagatccatcaatccacaagccgtctaatagagtgtcatccgacaaggaattcgatcgtctgctgaataatccactccttgcaattatagtctgtctaccaggtgatgctaccaagagcccagaacccatcggatttgtatcgatcagagatgtcccgccgtaccagcgtcgagggtcgcttggtattaagatcgcgccaaaacatcagaataaaggctatggttccgaagtcgtgagtgagtactcctggtttcgattcaaacctccggcacggcccaggaaactctacaatctggaaattcaattatggaccatgaagaataagaagagagactaa

SEQ ID NO: 35045 - protein, 157 aa, Muscodor strobelii
  misc_feature: SGI Peptide ID NO. 572122
  misc_feature (3)..(125): NCBI GI: 256723794 Blast Desc: NECHADRAFT_37130 [Nectria haematococca mpVI 77-13-4]
  misc_feature (12)..(125): NCBI GI: 67904434 Blast Desc: AN9204.2 [Aspergillus nidulans FGSC A4] gi|40742305|gb|EAA61495.1| AN9204.2 [Aspergillus nidulans FGSC A4] gi|259485366|tpe|CBF82329.1| TPA: GNAT family AFUA_4G14730)
  misc_feature (8)..(124): NCBI GI: 46111901 Blast Desc: FG02832.1 [Gibberella zeae PH-1]
  misc_feature (12)..(125): NCBI GI: 119499608 Blast Desc: GNAT family acetyltransferase, [Neosartorya fischeri NRRL 181] gi|119414726|gb|EAW24664.1| GNAT family acetyltransferase, [Neosartorya fischeri NRRL 181]
  misc_feature (1)..(125): NCBI GI: 46139701 Blast Desc: FG11365.1 [Gibberella zeae PH-1]
  misc_feature (12)..(125): NCBI GI: 70993024 Blast Desc: GNAT family acetyltransferase [Aspergillus fumigatus Af293] gi|66848994|gb|EAL89322.1| GNAT family acetyltransferase, [Aspergillus fumigatus Af293] gi|159125741|gb|EDP50858.1| GNAT
  misc_feature (10)..(133): NCBI GI: 121709742 Blast Desc: GNAT family acetyltransferase, [Aspergillus clavatus NRRL 1] gi|119400656|gb|EAW11081.1| GNAT family acetyltransferase, [Aspergillus clavatus NRRL 1]
  misc_feature (1)..(125): NCBI GI: 171685316 Blast Desc: protein product [Podospora anserina] gi|170942619|emb|CAP68271.1| protein product [Podospora anserina]
  misc_feature (12)..(124): NCBI GI: 238486952 Blast Desc: GNAT family acetyltransferase, [Aspergillus flavus NRRL3357] gi|220699593|gb|EED55932.1| GNAT family acetyltransferase, [Aspergillus flavus NRRL3357]
  misc_feature (12)..(124): NCBI GI: 169770609 Blast Desc: [Aspergillus oryzae RIB40] gi|83767633|dbj|BAE57772.1| protein product [Aspergillus oryzae]
MDFMTTAIADAFRSDRLVYRAIENNEVDRNFIFKELNSDHVTRALGDPSIHKPSNRVSSDKEFDRLLNNPLLAIIVCLPGDATKSPEPIGFVSIRDVPPYQRRGSLGIKIAPKHQNKGYGSEVVSEYSWFRFKPPARPRKLYNLEIQLWTMKNKKRD

SEQ ID NO: 35046 - DNA, 775 bp, Muscodor strobelii
  misc_feature: SGI EST ID NO. CUFF.83393.0
  misc_feature: Variant of the nucleotide sequence at SEQ ID NO 35044
ctgatgcgcggttcctaggaacttggtgggagtgcacgtaagaaatgcatagatgcgcatctacgctagctgaagcaagggtgctgcttgtcaaccattttcctaggttcagccccatagttagatctgataaaccccagaatatgagtcagagtttatttcgtatcttatcaatctgatctactcggatttatcatgttatactgtatgaacccacatagaaaaggccaccttcagctcggagatacatgtacttgaagttgagatcgccgagtccgaatacgttggatacctagtcaagacatgggcagaacaaatcattataaagctgccatagcggctgctctcactcagtattgtcttgtaatactcttttattaaagttacgcattcgttgaatgacagaaaaaatgcctgaaatggatttcatgacgacggccattgccgatgcattccgctccgatcgactcgtctatcgagctattgaaaacaacgaagttgatagaaacttcattttcaaagaactcaattccgaccacgttacccgcgctttgggagatccatcaatccacaagccgtctaatagagtgtcatccgacaaggaattcgatcgtctgctgaataatccactccttgcaattatagtctgtctaccaggtgatgctaccaagagcccagaacccatcggatttgtatcgatcagagatgtcccgccgtaccagcgtcgagggtcgcttggtattaagatcgcgccaaaacatcagaataaaggcta

SEQ ID NO: 35047 - DNA, 225 bp, Muscodor strobelii
  misc_feature: SGI cDNA ID NO. 572123
  misc_feature: Encodes the peptide sequence at SEQ ID NO 35048
atggactgggcgttcaagtggggagggctacacagcctgtgtctaggtgcgtctctatacaacgagagagcagtagccgtgtacgagaaagcgggtttcagacgagagggcgtcagcaaggaagctgtttacaggaatagaagatggtgggacacggtgcagatggcaattctagagcatgagtgggaggcccttcgaggcattactgattcgaagagttcatag

SEQ ID NO: 35048 - protein, 74 aa, Muscodor strobelii
  misc_feature: SGI Peptide ID NO. 572123
  misc_feature (1)..(34): Pfam Id: PF00583 Pfam Desc: Acetyltransferase (GNAT) family
  misc_feature (1)..(73): NCBI GI: 171685316 Blast Desc: protein product [Podospora anserina] gi|170942619|emb|CAP68271.1| protein product [Podospora anserina]
  misc_feature (1)..(68): NCBI GI: 46111901 Blast Desc: FG02832.1 [Gibberella zeae PH-1]
  misc_feature (1)..(68): NCBI GI: 46139701 Blast Desc: FG11365.1 [Gibberella zeae PH-1]
  misc_feature (1)..(67): NCBI GI: 67904434 Blast Desc: AN9204.2 [Aspergillus nidulans FGSC A4] gi|40742305|gb|EAA61495.1| AN9204.2 [Aspergillus nidulans FGSC A4] gi|259485366|tpe|CBF82329.1| TPA: GNAT family AFUA_4G14730)
  misc_feature (1)..(68): NCBI GI: 256730665 Blast Desc: NECHADRAFT_30277 [Nectria haematococca mpVI 77-13-4]
  misc_feature (1)..(64): NCBI GI: 119499608 Blast Desc: GNAT family acetyltransferase, [Neosartorya fischeri NRRL 181] gi|119414726|gb|EAW24664.1| GNAT family acetyltransferase, [Neosartorya fischeri NRRL 181]
  misc_feature (1)..(68): NCBI GI: 256723794 Blast Desc: NECHADRAFT_37130 [Nectria haematococca mpVI 77-13-4]
  misc_feature (1)..(73): NCBI GI: 145607441 Blast Desc: MGG_04247 [Magnaporthe grisea 70-15] gi|145014994|gb|EDJ99562.1| MGG_04247 [Magnaporthe grisea 70-15]
  misc_feature (1)..(66): NCBI GI: 85090157 Blast Desc: NCU04583 [Neurospora crassa OR74A] gi|28919629|gb|EAA29048.1| [Neurospora crassa OR74A] gi|28950022|emb|CAD70777.1| conserved [Neurospora crassa]
  misc_feature (1)..(66): NCBI GI: 170756428 Blast Desc: acetyltransferase [Clostridium botulinum B1 str. Okra] gi|169121640|gb|ACA45476.1| acetyltransferase, GNAT family [Clostridium botulinum B1 str. Okra]
MDWAFKWGGLHSLCLGASLYNERAVAVYEKAGFRREGVSKEAVYRNRRWWDTVQMAILEHEWEALRGITDSKSS

SEQ ID NO: 35049 - DNA, 513 bp, Muscodor strobelii
  misc_feature: SGI EST ID NO. CUFF.83396.0
  misc_feature: Variant of the nucleotide sequence at SEQ ID NO 35047
aaacctccggcacggcccaggaaactctacaatctggaaattcaattatggaccatgaagaataagaagagagactaacatgctttgataaactagactgggcaatggactgggcgttcaagtggggagggctacacagcctgtgtctaggtgcgtctctatacaacgagagagcagtagccgtgtacgagaaagcgggtttcagacgagagggcgtcagcaaggaagctgtttacaggaatagaagatggtgggacacggtgcagatggcaattctagagcatgagtgggaggcccttcgaggcattactgattcgaagagttcatagcttgaacacacagtggttcacatcctagatcgtcatatgagcaaaccaaaacgaggtcttcagagaagcacgaaaagagagaatatcagacacgagctccgtgaaccgggaggctatctcatgttgcattttcgtgactatatcaatcattttagcttatcatattgactataatcctttatcc

SEQ ID NO: 35050 - DNA, 1068 bp, Muscodor strobelii
  misc_feature: SGI cDNA ID NO. 572124
  misc_feature: Encodes the peptide sequence at SEQ ID NO 35051
atggcagatttcaagatctttcggcttggagacttttctctgcaatctggggttgttttgagagatgcgtacatcgcttataaaacgttcgggaacccagaaagcccagcgattgtatatccgacatggtacagcggtgttatcgcgcagaacgaatggctgattggtgatgatatgacactgagtccgaagaaatatttcattatcattcccgcactctttggcaatggccaatcgaaaagtccgtccaacagtccggagttgcgtccatttcctctaatcactttctttgacaacatcgcggcgcagtatcgtcttgtcacggaagagctgggcgtgaagcatctgagagccgttctgggatggagcatgggtgctgcgcagacttatcaatgggttactcaatatccgaatttcatggatcttgctatcccattttgcggcgccgcaaggtgcagctttcataatcaggtcttcctcgaaggtgtgaaaagcgcactatgcgctgccaagggaaaagtttcagcaggagtcgtgaaaggggaggccacatctgcagcagaataccgaaactggactgcagaagaacgtgagactggcctcaaagctcttggtagagtgtatgccggttggggccttagccaagcattctatcgcgagaagctctacgagacttacctaggatacaaggatctagaagacttcatggtcaagttctgggaaggttgggcgttgtctaaagatcctgaaaacatgatgacgatgctgtacacatggcaaagtgcagattgctcaaaccaagaggcatacaacggagacttcgagcttgcgatgaagagcatcaaggcgaagacactcgtactcccagggaagactgatctttacttccctccagaagactccgaatatgaggttgcttgtatgtctgagaacactggcaaatgcgtcgcgtttccttcgatatggggtcattgggcgggcggaccgggtgatagtaaagaggatatcaagtggcttgacgataagctaaacgtgtttctagagaccggtacctttgacaatatttga

SEQ ID NO: 35051 - protein, 355 aa, Muscodor strobelii
  misc_feature: SGI Peptide ID NO. 572124
  misc_feature (66)..(342): Pfam Id: PF00561 Pfam Desc: alpha/beta hydrolase fold
  misc_feature (66)..(137): Pfam Id: PF00561 Pfam Desc: alpha/beta hydrolase fold
  misc_feature (5)..(352): NCBI GI: 39972651 Blast Desc: MGG_07627 [Magnaporthe grisea 70-15] gi|145016838|gb|EDK01268.1| MGG_07627 [Magnaporthe grisea 70-15]
  misc_feature (3)..(349): NCBI GI: 121700909 Blast Desc: homoserine acetyltransferase family protein [Aspergillus clavatus NRRL 1] gi|119396862|gb|EAW07293.1| homoserine acetyltransferase family protein [Aspergillus clavatus
  misc_feature (3)..(347): NCBI GI: 119494844 Blast Desc: homoserine acetyltransferase family protein [Neosartorya fischeri NRRL 181] gi|119412386|gb|EAW22327.1| homoserine acetyltransferase family protein [Neosartorya fischeri
  misc_feature (3)..(347): NCBI GI: 189208744 Blast Desc: homoserine acetyltransferase family protein [Pyrenophora tritici-repentis Pt-1C-BFP] gi|187976798|gb|EDU43424.1| homoserine acetyltransferase family
  misc_feature (3)..(355): NCBI GI: 238484199 Blast Desc: homoserine acetyltransferase family protein [Aspergillus flavus NRRL3357] gi|220701388|gb|EED57726.1| homoserine acetyltransferase family protein [Aspergillus flavus
  misc_feature (3)..(348): NCBI GI: 145230990 Blast Desc: An01g13580 [Aspergillus niger] gi|134055885|emb|CAK37364.1| protein product [Aspergillus niger]
  misc_feature (3)..(348): NCBI GI: 115397687 Blast Desc: conserved [Aspergillus terreus NIH2624] gi|114192626|gb|EAU34326.1| conserved [Aspergillus terreus NIH2624]
  misc_feature (4)..(347): NCBI GI: 240108610 Blast Desc: alpha/beta hydrolase fold family protein [Coccidioides posadasii C735 delta SOWgp]
  misc_feature (4)..(347): NCBI GI: 119186323 Blast Desc: CIMG_03209 [Coccidioides immitis RS]
  misc_feature (1)..(348): NCBI GI: 46133803 Blast Desc: FG09041.1 [Gibberella zeae PH-1]
  misc_feature (7)..(324): SWISSPROT Homolog: EC 2.3.1.31 Homoserine O-acetyltransferase
MADFKIFRLGDFSLQSGVVLRDAYIAYKTFGNPESPAIVYPTWYSGVIAQNEWLIGDDMTLSPKKYFIIIPALFGNGQSKSPSNSPELRPFPLITFFDNIAAQYRLVTEELGVKHLRAVLGWSMGAAQTYQWVTQYPNFMDLAIPFCGAARCSFHNQVFLEGVKSALCAAKGKVSAGVVKGEATSAAEYRNWTAEERETGLKALGRVYAGWGLSQAFYREKLYETYLGYKDLEDFMVKFWEGWALSKDPENMMTMLYTWQSADCSNQEAYNGDFELAMKSIKAKTLVLPGKTDLYFPPEDSEYEVACMSENTGKCVAFPSIWGHWAGGPGDSKEDIKWLDDKLNVFLETGTFDNI

SEQ ID NO: 35052 - DNA, 2743 bp, Muscodor strobelii
  misc_feature: SGI EST ID NO. CUFF.83530.0
  misc_feature: Variant of the nucleotide sequence at SEQ ID NO 35050
tggtgataacatgcgctatctgacgaacgacctgcggttgacccctcacttgaagtcgatatagtcaagtaaatgcatctgccaattcgtgctattaaagcaatccctctacatgaacaaagcgataatacgaagatagcgtctagaataactcgtttgactctttagtggatctgacaaggatttgacgatcgttcgcaacgagatcaaggcgaaactatctaccgtgttacacaatccgggccaaagttattagtcaagcctcgacagaagtccgaaattttgttcgttagctactagaaaagaacttgttctcagataagtatactggaatataatttctagcacattacgggcagttcgcagatacagacggatgtcatatgcatcatggcagatttcaagatctttcggcttggagacttttctctgcaatctggggttgttttgagagatgcgtacatcgcttataaaacgttcgggaacccagaaagcccagcgattgtatatccgacatggtacagcggtgttatcgcgcagaacgaatggctgattggtgatgatatgacactgagtccgaagaaatatttcattatcattcccgcactctttggcaatggccaatcgaaaagtccgtccaacagtccggagttgcgtccatttcctctaatcactttctttgacaacatcgcggcgcagtatcgtcttgtcacggaagagctgggcgtgaagcatctgagagccgttctgggatggagcatgggtgctgcgcagacttatcaatgggttactcaatatccgaatttcatggatcttgctatcccattttgcggcgccgcaaggtgcagctttcataatcaggtcttcctcgaaggtgtgaaaagcgcactatgcgctgccaagggaaaagtttcagcaggagtcgtgaaaggggaggccacatctgcagcagaataccgaaactggactgcagaagaacgtgagactggcctcaaagctcttggtagagtgtatgccggttggggccttagccaagcattctatcgcgagaagctctacgagacttacctaggatacaaggatctagaagacttcatggtcaagttctgggaaggttgggcgttgtctaaagatcctgaaaacatgatgacgatgctgtacacatggcaaagtgcagattgctcaaaccaagaggcatacaacggagacttcgagcttgcgatgaagagcatcaaggcgaagacactcgtactcccagggaagactgatctttacttccctccagaagactccgaatatgaggttgcttgtatgtctgagaacactggcaaatgcgtcgcgtttccttcgatatggggtcattgggcgggcggaccgggtgatagtaaagaggatatcaagtggcttgacgataagctaaacgtgtttctagagaccggtacctttgacaatatttgagtggagtgctgaagtttcgattcagtgatacgtcaagatgagaggctgagattggaaacaagatttgaccatggccgggtgatagctaatcgtcgaaaactgaggtggtatttgattgattgaagattctgtcaaagctggcttaacatccctcgtacttcatcggggttgatttcgtcgatagtgtttgcctgaagacacgccgaatgagtatagacagaagtgcctctatcgcgcagactcagtgtttctacaagttcacctaagttcgcagtccttactccgccgccaacgatgatctgaataccaagaggctttgcttttcgcatgattttcttcaacgtctccatattgtcgatcgctttgcctgggccccccgaggtaaggatgccgtcaaatccacatgcggctaagtcttcgaggccactttcccatgaagtccgagacgatagtgtatacagatcgctgtcgcagctgacgacttcatcgtaagcgcgatgaaatacagccttgaatggacgtgaggcttcaaccaggcgtgcacatctttccttatcgatccagcaccgcgggaattgactagggccgtctactgtacttgattcactgtcatgactgtcaagattttcttctgccaagatgccgaagacaaatccatcgccacgtgttgcgtcaagcagtccggcttgtgtaaagtccctgatgctcctctccattgccttgaattcctcatcggtgtaaatgaaatctctaccgcttgtgtcaatcgcttttgacaaggaaccggacaacgtacatggaggtcctctcggtcgaatcatgattcgtagcgggatctgaacaccgctacttatcataatcttaagatcttctagtagcggcgtcaatccgccgtctgggtatgaacctgcggcattgagttcaatcctcgacgcgcctaattccacagcgcgtagtgctgcctgggcgccaaaagcggggatctcaagccccaggccagtgggtggcatcgtcgatgattcagatggcaaccgtgcttgcctttaacaatggaatgaatcgaattttgtctgtattcaggggcagtaccctttcatcgctattgagttttgatgttgaaaataaggacatagttgatggttgagaggtggaggttcggggaaactgagcggtgggacgctatttcgggtcaatcattccaacacaaacgtcaaccactcaaattccccttaaaacagcccggctggggctcaaactgagcggaatcgacacacatcaattagca

SEQ ID NO: 35053 - DNA, 2046 bp, Muscodor strobelii
  misc_feature: SGI cDNA ID NO. 572125
  misc_feature: Encodes the peptide sequence at SEQ ID NO 35054
atgtgctttcagataacagaggtttactcttcttgtcgatgtttgtactaccagcatgcgatcaacagatgtgccgtgtctggaaagccaggccatgaggtatcaaagaagacgatattagtcgggacttcatgcgaagaccatgggggttataacctcgtccccaatatcacgaacgatgctacgaaagatgcgtcttcagaagttgaatttgcgtcgcattatagggctttgggttccaatgtcgctcgtcatgcgcctatcgaattgctccaatctagaatcgtgccgattagagacgcggcgatgacagtttcgccgtcggttggtgaagactggagcgatacggaacccagcatccttcatgatgacaagcttttcgcgtgggacgatgatagcgataattctgagcttcccgtgatcacgtgtaccgaatggagttctgagaactcagagacggagtgtgaagaagaacagcaggcgaaagccaatttcctgcgccgtcgcccggcatcactatctagacgccaactaactaagcgtaatgagtcgccaaaattggatgctcttgacttcttggtctcatgtttaatcacttaccctccacttgataggatctggcgagttataatcaccggcaaagagctagaacatagcccaaaacgggccatcagcaacatcttcgcttcgttcgccctcgacattgaggaatggggcaaaggtgatgagattcacggagcttttcatgaattgattgatgcgtgtcatgaagagattgcggagagaataatgcaagcggtatatggcgaagagcaatcatctgatgaaatggatatcgatacttggaaacaacagcttcacgctatcataagagcccgtcatttccttgattggaacgcagaatcacatgcacgtatcttcataactacatgttggctcatcgaagacatagaacatcgcctgctcgcctacatagaacgacagagacgcgtgcagtctccatctttaagcttcagcatgcggtcctatatttccagaataatgtcatctttcgatactgtaaatttaggtccaggcgtgaagcggcacatcgattgcacatgcgcttgtgggtggcatatcaaagacaaatatgaagaaacttacccaggatcactggataagcttgagagagacctaaaacaatacacgaggacgtcccgtatcactcaatatgacacgagtaatgaagcgagacgggactcattgagaaacaagatttcatctcgcttcaagacggcaacgaatttcttgctaccacataaccttccgggtttaccaaatcacaaagcgcagggtactgcagcgatagtagaattaggcagctgcggagtagcttctatatcatcacaaggtgatcacacctttatacttctatgtgtgccctatcttcgttggggcctgcgcctactaaatagggagatttgccgaataaagtcagatcgtgagtttttccaggtgctgcggcatagctacgcaaaggagagactagccggcccattcaaggcactgagagttttcagaacagtccgagcgttacgattcgtgaaattcgaggtattccgtaacaagctagttgacgtgcagcattgtccatctcttccagatgcttctactgcaagctctgttgactacacatatgagccagacccaccagacgcgatacctcccattggaccgaatttactcatgcactacttcgagaatcctgatcacgcagatacaagcctggttctataccgtcggttcccaagaaagctccgcgcccagctcgaagcttgccctatcaaggggagctcagtcggctggggcatcgagtttgttgagggcgtggattggtattcagtatttgttgcaacctgtataggatccctgatctgttttttctttgccgttgtatggtcgagcgtgaaaggagacgttcaaggaggctttggcattgcgagttttcttctggccgtgttgggcattctgggcggaattctgcactatatgatttttatctaa

SEQ ID NO: 35054 - protein, 681 aa, Muscodor strobelii
  misc_feature: SGI Peptide ID NO. 572125
  misc_feature (307)..(678): NCBI GI: 256724768 Blast Desc: NECHADRAFT_48363 [Nectria haematococca mpVI 77-13-4]
  misc_feature (370)..(676): NCBI GI: 46110963 Blast Desc: FG02363.1 [Gibberella zeae PH-1]
  misc_feature (520)..(676): NCBI GI: 145604070 Blast Desc: MGG_14094 [Magnaporthe grisea 70-15] gi|145012156|gb|EDJ96812.1| MGG_14094 [Magnaporthe grisea 70-15]
  misc_feature (531)..(676): NCBI GI: 145616464 Blast Desc: MGG_10872 [Magnaporthe grisea 70-15] gi|145010118|gb|EDJ94774.1| MGG_10872 [Magnaporthe grisea 70-15]
  misc_feature (520)..(678): NCBI GI: 171683661 Blast Desc: protein product [Podospora anserina] gi|170941790|emb|CAP67444.1| protein product [Podospora anserina]
  misc_feature (511)..(664): NCBI GI: 154295720 Blast Desc: BC1G_12863 [Botryotinia fuckeliana B05.10] gi|150843896|gb|EDN19089.1| BC1G_12863 [Botryotinia fuckeliana B05.10]
  misc_feature (478)..(654): NCBI GI: 169598744 Blast Desc: SNOG_02179 [Phaeosphaeria nodorum SN15] gi|160704460|gb|EAT90391.2| SNOG_02179 [Phaeosphaeria nodorum SN15]
  misc_feature (352)..(676): NCBI GI: 189209441 Blast Desc: [Pyrenophora tritici-repentis Pt-1C-BFP] gi|187977146|gb|EDU43772.1| [Pyrenophora tritici-repentis Pt-1C-BFP]
  misc_feature (358)..(675): NCBI GI: 145236465 Blast Desc: An06g00530 [Aspergillus niger] gi|134075334|emb|CAK44968.1| [Aspergillus niger]
  misc_feature (367)..(673): NCBI GI: 256728791 Blast Desc: NECHADRAFT_86103 [Nectria haematococca mpVI 77-13-4]
MCFQITEVYSSCRCLYYQHAINRCAVSGKPGHEVSKKTILVGTSCEDHGGYNLVPNITNDATKDASSEVEFASHYRALGSNVARHAPIELLQSRIVPIRDAAMTVSPSVGEDWSDTEPSILHDDKLFAWDDDSDNSELPVITCTEWSSENSETECEEEQQAKANFLRRRPASLSRRQLTKRNESPKLDALDFLVSCLITYPPLDRIWRVIITGKELEHSPKRAISNIFASFALDIEEWGKGDEIHGAFHELIDACHEEIAERIMQAVYGEEQSSDEMDIDTWKQQLHAIIRARHFLDWNAESHARIFITTCWLIEDIEHRLLAYIERQRRVQSPSLSFSMRSYISRIMSSFDTVNLGPGVKRHIDCTCACGWHIKDKYEETYPGSLDKLERDLKQYTRTSRITQYDTSNEARRDSLRNKISSRFKTATNFLLPHNLPGLPNHKAQGTAAIVELGSCGVASISSQGDHTFILLCVPYLRWGLRLLNREICRIKSDREFFQVLRHSYAKERLAGPFKALRVFRTVRALRFVKFEVFRNKLVDVQHCPSLPDASTASSVDYTYEPDPPDAIPPIGPNLLMHYFENPDHADTSLVLYRRFPRKLRAQLEACPIKGSSVGWGIEFVEGVDWYSVFVATCIGSLICFFFAVVWSSVKGDVQGGFGIASFLLAVLGILGGILHYMIFI

SEQ ID NO: 35055 - DNA, 2273 bp, Muscodor strobelii
  misc_feature: SGI EST ID NO. CUFF.83411.0
  misc_feature: Variant of the nucleotide sequence at SEQ ID NO 35053
gaagtcctacatattgcccaaagtgcaaaggcggccaatgctgaatgcctacttagaatcgtcgccttcagatccatcgtaatacgtctcggagaattctgggacggagttgtctcatttctctttcttgaaaaaccctctataaccatatacggaaccactatgtgctttcagataacagaggtttactcttcttgtcgatgtttgtactaccagcatgcgatcaacagatgtgccgtgtctggaaagccaggccatgaggtatcaaagaagacgatattagtcgggacttcatgcgaagaccatgggggttataacctcgtccccaatatcacgaacgatgctacgaaagatgcgtcttcagaagttgaatttgcgtcgcattatagggctttgggttccaatgtcgctcgtcatgcgcctatcgaattgctccaatctagaatcgtgccgattagagacgcggcgatgacagtttcgccgtcggttggtgaagactggagcgatacggaacccagcatccttcatgatgacaagcttttcgcgtgggacgatgatagcgataattctgagcttcccgtgatcacgtgtaccgaatggagttctgagaactcagagacggagtgtgaagaagaacagcaggcgaaagccaatttcctgcgccgtcgcccggcatcactatctagacgccaactaactaagcgtaatgagtcgccaaaattggatgctcttgacttcttggtctcatgtttaatcacttaccctccacttgataggatctggcgagttataatcaccggcaaagagctagaacatagcccaaaacgggccatcagcaacatcttcgcttcgttcgccctcgacattgaggaatggggcaaaggtgatgagattcacggagcttttcatgaattgattgatgcgtgtcatgaagagattgcggagagaataatgcaagcggtatatggcgaagagcaatcatctgatgaaatggatatcgatacttggaaacaacagcttcacgctatcataagagcccgtcatttccttgattggaacgcagaatcacatgcacgtatcttcataactacatgttggctcatcgaagacatagaacatcgcctgctcgcctacatagaacgacagagacgcgtgcagtctccatctttaagcttcagcatgcggtcctatatttccagaataatgtcatctttcgatactgtaaatttaggtccaggcgtgaagcggcacatcgattgcacatgcgcttgtgggtggcatatcaaagacaaatatgaagaaacttacccaggatcactggataagcttgagagagacctaaaacaatacacgaggacgtcccgtatcactcaatatgacacgagtaatgaagcgagacgggactcattgagaaacaagatttcatctcgcttcaagacggcaacgaatttcttgctaccacataaccttccgggtttaccaaatcacaaagcgcagggtactgcagcgatagtagaattaggcagctgcggagtagcttctatatcatcacaaggtgatcacacctttatacttctatgtgtgccctatcttcgttggggcctgcgcctactaaatagggagatttgccgaataaagtcagatcgtgagtttttccaggtgctgcggcatagctacgcaaaggagagactagccggcccattcaaggcactgagagttttcagaacagtccgagcgttacgattcgtgaaattcgaggtattccgtaacaagctagttgacgtgcagcattgtccatctcttccagatgcttctactgcaagctctgttgactacacatatgagccagacccaccagacgcgatacctcccattggaccgaatttactcatgcactacttcgagaatcctgatcacgcagatacaagcctggttctataccgtcggttcccaagaaagctccgcgcccagctcgaagcttgccctatcaaggggagctcagtcggctggggcatcgagtttgttgagggcgtggattggtattcagtatttgttgcaacctgtataggatccctgatctgttttttctttgccgttgtatggtcgagcgtgaaaggagacgttcaaggaggctttggcattgcgagttttcttctggccgtgttgggcattctgggcggaattctgcactatatgatttttatctaagagcgctacgttatagatgttcacgtagaaatagcgaaagtcttcatagaaaaactcagagtttt

SEQ ID NO: 35056 - DNA, 1119 bp, Muscodor strobelii
  misc_feature: SGI cDNA ID NO. 572127
  misc_feature: Encodes the peptide sequence at SEQ ID NO 35057
atgtggccagacaagaaaggagcggacggcgctccacttttgaagacaatgcgctatctgttgacaggtcatcttccgaacattctacctgacattagaaactccatgtctgtcttgtttgatgacatgtacgaggcacatcccataacggccaatcaaaaactctcgcctctattcccaatggtgattcgcggtatcgcccagtctaatgcgtacgccttcttcggcagagagctctctacaaacgagccatttatgaataaggctatcgtattcgtcgaagaaacaataatcattgccgaagcggtgcgcctcctgcccagtttcatctccggacgtatcggggaataccttgcgaagaagttgaactcgggtaggattatatacgacgcgttagagccaattgtgtcgaaacgttttgaggaacgcgagagacacaggctaggccaaagtgtgcctcaccacactgcgtgcttcgcgttatttgatctatgtctgcatcccgaatacgtggaaccattgcgaaaagagattgaatctacgacgtggaaagcctttgatgagtccggtgggaaactatttcccctcatggatagttttatgaaagagtcagccagattgactcctgtagagtccgtcagtacccggcgtaaggcgacacagccgttttacctgtcggatgggaccaaagtagaaactggacaatggatttgcactgcagcccgcggaatcaatcttgatcctgcaagctacgcccaagtaaatgagttccgaggattccggttcgtcgagccgcaaatccttgagcaatcgctgtcaagagcccgtcaatccgatcacacgagtacaagttttcagatcccagaactgggaaagtcggcacctttcatagaattatctgactcgcaactctggggaactggaaagtctgcatgcaccgggagatggtacgcctccgccgtcatcaagactatgatcggactattcataacgaaatgggatatcaagcttgttgatccgaaggcgtctcgtcatttttgttggcgcactttcatatatccatatgctagtactaaggttatccttactacacgcccagcacaagattaccgggcatag

SEQ ID NO: 35057 - protein, 372 aa, Muscodor strobelii
  misc_feature: SGI Peptide ID NO. 572127
  misc_feature (2)..(365): NCBI GI: 171679926 Blast Desc: protein product [Podospora anserina] gi|170939589|emb|CAP64816.1| protein product [Podospora anserina]
  misc_feature (2)..(365): NCBI GI: 242766618 Blast Desc: cytochrome P450, [Talaromyces stipitatus ATCC 10500] gi|218724403|gb|EED23820.1| cytochrome P450, [Talaromyces stipitatus ATCC 10500]
  misc_feature (2)..(363): NCBI GI: 189194011 Blast Desc: conserved [Pyrenophora tritici-repentis Pt-1C-BFP] gi|187978908|gb|EDU45534.1| conserved [Pyrenophora tritici-repentis Pt-1C-BFP]
  misc_feature (2)..(311): NCBI GI: 238840890 Blast Desc: conserved [Microsporum canis CBS 113480]
  misc_feature (2)..(287): NCBI GI: 169612654 Blast Desc: SNOG_09451 [Phaeosphaeria nodorum SN15] gi|111061596|gb|EAT82716.1| SNOG_09451 [Phaeosphaeria nodorum SN15]
  misc_feature (2)..(365): NCBI GI: 116203901 Blast Desc: CHGG_09834 [Chaetomium globosum CBS 148.51] gi|88175962|gb|EAQ83430.1| CHGG_09834 [Chaetomium globosum CBS 148.51]
  misc_feature (58)..(354): NCBI GI: 259484380 Blast Desc: TPA: cytochrome P450, (Eurofung) [Aspergillus nidulans FGSC A4]
  misc_feature (159)..(365): NCBI GI: 171693381 Blast Desc: protein product [Podospora anserina] gi|170946639|emb|CAP73442.1| protein product [Podospora anserina]
  misc_feature (57)..(369): NCBI GI: 238845705 Blast Desc: conserved [Microsporum canis CBS 113480]
  misc_feature (14)..(362): NCBI GI: 156041144 Blast Desc: [Sclerotinia sclerotiorum 1980] gi|154695934|gb|EDN95672.1| [Sclerotinia sclerotiorum 1980]
  misc_feature (13)..(369): SWISSPROT Homolog: EC 1.14.13.78 Ent-kaurene oxidase
MWPDKKGADGAPLLKTMRYLLTGHLPNILPDIRNSMSVLFDDMYEAHPITANQKLSPLFPMVIRGIAQSNAYAFFGRELSTNEPFMNKAIVFVEETIIIAEAVRLLPSFISGRIGEYLAKKLNSGRIIYDALEPIVSKRFEERERHRLGQSVPHHTACFALFDLCLHPEYVEPLRKEIESTTWKAFDESGGKLFPLMDSFMKESARLTPVESVSTRRKATQPFYLSDGTKVETGQWICTAARGINLDPASYAQVNEFRGFRFVEPQILEQSLSRARQSDHTSTSFQIPELGKSAPFIELSDSQLWGTGKSACTGRWYASAVIKTMIGLFITKWDIKLVDPKASRHFCWRTFIYPYASTKVILTTRPAQDYRA

SEQ ID NO: 35058 - DNA, 1662 bp, Muscodor strobelii
  misc_feature: SGI cDNA ID NO. 572128
  misc_feature: Encodes the peptide sequence at SEQ ID NO 35059
atgtcaaccgagaactttcagaaccctcctcaaactcgaaatgctgatgatgatgggagagctgtcgtcgagtttacgggagaattccgactcacttggaagatttattgtatattttttgcacttgcgtttttgtccttcatagcatcaattgatgccactattatcacaacttccttaccaacaattacacagaagattggaggcgaaggtgcgtacgtctggattgcgaactcgtacttgctcgcctccacagtcccacaaccaatctatgcgcagttatcaaacatatttgggcgtcgaaatcctctcttcattgctattggtctatttttcgtgggaagtgctatcgcgggtggtgctcagaatcccgccactctcattacaggccgcgtgatacaaggccttggtactggcggcttgtatgttctttccgatgtcatcatatgcgatatcatccctccgcgctaccgtggtccattcttgggcgttgtactctccacctcggctctaggcacaacactcggccctatcataggcggcgcacttgctctctacagctggcgttggatattcctgataaacctcccgactgtgtcaacactgttcattgccctgttgctagtgctaagggtcaaatatacgcgtagcccaacctggcgcgccgcgctgagccaagtcgattttattggtattgcactctttataccatccgtggtcgctgtgttttttggcctcatcacgggcggaacaacaggattctcatggagttcttggcatatcattgtgccacttgtacttggtgtacttggatgggcggcctttcatttctatcaagcctctccagtttgccatcagcctagtgcgccacctagactgttcaaaaatcggacatctgccaccggctttttcatgatattcattgccagcactatcgtacaggccataagctattttcttcctatttactttcaggctgtaaagggctcttcgcccttaatctctggccttgattatcttcctttcaccgcaggcctcattgccctttccgctctagccggaggatttctatccaaaacaggactgtatagaccagtccacttcgctggattcgcattgagcacggttgcattaggattattttcaacactgaaccaggattctactcgaggagcctgggttgggtatcaattcatcgcggcagctggtaccggatttgtctttacagtaacgctgccatcgaccctggcacctctatccgactccgatgtggctctcgctaccggaacatactcgttcgttcgctctttcgggctcgtctggggagcaactgtgtcttcaatcattttcaataaccaagttgatgcaaatcttagtctcgttgctgatgactccgttcgagagctcctgaaaaacggcgctgcttacgcttttgcatccggccccaacaatgtaaattcactacccgagcctagcaaagctcaagtgttgcgcgtttatgttctggcaatgcgcgtcatgtggttggtacttgctggtatatcgtttctaggatttctagcagctattgttgagaagcatgttaaactacgtacagaaaacaatactgaatttgggattatggatgaaaaggtggatgaaaaggtggatgaaaaagcctga

SEQ ID NO: 35059 - protein, 553 aa, Muscodor strobelii
  misc_feature: SGI Peptide ID NO. 572128
  misc_feature (42)..(443): Pfam Id: PF07690 Pfam Desc: Major Facilitator Superfamily
  misc_feature (42)..(248): Pfam Id: PF07690 Pfam Desc: Major Facilitator Superfamily
  misc_feature (262)..(443): Pfam Id: PF07690 Pfam Desc: Major Facilitator Superfamily
  misc_feature (94)..(145): Pfam Id: PF00083 Pfam Desc: Sugar (and other) transporter
  misc_feature (8)..(544): NCBI GI: 238840894 Blast Desc: major facilitator superfamily MFS_1 [Microsporum canis CBS 113480]
  misc_feature (2)..(543): NCBI GI: 242766628 Blast Desc: efflux pump antibiotic resistance protein, [Talaromyces stipitatus ATCC 10500] gi|218724405|gb|EED23822.1| efflux pump antibiotic resistance protein, [Talaromyces ATCC
  misc_feature (6)..(553): NCBI GI: 171679930 Blast Desc: protein product [Podospora anserina] gi|170939591|emb|CAP64818.1| protein product [Podospora anserina]
  misc_feature (5)..(529): NCBI GI: 169612658 Blast Desc: SNOG_09453 [Phaeosphaeria nodorum SN15] gi|111061598|gb|EAT82718.1| SNOG_09453 [Phaeosphaeria nodorum SN15]
  misc_feature (32)..(552): NCBI GI: 238843713 Blast Desc: conserved [Microsporum canis CBS 113480]
  misc_feature (34)..(540): NCBI GI: 238497536 Blast Desc: macrolide phosphotransferase k, [Aspergillus flavus NRRL3357] gi|220693277|gb|EED49622.1| macrolide phosphotransferase k, [Aspergillus flavus NRRL3357]
  misc_feature (34)..(540): NCBI GI: 169768252 Blast Desc: [Aspergillus oryzae RIB40] gi|83766454|dbj|BAE56594.1| protein product [Aspergillus oryzae]
  misc_feature (7)..(552): NCBI GI: 256730290 Blast Desc: [Nectria haematococca mpVI 77-13-4]
  misc_feature (30)..(548): NCBI GI: 116203899 Blast Desc: CHGG_09833 [Chaetomium globosum CBS 148.51] gi|88175961|gb|EAQ83429.1| CHGG_09833 [Chaetomium globosum CBS 148.51]
  misc_feature (15)..(553): NCBI GI: 258569535 Blast Desc: [Uncinocarpus reesii 1704] gi|237903841|gb|EEP78242.1| [Uncinocarpus reesii 1704]
MSTENFQNPPQTRNADDDGRAVVEFTGEFRLTWKIYCIFFALAFLSFIASIDATIITTSLPTITQKIGGEGAYVWIANSYLLASTVPQPIYAQLSNIFGRRNPLFIAIGLFFVGSAIAGGAQNPATLITGRVIQGLGTGGLYVLSDVIICDIIPPRYRGPFLGVVLSTSALGTTLGPIIGGALALYSWRWIFLINLPTVSTLFIALLLVLRVKYTRSPTWRAALSQVDFIGIALFIPSVVAVFFGLITGGTTGFSWSSWHIIVPLVLGVLGWAAFHFYQASPVCHQPSAPPRLFKNRTSATGFFMIFIASTIVQAISYFLPIYFQAVKGSSPLISGLDYLPFTAGLIALSALAGGFLSKTGLYRPVHFAGFALSTVALGLFSTLNQDSTRGAWVGYQFIAAAGTGFVFTVTLPSTLAPLSDSDVALATGTYSFVRSFGLVWGATVSSIIFNNQVDANLSLVADDSVRELLKNGAAYAFASGPNNVNSLPEPSKAQVLRVYVLAMRVMWLVLAGISFLGFLAAIVEKHVKLRTENNTEFGIMDEKVDEKVDEKA

SEQ ID NO: 35060 - DNA, 1635 bp, Muscodor strobelii
  misc_feature: SGI EST ID NO. CUFF.83426.0
  misc_feature: Variant of the nucleotide sequence at SEQ ID NO 35058
cacaacttccttaccaacaattacacagaagattggaggcgaaggtgcgtacgtctggattgcgaactcgtacttgctcgcctccacagtcccacaaccaatctatgcgcagttatcaaacatatttgggcgtcgaaatcctctcttcattgctattggtctatttttcgtgggaagtgctatcgcgggtggtgctcagaatcccgccactctcattacaggccgcgtgatacaaggccttggtactggcggcttgtatgttctttccgatgtcatcatatgcgatatcatccctccgcgctaccgtggtccattcttgggcgttgtactctccacctcggctctaggcacaacactcggccctatcataggcggcgcacttgctctctacagctggcgttggatattcctgataaacctcccgactgtgtcaacactgttcattgccctgttgctagtgctaagggtcaaatatacgcgtagcccaacctggcgcgccgcgctgagccaagtcgattttattggtattgcactctttataccatccgtggtcgctgtgttttttggcctcatcacgggcggaacaacaggattctcatggagttcttggcatatcattgtgccacttgtacttggtgtacttggatgggcggcctttcatttctatcaagcctctccagtttgccatcagcctagtgcgccacctagactgttcaaaaatcggacatctgccaccggctttttcatgatattcattgccagcactatcgtacaggccataagctattttcttcctatttactttcaggctgtaaagggctcttcgcccttaatctctggccttgattatcttcctttcaccgcaggcctcattgccctttccgctctagccggaggatttctatccaaaacaggactgtatagaccagtccacttcgctggattcgcattgagcacggttgcattaggattattttcaacactgaaccaggattctactcgaggagcctgggttgggtatcaattcatcgcggcagctggtaccggatttgtctttacagtaacgctgccatcgaccctggcacctctatccgactccgatgtggctctcgctaccggaacatactcgttcgttcgctctttcgggctcgtctggggagcaactgtgtcttcaatcattttcaataaccaagttgatgcaaatcttagtctcgttgctgatgactccgttcgagagctcctgaaaaacggcgctgcttacgcttttgcatccggccccaacaatgtaaattcactacccgagcctagcaaagctcaagtgttgcgcgtttatgttctggcaatgcgcgtcatgtggttggtacttgctggtatatcgtttctaggatttctagcagctattgttgagaagcatgttaaactacgtacagaaaacaatactgaatttgggattatggatgaaaaggtggatgaaaaggtggatgaaaaagcctgagaaattaaggactttcagaaggaggagctttattacgtattaacggatgacttgaggaattatatgtcgaggggcgtggtatggggactatagatctcgaatatgcgctagtactaagcataatgcgcgttgtactcacg

SEQ ID NO: 35061 - DNA, 840 bp, Muscodor strobelii
  misc_feature: SGI cDNA ID NO. 572129
  misc_feature: Encodes the peptide sequence at SEQ ID NO 35062
atgtctactttaataccaccaggcaccgatctgtctacgatacctatttccccaaatcctgatggtagcccccctaactttggtggggggcagtccttacagccagcggctttgggtaccggaattgcattcatcgtcgttagctttacagtgttgatcatgagactctatgctgtattcaagagtagcaaaaggctatttgccgaagactacgtctgttgcgttggcgaactgtttgctatcgcctactgggtcactttgtacactgtacacgctcgaattggggcatttagacattcatgggacattcctctatcagtactcgcgacctacgaaaaagctgatgtaattgagcaagtgttcagctcttttgctcatgctcttgtcaaatgttcgataatattgttctatattcgaatgttcggtgctcttcgttgggttcgaagtacctgctatgtgctactcgtcgcgacgccagtgttctatcttgtctatcttgtcctcggcttggtctattgcattcctcaaccgggtgcaacttggctctcagatccttttagatgccctagcgttgccgcgccggcgacagttgcggctgggaccatcgcagtattcatagacattgttctctttacaatcccattctttgtcatatcctctcttaatttgagcaagaatagtagaaggggtctagtagttgtatttactatcggagtcttaatcattgcatccggcgttgcagaccttgctttcagagttatcgtcttcattggtctggaggatgcaatatggaatggaacaaatgtcgctattacgtcgtatgttcaaagtacatactga

SEQ ID NO: 35062 - protein, 279 aa, Muscodor strobelii
  misc_feature: SGI Peptide ID NO. 572129
  misc_feature (10)..(276): NCBI GI: 238840889 Blast Desc: conserved [Microsporum canis CBS 113480]
  misc_feature (10)..(239): NCBI GI: 238842461 Blast Desc: conserved [Microsporum canis CBS 113480]
  misc_feature (10)..(276): NCBI GI: 169612652 Blast Desc: SNOG_09450 [Phaeosphaeria nodorum SN15] gi|111061595|gb|EAT82715.1| SNOG_09450 [Phaeosphaeria nodorum SN15]
  misc_feature (10)..(273): NCBI GI: 242766624 Blast Desc: conserved [Talaromyces stipitatus ATCC 10500] gi|218724404|gb|EED23821.1| conserved [Talaromyces stipitatus ATCC 10500]
  misc_feature (75)..(276): NCBI GI: 171679922 Blast Desc: protein product [Podospora anserina] gi|170939587|emb|CAP64814.1| protein product [Podospora anserina]
  misc_feature (5)..(265): NCBI GI: 238843108 Blast Desc: conserved [Microsporum canis CBS 113480]
  misc_feature (1)..(271): NCBI GI: 242764820 Blast Desc: TSTA_068860 [Talaromyces stipitatus ATCC 10500] gi|218724045|gb|EED23462.1| TSTA_068860 [Talaromyces stipitatus ATCC 10500]
  misc_feature (7)..(238): NCBI GI: 145242916 Blast Desc: An11g00060 [Aspergillus niger] gi|134078677|emb|CAK48239.1| protein product [Aspergillus niger]
  misc_feature (16)..(279): NCBI GI: 242761452 Blast Desc: conserved [Talaromyces stipitatus ATCC 10500] gi|218723378|gb|EED22795.1| conserved [Talaromyces stipitatus ATCC 10500]
  misc_feature (5)..(276): NCBI GI: 169777221 Blast Desc: [Aspergillus oryzae RIB40] gi|83771813|dbj|BAE61943.1| protein product [Aspergillus oryzae]
MSTLIPPGTDLSTIPISPNPDGSPPNFGGGQSLQPAALGTGIAFIVVSFTVLIMRLYAVFKSSKRLFAEDYVCCVGELFAIAYWVTLYTVHARIGAFRHSWDIPLSVLATYEKADVIEQVFSSFAHALVKCSIILFYIRMFGALRWVRSTCYVLLVATPVFYLVYLVLGLVYCIPQPGATWLSDPFRCPSVAAPATVAAGTIAVFIDIVLFTIPFFVISSLNLSKNSRRGLVVVFTIGVLIIASGVADLAFRVIVFIGLEDAIWNGTNVAITSYVQSTY

SEQ ID NO: 35063 - DNA, 1312 bp, Muscodor strobelii
  misc_feature: SGI EST ID NO. CUFF.83441.0
  misc_feature: Variant of the nucleotide sequence at SEQ ID NO 35061
cgaagactacgtctgttgcgttggcgaactgtttgctatcgcctactgggtcactttgtacactgtacacgctcgaattggggcatttagacattcatgggacattcctctatcagtactcgcgacctacgaaaaagctgatgtaattgagcaagtgttcagctcttttgctcatgctcttgtcaaatgttcgataatattgttctatattcgaatgttcggtgctcttcgttgggttcgaagtacctgctatgtgctactcgtcgcgacgccagtgttctatcttgtctatcttgtcctcggcttggtctattgcattcctcaaccgggtgcaacttggctctcagatccttttagatgccctagcgttgccgcgccggcgacagttgcggctgggaccatcgcagtattcatagacattgttctctttacaatcccattctttgtcatatcctctcttaatttgagcaagaatagtagaaggggtctagtagttgtatttactatcggagtcttaatcattgcatccggcgttgcagaccttgctttcagagttatcgtcttcattggtctggaggatgcaatatggaatggaacaaatgtcgctattacgtcatacaccgaaatgtttggcacagtgatagtcagctgtgcgccgggcatctattcattttggagacaatcagtcgctccaagttcagcttataactccatgcgatcattactccagagaagtccaaggtccactacaaagatgcagagcaatgtctcagaggaagtacactccctgccacccgaagatcgacgctcttttcattcacaagacaaaaaacgcgcgtatagttcagaatctgctcaggggctcgtgaataatccgatccccttggaaggcataacaaaatctacgctcatcaaacaacatagcgataacgttgattccatcgataagacccaaaatggagaatgggaaatgaaaaaggtaactcgagaatggtaaaaagcggcgtacttatccagcttatcaatgtcacttctacctcgcgaggatcgggggcagaacgctacatcaagacaatccacttgatgttccgctctctaggacgctgttgttgcggtgaatttccactcgtgtccccctttttcgttgatgaagcccattcatgagcggttgaaccttgaaacgggcaaactaagtggcaagctacagtgttgcctacagtcattacaactatgcctagcgttgttaagacaatataggattaaatgctgatgttctaaagtgtatttcgttgacgatgtttacattcaatgc

SEQ ID NO: 35064 - DNA, 1053 bp, Muscodor strobelii
  misc_feature: SGI cDNA ID NO. 572130
  misc_feature: Encodes the peptide sequence at SEQ ID NO 35065
atgggcggaaagatttggtctcccgaggaggaggtgtacttctggcgaacggtgatggagcattctccaaagcgttgcggccctcatctggccaaccccatggtgtcctgggccgatctggcgactcagatgcagagtgacatgggcgccgaggcacgacgacagtatacgccgtcgatgctttttgagcattggttccagaacgtcgaaacccagcgcatctccccgaatgcgacgctcttcgttcgggagtaccttcgcagactcagggacacccctgagtatatgtggaatgcccgtcgcgcggtggatgctatgatcgccatcgaaccggaggatgtcgagcgtcgcgccgctgccgccgacggccccccggcggcccctcagcctggctttgctgagcctttcgtgcccagcgaccccatccccattcctgctccctctcgccccgctcccggttcttctggggctgatgcccgtcctgctctcgctgtcgctggaccctctcgccgtcccggcttccgcgctataaacgaggaggactacgaggactatgatggcgaggagccagtcaacttcccggagttcttcagccctccgcctcctcccaatccggccatggaagcgctgcgaacccgatctgaggagctcgagcgtgagcgaactcgcatgctggctcgcactcatgcccatcgccctcccgtcgtggcgtcgccctcacatgttcccatccccggactggaccactacaattcggccagtattcctcgcatgcctcccacccccaggcctgctcacttgcatccacctcgtcttgcgcaccccgtcgctgctcctgtcattcctgctgcgcttttcgcgcctgacactcctgaggctcttgcttctcctgacggcgctgaggctgaggatgctcctgtcaaccccggggatgagccgatggatttttacgacttcgccaactacgacgattacatgacctttttcgcggctgacgatccgccgctcttccccgacgacggtcagtctgctagtggacagtctcagccgtaa

SEQ ID NO: 35065 - protein, 350 aa, Muscodor strobelii
  misc_feature: SGI Peptide ID NO. 572130
  misc_feature (1)..(87): NCBI GI: 46123487 Blast Desc: FG06121.1 [Gibberella zeae PH-1]
  misc_feature (1)..(70): NCBI GI: 154299396 Blast Desc: [Botryotinia fuckeliana B05.10] gi|150857302|gb|EDN32494.1| [Botryotinia fuckeliana B05.10]
  misc_feature (1)..(70): NCBI GI: 85100272 Blast Desc: NCU01373 [Neurospora crassa OR74A] gi|11595662|emb|CAC18284.1| [Neurospora crassa] gi|28922463|gb|EAA31694.1| [Neurospora crassa OR74A]
  misc_feature (1)..(63): NCBI GI: 116206322 Blast Desc: [Chaetomium globosum CBS 148.51] gi|88183051|gb|EAQ90519.1| [Chaetomium globosum CBS 148.51]
MGGKIWSPEEEVYFWRTVMEHSPKRCGPHLANPMVSWADLATQMQSDMGAEARRQYTPSMLFEHWFQNVETQRISPNATLFVREYLRRLRDTPEYMWNARRAVDAMIAIEPEDVERRAAAADGPPAAPQPGFAEPFVPSDPIPIPAPSRPAPGSSGADARPALAVAGPSRRPGFRAINEEDYEDYDGEEPVNFPEFFSPPPPPNPAMEALRTRSEELERERTRMLARTHAHRPPVVASPSHVPIPGLDHYNSASIPRMPPTPRPAHLHPPRLAHPVAAPVIPAALFAPDTPEALASPDGAEAEDAPVNPGDEPMDFYDFANYDDYMTFFAADDPPLFPDDGQSASGQSQP

SEQ ID NO: 35066 - DNA, 645 bp, Muscodor strobelii
  misc_feature: SGI cDNA ID NO. 572131
  misc_feature: Elevated expression when VOC is produced
  misc_feature: Encodes the peptide sequence at SEQ ID NO 35067
atgaatctaaatctttctggggcgctcaacgtcttcaagctctttgctaagccctcattatgtctgcctcatgcgactgtatccacatttgccgaccttccttctccattagataaagtatttgaggctcaaggcaagaagagcaatatcaaagcagttatactcgataaagacgattgctttgcatatccaaacacaaatgagatacatcctccatatactgagcgctttagccagctgcgcaaagagtatccaggtcagaaactagtcatagtttcaaatactgctggtgctacttcatacgatcgcgatgggcgtttggcaaaggaactggaggcagcaacaggagtcttcgttctctcccatagcaccaagaagccaggctgcaaagacgagatcatggctcacttcagaaaacacccagaaacgggcgtaacacatccaagtgatatagctgtcattggtgatcgcctcatgacggacatgatgcttgccaatatgatgggtagctggggcatatggatcaaggatggtgtcaagccccatagtcagaagagtgtgttctcaaaatttgagcaacgtctcggccctttcttgatgaatcgcggctttcatgcacctgaccctatgagccctttcgagtga

SEQ ID NO: 35067 - protein, 214 aa, Muscodor strobelii
  misc_feature: SGI Peptide ID NO. 572131
  misc_feature (5)..(181): Pfam Id: PF09419 Pfam Desc: Domain of function
  misc_feature (1)..(214): NCBI GI: 85100264 Blast Desc: NCU01371 [Neurospora crassa OR74A] gi|16415990|emb|CAD01105.1| conserved [Neurospora crassa] gi|28922461|gb|EAA31692.1| conserved [Neurospora crassa OR74A]
  misc_feature (1)..(214): NCBI GI: 261355546 Blast Desc: conserved [Verticillium albo-atrum VaMs.102]
  misc_feature (1)..(189): NCBI GI: 171693517 Blast Desc: protein product [Podospora anserina] gi|170946707|emb|CAP73510.1| protein product [Podospora anserina]
  misc_feature (1)..(214): NCBI GI: 256731437 Blast Desc: NECHADRAFT_84888 [Nectria haematococca mpVI 77-13-4]
  misc_feature (1)..(189): NCBI GI: 116206324 Blast Desc: conserved [Chaetomium globosum CBS 148.51] gi|88183052|gb|EAQ90520.1| conserved [Chaetomium globosum CBS 148.51]
  misc_feature (3)..(214): NCBI GI: 156042163 Blast Desc: SS1G_11632 [Sclerotinia sclerotiorum 1980] gi|154696015|gb|EDN95753.1| SS1G_11632 [Sclerotinia sclerotiorum 1980]
  misc_feature (1)..(195): NCBI GI: 145602582 Blast Desc: MGG_09486 [Magnaporthe grisea 70-15] gi|145010982|gb|EDJ95638.1| MGG_09486 [Magnaporthe grisea 70-15]
  misc_feature (3)..(180): NCBI GI: 189199036 Blast Desc: conserved [Pyrenophora tritici-repentis Pt-1C-BFP] gi|187982954|gb|EDU48442.1| conserved [Pyrenophora tritici-repentis Pt-1C-BFP]
  misc_feature (3)..(174): NCBI GI: 169614185 Blast Desc: SNOG_10229 [Phaeosphaeria nodorum SN15] gi|160707293|gb|EAT82564.2| SNOG_10229 [Phaeosphaeria nodorum SN15]
  misc_feature (3)..(199): NCBI GI: 45190993 Blast Desc: AER392Wp [Ashbya gossypii ATCC 10895] gi|44984061|gb|AAS53071.1| AER392Wp [Ashbya gossypii ATCC 10895]
  misc_feature: Useful for introducing or modulating the production of volatile compounds
MNLNLSGALNVFKLFAKPSLCLPHATVSTFADLPSPLDKVFEAQGKKSNIKAVILDKDDCFAYPNTNEIHPPYTERFSQLRKEYPGQKLVIVSNTAGATSYDRDGRLAKELEAATGVFVLSHSTKKPGCKDEIMAHFRKHPETGVTHPSDIAVIGDRLMTDMMLANMMGSWGIWIKDGVKPHSQKSVFSKFEQRLGPFLMNRGFHAPDPMSPFE

SEQ ID NO: 35068 - DNA, 1476 bp, Muscodor strobelii
  misc_feature: SGI EST ID NO. CUFF.83451.0
  misc_feature: Variant of the nucleotide sequence at SEQ ID NO 35066
gtctgttgatcttctcaccaccaaactcaccacgacatcaagacatcaagacatctagactcatgtcatactcgggcgcttatagtcattagcttgatgcacctacaatgaatctaaatctttctggggcgctcaacgtcttcaagctctttgctaagccctcattatgtctgcctcatgcgactgtatccacatttgccgaccttccttctccattagataaagtatttgaggctcaaggcaagaagagcaatatcaaagcagttatactcgataaagacgattgctttgcatatccaaacacaaatgagatacatcctccatatactgagcgctttagccagctgcgcaaagagtatccaggtcagaaactagtcatagtttcaaatactgctggtgctacttcatacgatcgcgatgggcgtttggcaaaggaactggaggcagcaacaggagtcttcgttctctcccatagcaccaagaagccaggctgcaaagacgagatcatggctcacttcagaaaacacccagaaacgggcgtaacacatccaagtgatatagctgtcattggtgatcgcctcatgacggacatgatgcttgccaatatgatgggtagctggggcatatggatcaaggatggtgtcaagccccatagtcagaagagtgtgttctcaaaatttgagcaacgtctcggccctttcttgatgaatcgcggctttcatgcacctgaccctatgagccctttcgagtgaacagtatcatgaaggcaccccagtgccaggccccaaagagtggcgacaaggtggtaatcaagttgtactgcatacagtatgtcacaggagctcggatatatggagtgtacactacgtctaggcgtggtggaaacttgacgcacatacacgtcgagaatatcggcaagtcacaggttactcgactatcctggtttaatatcggagaacctattctaagggggctgatcgtgttaaatcagcatataatccattgacgatgggagacgtaagattgtgcttggtggcccgcactttctatggcggcgaaccacagttcgcattgggcaacatcatgagccaaatacgccgaaagcgtgcccatagggaattacttaatttgccgacaaaaacgagctcggattggaactgcattagatctatctgggctctgcggcgcatttggcttgacaccaatctacctatatcctcttataagaacacctactgttaatgccattgtggaaacaagccggcaatgctccgaagaatgcatcatctgtgtacactctattctattcaaataataccgatataccgtagtgacttgctgggacactgcgagcttctgcaagtcgactttgctgtctttccgaagctcaatgggcttttctgagcggagaacaatcggacttgaagttctttttgaatgacaacgacccaacaacgaatttatttttcattcaca

SEQ ID NO: 35069 - DNA, 1824 bp, Muscodor strobelii
  misc_feature: SGI cDNA ID NO. 572132
  misc_feature: Encodes the peptide sequence at SEQ ID NO 35070
atggacccgctggagctgcctgccaaccgcgccttaacgcgtttcgatttcgattgcgaccgctgtgatgtaacacctgccgcagttttcaagccacagacgacgataacgacagcaacgtacacagagctcgaccgtccgcgcattcttgtcctcgccacggtcactcccgtcatgaacggcactcctcaaaaacgtcgtcacgatgccctcggcgagcctgaagagggcactccttcgaaacgacggtcctcacgcgctggcgctggtactcgtgccaaagatgtctactcagaatatgagttcccttccgatggcgagctgaatcctcaacccacaaccaaatctacgcccaaaaaacgagcaagacaaccggcagtaaacggggatgctgaggcttctacaccaagtgggcgtaaagccaaacggctcgatgtaacgaccccaaagtcaaaaaggggattgaagaatggtgaaacaccacgacggcaacggaatgatcgatccgcgcgaaagaagagtgcccgagccctcattgagaaagtggtgggcggtgcatccagcgacgaggaaggagacgaggagattgctcgtgagatatacgagtctagtgaagaggatgaagacgacgaccaggaggatggacacgacccacaagatacactggacgaggcaacgacaccgtccaagaagcctcgaggacgccccaaagtagtgaagggtagacggacgcgaaagaagtcgccaacgccaccccccgatctcccgcctcacgagctgtattttgcccaaaacaggcccggagcgaataagacatcaaacaacacactcacttccctcaagcttctcactcatgaagagtatttctctctcctacgcgactacaaagatccacatgccgaggacgtcgagtttctagactcaatacacgtgctttcatttccacaatgggtctttgagctctcacaaggattcagtgtctgtctctgtggatatggctcaaaacgaccattactacacaagttcgcgaagcatgtttacgacacgatatctgaccacgagagtcacaagatcgtcattgtcaacggctatgttcgcgcgaaccagagttccctgcgagagattctcggcgtggttgctggagcgatagaccccaaacacaaggtggctgcaggcggacctgccatcatgatggacgacctcaagattttattgtcggctcacgatattctcatcactgttgtgttaaactcaattgattccgctcctcttcgaagacctgggtttcagccaatattggcacagcttgccatgcacccgcagattcggctcatatgctcagccgatacacccgacttcacattattatgggacagcagtctacgctcgtcatttagcttcgtcttccatgactgcacgacatttgcaccctttacggccgagctggaagttgtcgatgatgtgcacgagctcctcggccgcaaggcccgtcgtgtcggcggcaaggaaggtgtaacatatgtgctgcgcagtttgacagagaatgcgagaaatctgttccgtctgcttgtcggtgaagtgcttgtcgctatggatgacgacaatggatcgatggaggagaatcctggtgttgagtataggattgtatacaacaaggcggtggaggagttcatttgcagttccgagatggctttccggacgctgctcaaagagttccacgaccaccaaatgatcacaagtcggaaagacgtcctagggacagagctgctcagtgtaccctttccgaaggaagaactcgaggggatccttgaggaccttgtatag

SEQ ID NO: 35070 - protein, 607 aa, Muscodor strobelii
  misc_feature: SGI Peptide ID NO. 572132
  misc_feature (263)..(607): Pfam Id: PF04084 Pfam Desc: Origin recognition complex subunit 2
  misc_feature (93)..(607): NCBI GI: 46123489 Blast Desc: FG06122.1 [Gibberella zeae PH-1]
  misc_feature (64)..(607): NCBI GI: 256731045 Blast Desc: [Nectria haematococca mpVI 77-13-4]
  misc_feature (73)..(607): NCBI GI: 261355547 Blast Desc: origin recognition complex subunit 2 [Verticillium albo-atrum VaMs.102]
  misc_feature (73)..(596): NCBI GI: 85100260 Blast Desc: NCU01370 [Neurospora crassa OR74A] gi|16415991|emb|CAB88634.2| related to origin recognition complex subunit 2 [Neurospora crassa] gi|28922460|gb|EAA31691.1| crassa
  misc_feature (85)..(607): NCBI GI: 156065239 Blast Desc: SS1G_00630 [Sclerotinia sclerotiorum 1980] gi|154691489|gb|EDN91227.1| SS1G_00630 [Sclerotinia sclerotiorum 1980]
  misc_feature (134)..(607): NCBI GI: 154311355 Blast Desc: BC1G_06530 [Botryotinia fuckeliana B05.10] gi|150850927|gb|EDN26120.1| BC1G_06530 [Botryotinia fuckeliana B05.10]
  misc_feature (63)..(584): NCBI GI: 116206326 Blast Desc: CHGG_02456 [Chaetomium globosum CBS 148.51] gi|88183053|gb|EAQ90521.1| CHGG_02456 [Chaetomium globosum CBS 148.51]
  misc_feature (106)..(574): NCBI GI: 145602584 Blast Desc: MGG_09487 [Magnaporthe grisea 70-15] gi|145010983|gb|EDJ95639.1| MGG_09487 [Magnaporthe grisea 70-15]
  misc_feature (134)..(596): NCBI GI: 171693515 Blast Desc: protein product [Podospora anserina] gi|170946706|emb|CAP73509.1| protein product [Podospora anserina]
  misc_feature (105)..(607): NCBI GI: 212535474 Blast Desc: origin recognition complex subunit 2, [Penicillium marneffei ATCC 18224] gi|210070292|gb|EEA24382.1| origin recognition complex subunit 2, [Penicillium marneffei ATCC 18224]
MDPLELPANRALTRFDFDCDRCDVTPAAVFKPQTTITTATYTELDRPRILVLATVTPVMNGTPQKRRHDALGEPEEGTPSKRRSSRAGAGTRAKDVYSEYEFPSDGELNPQPTTKSTPKKRARQPAVNGDAEASTPSGRKAKRLDVTTPKSKRGLKNGETPRRQRNDRSARKKSARALIEKVVGGASSDEEGDEEIAREIYESSEEDEDDDQEDGHDPQDTLDEATTPSKKPRGRPKVVKGRRTRKKSPTPPPDLPPHELYFAQNRPGANKTSNNTLTSLKLLTHEEYFSLLRDYKDPHAEDVEFLDSIHVLSFPQWVFELSQGFSVCLCGYGSKRPLLHKFAKHVYDTISDHESHKIVIVNGYVRANQSSLREILGVVAGAIDPKHKVAAGGPAIMMDDLKILLSAHDILITVVLNSIDSAPLRRPGFQPILAQLAMHPQIRLICSADTPDFTLLWDSSLRSSFSFVFHDCTTFAPFTAELEVVDDVHELLGRKARRVGGKEGVTYVLRSLTENARNLFRLLVGEVLVAMDDDNGSMEENPGVEYRIVYNKAVEEFICSSEMAFRTLLKEFHDHQMITSRKDVLGTELLSVPFPKEELEGILEDLV

SEQ ID NO: 35071 - DNA, 2987 bp, Muscodor strobelii
  misc_feature: SGI EST ID NO. CUFF.83495.0
  misc_feature: Variant of the nucleotide sequence at SEQ ID NO 35069
tgcctgccaaccgcgccttaacgcgtttcgatttcgattgcgaccgctgtgatgtaacacctgccgcagttttcaagccacagacgacgataacgacagcaacgtacacagagctcgaccgtccgcgcattcttgtcctcgccacggtcactcccgtcatgagtcagcctttcagattgccgtagaataaacatggtccgtacgaaaagaggcgcggcggcgcccactaaaacagcgacagacggcactcctcaaaaacgtcgtcacgatgccctcggcgagcctgaagagggcactccttcgaaacgacggtcctcacgcgctggcgctggtactcgtgccaaagatgtctactcagaatatgagttcccttccgatggcgagctgaatcctcaacccacaaccaaatctacgcccaaaaaacgagcaagacaaccggcagtaaacggggatgctgaggcttctacaccaagtgggcgtaaagccaaacggctcgatgtaacgaccccaaagtcaaaaaggggattgaagaatggtgaaacaccacgacggcaacggaatgatcgatccgcgcgaaagaagagtgcccgagccctcattgagaaagtggtgggcggtgcatccagcgacgaggaaggagacgaggagattgctcgtgagatatacgagtctagtgaagaggatgaagacgacgaccaggaggatggacacgacccacaagatacactggacgaggcaacgacaccgtccaagaagcctcgaggacgccccaaagtagtgaagggtagacggacgcgaaagaagtcgccaacgccaccccccgatctcccgcctcacgagctgtattttgcccaaaacaggcccggagcgaataagacatcaaacaacacactcacttccctcaagcttctcactcatgaagagtatttctctctcctacgcgactacaaagatccacatgccgaggacgtcgagtttctagactcaatacacgtgctttcatttccacaatgggtctttgagctctcacaaggattcagtgtctgtctctgtggatatggctcaaaacgaccattactacacaagttcgcgaagcatgtttacgacacgatatctgaccacgagagtcacaagatcgtcattgtcaacggctatgttcgcgcgaaccagagttccctgcgagagattctcggcgtggttgctggagcgatagaccccaaacacaaggtggctgcaggcggacctgccatcatgatggacgacctcaagattttattgtcggctcacgatattctcatcactgttgtgttaaactcaattgattccgctcctcttcgaagacctgggtttcagccaatattggcacagcttgccatgcacccgcagattcggctcatatgctcagccgatacacccgacttcacattattatgggacagcagtctacgctcgtcatttagcttcgtcttccatgactgcacgacatttgcaccctttacggccgagctggaagttgtcgatgatgtgcacgagctcctcggccgcaaggcccgtcgtgtcggcggcaaggaaggtgtaacatatgtgctgcgcagtttgacagagaatgcgagaaatctgttccgtctgcttgtcggtgaagtgcttgtcgctatggatgacgacaatggatcgatggaggagaatcctggtgttgagtataggattgtatacaacaaggcggtggaggagttcatttgcagttccgagatggctttccggacgctgctcaaagagttccacgaccaccaaatgatcacaagtcggaaagacgtcctagggacagagctgctcagtgtaccctttccgaaggaagaactcgaggggatccttgaggaccttgtatagaatacctcacaatcaaaatgacacaacaagatatcacagggcagcggacttcgatcacagatcaactcacgagtaaatgaacgcatacggtactctttgattcccacatgcatcctaactaatctgatatacgctccaccttccgcttcccaaccacactctccatctcatgtttctcaacatccttcatcaagtcactcttctcatctaacctcgtccacttgggtttcccatccggtaagtcgaccacccgctggctgtagaaaatatgacacctgcaccatcatgtcagcccagactccttcagcaaaatagctaaagcagagtaactcactgtggatcaaagaatttcttatgctcggcatcttcgaatttgatgataccgggaaacatcaaaaccatgttcctcccctcatccataatcggcgagtgacagtacgaacagctgactttcaccggtaattcgtaatgcgtgcccttggttgctgaatgatagaatgctaggccttcagcgccattttcgaagtgtagatcttctttgtggaagattgccgcccattgaaatggtgcgcctatgtaattcatattagcggctcaactttcacgtcagtattattttggggatatgaggtgtaccatgcaacgcctgacagtcaacacaatggcagaatttcgcagcaagtggcttatctcgacttaaccagtactttactctaccacagtggcaatgtgctgtgtatttcttctcgaatttctcgttggagtctgctgtgcggtatggtggtctgttcttccagtcttcgtcccgcttggggccgtcaccgtcgagatgtccgtctttgttgttttgtgtcgttttgctcggcattgtgtggaatgtgactcgatttgctggagatggggcgtttgtgagggctagagcacgtgaggtgttgatatggtggtttatgggcggtttggatgtgctgtagttacaggtacagcggtgtaggtatgacgggtgatgacgtcgcagacctccaaccgtaaacaattggagtggttttctaagtaggagcattcaggttagagattctacggactagatttctcaatgttct

SEQ ID NO: 35072 - DNA, 627 bp, Muscodor strobelii
  misc_feature: SGI cDNA ID NO. 572133
  misc_feature: Encodes the peptide sequence at SEQ ID NO 35073
atgccgagcaaaacgacacaaaacaacaaagacggacatctcgacggtgacggccccaagcgggacgaagactggaagaacagaccaccataccgcacagcagactccaacgagaaattcgagaagaaatacacagcacattgccactgtggtagagtaaagtactggttaagtcgagataagccacttgctgcgaaattctgccattgtgttgactgtcaggcgttgcatggcgcaccatttcaatgggcggcaatcttccacaaagaagatctacacttcgaaaatggcgctgaaggcctagcattctatcattcagcaaccaagggcacgcattacgaattaccggtgaaagtcagctgttcgtactgtcactcgccgattatggatgaggggaggaacatggttttgatgtttcccggtatcatcaaattcgaagatgccgagcataagaaattctttgatccacagtgtcatattttctacagccagcgggtggtcgacttaccggatgggaaacccaagtggacgaggttagatgagaagagtgacttgatgaaggatgttgagaaacatgagatggagagtgtggttgggaagcggaaggtggagcgtatatcagattag

SEQ ID NO: 35073 - protein, 208 aa, Muscodor strobelii
  misc_feature: SGI Peptide ID NO. 572133
  misc_feature (2)..(188): NCBI GI: 156063012 Blast Desc: SS1G_01622 [Sclerotinia sclerotiorum 1980] gi|154696958|gb|EDN96696.1| SS1G_01622 [Sclerotinia sclerotiorum 1980]
  misc_feature (6)..(188): NCBI GI: 154318995 Blast Desc: BC1G_02449 [Botryotinia fuckeliana B05.10] gi|150856880|gb|EDN32072.1| BC1G_02449 [Botryotinia fuckeliana B05.10]
  misc_feature (24)..(205): NCBI GI: 169615933 Blast Desc: SNOG_11133 [Phaeosphaeria nodorum SN15] gi|160703075|gb|EAT81632.2| SNOG_11133 [Phaeosphaeria nodorum SN15]
  misc_feature (22)..(186): NCBI GI: 256724887 Blast Desc: NECHADRAFT_34722 [Nectria haematococca mpVI 77-13-4]
  misc_feature (16)..(188): NCBI GI: 189207034 Blast Desc: conserved [Pyrenophora tritici-repentis Pt-1C-BFP] gi|187975944|gb|EDU42570.1| conserved [Pyrenophora tritici-repentis Pt-1C-BFP]
  misc_feature (23)..(190): NCBI GI: 46110579 Blast Desc: FG02171.1 [Gibberella zeae PH-1]
  misc_feature (22)..(188): NCBI GI: 145233747 Blast Desc: An02g11170 [Aspergillus niger] gi|134057180|emb|CAK44447.1| protein product [Aspergillus niger]
  misc_feature (18)..(193): NCBI GI: 238485596 Blast Desc: conserved [Aspergillus flavus NRRL3357] gi|220698915|gb|EED55254.1| conserved [Aspergillus flavus NRRL3357]
  misc_feature (21)..(189): NCBI GI: 261355378 Blast Desc: conserved [Verticillium albo-atrum VaMs.102]
  misc_feature (18)..(188): NCBI GI: 169771807 Blast Desc: [Aspergillus oryzae RIB40] gi|83768232|dbj|BAE58371.1| protein product [Aspergillus oryzae]
MPSKTTQNNKDGHLDGDGPKRDEDWKNRPPYRTADSNEKFEKKYTAHCHCGRVKYWLSRDKPLAAKFCHCVDCQALHGAPFQWAAIFHKEDLHFENGAEGLAFYHSATKGTHYELPVKVSCSYCHSPIMDEGRNMVLMFPGIIKFEDAEHKKFFDPQCHIFYSQRVVDLPDGKPKWTRLDEKSDLMKDVEKHEMESVVGKRKVERISD

SEQ ID NO: 35074 - DNA, 1052 bp, Muscodor strobelii
  misc_feature: SGI EST ID NO. CUFF.83496.1
  misc_feature: Variant of the nucleotide sequence at SEQ ID NO 35072
cctgaatgctcctacttagaaaaccactccaattgtttacggttggaggtctgcgacgtcatcacccgtcatacctacaccgctgtacctgtaactacagcacatccaaaccgcccataaaccaccatatcaacacctcacgtgctctagccctcacaaacgccccatctccagcaaatcgagtcacattccacacaatgccgagcaaaacgacacaaaacaacaaagacggacatctcgacggtgacggccccaagcgggacgaagactggaagaacagaccaccataccgcacagcagactccaacgagaaattcgagaagaaatacacagcacattgccactgtggtagagtaaagtactggttaagtcgagataagccacttgctgcgaaattctgccattgtgttgactgtcaggcgttgcatggcgcaccatttcaatgggcggcaatcttccacaaagaagatctacacttcgaaaatggcgctgaaggcctagcattctatcattcagcaaccaagggcacgcattacgaattaccggtgaaagtcagctgttcgtactgtcactcgccgattatggatgaggggaggaacatggttttgatgtttcccggtatcatcaaattcgaagatgccgagcataagaaattctttgatccacagtgtcatattttctacagccagcgggtggtcgacttaccggatgggaaacccaagtggacgaggttagatgagaagagtgacttgatgaaggatgttgagaaacatgagatggagagtgtggttgggaagcggaaggtggagcgtatatcagattagttaggatgcatgtgggaatcaaagagtaccgtatgcgttcatttactcgtgagttgatctgtgatcgaagtccgctgccctgtgatatcttgttgtgtcattttgattgtgaggtattctatacaaggtcctcaaggatcccctcgagttcttccttcggaaagggtacactgagcagctctgtccctaggacgtctttccgacttgtgatcatttggtggtcgtgga

SEQ ID NO: 35075 - DNA, 1881 bp, Muscodor strobelii
  misc_feature: SGI cDNA ID NO. 572134
  misc_feature: Encodes the peptide sequence at SEQ ID NO 35076
atgaatagatctactactctagctctgaggagcctgaaagaattctctcgatccacgtccttgtcgttcccgggaaagaagcccgcctacttgaaagctactggtcctcacgatgcacgattttcttggtggacggtaatcttgatttggcgattgcagattctggctctggtcataagcttgggcagcttcacggcggttattgccctcgcggcaagtttcggaaaccgacccctatctgattggccgtcacggattgtatctataggtgctctcgtatcggccctcagcataatatcaaagctgtcactaacagccttgctggctgactctattagtcaagccaaatggagatggtttcagcagccagaggggaaagggaaaccgtttgcggatatggaactgattgatgatgcgtctcgaagcccctggggtggcattttgtggctctcgcaacgatctgggaagaacatggtttcttttgcagcagttatattgatcctcttaacggccttagagttcttcttgcagcaacttcttgttattgatacgagatttgtggtcgaccacacgcagactgctcatataccgtgggtaggaaactactcccacgatattaatacggatacctgggaagatgcgatcactaatgggatattcaatagcgatattcctgatttaccattggtctgtccgtctggaaactgtacttggaatccggtatcttcagtcggagtttgtggagaatgtgtcgacgttacttcagctcaaccaagagaatggattacatgttccggatttttttgtaattacactctcaaagagcctgggattgatgtgcgcagtgatatcgtttcgctcttcaatgcaccgccacccaacacggtttggaagtacactgaccttcctgcaattttcccaccgccatcggggactcaccccgagggcatgcagtatagggagtatagggtccctttatcagctctaacctcggaatcaaataccaacctcgacacaaggggaacacttgctttcatagttctgccgtacgattctgttacgcacaatgatgatgcaatctggcctctttctgattattactttcgagaccctaaagcgttggtatgcgacttccgagcatgtatcgagtctattaaggctaaggtcgagaatggagaagcaacacaagccgtagtgaaaacggcgcggccaagcttcttgtccaaagccgatcagcctgacgaaaaaataggaagcaccgtgttctcggatattcctggcttcaatatgcaaggacggaacttttcggtcacgaagttctggcccgaaaataactcagtctctgttgagagtgacgtgcggacaataactgttttctcggccactgcgtcgataaccagcttgaatcatacccaatgtatttcctcggtttccgatccactattcttcagtagatgggatcgtgtcaatgtcgccaatcattcgctcttggcgagcaacatcgccaaaagcataaataatgtgctacgccgagagttccaggtgcctgcaacaaggacagatgatatcttcgccggggatgtgtgggtgcagcaagcttacatccatgtgcggtggggttgggccgcatacccgagtgcagttatggtcgcgagttttggcttgcttatatttgacatgtttcaaacaaaagaagccggaaatcgatatttaccatggaaaaacgggattatacacctggctttgttggaggttgaagatgggctgaggagcttaggaaagggctcttacgcggtacaccatggcgtacaggcatctgtaggagaggagcaggttcgtatggatagtgatgaggaaggttggatgctcggtagggtttaa

SEQ ID NO: 35076 - protein, 626 aa, Muscodor strobelii
  misc_feature: SGI Peptide ID NO. 572134
  misc_feature (74)..(619): NCBI GI: 169612752 Blast Desc: SNOG_09502 [Phaeosphaeria nodorum SN15] gi|111061647|gb|EAT82767.1| SNOG_09502 [Phaeosphaeria nodorum SN15]
  misc_feature (46)..(253): NCBI GI: 189190860 Blast Desc: conserved [Pyrenophora tritici-repentis Pt-1C-BFP] gi|187973375|gb|EDU40874.1| conserved [Pyrenophora tritici-repentis Pt-1C-BFP]
  misc_feature (85)..(605): NCBI GI: 225560573 Blast Desc: conserved [Ajellomyces capsulatus G186AR]
  misc_feature (85)..(605): NCBI GI: 240280136 Blast Desc: conserved [Ajellomyces capsulatus H143]
  misc_feature (49)..(618): NCBI GI: 170940326 Blast Desc: protein product [Podospora anserina]
  misc_feature (32)..(296): NCBI GI: 115492355 Blast Desc: [Aspergillus terreus NIH2624] gi|114197665|gb|EAU39365.1| [Aspergillus terreus NIH2624]
  misc_feature (66)..(569): NCBI GI: 169606850 Blast Desc: SNOG_06475 [Phaeosphaeria nodorum SN15] gi|160707094|gb|EAT86306.2| SNOG_06475 [Phaeosphaeria nodorum SN15]
  misc_feature (50)..(259): NCBI GI: 164425452 Blast Desc: NCU05801 [Neurospora crassa OR74A] gi|157070931|gb|EAA30825.2| NCU05801 [Neurospora crassa OR74A]
  misc_feature (50)..(254): NCBI GI: 115400213 Blast Desc: [Aspergillus terreus NIH2624] gi|114191361|gb|EAU33061.1| [Aspergillus terreus NIH2624]
  misc_feature (22)..(623): NCBI GI: 70985502 Blast Desc: conserved [Aspergillus fumigatus Af293] gi|66845885|gb|EAL86219.1| conserved [Aspergillus fumigatus Af293]
MNRSTTLALRSLKEFSRSTSLSFPGKKPAYLKATGPHDARFSWWTVILIWRLQILALVISLGSFTAVIALAASFGNRPLSDWPSRIVSIGALVSALSIISKLSLTALLADSISQAKWRWFQQPEGKGKPFADMELIDDASRSPWGGILWLSQRSGKNMVSFAAVILILLTALEFFLQQLLVIDTRFVVDHTQTAHIPWVGNYSHDINTDTWEDAITNGIFNSDIPDLPLVCPSGNCTWNPVSSVGVCGECVDVTSAQPREWITCSGFFCNYTLKEPGIDVRSDIVSLFNAPPPNTVWKYTDLPAIFPPPSGTHPEGMQYREYRVPLSALTSESNTNLDTRGTLAFIVLPYDSVTHNDDAIWPLSDYYFRDPKALVCDFRACIESIKAKVENGEATQAVVKTARPSFLSKADQPDEKIGSTVFSDIPGFNMQGRNFSVTKFWPENNSVSVESDVRTITVFSATASITSLNHTQCISSVSDPLFFSRWDRVNVANHSLLASNIAKSINNVLRREFQVPATRTDDIFAGDVWVQQAYIHVRWGWAAYPSAVMVASFGLLIFDMFQTKEAGNRYLPWKNGIIHLALLEVEDGLRSLGKGSYAVHHGVQASVGEEQVRMDSDEEGWMLGRV

SEQ ID NO: 35077 - DNA, 279 bp, Muscodor strobelii
  misc_feature: SGI EST ID NO. CUFF.83462.0
  misc_feature: Variant of the nucleotide sequence at SEQ ID NO 35075
tggagaatgtgtcgacgttacttcagctcaaccaagagaatggattacatgttccggatttttttgtaattacactctcaaagagcctgggattgatgtgcgcagtgatatcgtttcgctcttcaatgcaccgccacccaacacggtttggaagtacactgaccttcctgcaattttcccaccgccatcggggactcaccccgagggcatgcagtatagggagtatagggtccctttatcagctctaacctcggaatcaaataccaacctcgacacaag

SEQ ID NO: 35078 - DNA, 336 bp, Muscodor strobelii
  misc_feature: SGI cDNA ID NO. 572135
  misc_feature: Encodes the peptide sequence at SEQ ID NO 35079
atgtctggaaaccagcaagatggaaaactcatgacgggtgacgatgctgcacgcattcaagcttcccaagctaagagcggcggtgatatgagctcaagtggttttgccgctcgcgcccaggctgctggcgcgaagaacgatgctgcggcaaaccagacttctggaggctcaggcggtagcaagaagcactgtgaaattgtcctcgttatcgttgtcgacgagtatggaggatgggtgctggttccgatgctgtctgatggatccctttgggagttttttgctccgatgaagttttctcccggaacaagtcaatatctatcagtacaacaatactag

SEQ ID NO: 35079 - protein, 111 aa, Muscodor strobelii
  misc_feature: SGI Peptide ID NO. 572135
  misc_feature (9)..(57): NCBI GI: 242800730 Blast Desc: conserved [Talaromyces stipitatus ATCC 10500] gi|218716992|gb|EED16413.1| conserved [Talaromyces stipitatus ATCC 10500]
  misc_feature (11)..(45): NCBI GI: 85091058 Blast Desc: NCU09650 [Neurospora crassa OR74A] gi|28920098|gb|EAA29480.1| [Neurospora crassa OR74A]
  misc_feature (11)..(58): NCBI GI: 66805243 Blast Desc: DDB_G0289245 [Dictyostelium discoideum AX4] gi|74852303|sp|Q54HT5.1|Y9414_DICDI RecName: Full= uncharacterized protein DDB_G0289245 gi|60464730|gb|EAL62856.1|
  misc_feature (10)..(46): NCBI GI: 169625746 Blast Desc: SNOG_16149 [Phaeosphaeria nodorum SN15] gi|111055401|gb|EAT76521.1| SNOG_16149 [Phaeosphaeria nodorum SN15]
MSGNQQDGKLMTGDDAARIQASQAKSGGDMSSSGFAARAQAAGAKNDAAANQTSGGSGGSKKHCEIVLVIVVDEYGGWVLVPMLSDGSLWEFFAPMKFSPGTSQYLSVQQY

SEQ ID NO: 35080 - DNA, 1698 bp, Muscodor strobelii
  misc_feature: SGI cDNA ID NO. 572136
  misc_feature: Encodes the peptide sequence at SEQ ID NO 35081
atgtcgctattcctcgatcagcgggccagtcaatacttctaccataagctagacgaccaagcgctcacgattcgattgattgacatcctacccggggacttctctgcacctgtatactgcgagctcgttgaggagaagctgataccttctttatcctacaaagctctgtcgtactcatggcagaacgatgaggcatttgcttctgagcttgtatactgcaacgccaagcctatgtcaatcagtgccaatctccacgctgcgcttcgaagactcaggtcccctaatatttatgtcagactatgggtggatgcaatttgcatcaatcaaaaggatgatgtcgagcgtgcacatcagcggggtccatatgatgacatgggcgattggattgatgatgaaagtgcctcgccctcgaatccgaacgtgatcaaatggcacggggatcagagagatatcccaaagctccaagcctatttctctacgattgaggagcgggacaaaaaaagaaaatacggagaggatacctgcgacatctttggtgcactttgcgtactacatcttcttgcaagtggggttcctgttgacaaaatatggcatctacgccactttcaatatgtccatagcattaccaaagggctcaactctataatggataaggcatggtggcgaagaatatgggtcgtacaagagacggtcgtcactcatctaccaacgatatactacgccaatatgtccgtaccatggcgcatgttcgctcttgccgccgtcgagtacgatcaaagtcgcgttaggagcgcaagggaagcattgagcggccaattagacagcgcattggcgttgatgcaattcacacgcgcgacaatggagatcgagtcgacgaggaggagctgggcgatgaatgagcccatgcagcctctcacacttcttcgcaagttccgctcaagattggctactgattcgagagacaagatatttgccgttcttggtcttatacgatcttggggtaaagataaagcgggcttttctctgccggccattgtaccggactatactatgcgtgcggctgagcttttctttaccacgactgagttgctgatcagaaatacgcgatctctcgccgtgcttaccggcacgttgcaaaggggaagtacttgtgatggacatttgccgtcctgggttacagactggggcgctcctccagatgtcaacgaacatgtacgactcgggaatctccacatctatgaaagtccctactatttcgcaggcagtgtcaagactcatggacgccggattcttcagactggcgggaggatcgtagatgaaatatatcacgtaggacgcgagcttgagagtgggcagggaaggaacagatcaaggcgcgtggtaatggaatgggaggaagcactgtcgcaattccgagatccctatatcggcactaaaactgaatccataaagaatgccttcgctcgaacactgtgcgccgatatcgagttcattcagcgcacggggtcctcaaactatactagggctttcaggagattagaagactttgagaggaaccgacgggattttgaagcatggcgatctgacgatgaatcgggttcaaatcggagaacttcgttagttggcgggatttgggtcgagcccacgctggctgagcttgagaccaaaaggcacaatgcttttcaatggtacgtgtag

SEQ ID NO: 35081 - protein, 565 aa, Muscodor strobelii
  misc_feature: SGI Peptide ID NO. 572136
  misc_feature (53)..(118): Pfam Id: PF06985 Pfam Desc: Heterokaryon incompatibility protein (HET)
  misc_feature (6)..(562): NCBI GI: 256722674 Blast Desc: NECHADRAFT_87206 [Nectria haematococca mpVI 77-13-4]
  misc_feature (23)..(395): NCBI GI: 171684317 Blast Desc: protein product [Podospora anserina] gi|170942119|emb|CAP67771.1| protein product [Podospora anserina]
  misc_feature (24)..(413): NCBI GI: 169777885 Blast Desc: [Aspergillus oryzae RIB40] gi|83772145|dbj|BAE62275.1| protein product [Aspergillus oryzae]
  misc_feature (24)..(415): NCBI GI: 256721593 Blast Desc: NECHADRAFT_67889 [Nectria haematococca mpVI 77-13-4]
  misc_feature (13)..(514): NCBI GI: 169617620 Blast Desc: SNOG_11993 [Phaeosphaeria nodorum SN15] gi|111059285|gb|EAT80405.1| SNOG_11993 [Phaeosphaeria nodorum SN15]
  misc_feature (68)..(413): NCBI GI: 238495120 Blast Desc: conserved [Aspergillus flavus NRRL3357] gi|220695446|gb|EED51789.1| conserved [Aspergillus flavus NRRL3357]
  misc_feature (14)..(517): NCBI GI: 256724252 Blast Desc: NECHADRAFT_87550 [Nectria haematococca mpVI 77-13-4]
  misc_feature (13)..(423): NCBI GI: 225683598 Blast Desc: [Paracoccidioides brasiliensis Pb03]
  misc_feature (13)..(423): NCBI GI: 226287224 Blast Desc: conserved [Paracoccidioides brasiliensis Pb18]
  misc_feature (2)..(402): NCBI GI: 189190762 Blast Desc: conserved [Pyrenophora tritici-repentis Pt-1C-BFP] gi|187973326|gb|EDU40825.1| conserved [Pyrenophora tritici-repentis Pt-1C-BFP]
MSLFLDQRASQYFYHKLDDQALTIRLIDILPGDFSAPVYCELVEEKLIPSLSYKALSYSWQNDEAFASELVYCNAKPMSISANLHAALRRLRSPNIYVRLWVDAICINQKDDVERAHQRGPYDDMGDWIDDESASPSNPNVIKWHGDQRDIPKLQAYFSTIEERDKKRKYGEDTCDIFGALCVLHLLASGVPVDKIWHLRHFQYVHSITKGLNSIMDKAWWRRIWVVQETVVTHLPTIYYANMSVPWRMFALAAVEYDQSRVRSAREALSGQLDSALALMQFTRATMEIESTRRSWAMNEPMQPLTLLRKFRSRLATDSRDKIFAVLGLIRSWGKDKAGFSLPAIVPDYTMRAAELFFTTTELLIRNTRSLAVLTGTLQRGSTCDGHLPSWVTDWGAPPDVNEHVRLGNLHIYESPYYFAGSVKTHGRRILQTGGRIVDEIYHVGRELESGQGRNRSRRVVMEWEEALSQFRDPYIGTKTESIKNAFARTLCADIEFIQRTGSSNYTRAFRRLEDFERNRRDFEAWRSDDESGSNRRTSLVGGIWVEPTLAELETKRHNAFQWYV

SEQ ID NO: 35082 - DNA, 1868 bp, Muscodor strobelii
  misc_feature: SGI EST ID NO. CUFF.83477.0
  misc_feature: Variant of the nucleotide sequence at SEQ ID NO 35080
aaccagaccatcacgattaaaaagcatccttcatcatttaaatggcttcgtcgtgctcgtttcatctcatcatctggatgcgcagcacgcacaggcttcgcgacaatgtcgctattcctcgatcagcgggccagtcaatacttctaccataagctagacgaccaagcgctcacgattcgattgattgacatcctacccggggacttctctgcacctgtatactgcgagctcgttgaggagaagctgataccttctttatcctacaaagctctgtcgtactcatggcagaacgatgaggcatttgcttctgagcttgtatactgcaacgccaagcctatgtcaatcagtgccaatctccacgctgcgcttcgaagactcaggtcccctaatatttatgtcagactatgggtggatgcaatttgcatcaatcaaaaggatgatgtcgagcgtgcacatcaggtaggtatgatgagggagatttatcaaaacagtaaccaagttttaatttggcttggggagcggggtccatatgatgacatgggcgattggattgatgatgaaagtgcctcgccctcgaatccgaacgtgatcaaatggcacggggatcagagagatatcccaaagctccaagcctatttctctacgattgaggagcgggacaaaaaaagaaaatacggagaggatacctgcgacatctttggtgcactttgcgtactacatcttcttgcaagtggggttcctgttgacaaaatatggcatctacgccactttcaatatgtccatagcattaccaaagggctcaactctataatggataaggcatggtggcgaagaatatgggtcgtacaagagacggtcgtcactcatctaccaacgatatactacgccaatatgtccgtaccatggcgcatgttcgctcttgccgccgtcgagtacgatcaaagtcgcgttaggagcgcaagggaagcattgagcggccaattagacagcgcattggcgttgatgcaattcacacgcgcgacaatggagatcgagtcgacgaggaggagctgggcgatgaatgagcccatgcagcctctcacacttcttcgcaagttccgctcaagattggctactgattcgagagacaagatatttgccgttcttggtcttatacgatcttggggtaaagataaagcgggcttttctctgccggccattgtaccggactatactatgcgtgcggctgagcttttctttaccacgactgagttgctgatcagaaatacgcgatctctcgccgtgcttaccggcacgttgcaaaggggaagtacttgtgatggacatttgccgtcctgggttacagactggggcgctcctccagatgtcaacgaacatgtacgactcgggaatctccacatctatgaaagtccctactatttcgcaggcagtgtcaagactcatggacgccggattcttcagactggcgggaggatcgtagatgaaatatatcacgtaggacgcgagcttgagagtgggcagggaaggaacagatcaaggcgcgtggtaatggaatgggaggaagcactgtcgcaattccgagatccctatatcggcactaaaactgaatccataaagaatgccttcgctcgaacactgtgcgccgatatcgagttcattcagcgcacggggtcctcaaactatactagggctttcaggagattagaagactttgagaggaaccgacgggattttgaagcatggcgatctgacgatgaatcgggttcaaatcggagaacttcgttagttggcgggatttgggtcgagcccacgctggctgagcttgagaccaaaaggcacaatgcttttcaatggtacgtgtagaaaga

SEQ ID NO: 35083 - DNA, 1386 bp, Muscodor strobelii
  misc_feature: SGI cDNA ID NO. 572137
  misc_feature: Encodes the peptide sequence at SEQ ID NO 35084
atgagctggcaacagacctcgcaaagtcacatttactcacgccctattggagaacatgagacattccttaagcttgtcggcgacgcaggattaccgctaaaccgtgagcattgggctatcaatgcaacggcaaccgttgtccccgttggaaaaatctcacccgaggacattgtcgatcgctttcgtcgagcctgggctcatttgcgatttcaacatccgagcatcgcaactaaggtcagcgcggacaacgagagctttacatacaccgtaccggcagatgcggctgctattgatagttggatctctcagacatttattgttgctaatgatgtacactcatcagcagaagtaattcggggctttcggccttcacagtgggcaaaacttgtatacatcacgcgttctcacgaactgttgtttcatacctcgcactggcgtagtgatgggattggggttctgcttctactggacgcgtttctcgcactagcatcctctccaacaccactcgcggatccggcgacgcttccatggggcactgaagtcgttcgacttatgcctgcagtggaggacgctgcggcgataccagaagtcgctacaccggaaatcaaacagcgtgcgactgatctgacgagtacatttgcgctcgcgaccggtgcgatcggcatcccgactcttggcgatgcggccgctttacctgggggcacgcgtagtacacttctgaccttgagtccggaaacgacaagcaaaatagtagcagcgtgcaaaattcgcaacatcagcgtgacaagtgcggttcacgcgagcgtggccggtgcaaattacgcgctagctaacgcagaagctagacacaagcactacaccagcacgatacgattcgggctacgaccgtacttgcccgagccatactcaacacgcgcatctgctgcaggattatataccaccggttggatgaagcgcgtagaagccgggtcatcgtgggccgagcgtgcgaaagattatcagagcgagtatcgtaaaggtattagtcgagaatatcttgactcgcatcgcgaatatgctttgaggattggcgagttgattcgtaatccgccggagagtgcgggtgagcctccgccgagtgatgtcgatatcagcagcattggggtcttggagaacttcattcgaagacgatggggtcccccggataatggatttgaggttggagctgttagtataggagtggagatgctcactcggcagggtgcggtctttgtctggaccttccgtgatcagctgaaccttagtttggtctataatgagtcgtttcactcggcggatcagatgagagagtttgtggatgaggtaaaggcgcaattgcttaaggggttagatattcaggatgcctag

SEQ ID NO: 35084 - protein, 461 aa, Muscodor strobelii
  misc_feature: SGI Peptide ID NO. 572137
  misc_feature (1)..(460): NCBI GI: 145230698 Blast Desc: An01g12050 [Aspergillus niger] gi|134055732|emb|CAK44105.1| protein product [Aspergillus niger]
  misc_feature (1)..(459): NCBI GI: 242797779 Blast Desc: conserved [Talaromyces stipitatus ATCC 10500] gi|218716377|gb|EED15798.1| conserved [Talaromyces stipitatus ATCC 10500]
  misc_feature (1)..(458): NCBI GI: 212542155 Blast Desc: conserved [Penicillium marneffei ATCC 18224] gi|210066139|gb|EEA20232.1| conserved [Penicillium marneffei ATCC 18224]
  misc_feature (1)..(445): NCBI GI: 115390216 Blast Desc: [Aspergillus terreus NIH2624] gi|114195009|gb|EAU36709.1| [Aspergillus terreus NIH2624]
  misc_feature (1)..(448): NCBI GI: 242760823 Blast Desc: conserved [Talaromyces stipitatus ATCC 10500] gi|218723262|gb|EED22679.1| conserved [Talaromyces stipitatus ATCC 10500]
  misc_feature (1)..(448): NCBI GI: 212539171 Blast Desc: conserved [Penicillium marneffei ATCC 18224] gi|210069483|gb|EEA23574.1| conserved [Penicillium marneffei ATCC 18224]
  misc_feature (1)..(456): NCBI GI: 121700474 Blast Desc: conserved [Aspergillus clavatus NRRL 1] gi|119396644|gb|EAW07076.1| conserved [Aspergillus clavatus NRRL 1]
  misc_feature (2)..(460): NCBI GI: 242760742 Blast Desc: conserved [Talaromyces stipitatus ATCC 10500] gi|218723247|gb|EED22664.1| conserved [Talaromyces stipitatus ATCC 10500]
  misc_feature (2)..(459): NCBI GI: 212539205 Blast Desc: conserved [Penicillium marneffei ATCC 18224] gi|210069500|gb|EEA23591.1| conserved [Penicillium marneffei ATCC 18224]
  misc_feature (1)..(449): NCBI GI: 242760833 Blast Desc: conserved [Talaromyces stipitatus ATCC 10500] gi|218723264|gb|EED22681.1| conserved [Talaromyces stipitatus ATCC 10500]
MSWQQTSQSHIYSRPIGEHETFLKLVGDAGLPLNREHWAINATATVVPVGKISPEDIVDRFRRAWAHLRFQHPSIATKVSADNESFTYTVPADAAAIDSWISQTFIVANDVHSSAEVIRGFRPSQWAKLVYITRSHELLFHTSHWRSDGIGVLLLLDAFLALASSPTPLADPATLPWGTEVVRLMPAVEDAAAIPEVATPEIKQRATDLTSTFALATGAIGIPTLGDAAALPGGTRSTLLTLSPETTSKIVAACKIRNISVTSAVHASVAGANYALANAEARHKHYTSTIRFGLRPYLPEPYSTRASAAGLYTTGWMKRVEAGSSWAERAKDYQSEYRKGISREYLDSHREYALRIGELIRNPPESAGEPPPSDVDISSIGVLENFIRRRWGPPDNGFEVGAVSIGVEMLTRQGAVFVWTFRDQLNLSLVYNESFHSADQMREFVDEVKAQLLKGLDIQDA

SEQ ID NO: 35085 - DNA, 8045 bp, Muscodor strobelii
  misc_feature: SGI EST ID NO. CUFF.83493.0
  misc_feature: Variant of the nucleotide sequence at SEQ ID NO 35083
caaacgcgtctcatacgcgctactcaatgttggagatagctccaacccgtacatcaactcattccgttttgcgcgactacacattcatttgcagaatacctcactttgtcgcacaacattgggtgagaagataaaatcaaaattcacgtcatatacccttgcctcatgcctttttaatatcatccctcctgctccaccaagtttacgaccacaataagaccccatggatccaagctggccaaaatggcttcggtgacatccctcggcctacaccgaccaacagccctcgagtatgccatacaggaacagctcttgccagaggaccctccgccctccttgtacgagtggaccatcaccgttgactatgcttccaacgatcacgccgaggacgagctgcttatcaccaaggatgctgtcatttggtctagaggctgcgtctttcgcaagtgcttcggcttcaagctggagaaggagcctatcgctcaggctctcttgacacattttccttactctgaacagccggtcgccaactcctcggcccctgcaaagtctcaggttcacagaacgttgaaacgggcactagtcgtcttccttcagacccaagctcacatctacttcctgagcggcaccagccatgttgttcatatgccctttgaagtcgagtccgcctgtgccgccccccaaggtgttgtcatccagcgaaaatatcgtgccgatgccgccactgtcgccagcatcaaatttcccaaggtgccccctaattcattcctcacgggccagatgtctcctatgtccatgcgcgcttcacagcagtctaccttcagcatcgagactttgggcatgccaaaagcgctgccgctgagattgagctcccatgctgataatatgtgggaaattcctgacgataggagtgactctcactggccgcgcctcgtagctttgactgatccattgcttgaattgggcttggttgtgacccaacccgagagagccgccaagccaaggagtcgcagacacacggatagatctccccatttcttagaccgtgccgaggaaattctgcacatagaagaagttgcccggattaatccagccgttgaccgacaggaccatgctttgattctcgccgtgactgccaatagagacacttcgatgtacacagtctggagggtatcttacattccacatagcgatcctttcattgccccccgggggtctcgcaggagaaggtctggccctcgcaggagctccatgcagcctggtctacctagcggcgctacaactcccttgcagtctaatttcaaggagagctttggtgcccctctcccaggaaaacgatccagaaagagcgagaaggtcgagaaaacaggtcgcgctcttgaggcccttgaatcatctcttgctctggacaaggagtctaatgtcacccgcaggacatcgcggcgagtcagctccatgcttgcgagagcagatctatccgcatctcaggacagaacaggtttcgtcgagcagccacagatccctaatcttgcaaccggaagaagggacacatcacatgggagccagcgaaatcgtgccagcggccttttcagcgggcagagttttggtgcaaatcacgcccatggtcctcattctctcggcgcgttccaaccggcaccaatcgatgatctgctcgaggaattgcggaccagcggcgacttcgagggattccataacatgggccttgatgatcacgattttgatggtctcacgcaagaaatgttattcaccaagatccacagtataccgatcgacaactccaacgtgcgatattctctttccaaacagcctgctcagcggcaatccaaggtcttctgtgtctctgggccccaggttgctgtggacggtctgattagacagcaaatccttgttggcttgcaggacccaatcgagaagcgtcttcagcttttgaccctgcatgtgcagtctcgaagagcatctccctcggatgcagctggcacgagtaaactgcttgtaacatttggacagctcaaaaaagccaataatgttattgatacatgtagactagtcgatggtaacatgtcgatcatcctgatgctatcccaagcagacaatggacaacgtcaactcagcgtgcaggccccttggagtccgtttgcgcctatcgttctcccgaataggttgttcttggccagcgtgcgcaacattgcttatcgtggtagcctagtaaatcgggaagtcggtatcagaagagcgattatccccgccgccggcgaggtcgcgggtatgcgacacccaaagctcagaggtgttgtcgatatcgtagacgcagacaacacgcatctgcatcaggttcgaattcagcttgaagcgtcatcagaccgcgttcggaagattcttgacgtcctccgtgcaattctgcctgcacggtcgtctgatcactttatgaccggctggtggaatatcattgcatggctacgagagcgagatagttcagtggtagatgtcgagtgggatgcagcgatcattcagattttcctcatctatcttgcgccgggatatcaggtccatccgcaagcatcagagcctgtactgcgaaaaaggacccgacatctacctaggtccagtagcggagcgcaagataatcttgctgattgggactcaatggggagctttgaaacctccgggaccctggtgcaccctccctggatggaggccacaccctggcaatgggtgacggaagaagacgaatctgcacaacctgcgttccgatcaacagccggcagtggcgaggttagtttcctcaaaattgaggttaggaatgcaatcgaatacatgcgttcacgtgcaggagacagtaccgttgggttacctgaatatttgccgactcattcgtcaaatgatgaacagagtcgcgtaacgcatgcacatgacgttttccttgctctacacctgatacttgaggaagaaaaactcaatgttgcggcccactctacggcttcaccatccttacttgaactgcgtgccgtgttgcttcaaattgcgaaatggttgaaatgggctcaatgggtaaaaatatacgagctcgaaatgccgtttgactggccagagaatatcactgactcagatgcgcttacgattactctgatgtcacctgagcctggttattggagtgtccttgaatggacacacgctctgctatctcaagacgcgaagtctcagtcaaccataccgtcgatctatgccgctatcccgaggtcttatacgcctcgcattcgcatgctagagcagttatttcaaacgatcgagccaactagcaggaaccccacggatttcgtgaaagctttgtatgaaagtggcaccactacagctgtcttggaatctctcccagagtctctcctgattcctcttcgagacacgattgcgcagtgtcagcccaatccttcaccagactggcctagaggaatgttagaattgattcgtagagcggatgttgactctatcttgcttcccatcgacaaccgtcgcgcgcatgcaaccactctgcttaccccgacccatcaagcctcttgggacttcaactcactctgccaaaatgtcatggaactcaatgatgcaccagccgacgatgttgctgagagcaacaaacaggcagtgatcagggccatttttagggaagaccgtcgcttagacgaaaccaagatgatgcttaacacaaccaagccgagatctatccgtctagatccgctccctgaatggagcgagccgttctacttggaacaacagaaagaactcgtcacccgccttgctacaaatactttgtcgataccagctggacgaggacttatgaactatggcttacgctttccccttctgacacagaagttccaaatgcatggttttgtgctcaattgtacagtcagacccaccaatgtgacggtaggagtagataagtcactttttacggaagagaagatcgcctgggccttcttccactctggagttgcagccggtctctctatatcccgcgaagctaaaggcattgatacatcatggatcctctacaataagccggggaacgatctgacaaatcgccatgctgggtttctccttgcattaggcctgaatggtcacctcaaggatgtagccaaatgggttgccttcaaatatttaaccccgaaacataccatgacatcaattggtctactccttggtttggctgcctcctacattggaacgatggactctctaattactagactcttgtctgtacatgtcactcgtatgctgcctcgaggagctgctgagttaaacctgtcgcctcttacacagacaacggggattatggggatcggcttgctgtattgcaacagtcagcaccgtcgcatgagtgagatcatgatgtccgaaatcgagtatatcgaaactgaagatgacggcgagccactacggaccgagtgctatcggcttgcggcaggtttcgcacttggattcatcaatttgggcaaagggacagatctgaaaggacttcacgacatgcgcatcacagaaaaactgcttaccctcgcttctgccactaaaaaggttgagcaagtccatattctcgacagatccaccgctccagctgttgttgctattgctctcatttacatgaagtcagaggacagcgtagtagctcgtaagatcgatgtgccggatgcgattttacaattcgattacattcgacctgatattcttctcctacgcaccgtcgccaagcatctgattctttggtcacaaattgtccctactcatgactggatccgagacaacctacccaagcgctatcatcatcgaatcgtaacgcccaagtctagacatttcgatcaaaatgcgcgtacccctttgaactctacgcatctcccatttcttaccattcttgctggcctttgtttcgcgcttgctttgcgttacgctggatctgggaacaccgtcgttcgggacttgttactcagttacctagatcgcttttacggacagagtcaaaagtccaaatccaacagtacatttgatgacaggtgtgtcaaagttgcagcacggatgtgtcttgatgttgtggcgctgtctgccgcgacagtcatggcaggcacctgtgatcttaaggtactgcgatatctaagatcactgcacggacgtaacgactcagacataacttatgggtctcacatggcagctcatatggccatgggcgttttgtcgctgggctgcggaacgcaaacattaaatacgtcaaacttatccatcgctgcacttctcgttgccttctatccggtatttccggatagtgcccaggacaataagagtcatcttcaagcgttcaggcatttctgggtccttgcaaccgatccaagatgcctagttactaaggatgtcgccacgcatgcgccagtcagtgtgccgatatcgatccgtctccggacatcaacggattcgtcggaggatgaagttcgcacaacgccatgcctcttaccgcctctgtctgaggtttccagaatacgaacaacatcatccgaattttggaacctagaattagattttgtcgcccatcccgagtacatcgacgcattccgacggacgcaaagcctattcatgcgccgtcgatctgtgagtgatagcccatttgccgccacggtaacagcactaggtcgggaggacacgagtacaggttcggctggcgcagaatccgggtctcagccactcgaatggctattcgaccacaatcccactctgaacaagctctcccatgccgatcgcggtctcgtcctcgatcgtactactggcgcgcccgatgtcagcgacgcaacgggaagtgtcgtagacgcacgtcttgtccttgaaagcagtgccaataacggtggtcgtgatgatcttcttgggcttaagggattattcgcctgggttgagtggcgagctcgagtatccgaagaggagcacgatgggaatgagaagactgatggcgacatgagaaatgccacctgggctggtgatggctggatgagagagagcatcattgagaatttgaaaggtgaaatttggctcgcagggaaagaatagtttcctcctgcttggaacttgattttgactgccgatgttaggtacacttcatgaattacgatgttatgggctacacgatgaggtgaaaagcatcacggcgttgtaggtacggaaatgaatatacccttttgcttgttggtacgggccaataaacaacgagagtcgtataagtggtccacttccaatgacatcaccctccaccgctgctcgaacgtcagcttacgagttgaatccgccgtgaacaaataatgtcgcaatatatcctcagctttactaaaatgactatatatcaacatgagctggcaacagacctcgcaaagtcacatttactcacgccctattggagaacatgagacattccttaagcttgtcggcgacgcaggattaccgctaaaccgtgagcattgggctatcaatgcaacggcaaccgttgtccccgttggaaaaatctcacccgaggacattgtcgatcgctttcgtcgagcctgggctcatttgcgatttcaacatccgagcatcgcaactaaggtcagcgcggacaacgagagctttacatacaccgtaccggcagatgcggctgctattgatagttggatctctcagacatttattgttgctaatgatgtacactcatcagcagaagtaattcggggctttcggccttcacagtgggcaaaacttgtatacatcacgcgttctcacgaactgttgtttcatacctcgcactggcgtagtgatgggattggggttctgcttctactggacgcgtttctcgcactagcatcctctccaacaccactcgcggatccggcgacgcttccatggggcactgaagtcgttcgacttatgcctgcagtggaggacgctgcggcgataccagaagtcgctacaccggaaatcaaacagcgtgcgactgatctgacgagtacatttgcgctcgcgaccggtgcgatcggcatcccgactcttggcgatgcggccgctttacctgggggcacgcgtagtacacttctgaccttgagtccggaaacgacaagcaaaatagtagcagcgtgcaaaattcgcaacatcagcgtgacaagtgcggttcacgcgagcgtggccggtgcaaattacgcgctagctaacgcagaagctagacacaagcactacaccagcacgatacgattcgggctacgaccgtacttgcccgagccatactcaacacgcgcatctgctgcaggattatataccaccggttggatgaagcgcgtagaagccgggtcatcgtgggccgagcgtgcgaaagattatcagagcgagtatcgtaaaggtattagtcgagaatatcttgactcgcatcgcgaatatgctttgaggattggcgagttgattcgtaatccgccggagagtgcgggtgagcctccgccgagtgatgtcgatatcagcagcattggggtcttggagaacttcattcgaagacgatggggtcccccggataatggatttgaggttggagctgttagtataggagtggagatgctcactcggcagggtgcggtctttgtctggaccttccgtgatcagctgaaccttagtttggtctataatgagtcgtttcactcggcggatcagatgagagagtttgtggatgaggtaaaggcgcaattgcttaaggggttagatattcaggatgcctagatactaaagatgtcgaatgaagtagtccaaaacattcaagacttggaaggctttatgttactgatgactgggactggtggcatataatgtacagaagtatatcacgatgtcgcggagaaactatctaaacatttgggtgatgataaatcttccacgccagtaagagaccatgcaaagtgtgagaataaaatcaatgaggaagttgttccccgatctattcatcaacggcatcaaatggctaagcaacgcgtgaagccttgttaacttcccga

SEQ ID NO: 35086 - DNA, 5850 bp, Muscodor strobelii
  misc_feature: SGI cDNA ID NO. 572138
  misc_feature: Encodes the peptide sequence at SEQ ID NO 35087
atggcttcggtgacatccctcggcctacaccgaccaacagccctcgagtatgccatacaggaacagctcttgccagaggaccctccgccctccttgtacgagtggaccatcaccgttgactatgcttccaacgatcacgccgaggacgagctgcttatcaccaaggatgctgtcatttggtctagaggctgcgtctttcgcaagtgcttcggcttcaagctggagaaggagcctatcgctcaggctctcttgacacattttccttactctgaacagccggtcgccaactcctcggcccctgcaaagtctcaggttcacagaacgttgaaacgggcactagtcgtcttccttcagacccaagctcacatctacttcctgagcggcaccagccatgttgttcatatgccctttgaagtcgagtccgcctgtgccgccccccaaggtgttgtcatccagcgaaaatatcgtgccgatgccgccactgtcgccagcatcaaatttcccaaggtgccccctaattcattcctcacgggccagatgtctcctatgtccatgcgcgcttcacagcagtctaccttcagcatcgagactttgggcatgccaaaagcgctgccgctgagattgagctcccatgctgataatatgtgggaaattcctgacgataggagtgactctcactggccgcgcctcgtagctttgactgatccattgcttgaattgggcttggttgtgacccaacccgagagagccgccaagccaaggagtcgcagacacacggatagatctccccatttcttagaccgtgccgaggaaattctgcacatagaagaagttgcccggattaatccagccgttgaccgacaggaccatgctttgattctcgccgtgactgccaatagagacacttcgatgtacacagtctggagggtatcttacattccacatagcgatcctttcattgccccccgggggtctcgcaggagaaggtctggccctcgcaggagctccatgcagcctggtctacctagcggcgctacaactcccttgcagtctaatttcaaggagagctttggtgcccctctcccaggaaaacgatccagaaagagcgagaaggtcgagaaaacaggtcgcgctcttgaggcccttgaatcatctcttgctctggacaaggagtctaatgtcacccgcaggacatcgcggcgagtcagctccatgcttgcgagagcagatctatccgcatctcaggacagaacaggtttcgtcgagcagccacagatccctaatcttgcaaccggaagaagggacacatcacatgggagccagcgaaatcgtgccagcggccttttcagcgggcagagttttggtgcaaatcacgcccatggtcctcattctctcggcgcgttccaaccggcaccaatcgatgatctgctcgaggaattgcggaccagcggcgacttcgagggattccataacatgggccttgatgatcacgattttgatggtctcacgcaagaaatgttattcaccaagatccacagtataccgatcgacaactccaacgtgcgatattctctttccaaacagcctgctcagcggcaatccaaggtcttctgtgtctctgggccccaggttgctgtggacggtctgattagacagcaaatccttgttggcttgcaggacccaatcgagaagcgtcttcagcttttgaccctgcatgtgcagtctcgaagagcatctccctcggatgcagctggcacgagtaaactgcttgtaacatttggacagctcaaaaaagccaataatgttattgatacatgtagactagtcgatggtaacatgtcgatcatcctgatgctatcccaagcagacaatggacaacgtcaactcagcgtgcaggccccttggagtccgtttgcgcctatcgttctcccgaataggttgttcttggccagcgtgcgcaacattgcttatcgtggtagcctagtaaatcgggaagtcggtatcagaagagcgattatccccgccgccggcgaggtcgcgggtatgcgacacccaaagctcagaggtgttgtcgatatcgtagacgcagacaacacgcatctgcatcaggttcgaattcagcttgaagcgtcatcagaccgcgttcggaagattcttgacgtcctccgtgcaattctgcctgcacggtcgtctgatcactttatgaccggctggtggaatatcattgcatggctacgagagcgagatagttcagtggtagatgtcgagtgggatgcagcgatcattcagattttcctcatctatcttgcgccgggatatcaggtccatccgcaagcatcagagcctgtactgcgaaaaaggacccgacatctacctaggtccagtagcggagcgcaagataatcttgctgattgggactcaatggggagctttgaaacctccgggaccctggtgcaccctccctggatggaggccacaccctggcaatgggtgacggaagaagacgaatctgcacaacctgcgttccgatcaacagccggcagtggcgaggttagtttcctcaaaattgaggttaggaatgcaatcgaatacatgcgttcacgtgcaggagacagtaccgttgggttacctgaatatttgccgactcattcgtcaaatgatgaacagagtcgcgtaacgcatgcacatgacgttttccttgctctacacctgatacttgaggaagaaaaactcaatgttgcggcccactctacggcttcaccatccttacttgaactgcgtgccgtgttgcttcaaattgcgaaatggttgaaatgggctcaatgggtaaaaatatacgagctcgaaatgccgtttgactggccagagaatatcactgactcagatgcgcttacgattactctgatgtcacctgagcctggttattggagtgtccttgaatggacacacgctctgctatctcaagacgcgaagtctcagtcaaccataccgtcgatctatgccgctatcccgaggtcttatacgcctcgcattcgcatgctagagcagttatttcaaacgatcgagccaactagcaggaaccccacggatttcgtgaaagctttgtatgaaagtggcaccactacagctgtcttggaatctctcccagagtctctcctgattcctcttcgagacacgattgcgcagtgtcagcccaatccttcaccagactggcctagaggaatgttagaattgattcgtagagcggatgttgactctatcttgcttcccatcgacaaccgtcgcgcgcatgcaaccactctgcttaccccgacccatcaagcctcttgggacttcaactcactctgccaaaatgtcatggaactcaatgatgcaccagccgacgatgttgctgagagcaacaaacaggcagtgatcagggccatttttagggaagaccgtcgcttagacgaaaccaagatgatgcttaacacaaccaagccgagatctatccgtctagatccgctccctgaatggagcgagccgttctacttggaacaacagaaagaactcgtcacccgccttgctacaaatactttgtcgataccagctggacgaggacttatgaactatggcttacgctttccccttctgacacagaagttccaaatgcatggttttgtgctcaattgtacagtcagacccaccaatgtgacggtaggagtagataagtcactttttacggaagagaagatcgcctgggccttcttccactctggagttgcagccggtctctctatatcccgcgaagctaaaggcattgatacatcatggatcctctacaataagccggggaacgatctgacaaatcgccatgctgggtttctccttgcattaggcctgaatggtcacctcaaggatgtagccaaatgggttgccttcaaatatttaaccccgaaacataccatgacatcaattggtctactccttggtttggctgcctcctacattggaacgatggactctctaattactagactcttgtctgtacatgtcactcgtatgctgcctcgaggagctgctgagttaaacctgtcgcctcttacacagacaacggggattatggggatcggcttgctgtattgcaacagtcagcaccgtcgcatgagtgagatcatgatgtccgaaatcgagtatatcgaaactgaagatgacggcgagccactacggaccgagtgctatcggcttgcggcaggtttcgcacttggattcatcaatttgggcaaagggacagatctgaaaggacttcacgacatgcgcatcacagaaaaactgcttaccctcgcttctgccactaaaaaggttgagcaagtccatattctcgacagatccaccgctccagctgttgttgctattgctctcatttacatgaagtcagaggacagcgtagtagctcgtaagatcgatgtgccggatgcgattttacaattcgattacattcgacctgatattcttctcctacgcaccgtcgccaagcatctgattctttggtcacaaattgtccctactcatgactggatccgagacaacctacccaagcgctatcatcatcgaatcgtaacgcccaagtctagacatttcgatcaaaatgcgcgtacccctttgaactctacgcatctcccatttcttaccattcttgctggcctttgtttcgcgcttgctttgcgttacgctggatctgggaacaccgtcgttcgggacttgttactcagttacctagatcgcttttacggacagagtcaaaagtccaaatccaacagtacatttgatgacaggtgtgtcaaagttgcagcacggatgtgtcttgatgttgtggcgctgtctgccgcgacagtcatggcaggcacctgtgatcttaaggtactgcgatatctaagatcactgcacggacgtaacgactcagacataacttatgggtctcacatggcagctcatatggccatgggcgttttgtcgctgggctgcggaacgcaaacattaaatacgtcaaacttatccatcgctgcacttctcgttgccttctatccggtatttccggatagtgcccaggacaataagagtcatcttcaagcgttcaggcatttctgggtccttgcaaccgatccaagatgcctagttactaaggatgtcgccacgcatgcgccagtcagtgtgccgatatcgatccgtctccggacatcaacggattcgtcggaggatgaagttcgcacaacgccatgcctcttaccgcctctgtctgaggtttccagaatacgaacaacatcatccgaattttggaacctagaattagattttgtcgcccatcccgagtacatcgacgcattccgacggacgcaaagcctattcatgcgccgtcgatctgtgagtgatagcccatttgccgccacggtaacagcactaggtcgggaggacacgagtacaggttcggctggcgcagaatccgggtctcagccactcgaatggctattcgaccacaatcccactctgaacaagctctcccatgccgatcgcggtctcgtcctcgatcgtactactggcgcgcccgatgtcagcgacgcaacgggaagtgtcgtagacgcacgtcttgtccttgaaagcagtgccaataacggtggtcgtgatgatcttcttgggcttaagggattattcgcctgggttgagtggcgagctcgagtatccgaagaggagcacgatgggaatgagaagactgatggcgacatgagaaatgccacctgggctggtgatggctggatgagagagagcatcattgagaatttgaaaggtgaaatttggctcgcagggaaagaatag

SEQ ID NO: 35087 - protein, 1949 aa, Muscodor strobelii
  misc_feature: SGI Peptide ID NO. 572138
  misc_feature (1)..(1944): NCBI GI: 145245511 Blast Desc: An11g10660 [Aspergillus niger] gi|134079725|emb|CAK40864.1| protein product [Aspergillus niger]
  misc_feature (1)..(1944): NCBI GI: 71000659 Blast Desc: 20S cyclosome subunit (APC1/BimE) [Aspergillus fumigatus Af293] gi|66852648|gb|EAL92973.1| 20S cyclosome subunit (APC1/BimE), [Aspergillus fumigatus Af293]
  misc_feature (1)..(1944): NCBI GI: 159128025 Blast Desc: 20S cyclosome subunit (APC1/BimE), [Aspergillus fumigatus A1163]
  misc_feature (1)..(1944): NCBI GI: 238845741 Blast Desc: negative mitosis regulator [Microsporum canis CBS 113480]
  misc_feature (1)..(1944): NCBI GI: 212544880 Blast Desc: 20S cyclosome subunit (APC1/BimE), [Penicillium marneffei ATCC 18224] gi|210065563|gb|EEA19657.1| 20S cyclosome subunit (APC1/BimE), [Penicillium marneffei ATCC 18224]
  misc_feature (1)..(1944): NCBI GI: 242814070 Blast Desc: 20S cyclosome subunit (APC1/BimE), [Talaromyces stipitatus ATCC 10500] gi|218714635|gb|EED14058.1| 20S cyclosome subunit (APC1/BimE), [Talaromyces stipitatus ATCC 10500]
  misc_feature (1)..(1949): NCBI GI: 240106154 Blast Desc: Negative regulator of mitosis, [Coccidioides posadasii C735 delta SOWgp]
  misc_feature (1)..(1944): NCBI GI: 255945115 Blast Desc: Pc20g08020 [Penicillium chrysogenum Wisconsin 54-1255] gi|211588060|emb|CAP86131.1| Pc20g08020 [Penicillium chrysogenum Wisconsin 54-1255]
  misc_feature (1)..(1944): NCBI GI: 169779954 Blast Desc: [Aspergillus oryzae RIB40] gi|83773181|dbj|BAE63308.1| protein product [Aspergillus oryzae]
  misc_feature (1)..(1944): NCBI GI: 238506026 Blast Desc: 20S cyclosome subunit (APC1/BimE), [Aspergillus flavus NRRL3357] gi|220690329|gb|EED46679.1| 20S cyclosome subunit (APC1/BimE), [Aspergillus flavus NRRL3357]
MASVTSLGLHRPTALEYAIQEQLLPEDPPPSLYEWTITVDYASNDHAEDELLITKDAVIWSRGCVFRKCFGFKLEKEPIAQALLTHFPYSEQPVANSSAPAKSQVHRTLKRALVVFLQTQAHIYFLSGTSHVVHMPFEVESACAAPQGVVIQRKYRADAATVASIKFPKVPPNSFLTGQMSPMSMRASQQSTFSIETLGMPKALPLRLSSHADNMWEIPDDRSDSHWPRLVALTDPLLELGLVVTQPERAAKPRSRRHTDRSPHFLDRAEEILHIEEVARINPAVDRQDHALILAVTANRDTSMYTVWRVSYIPHSDPFIAPRGSRRRRSGPRRSSMQPGLPSGATTPLQSNFKESFGAPLPGKRSRKSEKVEKTGRALEALESSLALDKESNVTRRTSRRVSSMLARADLSASQDRTGFVEQPQIPNLATGRRDTSHGSQRNRASGLFSGQSFGANHAHGPHSLGAFQPAPIDDLLEELRTSGDFEGFHNMGLDDHDFDGLTQEMLFTKIHSIPIDNSNVRYSLSKQPAQRQSKVFCVSGPQVAVDGLIRQQILVGLQDPIEKRLQLLTLHVQSRRASPSDAAGTSKLLVTFGQLKKANNVIDTCRLVDGNMSIILMLSQADNGQRQLSVQAPWSPFAPIVLPNRLFLASVRNIAYRGSLVNREVGIRRAIIPAAGEVAGMRHPKLRGVVDIVDADNTHLHQVRIQLEASSDRVRKILDVLRAILPARSSDHFMTGWWNIIAWLRERDSSVVDVEWDAAIIQIFLIYLAPGYQVHPQASEPVLRKRTRHLPRSSSGAQDNLADWDSMGSFETSGTLVHPPWMEATPWQWVTEEDESAQPAFRSTAGSGEVSFLKIEVRNAIEYMRSRAGDSTVGLPEYLPTHSSNDEQSRVTHAHDVFLALHLILEEEKLNVAAHSTASPSLLELRAVLLQIAKWLKWAQWVKIYELEMPFDWPENITDSDALTITLMSPEPGYWSVLEWTHALLSQDAKSQSTIPSIYAAIPRSYTPRIRMLEQLFQTIEPTSRNPTDFVKALYESGTTTAVLESLPESLLIPLRDTIAQCQPNPSPDWPRGMLELIRRADVDSILLPIDNRRAHATTLLTPTHQASWDFNSLCQNVMELNDAPADDVAESNKQAVIRAIFREDRRLDETKMMLNTTKPRSIRLDPLPEWSEPFYLEQQKELVTRLATNTLSIPAGRGLMNYGLRFPLLTQKFQMHGFVLNCTVRPTNVTVGVDKSLFTEEKIAWAFFHSGVAAGLSISREAKGIDTSWILYNKPGNDLTNRHAGFLLALGLNGHLKDVAKWVAFKYLTPKHTMTSIGLLLGLAASYIGTMDSLITRLLSVHVTRMLPRGAAELNLSPLTQTTGIMGIGLLYCNSQHRRMSEIMMSEIEYIETEDDGEPLRTECYRLAAGFALGFINLGKGTDLKGLHDMRITEKLLTLASATKKVEQVHILDRSTAPAVVAIALIYMKSEDSVVARKIDVPDAILQFDYIRPDILLLRTVAKHLILWSQIVPTHDWIRDNLPKRYHHRIVTPKSRHFDQNARTPLNSTHLPFLTILAGLCFALALRYAGSGNTVVRDLLLSYLDRFYGQSQKSKSNSTFDDRCVKVAARMCLDVVALSAATVMAGTCDLKVLRYLRSLHGRNDSDITYGSHMAAHMAMGVLSLGCGTQTLNTSNLSIAALLVAFYPVFPDSAQDNKSHLQAFRHFWVLATDPRCLVTKDVATHAPVSVPISIRLRTSTDSSEDEVRTTPCLLPPLSEVSRIRTTSSEFWNLELDFVAHPEYIDAFRRTQSLFMRRRSVSDSPFAATVTALGREDTSTGSAGAESGSQPLEWLFDHNPTLNKLSHADRGLVLDRTTGAPDVSDATGSVVDARLVLESSANNGGRDDLLGLKGLFAWVEWRARVSEEEHDGNEKTDGDMRNATWAGDGWMRESIIENLKGEIWLAGKE

SEQ ID NO: 35088 - DNA, 8045 bp, Muscodor strobelii; identical to SEQ ID NO: 35085
  misc_feature: SGI EST ID NO. CUFF.83493.0
  misc_feature: Variant of the nucleotide sequence at SEQ ID NO 35086

SEQ ID NO: 35089 - DNA, 3894 bp, Muscodor strobelii
  misc_feature: SGI cDNA ID NO. 572139
  misc_feature: Encodes the peptide sequence at SEQ ID NO 35090
atgacggaggctcagcccagcgcgggcagctctcccagatcgacatcttctcgcgcctctgcctctgccaacgccagcctccgcccagaggaccgtgccgctcaagctccggacaacaacaccagtggcggaagtgtgttgctcggagaaggtgatcagctacgaggcgaacgcgctggccatgacgggcaaaatgacaagcagatcgaggaggagagtgcggacgatcacgacgaagacgacgaggaagacggaggagacgacgacggcgatgatgaggaagatgaagacgaagaagaggaggaggaagaacccaggctgaagtacgcacgcctgacacagcatctaggggccgtctataggaatggcgactccaccagtgcctttcttgttgcgggcgacaagatgatcatcggcactcacaaaggcaacgtccacgttatacaacttccgactttccagcccctcatcgcgtaccacgcccacgatgcttccgtcaccagcatctccatctcgccatatcctccgcctgccctgcccccgaccctcaagcccgacgccgtagccaaagccatggcccagacagccagtcgcccgccctcggtccactccgaagcctctcctgcgcgacagcaacgcaagccgcgcgaccttccccaagttcccaacctgccttccaacaacatctacatcactacttcctccatggacggcctcgtccgtgtccagtctctggtcgacctaaaagactgccagctgcgcaactttgcccggcccatccaggctgctgccgtgtccccaaactacaaatccgacaggacgtatctgtcgggcgggcgagccgggaacctgatattgactgttggtgcgcctcagggccggagtacgtcgacgacgatcggcaccgctgccgctgctgcctcgggatggcttggaagcatgggcttgggtacaaacactgggaaagacacggtcatacactcggccgaaggagccatcagcaccataaagtggtccttgtctggcaagtatgttgtttggctcaacgaacacggcatcaagatcatgcgcacaaacttgcatctcgagagtagcgatgccgaagatgcatggaagcgcatcggtcacatagatcgacctcagacagacgaatgggaggagatggccgggtattgggaaggtcgagcagaatggattgacgaccaggccatgagccaagacgatgcaccaaaggagggctctttatcctccacactatccccagccgcctccaagctcgcttctcagtcgcaaagctatgagaagaggatcgagcgcttgctcgtcggctggggaggtactatctggatcatcaatatacatccaggcaatgcaggctctgataagacaggggcacaaaagtcagcagggagagccgagatcgccaagatattacgcatggactgtattatttctggcatctcgctgtacacacagaatctcttactagtcctcgcatattgtacctctgaatcaggaaacgacgatgaggacaacgaaaagagcaaatcaggacccaatgcgccggctcgaggacacaaacccaaaccctcgacatcctcgagcggcagtggaccttcgggtgggattaggcatcgccacaatgctttgcgaccagaactcagattaattgacctcgtgtcacaggctgaggtcgataaggacagcctgcccgtcaccaactttcacgccttatcctccaatgattaccacttaggtgtgctgcccgccagtcgggccgcttcagtggctgcctcacggggagcactcgaagctctagcaggctttggtaatgaaatgtggaacgccgccatcaatcctatgtcactcttcaattccaatgctagcatcagaagtaaggacagcacggatgccgcttcaggcagtcgaatgggcggcaccacgcaaagtgcgcggctaggaacaaatctcacttcccaaactgttcatccaaatctggtcaaaccgggagcaaaactcttcatccacagcccatacgattgtatacttgctaccaagcgcgacttgggtgatcatcttgcttggctattagaacacgaaaagtttgaagatgcatggagtctgctggacgagcaccctgaagctttgccgtccacttctgagaagtctggtttggccttctcagtgaacgctgatcaaaggtcatccactgccgacgaattttttgaggataattcttcaatcatcgacactcataatctgtccaatgctcctatcgaaaaggaaaacagcgaattggcgagctatgggttcaggatcttctggaccacggcaactggaatgaagccgcccagactattgccaaagtcgtacacactccagacaggtgggagaaatgggtataagccacacttcaaagaactgctcgatcgatggagccttgacctattcgatgagcaggcaatctcgaccgcgctcgaaaaccagctgaaatttcgcgatgttcgcgaagatagcattgacgatggcgaaaaggggcgcgactggcgcattgtgatggaaagcttagctcgcctgcatgaaacgaacggaaaatttcgcgatgccttaaaatgttacattcgactccaagatgcagattcagccatgcgtttgatcaaggacaatcatcttgccgacgcggtgaccgacgacatagccagcttcatcgcgcttagagtgcccgagtcgcgcttgagtcgcatgagcatggaagagctcacagaagcgacctctgaagcaataacattgctagtggatgagacgcatcgaggcctcatccgagtcgacactgtcgtgacccaattggagaagaaggacatgaatctctacatatacttctatttccgtggactgtggcaagaataccgcgaacgcccagccgacgaatcagtctcccttgtcgatgagtttgccgacttagctgtccacatatttgccttgttcgatccggtattactgatggacttcctcaaagtgtcgacttcatacactttcgagaaggccgttcaagagtgcgaaaatgggaaattcatccccgaactcgtttacttgtattccaagacaggtcaaatgaagcgtgccctgtacctaattatcgaccggcttggcgacgtatcgcaagccatcacttttgccaaggagcaagacgaccctgatttatgggaagacctactcgaatacagtatggacaagccgcgattcatccgcggcctactagaggaagtcggcacttcgatcaatcccatcactctagttcggcgcatacccgagggcctcgagattcctggtcttcgagaaggactgaaacatatcatgaaggaacacgagattcaatatagcatatcatcgggtgttgcgagagttcttaggtcggaagtcgcggctgctcagacccaattacgtggtgggcagcgcaaaggcgtcaagtttaacatagtcgtgaaatcgaatgatcacgtcgatatcgaggctaaggacgtacctaatcctccgaaaatcgtggagctttcttcgccgacggccacgccgcatacgaatggctcgggtactcctgccacgacgcctgcgaagcccgcgaagcctaactcagccggtggcactaaggatacacagcagccggaacatgatcacagagaagcccagccaggccattgcgcaaagtgtcacgagccgttctcggaatttgagactgagacgttagtaggctttgcgtgcgggcatgtatttcacgtcacgcatctgcttgaggtgcttaatccgggtcaggacgtcgagccgagtgttattggcaatggggatgtggatagatcgagaggcgggagggttgaggttgtgcagggtggtggcatgtaa

SEQ ID NO: 35090 - protein, 1297 aa, Muscodor strobelii
  misc_feature: SGI Peptide ID NO. 572139
  misc_feature (153)..(244): Pfam Id: PF00400 Pfam Desc: WD domain, G-beta repeat
  misc_feature (993)..(1084): Pfam Id: PF00637 Pfam Desc: Region in Clathrin and VPS
  misc_feature (105)..(1285): NCBI GI: 46123395 Blast Desc: FG06075.1 [Gibberella zeae PH-1]
  misc_feature (105)..(1276): NCBI GI: 171678333 Blast Desc: protein product [Podospora anserina] gi|170937236|emb|CAP61893.1| protein product [Podospora anserina]
  misc_feature (105)..(1291): NCBI GI: 39942466 Blast Desc: MGG_03313 [Magnaporthe grisea 70-15] gi|145015680|gb|EDK00170.1| MGG_03313 [Magnaporthe grisea 70-15]
  misc_feature (105)..(1284): NCBI GI: 85092567 Blast Desc: NCU05902 [Neurospora crassa OR74A] gi|28920888|gb|EAA30224.1| conserved [Neurospora crassa OR74A]
  misc_feature (105)..(1272): NCBI GI: 261354893 Blast Desc: vacuolar protein sorting 41 [Verticillium albo-atrum VaMs.102]
  misc_feature (105)..(1199): NCBI GI: 116206124 Blast Desc: CHGG_02355 [Chaetomium globosum CBS 148.51] gi|88182952|gb|EAQ90420.1| CHGG_02355 [Chaetomium globosum CBS 148.51]
  misc_feature (219)..(1262): NCBI GI: 154293891 Blast Desc: BC1G_14017 [Botryotinia fuckeliana B05.10] gi|150845172|gb|EDN20365.1| BC1G_14017 [Botryotinia fuckeliana B05.10]
  misc_feature (105)..(1273): NCBI GI: 169770711 Blast Desc: [Aspergillus oryzae RIB40] gi|83767684|dbj|BAE57823.1| protein product [Aspergillus oryzae]
  misc_feature (105)..(1273): NCBI GI: 238486830 Blast Desc: vacuolar assembly protein, [Aspergillus flavus NRRL3357] gi|220699532|gb|EED55871.1| vacuolar assembly protein, [Aspergillus flavus NRRL3357]
  misc_feature (105)..(1261): NCBI GI: 119491691 Blast Desc: vacuolar assembly protein, [Neosartorya fischeri NRRL 181] gi|119411500|gb|EAW21443.1| vacuolar assembly protein, [Neosartorya fischeri NRRL 181]
MTEAQPSAGSSPRSTSSRASASANASLRPEDRAAQAPDNNTSGGSVLLGEGDQLRGERAGHDGQNDKQIEEESADDHDEDDEEDGGDDDGDDEEDEDEEEEEEEPRLKYARLTQHLGAVYRNGDSTSAFLVAGDKMIIGTHKGNVHVIQLPTFQPLIAYHAHDASVTSISISPYPPPALPPTLKPDAVAKAMAQTASRPPSVHSEASPARQQRKPRDLPQVPNLPSNNIYITTSSMDGLVRVQSLVDLKDCQLRNFARPIQAAAVSPNYKSDRTYLSGGRAGNLILTVGAPQGRSTSTTIGTAAAAASGWLGSMGLGTNTGKDTVIHSAEGAISTIKWSLSGKYVVWLNEHGIKIMRTNLHLESSDAEDAWKRIGHIDRPQTDEWEEMAGYWEGRAEWIDDQAMSQDDAPKEGSLSSTLSPAASKLASQSQSYEKRIERLLVGWGGTIWIINIHPGNAGSDKTGAQKSAGRAEIAKILRMDCIISGISLYTQNLLLVLAYCTSESGNDDEDNEKSKSGPNAPARGHKPKPSTSSSGSGPSGGIRHRHNALRPELRLIDLVSQAEVDKDSLPVTNFHALSSNDYHLGVLPASRAASVAASRGALEALAGFGNEMWNAAINPMSLFNSNASIRSKDSTDAASGSRMGGTTQSARLGTNLTSQTVHPNLVKPGAKLFIHSPYDCILATKRDLGDHLAWLLEHEKFEDAWSLLDEHPEALPSTSEKSGLAFSVNADQRSSTADEFFEDNSSIIDTHNLSNAPIEKENSELASYGFRIFWTTATGMKPPRLLPKSYTLQTGGRNGYKPHFKELLDRWSLDLFDEQAISTALENQLKFRDVREDSIDDGEKGRDWRIVMESLARLHETNGKFRDALKCYIRLQDADSAMRLIKDNHLADAVTDDIASFIALRVPESRLSRMSMEELTEATSEAITLLVDETHRGLIRVDTVVTQLEKKDMNLYIYFYFRGLWQEYRERPADESVSLVDEFADLAVHIFALFDPVLLMDFLKVSTSYTFEKAVQECENGKFIPELVYLYSKTGQMKRALYLIIDRLGDVSQAITFAKEQDDPDLWEDLLEYSMDKPRFIRGLLEEVGTSINPITLVRRIPEGLEIPGLREGLKHIMKEHEIQYSISSGVARVLRSEVAAAQTQLRGGQRKGVKFNIVVKSNDHVDIEAKDVPNPPKIVELSSPTATPHTNGSGTPATTPAKPAKPNSAGGTKDTQQPEHDHREAQPGHCAKCHEPFSEFETETLVGFACGHVFHVTHLLEVLNPGQDVEPSVIGNGDVDRSRGGRVEVVQGGGM

SEQ ID NO: 35091 - DNA, 4447 bp, Muscodor strobelii
  misc_feature: SGI EST ID NO. CUFF.83572.1
  misc_feature: Variant of the nucleotide sequence at SEQ ID NO 35089
tacggtgctggagcttcgataggcagctccaaaggatcgtcaagctccagctaacgaacaaccctcagatacgcagcccgtacgcgcgcttttaagacgcttgtgcgactgcattatgctattctgcgtgatcccatcctcgctatgacggaggctcagcccagcgcgggcagctctcccagatcgacatcttctcgcgcctctgcctctgccaacgccagcctccgcccagaggaccgtgccgctcaagctccggacaacaacaccagtggcggaagtgtgttgctcggagaaggtgatcagctacgaggcgaacgcgctggccatgacgggcaaaatgacaagcagatcgaggaggagagtgcggacgatcacgacgaagacgacgaggaagacggaggagacgacgacggcgatgatgaggaagatgaagacgaagaagaggaggaggaagaacccaggctgaagtacgcacgcctgacacagcatctaggggccgtctataggaatggcgactccaccagtgcctttcttgttgcgggcgacaagatgatcatcggcactcacaaaggcaacgtccacgttatacaacttccgactttccagcccctcatcgcgtaccacgcccacgatgcttccgtcaccagcatctccatctcgccatatcctccgcctgccctgcccccgaccctcaagcccgacgccgtagccaaagccatggcccagacagccagtcgcccgccctcggtccactccgaagcctctcctgcgcgacagcaacgcaagccgcgcgaccttccccaagttcccaacctgccttccaacaacatctacatcactacttcctccatggacggcctcgtccgtgtccagtctctggtcgacctaaaagactgccagctgcgcaactttgcccggcccatccaggctgctgccgtgtccccaaactacaaatccgacaggacgtatctgtcgggcgggcgagccgggaacctgatattgactgttggtgcgcctcagggccggagtacgtcgacgacgatcggcaccgctgccgctgctgcctcgggatggcttggaagcatgggcttgggtacaaacactgggaaagacacggtcatacactcggccgaaggagccatcagcaccataaagtggtccttgtctggcaagtatgttgtttggctcaacgaacacggcatcaagatcatgcgcacaaacttgcatctcgagagtagcgatgccgaagatgcatggaagcgcatcggtcacatagatcgacctcagacagacgaatgggaggagatggccgggtattgggaaggtcgagcagaatggattgacgaccaggccatgagccaagacgatgcaccaaaggagggctctttatcctccacactatccccagccgcctccaagctcgcttctcagtcgcaaagctatgagaagaggatcgagcgcttgctcgtcggctggggaggtactatctggatcatcaatatacatccaggcaatgcaggctctgataagacaggggcacaaaagtcagcagggagagccgagatcgccaagatgtaagtgacgttgtccgaaagctgaaccttcatggtgctaatgacaactagattacgcatggactgtattatttctggcatctcgctgtacacacagaatctcttactagtcctcgcatattgtacctctgaatcaggaaacgacgatgaggacaacgaaaagagcaaatcaggacccaatgcgccggctcgaggacacaaacccaaaccctcgacatcctcgagcggcagtggaccttcgggtgggattaggcatcgccacaatgctttgcgaccagaactcagattaattgacctcgtgtcacaggctgaggtcgataaggacagcctgcccgtcaccaactttcacgccttatcctccaatgattaccacttaggtgtgctgcccgccagtcgggccgcttcagtggctgcctcacggggagcactcgaagctctagcaggctttggtaatgaaatgtggaacgccgccatcaatcctatgtcactcttcaattccaatgctagcatcagaagtaaggacagcacggatgccgcttcaggcagtcgaatgggcggcaccacgcaaagtgcgcggctaggaacaaatctcacttcccaaactgttcatccaaatctggtcaaaccgggagcaaaactcttcatccacagcccatacgattgtatacttgctaccaagcgcgacttgggtgatcatcttgcttggctattagaacacgaaaagtttgaagatgcatggagtctgctggacgagcaccctgaagctttgccgtccacttctgagaagtctggtttggccttctcagtgaacgctgatcaaaggtcatccactgccgacgaattttttgaggataattcttcaatcatcgacactcataatctgtccaatgctcctatcgaaaaggaaaacagcgaattggcgagctatgggttcaggatcttctggaccacggcaactggaatgaagccgcccagactattgccaaagtcgtacacactccagacaggtgggagaaatgggtgtatacatttgccggtgcaacgaaattcgatgagatagtcaattatattccatctgagagaatgcaacccccgattcccggaactatatacgagatcgtactgggacattacttacgaacagataagccacacttcaaagaactgctcgatcgatggagccttgacctattcgatgagcaggcaatctcgaccgcgctcgaaaaccagctgaaatttcgcgatgttcgcgaagatagcattgacgatggcgaaaaggggcgcgactggcgcattgtgatggaaagcttagctcgcctgcatgaaacgaacggaaaatttcgcgatgccttaaaatgttacattcgactccaagatgcagattcagccatgcgtttgatcaaggacaatcatcttgccgacgcggtgaccgacgacatagccagcttcatcgcgcttagagtgcccgagtcgcgcttgagtcgcatgagcatggaagagctcacagaagcgacctctgaagcaataacattgctagtggatgagacgcatcgaggcctcatccgagtcgacactgtcgtgacccaattggagaagaaggacatgaatctctacatatacttctatttccgtggactgtggcaagaataccgcgaacgcccagccgacgaatcagtctcccttgtcgatgagtttgccgacttagctgtccacatatttgccttgttcgatccggtattactgatggacttcctcaaagtgtcgacttcatacactttcgagaaggccgttcaagagtgcgaaaatgggaaattcatccccgaactcgtttacttgtattccaagacaggtcaaatgaagcgtgccctgtacctaattatcgaccggcttggcgacgtatcgcaagccatcacttttgccaaggagcaagacgaccctgatttatgggaagacctactcgaatacagtatggacaagccgcgattcatccgcggcctactagaggaagtcggcacttcgatcaatcccatcactctagttcggcgcatacccgagggcctcgagattcctggtcttcgagaaggactgaaacatatcatgaaggaacacgagattcaatatagcatatcatcgggtgttgcgagagttcttaggtcggaagtcgcggctgctcagacccaattacgtggtgggcagcgcaaaggcgtcaagtttaacatagtcgtgaaatcgaatgatcacgtcgatatcgaggctaaggacgtacctaatcctccgaaaatcgtggagctttcttcgccgacggccacgccgcatacgaatggctcgggtactcctgccacgacgcctgcgaagcccgcgaagcctaactcagccggtggcactaaggatacacagcagccggaacatgatcacagagaagcccagccaggccattgcgcaaagtgtcacgagccgttctcggaatttgagactgagacgttagtaggctttgcgtgcgggcatgtatttcacgtcacgcatctgcttgaggtgcttaatccgggtcaggacgtcgagccgagtgttattggcaatggggatgtggatagatcgagaggcgggaggtatgttggcagtaaggtcacgcatgcgagactgctgagggatagggtgaggagtgggtgtccggtttgtcggtatagggttgaggttgtgcagggtggtggcatgtaaggtgttagaggagttatttggtggcatggcatttataggcgtatgatatcttttgagtagcgcgcttgaacataattggagaggggtggtgtatattcgatgatgatcttattgcagtgtgtgatggtgattgtgtcacaaaatggcccactcattcg

SEQ ID NO: 35092 - DNA, 753 bp, Muscodor strobelii
  misc_feature: SGI cDNA ID NO. 572140
  misc_feature: Encodes the peptide sequence at SEQ ID NO 35093
atgtatgccgataatcctttcggcaaccctttcaattacgttaagcttgagatcggcggtcctggctatgtttgcccatttccgaaggatacacgaaaggcagagctacggcgaattgtggaagagtcaaaacgtcaggtcgagtctggtccactcaccgacgcagacatcgccaggcttcggaatactggcgctgtatctgttactttccgagctgatgagcacgcaatcgccgccgatactggtgttaaagccattgaatgcatcggtggccgtcttcgactcgaagtctacacagatgcaagtgctctcgaagggcttccctacgcagggattggaatagcgtggcgattcgttgacggacacgacaaggcgaagaggactccttggatgttcgagagtattgcggtagtcggcccggtcgagagtactcaggcagagacaatagctatcgactgtacaacgcgttatgttttgcgaattttagaggccccgtacgctcgatacaaggaccatcgcttcatgaagtcgatgccacccaacacagacatctttaccgattcctttctcgggatgtcaaccgccaataaagtttggcacaaccacgacgccagcgcagcgcagaaagagctgccacgtgagttacagggaccattcctcgaggctttggtgcacatccagatgctgggcatagcatccgataagcccaaatgtcaacccaacctttctcgccccaacgttagattcaactag

SEQ ID NO: 35093 - protein, 250 aa, Muscodor strobelii
  misc_feature: SGI Peptide ID NO. 572140
MYADNPFGNPFNYVKLEIGGPGYVCPFPKDTRKAELRRIVEESKRQVESGPLTDADIARLRNTGAVSVTFRADEHAIAADTGVKAIECIGGRLRLEVYTDASALEGLPYAGIGIAWRFVDGHDKAKRTPWMFESIAVVGPVESTQAETIAIDCTTRYVLRILEAPYARYKDHRFMKSMPPNTDIFTDSFLGMSTANKVWHNHDASAAQKELPRELQGPFLEALVHIQMLGIASDKPKCQPNLSRPNVRFN

SEQ ID NO: 35094 - DNA, 151 bp, Muscodor strobelii
  misc_feature: SGI EST ID NO. CUFF.83508.0
  misc_feature: Variant of the nucleotide sequence at SEQ ID NO 35092
gcccggtcgagagtactcaggcagagacaatagctatcgactgtacaacgcgttatgttttgcgaattttagaggccccgtacgctcgatacaaggaccatcgcttcatgaagtcgatgccacccaacacagacatctttaccgattcctt

SEQ ID NO: 35095 - DNA, 708 bp, Muscodor strobelii
  misc_feature: SGI cDNA ID NO. 572141
  misc_feature: Encodes the peptide sequence at SEQ ID NO 35096
atgcgtttcagctgcagcagtgtgctggtccttgccggtctcgcccaagcatttacgtatgagaggctgaacaaatcggatgccgctctcgtaatcttggacatgcaggaaggcctgttcagtcttgcccgtgactacgacgccactctgtttcgggacgccatgtacgctcatgcggagctgggaaaagttttcgacctccctgttgttcttagcacctcatcagagacaggtcccaacggtcctcttcctaatgagtttttgaagatgtatcccaattctacactggtaaagcgacaaggagaggtaaatgcttgggataatcctgacttccgagctgctgtcgaggctactggaaaatctcagattattatcgctggtatagtcacggatgtctgcactaccttcgccgccctatccttgatcgaagcaggctatagcgtttgggcgaatcatgaggcatcaggcactaccaccgttgtccaccgtgaggaagcaaacgaccgtatgcgatcggctggcgtgcacgttgtgtcatactttgcgatcgtgtgcgagctcatgcgggattggcgcagtgttccaggcgctgcagaggtctttccgctgcttgatcaatggttccctgcttacggcatggttgccagggctcatcgcgctgcaatccagaatgggactattcttgatggtgagaaggatcttccttag

SEQ ID NO: 35096 - protein, 235 aa, Muscodor strobelii
  misc_feature: SGI Peptide ID NO. 572141
  misc_feature (23)..(186): Pfam Id: PF00857 Pfam Desc: Isochorismatase family
  misc_feature (95)..(148): Pfam Id: PF00857 Pfam Desc: Isochorismatase family
  misc_feature (1)..(234): NCBI GI: 39955298 Blast Desc: MGG_08994 [Magnaporthe grisea 70-15] gi|145009445|gb|EDJ94123.1| MGG_08994 [Magnaporthe grisea 70-15]
  misc_feature (1)..(234): NCBI GI: 169596604 Blast Desc: SNOG_01067 [Phaeosphaeria nodorum SN15] gi|111071442|gb|EAT92562.1| SNOG_01067 [Phaeosphaeria nodorum SN15]
  misc_feature (1)..(234): NCBI GI: 189202046 Blast Desc: PTRG_07027 [Pyrenophora tritici-repentis Pt-1C-BFP] gi|187984458|gb|EDU49946.1| PTRG_07027 [Pyrenophora tritici-repentis Pt-1C-BFP]
  misc_feature (1)..(232): NCBI GI: 46116144 Blast Desc: FG03914.1 [Gibberella zeae PH-1]
  misc_feature (1)..(234): NCBI GI: 156045834 Blast Desc: SS1G_09193 [Sclerotinia sclerotiorum 1980] gi|154693589|gb|EDN93327.1| SS1G_09193 [Sclerotinia sclerotiorum 1980]
  misc_feature (1)..(235): NCBI GI: 261356696 Blast Desc: ycaC [Verticillium albo-atrum VaMs.102]
  misc_feature (1)..(234): NCBI GI: 154321788 Blast Desc: BC1G_01041 [Botryotinia fuckeliana B05.10] gi|150850288|gb|EDN25481.1| BC1G_01041 [Botryotinia fuckeliana B05.10]
  misc_feature (17)..(235): NCBI GI: 171686070 Blast Desc: protein product [Podospora anserina] gi|170942996|emb|CAP68649.1| protein product [Podospora anserina]
  misc_feature (18)..(234): NCBI GI: 256723546 Blast Desc: NECHADRAFT_42039 [Nectria haematococca mpVI 77-13-4]
  misc_feature (6)..(234): NCBI GI: 169768364 Blast Desc: [Aspergillus oryzae RIB40] gi|83766510|dbj|BAE56650.1| protein product [Aspergillus oryzae]
MRFSCSSVLVLAGLAQAFTYERLNKSDAALVILDMQEGLFSLARDYDATLFRDAMYAHAELGKVFDLPVVLSTSSETGPNGPLPNEFLKMYPNSTLVKRQGEVNAWDNPDFRAAVEATGKSQIIIAGIVTDVCTTFAALSLIEAGYSVWANHEASGTTTVVHREEANDRMRSAGVHVVSYFAIVCELMRDWRSVPGAAEVFPLLDQWFPAYGMVARAHRAAIQNGTILDGEKDLP

SEQ ID NO: 35097 - DNA, 2225 bp, Muscodor strobelii
  misc_feature: SGI EST ID NO. CUFF.83534.0
  misc_feature: Variant of the nucleotide sequence at SEQ ID NO 35095
gtagtcttggctgtccacggaccaatgatcaatttgatggaaacgacgacaatgtacgagatagcgaacaatcgcaatggaaggaaattcactgaataatcaaatcccgaaatttaataaggtggctcgtcatacttatgaacgaccacggccctggtcttgagctgacgcccagaaccgtttttcgaaggtttgacttcacgatattgagatccacaatgaggcgcgaggggcgaagcgaagctgcagcacgaaaacaccaatatccaaaagcgaaattacggaagatatcgtcatatagcaaggacaacacctcgcgtacgccgtattggtatcatgcaatgagacgcatatacccacgtgtggactcgagtcggtgaagagttcgaagagataacgagtataaagacctgcaacatttccgtcaatgatagaatatttcttcagttggggagcagcaagcatcaactcgttctattcaagctcttcaccgcttcctcaaatttcagtctttgcaaaaaaatttcccacaaatcgaggaacaccttccgcaaagatgcgtttcagctgcagcagtgtgctggtccttgccggtctcgcccaagcatttacgtatgagaggctgaacaaatcggatgccgtatgcttctaataatcataaaactccacctcattcgtcgactgacaatggacaggctctcgtaatcttggacatgcaggaaggcctgttcagtcttgcccgtgactacgacgccactctgtttcgggacgccatgtacgctcatgcggagctgggaaaagttttcgacctccctgttgttcttagcacctcatcagagacaggtcccaacggtcctcttcctaatgagtttttgaagatgtatcccaattctacactggtaaagcgacaaggagaggtaaatgcttgggataatcctgacttccgagctgctgtcgaggctactggaaaatctcagattattatcgctggtatagtcacggatgtctgcactaccttcgccgccctatccttgatcgaagcaggctatagcgtttgggcgaatcatgaggcatcaggcactaccaccgttgtccaccgtgaggaagcaaacgaccgtatgcgatcggctggcgtgcacgttgtgtcatactttgcgatcgtgtgcgagctcatgcgggattggcgcagtgttccaggcgctgcagaggtctttccgctgcttgatcaatggttccctgcttacggcatggttgccagggctcatcgcgctgcaatccagaatgggactattcttgatggtgagaaggatcttccttaggtttagacctgagttgattattgtggtcaggcttgacccatgagaatgagggggtgaccatactgctgaatgcctatgcgtggatcttgtgtggctatggttttatgcagagattggttgtgggtgttttgttcttctgaaaggagccgacatgactggctggtcactgtgttcctgttccactatttagcataaaattttccgcctcgtagaagtgatatagttcaagatgtagatgtatatcagcccaattacacgctaagaatggctttccagagggggctggacggggccaaatgtgtcggcagcacataaatccgcagtctttatccattccgactacttcactaaatctatacactacgtacatttgccattcatgtctgcttgatcgactccatctcgttatgaccttgtactttcgttgctacgttccatcattcaggaaattggtatgtggtccataattattcaaaacgtaacccttatctcaggaataagatcacatgttaactttacatggtatctatatcgtatgatacggtgcattatgctcctggatgccattatgcttctgcaatgcgatccgctgctggcacctatcccatattaggtagtgcgtgatggagttgggtgcataacgcccgaagcatgtactgaaatcgtcggttaacggcaggtcccataactccgcttcgtatttgagcttgctctccccttctatttattgcaattgtcatcttcattcttacgtggtggtagcctgtatctacgtacgcagatgcaccatcgacactcgtcgttcttattccttcccccagtaatcattaataacatcaacaatcacaccatggtcttctctctgcgcaagtccagacacaacaacaaccgccacaacgccttcca

SEQ ID NO: 35098 - DNA, 621 bp, Muscodor strobelii
  misc_feature: SGI cDNA ID NO. 572142
  misc_feature: Encodes the peptide sequence at SEQ ID NO 35099
atgagtctcgtttattcacgtcgtaacaaaacgcctggcgtcggtctaaaggcggtcctcgaggcgcaagagaacatcgggaagaaaattccaatctcggaggtatctgacgttgacacggtagtgaagtctagctgcgactcatttatcttcaaaacattcacgtcagacgatgcatgggatctcgggcacttgctttacgccaggttattaccgtatgcggccgcaggaaagccaacactgatctctattgcgttggcgaacaactcacatgtgttgttccaatctgccgtgggctccggcacagcaccggataacgctctctgggtgcagcggaaacgtaacactgtccttcgcttcggaacgagtacttggtaccagcactgcaagttcaataaactcgatgataaggatgctaggagtgacgaactcaaattccgtaccaagtttggcatgagcgaggagcaggcgagccagtatgccattcatggtggaggggtaccaatttatgtcgagggtgtggaaggcgttgtggcggttgttgttgtgtctggacttgcgcagagagaagaccatggtgtgattgttgatgttattaatgattactgggggaaggaataa

SEQ ID NO: 35099 - protein, 206 aa, Muscodor strobelii
  misc_feature: SGI Peptide ID NO. 572142
  misc_feature (52)..(199): Pfam Id: PF03928 Pfam Desc: Domain of function (DUF336)
  misc_feature (4)..(203): NCBI GI: 145609519 Blast Desc: MGG_13448 [Magnaporthe grisea 70-15] gi|145016884|gb|EDK01314.1| MGG_13448 [Magnaporthe grisea 70-15]
  misc_feature (8)..(203): NCBI GI: 46123159 Blast Desc: FG05957.1 [Gibberella zeae PH-1]
  misc_feature (7)..(203): NCBI GI: 261358730 Blast Desc: DUF967 domain-containing protein [Verticillium albo-atrum VaMs.102]
  misc_feature (48)..(206): NCBI GI: 154305751 Blast Desc: BC1G_07690 [Botryotinia fuckeliana B05.10] gi|150853209|gb|EDN28401.1| BC1G_07690 [Botryotinia fuckeliana B05.10]
  misc_feature (42)..(202): NCBI GI: 261354484 Blast Desc: DUF336 domain-containing protein [Verticillium albo-atrum VaMs.102]
  misc_feature (42)..(202): NCBI GI: 256723964 Blast Desc: NECHADRAFT_97071 [Nectria haematococca mpVI 77-13-4]
  misc_feature (31)..(205): NCBI GI: 242764257 Blast Desc: DUF967 domain protein [Talaromyces stipitatus ATCC 10500] gi|242764261|ref|XP_002340734.1| DUF967 domain protein [Talaromyces stipitatus ATCC 10500] gi|218723929|gb|EED23346.1|
  misc_feature (31)..(202): NCBI GI: 212529178 Blast Desc: DUF967 domain protein [Penicillium marneffei ATCC 18224] gi|210074144|gb|EEA28231.1| DUF967 domain protein [Penicillium marneffei ATCC 18224]
  misc_feature (48)..(202): NCBI GI: 189190206 Blast Desc: conserved [Pyrenophora tritici-repentis Pt-1C-BFP] gi|187973048|gb|EDU40547.1| conserved [Pyrenophora tritici-repentis Pt-1C-BFP]
  misc_feature (25)..(197): NCBI GI: 189205102 Blast Desc: PTRG_08554 [Pyrenophora tritici-repentis Pt-1C-BFP] gi|187985985|gb|EDU51473.1| PTRG_08554 [Pyrenophora tritici-repentis Pt-1C-BFP]
MSLVYSRRNKTPGVGLKAVLEAQENIGKKIPISEVSDVDTVVKSSCDSFIFKTFTSDDAWDLGHLLYARLLPYAAAGKPTLISIALANNSHVLFQSAVGSGTAPDNALWVQRKRNTVLRFGTSTWYQHCKFNKLDDKDARSDELKFRTKFGMSEEQASQYAIHGGGVPIYVEGVEGVVAVVVVSGLAQREDHGVIVDVINDYWGKE

SEQ ID NO: 35100 - DNA, 2062 bp, Muscodor strobelii
  misc_feature: SGI EST ID NO. CUFF.83535.1
  misc_feature: Variant of the nucleotide sequence at SEQ ID NO 35098
gacccctctcagctccaccacgataaacttcacgatcagtagagattgcttgataatcatttaactagatcaaatctcttcacttctgcatatctctcttagtatagttctcatagcaactcctttattcatcatgagtctcgtttattcacgtcgtaacaaaacgcctggcgtcggtctaaaggcggtcctcgaggcgcaagagaacatcgggaagaaaattccaatctcggaggtatctgacgttgacacggtagtgaagtctagctgcgactcatttatcttcaaaacattcacgtcagacgatgcatgggatctcgggcacttgctttacgccaggttattaccgtatgcggccgcaggaaagccaacactgatctctattgcgttggcgaacaactcacatgtgttgttccaatctgccgtgggctccggcacagcaccggataacgctctctgggtgcagcggaaacgtaacactgtccttcgcttcggaacgagtacttggtaccagcactgcaagttcaataaactcgatgataaggatgctaggagtgacgaactcaaattccgtaccaagtttggcatgagcgaggagcaggcgagccagtatgccattcatggtggaggggtaccaatttatgtcgagggtgtggaaggcgttgtggcggttgttgttgtgtctggacttgcgcagagagaagaccatggtgtgattgttgatgttattaatgattactgggggaaggaataagaacgacgagtgtcgatggtgcatctgcgtacgtagatacaggctaccaccacgtaagaatgaagatgacaattgcaataaatagaaggggagagcaagctcaaatacgaagcggagttatgggacctgccgttaaccgacgatttcagtacatgcttcgggcgttatgcacccaactccatcacgcactacctaatatgggataggtgccagcagcggatcgcattgcagaagcataatggcatccaggagcataatgcaccgtatcatacgatatagataccatgtaaagttaacatgtgatcttattcctgagataagggttacgttttgaataattatggaccacataccaatttcctgaatgatggaacgtagcaacgaaagtacaaggtcataacgagatggagtcgatcaagcagacatgaatggcaaatgtacgtagtgtatagatttagtgaagtagtcggaatggataaagactgcggatttatgtgctgccgacacatttggccccgtccagccccctctggaaagccattcttagcgtgtaattgggctgatatacatctacatcttgaactatatcacttctacgaggcggaaaattttatgctaaatagtggaacaggaacacagtgaccagccagtcatgtcggctcctttcagaagaacaaaacacccacaaccaatctctgcataaaaccatagccacacaagatccacgcataggcattcagcagtatggtcaccccctcattctcatgggtcaagcctgaccacaataatcaactcaggtctaaacctaaggaagatccttctcaccatcaagaatagtcccattctggattgcagcgcgatgagccctggcaaccatgccgtaagcagggaaccattgatcaagcagcggaaagacctctgcagcgcctggaacactgcgccaatcccgcatgagctcgcacacgatcgcaaagtatgacacaacgtgcacgccagccgatcgcatacggtcgtttgcttcctcacggtggacaacggtggtagtgcctgatgcctcatgattcgcccaaacgctatagcctgcttcgatcaaggatagggcggcgaaggtagtgcctgggtgagggggaagacgtgagttcgtattcagatgacggggaaaggtggaagaatatggtgatggaggggatagcatggggaggatacttacagacatccgtgactataccagcgataatctgcgtggggaatatgccgggtcagtaatgttccttgccccttatctgagagcccctggctagtgttctg

SEQ ID NO: 35101 - DNA, 3096 bp, Muscodor strobelii
  misc_feature: SGI cDNA ID NO. 572143
  misc_feature: Encodes the peptide sequence at SEQ ID NO 35102
atggaagaaagatccaagaaacaaaggccggatagaatcacattttctgatgcctctttgtcggctgagattgcccagtttcgacgtggccacagccaagcttcaaactcgtttatcggcacagggctacaaaatataggcggcaacatcaacgtcggtggcaatataaatatcaacactttcgatagacaatcgagcatcaaagacgggaatgaagaagtcaaacagaagtacgaactgttgttcgagtcattgtattttacccagatggatgctaggcagtggagcatcaagaaaccacatttgggcacgtgtgactggttatgggcaacaccagcatacactagctggaggtgtggaacagactataataatgtgttgtggataaaagggaaaccgggcgcaggaaaatcgaccgtgatgaaattcctgtcaactgggctttcgaaacaggaacgcgaagctagatcggccacaatcatcctatcatttttcttcaactcaagaggtcatggactggaaaggactacaatcggcttgtatcgctcgtttttggtgcagctgcttgaaaaacgtcaagatctacggtatgttttggacgatatccgtttggggcatgaatggaccgccgagtcgctcgaagctctgttcgaagaagccgtaaaaggcctgggcgatgaaacgctcatttgtcttattgatgcactcgacgagtgtgatgagacagaagccagagacttggtatccctctttggtcgccttgctgtcacacatcaagtactcgtctgcttcgcgagtagacattaccctcatatcacccttgcacaatcgatgagtttagttctcgaaaacgagaagggccatgacaaagatatagcgacatatttggacaactcgttgtctgtcggatttggtcaagatgcagacgatattcgctctgagctgcaaatgaaagcgtcgggggtgtttatgtgggttgtgctcgtagtcgctattctcaacaaagttttcgactcgggtcgcaagcatttattacgttcaaaacttcagacgcttcctgcagacttatcgaagctattccgggatatccttactcgcggtgatcatgattccaatagtctccttcactgcattcagtgggttttattcgctcccgacccgctcaccccaaagcaactatattacgcgattatgattacagacgagcctcataatatggtgtccagtcattcaattgatgtatctcgcgacacaatccaaagatatatcttagattgttcgaagggtcttgtagaatctactaagtctccaagtccaaccgttcagtttattcatgtgtcagtcacagaattcttgctgaaggagaagggtttaggctgtctatggattgagcacgtcgcgaatccggttggttggagccatgatctgctcaaacaacgttgttttacgtacttagagatggaaatcctagaaggcattcaagcatcacagcctgattatctactagaggctacattcttcttacacggataccccgatttcaaggcatacccgttcctagcgtacgccgtttacggaattttgtatcacgccgaaaaggctcagagctatgggataagccaacaagatttcttagattctttctctcagttcaagcaaagatgggtcacatgtcataatgctctcacttcccatgcgccgaagtctagatattacaaaccattgccttacaaaggagatgtcagtcttctatatattttgggcgaggcaggcatacaaggacttattcaaatactgtcgagcggacagtctcctttcgaagtagagaatgaacgatttggagcaccgatactggcagctagcgtcgctaagcattccgctacggtcgaggccatgctaaagatggaacttgagcgactgtcgagatacgattacaccaaattctacactcaatggcggatcactgaaacttttggggacattactgcttccatgctagctcgagactttccgttcggcgacaaagaactattgcttcatagactcgcggctcacgctgggcagagagctaccatgttattccttgatacgcggagttgtgacataaattatactgaccccgacggcaggacagtgttgatgtacgcggctcgaaatggtcacgatcttcttactaccgagctgcttatgaggggatgcgatgtttcatgtcgtgacatggagggatttacggcattacattttgcatcaatgacaggccagcacacgacagtgaagctgttgattgaccacgatgccgatgtatcgacatgttgcgaacggggctatacgccgttacactatgcaaccaaatacaataaatttaaagcgacggaggtgcttcttgactacaacgtcgacgcatctgcggccacagtggatggggaaacgccactacacttcgcgattgcagatggggaagtcgaagtggcaagactgctcattgagcacggcgcagatatttttgtcattgaccaagatgggtgtagtctgctggatcgggccaccgaaagggggcatcttaagatggccaagttgctacttgaatatagcaaggttaattggccactcagcaagaacggtgtcaccccattgcaccgtgccgttcgcaaagagaacgtagcgatggtggaattactccttgatagtggcgccgacgtatctcccgtcgatagattcgggagcacacccttgcacgacatttcatatggtcttaaatggcctgttggtacatcgaaattaatattgcacacgattggaggttgggattacaaaatgacaacgcaacggcgtgtcgatattgctagaatgcttcttctaagaggcgcgccaataacagctactgatggagacggcaacacacctttgcaccatgccgtcaagagaggtcacgttagcatcgccttgctgcttatagactacggagccgatgttgctgcaacaaacaaattagggttcacgccacaatcctctattttgctaaacaaagattctgaaatggccacagccttcaaagatgttgggattgaggggccttccttcctgggcaacatctag

SEQ ID NO: 35102 - protein, 1031 aa, Muscodor strobelii
  misc_feature: SGI Peptide ID NO. 572143
  misc_feature (964)..(996): Pfam Id: PF00023 Pfam Desc: Ankyrin repeat
  misc_feature (807)..(839): Pfam Id: PF00023 Pfam Desc: Ankyrin repeat
  misc_feature (873)..(905): Pfam Id: PF00023 Pfam Desc: Ankyrin repeat
  misc_feature (741)..(773): Pfam Id: PF00023 Pfam Desc: Ankyrin repeat
  misc_feature (708)..(740): Pfam Id: PF00023 Pfam Desc: Ankyrin repeat
  misc_feature (774)..(806): Pfam Id: PF00023 Pfam Desc: Ankyrin repeat
  misc_feature (76)..(1023): NCBI GI: 70990006 Blast Desc: Pfs, NACHT and Ankyrin domain protein [Aspergillus fumigatus Af293] gi|66847484|gb|EAL87814.1| Pfs, NACHT and Ankyrin domain protein [Aspergillus fumigatus Af293]
  misc_feature (79)..(984): NCBI GI: 238496907 Blast Desc: Pfs, NACHT and Ankyrin domain protein [Aspergillus flavus NRRL3357] gi|220694569|gb|EED50913.1| Pfs, NACHT and Ankyrin domain protein [Aspergillus flavus NRRL3357]
  misc_feature (79)..(911): NCBI GI: 169774533 Blast Desc: [Aspergillus oryzae RIB40] gi|83769597|dbj|BAE59732.1| protein product [Aspergillus oryzae]
  misc_feature (65)..(783): NCBI GI: 159124773 Blast Desc: Pfs, NB-ARC and Ankyrin domain protein [Aspergillus fumigatus A1163]
  misc_feature (76)..(998): NCBI GI: 115433911 Blast Desc: conserved [Aspergillus terreus NIH2624] gi|114189944|gb|EAU31644.1| conserved [Aspergillus terreus NIH2624]
  misc_feature (65)..(783): NCBI GI: 70983830 Blast Desc: Pfs, NB-ARC and Ankyrin domain protein [Aspergillus fumigatus Af293] gi|66845067|gb|EAL85403.1| Pfs, NB-ARC and Ankyrin domain protein [Aspergillus fumigatus Af293]
  misc_feature (73)..(863): NCBI GI: 169608167 Blast Desc: SNOG_07152 [Phaeosphaeria nodorum SN15] gi|111064683|gb|EAT85803.1| SNOG_07152 [Phaeosphaeria nodorum SN15]
  misc_feature (81)..(1017): NCBI GI: 145254107 Blast Desc: An18g00540 [Aspergillus niger] gi|134084101|emb|CAK43130.1| protein product [Aspergillus niger]
  misc_feature (57)..(1001): NCBI GI: 225555201 Blast Desc: pfs domain-containing protein [Ajellomyces capsulatus G186AR]
  misc_feature (72)..(837): NCBI GI: 169614249 Blast Desc: SNOG_10262 [Phaeosphaeria nodorum SN15] gi|111061477|gb|EAT82597.1| SNOG_10262 [Phaeosphaeria nodorum SN15]
MEERSKKQRPDRITFSDASLSAEIAQFRRGHSQASNSFIGTGLQNIGGNINVGGNININTFDRQSSIKDGNEEVKQKYELLFESLYFTQMDARQWSIKKPHLGTCDWLWATPAYTSWRCGTDYNNVLWIKGKPGAGKSTVMKFLSTGLSKQEREARSATIILSFFFNSRGHGLERTTIGLYRSFLVQLLEKRQDLRYVLDDIRLGHEWTAESLEALFEEAVKGLGDETLICLIDALDECDETEARDLVSLFGRLAVTHQVLVCFASRHYPHITLAQSMSLVLENEKGHDKDIATYLDNSLSVGFGQDADDIRSELQMKASGVFMWVVLVVAILNKVFDSGRKHLLRSKLQTLPADLSKLFRDILTRGDHDSNSLLHCIQWVLFAPDPLTPKQLYYAIMITDEPHNMVSSHSIDVSRDTIQRYILDCSKGLVESTKSPSPTVQFIHVSVTEFLLKEKGLGCLWIEHVANPVGWSHDLLKQRCFTYLEMEILEGIQASQPDYLLEATFFLHGYPDFKAYPFLAYAVYGILYHAEKAQSYGISQQDFLDSFSQFKQRWVTCHNALTSHAPKSRYYKPLPYKGDVSLLYILGEAGIQGLIQILSSGQSPFEVENERFGAPILAASVAKHSATVEAMLKMELERLSRYDYTKFYTQWRITETFGDITASMLARDFPFGDKELLLHRLAAHAGQRATMLFLDTRSCDINYTDPDGRTVLMYAARNGHDLLTTELLMRGCDVSCRDMEGFTALHFASMTGQHTTVKLLIDHDADVSTCCERGYTPLHYATKYNKFKATEVLLDYNVDASAATVDGETPLHFAIADGEVEVARLLIEHGADIFVIDQDGCSLLDRATERGHLKMAKLLLEYSKVNWPLSKNGVTPLHRAVRKENVAMVELLLDSGADVSPVDRFGSTPLHDISYGLKWPVGTSKLILHTIGGWDYKMTTQRRVDIARMLLLRGAPITATDGDGNTPLHHAVKRGHVSIALLLIDYGADVAATNKLGFTPQSSILLNKDSEMATAFKDVGIEGPSFLGNI

SEQ ID NO: 35103 - DNA, 1182 bp, Muscodor strobelii
  misc_feature: SGI EST ID NO. CUFF.83524.0
  misc_feature: Variant of the nucleotide sequence at SEQ ID NO 35101
gccatgaggggttcaaatgcgtaacgtcatatcgcccagctcacttcgctctcggtatccaaaatggccacactttctcgcgcagtagtactcgcatgatggaagaaagatccaagaaacaaaggccggatagaatcacattttctgatgcctctttgtcggctgagattgcccagtttcgacgtggccacagccaagcttcaaactcgtttatcggcacagggctacaaaatataggcggcaacatcaacgtcggtggcaatataaatatcaacactttcgatagacaatcgagcatcaaagacgggaatgaagaagtcaaacagaagtacgaactgttgttcgagtcattgtattttacccagatggatgctaggcagtggagcatcaagaaaccacatttgggcacgtgtgactggttatgggcaacaccagcatacactagctggaggtgtggaacagactataataatgtgttgtggataaaagggaaaccgggcgcaggaaaatcgaccgtgatgaaattcctgtcaactgggctttcgaaacaggaacgcgaagctagatcggccacaatcatcctatcatttttcttcaactcaagaggtcatggactggaaaggactacaatcggcttgtatcgctcgtttttggtgcagctgcttgaaaaacgtcaagatctacggtatgttttggacgatatccgtttggggcatgaatggaccgccgagtcgctcgaagctctgttcgaagaagccgtaaaaggcctgggcgatgaaacgctcatttgtcttattgatgcactcgacgagtgtgatgagacagaagccagagacttggtatccctctttggtcgccttgctgtcacacatcaagtactcgtctgcttcgcgagtagacattaccctcatatcacccttgcacaatcgatgagtttagttctcgaaaacgagaagggccatgacaaagatatagcgacatatttggacaactcgttgtctgtcggatttggtcaagatgcagacgatattcgctctgagctgcaaatgaaagcgtcgggggtgtttatgtgggttgtgctcgtagtcgctattctcaacaaagttttcgactcgggtcgcaagcatttattacgttcaaaacttcagacgcttcctgcagacttatcgaagctattccggg

SEQ ID NO: 35104 - DNA, 723 bp, Muscodor strobelii
  misc_feature: SGI cDNA ID NO. 572144
  misc_feature: Encodes the peptide sequence at SEQ ID NO 35105
atgtatcacaccgcaacagcaacaaaaaacacgaaaatcctcactcgagatatagcagcaagacgtcaagtccaagaaacgacattccttaccttgacagtgacccggtcgtcgaacatagaaataacagtcatcccgttaggtaacgggaagagcgatcccgggccgacaaccgtgtccgagacccaaagcccatcgccagtggccgccacgacgtcacagtccggcgtcgcagatgggactatcataatcgttgtcgtcgtcctgttcatactgattctatcacttgcctcatgctgcttttggagggcgcgacgggaaggcggcggcggcttttgcgggttgcgaggaccgccaggcgcacgcggtcctcaaggcccagatggaaaggacggcatagtcgggcgatcggggtacgagcctagttcgcaaatcgatgcccagcgcattttggtccatctggtgctacgggtagtacaggacaacctgggaaggatggtgaacatggtagagatggcagagatggcagggacggccgagatggccagaatggtacagacgggcggagtggcaacgagggtccgagaggcgagcgaggtccccgaggagaagacggcatcgcgggatctgccgggcctagcggcccacgagggccagtcggacctcccggcgcacagggagagaaaggggagaaagggccgaaaggatgtccagggtaagtga

SEQ ID NO: 35105 - protein, 240 aa, Muscodor strobelii
  misc_feature: SGI Peptide ID NO. 572144
MYHTATATKNTKILTRDIAARRQVQETTFLTLTVTRSSNIEITVIPLGNGKSDPGPTTVSETQSPSPVAATTSQSGVADGTIIIVVVVLFILILSLASCCFWRARREGGGGFCGLRGPPGARGPQGPDGKDGIVGRSGYEPSSQIDAQRILVHLVLRVVQDNLGRMVNMVEMAEMAGTAEMARMVQTGGVATRVREASEVPEEKTASRDLPGLAAHEGQSDLPAHRERKGRKGRKDVQGK

SEQ ID NO: 35106 - DNA, 1125 bp, Muscodor strobelii
  misc_feature: SGI cDNA ID NO. 572145
  misc_feature: Encodes the peptide sequence at SEQ ID NO 35107
atgtcgtccctcatccacctcaacccggacgcgcggggttggacgcacaagccagtccgggcggggaccgaaagcacagtattggctttccaccagacattgccggactacaacaaaacttcattacactctttagcggatgtggcacgcgagctgggcttgagccacgttctcgtcaaggatgagtcaaaccggtttgggctccccgccttcaagattttaggcgcatcgtgggccgtctaccgcgccgtaggctggcatctggagattcccgtggctgatggtcaggtcccaatagctgaactgggcgccaaagctcgcaaggctggcctcgagattgtcgctcccactacgggcaactgtggtcgcgcgatcgctcggatggcaaaatacatgaatatacccgcccgcatctacgttcctgagtttatgcacgaggcgacgcgcgagttgatccgcagcgaaggggccgaggttgtcgtgggcggcacttacgatgagctgtttcccgtagtgatggaagaggccgaggataaggatactgtgctcgtcgtcgatgttgggatcgagggatatgccgacattcccaagtacttcacacaagggtacggcacgatgctcgctgaggctgaccaacaggtccttgaagtgaccggcggacggccggtaacacacgctatcgtcccctgtggcgctggctccatatccgaggctgttacgtcacatttcaagagactaggacgggaggcacgggcgaaagtcgtcgccgtggagcccacaatggcagcgagcttacatggggcactcaaggcaggcaagattgtctccttacagaccggagatacgattatggcgggtatgaactgtgggacactgtccacgacagcttggccagtactccaagcagggatcgatggcgatgttcttgttaccgatgccgagtcgcatcaggcagtacgggatctagaagccgcaggcgtcaaggctggaccgtgtggcgctgctactctggtagccctgcgcaggctatgtgccgatgccaaagacgatttagggctcgacagcaattcggtagtgctcttgtgttgcaccgaagggagtcgagattacaaagtcccctcttga

SEQ ID NO: 35107 - protein, 374 aa, Muscodor strobelii
  misc_feature: SGI Peptide ID NO. 572145
  misc_feature (33)..(363): Pfam Id: PF00291 Pfam Desc: Pyridoxal-phosphate dependent enzyme
  misc_feature (110)..(363): Pfam Id: PF00291 Pfam Desc: Pyridoxal-phosphate dependent enzyme
  misc_feature (5)..(373): NCBI GI: 169600919 Blast Desc: SNOG_03314 [Phaeosphaeria nodorum SN15] gi|111068925|gb|EAT90045.1| SNOG_03314 [Phaeosphaeria nodorum SN15]
  misc_feature (5)..(373): NCBI GI: 256721873 Blast Desc: NECHADRAFT_54589 [Nectria haematococca mpVI 77-13-4]
  misc_feature (25)..(373): NCBI GI: 239613195 Blast Desc: diaminopropionate ammonia-lyase [Ajellomyces dermatitidis ER-3]
  misc_feature (1)..(373): NCBI GI: 171695600 Blast Desc: protein product [Podospora anserina] gi|170948042|emb|CAP60206.1| protein product [Podospora anserina]
  misc_feature (2)..(373): NCBI GI: 119186311 Blast Desc: CIMG_03203 [Coccidioides immitis RS]
  misc_feature (2)..(373): NCBI GI: 240108616 Blast Desc: Pyridoxal-phosphate dependent enzyme family [Coccidioides posadasii C735 delta SOWgp]
  misc_feature (5)..(373): NCBI GI: 238844100 Blast Desc: diaminopropionate ammonia-lyase [Microsporum canis CBS 113480]
  misc_feature (38)..(373): NCBI GI: 261190891 Blast Desc: diaminopropionate ammonia-lyase [Ajellomyces dermatitidis SLH14081] gi|239590898|gb|EEQ73479.1| diaminopropionate ammonia-lyase [Ajellomyces dermatitidis
  misc_feature (30)..(373): NCBI GI: 169767218 Blast Desc: [Aspergillus oryzae RIB40] gi|83765935|dbj|BAE56078.1| protein product [Aspergillus oryzae]
  misc_feature (5)..(373): NCBI GI: 46127077 Blast Desc: FG07916.1 [Gibberella zeae PH-1]
  misc_feature (27)..(366): SWISSPROT Homolog: EC 4.3.1.15 Diaminopropionate ammonia-lyase
MSSLIHLNPDARGWTHKPVRAGTESTVLAFHQTLPDYNKTSLHSLADVARELGLSHVLVKDESNRFGLPAFKILGASWAVYRAVGWHLEIPVADGQVPIAELGAKARKAGLEIVAPTTGNCGRAIARMAKYMNIPARIYVPEFMHEATRELIRSEGAEVVVGGTYDELFPVVMEEAEDKDTVLVVDVGIEGYADIPKYFTQGYGTMLAEADQQVLEVTGGRPVTHAIVPCGAGSISEAVTSHFKRLGREARAKVVAVEPTMAASLHGALKAGKIVSLQTGDTIMAGMNCGTLSTTAWPVLQAGIDGDVLVTDAESHQAVRDLEAAGVKAGPCGAATLVALRRLCADAKDDLGLDSNSVVLLCCTEGSRDYKVPS

SEQ ID NO: 35108 - DNA, 4845 bp, Muscodor strobelii
  misc_feature: SGI EST ID NO. CUFF.83699.1
  misc_feature: Variant of the nucleotide sequence at SEQ ID NO 35106
ccggtgcgccggcgtttgtatgaagaatatcttgtcctggtattcgatgtacagttccgtggtactcgtatgtgatatttgatataattggcgagtatgttttcttttgcacattcttgtcctcgaggccgtttgtctagtcccggttggtagcgggatgctgcaggacattctgcgctccgttcactacacctccgaaaggtaaaattcttgagatttttagtttggacgagtgatagttcttgttctctcgttgctttgtgattcttgtgggttggaaattgtttcgttgatcttcgatacatagtatatgtcatgaaagctgattatacgacgatttcataatgtatcacaccgcaacagcaacaaaaaacacgaaaatcctcactcgagatatagcagcaagacgtcaagtccaagaaacgacattccttaccttgacagtgacccggtcgtcgaacatagaaataacagtcatcccgttaggtaacgggaagagcgatcccgggccgacaaccgtgtccgagacccaaagcccatcgccagtggccgccacgacgtcacagtccggcgtcgcagatgggactatcataatcgttgtcgtcgtcctgttcatactgattctatcacttgcctcatgctgcttttggagggcgcgacgggaaggcggcggcggcttttgcgggttgcgaggaccgccaggtcggcgagggccaaggggtcaccctggtgtaggacggccggtatgtaataattgccattgattcgttgagatgcgactaaattcaaaaggagatccggggctgagaggggaacctggcaagtgatctcatccccgtctcatcgtggtggtattctggtattgactccgctaactcccatctcacattccaggcgcacgcggtcctcaaggcccagatggaaaggacggcatagtcgggcgatcggggtacgagcctagttcgcaaatcgatgcccagcgcattgtgcgtgcctaaacagaagaagctaatatttcatcttagaccaattggcccagttggtccatctggtgctacgggtagtacaggacaacctgggaaggatggtgaacatggtagagatggcagagatggcagggacggccgagatggccagaatggtacagacgggcggagtggcaacgagggtccgagaggcgagcgaggtccccgagggtaagtgatgagttgccaatagcactattgcgtttcgtcttcacctcagacgctgatcatcacatgtcaaaatcaacagagaagacggcatcgcgggatctgccgggcctagcggcccacgagggccagtcggacctcccggcgcacagggagagaaaggggagaaagggccgaaaggatgtccagggtaagtgacttccttcaccggtcttcgagagaatatagttgatcatcgacgatggcctagccctcaggtagagcagggctcagagggtgatagaggggagaggggatctggtggctctaaaggcgatcacgctcctttggcagagacgatcgagagctgcaattgtacaatctgcggtggccaaaagagatcaaaaatctcacaaagctgcatcaggactcgacgttattgtacccgggagggttgtgggacagctcgatgttgttgcgacgaggaatgagcgttgctagcaccaagagcgatttcgagaatttcgaatcggcctccacgatgttaatgcctgacgacgcgtgagttttattggaaaggaacagtaataatgctggcgttgggcagaggcttgagtatctcaggtttctattctcagaccagcgaattcttcgcacaccgagagaggaaggccgtcgctgatcgcgcagaccgcaaaagtactaccggccagtaccgcggttctcgaaccatggggaagccggatgcgctccccgccacgccgccgaattggttatggcgacgttgactgccccgctgccctaacaaagctatcaccaatacagggaggtagcatgtgccaagacaagagccacgaatcagaatgcttaccaacgttgtgaggccgtagtcccacgcgccttttcgcttggtgtcgtaccttacagatagggcaggcagggaacgatatacaatcagctttgtacataggccccttcatcaatctgcgccgtccgtggcagccatttctcggctctgatgcgtggtgcagcaacaagagagagaggagagaccgagacgcggtccgttccggggatttgaaattgttctggaccgggggttcggcgcaagtggggaagctctcaagctcccacgcaagcttcccctcgatacttgatagggctcagcctcctttgcattgattcgatcctgttctggagagcatctgcctggtccggccggctccatgtggttcttatcgacttgtgcatttccgtagacgtcgtgattttcctgttttgcttttgctttttccgaattgacccctttggagaatcagaaggaccatcgtatagacacacagagaaaggcgcccgatgtcgtccctcatccacctcaacccggacgcgcggggttggacgcacaagccagtccgggcggggaccgaaagcacagtattggctttccaccagacattgccggactacaacaaaacttcattacactctttagcggatgtggcacgcgagctgggcttgagccacgttctcgtcaaggatgagtcaaaccggtttgggctccccgccttcaagattttaggcgcatcgtgggccgtctaccgcgccgtaggctggcatctggagattcccgtggctgatggtcaggtcccaatagctgaactgggcgccaaagctcgcaaggctggcctcgagattgtcgctcccactacgggcaactgtggtcgcgcgatcgctcggatggcaaaatacatgaatatacccgcccgcatctacgttcctgagtttatgcacgaggcgacgcgcgagttgatccgcagcgaaggggccgaggttgtcgtgggcggcacttacgatgagctgtttcccgtagtgatggaagaggccgaggataaggatactgtgctcgtcgtcgatgttgggatcgagggatatgccgacattcccaagtacttcacacaagggtacggcacgatgctcgctgaggctgaccaacaggtccttgaagtgaccggcggacggccggtaacacacgctatcgtcccctgtggcgctggctccatatccgaggctgttacgtcacatttcaagagactaggacgggaggcacgggcgaaagtcgtcgccgtggagcccacaatggcagcgagcttacatggggcactcaaggcaggcaagattgtctccttacagaccggagatacgattatggcgggtatgaactgtgggacactgtccacgacagcttggccagtactccaagcagggatcgatggcgatgttcttgttaccgatgccgagtcgcatcaggcagtacgggatctagaagccgcaggcgtcaaggctggaccgtgtggcgctgctactctggtagccctgcgcaggctatgtgccgatgccaaagacgatttagggctcgacagcaattcggtagtgctcttgtgttgcaccgaagggagtcgagattacaaagtcccctcttgatcacatacgttcatcccgagccactgctcattttctgatcacgagaccatgggaaccatgaaaatggccgttcgacgtagaagcaagaacggcacgcgatgtttaaagcgggcgtccaagagggagagtcaaaaaaaaaaggaaaaagttcaacatatagcgtttcttgattgaggaggcagttttcctcgtcttcactttgctttgtacattggcttcttctcttcccattctcttcttcttcaacaaatattatacacttgatcacacagtcttcatccttttccgccttggggtatgttgttggtggtatttggtggtttggatgccgatggtggttatctttctttgtatttgttacacacttctggagattatacccctaccctggcgggctatgtgctcgagctttttgtacattgtgcatatttgcaaaaaaactttgtatgtcgaatttgagaaacttgcttcgggctaaaatccatttgtttcgaggaaatgaacaacacgccgcctgtctcgccggccctgtacccgtgaacaattagcaagtgactcgccatgtagcaagcagaagaatatgtgatgggtagatctaggtaaacatggcagcaatttgtaaactggggaaagtcgacttactcctatggagatatgattattggtgctattgatgcggactatcttgggatctagctcgagcgctttcgccaaatcttccttgaaggctcttaaattgccctcgactctcttgatgacagtcttgtgcttgttgccgccggctacggacaaatcgtagacgctgagattcatgagggagtttcggccgacaaagtagggtagcccatcggtgggcttcgtttgcttcgtctctggagctgcggcctctgaggtcggaggttcgatcgcggttgctagggttcggagtcgtaatgacactggcaaggcagctaagggtacggactggagagagggcgcagacagagatgccgcaagcggccgaaacgttcgcgacagcatggctgcggtcgatcggtagagttgggatcgggcgttgtgaagaatcagtctggggatgatgcagaaacgagtgtgacgatgccttcaatctggggtttggcagcagctggaagtcggagaaacatttcaatggcactgtgtctcaagcagtacaaagaagcagcgattacgg

SEQ ID NO: 35109 - DNA, 432 bp, Muscodor strobelii
  misc_feature: SGI cDNA ID NO. 572146
  misc_feature: Encodes the peptide sequence at SEQ ID NO 35110
atgctgtcgcgaacgtttcggccgcttgcggcatctctgtctgcgccctctctccagtccgtacccttagctgccttgccagtgtcattacgactccgaaccctagcaaccgcgatcgaacctccgacctcagaggccgcagctccagagacgaagcaaacgaagcccaccgatgggctaccctactttgtcggccgaaactccctcatgaatctcagcgtctacgatttgtccgtagccggcggcaacaagcacaagactgtcatcaagagagtcgagggcaatttaagagccttcaaggaagatttggcgaaagcgctcgagctagatcccaagatagtccgcatcaatagcaccaataatcatatctccataggaggccggcgagacaggcggcgtgttgttcatttcctcgaaacaaatggattttag

SEQ ID NO: 35110 - protein, 143 aa, Muscodor strobelii
  misc_feature: SGI Peptide ID NO. 572146
  misc_feature (52)..(116): Pfam Id: PF05046 Pfam Desc: Mitochondrial large subunit ribosomal protein (Img2)
  misc_feature (53)..(116): Pfam Id: PF05046 Pfam Desc: Mitochondrial large subunit ribosomal protein (Img2)
  misc_feature (60)..(143): NCBI GI: 171678309 Blast Desc: protein product [Podospora anserina] gi|170937224|emb|CAP61881.1| protein product [Podospora anserina]
  misc_feature (46)..(143): NCBI GI: 85094394 Blast Desc: NCU05890 [Neurospora crassa OR74A] gi|28921337|gb|EAA30645.1| [Neurospora crassa OR74A]
  misc_feature (44)..(138): NCBI GI: 238838076 Blast Desc: conserved [Microsporum canis CBS 113480]
  misc_feature (57)..(143): NCBI GI: 115396422 Blast Desc: conserved [Aspergillus terreus NIH2624] gi|114193419|gb|EAU35119.1| conserved [Aspergillus terreus NIH2624]
  misc_feature (38)..(143): NCBI GI: 212526760 Blast Desc: mitochondrial large ribosomal subunit L49, [Penicillium marneffei ATCC 18224] gi|210072935|gb|EEA27022.1| mitochondrial large ribosomal subunit L49, [Penicillium marneffei
  misc_feature (39)..(143): NCBI GI: 242781742 Blast Desc: mitochondrial large ribosomal subunit L49, [Talaromyces stipitatus ATCC 10500] gi|218720009|gb|EED19428.1| mitochondrial large ribosomal subunit L49, [Talaromyces ATCC
  misc_feature (33)..(141): NCBI GI: 121705750 Blast Desc: mitochondrial large ribosomal subunit L49, [Aspergillus clavatus NRRL 1] gi|119399284|gb|EAW09712.1| mitochondrial large ribosomal subunit L49, [Aspergillus clavatus
  misc_feature (44)..(129): NCBI GI: 240108246 Blast Desc: Mitochondrial large subunit ribosomal protein, [Coccidioides posadasii C735 delta SOWgp]
  misc_feature (44)..(143): NCBI GI: 119187289 Blast Desc: CIMG_03692 [Coccidioides immitis RS]
  misc_feature (56)..(143): NCBI GI: 261194100 Blast Desc: mitochondrial large ribosomal subunit L49 [Ajellomyces dermatitidis SLH14081] gi|239588469|gb|EEQ71112.1| mitochondrial large ribosomal subunit L49 [Ajellomyces dermatitidis SLH14081]
MLSRTFRPLAASLSAPSLQSVPLAALPVSLRLRTLATAIEPPTSEAAAPETKQTKPTDGLPYFVGRNSLMNLSVYDLSVAGGNKHKTVIKRVEGNLRAFKEDLAKALELDPKIVRINSTNNHISIGGRRDRRRVVHFLETNGF

SEQ ID NO: 35111 - DNA, 6370 bp, Muscodor strobelii
  misc_feature: SGI EST ID NO. CUFF.83700.0
  misc_feature: Variant of the nucleotide sequence at SEQ ID NO 35109
ccgtaatcgctgcttctttgtactgcttgagacacagtgccattgaaatgtttctccgacttccagctgctgccaaaccccagattgaaggcatcgtcacactcgtttctgcatcatccccagactgattcttcacaacgcccgatcccaactctaccgatcgaccgcagccatgctgtcgcgaacgtttcggccgcttgcggcatctctgtctgcgccctctctccagtccgtacccttagctgccttgccagtgtcattacgactccgaaccctagcaaccgcgatcgaacctccgacctcagaggccgcagctccagagacgaagcaaacgaagcccaccgatgggctaccctactttgtcggccgaaactccctcatgaatctcagcgtctacgatttgtccgtagccggcggcaacaagcacaagactgtcatcaagagagtcgagggcaatttaagagccttcaaggaagatttggcgaaagcgctcgagctagatcccaagatagtccgcatcaatagcaccaataatcatatctccataggaggccggcgagacaggcggcgtgttgttcatttcctcgaaacaaatggattttagcccgaagcaagtttctcaaattcgacatacaaagtttttttgcaaatatgcacaatgtacaaaaagctcgagcacatagcccgccagggtaggggtataatctccagaagtgtgtaacaaatacaaagaaagataaccaccatcggcatccaaaccaccaaataccaccaacaacataccccaaggcggaaaaggatgaagactgtgtgatcaagtgtataatatttgttgaagaagaagagaatgggaagagaagaagccaatgtacaaagcaaagtgaagacgaggaaaactgcctcctcaatcaagaaacgctatatgttgaactttttccttttttttttgactctccctcttggacgcccgctttaaacatcgcgtgccgttcttgcttctacgtcgaacggccattttcatggttcccatggtctcgtgatcagaaaatgagcagtggctcgggatgaacgtatgtgatcaagaggggactttgtaatctcgactcccttcggtgcaacacaagagcactaccgaattgctgtcgagccctaaatcgtctttggcatcggcacatagcctgcgcagggctaccagagtagcagcgccacacggtccagccttgacgcctgcggcttctagatcccgtactgcctgatgcgactcggcatcggtaacaagaacatcgccatcgatccctgcttggagtactggccaagctgtcgtggacagtgtcccacagttcatacccgccataatcgtatctccggtctgtaaggagacaatcttgcctgccttgagtgccccatgtaagctcgctgccattgtgggctccacggcgacgactttcgcccgtgcctcccgtcctagtctcttgaaatgtgacgtaacagcctcggatatggagccagcgccacaggggacgatagcgtgtgttaccggccgtccgccggtcacttcaaggacctgttggtcagcctcagcgagcatcgtgccgtacccttgtgtgaagtactgggaaaacattagtaaatgccatccatcgcagtactaaaacaaaaaggcacgcggcatttgtagatgttggcccaccttgggaatgtcggcatatccctcgatcccaacatcgacgacgagcacagtatccttatcctcggcctcttccatcactacgggaaacagctcatcgtaagtgccgcccacgacaacctcggccccttcgctgcggatcaactcgcgcgtcgcctcgtgcataaactcaggaacgtagatgcgggcgggtatattcatgtattttgccatccgagcgatcgcgcgaccacagttgcccgtagtgggagcgacaatctcgaggccagccttgcgagctttggcgcccagttcagctattgggacctgaccatcagccacgggaatctccagatgccagcctacggcgcggtagacggcccacgatgcgcctaaaatcttgaaggcggggagcccaaaccggtttgactcatccttgacgagaacgtggctcaagcccagctcgcgtgccacatccgctaaagagtgtaatgaagttttgttgtagtccggcaatgtctggtggaaagccaatactgtgctttcggtccccgcccggactggcttgtgcgtccaaccccgcgcgtccgggttgaggtggatgagggacgacatcgggcgcctttctctgtgtgtctatacgatggtccttctgattctccaaaggggtcaattcggaaaaagcaaaagcaaaacaggaaaatcacgacgtctacggaaatgcacaagtcgataagaaccacatggagccggccggaccaggcagatgctctccagaacaggatcgaatcaatgcaaaggaggctgagccctatcaagtatcgaggggaagcttgcgtgggagcttgagagcttccccacttgcgccgaacccccggtccagaacaatttcaaatccccggaacggaccgcgtctcggtctctcctctctctcttgttgctgcaccacgcatcagagccgagaaatggctgccacggacggcgcagattgatgaaggggcctatgtacaaagctgattgtatatcgttccctgcctgccctatctgtaaggtacgacaccaagcgaaaaggcgcgtgggactacggcctcacaacgttggtaagcattctgattcgtggctcttgtcttggcacatgctacctccctgtattggtgatagctttgttagggcagcggggcagtcaacgtcgccataaccaattcggcggcgtggcggggagcgcatccggcttccccatggttcgagaaccgcggtactggccggtagtacttttgcggtctgcgcgatcagcgacggccttcctctctcggtgtgcgaagaattcgctggtctgagaatagaaacctgagatactcaagcctctgcccaacgccagcattattactgttcctttccaataaaactcacgcgtcgtcaggcattaacatcgtggaggccgattcgaaattctcgaaatcgctcttggtgctagcaacgctcattcctcgtcgcaacaacatcgagctgtcccacaaccctcccgggtacaataacgtcgagtcctgatgcagctttgtgagatttttgatctcttttggccaccgcagattgtacaattgcagctctcgatcgtctctgccaaaggagcgtgatcgcctttagagccaccagatcccctctcccctctatcaccctctgagccctgctctacctgagggctaggccatcgtcgatgatcaactatattctctcgaagaccggtgaaggaagtcacttaccctggacatcctttcggccctttctcccctttctctccctgtgcgccgggaggtccgactggccctcgtgggccgctaggcccggcagatcccgcgatgccgtcttctctgttgattttgacatgtgatgatcagcgtctgaggtgaagacgaaacgcaatagtgctattggcaactcatcacttaccctcggggacctcgctcgcctctcggaccctcgttgccactccgcccgtctgtaccattctggccatctcggccgtccctgccatctctgccatctctaccatgttcaccatccttcccaggttgtcctgtactacccgtagcaccagatggaccaactgggccaattggtctaagatgaaatattagcttcttctgtttaggcacgcacaatgcgctgggcatcgatttgcgaactaggctcgtaccccgatcgcccgactatgccgtcctttccatctgggccttgaggaccgcgtgcgcctggaatgtgagatgggagttagcggagtcaataccagaataccaccacgatgagacggggatgagatcacttgccaggttcccctctcagccccggatctccttttgaatttagtcgcatctcaacgaatcaatggcaattattacataccggccgtcctacaccagggtgaccccttggccctcgccgacctggcggtcctcgcaacccgcaaaagccgccgccgccttcccgtcgcgccctccaaaagcagcatgaggcaagtgatagaatcagtatgaacaggacgacgacaacgattatgatagtcccatctgcgacgccggactgtgacgtcgtggcggccactggcgatgggctttgggtctcggacacggttgtcggcccgggatcgctcttcccgttacctaacgggatgactgttatttctatgttcgacgaccgggtcactgtcaaggtaaggaatgtcgtttcttggacttgacgtcttgctgctatatctcgagtgaggattttcgtgttttttgttgctgttgcggtgtgatacattatgaaatcgtcgtataatcagctttcatgacatatactatgtatcgaagatcaacgaaacaatttccaacccacaagaatcacaaagcaacgagagaacaagaactatcactcgtccaaactaaaaatctcaagaattttacctttcggaggtgtagtgaacggagcgcagaatgtcctgcagcatcccgctaccaaccgggactagacaaacggcctcgaggacaagaatgtgcaaaagaaaacatactcgccaattatatcaaatatcacatacgagtaccacggaactgtacatcgaataccaggacaagatattcttcatacaaacgccggcgcaccggctggtgtttgaaaacagcaccacacgtacctgacacaatcagggctttatatttatcactgaagaagatggtactaccttcgccgtaagggctctatatatataaagtggttgatctgtaaagatctgtaactacagatcattacagatcaccctcgcatataagcatatgccaccatacaagcataatgtctctatgcatttatcagcgtatttctatatagcgaatggaatggcctgttccaatgttcatgttggcccgtaacagatactcttatagggagtaccaatacagctatgtggacgaagttttgccaaaatttctgcgctacaactcatcattgaacctattgtcaaagagctcggttcttgtaactaacaacagtgcaagtttagagcaatggtttcatcattcttatacacacgtcggtcattcctctccgagaaagcaatccaaaccccctggttttacatattccgctcttcttgtcctcaaactgacgtatctagaagcgttgcgtttggcatccttccagactcgcctcagctagatgttgcccaggaaggaaggcccctcaatcccaacatctttgaaggctgtggccatttcagaatctttgtttagcaaaatagaggattgtggcgtgaaccctaatttgtttgttgcagcaacatcggctccgtagtctataagcagcaaggcgatgctaacgtgacctctcttgacggcatggtgcaaaggtgtgttgccgtctccatcagtagctgttattggcgcgcctcttagaagaagcattctagcaatatcgacacgccgttgcgttgtcattttgtaatcccaacctccaatcgtgtgcaatattaatttcgatgtaccaacaggccatttaagaccatatgaaatgtcgtgcaagggtgtgctcccgaatctatcgacgggagatacgtcggcgccactatcaaggagtaattccaccatcgctacgttctctttgcgaacggcacggtgcaatggggtgacaccgttcttgctgagtggccaattaaccttgctatattcaagtagcaacttggccatcttaagatgccccctttcggtggcccgatccagcagactacacccatcttggtcaatgacaaaaatatctgcgccgtgctcaatgagcagtcttgccacttcgacttccccatctgcaatcgcgaagtgtagtggcgtttccccatccactgtggccgcagatgcgtcgacgttgtagtcaagaagcacctccgtcgctttaaatttattgtatttggttgcatagtgtaacggcgtatagccccgttcgcaacatgtcgatacatcggcatcgtggtcaatcaacagcttcactgtcgtgtgctggcctgtcattgatgcaaaatgtaatgccgtaaatccctccatgtcacgacatgaaacatcgcatcccctcataagcagctcggtagtaagaagatcgtgaccatttcgagccgcgtacatcaacactgtcctgccgtcggggtcagtataatttatgtcacaactccgcgtatcaagg

SEQ ID NO: 35112 - DNA, 1650 bp, Muscodor strobelii
  misc_feature: SGI cDNA ID NO. 572148
  misc_feature: Reduced expression when VOC is produced
  misc_feature: Encodes the peptide sequence at SEQ ID NO 35113
atgtccaacaccttagcgccaaccccagccaatctgggcgcgttcgtcctcttcatagcgctcatcctttggcgccgctacaccgcgaaatactccgagtacaccagctcacaaactcatcagcccagccaacctacagcaccttcaacatatccctatatcttccctctcatcggaagtctcccagttaaatatctcctcaacccactatcattcgtcctgaacactaactcattctttcaatccccaaacccaacacggataaatgtcttaaataaagaattctacgtcctccggggccaagaaaacatcaaagctttattcagaggatcgtcactatgcacttcaatcccactcgttgaattcgcgctcggcaacgccttcgggctacccgccgctgcgctacgaacagtgtcgtctgatgactctggtggtgggcctgtgccacatcctgacagcaatgtagaggccaggaatcggtttgaatatgtgaatcatcactcttttggacctctgctagagggtaacggtttcagatgtctggtagataggttcaagacctgtattcgtgatgtgttggacgagtgggttgaggaaataggggatgaagagagggagtatgacgatttgatgagagtgataggtgataagagtacagctgcgatcgttgatgcgctttgtgggacgtatttgagagagttgaatccaacgtttttagatgacttttgggagtttgatcggtgcttgcagacttatctacaaggcatcccaaggttcctagcaccacgagcctacgcatcgcgagctcgtgtgttaaacgccgtgaagaaatggcaagcccacgcccgagcgcactacactcccacagctcaaacagaagatggcgatgatccatactggggcagtagcttctttcgtgagcgtcacgatatgttcctagagatggatggcttcgaccacgacgccatcgcatccgcagacttcggcgcgatctgggccgttcgaaacgcagtctcagcagtaatatgggcaatactctcaatatacagttcccccacactcctaaccaccattcgctccgaaatccacacctgcctccaggcagacagaaccttctctatcgacgcactcctccgtctcccagtccttcaagcagtatacgcagaaaccctccgtctcaggatgcatttctacataattcgcatgcccgacaggctccccctaaaaatcggcaactgggtcataccgcgccgtaaggtcgtagtgacacccacgaccgtagcgcacatggatgctcagacttgggacacagggtcaaataacgaacatcccgttaataagttctgggaaggaagattccttaagcatggcgcagatggcgaacttgttttctcgatgaaagatctcgaaggagcatggataccatacggaggcggaccacggatgtgccctggtcgacatttcgctaaacgccagattttgctgactattgctataatagtcgatctattcgatatagaaattttggggaaaggtaaggaagtgaaggaagacttcacgctcaacggatttggtggtggtatgtcacgcgctgtgggcaagatcccgttccgaataaagcgtagaagaaaggatgatattacgtcgtaa

SEQ ID NO: 35113 - protein, 549 aa, Muscodor strobelii
  misc_feature: SGI Peptide ID NO. 572148
  misc_feature (63)..(537): Pfam Id: PF00067 Pfam Desc: Cytochrome P450
  misc_feature (472)..(537): Pfam Id: PF00067 Pfam Desc: Cytochrome P450
  misc_feature (48)..(542): NCBI GI: 189195766 Blast Desc: conserved [Pyrenophora tritici-repentis Pt-1C-BFP] gi|187980100|gb|EDU46726.1| conserved [Pyrenophora tritici-repentis Pt-1C-BFP]
  misc_feature (43)..(542): NCBI GI: 242813620 Blast Desc: conserved [Talaromyces stipitatus ATCC 10500] gi|218714542|gb|EED13965.1| conserved [Talaromyces stipitatus ATCC 10500]
  misc_feature (43)..(542): NCBI GI: 242813615 Blast Desc: conserved [Talaromyces stipitatus ATCC 10500] gi|218714541|gb|EED13964.1| conserved [Talaromyces stipitatus ATCC 10500]
  misc_feature (47)..(541): NCBI GI: 145246720 Blast Desc: An12g05400 [Aspergillus niger] gi|134080330|emb|CAK46252.1| protein product [Aspergillus niger]
  misc_feature (3)..(547): NCBI GI: 212528994 Blast Desc: Pfs, NACHT and Ankyrin domain protein [Penicillium marneffei ATCC 18224] gi|210074052|gb|EEA28139.1| Pfs, NACHT and Ankyrin domain protein [Penicillium marneffei ATCC 18224]
  misc_feature (45)..(547): NCBI GI: 169785174 Blast Desc: [Aspergillus oryzae RIB40] gi|83775795|dbj|BAE65915.1| protein product [Aspergillus oryzae]
  misc_feature (47)..(543): NCBI GI: 242764799 Blast Desc: conserved [Talaromyces stipitatus ATCC 10500] gi|218724041|gb|EED23458.1| conserved [Talaromyces stipitatus ATCC 10500]
  misc_feature (48)..(544): NCBI GI: 116200698 Blast Desc: CHGG_10894 [Chaetomium globosum CBS 148.51] gi|88175608|gb|EAQ83076.1| CHGG_10894 [Chaetomium globosum CBS 148.51]
  misc_feature (128)..(542): NCBI GI: 156062376 Blast Desc: SS1G_01304 [Sclerotinia sclerotiorum 1980] gi|154696640|gb|EDN96378.1| SS1G_01304 [Sclerotinia sclerotiorum 1980]
  misc_feature (48)..(543): NCBI GI: 46116016 Blast Desc: FG03850.1 [Gibberella zeae PH-1]
  misc_feature: Useful for introducing or modulating the production of volatile compounds
MSNTLAPTPANLGAFVLFIALILWRRYTAKYSEYTSSQTHQPSQPTAPSTYPYIFPLIGSLPVKYLLNPLSFVLNTNSFFQSPNPTRINVLNKEFYVLRGQENIKALFRGSSLCTSIPLVEFALGNAFGLPAAALRTVSSDDSGGGPVPHPDSNVEARNRFEYVNHHSFGPLLEGNGFRCLVDRFKTCIRDVLDEWVEEIGDEEREYDDLMRVIGDKSTAAIVDALCGTYLRELNPTFLDDFWEFDRCLQTYLQGIPRFLAPRAYASRARVLNAVKKWQAHARAHYTPTAQTEDGDDPYWGSSFFRERHDMFLEMDGFDHDAIASADFGAIWAVRNAVSAVIWAILSIYSSPTLLTTIRSEIHTCLQADRTFSIDALLRLPVLQAVYAETLRLRMHFYIIRMPDRLPLKIGNWVIPRRKVVVTPTTVAHMDAQTWDTGSNNEHPVNKFWEGRFLKHGADGELVFSMKDLEGAWIPYGGGPRMCPGRHFAKRQILLTIAIIVDLFDIEILGKGKEVKEDFTLNGFGGGMSRAVGKIPFRIKRRRKDDITS

SEQ ID NO: 35114 - DNA, 3880 bp, Muscodor strobelii
  misc_feature: SGI EST ID NO. CUFF.83859.1
  misc_feature: Variant of the nucleotide sequence at SEQ ID NO 35112
ccacgctcctatagacgtccgtaagcggaaacaccgccctttgcatgcggttcttcttcactatcaacgtcctcacttttaagtccttcatcacaagtcaatctcatataatcaatctatttcgtgaataagtatttcaacacgatgattcttatctcatgatgtccaacaccttagcgccaaccccagccaatctgggcgcgttcgtcctcttcatagcgctcatcctttggcgccgctacaccgcgaaatactccgagtacaccagctcacaaactcatcagcccagccaacctacagcaccttcaacatatccctatatcttccctctcatcggaagtctcccagttaaatatctcctcaacccactatcattcgtcctgaacactaactcattctttcaatccccaaacccaacacggataaatgtcttaaataaagaattctacgtcctccggggccaagaaaacatcaaagctttattcagaggatcgtcactatgcacttcaatcccactcgttgaattcgcgctcggcaacgccttcgggctacccgccgctgcgctacgaacagtgtcgtctgatgactctggtggtgggcctgtgccacatcctgacagcaatgtagaggccaggaatcggtttgaatatgtgaatcatcactcttttggacctctgctagagggtaacggtttcagatgtctggtagataggttcaagacctgtattcgtgatgtgttggacgagtgggttgaggaaataggggatgaagagagggagtatgacgatttgatgagagtgataggtgataagagtacagctgcgatcgttgatgcgctttgtgggacgtatttgagagagttgaatccaacgtttttagatgacttttgggagtttgatcggtgcttgcagacttatctacaaggcatcccaaggttcctagcaccacgagcctacgcatcgcgagctcgtgtgttaaacgccgtgaagaaatggcaagcccacgcccgagcgcactacactcccacagctcaaacagaagatggcgatgatccatactggggcagtagcttctttcgtgagcgtcacgatatgttcctagagatggatggcttcgaccacgacgccatcgcatccgcagacttcggcgcgatctgggcgtaagcccccatacaccccatccaatacccaacccgcagactaacacaccgcacagcgttcgaaacgcagtctcagcagtaatatgggcaatactctcaatatacagttcccccacactcctaaccaccattcgctccgaaatccacacctgcctccaggcagacagaaccttctctatcgacgcactcctccgtctcccagtccttcaagcagtatacgcagaaaccctccgtctcaggatgcatttctacataattcgcatgcccgacaggctccccctaaaaatcggcaactgggtcataccgcgccgtaaggtcgtagtgacacccacgaccgtagcgcacatggatgctcagacttgggacacagggtcaaataacgaacatcccgttaataagttctgggaaggaagattccttaagcatggcgcagatggcgaacttgttttctcgatgaaagatctcgaaggagcatggataccatacggaggcggaccacggatgtgccctggtcgacatttcgctaaacgccagattttgctgactattgctataatagtcgatctattcgatatagaaattttggggaaaggtaaggaagtgaaggaagacttcacgctcaacggatttggtggtggtatgtcacgcgctgtgggcaagatcccgttccgaataaagcgtagaagaaaggatgatattacgtcgtaattataagatcactttgtactgtcgaaaaccttcttgttgatggtgcatctgcgtacgcagatacaggcgaccaccatcacatacaagatgacaatagagcagaatcattgaagacgtaagttgaaacacatcaacatgtcacacgtcacgaaagatggaattcagcaagcaagctcgttcatgaacatggtcgctccgcagagcgccccatcgcattaaatagaaatggatgcctaagcaaagaagcacaattcatacaggtctacccgccttgatttgtaccgaaaccccagacgccaatcatgcaagtcattttcgagaaaccaagccttttctgcaatgctgccactgcatgttctctcgctcatccagccctcaaagaaacggattgcttcaaagatccacctcactacgaccgcgcctggatctatctggccacggcagcgctgaggacctgagttctgaagaatccacccttagttctctcaattacttgctggtatactgagctcggtgggtggttcatgacgacggtgccctccttgtagtcaatcttggcgtcaacgcgggtgtcgcggatgaggttaacaatccacttctctccctcgtcctcggccagacctaaccgtgcgctaagatccttgatatcaatacgagcgtggatcttgcagtagctctcggagatgaggtggcgagcgcagtcgacgaaagtgtcggcagcggcaccgaggaagaagtcggcacggcagatctcctcggcgagagagagttgtctctgggcctcctcgaaatcgaagtcgatgtagagggcgcggatgaagtcggtgatggggtcggagtactcgtaggcctcctgcttgacgatgcggatgatgtccttcagctgcttctggtgctggccggagttgcgcgtgcggttgcggccggtgatgacggaggctgtgaggtagcgtaggatccaggggctgctggtctggatggtgttgatgtaggcggggctgaagaagaggtcgaggagctggtcgcgcgtgcgctcgtcgttgaagagggggaacagaccccaatggatgagccatgtgcgctgctggagctgggcaagggggttgttgaagagcttggtgtcgatgctctccttgaccttgttgagctcctcgacgctggcctcccagttgtcgccggtgagaatctcggaggccagctttccccatgtggcggcggcaaccttgtcgttatctgtggagaggacacgaaactggtagaggaggtcggcagcggcgccgtagtttccgcagctgtactggaggttgccgaagtcgtagagggcgtcgaccatctcgatggtgacctaggccttgagtcagtatgcggtactcggttcaacgcgtgcggggccgccggtgaggatggtgcatacatcgtgatcctttttgaggaactccaagttggccaccttgtcgctgcgcaggttgccgacgacatcctcgcgtcccagcaggtcagtgagcttggcggtactgtcgttgaactgctgcaggcgctgcagcacctggtcgcgcttctgctcaaactctggggggatctggtcgagaccgtcgagctccgccttgaggttgccgatgaagtcgatcatgttggtggtcttgaggagctcgtacttggcctgggtgagcggccgcagcgtgtcgtcgtcggcatcttcaggcaggcggtcggcggcgtgctgcaggaggggaaatatgagatgacggtcgaggtagggaagaagcttcggagtgagatcgtacttgtcggccatcttgtcggtattggcgcgcgtgagggggccggcgggggtgatgggtggacggtgatgcggtctgtggagtgcgcttagaaaaattggtgatggaggggcaactgctcaaatctggtgttttggcggttcccactgctgctggctgcgacttgtgggctgtgggctgtccgtcactgccagatttccaggtgcagtggcttgcgcagtgctgcggcata

SEQ ID NO: 35115 - DNA, 1311 bp, Muscodor strobelii
  misc_feature: SGI cDNA ID NO. 572149
  misc_feature: Encodes the peptide sequence at SEQ ID NO 35116
atgaacgaaaataaaacatcgttagttgaggctggtggcatacgggtggccatccaaggttgcggacatggccatcttgaaaccatttacaagtccgtgcagagcgctgcgcagaagcggggatgggatacagtagatttagtcatcattggaggggatttccaagcagtgcgcaatgcagccgacttgacagtgatggctgttcccatcaagtatcgaaagctcggagatttcccagaatactacagtggccgatcgagagcaccgttccttaccgtttttattggcggtaaccatgaagctatttcacatatgtgggagctcgcatatggcggctgggtcgcgccgaatatttactatttcgggtttgctaatgttctgcgcttcggtcccattcgggttgcaggcatgagcggtatctggaaggggccggaacattatcacacaccgcatgtagagcggttaccattcaggcatgatgatatcaagagcttttaccatattcgcgagtttgatgttcgaaaattactccaggttaaagaacaagtcgacatatgcctaagtcatgactggcccgaaggcatcgaagatttcggcgatgcaaaaacactattcgagcaaaagcctcatttcaggcaatcacaaatgcgcgggaattttgggaaccctgcagcaacctacgtcctggcccgacttcgacccgcgcattggttttccgcgcatatgcactggcaaaacgaggaagaggatgtgtttagcggcgaagatatgttgctagcttccgcagacgagacggtgatcggcacaggcacaaagaatcccggccagcctgttccaagcagtatattcaataccgagacacaatttctagcattagacaagtgccagcctggtggtgagcacttgactcttcggtacataaagccacttactcctctccctagcacgacgctcccacgtgatttcaggctagagtacgatcccgagtggctcgcaattactcgagcttttcacccttatctcacagtcggagattccgatgcagataatccgatagatgagggagaggaacaatacgctaaactgatcgatcgtgagcgcgcttgggtggacgagcacattgcgaacaaggggaagctgaccgttcccgaaaactttactataactgctcccgtgcacaaggctggagacccagagaccgccaatcaccaaccgatagaatacacaaatcctcaaatggtaacattctgcgagctgttggagattcagaatctttgggttgcgaaaactcaggtgaagaaaggcagatag

SEQ ID NO: 35116 - protein, 436 aa, Muscodor strobelii
  misc_feature: SGI Peptide ID NO. 572149
  misc_feature (276)..(430): Pfam Id: PF05011 Pfam Desc: Lariat debranching enzyme, C-terminal domain
  misc_feature (14)..(245): Pfam Id: PF00149 Pfam Desc: Calcineurin-like phosphoesterase
  misc_feature (276)..(425): Pfam Id: PF05011 Pfam Desc: Lariat debranching enzyme, C-terminal domain
  misc_feature (10)..(436): NCBI GI: 145243096 Blast Desc: An11g00840 [Aspergillus niger] gi|134078761|emb|CAK40558.1| protein product [Aspergillus niger]
  misc_feature (14)..(243): NCBI GI: 171689916 Blast Desc: protein product [Podospora anserina] gi|170944920|emb|CAP71031.1| protein product [Podospora anserina]
  misc_feature (10)..(243): NCBI GI: 67524003 Blast Desc: AN2457.2 [Aspergillus nidulans FGSC A4] gi|40745007|gb|EAA64163.1| AN2457.2 [Aspergillus nidulans FGSC A4] gi|259487874|tpe|CBF86895.1| TPA: RNA lariat debranching FGSC
  misc_feature (6)..(243): NCBI GI: 46105348 Blast Desc: FG00302.1 [Gibberella zeae PH-1]
  misc_feature (6)..(243): NCBI GI: 156060135 Blast Desc: SS1G_02206 [Sclerotinia sclerotiorum 1980] gi|154699614|gb|EDN99352.1| SS1G_02206 [Sclerotinia sclerotiorum 1980]
  misc_feature (6)..(245): NCBI GI: 116199909 Blast Desc: CHGG_08110 [Chaetomium globosum CBS 148.51] gi|88179389|gb|EAQ86857.1| CHGG_08110 [Chaetomium globosum CBS 148.51]
  misc_feature (8)..(243): NCBI GI: 212530296 Blast Desc: RNA lariat debranching enzyme, [Penicillium marneffei ATCC 18224] gi|210074703|gb|EEA28790.1| RNA lariat debranching enzyme, [Penicillium marneffei ATCC 18224]
  misc_feature (13)..(243): NCBI GI: 85082132 Blast Desc: NCU03409 [Neurospora crassa OR74A] gi|18376344|emb|CAD21122.1| related to lariat-debranching enzyme [Neurospora crassa] gi|28917935|gb|EAA27620.1| conserved crassa
  misc_feature (10)..(243): NCBI GI: 256734628 Blast Desc: [Nectria haematococca mpVI 77-13-4]
  misc_feature (68)..(433): NCBI GI: 169608195 Blast Desc: SNOG_07165 [Phaeosphaeria nodorum SN15] gi|160701587|gb|EAT85816.2| SNOG_07165 [Phaeosphaeria nodorum SN15]
MNENKTSLVEAGGIRVAIQGCGHGHLETIYKSVQSAAQKRGWDTVDLVIIGGDFQAVRNAADLTVMAVPIKYRKLGDFPEYYSGRSRAPFLTVFIGGNHEAISHMWELAYGGWVAPNIYYFGFANVLRFGPIRVAGMSGIWKGPEHYHTPHVERLPFRHDDIKSFYHIREFDVRKLLQVKEQVDICLSHDWPEGIEDFGDAKTLFEQKPHFRQSQMRGNFGNPAATYVLARLRPAHWFSAHMHWQNEEEDVFSGEDMLLASADETVIGTGTKNPGQPVPSSIFNTETQFLALDKCQPGGEHLTLRYIKPLTPLPSTTLPRDFRLEYDPEWLAITRAFHPYLTVGDSDADNPIDEGEEQYAKLIDRERAWVDEHIANKGKLTVPENFTITAPVHKAGDPETANHQPIEYTNPQMVTFCELLEIQNLWVAKTQVKKGR

SEQ ID NO: 35117 - DNA, 2715 bp, Muscodor strobelii
  misc_feature: SGI EST ID NO. CUFF.83545.0
  misc_feature: Variant of the nucleotide sequence at SEQ ID NO 35115
aacgaaaataaaacatcgttagttgaggctggtggcatacgggtggccatccaaggttgcggacatggccatcttgaaaccatttacaagtccgtgcagagcgctgcgcagaagcggggatgggatacagtagatttagtcatcattggaggggatttccaagcagtgcgcaatgcagccgacttgacagtgatggctgttcccatcaagtatcgaaagctcggagatttcccagaatactacagtggccgatcgagagcaccgttccttaccgtttttattggcggtaaccatgaagctatttcacatatgtgggagctcgcatatggcggctgggtcgcgccgaatatttactatttcgggtttgctaatgttctgcgcttcggtcccattcgggttgcaggcatgagcggtatctggaaggggccggaacattatcacacaccgcatgtagagcggttaccattcaggcatgatgatatcaagagcttttaccatattcgcgagtttgatgttcgaaaattactccaggttaaagaacaagtcgacatatgcctaagtcatgactggcccgaaggcatcgaagatttcggcgatgcaaaaacactattcgagcaaaagcctcatttcaggcaatcacaaatgcgcgggaattttgggaaccctgcagcaacctacgtcctggcccgacttcgacccgcgcattggttttccgcgcatatgcactgtaagttcacagcgttgaaacatcacagagcaccaccggactgttctagtgcagggcaaaacgaggaagaggatgtgtttagcggcgaagatatgttgctagcttccgcagacgagacggtgatcggcacaggcacaaagaatcccggccagcctgttccaagcagtatattcaataccgagacacaatttctagcattagacaagtgccagcctggtggtgagcacttgactcttcggtacataaagccacttactcctctccctagcacgacgctcccacgtgatttcaggctagagtacgatcccgagtggctcgcaattactcgagcttttcacccttatctcacagtcggagattccgatgcagataatccgatagatgagggagaggaacaatacgctaaactgatcgatcgtgagcgcgcttgggtggacgagcacattgcgaacaaggggaagctgaccgttcccgaaaactttactataactgctcccgtgcacaaggctggagacccagagaccgccaatcaccaaccgatagaatacacaaatcctcaaatggtaacattctgcgagctgttggagattcagaatctttgggttgcgaaaactcaggtgaagaaaggcagataggccggaaacctggctgggggcagtagttttgaatactgttccaatgactctgcgcatcacagttttcaaatgtagcgacgcaactgtgcatgcttgtttgggaactgagagtagtgaaagtgcgggcttttggaagcttgtggtagggtgattggcagcgtgcacagtgagcggagctgtggttgtctttttgcgtatttttatcaagacgtctctattgaattcgcaactacgtgttcctttcttaccgttgaattaaaaattgagacgacagtagactggatgaatgacgaaaaaagtataggaggaaaaaattatcaagcaccaaagttgatgaatcgaacagtgaacctgcaaaaagctggctgcggctttttttttttttttttttttttcgttttcctgtactcggtggcattactgatcatccccgttaccatgaatgataccatgaaaccagactcccaaaccacgcccagcttcctgtgaggcaatcagggtagagagagactctcataatacaatctgacgattgtaccactacaccatctaaggtgggttattcttgatagaccagctgattatttagctatataaccccgccgcacaagctcaaggacatattgaatggctccccaggcacaaagggcataatcatcagggtaatgtccgaatagccccgcagcttatatattccttatgacttttagcatagccaattagtctgctgcaaaacaaattccgaaactcaagttgcctcctcccagcattgaatatcttgtggacttgaaatgcgtgtattcgcaacgcgagtaagcatggcaactagctttccccttcatagcaagaccataaccctctctaaaaccggtgccttatcttgttacgaaagtaggccgcatgtcatgaggagatcatggcattgtcctaataattatagcgtatcatcattcgctgttcacgatagtcgtaattgcgactcagagcggtgcctgccccttttgcgtcgcaacactttgtgtttacctctacttcgtctcgcaaatcttccgttcgggcatggtcctcgactctatgctgttgccggagtcacgggttctgttcagtatgaccgtcctggttcgcatcgactttacgattgctaatttccggcctccaattgccctccgtcggtatcggttcatcagcctcacgtcgtgctccggcattgtccggattacttttgcatttccatctcctcagatccgtataacaactcttttctctcgactttcgcttctcatagactcggacaatatccccgtggcaacgccttcgccaatacctccagcttcatttcactcgagattggca

SEQ ID NO: 35118 - DNA, 918 bp, Muscodor strobelii
  misc_feature: SGI cDNA ID NO. 572150
  misc_feature: Reduced expression when VOC is produced
  misc_feature: Encodes the peptide sequence at SEQ ID NO 35119
atggccgacgcagcgcaggacatcgaagccgctggcagcgcagcagatacagccaaggacctattcgcgggcgcggcaggtggaattgcacaggtcttgatcggccaacccttcgacatcgtaaaagtccgtctacaaaccaccacacaatacagctcagccctcaatgccgcgacgacaatctacgctaaagaaggtccattcgctttctacaaaggcacactcacacccctcatcggcatcggggcctgcgtctccatacagttcggtgccttcggctacgcaaagcggtacttcgagacagtaaacgcagggaaatctctcaccgccaccaaggacctcagctacggacaatactatgcatccggcgcattcgccggtgtagcaaactctatcatatctggcccaattgagcacgtgcgtatcagactgcagacacagccccacggtgcagaacgtctgtacaatggcccgctagactgtgttcgcaagctcagcgcccaaggaggtggtctgaagggtgtctaccgcggagaggcttttacaattctccgcgaggcccaggcctacggtatgtggtttctggcctttgagtggatgatgaacgcagacgctgcacgaaacaagatcgcgcgcaatgaagtaccggcttacaaggttgcgttctacggtggattggcaggcgaggtactatggctaggcagctacccgttcgatgtcatcaagagcaagatgcagacagatggatttggcgagaagatgcgctacaagagcatgcgggactgctttgcccagacatggcgggctgagggcatgggtggcttctggaagggtcttggacctacgctgctgcgtgccatgcctgtcagtgctggcacgtttgccgtggtcgaggcgacgagacgcgctatcagctag

SEQ ID NO: 35119 - protein, 305 aa, Muscodor strobelii
  misc_feature: SGI Peptide ID NO. 572150
  misc_feature (16)..(103): Pfam Id: PF00153 Pfam Desc: Mitochondrial carrier protein
  misc_feature (216)..(305): Pfam Id: PF00153 Pfam Desc: Mitochondrial carrier protein
  misc_feature (115)..(205): Pfam Id: PF00153 Pfam Desc: Mitochondrial carrier protein
  misc_feature (115)..(202): Pfam Id: PF00153 Pfam Desc: Mitochondrial carrier protein
  misc_feature (1)..(305): NCBI GI: 156039759 Blast Desc: SS1G_12016 [Sclerotinia sclerotiorum 1980] gi|154697753|gb|EDN97491.1| SS1G_12016 [Sclerotinia sclerotiorum 1980]
  misc_feature (1)..(305): NCBI GI: 154293915 Blast Desc: BC1G_14029 [Botryotinia fuckeliana B05.10] gi|150845184|gb|EDN20377.1| BC1G_14029 [Botryotinia fuckeliana B05.10]
  misc_feature (1)..(305): NCBI GI: 85094582 Blast Desc: NCU02269 [Neurospora crassa OR74A] gi|28921370|gb|EAA30677.1| NCU02269 [Neurospora crassa OR74A] gi|40804618|emb|CAF05878.1| related to carrier protein YMC1,
  misc_feature (1)..(305): NCBI GI: 189194461 Blast Desc: mitochondrial carnitine/acylcarnitine carrier protein [Pyrenophora tritici-repentis Pt-1C-BFP] gi|187979133|gb|EDU45759.1| mitochondrial carnitine/acylcarnitine
  misc_feature (1)..(305): NCBI GI: 116203543 Blast Desc: CHGG_09655 [Chaetomium globosum CBS 148.51] gi|88175783|gb|EAQ83251.1| CHGG_09655 [Chaetomium globosum CBS 148.51]
  misc_feature (12)..(305): NCBI GI: 39973873 Blast Desc: MGG_00917 [Magnaporthe grisea 70-15] gi|145018135|gb|EDK02414.1| MGG_00917 [Magnaporthe grisea 70-15]
  misc_feature (10)..(305): NCBI GI: 171679547 Blast Desc: protein product [Podospora anserina] gi|170939399|emb|CAP64627.1| protein product [Podospora anserina]
  misc_feature (4)..(304): NCBI GI: 226281891 Blast Desc: hepatocellular carcinoma down-regulated mitochondrial carrier protein [Paracoccidioides brasiliensis Pb01]
  misc_feature (4)..(304): NCBI GI: 225679006 Blast Desc: amino-acid transporter arg-13 [Paracoccidioides brasiliensis Pb03] gi|226288078|gb|EEH43591.1| hepatocellular carcinoma down-regulated mitochondrial carrier protein Pb18]
  misc_feature (14)..(305): NCBI GI: 46123845 Blast Desc: FG06300.1 [Gibberella zeae PH-1]
  misc_feature: Useful for introducing or modulating the production of volatile compounds
MADAAQDIEAAGSAADTAKDLFAGAAGGIAQVLIGQPFDIVKVRLQTTTQYSSALNAATTIYAKEGPFAFYKGTLTPLIGIGACVSIQFGAFGYAKRYFETVNAGKSLTATKDLSYGQYYASGAFAGVANSIISGPIEHVRIRLQTQPHGAERLYNGPLDCVRKLSAQGGGLKGVYRGEAFTILREAQAYGMWFLAFEWMMNADAARNKIARNEVPAYKVAFYGGLAGEVLWLGSYPFDVIKSKMQTDGFGEKMRYKSMRDCFAQTWRAEGMGGFWKGLGPTLLRAMPVSAGTFAVVEATRRAIS

SEQ ID NO: 35120 - DNA, 3811 bp, Muscodor strobelii
  misc_feature: SGI EST ID NO. CUFF.83851.0
  misc_feature: Variant of the nucleotide sequence at SEQ ID NO 35118
ctcctacatcggcgacaaagttccggaattgtaaacagctctcaaaacggccaattgctggattgttgactcgcttgtacctcccaaagccttcacttgagcgtggaaataccacaagagggatatccagcaattgggcccgtgaggagtgagcgcggggtaggaggaccatggccgacgcagcgcaggacatcgaagccgctggcagcgcagcagatacagccaaggacctattcgcgggcgcggcaggtggaattgcacaggtcttgatcggccaacccttcgacatcgtaaaagtccgtctacaaaccaccacacaatacagctcagccctcaatgccgcgacgacaatctacgctaaagaaggtccattcgctttctacaaaggcacactcacacccctcatcggcatcggggcctgcgtctccatacagttcggtgccttcggctacgcaaagcggtacttcgagacagtaaacgcagggaaatctctcaccgccaccaaggacctcagctacggacaatactatgcatccggcgcattcgccggtgtagcaaactctatcatatctggcccaattgagcacgtgcgtatcagactgcagacacagccccacggtgcagaacgtctgtacaatggcccgctagactgtgttcgcaagctcagcgcccaaggaggtggtctgaagggtgtctaccgcggagaggcttttacaattctccgcgaggcccaggcctacggtatgtggtttctggcctttgagtggatgatgaacgcagacgctgcacgaaacaagatcgcgcgcaatgaagtaccggcttacaaggttgcgttctacggtggattggcaggcgaggtactatggctaggcagctacccgttcgatgtcatcaagagcaagatgcagacagatggatttggcgagaagatgcgctacaagagcatgcgggactgctttgcccagacatggcgggctgagggcatgggtggcttctggaagggtcttggacctacgctgctgcgtgccatgcctgtcagtgctggcacgtttgccgtggtcgaggcgacgagacgcgctatcagctagagtgtgtctgagtgtactgcgaacatttactagcgtgtcatttcatgaactggaaaaaggctgttcttctcgcataagatattcaacatagagcatggcggcatgcagatgcaaatgttatttgatcgatactgatctacaactactcgctattctcaacccgtctctgtagaatcttccgtgcgttggtgggtgttaaagattcgatatcgagctcggccagcactttcttcgcttcggtattgtctgtaaagatgcgatcactggcttgttgaagagtgatcgctccattggacgtcccaagaggcagattgagaagttgcgccccatcctgcaacgtgctcatcgttgatgatccatccggtacattgcggtctaatgtggaagagatcgcctggagatcgcgtacaaactgcgcggctccaagagttgtgaagttttgtctcatcagtacgtcactccagagcatatcttgaatactttcaatcgctgaacgccagactcttcgatatacaggtgtgcttagtgcatcagccaaaaaagtgagattgcgtttgagaatctggggtcatttagcaatggtgtcgcgagcagttaagagggtgtcttcacaaaccttgaggggctcatccagctcgggtgtgatggcaagctgtagtggatcaactacggcagaattagcgtggtaaggcgaggcagtgaggaaggtacggctcactattgacgtcgggactgatggtactccagtgagttttactaagatatgggcgaaacgtcttttgatgtgaatcaatcaatcccgttgtgagaaattcttcggcgctcttccgccggtaggcgaatgctgtaatagtctcgtcgaacagaataccgccatccccatctgacccaacagcagatgagatgcgatctttgacatcatcatggctcataccgccagcaagattttcttgatcactattcttcttggcacgggcttgcaattcttcccatagagtgatgaagaactagaacgggtcagatgcagacaataaaatccatttggcgagttcttacctcctcattactccagtcctttaaggtggcaatgatgtgatctgaactgccaagcactttgcaaagcgtctcgaagccacctgtaccctctagcgcagccagttgttctcgtgtagctccgtgcagagtccggccaagtgtagacgttattgcggaataggcatcaagagaatccttcaaacgatcatgatattgatctaagatttcgagttgaatatcaatcagaaatcgtaacttgtgtgaaaagcgtcgtatccgttgatattgagatgtgactgatcttagcagatctgtgattcggacagcaccgtatgttggcttcattttgccatgtgcgctatagtcgtaatcaatatttctcgcatcgggcgagttaacaattcctcggaagcgctcaagagcaaactccttttcggcatacaaccaggtgtcaaaatgtgtgcctagaacttctgatgtaagccctgcccagcctcgttcttcgtcaccgccgtcgtactcaaatttgtttcggacttcgtcatctagatccataatatgcaccattgtactgctcagagactgagggtttttcagtccgtcctggataatcagggcgatcttctccctcatgacaggtagtaaggcagtcacgagagcgcaagcggggtccagatatacactcatttcacccaccgcggtctcacgaaatcgagagaacaaaatatgaccgacattgtctcgaaaaaagccttcccacttttcgatgagtgagatgaattggggaatacagaatgtcccgaaggactgagaactgctcgttgcactgttgcccatgaactggtatctgaaccattgagctaatggctttgccattacttcgaagggcaatagcgtaactatatcttcggagtagaccacttcaggaacttggagatcgacaagtttctcgaagcactgaagccattcttggtccatctcactatttgaatcaacaccgtgaggccacttgcgctgctttaagatagtctccatctcaagggacatggtgttcttcatttctttccacaggctttctgctgtgttctcaacatgattgacgagatgagtcgcagcttcgtccgcctgtccctgtagctccttcagtcgcaagcacagctgtcttagtcgcgtatgtggcccgagtgcagctttaggatcatgtggcagatgcgaacgtgcctcgagtctcatattctcgacgtcttgtaacatcgatacgtattcatatgccatctcgactttgtgcagctgtttcatgggtctttcaagccgttgtatcgcttcgtcgggcgcggttgagttggctacgatcttgagtcgtgcgtcgatgctctgttggagctggtgaaactctccaatagactgagcgaggccaccttggcgatcatcagccacacttctggcagcctcgagctctcgcattgcatcgtctaactgcgcctggagctggctgcgttgcacttcgacattcgctatcaagctatcgagattctcgaaatcggcggtcgtttggagcttgtcgtcgaggtagtcctcgaggcgaatatccggctccatcgagtacgagcgagagaatgaccttgtcgccatcgtgatctctgggattgctcgcttcgggacaagcgaagcaatttgatctggtgttg

SEQ ID NO: 35121 - DNA, 2370 bp, Muscodor strobelii
  misc_feature: SGI cDNA ID NO. 572151
  misc_feature: Encodes the peptide sequence at SEQ ID NO 35122
atggcgacaaggtcattctctcgctcgtactcgatggagccggatattcgcctcgaggactacctcgacgacaagctccaaacgaccgccgatttcgagaatctcgatagcttgatagcgaatgtcgaagtgcaacgcagccagctccaggcgcagttagacgatgcaatgcgagagctcgaggctgccagaagtgtggctgatgatcgccaaggtggcctcgctcagtctattggagagtttcaccagctccaacagagcatcgacgcacgactcaagatcgtagccaactcaaccgcgcccgacgaagcgatacaacggcttgaaagacccatgaaacagctgcacaaagtcgagatggcatatgaatacgtatcgatgttacaagacgtcgagaatatgagactcgaggcacgttcgcatctgccacatgatcctaaagctgcactcgggccacatacgcgactaagacagctgtgcttgcgactgaaggagctacagggacaggcggacgaagctgcgactcatctcgtcaatcatgttgagaacacagcagaaagcctgtggaaagaaatgaagaacaccatgtcccttgagatggagactatcttaaagcagcgcaagtggcctcacggtgttgattcaaatagtgagatggaccaagaatggcttcagtgcttcgagaaacttgtcgatctccaagttcctgaagtggtctactccgaagatatagttacgctattgcccttcgaagtaatggcaaagccattagctcaatggttcagataccagttcatgggcaacagtgcaacgagcagttctcagtccttcgggacattctgtattccccaattcatctcactcatcgaaaagtgggaaggcttttttcgagacaatgtcggtcatattttgttctctcgatttcgtgagaccgcggtgggtgaaatgagtgtatatctggaccccgcttgcgctctcgtgactgccttactacctgtcatgagggagaagatcgccctgattatccaggacggactgaaaaaccctcagtctctgagcagtacaatggtgcatattatggatctagatgacgaagtccgaaacaaatttgagtacgacggcggtgacgaagaacgaggctgggcagggcttacatcagaagttctaggcacacattttgacacctggttgtatgccgaaaaggagtttgctcttgagcgcttccgaggaattgttaactcgcccgatgcgagaaatattgattacgactatagcgcacatggcaaaatgaagccaacatacggtgctgtccgaatcacagatctgctaagatcagtcacatctcaatatcaacggatacgacgcttttcacacaagttacgatttctgattgatattcaactcgaaatcttagatcaatatcatgatcgtttgaaggattctcttgatgcctattccgcaataacgtctacacttggccggactctgcacggagctacacgagaacaactggctgcgctagagggtacaggtggcttcgagacgctttgcaaagtgcttggcagttcagatcacatcattgccaccttaaaggactggagtaatgaggagttcttcatcactctatgggaagaattgcaagcccgtgccaagaagaatagtgatcaagaaaatcttgctggcggtatgagccatgatgatgtcaaagatcgcatctcatctgctgttgggtcagatggggatggcggtattctgttcgacgagactattacagcattcgcctaccggcggaagagcgccgaagaatttctcacaacgggattgattgattcacatcaaaagacgtttcgcccatatcttagtaaaactcactggagtaccatcagtcccgacgtcaatattgatccactacagcttgccatcacacccgagctggatgagcccctcaagattctcaaacgcaatctcacttttttggctgatgcactaagcacacctgtatatcgaagagtctggcgttcagcgattgaaagtattcaagatatgctctggagtgacgtactgatgagacaaaacttcacaactcttggagccgcgcagtttgtacgcgatctccaggcgatctcttccacattagaccgcaatgtaccggatggatcatcaacgatgagcacgttgcaggatggggcgcaacttctcaatctgcctcttgggacgtccaatggagcgatcactcttcaacaagccagtgatcgcatctttacagacaataccgaagcgaagaaagtgctggccgagctcgatatcgaatctttaacacccaccaacgcacggaagattctacagagacgggttgagaatagcgagtag

SEQ ID NO: 35122 - protein, 789 aa, Muscodor strobelii
  misc_feature: SGI Peptide ID NO. 572151
  misc_feature (15)..(789): NCBI GI: 261355099 Blast Desc: RINT-1 family protein [Verticillium albo-atrum VaMs.102]
  misc_feature (12)..(789): NCBI GI: 85094586 Blast Desc: NCU02270 [Neurospora crassa OR74A] gi|28921371|gb|EAA30678.1| conserved [Neurospora crassa OR74A] gi|40804617|emb|CAF05877.1| related to Rad50-interacting protein
  misc_feature (15)..(789): NCBI GI: 256732477 Blast Desc: NECHADRAFT_78717 [Nectria haematococca mpVI 77-13-4]
  misc_feature (15)..(789): NCBI GI: 39973871 Blast Desc: MGG_00918 [Magnaporthe grisea 70-15] gi|145018134|gb|EDK02413.1| MGG_00918 [Magnaporthe grisea 70-15]
  misc_feature (15)..(789): NCBI GI: 46123847 Blast Desc: FG06301.1 [Gibberella zeae PH-1]
  misc_feature (11)..(789): NCBI GI: 171679549 Blast Desc: protein product [Podospora anserina] gi|170939400|emb|CAP64628.1| protein product [Podospora anserina]
  misc_feature (15)..(755): NCBI GI: 116203545 Blast Desc: CHGG_09656 [Chaetomium globosum CBS 148.51] gi|88175784|gb|EAQ83252.1| CHGG_09656 [Chaetomium globosum CBS 148.51]
  misc_feature (13)..(786): NCBI GI: 154292010 Blast Desc: BC1G_14932 [Botryotinia fuckeliana B05.10] gi|150846351|gb|EDN21544.1| BC1G_14932 [Botryotinia fuckeliana B05.10]
  misc_feature (17)..(786): NCBI GI: 121705706 Blast Desc: RINT-1 family protein [Aspergillus clavatus NRRL 1] gi|119399262|gb|EAW09690.1| RINT-1 family protein [Aspergillus clavatus NRRL 1]
  misc_feature (1)..(786): NCBI GI: 70999578 Blast Desc: RINT-1 family protein [Aspergillus fumigatus Af293] gi|66852143|gb|EAL92468.1| RINT-1 family protein [Aspergillus fumigatus Af293]
MATRSFSRSYSMEPDIRLEDYLDDKLQTTADFENLDSLIANVEVQRSQLQAQLDDAMRELEAARSVADDRQGGLAQSIGEFHQLQQSIDARLKIVANSTAPDEAIQRLERPMKQLHKVEMAYEYVSMLQDVENMRLEARSHLPHDPKAALGPHTRLRQLCLRLKELQGQADEAATHLVNHVENTAESLWKEMKNTMSLEMETILKQRKWPHGVDSNSEMDQEWLQCFEKLVDLQVPEVVYSEDIVTLLPFEVMAKPLAQWFRYQFMGNSATSSSQSFGTFCIPQFISLIEKWEGFFRDNVGHILFSRFRETAVGEMSVYLDPACALVTALLPVMREKIALIIQDGLKNPQSLSSTMVHIMDLDDEVRNKFEYDGGDEERGWAGLTSEVLGTHFDTWLYAEKEFALERFRGIVNSPDARNIDYDYSAHGKMKPTYGAVRITDLLRSVTSQYQRIRRFSHKLRFLIDIQLEILDQYHDRLKDSLDAYSAITSTLGRTLHGATREQLAALEGTGGFETLCKVLGSSDHIIATLKDWSNEEFFITLWEELQARAKKNSDQENLAGGMSHDDVKDRISSAVGSDGDGGILFDETITAFAYRRKSAEEFLTTGLIDSHQKTFRPYLSKTHWSTISPDVNIDPLQLAITPELDEPLKILKRNLTFLADALSTPVYRRVWRSAIESIQDMLWSDVLMRQNFTTLGAAQFVRDLQAISSTLDRNVPDGSSTMSTLQDGAQLLNLPLGTSNGAITLQQASDRIFTDNTEAKKVLAELDIESLTPTNARKILQRRVENSE

SEQ ID NO: 35123 - DNA, 3791 bp, Muscodor strobelii
  misc_feature: SGI EST ID NO. CUFF.83852.1
  misc_feature: Variant of the nucleotide sequence at SEQ ID NO 35121
caacaccagatcaaattgcttcgcttgtcccgaagcgagcaatcccagagatcacgatggcgacaaggtcattctctcgctcgtactcgatggagccggatattcgcctcgaggactacctcgacgacaagctccaaacgaccgccgatttcgagaatctcgatagcttgatagcgaatgtcgaagtgcaacgcagccagctccaggcgcagttagacgatgcaatgcgagagctcgaggctgccagaagtgtggctgatgatcgccaaggtggcctcgctcagtctattggagagtttcaccagctccaacagagcatcgacgcacgactcaagatcgtagccaactcaaccgcgcccgacgaagcgatacaacggcttgaaagacccatgaaacagctgcacaaagtcgagatggcatatgaatacgtatcgatgttacaagacgtcgagaatatgagactcgaggcacgttcgcatctgccacatgatcctaaagctgcactcgggccacatacgcgactaagacagctgtgcttgcgactgaaggagctacagggacaggcggacgaagctgcgactcatctcgtcaatcatgttgagaacacagcagaaagcctgtggaaagaaatgaagaacaccatgtcccttgagatggagactatcttaaagcagcgcaagtggcctcacggtgttgattcaaatagtgagatggaccaagaatggcttcagtgcttcgagaaacttgtcgatctccaagttcctgaagtggtctactccgaagatatagttacgctattgcccttcgaagtaatggcaaagccattagctcaatggttcagataccagttcatgggcaacagtgcaacgagcagttctcagtccttcgggacattctgtattccccaattcatctcactcatcgaaaagtgggaaggcttttttcgagacaatgtcggtcatattttgttctctcgatttcgtgagaccgcggtgggtgaaatgagtgtatatctggaccccgcttgcgctctcgtgactgccttactacctgtcatgagggagaagatcgccctgattatccaggacggactgaaaaaccctcagtctctgagcagtacaatggtgcatattatggatctagatgacgaagtccgaaacaaatttgagtacgacggcggtgacgaagaacgaggctgggcagggcttacatcagaagttctaggcacacattttgacacctggttgtatgccgaaaaggagtttgctcttgagcgcttccgaggaattgttaactcgcccgatgcgagaaatattgattacgactatagcgcacatggcaaaatgaagccaacatacggtgctgtccgaatcacagatctgctaagatcagtcacatctcaatatcaacggatacgacgcttttcacacaagttacgatttctgattgatattcaactcgaaatcttagatcaatatcatgatcgtttgaaggattctcttgatgcctattccgcaataacgtctacacttggccggactctgcacggagctacacgagaacaactggctgcgctagagggtacaggtggcttcgagacgctttgcaaagtgcttggcagttcagatcacatcattgccaccttaaaggactggagtaatgaggagttcttcatcactctatgggaagaattgcaagcccgtgccaagaagaatagtgatcaagaaaatcttgctggcggtatgagccatgatgatgtcaaagatcgcatctcatctgctgttgggtcagatggggatggcggtattctgttcgacgagactattacagcattcgcctaccggcggaagagcgccgaagaatttctcacaacgggattgattgattcacatcaaaagacgtttcgcccatatcttagtaaaactcactggagtaccatcagtcccgacgtcaatattgatccactacagcttgccatcacacccgagctggatgagcccctcaagattctcaaacgcaatctcacttttttggctgatgcactaagcacacctgtatatcgaagagtctggcgttcagcgattgaaagtattcaagatatgctctggagtgacgtactgatgagacaaaacttcacaactcttggagccgcgcagtttgtacgcgatctccaggcgatctcttccacattagaccgcaatgtaccggatggatcatcaacgatgagcacgttgcaggatggggcgcaacttctcaatctgcctcttgggacgtccaatggagcgatcactcttcaacaagccagtgatcgcatctttacagacaataccgaagcgaagaaagtgctggccgagctcgatatcgaatctttaacacccaccaacgcacggaagattctacagagacgggttgagaatagcgagtagttgtagatcagtatcgatcaaataacatttgcatctgcatgccgccatgctctatgttgaatatcttatgcgagaagaacagcctttttccagttcatgaaatgacacgctagtaaatgttcgcagtacactcagacacactctagctgatagcgcgtctcgtcgcctcgaccacggcaaacgtgccagcactgacaggcatggcacgcagcagcgtaggtccaagacccttccagaagccacccatgccctcagcccgccatgtctgggcaaagcagtcccgcatgctcttgtagcgcatcttctcgccaaatccatctgtctgcatcttgctcttgatgacatcgaacgggtagctgcctagccatagtacctcgcctgccaatccaccgtagaacgcaaccttgtaagccggtacttcattgcgcgcgatcttgtttcgtgcagcgtctgcgttcatcatccactcaaaggccagaaaccacataccgtaggcctgggcctcgcggagaattgtaaaagcctctccgcggtagacacccttcagaccacctccttgggcgctgagcttgcgaacacagtctagcgggccattgtacagacgttctgcaccgtggggctgtgtctgcagtctgatacgcacgtgctcaattgggccagatatgatagagtttgctacaccggcgaatgcgccggatgcatagtattgtccgtagctgaggtccttggtggcggtgagagatttccctgcgtttactgtctcgaagtaccgctttgcgtagccgaaggcaccgaactgtatggagacgcaggccccgatgccgatgaggggtgtgagtgtgcctttgtagaaagcgaatggaccttctttagcgtagattgtcgtcgcggcattgagggctgagctgtattgtgtggtggtttgtagacggacttttacgatgtcgaagggttggcctggagtgtagcttagtaagtccgtctttcaaggttcagaacagacaacagcagagaatccaccaagtacgatgaaaacgcctctcgcttgagaattttgagtttcaatacaaagttaaatcagggatcactaaccgatcaagacctgtgcaattccacctgccgcgcccgcgaataggtccttggctgtatctgctgcgctgccagcggcttcgatgtcctgcgctgcgtcggccatggtcctcctaccccgcgctcactcctcacgggcccaattgctggatatccctcttgtggtatttccacgctcaagtgaaggctttgggaggtacaagcgagtcaacaatccagcaattggccgttttgagagctgtttacaattccggaactttgtcgccgatgtaggag

SEQ ID NO: 35124 - DNA, 3219 bp, Muscodor strobelii
  misc_feature: SGI cDNA ID NO. 572152
  misc_feature: Elevated expression when VOC is produced
  misc_feature: Encodes the peptide sequence at SEQ ID NO 35125
atggcaacgatgattgatcatcttaacctgggcgacgacgaagccgataatcaacaggagaaaacggcgcgagcagcttgtttgagtgtagagaaacatgacttcgagatccgagacccattggctcattttataggttgcctcgaattctacgagagggataaatttcttgaaacaacaccggtgtggaaggccgagtataactaccagatggaaattgcagcagcgcctctcccacaggatcagaaagagagggcaatgatcgcggttgataaactaaaatcgacctggaagaatacaatcagcactgagttaagacgaattgcctttctccgcgagaaacttgctcaggataaacatgacaaaacgctagtagccgatgtcaacaaaatgcgagaacagtggcgcaattcggaggattaccgagagcatattgacgacgtgcgccgctggcgcagtgcccacaacaagcagaattcgatatctccagattaccaacagtatacgaataatgggaacgttacacagcagtatatgatcgagaaggatatggtcgtaccagtcatacagtttcagcggaaagaagtcaaagacgacaccaagtccgcgccgtcaaaaaaaatccatgttgatccccatgatgacccaattttgcgaagcaaattcccgaaccagaagactaccatccacaaaattctaaaagacccggaaaatggccatatcttgtccaaagacggcaaagcaaaagattaccgaattacatatgttcatataccgtccaataatatggtttgggctgaggaagcaattgcaaaatactatggagacgcagtgccaaacttcaatgtcatgcacaggcaattacaacggccattgaagaccgagacatccatgatcctccaggagcgttactggagaggtcaactacatggtgattctgactcgccgccacatgcgaggtacatgtcacccatgtgtgagactatctcgtcgtccccgaataccccggatgacgatccaaaaaatattgctctattcatgccctatctacattgggagacctcgcgaaaaagagagcagtttgcttcagaaatcgataagatagtgctctcatcagcgctagataaagccaatggagaagacgcacggaagaacgatcgtatacgggcaagatgccatcttcctagacagaagcagcgggagaatccagagagaccagacatttcggttttgaagtcgccaaacaatcaagacagggaaccttcgcaggtcatgtcaaaaattgagacggtagatgacttggttgaagccacgaagaactacacaaagccctttagttccaataatccattgggccagtacttgctcgcagcagctagattagccgaagggatgacaacgtatcgagacaagatgctcctcaggaagtatcttcctctggaccctccaattcacatccggaggactttagatcaagcatattactggacccttaattcgacaaagaagcgggacaaagaccaagttgtataccgagggaccacaacacggccatctgacttccaccggtatgatgcggattctgcaaccttcccggatcatgacggactaacaggagactgtggtgcatgcctcgttaacatcaaaaaagtatctcgagtggtgatggttgatcaactgtggatgtgggtcctcgactcgcagactataattacttgttttccgaagcgatatggagcgaataaacaagactactcaggggtccacaagtcgattagaacaagattcgagaatgccagtccaaattcgatacgcacagtattcgaattggcgctgattattctagacgaatgcaccatgacattttttgaccgagcaaaagccctgaataggcaacctcaagtgatcgacgagttctcaaaagcgatcggaaacatcatgcataagcaaagtacagctttcagtcgtctttggagatggactggtgaagctcggaaggtataccgctgccaaggatatacggacgcagccgggcttcaaattcctcttctcgatatcaacccagagggtcacctagagcgagagattgaagacattgtcgaagaactagacattatgttgcacatatgcaaaactcaccaggacataattaagagcttcattgatcaagctaagcatatcttggaccccgatgggaagttcagtcagtctgatccagtttctcaatctcagagacacaggatcagaaatcgtgctgcagttcagggatctgatgaagacggtgactccaaggattacgactcattcaacattagagccatggagctcaaggaaagagtcgacagtcatgtgaaagacttggaagcgttgcgtaaaagcgccaaaaatactgccgaagatgtcttgcatcttctgacaatgaaacaacagcaagccagcgtcgttcaagcatggcaagcagtcaaacaagcagaagaaacgatccggcagggtcgttccatcatggtcttcacactcgctacaattgtttttctacctctctcattcttgactagcgtttttggaatgaacaatcgcgaattcggagacaacaattggcagattaaatggcagcttctatacattttcgcgatttccgcagccgtcgtgttcataagtctcctcttcgcatacagccactgggtccgaacaattagctggtccatctataagcgtattgtaattgcagtcgtcgtgaagacgaaactttacgatatctatttgacacattggaagtccagtgaaagaattgagaaagatacgctagcagtcactaacaagatcaaaatggatgcgacaaaccagttctatgaggatcttgcgcgaagaagggaggcaaaagaggaagcaaagaaagaagctgatgcgaaaagacaaagcaagctacagcctatgatggcagcggaaagcatgcgtcagcaacaaattcccaggactgacgaagatgaagattggctcacccagaagtggagaaacacgagactcaagttcaatagcctcgttacgaatgaaagtcagaaccctaaaagcaggaaaagtgatatcagagcaattcgaaacaatgtaacggggcggaggcagtgggttggaaagtcagacccaagtaacggtgctgcgggtactgctcttgacctggagaacacatcatcagctacatcggcgtaccggtctattgtataa

SEQ ID NO: 35125 - protein, 1072 aa, Muscodor strobelii
  misc_feature: SGI Peptide ID NO. 572152
  misc_feature (22)..(944): NCBI GI: 116204025 Blast Desc: CHGG_09896 [Chaetomium globosum CBS 148.51] gi|88176024|gb|EAQ83492.1| CHGG_09896 [Chaetomium globosum CBS 148.51]
  misc_feature (21)..(801): NCBI GI: 171677043 Blast Desc: protein product [Podospora anserina] gi|170936589|emb|CAP61248.1| protein product [Podospora anserina]
  misc_feature (98)..(910): NCBI GI: 171678473 Blast Desc: protein product [Podospora anserina] gi|170937306|emb|CAP61963.1| protein product [Podospora anserina]
  misc_feature (177)..(930): NCBI GI: 39969741 Blast Desc: MGG_10480 [Magnaporthe grisea 70-15] gi|145012094|gb|EDJ96750.1| MGG_10480 [Magnaporthe grisea 70-15]
  misc_feature (93)..(875): NCBI GI: 85092656 Blast Desc: NCU09566 [Neurospora crassa OR74A] gi|28920924|gb|EAA30255.1| [Neurospora crassa OR74A]
  misc_feature (214)..(845): NCBI GI: 116204327 Blast Desc: CHGG_10047 [Chaetomium globosum CBS 148.51] gi|88176175|gb|EAQ83643.1| CHGG_10047 [Chaetomium globosum CBS 148.51]
  misc_feature (510)..(891): NCBI GI: 154292567 Blast Desc: BC1G_14807 [Botryotinia fuckeliana B05.10] gi|150845888|gb|EDN21081.1| BC1G_14807 [Botryotinia fuckeliana B05.10]
  misc_feature (212)..(845): NCBI GI: 171684229 Blast Desc: protein product [Podospora anserina] gi|170942075|emb|CAP67727.1| protein product [Podospora anserina]
  misc_feature (512)..(921): NCBI GI: 164423373 Blast Desc: NCU08697 [Neurospora crassa OR74A] gi|157070064|gb|EAA34322.2| [Neurospora crassa OR74A]
  misc_feature (225)..(892): NCBI GI: 70996130 Blast Desc: ankyrin repeat protein [Aspergillus fumigatus Af293] gi|66850455|gb|EAL90782.1| ankyrin repeat protein [Aspergillus fumigatus Af293] gi|159131573|gb|EDP56686.1| ankyrin repeat
  misc_feature: Useful for introducing or modulating the production of volatile compounds
MATMIDHLNLGDDEADNQQEKTARAACLSVEKHDFEIRDPLAHFIGCLEFYERDKFLETTPVWKAEYNYQMEIAAAPLPQDQKERAMIAVDKLKSTWKNTISTELRRIAFLREKLAQDKHDKTLVADVNKMREQWRNSEDYREHIDDVRRWRSAHNKQNSISPDYQQYTNNGNVTQQYMIEKDMVVPVIQFQRKEVKDDTKSAPSKKIHVDPHDDPILRSKFPNQKTTIHKILKDPENGHILSKDGKAKDYRITYVHIPSNNMVWAEEAIAKYYGDAVPNFNVMHRQLQRPLKTETSMILQERYWRGQLHGDSDSPPHARYMSPMCETISSSPNTPDDDPKNIALFMPYLHWETSRKREQFASEIDKIVLSSALDKANGEDARKNDRIRARCHLPRQKQRENPERPDISVLKSPNNQDREPSQVMSKIETVDDLVEATKNYTKPFSSNNPLGQYLLAAARLAEGMTTYRDKMLLRKYLPLDPPIHIRRTLDQAYYWTLNSTKKRDKDQVVYRGTTTRPSDFHRYDADSATFPDHDGLTGDCGACLVNIKKVSRVVMVDQLWMWVLDSQTIITCFPKRYGANKQDYSGVHKSIRTRFENASPNSIRTVFELALIILDECTMTFFDRAKALNRQPQVIDEFSKAIGNIMHKQSTAFSRLWRWTGEARKVYRCQGYTDAAGLQIPLLDINPEGHLEREIEDIVEELDIMLHICKTHQDIIKSFIDQAKHILDPDGKFSQSDPVSQSQRHRIRNRAAVQGSDEDGDSKDYDSFNIRAMELKERVDSHVKDLEALRKSAKNTAEDVLHLLTMKQQQASVVQAWQAVKQAEETIRQGRSIMVFTLATIVFLPLSFLTSVFGMNNREFGDNNWQIKWQLLYIFAISAAVVFISLLFAYSHWVRTISWSIYKRIVIAVVVKTKLYDIYLTHWKSSERIEKDTLAVTNKIKMDATNQFYEDLARRREAKEEAKKEADAKRQSKLQPMMAAESMRQQQIPRTDEDEDWLTQKWRNTRLKFNSLVTNESQNPKSRKSDIRAIRNNVTGRRQWVGKSDPSNGAAGTALDLENTSSATSAYRSIV

SEQ ID NO: 35126 - DNA, 3045 bp, Muscodor strobelii
  misc_feature: SGI EST ID NO. CUFF.83596.0
  misc_feature: Variant of the nucleotide sequence at SEQ ID NO 35124
cgggacaggaacgttacacagcagtatatgatcgagaaggatatggtcgtaccagtcatacagtttcagcggaaagaagtcaaagacgacaccaagtccgcgccgtcaaaaaaaatccatgttgatccccatgatgacccaattttgcgaagcaaattcccgaaccagaagactaccatccacaaaattctaaaagacccggaaaatggccatatcttgtccaaagacggcaaagcaaaagattaccgaattacatatgttcatataccgtccaataatatggttgtaagttctcgagtatttatatatctgcatgaacaacgttgaggcttgaaaggctaacgaaccgcgtataactcttcgtagtgggctgaggtgagtccaatctcgcgccctctgggataattatgcttgctgactgagatacctctaggaagcaattgcaaaatactatggagacgcagtgccaaacttcaatgtcatgcacaggcaattacaacggccattgaagaccgagacatccatgatcctccaggagcgttactggagaggtcaactacatggtgattctgactcgccgccacatgcgaggtacatgtcacccatgtgtgagactatctcgtcgtccccgaataccccggatgacgatccaaaaaatattgctctattcatgccctatctacattgggagacctcgcgaaaaagagagcagtttgcttcagaaatcgataagatagtgctctcatcagcgctagataaagccaatggagaagacgcacggaagaacgatcgtatacgggcaagatgccatcttcctagacagaagcagcgggagaatccagagagaccagacatttcggttttgaagtcgccaaacaatcaagacagggaaccttcgcaggtcatgtcaaaaattgagacggtagatgacttggttgaagccacgaagaactacacaaagccctttagttccaataatccattgggccagtacttgctcgcagcagctagattagccgaagggatgacaacgtatcgagacaagatgctcctcaggaagtatcttcctctggaccctccaattcacatccggaggactttagatcaagcatattactggacccttaattcgacaaagaagcgggacaaagaccaagttgtataccgagggaccacaacacggccatctgacttccaccggtatgatgcggattctgcaaccttcccggatcatgacggactaacaggagactgtggtgcatgcctcgttaacatcaaaaaagtatctcgagtggtgatggttgatcaactgtggatgtgggtcctcgactcgcagactataattacttgttttccgaagcgatatggagcgaataaacaagactactcaggggtccacaagtcgattagaacaagattcgagaatgccagtccaaattcgatacgcacagtattcgaattggcgctgattattctagacgaatgcaccatgacattttttgaccgagcaaaagccctgaataggcaacctcaagtgatcgacgagttctcaaaagcgatcggaaacatcatgcataagcaaagtacagctttcagtcgtctttggagatggactggtgaagctcggaaggtataccgctgccaaggatatacggacgcagccgggcttcaaattcctcttctcgatatcaacccagagggtcacctagagcgagagattgaagacattgtcgaagaactagacattatgttgcacatatgcaaaactcaccaggacataattaagagcttcattgatcaagctaagcatatcttggaccccgatgggaagttcagtcagtctgatccagtttctcaatctcagagacacaggatcagaaatcgtgctgcagttcagggatctgatgaagacggtgactccaaggattacgactcattcaacattagagccatggagctcaaggaaagagtcgacagtcatgtgaaagacttggaagcgttgcgtaaaagcgccaaaaatactgccgaagatgtcttgcatcttctgacaatgaaacaacagcaagccagcgtcgttcaagcatggcaagcagtcaaacaagcagaagaaacgatccggcagggtcgttccatcatggtcttcacactcgctacaattgtttttctacctctctcattcttgactagcgtttttggaatgaacaatcgcgaattcggagacaacaattggcagattaaatggcagcttctatacattttcgcgatttccgcagccgtcgtgttcataagtctcctcttcgcatacagccactgggtccgaacaattagctggtccatctataagcgtattgtaattgcagtcgtcgtgaagacgaaactttacgatatctatttgacacattggaagtccagtgaaagaattgagaaagatacgctagcagtcactaacaagatcaaaatggatgcgacaaaccagttctatgaggatcttgcgcgaagaagggaggcaaaagaggaagcaaagaaagaagctgatgcgaaaagacaaagcaagctacagcctatgatggcagcggaaagcatgcgtcagcaacaaattcccaggactgacgaagatgaagattggctcacccagaagtggagaaacacgagactcaagttcaatagcctcgttacgaatgaaagtcagaaccctaaaagcaggaaaagtgatatcagagcaattcgaaacaatgtaacggggcggaggcagtgggttggaaagtcagacccaagtaacggtgctgcgggtactgctcttgacctggagaacacatcatcagctacatcggcgtaccggtctattgtataagccccgagccccgagcgattcacttgaatattaggaggcgacgctataggtgacccagcatgactttgtgcgcttgatatattgggcttggagtagtcatcgatttccgttctggttcccagtagttttgagcaatattgattgatccataattatactattccaaagtaattgctatgcattcgggacgcaaa

SEQ ID NO: 35127 - DNA, 3234 bp, Muscodor strobelii
  misc_feature: SGI cDNA ID NO. 572153
  misc_feature: Encodes the peptide sequence at SEQ ID NO 35128
atggcaacgatgattgatcatcttaacctgggcgacgacgaagccgataatcaacaggagaaaacggcgcgagcagcttgtttgagtgtagagaaacatgacttcgagatccgagacccattggctcattttataggttgcctcgaattctacgagagggataaatttcttgaaacaacaccggtgtggaaggccgagtataactaccagatggaaattgcagcagcgcctctcccacaggatcagaaagagagggcaatgatcgcggttgataaactaaaatcgacctggaagaatacaatcagcactgagttaagacgaattgcctttctccgcgagaaacttgctcaggataaacatgacaaaacgctagtagccgatgtcaacaaaatgcgagaacagtggcgcaattcggaggattaccgagagcatattgacgacgtgcgccgctggcgcagtgcccacaacaagcagaattcgatatctccagattaccaacagtatacgaataatgggaacgttacacagcagtatatgatcgagaaggatatggtcgtaccagtcatacagtttcagcggaaagaagtcaaagacgacaccaagtccgcgccgtcaaaaaaaatccatgttgatccccatgatgacccaattttgcgaagcaaattcccgaaccagaagactaccatccacaaaattctaaaagacccggaaaatggccatatcttgtccaaagacggcaaagcaaaagattaccgaattacatatgttcatataccgtccaataatatggtttgggctgaggaagcaattgcaaaatactatggagacgcagtgccaaacttcaatgtcatgcacaggcaattacaacggccattgaagaccgagacatccatgatcctccaggagcgttactggagaggtcaactacatggtgattctgactcgccgccacatgcgaggtacatgtcacccatgtgtgagactatctcgtcgtccccgaataccccggatgacgatccaaaaaatattgctctattcatgccctatctacattgggagacctcgcgaaaaagagagcagtttgcttcagaaatcgataagatagtgctctcatcagcgctagataaagccaatggagaagacgcacggaagaacgatcgtatacgggcaagatgccatcttcctagacagaagcagcgggagaatccagagagaccagacatttcggttttgaagtcgccaaacaatcaagacagggaaccttcgcaggtcatgtcaaaaattgagacggtagatgacttggttgaagccacgaagaactacacaaagccctttagttccaataatccattgggccagtacttgctcgcagcagctagattagccgaagggatgacaacgtatcgagacaagatgctcctcaggaagtatcttcctctggaccctccaattcacatccggaggactttagatcaagcatattactggacccttaattcgacaaagaagcgggacaaagaccaagttgtataccgagggaccacaacacggccatctgacttccaccggtatgatgcggattctgcaaccttcccggatcatgacggactaacaggagactgtggtgcatgcctcgttaacatcaaaaaagtatctcgagtggtgatggttgatcaactgtggatgtgggtcctcgactcgcagactataattacttgttttccgaagcgatatggagcgaataaacaagactactcaggggtccacaagtcgattagaacaagattcgagaatgccagtccaaattcgatacgcacagtattcgaattggcgctgattattctagacgaatgcaccatgacattttttgaccgagcaaaagccctgaataggcaacctcaagtgatcgacgagttctcaaaagcgatcggaaacatcatgcataagcaaagtacagctttcagtcgtctttggagatggactggtgaagctcggaaggtataccgctgccaaggatatacggacgcagccgggcttcaaattcctcttctcgatatcaacccagagggtcacctagagcgagagattgaagacattgtcgaagaactagacattatgttgcacatatgcaaaactcaccaggacataattaagagcttcattgatcaagctaagcatatcttggaccccgatgggaagttcagtcagtctgatccagtttctcaatctcagagacacaggatcagaaatcgtgctgcagttcagggatctgatgaagacggtgactccaaggattacgactcattcaacattagagccatggagctcaaggaaagagtcgacagtcatgtgaaagacttggaagcgttgcgtaaaagcgccaaaaatactgccgaagatgtatttcacccttttgtcttgcatcttctgacaatgaaacaacagcaagccagcgtcgttcaagcatggcaagcagtcaaacaagcagaagaaacgatccggcagggtcgttccatcatggtcttcacactcgctacaattgtttttctacctctctcattcttgactagcgtttttggaatgaacaatcgcgaattcggagacaacaattggcagattaaatggcagcttctatacattttcgcgatttccgcagccgtcgtgttcataagtctcctcttcgcatacagccactgggtccgaacaattagctggtccatctataagcgtattgtaattgcagtcgtcgtgaagacgaaactttacgatatctatttgacacattggaagtccagtgaaagaattgagaaagatacgctagcagtcactaacaagatcaaaatggatgcgacaaaccagttctatgaggatcttgcgcgaagaagggaggcaaaagaggaagcaaagaaagaagctgatgcgaaaagacaaagcaagctacagcctatgatggcagcggaaagcatgcgtcagcaacaaattcccaggactgacgaagatgaagattggctcacccagaagtggagaaacacgagactcaagttcaatagcctcgttacgaatgaaagtcagaaccctaaaagcaggaaaagtgatatcagagcaattcgaaacaatgtaacggggcggaggcagtgggttggaaagtcagacccaagtaacggtgctgcgggtactgctcttgacctggagaacacatcatcagctacatcggcgtaccggtctattgtataa

SEQ ID NO: 35128 - protein, 1077 aa, Muscodor strobelii
  misc_feature: SGI Peptide ID NO. 572153
  misc_feature (22)..(949): NCBI GI: 116204025 Blast Desc: CHGG_09896 [Chaetomium globosum CBS 148.51] gi|88176024|gb|EAQ83492.1| CHGG_09896 [Chaetomium globosum CBS 148.51]
  misc_feature (21)..(801): NCBI GI: 171677043 Blast Desc: protein product [Podospora anserina] gi|170936589|emb|CAP61248.1| protein product [Podospora anserina]
  misc_feature (98)..(915): NCBI GI: 171678473 Blast Desc: protein product [Podospora anserina] gi|170937306|emb|CAP61963.1| protein product [Podospora anserina]
  misc_feature (177)..(935): NCBI GI: 39969741 Blast Desc: MGG_10480 [Magnaporthe grisea 70-15] gi|145012094|gb|EDJ96750.1| MGG_10480 [Magnaporthe grisea 70-15]
  misc_feature (93)..(880): NCBI GI: 85092656 Blast Desc: NCU09566 [Neurospora crassa OR74A] gi|28920924|gb|EAA30255.1| [Neurospora crassa OR74A]
  misc_feature (214)..(850): NCBI GI: 116204327 Blast Desc: CHGG_10047 [Chaetomium globosum CBS 148.51] gi|88176175|gb|EAQ83643.1| CHGG_10047 [Chaetomium globosum CBS 148.51]
  misc_feature (510)..(896): NCBI GI: 154292567 Blast Desc: BC1G_14807 [Botryotinia fuckeliana B05.10] gi|150845888|gb|EDN21081.1| BC1G_14807 [Botryotinia fuckeliana B05.10]
  misc_feature (212)..(850): NCBI GI: 171684229 Blast Desc: protein product [Podospora anserina] gi|170942075|emb|CAP67727.1| protein product [Podospora anserina]
  misc_feature (512)..(926): NCBI GI: 164423373 Blast Desc: NCU08697 [Neurospora crassa OR74A] gi|157070064|gb|EAA34322.2| [Neurospora crassa OR74A]
  misc_feature (225)..(897): NCBI GI: 70996130 Blast Desc: ankyrin repeat protein [Aspergillus fumigatus Af293] gi|66850455|gb|EAL90782.1| ankyrin repeat protein [Aspergillus fumigatus Af293] gi|159131573|gb|EDP56686.1| ankyrin repeat
MATMIDHLNLGDDEADNQQEKTARAACLSVEKHDFEIRDPLAHFIGCLEFYERDKFLETTPVWKAEYNYQMEIAAAPLPQDQKERAMIAVDKLKSTWKNTISTELRRIAFLREKLAQDKHDKTLVADVNKMREQWRNSEDYREHIDDVRRWRSAHNKQNSISPDYQQYTNNGNVTQQYMIEKDMVVPVIQFQRKEVKDDTKSAPSKKIHVDPHDDPILRSKFPNQKTTIHKILKDPENGHILSKDGKAKDYRITYVHIPSNNMVWAEEAIAKYYGDAVPNFNVMHRQLQRPLKTETSMILQERYWRGQLHGDSDSPPHARYMSPMCETISSSPNTPDDDPKNIALFMPYLHWETSRKREQFASEIDKIVLSSALDKANGEDARKNDRIRARCHLPRQKQRENPERPDISVLKSPNNQDREPSQVMSKIETVDDLVEATKNYTKPFSSNNPLGQYLLAAARLAEGMTTYRDKMLLRKYLPLDPPIHIRRTLDQAYYWTLNSTKKRDKDQVVYRGTTTRPSDFHRYDADSATFPDHDGLTGDCGACLVNIKKVSRVVMVDQLWMWVLDSQTIITCFPKRYGANKQDYSGVHKSIRTRFENASPNSIRTVFELALIILDECTMTFFDRAKALNRQPQVIDEFSKAIGNIMHKQSTAFSRLWRWTGEARKVYRCQGYTDAAGLQIPLLDINPEGHLEREIEDIVEELDIMLHICKTHQDIIKSFIDQAKHILDPDGKFSQSDPVSQSQRHRIRNRAAVQGSDEDGDSKDYDSFNIRAMELKERVDSHVKDLEALRKSAKNTAEDVFHPFVLHLLTMKQQQASVVQAWQAVKQAEETIRQGRSIMVFTLATIVFLPLSFLTSVFGMNNREFGDNNWQIKWQLLYIFAISAAVVFISLLFAYSHWVRTISWSIYKRIVIAVVVKTKLYDIYLTHWKSSERIEKDTLAVTNKIKMDATNQFYEDLARRREAKEEAKKEADAKRQSKLQPMMAAESMRQQQIPRTDEDEDWLTQKWRNTRLKFNSLVTNESQNPKSRKSDIRAIRNNVTGRRQWVGKSDPSNGAAGTALDLENTSSATSAYRSIV

SEQ ID NO: 35129 - DNA, 3045 bp, Muscodor strobelii; identical to SEQ ID NO: 35126
  misc_feature: SGI EST ID NO. CUFF.83596.0
  misc_feature: Variant of the nucleotide sequence at SEQ ID NO 35127

SEQ ID NO: 35130 - DNA, 1713 bp, Muscodor strobelii
  misc_feature: SGI cDNA ID NO. 572154
  misc_feature: Encodes the peptide sequence at SEQ ID NO 35131
atgttctcttcgaaatacgtgcttggcctgtttgcccttttccctctgtgctggtccactttagtcacgggcaatgacgttaagcagattgcaatcatcggagctggcgcggccgggtcgtccgcggcgtaccacttgaggaaatatgccgacgttgccggcatccctatcaacgtgaccatggcattaagtgatctgaactatcagatttcagaaaatagtcctttattcgagaagaccggacacattggcgggcgcactctcacagtcaacatttatgacgacccaatattgccaattgagcttggtgcatccattttcgtcgacgccaattacatactctcaaatgcgacgagagaatttggccttgtgacgagagatccaggtgccgatgaggatggtctgctcggtatttgggacggcgacacctttgtgtatacacaagattcgagctcctgggattgggtgaatctcgccaagctattttggaaatatggcaccgcaccctacttcacacggaagctggtcaagaatactgttgccatgtttcttcagctgtacgatgagcccttcttcccgtttcgatcactatcaacaagagctttccagctaggtctagtcaagataactggattgacaggacaacaatttttggcaaagaataaacttgacggagcgtttgctcatcatattgtgcaagcgggtactcgcgtaaattatgcttcgaatctggagtatattcacggccttggagctatggtcgcaatggcaccagagggtgctaaagccgtcgatggcggtaactggcagatcttttctagaatggttgaggtttcaggagctaagactcacatgaacacctctgtcactggtcttgcactggattctgacaagaaatatcgccttaaaactagcacagcagcatcgggcgatagcaggaccgaatcactaccgcattcaactgcttttgacgatgtcatcattgcagcccctttgcaattcgccaacatcagcaccgacaagcaccttatccagcaccccgttgacacaatcccatacgcgacgctacacgtaacattgttcgcatcgccgtataaatttagtgcggagttcttcaagatgccgcctgcgtccgatgttcctatttctgtgctcacaacgctaggagctgacgaagaagcacgaccaggcagcgctggcgcgggcaaggcgggcttctactcagcaacgctgcagcgaatcgttgtgaatccacgcacgcacaaccccgagtacgtctacaagattttctcgcccgaggctgtgactcccaagttccttggtgcactcctcggggtcgagatcccgggttcattcccgcgcgacatcccagatgactcgaccgtaaacccgatttcgtggttccatgctaccgtgtttcatccctatcctcagaaatatcctcgtgtcacttttcaagatccgatcttgagagatgggctatattacacttcgggaatcgagagcttcatctcaaccatggagactagtgcgctgatgggcgccaatgtcgcgcggttgattgtagacgactatgcgggaataacacgtcctggagaggaaatgattggggccatgcctttgtatggcgtggcgcacgaaggctcgacgaaattgcagatgcagactgcgaatcatcatgatgaggggatcgccaacgtaaacgagctttga

SEQ ID NO: 35131 - protein, 570 aa, Muscodor strobelii
  misc_feature: SGI Peptide ID NO. 572154
  misc_feature (29)..(49): Pfam Id: PF01266 Pfam Desc: FAD dependent oxidoreductase
  misc_feature (21)..(524): NCBI GI: 261354542 Blast Desc: prenylcysteine oxidase [Verticillium albo-atrum VaMs.102]
  misc_feature (14)..(527): NCBI GI: 39943694 Blast Desc: MGG_03858 [Magnaporthe grisea 70-15] gi|145014546|gb|EDJ99114.1| MGG_03858 [Magnaporthe grisea 70-15]
  misc_feature (44)..(535): NCBI GI: 171678609 Blast Desc: protein product [Podospora anserina] gi|170937374|emb|CAP62032.1| protein product [Podospora anserina]
  misc_feature (27)..(532): NCBI GI: 164422741 Blast Desc: NCU09710 [Neurospora crassa OR74A] gi|157069801|gb|EAA29713.2| conserved [Neurospora crassa OR74A]
  misc_feature (16)..(531): NCBI GI: 256733010 Blast Desc: NECHADRAFT_78887 [Nectria haematococca mpVI 77-13-4]
  misc_feature (44)..(534): NCBI GI: 156050667 Blast Desc: SS1G_07921 [Sclerotinia sclerotiorum 1980] gi|154692321|gb|EDN92059.1| SS1G_07921 [Sclerotinia sclerotiorum 1980]
  misc_feature (44)..(537): NCBI GI: 154308643 Blast Desc: BC1G_07744 [Botryotinia fuckeliana B05.10] gi|150852695|gb|EDN27887.1| BC1G_07744 [Botryotinia fuckeliana B05.10]
  misc_feature (28)..(525): NCBI GI: 212543119 Blast Desc: prenylcysteine lyase, [Penicillium marneffei ATCC 18224] gi|210066621|gb|EEA20714.1| prenylcysteine lyase, [Penicillium marneffei ATCC 18224]
  misc_feature (44)..(563): NCBI GI: 46123351 Blast Desc: FG06053.1 [Gibberella zeae PH-1]
  misc_feature (23)..(524): NCBI GI: 116204121 Blast Desc: CHGG_09944 [Chaetomium globosum CBS 148.51] gi|88176072|gb|EAQ83540.1| CHGG_09944 [Chaetomium globosum CBS 148.51]
  misc_feature (76)..(525): SWISSPROT Homolog: EC 1.8.3.5 Prenylcysteine oxidase
MFSSKYVLGLFALFPLCWSTLVTGNDVKQIAIIGAGAAGSSAAYHLRKYADVAGIPINVTMALSDLNYQISENSPLFEKTGHIGGRTLTVNIYDDPILPIELGASIFVDANYILSNATREFGLVTRDPGADEDGLLGIWDGDTFVYTQDSSSWDWVNLAKLFWKYGTAPYFTRKLVKNTVAMFLQLYDEPFFPFRSLSTRAFQLGLVKITGLTGQQFLAKNKLDGAFAHHIVQAGTRVNYASNLEYIHGLGAMVAMAPEGAKAVDGGNWQIFSRMVEVSGAKTHMNTSVTGLALDSDKKYRLKTSTAASGDSRTESLPHSTAFDDVIIAAPLQFANISTDKHLIQHPVDTIPYATLHVTLFASPYKFSAEFFKMPPASDVPISVLTTLGADEEARPGSAGAGKAGFYSATLQRIVVNPRTHNPEYVYKIFSPEAVTPKFLGALLGVEIPGSFPRDIPDDSTVNPISWFHATVFHPYPQKYPRVTFQDPILRDGLYYTSGIESFISTMETSALMGANVARLIVDDYAGITRPGEEMIGAMPLYGVAHEGSTKLQMQTANHHDEGIANVNEL

SEQ ID NO: 35132 - DNA, 2249 bp, Muscodor strobelii
  misc_feature: SGI EST ID NO. CUFF.83600.0
  misc_feature: Variant of the nucleotide sequence at SEQ ID NO 35130
tgaactatcagatttcagaaaatagtcctttgtcctaaaacccgcggccccgcgaaaagtcatgaaaaaataactaacccaatacctttctggctaccagattcgagaagaccggacacattggcgggcgcactctcacagtcaacatttatgacgacccaatattgccaattgagcttggtgcatccattttcgtcgacgccaattacatactctcaaatgcgacgagagaatttggccttgtgacgagagatccaggtgccgatgaggatggtctgctcggtatttgggacggcgacacctttgtgtatacacaagattcgagctcctgggattgggtgaatctcgccaagctattttggaaatatggcaccgcaccctacttcacacggaagctggtcaagaatactgttgccatgtttcttcagctgtacgatgagcccttcttcccgtttcgatcactatcaacaagagctttccagctaggtctagtcaagataactggattgacaggacaacaatttttggcaaagaataaacttgacggagcgtttgctcatcatattgtgcaagcgggtactcgcgtaaattatgcttcgaatctggagtatattcacggccttggagctatggtcgcaatggcaccagagggtgctaaagccgtcgatggcggtaactggcagatcttttctagaatggttgaggtttcaggagctaagactcacatgaacacctctgtcactggtcttgcactggattctgacaagaaatatcgccttaaaactagcacagcagcatcgggcgatagcaggaccgaatcactaccgcattcaactgcttttgacgatgtcatcattgcagcccctttgcaattcgccaacatcagcaccgacaagcaccttatccagcaccccgttgacacaatcccatacgcgacgctacacgtaacattgttcgcatcgccgtataaatttagtgcggagttcttcaagatgccgcctgcgtccgatgttcctatttctgtgctcacaacgctaggagctgacgaagaagcacgaccaggcagcgctggcgcgggcaaggcgggcttctactcagcaacgctgcagcgaatcgttgtgaatccacgcacgcacaaccccgagtacgtctacaagattttctcgcccgaggctgtgactcccaagttccttggtgcactcctcggggtcgagatcccgggttcattcccgcgcgacatcccagatgactcgaccgtaaacccgatttcgtggttccatgctaccgtgtttcatccctatcctcagaaatatcctcgtgtcacttttcaagatccgatcttgagagatgggctatattacacttcgggaatcgagagcttcatctcaaccatggagactagtgcgctgatgggcgccaatgtcgcgcggttgattgtagacgactatgcgggaataacacgtcctggagaggaaatgattggggccatgcctttgtatggcgtggcgcacgaaggctcgacgaaattgcagatgcagactgcgaatcatcatgatgaggggatcgccaacgtaaacgagctttgagcacccgggcacgagcaatctgtttcaatgagacatatttattgatttccttgcgtctatgttagagaatgattcaactgcgccagatgcaaatgaatgtttgtgcgcctacatcaaatcttgggacgccatcgaacctaagctaatctaagctatttctacgctccatctgggcatctgcgagatttgttgtagttaggctgcgaggatccggcgtagaatgcaaggattacgctcaatacatcaaacttaaaggcatggtaggattgatctgtattgctttctactcactttcatcgcaaggtaataagtggtattttaagtggaaatggttaaaggaaaaaaaatcggccggttgaagcatcgaaccgacgccttacaaaaatgtggtagtggtgtttttagcagggtctttcagtgaatttttttttttttttttctagtttacctctgtcgcacctagggttctggttgtttcattaccggtctctcatggcccgagccgtgagtcctgaccacagtggtccaaggcttgacgtttgagataagggattgaactcaatgagctctaattacaatctgacgatcgtaccactacaccagtgtagttgttcttgttgtaggcccagctcgttatctagctacttgtacgtaacaccgccc

SEQ ID NO: 35133 - DNA, 1329 bp, Muscodor strobelii
  misc_feature: SGI cDNA ID NO. 572155
  misc_feature: Encodes the peptide sequence at SEQ ID NO 35134
atgttcggaagctggcgagtcggtgtcggtaccgccggcggccaacccacattcaggcatagcccttcggccaccaaagcctgcaaaaattgccgggcaaaaaaggtcaaatgcaccggagagttgtcgggctgcgagcggtgcgagacgcttggcatagaatgcacttacatggccgggtccggtcggaagcgccatacctcccctagcgcgtccgacaccaagaggcgacaatcagttgcccgcccgaccgataccgagcccgcgaagcagccggatccgacggtcaccgacaatgccccgccgtccctgctctccgccgacgacgaagtcatgtctggggccgaattcgcatcgcacgctggcggccccgacgcgcagacatcactcgccatggacctggacgattggaccaatttctctcattatgaccctgtactcttctctccgatcgacgggactgttttctcatcaacgatgggtcccagcaacaccgttgatagggagttttggaatgaggagtatgcatcactcgccagctttggaatagacagcgagccgtccacatccacagtcaagagtagtccgcccaacatctgcaatgtgaataacgcgagcattgcaaacacacaaacttggacagaatcaggatccacaatagcgactgattcccaaaaggagataaaaccaatttcaggaagacggccatgtctcgcacatgaaaccaatcctaatgatccattgagttgtacatgcttcatccgcgtggtgctgctcattaatgagcttgagacgggcatatcgtataatatgaacatggatggagataacaaccataaaaatgaaaatgccggtagcaatgggtcgacacacaaccaaaacaataacaagcgaggtcttgattcagctttgggcttgcataaagaagccctgcaatacggcgacacaatgcgccggtgtcgaaggtgttcatcgcgatccgaggtgaaaatgatgctaactctattaacgaaccgcctcctcgtgctgtgcgcggatatggtctcggcctacgaaggcgccgcccaagccccttccgctaccgccgggtcgtccaatgacctgagcgttgccataacggcgggcgagtatgaagtcgactcgaatgtcgagtatgcggttgtgatgcgagagttagttgcctaccagctgcaggctctgcagctctttctagattctatatcggagtctcggggctcggagttcgtgccggctaagaacaaagcggctagtttgctaagacgtttatatatggtagcgttgccggttcctggggttggaggggcgtaa

SEQ ID NO: 35134 - protein, 442 aa, Muscodor strobelii
  misc_feature: SGI Peptide ID NO. 572155
  misc_feature (26)..(64): Pfam Id: PF00172 Pfam Desc: Fungal Zn(2)-Cys(6) binuclear cluster domain
  misc_feature (27)..(404): NCBI GI: 259485753 Blast Desc: TPA: Zn(II)2Cys6 transcription factor (Eurofung) [Aspergillus nidulans FGSC A4]
  misc_feature (27)..(404): NCBI GI: 121712477 Blast Desc: C6 zinc finger domain protein [Aspergillus clavatus NRRL 1] gi|119402002|gb|EAW12424.1| C6 zinc finger domain protein [Aspergillus clavatus NRRL 1]
  misc_feature (32)..(404): NCBI GI: 67525645 Blast Desc: AN3280.2 [Aspergillus nidulans FGSC A4] gi|40744068|gb|EAA63248.1| [Aspergillus nidulans FGSC A4]
  misc_feature (238)..(407): NCBI GI: 115389728 Blast Desc: conserved [Aspergillus terreus NIH2624] gi|114194765|gb|EAU36465.1| conserved [Aspergillus terreus NIH2624]
  misc_feature (15)..(94): NCBI GI: 238839256 Blast Desc: [Microsporum canis CBS 113480]
  misc_feature (25)..(404): NCBI GI: 119174210 Blast Desc: [Coccidioides immitis RS]
  misc_feature (27)..(352): NCBI GI: 39966972 Blast Desc: [Magnaporthe grisea 70-15] gi|145012817|gb|EDJ97458.1| [Magnaporthe grisea 70-15]
  misc_feature (3)..(57): NCBI GI: 67521822 Blast Desc: AN1368.2 [Aspergillus nidulans FGSC A4] gi|40746395|gb|EAA65551.1| AN1368.2 [Aspergillus nidulans FGSC A4] gi|259488298|tpe|CBF87636.1| TPA: Zn(II)2Cys6 transcription
  misc_feature (26)..(81): NCBI GI: 242206424 Blast Desc: [Postia placenta Mad-698-R] gi|220731933|gb|EED85773.1| [Postia placenta Mad-698-R]
  misc_feature (24)..(77): NCBI GI: 259483819 Blast Desc: TPA: Zn(II)2Cys6 transcription factor (Eurofung) [Aspergillus nidulans FGSC A4]
MFGSWRVGVGTAGGQPTFRHSPSATKACKNCRAKKVKCTGELSGCERCETLGIECTYMAGSGRKRHTSPSASDTKRRQSVARPTDTEPAKQPDPTVTDNAPPSLLSADDEVMSGAEFASHAGGPDAQTSLAMDLDDWTNFSHYDPVLFSPIDGTVFSSTMGPSNTVDREFWNEEYASLASFGIDSEPSTSTVKSSPPNICNVNNASIANTQTWTESGSTIATDSQKEIKPISGRRPCLAHETNPNDPLSCTCFIRVVLLINELETGISYNMNMDGDNNHKNENAGSNGSTHNQNNNKRGLDSALGLHKEALQYGDTMRRCRRCSSRSEVKMMLTLLTNRLLVLCADMVSAYEGAAQAPSATAGSSNDLSVAITAGEYEVDSNVEYAVVMRELVAYQLQALQLFLDSISESRGSEFVPAKNKAASLLRRLYMVALPVPGVGGA

SEQ ID NO: 35135 - DNA, 1495 bp, Muscodor strobelii
  misc_feature: SGI EST ID NO. CUFF.83606.0
  misc_feature: Variant of the nucleotide sequence at SEQ ID NO 35133
ttgctatctatatcctacctatccacctccgtgctgacaaagagcgatgttcggaagctggcgagtcggtgtcggtaccgccggcggccaacccacattcaggcatagcccttcggccaccaaagcctgcaaaaattgccgggcaaaaaaggtcaaatgcaccggagagttgtcgggctgcgagcggtgcgagacgcttggcatagaatgcacttacatggccgggtccggtcggaagcgccatacctcccctagcgcgtccgacaccaagaggcgacaatcagttgcccgcccgaccgataccgagcccgcgaagcagccggatccgacggtcaccgacaatgccccgccgtccctgctctccgccgacgacgaagtcatgtctggggccgaattcgcatcgcacgctggcggccccgacgcgcagacatcactcgccatggacctggacgattggaccaatttctctcattatgaccctgtactcttctctccgatcgacgggactgttttctcatcaacgatgggtcccagcaacaccgttgatagggagttttggaatgaggagtatgcatcactcgccagctttggaatagacagcgagccgtccacatccacagtcaagagtagtccgcccaacatctgcaatgtgaataacgcgagcattgcaaacacacaaacttggacagaatcaggatccacaatagcgactgattcccaaaaggagataaaaccaatttcaggaagacggccatgtctcgcacatgaaaccaatcctaatgatccattgagttgtacatgcttcatccgcgtggtgctgctcattaatgagcttgagacgggcatatcgtataatatgaacatggatggagataacaaccataaaaatgaaaatgccggtagcaatgggtcgacacacaaccaaaacaataacaagcgaggtcttgattcagctttgggcttgcataaagaagccctgcaatacggcgacacaatgcgccggtgtcgaaggtgttcatcgcgatccgaggtgaaaatgatgctaactctattaacgaaccgcctcctcgtgctgtgcgcggatatggtctcggcctacgaaggcgccgcccaagccccttccgctaccgccgggtcgtccaatgacctgagcgttgccataacggcgggcgagtatgaagtcgactcgaatgtcgagtatgcggttgtgatgcgagagttagttgcctaccagctgcaggctctgcagctctttctagattctatatcggagtctcggggctcggagttcgtgccggctaagaacaaagcggctagtttgctaagacgtttatatatggtagcgttgccggttcctggggttggaggggcgtaatatacgggcgccctcatagatagagacagattatatagacagatgagtagaccaaaggctttatatcggctgatataggtattgtcaccctatccccagaagcaaaactagatattcggc

SEQ ID NO: 35136 - DNA, 1671 bp, Muscodor strobelii
  misc_feature: SGI cDNA ID NO. 572156
  misc_feature: Encodes the peptide sequence at SEQ ID NO 35137
atggcgaacaccgattgggtcgctatacgcacgaagggtcttctcgagcaagctagcacctcatcaactgcactttttttcgtcgcgctgctgttggcatatatcctctggcaacagggcccttcaccgtctcatcaaccaccacacattcccgagattataccctttgtgtccaacacatacctcttcgctactaaccacaatgtgttcttggaaaagtgtgtcgcagcattgcgtaaaagcagtatcgcacaatttcgcctcggtggcacacggacatatgtcatcactggcgttgagaacataggtgcgattttcaaatcgacaactgagattcgcgatgaaaccatgatggaaatgtactcactgccgaagctgtgggctatgccgcagagcgaggtcgactacttcaggagagatagaactggaagagggaaggtgcccttgccaggagcgatgcctgtgcctgaggatcaaagacattgggctataaatcacaacatttacgaaagattcctgggcagcaaaaagcataccactcttctcgccgagaaatactttgaggtattctcggggagactggacatgtacccaaccggccaatggacagaagtcttagtcatgaagacactgatgaaatgtgacatggccgagagtgcactggtggctctcgccggccccaagctcctggaacttaaccctggcttcatcgataagttctgggagtttgacccagtcctagcagatctatgtctcggaaagccaaggtggatgaacccgaagccctggcagatcagggatagctatcacgatatgacgaagaagttcatcgaatcagcctgggccaactttgactgggctggtcctaacaaagaggccgactgggaagagcagtttggcgctcgcatctgtcgtgaattggcgcgttggatgcgaggcagcttctctatacaagcacaggctgggttcttcggggcactgttcattggacagaattccaacacagtatcaatcgcgacatgggcacttatggaaatgatgcgtgatcccgagatgttcaaagcagtgcagcaggaagttctgtcggcatatacgctgagccctgaaaccacccaacgcacattagatatttctaagctgctctccctacccctattacagtcagtatacgtcgaaacaatgcgcatgcgcatgtccttctcgccaatgcgcgaagtggtggcaccagtccacatgggcgggtatgatctcaagccaggctcgctcatcttcgcgccgaattatgtcgcacactataacgagtccgcatggggtgtccagggacaccctgcgtcggaattttggggtgcgcgccacgtacgatacgttcacagcgacgacgataatggcaggagtgtcagcaagcccaagtttgagatggcatcgcacagaaacaatttctttccctttggcggtggtccttccatgtgccctggtcgattttttgccaagcaggagatcttgatgacgttggctatacttgttgaacgtttcgacatcgagtttattgaatgggttcaactggatggaagccaatctgatcgacctgcgcagaatgatgttaactgtgctggtgcagtggctatccctcctgatcgggatatgagagtgcggcttaagcggcgctggtaa

SEQ ID NO: 35137 - protein, 556 aa, Muscodor strobelii
  misc_feature: SGI Peptide ID NO. 572156
  misc_feature (48)..(537): Pfam Id: PF00067 Pfam Desc: Cytochrome P450
  misc_feature (340)..(437): Pfam Id: PF00067 Pfam Desc: Cytochrome P450
  misc_feature (480)..(517): Pfam Id: PF00067 Pfam Desc: Cytochrome P450
  misc_feature (20)..(556): NCBI GI: 242801851 Blast Desc: cytochrome P450, [Talaromyces stipitatus ATCC 10500] gi|218717199|gb|EED16620.1| cytochrome P450, [Talaromyces stipitatus ATCC 10500]
  misc_feature (30)..(556): NCBI GI: 212545775 Blast Desc: cytochrome P450, [Penicillium marneffei ATCC 18224] gi|210064561|gb|EEA18656.1| cytochrome P450, [Penicillium marneffei ATCC 18224]
  misc_feature (44)..(548): NCBI GI: 46138191 Blast Desc: FG10610.1 [Gibberella zeae PH-1]
  misc_feature (15)..(556): NCBI GI: 171691232 Blast Desc: protein product [Podospora anserina] gi|170945564|emb|CAP71676.1| protein product [Podospora anserina]
  misc_feature (46)..(554): NCBI GI: 46110465 Blast Desc: FG02114.1 [Gibberella zeae PH-1]
  misc_feature (11)..(555): NCBI GI: 256724156 Blast Desc: NECHADRAFT_51576 [Nectria haematococca mpVI 77-13-4]
  misc_feature (11)..(555): NCBI GI: 46116016 Blast Desc: FG03850.1 [Gibberella zeae PH-1]
  misc_feature (159)..(490): NCBI GI: 261352931 Blast Desc: conserved [Verticillium albo-atrum VaMs.102]
  misc_feature (125)..(555): NCBI GI: 156062376 Blast Desc: SS1G_01304 [Sclerotinia sclerotiorum 1980] gi|154696640|gb|EDN96378.1| SS1G_01304 [Sclerotinia sclerotiorum 1980]
  misc_feature (47)..(514): NCBI GI: 242764799 Blast Desc: conserved [Talaromyces stipitatus ATCC 10500] gi|218724041|gb|EED23458.1| conserved [Talaromyces stipitatus ATCC 10500]
MANTDWVAIRTKGLLEQASTSSTALFFVALLLAYILWQQGPSPSHQPPHIPEIIPFVSNTYLFATNHNVFLEKCVAALRKSSIAQFRLGGTRTYVITGVENIGAIFKSTTEIRDETMMEMYSLPKLWAMPQSEVDYFRRDRTGRGKVPLPGAMPVPEDQRHWAINHNIYERFLGSKKHTTLLAEKYFEVFSGRLDMYPTGQWTEVLVMKTLMKCDMAESALVALAGPKLLELNPGFIDKFWEFDPVLADLCLGKPRWMNPKPWQIRDSYHDMTKKFIESAWANFDWAGPNKEADWEEQFGARICRELARWMRGSFSIQAQAGFFGALFIGQNSNTVSIATWALMEMMRDPEMFKAVQQEVLSAYTLSPETTQRTLDISKLLSLPLLQSVYVETMRMRMSFSPMREVVAPVHMGGYDLKPGSLIFAPNYVAHYNESAWGVQGHPASEFWGARHVRYVHSDDDNGRSVSKPKFEMASHRNNFFPFGGGPSMCPGRFFAKQEILMTLAILVERFDIEFIEWVQLDGSQSDRPAQNDVNCAGAVAIPPDRDMRVRLKRRW

SEQ ID NO: 35138 - DNA, 1017 bp, Muscodor strobelii
  misc_feature: SGI cDNA ID NO. 572157
  misc_feature: Encodes the peptide sequence at SEQ ID NO 35139
atgtcagtggccgttgagacccgaaccgccgcccacagcggccacgaaaaggtggctcgtggccagaccatcaaggagtcgtggaagataccctcatcgaagtggaaagccatgatccatccccgcgctgaggaggttggacaagaagtcgatggctatttcctcgataattggaactttcccaatgagcgcgccagagcgactttcctcaaggccggcttctctcgtgtgacgtgcttgtactttcctttagctaaagatgatcgaatccattttgcttgtcggctgctgaccgtcttgttcttgattgacgacatcctggaggacatgggttttgaagatggcgagaagctcaacaacaggttgatagagctatctaagggaccgcaatatgcgacacctgatcgttccaaccctgcggaatttgtcatcttcgatctctgggagagcatgcgcgcccatgatctcgagcttgcgaacgaggtcctcgagccgactttcgtcttcatgcgatctcaaactgacaaagttcgcctgagtatcaccgaactgggagagtatctgcgataccgagagaaagacgttggcaaggcactgttatcggcactgatgcgctactcaatggagctacgcccaaacgcagaagagatggaagccatcaaaccgcttgaagagaactgctcaaagcatctctctatcgtgaacgacatctacagctatgagaaagaactccttgcctccaagacagggcactcggagggctcctatctgtgctcagctgtcaaggtggttgcatatgagacagggctcagtgtggcagccaccaagcgtgttctgtggtacatggtgcgagagtgggagttgacgcacaatgatatgtgctcgaacttaagtgttggtggcaagacgatggttgattacattcgtgggttgcagtatcagatgagtggcaatgaactctggagcaggaccactcctcgctatcttgaggccattgaccaggttggtgaagagtga

SEQ ID NO: 35139 - protein, 338 aa, Muscodor strobelii
  misc_feature: SGI Peptide ID NO. 572157
  misc_feature (31)..(284): Pfam Id: PF03936 Pfam Desc: Terpene synthase family, metal binding domain
  misc_feature (64)..(284): Pfam Id: PF03936 Pfam Desc: Terpene synthase family, metal binding domain
  misc_feature (31)..(328): NCBI GI: 416643 Blast Desc: ARIS_PENRO RecName: Full=Aristolochene synthase; Short=AS; AltName: Full=Sesquiterpene cyclase gi|169178|gb|AAA33694.1| aristolochene synthase [Penicillium
  misc_feature (31)..(328): NCBI GI: 255931833 Blast Desc: Pc12g06310 [Penicillium chrysogenum Wisconsin 54-1255] gi|211582092|emb|CAP80258.1| Pc12g06310 [Penicillium chrysogenum Wisconsin 54-1255]
  misc_feature (31)..(325): NCBI GI: 10120633 Blast Desc: Pc12g06310 [Penicillium chrysogenum Wisconsin 54-1255] gi|211582092|emb|CAP80258.1| Pc12g06310 [Penicillium chrysogenum Wisconsin 54-1255]
  misc_feature (31)..(319): NCBI GI: 224589059 Blast Desc: FPP cyclase [Penicillium expansum]
  misc_feature (27)..(333): NCBI GI: 126030360 Blast Desc: FPP cyclase [Penicillium expansum]
  misc_feature (33)..(330): NCBI GI: 121712471 Blast Desc: terpene synthase metal binding domain protein [Aspergillus clavatus NRRL 1] gi|119401999|gb|EAW12421.1| terpene synthase metal binding domain protein [Aspergillus clavatus NRRL
  misc_feature (33)..(330): NCBI GI: 67525639 Blast Desc: AN3277.2 [Aspergillus nidulans FGSC A4] gi|40744065|gb|EAA63245.1| AN3277.2 [Aspergillus nidulans FGSC A4] gi|259485756|tpe|CBF83046.1| TPA: conserved [Aspergillus FGSC
  misc_feature (31)..(328): NCBI GI: 169782654 Blast Desc: [Aspergillus oryzae RIB40] gi|83774533|dbj|BAE64656.1| protein product [Aspergillus oryzae]
  misc_feature (30)..(333): NCBI GI: 171677181 Blast Desc: protein product [Podospora anserina] gi|170936658|emb|CAP61317.1| protein product [Podospora anserina]
  misc_feature (24)..(333): NCBI GI: 121708682 Blast Desc: conserved [Aspergillus clavatus NRRL 1] gi|119400361|gb|EAW10787.1| conserved [Aspergillus clavatus NRRL 1]
  misc_feature (31)..(328): SWISSPROT Homolog: EC 4.2.3.9 Aristolochene synthase
  misc_feature: Useful for introducing or modulating the production of volatile compounds
MSVAVETRTAAHSGHEKVARGQTIKESWKIPSSKWKAMIHPRAEEVGQEVDGYFLDNWNFPNERARATFLKAGFSRVTCLYFPLAKDDRIHFACRLLTVLFLIDDILEDMGFEDGEKLNNRLIELSKGPQYATPDRSNPAEFVIFDLWESMRAHDLELANEVLEPTFVFMRSQTDKVRLSITELGEYLRYREKDVGKALLSALMRYSMELRPNAEEMEAIKPLEENCSKHLSIVNDIYSYEKELLASKTGHSEGSYLCSAVKVVAYETGLSVAATKRVLWYMVREWELTHNDMCSNLSVGGKTMVDYIRGLQYQMSGNELWSRTTPRYLEAIDQVGEE

SEQ ID NO: 35140 - DNA, 2256 bp, Muscodor strobelii
  misc_feature: SGI cDNA ID NO. 572158
  misc_feature: Encodes the peptide sequence at SEQ ID NO 35141
atgctgatatacgctgactcggtgactggtttcgccgggttttgcatctgcgccgttctgctatcacaagtcatccaagccacatacaacctattgttccatcccctgtccaaatttcccgggccacgtgctgcagcatgttccaatattccattcacctattggtttcatggtgggcgcatgccctacaagattttagaactacacgagagatacggtccggcagtccgggtggcccctaacgaagtctcgtttaactcgcttcagtcgtggaatgacatttacagttttagacctgggcacacaacattcatcaaaagcgagttctacgatggaggtccgtttgccggtcgaggagttcattccattgtgagcgagcgtgacgtagccttacatgggcagatgcgacggcatctctcacacgccttctctgatcaatctttgagtgaacaagagcagattattgctgagaccgtcgacaaattcatacgggctgctggccgtagaggtgcgcagcccgatgggttcgaaataggcaaggccctcgagatgatgacattcgatatcattggtgatttggcattcggtgagacatttgcgggcgtcgaaagtgacaagcctcatccatggatcgccattgcgatgggcgcactacgccaaggagcgctagcagacacgttcatgcggtttccggtcgcaggaaaaatactcaagactctgatgccaggtaaaatagcagatctgacagcgcaaacgagacacaacgaggatatagcgattgcgctgactgagaaacgcataagccgacaagaatcatcaaggaaggatttcatgacacggatactggagcaacgcgatcctgctgaagtgtctgatctgcaactggcagcccatgcatctgactttgttgtcgctggaagtgagacaactgcaacagcgttgacttgcatcttgtattacttacttaaggagtcatccgtcatgacccagctccaacaggaaataaggcacagctttcagtcttatgaggatatcactgcattatcgactctaactctcaagtacatgaaatcagtcatactcgagggtttaagaatctacccacctttgcccttcggacttccccgagtagtgcctgaaggaggcgatactgtcgatggctatttcctcccggctggcactatcgtgagcacaaaccccgtggcggctagcttagcatctacaaacttcagccagccaatgaaattccggccagaaaggtggttgggtgaaaagggggctggtactgacatccgagccgccacgcaaccattcagccttgggccaaggggttgcctcggccgcaagtgggtgctccattgtgataactacagtgacattccttcgcaggctggcaaggttgccattatcacaggtggctcttctggtatcggactagcggctgctcgggtgttgtgccacagaggcgccatcgtacactcactagacgtcaatccgcctaatgaagatgtaacagggctgcactaccaacattgtgacatagcagactggggagagctacgaactgccttcgaggagattggacacgtcgattatgtctttgtaaacgcaggtatttctgagacattcgactattttgcagacatcgtggattcccagggtcaactagcagaaccgagtgctcgactaatcgatgtcaacctgcgagctacttacaacatagtcaagctatcttggagccagatgcgtaaacagccgaagggtccgccgtacagcatagtcatcacgaccagtgcctccggctacgcgccagaacagtcactcccaatctattccagtgggaaattggcgcttgttggactgattcgagcattgagatccgttatcatcaaagacggcatcaccattaacggtattgcacccgcagccaccatcaccggcctcttacccgcccacctggccgcaccaatcgtcgcccagcagctcccaatcagcgatgcccactttgttggattggctttggtgtactcagcaatcgccacggaggatgcgaaggtgcaactctacgggaaagataaggacgacgccaaggaccaaagtggccgctggaacgggcgagtgatcttaacgctgggtagcacatacactgagcttgaaggacccacggctgaactgcgtccggtctggtttggcaagaagaatgatgctttgactcgtcgacagcaagcagcgaccgattttcgcgactcggcgtga

SEQ ID NO: 35141 - protein, 751 aa, Muscodor strobelii
  misc_feature: SGI Peptide ID NO. 572158
  misc_feature (466)..(630): Pfam Id: PF00106 Pfam Desc: short chain dehydrogenase
  misc_feature (39)..(488): Pfam Id: PF00067 Pfam Desc: Cytochrome P450
  misc_feature (134)..(448): Pfam Id: PF00067 Pfam Desc: Cytochrome P450
  misc_feature (34)..(451): NCBI GI: 255931851 Blast Desc: Pc12g06400 [Penicillium chrysogenum Wisconsin 54-1255] gi|211582101|emb|CAP80267.1| Pc12g06400 [Penicillium chrysogenum Wisconsin 54-1255]
  misc_feature (35)..(395): NCBI GI: 171677183 Blast Desc: protein product [Podospora anserina] gi|170936659|emb|CAP61318.1| protein product [Podospora anserina]
  misc_feature (34)..(448): NCBI GI: 259485758 Blast Desc: TPA: cytochrome P450, (Eurofung) [Aspergillus nidulans FGSC A4]
  misc_feature (8)..(448): NCBI GI: 121712467 Blast Desc: benzoate 4-monooxygenase cytochrome P450 [Aspergillus clavatus NRRL 1] gi|119401997|gb|EAW12419.1| benzoate 4-monooxygenase cytochrome P450 [Aspergillus clavatus NRRL 1]
  misc_feature (14)..(449): NCBI GI: 169603624 Blast Desc: SNOG_04820 [Phaeosphaeria nodorum SN15] gi|111066091|gb|EAT87211.1| SNOG_04820 [Phaeosphaeria nodorum SN15]
  misc_feature (29)..(449): NCBI GI: 259485752 Blast Desc: TPA: cytochrome P450, (Eurofung) [Aspergillus nidulans FGSC A4]
  misc_feature (14)..(452): NCBI GI: 255931847 Blast Desc: Pc12g06380 [Penicillium chrysogenum Wisconsin 54-1255] gi|211582099|emb|CAP80265.1| Pc12g06380 [Penicillium chrysogenum Wisconsin 54-1255]
  misc_feature (24)..(449): NCBI GI: 121716300 Blast Desc: benzoate 4-monooxygenase cytochrome P450 [Aspergillus clavatus NRRL 1] gi|119403916|gb|EAW14333.1| benzoate 4-monooxygenase cytochrome P450 [Aspergillus clavatus NRRL 1]
  misc_feature (29)..(449): NCBI GI: 169783630 Blast Desc: [Aspergillus oryzae RIB40] gi|83775021|dbj|BAE65144.1| protein product [Aspergillus oryzae]
  misc_feature (19)..(449): NCBI GI: 121712479 Blast Desc: benzoate 4-monooxygenase cytochrome P450 [Aspergillus clavatus NRRL 1] gi|119402003|gb|EAW12425.1| benzoate 4-monooxygenase cytochrome P450 [Aspergillus clavatus NRRL 1]
  misc_feature (36)..(449): SWISSPROT Homolog: EC 1.14.13.12 Benzoate 4-monooxygenase
MLIYADSVTGFAGFCICAVLLSQVIQATYNLLFHPLSKFPGPRAAACSNIPFTYWFHGGRMPYKILELHERYGPAVRVAPNEVSFNSLQSWNDIYSFRPGHTTFIKSEFYDGGPFAGRGVHSIVSERDVALHGQMRRHLSHAFSDQSLSEQEQIIAETVDKFIRAAGRRGAQPDGFEIGKALEMMTFDIIGDLAFGETFAGVESDKPHPWIAIAMGALRQGALADTFMRFPVAGKILKTLMPGKIADLTAQTRHNEDIAIALTEKRISRQESSRKDFMTRILEQRDPAEVSDLQLAAHASDFVVAGSETTATALTCILYYLLKESSVMTQLQQEIRHSFQSYEDITALSTLTLKYMKSVILEGLRIYPPLPFGLPRVVPEGGDTVDGYFLPAGTIVSTNPVAASLASTNFSQPMKFRPERWLGEKGAGTDIRAATQPFSLGPRGCLGRKWVLHCDNYSDIPSQAGKVAIITGGSSGIGLAAARVLCHRGAIVHSLDVNPPNEDVTGLHYQHCDIADWGELRTAFEEIGHVDYVFVNAGISETFDYFADIVDSQGQLAEPSARLIDVNLRATYNIVKLSWSQMRKQPKGPPYSIVITTSASGYAPEQSLPIYSSGKLALVGLIRALRSVIIKDGITINGIAPAATITGLLPAHLAAPIVAQQLPISDAHFVGLALVYSAIATEDAKVQLYGKDKDDAKDQSGRWNGRVILTLGSTYTELEGPTAELRPVWFGKKNDALTRRQQAATDFRDSA

SEQ ID NO: 35142 - DNA, 1524 bp, Muscodor strobelii
  misc_feature: SGI cDNA ID NO. 572159
  misc_feature: Encodes the peptide sequence at SEQ ID NO 35143
atgagaaccgcattagcttggttatgcctcttggcgggatcgtcgcaagctgcgactatcccatactcaggacatggaaatgcttgtcagcagcttgaattccagttcccaaacaagacattcgcccccgaaacgaccaattatacgtctgcctctatggacaacatctggtctatgacttgctaccttgacccgggctgcgtatttatgccaagcactgcaaatgatgtcgccgaagcagtccacattattcaggctactaaatcagtcttcagcgttgtcagcggcggtcacatgcccgtaccgggagcacagtcaaacaatggcggagtcctgatcgcgatggccaatatgaatcaactttccctcaacagggatcagtctatcgcttccattggtccgggtaacagatgggtgaatgtatacacatggcttgaaccgtttggtctcgcagtccccggcggccgctacgctaacgtgggggttggtggtattatgctaagcggcggaatcaacttctttggtgaacacaaaggctggagcgtcaacaacatcgccagtatgcaagtagtcctgggagatgggaaaattatcgaagtcaaccaacactcccatgccgacctattctgggccatgaagggaggtggcaacaactatggtatcgtcacgcgatatgacatgcgcacattccccatcacggatgcttatggtggtattctcgtatggcagggcgaagacaaggtccatgagctagccgaagcttccgacgcctttctccagtccccagacgtttctctcaaggtcgacacacatattaatccaagttatacaatcacccgggcagataacggcacattcttctggcgcggcgtctttgtcaccctggtcaatggaacttttgatggagagccgtcaaccctgactaatttcactgccatctcagatgttggagccggctctctccaacaagaggatagctgggtcgacgttgtgagagatgtccagagcctgaacaccatcgatgccaacggccaaggccaacttttcggttgtcttgcgtctccgtatgcccccggaatcaccgagcttatgatcgacgcagtgctcaagccggcgatcgaggcgttggcggatgttgcgggattgttcgttgcagtgagcccagaaccagttggccagcattggcttcaagctgcccaggactctggcccgtatgcgattgacctcgaccctacggaggggcttatcgtgcaacttattactttcacatggaccaatgccgccgatgaccagaaaatcttcgacttcgcgaatgcctcgctacaaaagatgcgagatgttctcgaggcgaatgatgttttccgtcccttcatttatatgggtgacgctgctcctggccagaatgtgtttgcatcgtacggaaggggtaacggtcagaacgttccccgcatgagaaagatccaatccaagtacgaccctgtccgagtcttcaagaatcagatcacgagtggatttaagctataa

SEQ ID NO: 35143 - protein, 507 aa, Muscodor strobelii
  misc_feature: SGI Peptide ID NO. 572159
  misc_feature (65)..(201): Pfam Id: PF01565 Pfam Desc: FAD binding domain
  misc_feature (8)..(507): NCBI GI: 259485759 Blast Desc: TPA: FAD-binding oxidoreductase, (AFU_orthologue; AFUA_3G03300) [Aspergillus nidulans FGSC A4]
  misc_feature (27)..(507): NCBI GI: 121712465 Blast Desc: FAD binding domain protein [Aspergillus clavatus NRRL 1] gi|119401996|gb|EAW12418.1| FAD binding domain protein [Aspergillus clavatus NRRL 1]
  misc_feature (8)..(494): NCBI GI: 67525633 Blast Desc: AN3274.2 [Aspergillus nidulans FGSC A4] gi|40744062|gb|EAA63242.1| AN3274.2 [Aspergillus nidulans FGSC A4]
  misc_feature (5)..(507): NCBI GI: 67523863 Blast Desc: AN2387.2 [Aspergillus nidulans FGSC A4] gi|40745342|gb|EAA64498.1| AN2387.2 [Aspergillus nidulans FGSC A4] gi|259487790|tpe|CBF86739.1| TPA: conserved [Aspergillus FGSC
  misc_feature (27)..(507): NCBI GI: 240280219 Blast Desc: FAD binding protein [Ajellomyces capsulatus H143]
  misc_feature (27)..(507): NCBI GI: 225557314 Blast Desc: FAD binding domain-containing protein [Ajellomyces capsulatus G186AR]
  misc_feature (29)..(507): NCBI GI: 154296896 Blast Desc: BC1G_12537 [Botryotinia fuckeliana B05.10] gi|150843191|gb|EDN18384.1| BC1G_12537 [Botryotinia fuckeliana B05.10]
  misc_feature (27)..(507): NCBI GI: 154277320 Blast Desc: [Ajellomyces capsulatus NAm1] gi|150413086|gb|EDN08469.1| [Ajellomyces capsulatus NAm1]
  misc_feature (1)..(507): NCBI GI: 255954763 Blast Desc: Pc21g11020 [Penicillium chrysogenum Wisconsin 54-1255] gi|211589845|emb|CAP95999.1| Pc21g11020 [Penicillium chrysogenum Wisconsin 54-1255]
  misc_feature (23)..(507): NCBI GI: 189210808 Blast Desc: FAD binding domain containing protein [Pyrenophora tritici-repentis Pt-1C-BFP] gi|187977828|gb|EDU44454.1| FAD binding domain containing protein [Pyrenophora tritici-repentis
MRTALAWLCLLAGSSQAATIPYSGHGNACQQLEFQFPNKTFAPETTNYTSASMDNIWSMTCYLDPGCVFMPSTANDVAEAVHIIQATKSVFSVVSGGHMPVPGAQSNNGGVLIAMANMNQLSLNRDQSIASIGPGNRWVNVYTWLEPFGLAVPGGRYANVGVGGIMLSGGINFFGEHKGWSVNNIASMQVVLGDGKIIEVNQHSHADLFWAMKGGGNNYGIVTRYDMRTFPITDAYGGILVWQGEDKVHELAEASDAFLQSPDVSLKVDTHINPSYTITRADNGTFFWRGVFVTLVNGTFDGEPSTLTNFTAISDVGAGSLQQEDSWVDVVRDVQSLNTIDANGQGQLFGCLASPYAPGITELMIDAVLKPAIEALADVAGLFVAVSPEPVGQHWLQAAQDSGPYAIDLDPTEGLIVQLITFTWTNAADDQKIFDFANASLQKMRDVLEANDVFRPFIYMGDAAPGQNVFASYGRGNGQNVPRMRKIQSKYDPVRVFKNQITSGFKL

SEQ ID NO: 35144 - DNA, 206 bp, Muscodor strobelii
  misc_feature: SGI EST ID NO. CUFF.83627.0
  misc_feature: Variant of the nucleotide sequence at SEQ ID NO 35142
caccgagcttatgatcgacgcagtgctcaagccggcgatcgaggcgttggcggatgttgcgggattgttcgttgcagtgagcccagaaccagttggccagcattggcttcaagctgcccaggactctggcccgtatgcgattgacctcgaccctacggaggggcttatcgtgcaacttattactttcacatggaccaatgccgccg

SEQ ID NO: 35145 - DNA, 1290 bp, Muscodor strobelii
  misc_feature: SGI cDNA ID NO. 572160
  misc_feature: Encodes the peptide sequence at SEQ ID NO 35146
atgattattgactctagaggcttagggcccgtctttcgtgtctcgccaaatgagctctcgttcgcttcaccaacttcatggaaagcaatttatggctacccatctccagggttggagcaactcatcaagggcgagttctacgacatcttcggtggcgcatacaagacagggtgcattggctcggagcgcaacccagccatacatgcgaaaaagaagaagaatctgatagccgcctttgcgccaaaggctttagctgctcaggaaccaattgtacaggcctgcttagaccagttcgtagggaagctagggcccctaagcaagcacagccaaggacagggagtcgacgtcgtacagtggctagagatggtttcctttgacatacttggtgagatggcattcggtgaggggttcgattgtatcaacacgagtcaccatcacagttggatggatcttatcttgaaacacctattcgaagtcacactagttgacaacctacgacgcatccggctgctcgcggctctagggaagtggcttttgccgtctgtcacctcatcagtaagagagaaacactccatgtacagccgcgaaaaggtgcagaagcgccttacagccgaaacgcctcgtcaggacttcctgacgcacattgtcaacaaggtgcggaatggcgaagtacaagaagaggaaatggtggcacatgcttcaactcttatcattgccggtggcgaaacaacaggaacttgtctcgcagctgcggtgtactacctactgaaaacaccagaagctctcgaaaagctgactgctgaaattcgcgctcgttattcctcatatgaagagatcgacgccacctcagcaacacaactgccctatctccaagctgttattaatgagtcgttgcgaattcacccacccgggtcgcaaggattcccacgcgtgtcaccggggtgcgaaatcgacggcttttgggttcccaaagggactgaggtatatacgagtgcatgggcggttactcatgatccgaagaatttccacgagccaatgaagttcataccagagcggtggctggatccgcaaagtggcgacacaaaagatgccagccaaccattttcgcttggctatcgagcttgtataggcagaaacttcgcgtttatggaaatgacgtcgtgtgtcgccaaaatgttatatcggtacaatctcaaactggtagatgtggatctggactgggaggcggcttctcggtgctatgttatgtggtggaaggcaccggtacatgtcttgtttgtagagcgttaa

SEQ ID NO: 35146 - protein, 429 aa, Muscodor strobelii
  misc_feature: SGI Peptide ID NO. 572160
  misc_feature (5)..(426): Pfam Id: PF00067 Pfam Desc: Cytochrome P450
  misc_feature (73)..(400): Pfam Id: PF00067 Pfam Desc: Cytochrome P450
  misc_feature (9)..(426): NCBI GI: 255931847 Blast Desc: Pc12g06380 [Penicillium chrysogenum Wisconsin 54-1255] gi|211582099|emb|CAP80265.1| Pc12g06380 [Penicillium chrysogenum Wisconsin 54-1255]
  misc_feature (6)..(426): NCBI GI: 259485752 Blast Desc: TPA: cytochrome P450, (Eurofung) [Aspergillus nidulans FGSC A4]
  misc_feature (8)..(427): NCBI GI: 238492291 Blast Desc: cytochrome P450, [Aspergillus flavus NRRL3357] gi|220695876|gb|EED52218.1| cytochrome P450, [Aspergillus flavus NRRL3357]
  misc_feature (6)..(426): NCBI GI: 121712479 Blast Desc: benzoate 4-monooxygenase cytochrome P450 [Aspergillus clavatus NRRL 1] gi|119402003|gb|EAW12425.1| benzoate 4-monooxygenase cytochrome P450 [Aspergillus clavatus NRRL 1]
  misc_feature (6)..(424): NCBI GI: 67525647 Blast Desc: AN3281.2 [Aspergillus nidulans FGSC A4] gi|40744069|gb|EAA63249.1| AN3281.2 [Aspergillus nidulans FGSC A4]
  misc_feature (8)..(427): NCBI GI: 169782646 Blast Desc: [Aspergillus oryzae RIB40] gi|83774529|dbj|BAE64652.1| protein product [Aspergillus oryzae]
  misc_feature (9)..(424): NCBI GI: 188596513 Blast Desc: BCL4p [Botryotinia fuckeliana]
  misc_feature (9)..(419): NCBI GI: 259485758 Blast Desc: TPA: cytochrome P450, (Eurofung) [Aspergillus nidulans FGSC A4]
  misc_feature (9)..(419): NCBI GI: 121712467 Blast Desc: benzoate 4-monooxygenase cytochrome P450 [Aspergillus clavatus NRRL 1] gi|119401997|gb|EAW12419.1| benzoate 4-monooxygenase cytochrome P450 [Aspergillus clavatus NRRL 1]
  misc_feature (9)..(421): NCBI GI: 255931851 Blast Desc: Pc12g06400 [Penicillium chrysogenum Wisconsin 54-1255] gi|211582101|emb|CAP80267.1| Pc12g06400 [Penicillium chrysogenum Wisconsin 54-1255]
  misc_feature (1)..(400): SWISSPROT Homolog: EC 1.14.13.12 Benzoate 4-monooxygenase
MIIDSRGLGPVFRVSPNELSFASPTSWKAIYGYPSPGLEQLIKGEFYDIFGGAYKTGCIGSERNPAIHAKKKKNLIAAFAPKALAAQEPIVQACLDQFVGKLGPLSKHSQGQGVDVVQWLEMVSFDILGEMAFGEGFDCINTSHHHSWMDLILKHLFEVTLVDNLRRIRLLAALGKWLLPSVTSSVREKHSMYSREKVQKRLTAETPRQDFLTHIVNKVRNGEVQEEEMVAHASTLIIAGGETTGTCLAAAVYYLLKTPEALEKLTAEIRARYSSYEEIDATSATQLPYLQAVINESLRIHPPGSQGFPRVSPGCEIDGFWVPKGTEVYTSAWAVTHDPKNFHEPMKFIPERWLDPQSGDTKDASQPFSLGYRACIGRNFAFMEMTSCVAKMLYRYNLKLVDVDLDWEAASRCYVMWWKAPVHVLFVER

SEQ ID NO: 35147 - DNA, 1734 bp, Muscodor strobelii
  misc_feature: SGI cDNA ID NO. 572161
  misc_feature: Encodes the peptide sequence at SEQ ID NO 35148
atggctttgacatatctatacgtgcccgcggtcttggttttctgccaggtactgtacacgagcttttcatttctgtattatctgagagtagctcggcgctctggactgccatacacatggtcacccatccacgaactccagggtccggcctacctaaccgacgcattcctgcgatggtggtgtcgcgaatatgtcgaacgaggcaatggctggccccgatgggctcggttcatgatcaaagactggcactacgaggaccgacgacgtgcgacacttgaatacggagattgcttcctcgtcgtgacgcccaatggattgatgtgttatatcagcgacgcgaataccgcctctcggctggtaacgagacggaaagcgttcgtcaagccaacagacaagatgaagatcctcgagcccttcggtcccaacgtcgtgacggtcgaaggggatctgtggaaattccatctaggcatcacactaccacccttggcagctgaatcagttgctcgcacagtatggcacgaaacaaatagacaggtcgatatgatggtggcagcatggaaaccagaagacagccacaaagaccgcatatacgctctgactatgaacacgatgtccatggtaggatttggacgccagtcagaatggggagagggcgagcgtcatgacctcatcccaaaaggccatcgatactctctagtcggggccctcacaggtgtcatcatgcacctgccgcacattctactcttgccccgatggctactgcgtcggtcgccatggcccatagccaccgagacgcttgaggaggttgagtcttatatcaatgagcttctggcagaagagcgtaggaagcttgctgtcggaagcaatgaggcttcccgggagacgcttctcactgctctgctccactcgaatctggaagcggacagaaaggttgatccagctgttgggagatctactctaactgatgaggagattcggggtaatgtgttcatcttcctggttgctggatacgacactacagccaatactgtccagtttactagtctcgttttggcattttacaaagatatccaggatcgtttgctcgaagagatcgacacggtctatgcccaagctgaaaaagaaggtcgttccgaactctcgtatgaacaagacttcccccgctttcgctacctcgtcgcattcatgtacgaggtcatgcgtatatttcccatcgtacagactctcgctcgagtttctgtgggcagtcaagctgtgccaatggacggcggttctgctctccttcccgagggaactacactcgtcgtcaacaacactgcgattcattacaaccccgatgtctggcctagcccggatgtcatagaaccacggcgatggctcctcagtgacccgcactcctatgacccttcaaagccattgacagcaacgcaagaagccgagatcataacaggaagcgttgcgatccccggaagccgcaaaggcacattcttgtcgttcggtgaaggcccacgtgcgtgcccggggcggagcttcgctagggttgagttcgtttcgcttatgtctcgcttgctgcgctcgcacagactagagcttgcggatgatgacgcgaatgcggcggctcggaatctaagaatggcgcgtatgagaagtggcggttcgcctattacactcattccacctgaggacattccaattcgtcttgttccaagaaagacatctgctcaaggtagctga

SEQ ID NO: 35148 - protein, 577 aa, Muscodor strobelii
  misc_feature: SGI Peptide ID NO. 572161
  misc_feature (70)..(566): Pfam Id: PF00067 Pfam Desc: Cytochrome P450
  misc_feature (259)..(535): Pfam Id: PF00067 Pfam Desc: Cytochrome P450
  misc_feature (18)..(570): NCBI GI: 67525629 Blast Desc: AN3272.2 [Aspergillus nidulans FGSC A4] gi|40743991|gb|EAA63173.1| AN3272.2 [Aspergillus nidulans FGSC A4] gi|259485762|tpe|CBF83057.1| TPA: cytochrome P450 (Eurofung)
  misc_feature (17)..(576): NCBI GI: 255931841 Blast Desc: Pc12g06350 [Penicillium chrysogenum Wisconsin 54-1255] gi|211582096|emb|CAP80262.1| Pc12g06350 [Penicillium chrysogenum Wisconsin 54-1255]
  misc_feature (18)..(398): NCBI GI: 121712459 Blast Desc: Cytochrome P450 oxidoreductase, [Aspergillus clavatus NRRL 1] gi|119401993|gb|EAW12415.1| Cytochrome P450 oxidoreductase, [Aspergillus clavatus NRRL 1]
  misc_feature (21)..(569): NCBI GI: 46110463 Blast Desc: FG02113.1 [Gibberella zeae PH-1]
  misc_feature (11)..(570): NCBI GI: 256732084 Blast Desc: NECHADRAFT_41367 [Nectria haematococca mpVI 77-13-4]
  misc_feature (24)..(567): NCBI GI: 121709374 Blast Desc: cytochrome P450 monooxygenase, [Aspergillus clavatus NRRL 1] gi|119400551|gb|EAW10976.1| cytochrome P450 monooxygenase, [Aspergillus clavatus NRRL 1]
  misc_feature (6)..(543): NCBI GI: 238485360 Blast Desc: cytochrome P450, [Aspergillus flavus NRRL3357] gi|220698797|gb|EED55136.1| cytochrome P450, [Aspergillus flavus NRRL3357]
  misc_feature (75)..(570): NCBI GI: 156056064 Blast Desc: SS1G_05384 [Sclerotinia sclerotiorum 1980] gi|154703168|gb|EDO02907.1| SS1G_05384 [Sclerotinia sclerotiorum 1980]
  misc_feature (76)..(571): NCBI GI: 154309181 Blast Desc: BC1G_07485 [Botryotinia fuckeliana B05.10] gi|150852528|gb|EDN27720.1| BC1G_07485 [Botryotinia fuckeliana B05.10]
  misc_feature (17)..(530): NCBI GI: 156031110 Blast Desc: SS1G_14163 [Sclerotinia sclerotiorum 1980] gi|154700554|gb|EDO00293.1| SS1G_14163 [Sclerotinia sclerotiorum 1980]
MALTYLYVPAVLVFCQVLYTSFSFLYYLRVARRSGLPYTWSPIHELQGPAYLTDAFLRWWCREYVERGNGWPRWARFMIKDWHYEDRRRATLEYGDCFLVVTPNGLMCYISDANTASRLVTRRKAFVKPTDKMKILEPFGPNVVTVEGDLWKFHLGITLPPLAAESVARTVWHETNRQVDMMVAAWKPEDSHKDRIYALTMNTMSMVGFGRQSEWGEGERHDLIPKGHRYSLVGALTGVIMHLPHILLLPRWLLRRSPWPIATETLEEVESYINELLAEERRKLAVGSNEASRETLLTALLHSNLEADRKVDPAVGRSTLTDEEIRGNVFIFLVAGYDTTANTVQFTSLVLAFYKDIQDRLLEEIDTVYAQAEKEGRSELSYEQDFPRFRYLVAFMYEVMRIFPIVQTLARVSVGSQAVPMDGGSALLPEGTTLVVNNTAIHYNPDVWPSPDVIEPRRWLLSDPHSYDPSKPLTATQEAEIITGSVAIPGSRKGTFLSFGEGPRACPGRSFARVEFVSLMSRLLRSHRLELADDDANAAARNLRMARMRSGGSPITLIPPEDIPIRLVPRKTSAQGS

SEQ ID NO: 35149 - DNA, 915 bp, Muscodor strobelii
  misc_feature: SGI cDNA ID NO. 572162
  misc_feature: Elevated expression when VOC is produced
  misc_feature: Encodes the peptide sequence at SEQ ID NO 35150
atgtctaacatcaagttcgacaaatccagcattcccgacctttctggtcgagtattgttagtgacaggaggtacgggaggcattggtgccgagatcatcgtggaactatcgcgacatcatcctagccatatctacttcaccgggcgcaatgcgaaatcggccgataagaccatacaacgcgtcaaagccattgattctacagtccaagccactttcctagcctgtgacctcgcggacctctctactgtccgggaggcggccaataaggttctagccagtagcgaccgtctcgacatgcttcttgccaatgctggcatcatggctcaacctgctggcctgtctgcagatggctacgagatacattttgctaccaatcacatggggcatgcgttgttgacccaaaagcttcttcctttgctcgaaaagaccgctgatctacctcattcagatgtgcgtctcatttacacgacaagtctgggatggaagaacggcacgctcgacttcaagcgcttagacactccccaggaatccgccatcatgggacgctggatacgctatggtaatagcaagctggcaaatatgctgtatgcacgtgaagtatctcgtcggcacccgaagatattgactttcagtgttcatcctggcgctgttacgactggcctaatcaacgatctcaagtttaccgaccgcgtgtttgtgcatctctccatgctagggaagatgattacccctgaacagggtaccttcaatcatctttgggctgtctctgctcctcgggaagccgtcaaaccaggcgggttttacgagcccgttggggtgttctcttcagaggacggggcgatcacaaaggataagaagtttagtgcacagctctgggaatacaccgagaaggaactcgagccatggatgaaataa

SEQ ID NO: 35150 - protein, 304 aa, Muscodor strobelii
  misc_feature: SGI Peptide ID NO. 572162
  misc_feature (17)..(152): Pfam Id: PF00106 Pfam Desc: short chain dehydrogenase
  misc_feature (17)..(142): Pfam Id: PF00106 Pfam Desc: short chain dehydrogenase
  misc_feature (20)..(98): Pfam Id: PF08659 Pfam Desc: KR domain
  misc_feature (19)..(44): Pfam Id: PF02719 Pfam Desc: Polysaccharide biosynthesis protein
  misc_feature (2)..(304): NCBI GI: 159128997 Blast Desc: oxidoreductase, short-chain dehydrogenase/reductase family [Aspergillus fumigatus A1163]
  misc_feature (2)..(303): NCBI GI: 119480111 Blast Desc: oxidoreductase, short-chain dehydrogenase/reductase family [Neosartorya fischeri NRRL 181] gi|119408238|gb|EAW18187.1| oxidoreductase, short-chain family
  misc_feature (11)..(304): NCBI GI: 70989477 Blast Desc: oxidoreductase, short-chain dehydrogenase/reductase family [Aspergillus fumigatus Af293] gi|66847219|gb|EAL87550.1| oxidoreductase, short-chain dehydrogenase/reductase family Af293]
  misc_feature (1)..(303): NCBI GI: 238839616 Blast Desc: oxidoreductase [Microsporum canis CBS 113480]
  misc_feature (1)..(303): NCBI GI: 238508114 Blast Desc: oxidoreductase, short-chain dehydrogenase/reductase family [Aspergillus flavus NRRL3357] gi|220688777|gb|EED45129.1| oxidoreductase, short-chain dehydrogenase/reductase family flavus
  misc_feature (1)..(303): NCBI GI: 169784686 Blast Desc: [Aspergillus oryzae RIB40] gi|83775551|dbj|BAE65671.1| protein product [Aspergillus oryzae]
  misc_feature (11)..(299): NCBI GI: 154322292 Blast Desc: BC1G_01293 [Botryotinia fuckeliana B05.10] gi|150850540|gb|EDN25733.1| BC1G_01293 [Botryotinia fuckeliana B05.10]
  misc_feature (8)..(299): NCBI GI: 255950242 Blast Desc: Pc22g19860 [Penicillium chrysogenum Wisconsin 54-1255] gi|211592905|emb|CAP99274.1| Pc22g19860 [Penicillium chrysogenum Wisconsin 54-1255]
  misc_feature (2)..(299): NCBI GI: 256724429 Blast Desc: NECHADRAFT_54708 [Nectria haematococca mpVI 77-13-4]
  misc_feature (1)..(257): NCBI GI: 67524711 Blast Desc: AN2813.2 [Aspergillus nidulans FGSC A4] gi|40743732|gb|EAA62919.1| AN2813.2 [Aspergillus nidulans FGSC A4] gi|259486262|tpe|CBF83961.1| TPA: oxidoreductase, short-chain
  misc_feature (43)..(224): SWISSPROT Homolog: EC 1.3.1.33 Protochlorophyllide reductase
  misc_feature: Useful for introducing or modulating the production of volatile compounds
MSNIKFDKSSIPDLSGRVLLVTGGTGGIGAEIIVELSRHHPSHIYFTGRNAKSADKTIQRVKAIDSTVQATFLACDLADLSTVREAANKVLASSDRLDMLLANAGIMAQPAGLSADGYEIHFATNHMGHALLTQKLLPLLEKTADLPHSDVRLIYTTSLGWKNGTLDFKRLDTPQESAIMGRWIRYGNSKLANMLYAREVSRRHPKILTFSVHPGAVTTGLINDLKFTDRVFVHLSMLGKMITPEQGTFNHLWAVSAPREAVKPGGFYEPVGVFSSEDGAITKDKKFSAQLWEYTEKELEPWMK

SEQ ID NO: 35151 - DNA, 1399 bp, Muscodor strobelii
  misc_feature: SGI EST ID NO. CUFF.83643.0
  misc_feature: Variant of the nucleotide sequence at SEQ ID NO 35149
cacaaatcaaaaagttacaatcttgatcgttgatttccctaccgtcgactctatcatcaaacgtcctgaacaagaagatgtctaacatcaagttcgacaaatccagcattcccgacctttctggtcgagtattgttagtgacaggaggtacgggaggcattggtgccgagatcatcgtggaactatcgcgacatcatcctagccatatctacttcaccgggcgcaatgcgaaatcggccgataagaccatacaacgcgtcaaagccattgattctacagtccaagccactttcctagcctgtgacctcgcggacctctctactgtccgggaggcggccaataaggttctagccagtagcgaccgtctcgacatgcttcttgccaatgctggcatcatggctcaacctgctggcctgtctgcagatggctacgagatacattttgctaccaatcacatggggcatgcgttgttgacccaaaagcttcttcctttgctcgaaaagaccgctgatctacctcattcagatgtgcgtctcatttacacgacaagtctgggatggaagaacggcacgctcgacttcaagcgcttagacactccccaggaatccgccatcatgggacgctggatacgctatggtaatagcaagctggcaaatatgctgtatgcacgtgaagtatctcgtcggcacccgaagatattgactttcagtgttcatcctggcgctgttacgactggcctaatcaacgatctcaagtttaccgaccgcgtgtttgtgcatctctccatgctagggaagatgattacccctgaacagggtaccttcaatcatctttgggctgtctctgctcctcgggaagccgtcaaaccaggcgggttttacgagcccgttggggtgttctcttcagaggacggggcgatcacaaaggataagaagtttagtgcacagctctgggaatacaccgagaaggaactcgagccatggatgaaataaagagggcttcactaatcgacacttgagatgatattcaaaaagcgtttgcgtcaagagacacgtgaatagtattgatgttcaatgtagagaggatgtgagttgggtgaagcatggtgataggtggcaaacggtctattgaaggcatcgtcgatatggttgaacatgcgcacgagctaaagcagaactgacaaaacaacacgcgcgagaatcaaaaatcaaagatgtgaatgaaagctacgcgtacttcttatcggcgggattggcgaaatgtgagctcacgacgaaagactattgaaggctatcaatttgaattatctccaagcaatttgcttgttttcaacgatacgtagaccaatcgccgtactctaggtaatagatagctagctacgctcaaaaatggaatgata

SEQ ID NO: 35152 - DNA, 1443 bp, Muscodor strobelii
  misc_feature: SGI cDNA ID NO. 572163
  misc_feature: Encodes the peptide sequence at SEQ ID NO 35153
atggaaagccacggtaaaaagattgtggcactgagccctttggacaaccgcatggtgccctgttgggtgaaactgctgttttattttccaacgccatctaacaccagcatacatgacaccttcgagattctgcgtaaaggtcttaacatcgccatcgctgaaagacccatctgcggtgccgtgacatatcctcgacctgacactcgacccggatggaaaccaggacagatcgaggtccatatacctgacaatgtcggccgggatggggcataccccttagacttcaaagacctaaccagctcagtctcatacaatgaactgcgagctagaggcttccccatggacgaggttgacacaaaggtgctgatgaccaagtcctgcaacgtcgacttggtgagcggcatccagacaaccgccgcgcaggccaattttgtcgagggcggttgtctcctcgggttggctatgtggcaccacacaattgatccccacggcgtttatgtcttcgctcgcagctgggcttctcattgcaagaagctgcaaactgaatctgactgggaactaaagtgggaagaatgcgtagcgactgaagcagccatgccgagtgacgatcgtcaagttctcgagaggatgtggcgtcaatctggcggctccgaggcaagcgtcgcttcggagaaacaatgggctacactcggcctttatccaccaacctccaaggcgctgaagcttgatgagatcatgatgcaggccatgagcaacgtcgatcctacgaagaaagtaacttgccaggttttttcggtcccaaaatcatcactcgagctcctccagaaggacgcaataggatcggataagagcggtactaccgtcaacgatgccatccatgccctgttgtggagatgcatcatgaaagcgagatatccagagcccgggcaacagatctcagagtaccaggtcgcctttgacgggcggcggaaacttgaagaccccaagatggactcttatctaggggatgtctcgtatttcgcagctacgcacatgcccctcgcccaggtgctagatccatcaactactctcagtcagatctcaaaggcactccaccaaacgatgagttccatatcacgggaagacttgctcgccggatatggtattgcacataatctctccggttatgtgaatctgaagtacaatctagcgggcatggcggacgctaccatggtcatggtcgaccatcgacatataccgctcccggagcttgatttcgggcccgcgcttggcagcccggattgtgagcgtcctccaggagaagagtggaacgatcttttcagacgtatcattatcatgcccgacgcatcaggcgaagggcttgagttcttggtcactctttttgatttcgaactagaacggttgagaaaagaccctgagttcattcgctatgcgaagtcataa

SEQ ID NO: 35153 - protein, 480 aa, Muscodor strobelii
  misc_feature: SGI Peptide ID NO. 572163
  misc_feature (2)..(475): Pfam Id: PF02458 Pfam Desc: Transferase family
  misc_feature (9)..(478): NCBI GI: 255953395 Blast Desc: Pc21g04020 [Penicillium chrysogenum Wisconsin 54-1255] gi|211589161|emb|CAP95299.1| Pc21g04020 [Penicillium chrysogenum Wisconsin 54-1255]
  misc_feature (9)..(478): NCBI GI: 212536901 Blast Desc: conserved [Penicillium marneffei ATCC 18224] gi|210068348|gb|EEA22439.1| conserved [Penicillium marneffei ATCC 18224]
  misc_feature (2)..(478): NCBI GI: 39972803 Blast Desc: MGG_11099 [Magnaporthe grisea 70-15] gi|145012816|gb|EDJ97457.1| MGG_11099 [Magnaporthe grisea 70-15]
  misc_feature (9)..(478): NCBI GI: 121711952 Blast Desc: transferase family protein [Aspergillus clavatus NRRL 1] gi|119401743|gb|EAW12165.1| transferase family protein [Aspergillus clavatus NRRL 1]
  misc_feature (9)..(478): NCBI GI: 238845010 Blast Desc: transferase family protein [Microsporum canis CBS 113480]
  misc_feature (11)..(477): NCBI GI: 121712473 Blast Desc: transferase family protein [Aspergillus clavatus NRRL 1] gi|119402000|gb|EAW12422.1| transferase family protein [Aspergillus clavatus NRRL 1]
  misc_feature (25)..(479): NCBI GI: 238846197 Blast Desc: transferase family protein [Microsporum canis CBS 113480]
  misc_feature (25)..(479): NCBI GI: 70999065 Blast Desc: transferase family protein [Aspergillus fumigatus Af293] gi|66851891|gb|EAL92216.1| transferase family protein [Aspergillus fumigatus Af293]
  misc_feature (25)..(479): NCBI GI: 159127271 Blast Desc: transferase family protein [Aspergillus fumigatus A1163]
  misc_feature (25)..(478): NCBI GI: 119490811 Blast Desc: transferase family protein [Neosartorya fischeri NRRL 181] gi|119411262|gb|EAW21205.1| transferase family protein [Neosartorya fischeri NRRL 181]
MESHGKKIVALSPLDNRMVPCWVKLLFYFPTPSNTSIHDTFEILRKGLNIAIAERPICGAVTYPRPDTRPGWKPGQIEVHIPDNVGRDGAYPLDFKDLTSSVSYNELRARGFPMDEVDTKVLMTKSCNVDLVSGIQTTAAQANFVEGGCLLGLAMWHHTIDPHGVYVFARSWASHCKKLQTESDWELKWEECVATEAAMPSDDRQVLERMWRQSGGSEASVASEKQWATLGLYPPTSKALKLDEIMMQAMSNVDPTKKVTCQVFSVPKSSLELLQKDAIGSDKSGTTVNDAIHALLWRCIMKARYPEPGQQISEYQVAFDGRRKLEDPKMDSYLGDVSYFAATHMPLAQVLDPSTTLSQISKALHQTMSSISREDLLAGYGIAHNLSGYVNLKYNLAGMADATMVMVDHRHIPLPELDFGPALGSPDCERPPGEEWNDLFRRIIIMPDASGEGLEFLVTLFDFELERLRKDPEFIRYAKS

SEQ ID NO: 35154 - DNA, 479 bp, Muscodor strobelii
  misc_feature: SGI EST ID NO. CUFF.83648.0
  misc_feature: Variant of the nucleotide sequence at SEQ ID NO 35152
gcggctccgaggcaagcgtcgcttcggagaaacaatgggctacactcggcctttatccaccaacctccaaggcgctgaagcttgatgagatcatgatgcaggccatgagcaacgtcgatcctacgaagaaagtaacttgccaggttttttcggtcccaaaatcatcactcgagctcctccagaaggacgcaataggatcggataagagcggtactaccgtcaacgatgccatccatgccctgttgtggagatgcatcatgaaagcgagatatccagagcccgggcaacagatctcagagtaccaggtcgcctttgacgggcggcggaaacttgaagaccccaagatggactcttatctaggggatgtctcgtatttcgcagctacgcacatgcccctcgcccaggtgctagatccatcaactactctcagtcagatctcaaaggcactccaccaaacgatgagttccatatcacgggaa

SEQ ID NO: 35155 - DNA, 234 bp, Muscodor strobelii
  misc_feature: SGI cDNA ID NO. 572164
  misc_feature: Encodes the peptide sequence at SEQ ID NO 35156
atggtcatggtcgaccatcgacatataccgctcccggagcttgatttcgggcccgcgcttggcagcccggattgtgagcgtcctccaggagaagagtggaacgatcttttcagacgtatcattatcatgcccgacgcatcaggcgaagggcttgagttcttggtcactctttttgatttcgaactagaacggttgagaaaagaccctgagttcattcgctatgcgaagtcataa

SEQ ID NO: 35156 - protein, 77 aa, Muscodor strobelii
  misc_feature: SGI Peptide ID NO. 572164
  misc_feature (9)..(75): NCBI GI: 39972803 Blast Desc: MGG_11099 [Magnaporthe grisea 70-15] gi|145012816|gb|EDJ97457.1| MGG_11099 [Magnaporthe grisea 70-15]
MVMVDHRHIPLPELDFGPALGSPDCERPPGEEWNDLFRRIIIMPDASGEGLEFLVTLFDFELERLRKDPEFIRYAKS

SEQ ID NO: 35157 - DNA, 438 bp, Muscodor strobelii
  misc_feature: SGI EST ID NO. CUFF.83651.0
  misc_feature: Variant of the nucleotide sequence at SEQ ID NO 35155
tataccgctcccggagcttgatttcgggcccgcgcttggcagcccggattgtgagcgtcctccaggagaagagtggaacgatcttttcagacgtatcattatcatgcccgacgcatcaggcgaagggcttgagttcttggtcactctttttgatttcgaactagaacggttgagaaaagaccctgagttcattcgctatgcgaagtcataagatcacaaacaggaattcatcttgcaggttatattatactagagttataatagacggtttgctggtgcgacaagcctgtcgctggggccccggtttgtgaagtacaccggtagcttggatagtcgaaagtgaaatgttttaaatcaaagcgttgaaaaaacctagtaaaagacttagttcatctatacactttcaaagatatagaataaaaatgctgaaagcccgcg

SEQ ID NO: 35158 - DNA, 1452 bp, Muscodor strobelii
  misc_feature: SGI cDNA ID NO. 572165
  misc_feature: Encodes the peptide sequence at SEQ ID NO 35159
atggcagaaaccacgccgcctatcaaactaagcgccatggataatataatgccacgattcttcgcgagtctcatattcacattccggctgaaggacggagtaacatacggtgaagcgcttgatgccctacagaccagcattcgaaatgcaagcaaggaactccctctcatcacacgccgcgctttcgccatcccaccatcccccgacagacccgtaccaggtcgtttagaagctcgagagaacacagaatgggtaccagaagtggaaacgaacgatttgtccaccgagtggccagattacgatgaactggtcggcgcaggtctcgagcaggacatgatggatggcaagttgatattaccagaggctcgcacacacatcgatctaaaagccggaacacctctcctcattgcgagagcgacttacgtggaggatggcttgctattgggcgtatcgatgttccacccgctcgtcgatggatctagtgctgtgctcattctccgcacatgggcaaaacacatcagaatgctacagggcgaggtgccggcctcgctcaatatccccgccgagtgttgcgactatcaggtggtggaggaggcatggaaagcagctggcgcgccggtggctgatgatactgccgatagttggcggctgctcgggttgctgccccctgcatcgggagaactaccgaagacatcaccaccgcccatgataacaaccatcttctacgtatctgctcaagggttctcaaaactcgcagctattgctgcagaggctagtagcacgaactttgacagcgaaacaggcggctcggccaccgccaacgacgcactcatggctctgctctggcggtgcatcatgcgcgctcgccaagcagcctcgccagagtcaccagcatacagtacgccagatgctttcgctgaactagacactacactagatgggcgaggaccgcttagtgccagtttgccaagtcaatacatgggcacgctggtatacatagtaactacgaagctcccattcgccgaactcgtggctaagtcaacatcccttgcttcagttgtgcgaaaaatcagaagcagcgtcgcgcgcatgacgagtcatcgattttacgccgcttacggcctcgccgcaacgcggttgtcgggttacacggccgaaacgcttcgttggccgtttgcaacttttgatggagcggagtcttgtttcagtagctggttgacgctgcctattatggatatggcttttggtggaggtctatttgcgaacaatggcattcctgactatgtccgccccgagaggagactcttggatcctatctgccggaattgcaatatcttgcctatgcggcttgagggtggtgctgaggtcttggtgtctttgacggttgatgagatgcctttccttgagaacgaccctgagtttgcagagtttgcgcaggttctctgccactga

SEQ ID NO: 35159 - protein, 483 aa, Muscodor strobelii
  misc_feature: SGI Peptide ID NO. 572165
  misc_feature (2)..(475): Pfam Id: PF02458 Pfam Desc: Transferase family
  misc_feature (8)..(483): NCBI GI: 39972803 Blast Desc: MGG_11099 [Magnaporthe grisea 70-15] gi|145012816|gb|EDJ97457.1| MGG_11099 [Magnaporthe grisea 70-15]
  misc_feature (1)..(481): NCBI GI: 255953395 Blast Desc: Pc21g04020 [Penicillium chrysogenum Wisconsin 54-1255] gi|211589161|emb|CAP95299.1| Pc21g04020 [Penicillium chrysogenum Wisconsin 54-1255]
  misc_feature (8)..(481): NCBI GI: 212536901 Blast Desc: conserved [Penicillium marneffei ATCC 18224] gi|210068348|gb|EEA22439.1| conserved [Penicillium marneffei ATCC 18224]
  misc_feature (8)..(481): NCBI GI: 238846197 Blast Desc: transferase family protein [Microsporum canis CBS 113480]
  misc_feature (8)..(481): NCBI GI: 70999065 Blast Desc: transferase family protein [Aspergillus fumigatus Af293] gi|66851891|gb|EAL92216.1| transferase family protein [Aspergillus fumigatus Af293]
  misc_feature (8)..(481): NCBI GI: 159127271 Blast Desc: transferase family protein [Aspergillus fumigatus A1163]
  misc_feature (8)..(481): NCBI GI: 242798886 Blast Desc: transferase family protein [Talaromyces stipitatus ATCC 10500] gi|218716605|gb|EED16026.1| transferase family protein [Talaromyces stipitatus ATCC 10500]
  misc_feature (9)..(476): NCBI GI: 46115788 Blast Desc: FG03736.1 [Gibberella zeae PH-1]
  misc_feature (8)..(481): NCBI GI: 119490811 Blast Desc: transferase family protein [Neosartorya fischeri NRRL 181] gi|119411262|gb|EAW21205.1| transferase family protein [Neosartorya fischeri NRRL 181]
  misc_feature (5)..(478): NCBI GI: 238845010 Blast Desc: transferase family protein [Microsporum canis CBS 113480]
MAETTPPIKLSAMDNIMPRFFASLIFTFRLKDGVTYGEALDALQTSIRNASKELPLITRRAFAIPPSPDRPVPGRLEARENTEWVPEVETNDLSTEWPDYDELVGAGLEQDMMDGKLILPEARTHIDLKAGTPLLIARATYVEDGLLLGVSMFHPLVDGSSAVLILRTWAKHIRMLQGEVPASLNIPAECCDYQVVEEAWKAAGAPVADDTADSWRLLGLLPPASGELPKTSPPPMITTIFYVSAQGFSKLAAIAAEASSTNFDSETGGSATANDALMALLWRCIMRARQAASPESPAYSTPDAFAELDTTLDGRGPLSASLPSQYMGTLVYIVTTKLPFAELVAKSTSLASVVRKIRSSVARMTSHRFYAAYGLAATRLSGYTAETLRWPFATFDGAESCFSSWLTLPIMDMAFGGGLFANNGIPDYVRPERRLLDPICRNCNILPMRLEGGAEVLVSLTVDEMPFLENDPEFAEFAQVLCH

SEQ ID NO: 35160 - DNA, 260 bp, Muscodor strobelii
  misc_feature: SGI EST ID NO. CUFF.83654.0
  misc_feature: Variant of the nucleotide sequence at SEQ ID NO 35158
atggatggcaagttgatattaccagaggctcgcacacacatcgatctaaaagccggaacacctctcctcattgcgagagcgacttacgtggaggatggcttgctattgggcgtatcgatgttccacccgctcgtcgatggatctagtgctgtgctcattctccgcacatgggcaaaacacatcagaatgctacagggcgaggtgccggcctcgctcaatatccccgccgagtgttgcgactatcaggtggtggaggaggc

SEQ ID NO: 35161 - DNA, 912 bp, Muscodor strobelii
  misc_feature: SGI cDNA ID NO. 572166
  misc_feature: Encodes the peptide sequence at SEQ ID NO 35162
atgtcgaaagattccatgcccaagaaggtcctcgtatgcggtgcaacggggaatcaaggctcaggagtagtaagacattgtctaaacgccggacacaatgtcttcgcacttgtccgcgactcatcatcagcacaagcacttagcctaaagaatggcggagtcgcccttgtggaaggggactttgacgacgtcgagtctctcaaccgagccatggcaaatatggatgctgttttcttcacctctgccttcagacaagggtcggaggcagatatgcgccatgcaaccaacataatatcggcggccaaggggtcaggtaccgtctcgactatcatctacacaagcgcggcgagcttggaccgtattatggctcatcctatgttcacacccgattactcggagtacgagtactggaataccaaacaccagatagaaagacaagttcgcgactccggtattgcgcattgggccatagtgcgcccagcttggttcattcagaacttcgctcctcccatctcgactgtggtctttccaggattggcagacaaaggcctgttgcctgttgcatggcagtctggaaagaaggtagagatggtggatgggggcgatgtgggagtagtcgctgctgctgttgttgcgagtccggaagcatacagcggacaggtcattgagcttgcggctgaggccctgacaatcaatgaggttgctgatcgtttgagcaaagcttctgcctcacaagtcaaagttgcatacatgtcaccagccaagctggcttcaacgttaggtctgtacggggaacacactgctgcgcatcaggcaatgcataacgaattgggaccattcatgaacatcgatgagctaaacgcgaggttcgagctcactaagctcgaagagttcttgagcgagcatagatag

SEQ ID NO: 35162 - protein, 303 aa, Muscodor strobelii
  misc_feature: SGI Peptide ID NO. 572166
  misc_feature (10)..(225): Pfam Id: PF01370 Pfam Desc: NAD dependent epimerase/dehydratase family
  misc_feature (10)..(252): Pfam Id: PF05368 Pfam Desc: NmrA-like family
  misc_feature (10)..(78): Pfam Id: PF01370 Pfam Desc: NAD dependent epimerase/dehydratase family
  misc_feature (10)..(241): Pfam Id: PF05368 Pfam Desc: NmrA-like family
  misc_feature (7)..(251): NCBI GI: 145252048 Blast Desc: An16g02240 [Aspergillus niger] gi|134083080|emb|CAL00448.1| protein product [Aspergillus niger]
  misc_feature (6)..(303): NCBI GI: 169775371 Blast Desc: [Aspergillus oryzae RIB40] gi|83770016|dbj|BAE60151.1| protein product [Aspergillus oryzae]
  misc_feature (6)..(299): NCBI GI: 238495981 Blast Desc: NAD dependent epimerase/dehydratase, [Aspergillus flavus NRRL3357] gi|220694106|gb|EED50450.1| NAD dependent epimerase/dehydratase, [Aspergillus flavus NRRL3357]
  misc_feature (6)..(251): NCBI GI: 169596883 Blast Desc: SNOG_01211 [Phaeosphaeria nodorum SN15] gi|111069740|gb|EAT90860.1| SNOG_01211 [Phaeosphaeria nodorum SN15]
  misc_feature (8)..(303): NCBI GI: 39970787 Blast Desc: MGG_02860 [Magnaporthe grisea 70-15] gi|149210281|ref|XP_001522515.1| MGCH7_ch7g618 [Magnaporthe grisea 70-15] gi|86196573|gb|EAQ71211.1| MGCH7_ch7g618 grisea
  misc_feature (4)..(303): NCBI GI: 251789882 Blast Desc: NmrA family protein [Dickeya zeae Ech1591] gi|247538503|gb|ACT07124.1| NmrA family protein [Dickeya zeae Ech1591]
  misc_feature (11)..(303): NCBI GI: 169763854 Blast Desc: [Aspergillus oryzae RIB40] gi|238489829|ref|XP_002376152.1| NAD dependent epimerase/dehydratase, [Aspergillus flavus NRRL3357] protein NAD
  misc_feature (9)..(303): NCBI GI: 242811463 Blast Desc: NAD dependent epimerase/dehydratase, [Talaromyces stipitatus ATCC 10500] gi|218714093|gb|EED13516.1| NAD dependent epimerase/dehydratase, [Talaromyces stipitatus ATCC 10500]
  misc_feature (10)..(303): NCBI GI: 209515514 Blast Desc: NmrA family protein [Burkholderia sp. H160] gi|209503981|gb|EEA03972.1| NmrA family protein [Burkholderia sp. H160]
  misc_feature (10)..(256): NCBI GI: 67522725 Blast Desc: AN1819.2 [Aspergillus nidulans FGSC A4] gi|40745828|gb|EAA64984.1| AN1819.2 [Aspergillus nidulans FGSC A4] gi|259487166|tpe|CBF85622.1| TPA: conserved [Aspergillus FGSC
MSKDSMPKKVLVCGATGNQGSGVVRHCLNAGHNVFALVRDSSSAQALSLKNGGVALVEGDFDDVESLNRAMANMDAVFFTSAFRQGSEADMRHATNIISAAKGSGTVSTIIYTSAASLDRIMAHPMFTPDYSEYEYWNTKHQIERQVRDSGIAHWAIVRPAWFIQNFAPPISTVVFPGLADKGLLPVAWQSGKKVEMVDGGDVGVVAAAVVASPEAYSGQVIELAAEALTINEVADRLSKASASQVKVAYMSPAKLASTLGLYGEHTAAHQAMHNELGPFMNIDELNARFELTKLEEFLSEHR

SEQ ID NO: 35163 - DNA, 1245 bp, Muscodor strobelii
  misc_feature: SGI EST ID NO. CUFF.83657.0
  misc_feature: Variant of the nucleotide sequence at SEQ ID NO 35161
cctaaccgcaaatgtacgactacgagcaaggaaaatcatggagtatagaatcaggtatgtggaggtttgcctcaattgaatctccgcggcgtattcgaaacatttctcgtagacggggtttggagtcgatgaaactcggtgtcgtgaaagccgtaacagaggagaagtaactccttcggtagtgtagttcttactttgtctgatttctttgctcgatttcagaacaacaactttctcttccaatcgcgtcccaatcaatcaggcccaagcagtctttcacaatgtcgaaagattccatgcccaagaaggtcctcgtatgcggtgcaacggggaatcaaggctcaggagtagtaagacattgtctaaacgccggacacaatgtcttcgcacttgtccgcgactcatcatcagcacaagcacttagcctaaagaatggcggagtcgcccttgtggaaggggactttgacgacgtcgagtctctcaaccgagccatggcaaatatggatgctgttttcttcacctctgccttcagacaagggtcggaggcagatatgcgccatgcaaccaacataatatcggcggccaaggggtcaggtaccgtctcgactatcatctacacaagcgcggcgagcttggaccgtattatggctcatcctatgttcacacccgattactcggagtacgagtactggaataccaaacaccagatagaaagacaagttcgcgactccggtattgcgcattgggccatagtgcgcccagcttggttcattcagaacttcgctcctcccatctcgactgtggtctttccaggattggcagacaaaggcctgttgcctgttgcatggcagtctggaaagaaggtagagatggtggatgggggcgatgtgggagtagtcgctgctgctgttgttgcgagtccggaagcatacagcggacaggtcattgagcttgcggctgaggccctgacaatcaatgaggttgctgatcgtttgagcaaagcttctgcctcacaagtcaaagttgcatacatgtcaccagccaagctggcttcaacgttaggtctgtacggggaacacactgctgcgcatcaggcaatgcataacgaattgggaccattcatgaacatcgatgagctaaacgcgaggttcgagctcactaagctcgaagagttcttgagcgagcatagatagtgaatgtacataattgatgccgtgctaccaactaggtacttagaaattctag

SEQ ID NO: 35164 - DNA, 7743 bp, Muscodor strobelii
  misc_feature: SGI cDNA ID NO. 572167
  misc_feature: Encodes the peptide sequence at SEQ ID NO 35165
atgacgcatcttcgctctaataacgttggcgccatgatagatgcgtatcctgactattccgatggcgtcctggcaggggccaagacaatgccgctggctatcgtcggtatggcctgtcggtttgccggtgatgtatcgaatcccagcaagctatgggacttggtgtcccaagggcgagatgcctggtcagagataccgaagagccggttcaaccaagatgctttctatcaccctgattccggccgcctgtcaacaatacacgcgaaagggggctactttctcggagaagacattggcgcctttgaccactccttcttcaatatgaacgctgaagtcgcggcctcaatggatcctcagcttcgaatgcagcttgagatcacatacgaagcatttgaaagcgccggtatcccactgagcaaagtgaaaggctccagaacgtgtgtcttcacgggcgccttcacccgtgactacaaagccgtctccgccaacgaccctttacacataccacgttcccacgtgaccggtaactacgctaccatgctggctaaccgcatatcacacttctttgatctgcaaggacatagcacgtccatcgacacggcttgctcaacatcgcttgtggggcttcatctagcttgccagagtctgcgatcaggggactcggacgcggcggttgtgggaggcacttgtcttcatctgagtcctgaatcatttgcaggactatccactttaggggtgtgcggccctgatggtaaatgctacgcattcgaccaccgggcacaaggctacggccgcggcgaaggcgtagcagtcctcgtagtaaagcgactttcagacgccatccgagatggtgatcccattcgatcaattatccgagaaacaagggctaaccaagacggcaaaaccgcaaccatcacatcgccaagctctgatgcacagcaacagttgatccaggaatgttacgctgccgctggactagatccactcgatacggccctcgtagaggcacacggaacaggcacagcggtaggtgacccgctagaagccagggcaattggcgaggttcttggccagaacaggccatcaaacagacctctccagattgcctctgtcaagacaaacttgggacacacagaagcagcctcgggcttagcctctgttattaaagcggttatgtctttagagaacagacaaatcgcaccgagtgtcaactacgagaaggcgaatccggatattgatatggagacactaggactagagattccgacacaactcaagccatggccgtcctcgaagcctaggcgtgcttctataaataacttcggattcggcggtaccaacgcgcatgtcatcttgcaagaatccagtagtcttctcacaaacagagcgaagcttaatggcattacagaacatgcacaagaagttagacagaagctcttcatcctcagcgcaaacgacaaggcaacagcgacaaaaatggccgccagcctgagagagcacttacaggctcacgcggatttatatgcgacggacaaatcgtttgcggatcttgcgtacaccctaaccgagaggcgaactcgttttaactggagcgtcacagtgactgccagtaacataccagaactcgtagagggattaactacgccgccttcgtccaactcacgacacggtactgcgcctcgacttggattcgtcttcaacggtcaaggagcgcagtggtttggaatgggccgagagctggctagcgcgtatcccgtgtacgcgcagactttgaagcaatgcgatgcagccgttcgctctttcggagcgaaatggtcacttattgaggagcttggtcgaagtgagaaaaccagtcgagttaacgacgtcgaatacagtatgccactatcatgtgctgtacagttggcacttgtccggctgcttgaggagtttggcatcgaaccggctgccgtgactggtcactcgagcggagaggtagctgctgctttcgcggcaggtgctctgagcctcgaggaggccatggcatgtacctattaccgtggcctgatcaactcggagcacattgctgaatctgatactgtcgccggtagtatgatggccgtcggctgtggtcccgatgaagtgataccttatctcgacgaagtacagtctgggaaagttgtggttgcttgcgtgaacagtccgtccagtgtcaccttatccggtgactccaaggcaatcaaagaaatagaatccagattcaaagaagaagcgatattcactcgagtacttcaagtccaggctgctttccattcacatcacatgctaccccttgaggaagagtacctacaagcactgcagctgaagatttcaaacggcggcaaacaatggcgtggcaatgatgacgaggaggtcttgttcgtatctcctgtcaccggcaagagagtgctgcatgcttccgagctcggcccacaacattggtgcaagaacatgacacagcctgtcctgttctcgcagtcattccataacatggtgatcggcgacgatggccttcagaatgtggacgtcgtcgttgaggttgggccgcacagcgcattggccggcccgatacgccaaattcttcaatccactgacgcaatcaaggcattggggatcccgtatggaacgtgtttggaaagagggaagaacgcagttcagactatgcaaatgctttcgggattcttgatcagcaagggctgtgctgtcgacacctccaaggtgaacgcgtacaatggcaagaatcgtgttgttacctcactacccacctatccttggaaccatgaacagcgattctggtttgagtctcgcatgagcacggagcacaggggtcgtgagcatgcgcctcatgaactactaggcgtgagagtgccaggtatgagcaacaagtccccgatctggcggcatgtcatccgagtcacagagatgccttggctgagtgaccacatcgttcagggcgacgtcgtctacccgggagctggttacatcgctatggcacttgaagccatgcgccagctgcactcgtcagactctacttccatcacagggtacgagctaagtgaagttgagataatgaaggctgttgtggtacccgaaagctcggaaggaatcgaaatacagttattcctcgagccggcaagcgagaagtcgctggaacacagtcaacgtcgttttcgtatttacagcgccggtgacgaaggcatatggaacgaagtgtcaagaggacttgttgcagtcgagacaactgaagcgacacaaagagtatcaccggttttgcagggcaccgacgtcaatgtcaaggacctcgtccgcgatattgaaccaaaagaactctacacctcactcaacaaactcggtatcacccacggccctgctttccagaacttgctgaacattcgcgccggtcaaagcctctctcttgcggagttccatgtgcgtgacacggcaagcctcatgccttatggcgtccaaccacctcatttgatccacccagtcactctcgaccaggtcttccaagccgcatacaccacgctgtcgcaggaagcaagcgatgtcgtaggcacagccgtgcctcagtatatcaaacacatctacatatcatcgcgtgtgagctcagagccaggacatcacatgtcatctctatccaagctcgagaaccacagtcgtcggggtttcgagatgtcctcagcaattttctcgacagcgactgatggccagagcagtgacatactttcaggcgaaccggtcgtagagatagacggaatgcgattccagtcaatcggtcactccgaagaaaatggcaaaagcaacaggcaaatgctcgcagacgtatgtgcgtttgttgactacgtgccgtccttctcgctgaacagtttcgactccctccgcgagcagcttcagcgcccgacggatgccggtgaaaaggcagtaggtaaggacttggtgcgtgcaacatgttacctaatagccgatgctgtcgcacaactttccgagagcgatatacagaatctcgaatggcagcaccagaagctatacaagtggatgatgcaggagctcgataaagccgcatcaaatcaactagctccgaagagctcacgatggcttacggcgcagccaggtgctagatcaatgtttctggaccgtgtatctaaatcaggtcccacaggcgagctgacagttcgcattgggcgccaccttgttcggattctgaggcgggaagttgccccactggagatcatgctcgagggcgatcttctcaacactttctacaaagagatgttacacttcaatgcctcgaccgaccagctagctcagatcacagccgcgttcgctgctgagaacccacgcgctcgcatcctcgagatcggtggcggcacgggtggctgcaccgagcctgtgcttcgcgtgttgggtggtgatggcactctacccgcgcggttcgagcgatatgactttaccgatatctcatctggcttcttccgggctgctcgtgagcggtttgcagcttggggtgaccgcataacctatgcgccgctcaacatcgaggacgacccagtcaagcaggggttcgaggaaaacagctacgatctcattgtggctgctcaggtactgcatgcaacaaagaatatgaacgtcaccatgcgcaacgtccggcggttactcaaggataatggcagattgcttatggtcgagacgacaaaggactggtccgctcaacatctgatcttcggtacccttccgggttggtggctgagcgaagagcccgaaagatcgatgagtccaaatatgtcactcgacatgtggcagcgcattctgacaaccactggctttagtgggttggatatcgacgtgtgggactgcgaagatgaggagcaccaagcctccagtgtgcttctgtcgacggctgtacgccgacccaaagacaccaaaattgtgaaagaacagcaaatcaagattgtttacgatccgaattcttcaccggctcctcctctagaatggctcaacggcatggcacagcgcgctaccgagctcacaggcacttccatcaatcccattgtcgtcaagctaggagaggccgacacctcggacagtgtctgcattttcgtagctgggctgaatggagttccgtataagattgattcctcaaatttcgattcgatcaaggcgctcgcgatttcttcaaaagcccttctgtgggtcacgtcgggatcttccaccgattgtactgtacccgaaaatgcactgcctttaggtttgatacgcactatcagaacggagattggcgaccgccggcttgtgactctcgacgttgatcccgcaggctcgccttgggacacaggatcacaaagcgtcgttgcccgcgtatttgcaaccgtattgtcatgctcagatgggccgactgatgtcgagttctcggagcgtggtggtacagttctagtcccccgaattgaacgtgatgacctcgagaacacagctcttgccggcactacagacaagtcggagatgcaggctttcatacagcattctgaaggtcgacagttgaaagcagaggtctccatcgcaggtcggctggacaccatgatattcattgacgacaaggacgccggcattgcacttccccatgattgggttgagatccggccctctgcttacgggttgaactttcatgacatccatccgtgtgcactgggtcagctggatgggccccaggagctaggtttcgaatgcgctggtgttatcaccagaaagggatcagatatcacgcagctacgcgaaggcgatagagtcatggcattgacattgcacggtcactttgcgtctcgcgtgcgagtcccttggacgagtgttgtccgtatacctgacgacatgtccttctcagatgctgccagtattgggctggcgtttgcgacagcgtactactccatgtttgacgccgggagattaaatccaggcgagacagtcttgatccacgcggcagctggaggtgtcggacaagcttgcatcatgctggcccaattgagaggcatcaaggtgctcgcaactgttgggacgcccgagaagcgccgcttcttgcaggaaacttatggcattcccgatacagatatgttctccagcagagacacttcttttgcctccgccgtgatggctgccacggacggaaggggtgttgacgctgttattaattcgcttgcagggccactgctacaggcgagctggggtgtcgtggcttctcacggacgattcgtcgagattggcaagagagatattgatcagaacatgcaactgtcgatgagtagcttcaagaaggctgtgagctttgcagcagttgatctgatacaattgggagatgatcgtggtcccgtgttacagcgcgttttgacagatgtgatggacctgattaagacgaaaaagatccgcactatttcgcctattaacacgtttccaatcagcaagctcgagcaagcgttccggacgatgcaagctggaaaacacatagggaagatcgtgatcgtgtctgaaaagggtgatcttgtcaagacaacgccagtacaagccgcagcgcgactggatggggacgccagttacctcatcatcggaggtgtcggtggtctcggacggtcgattgtacgacgatttacggaccacggagctaagaatctcatactagcctcacgccatgccactaccagtcctcatgcacagtcgcttcaagaagaaatggctgctcaagggacccgtgtcatgttgcgtgactgcgatgtaggcgacatggctagtctgaaagcggtactgacgagctgcgaagaggagatgccacccgtgcgaggcattgtccatggcggtatggtgcttaacgactctatcgtggaacgcatgacggcaacccaatgggagacggcgctcgggcctaaagtcgccggaacacgcaatctggatcggatattctccgagccaggatcgctcgacttttttatcatcctgtcgtcttttgtaggtgtcgccggcaaccccagtcaaggcaattatggcgctggcggggctttccaggacgccattgcccgcagccgcgctgcccgcggccttccctgcgtgacgctcgatctcggtcccgtgaatagtgtcggctttgtcgcagaggcagaccagtccgtttccaagcgtctacttggctctgggtacttccggccactcgaggagggcgacttccatcaactgttggactatgcaatacgcgtacccattcgctctccacggaccgcccaagtcattgcaggcctcgctggtcgcgccgtcgggaacccagacagcgttgcttcttggacgcgagagctgcgattcgctcgccttgctggcgacgatgagatgctccacagcagcaatgccgatgaagctgcagggtcaagtaagagcaagacgaaaggctcgcctgctgcgaatctgaagcaacgtcttgccggtgcccagagtgtccaggagggagctgaggtcgtggagaaggctgtcatcagtaaacttgccgacatgttcgtcgtacctgaggacgacattgaaggcggacagccgttgtccaagtacggtgtggattccctagtggccgttgagctgcgcaactggctagttcccgccgctcagtgtgacatgtctatctttgacttgctcggcgccaagtcactgcgagacttggccaaccatattgccaagatgagcaaggcaatcaatgtgctgtga

SEQ ID NO: 35165 - protein, 2580 aa, Muscodor strobelii
  misc_feature: SGI Peptide ID NO. 572167
  misc_feature (563)..(908): Pfam Id: PF00698 Pfam Desc: Acyl transferase domain
  misc_feature (1879)..(1957): Pfam Id: PF08240 Pfam Desc: Alcohol dehydrogenase GroES-like domain
  misc_feature (2198)..(2366): Pfam Id: PF00106 Pfam Desc: short chain dehydrogenase
  misc_feature (1988)..(2132): Pfam Id: PF00107 Pfam Desc: Zinc-binding dehydrogenase
  misc_feature (30)..(280): Pfam Id: PF00109 Pfam Desc: Beta-ketoacyl synthase, N-terminal domain
  misc_feature (288)..(406): Pfam Id: PF02801 Pfam Desc: Beta-ketoacyl synthase, C-terminal domain
  misc_feature (2198)..(2379): Pfam Id: PF08659 Pfam Desc: KR domain
  misc_feature (1458)..(1567): Pfam Id: PF08241 Pfam Desc: Methyltransferase domain
  misc_feature (1458)..(1565): Pfam Id: PF08242 Pfam Desc: Methyltransferase domain
  misc_feature (564)..(869): Pfam Id: PF00698 Pfam Desc: Acyl transferase domain
  misc_feature (1988)..(2101): Pfam Id: PF00107 Pfam Desc: Zinc-binding dehydrogenase
  misc_feature (31)..(2578): NCBI GI: 171688048 Blast Desc: protein product [Podospora anserina] gi|170943986|emb|CAP70096.1| protein product [Podospora anserina]
  misc_feature (29)..(2571): NCBI GI: 145241724 Blast Desc: An09g01930 [Aspergillus niger] gi|134078048|emb|CAK40131.1| protein product [Aspergillus niger]
  misc_feature (29)..(2566): NCBI GI: 23574645 Blast Desc: polyketide synthase [Penicillium citrinum]
  misc_feature (30)..(2578): NCBI GI: 85091888 Blast Desc: NCU04865 [Neurospora crassa OR74A] gi|28920522|gb|EAA29886.1| conserved [Neurospora crassa OR74A]
  misc_feature (29)..(2578): NCBI GI: 29027893 Blast Desc: type I polyketide synthase [Phoma sp. C2932]
  misc_feature (28)..(2578): NCBI GI: 255953379 Blast Desc: Pc21g03930 [Penicillium chrysogenum Wisconsin 54-1255] gi|211589153|emb|CAP95290.1| Pc21g03930 [Penicillium chrysogenum Wisconsin 54-1255]
  misc_feature (31)..(2579): NCBI GI: 115401384 Blast Desc: ATEG_07659 [Aspergillus terreus NIH2624] gi|114190221|gb|EAU31921.1| ATEG_07659 [Aspergillus terreus NIH2624]
  misc_feature (27)..(2577): NCBI GI: 67541242 Blast Desc: AN6791.2 [Aspergillus nidulans FGSC A4] gi|40739419|gb|EAA58609.1| AN6791.2 [Aspergillus nidulans FGSC A4] gi|259480385|tpe|CBF71467.1| TPA: polyketide synthase, (JCVI)
  misc_feature (25)..(2572): NCBI GI: 74275562 Blast Desc: polyketide synthase [Monascus pilosus]
  misc_feature (30)..(2577): NCBI GI: 238845006 Blast Desc: type I polyketide synthase [Microsporum canis CBS 113480]
  misc_feature (31)..(1831): SWISSPROT Homolog: EC 2.3.1.161 Lovastatin nonaketide synthase
  misc_feature: Useful for fungicidal and/or biocontrol applications
MTHLRSNNVGAMIDAYPDYSDGVLAGAKTMPLAIVGMACRFAGDVSNPSKLWDLVSQGRDAWSEIPKSRFNQDAFYHPDSGRLSTIHAKGGYFLGEDIGAFDHSFFNMNAEVAASMDPQLRMQLEITYEAFESAGIPLSKVKGSRTCVFTGAFTRDYKAVSANDPLHIPRSHVTGNYATMLANRISHFFDLQGHSTSIDTACSTSLVGLHLACQSLRSGDSDAAVVGGTCLHLSPESFAGLSTLGVCGPDGKCYAFDHRAQGYGRGEGVAVLVVKRLSDAIRDGDPIRSIIRETRANQDGKTATITSPSSDAQQQLIQECYAAAGLDPLDTALVEAHGTGTAVGDPLEARAIGEVLGQNRPSNRPLQIASVKTNLGHTEAASGLASVIKAVMSLENRQIAPSVNYEKANPDIDMETLGLEIPTQLKPWPSSKPRRASINNFGFGGTNAHVILQESSSLLTNRAKLNGITEHAQEVRQKLFILSANDKATATKMAASLREHLQAHADLYATDKSFADLAYTLTERRTRFNWSVTVTASNIPELVEGLTTPPSSNSRHGTAPRLGFVFNGQGAQWFGMGRELASAYPVYAQTLKQCDAAVRSFGAKWSLIEELGRSEKTSRVNDVEYSMPLSCAVQLALVRLLEEFGIEPAAVTGHSSGEVAAAFAAGALSLEEAMACTYYRGLINSEHIAESDTVAGSMMAVGCGPDEVIPYLDEVQSGKVVVACVNSPSSVTLSGDSKAIKEIESRFKEEAIFTRVLQVQAAFHSHHMLPLEEEYLQALQLKISNGGKQWRGNDDEEVLFVSPVTGKRVLHASELGPQHWCKNMTQPVLFSQSFHNMVIGDDGLQNVDVVVEVGPHSALAGPIRQILQSTDAIKALGIPYGTCLERGKNAVQTMQMLSGFLISKGCAVDTSKVNAYNGKNRVVTSLPTYPWNHEQRFWFESRMSTEHRGREHAPHELLGVRVPGMSNKSPIWRHVIRVTEMPWLSDHIVQGDVVYPGAGYIAMALEAMRQLHSSDSTSITGYELSEVEIMKAVVVPESSEGIEIQLFLEPASEKSLEHSQRRFRIYSAGDEGIWNEVSRGLVAVETTEATQRVSPVLQGTDVNVKDLVRDIEPKELYTSLNKLGITHGPAFQNLLNIRAGQSLSLAEFHVRDTASLMPYGVQPPHLIHPVTLDQVFQAAYTTLSQEASDVVGTAVPQYIKHIYISSRVSSEPGHHMSSLSKLENHSRRGFEMSSAIFSTATDGQSSDILSGEPVVEIDGMRFQSIGHSEENGKSNRQMLADVCAFVDYVPSFSLNSFDSLREQLQRPTDAGEKAVGKDLVRATCYLIADAVAQLSESDIQNLEWQHQKLYKWMMQELDKAASNQLAPKSSRWLTAQPGARSMFLDRVSKSGPTGELTVRIGRHLVRILRREVAPLEIMLEGDLLNTFYKEMLHFNASTDQLAQITAAFAAENPRARILEIGGGTGGCTEPVLRVLGGDGTLPARFERYDFTDISSGFFRAARERFAAWGDRITYAPLNIEDDPVKQGFEENSYDLIVAAQVLHATKNMNVTMRNVRRLLKDNGRLLMVETTKDWSAQHLIFGTLPGWWLSEEPERSMSPNMSLDMWQRILTTTGFSGLDIDVWDCEDEEHQASSVLLSTAVRRPKDTKIVKEQQIKIVYDPNSSPAPPLEWLNGMAQRATELTGTSINPIVVKLGEADTSDSVCIFVAGLNGVPYKIDSSNFDSIKALAISSKALLWVTSGSSTDCTVPENALPLGLIRTIRTEIGDRRLVTLDVDPAGSPWDTGSQSVVARVFATVLSCSDGPTDVEFSERGGTVLVPRIERDDLENTALAGTTDKSEMQAFIQHSEGRQLKAEVSIAGRLDTMIFIDDKDAGIALPHDWVEIRPSAYGLNFHDIHPCALGQLDGPQELGFECAGVITRKGSDITQLREGDRVMALTLHGHFASRVRVPWTSVVRIPDDMSFSDAASIGLAFATAYYSMFDAGRLNPGETVLIHAAAGGVGQACIMLAQLRGIKVLATVGTPEKRRFLQETYGIPDTDMFSSRDTSFASAVMAATDGRGVDAVINSLAGPLLQASWGVVASHGRFVEIGKRDIDQNMQLSMSSFKKAVSFAAVDLIQLGDDRGPVLQRVLTDVMDLIKTKKIRTISPINTFPISKLEQAFRTMQAGKHIGKIVIVSEKGDLVKTTPVQAAARLDGDASYLIIGGVGGLGRSIVRRFTDHGAKNLILASRHATTSPHAQSLQEEMAAQGTRVMLRDCDVGDMASLKAVLTSCEEEMPPVRGIVHGGMVLNDSIVERMTATQWETALGPKVAGTRNLDRIFSEPGSLDFFIILSSFVGVAGNPSQGNYGAGGAFQDAIARSRAARGLPCVTLDLGPVNSVGFVAEADQSVSKRLLGSGYFRPLEEGDFHQLLDYAIRVPIRSPRTAQVIAGLAGRAVGNPDSVASWTRELRFARLAGDDEMLHSSNADEAAGSSKSKTKGSPAANLKQRLAGAQSVQEGAEVVEKAVISKLADMFVVPEDDIEGGQPLSKYGVDSLVAVELRNWLVPAAQCDMSIFDLLGAKSLRDLANHIAKMSKAINVL

SEQ ID NO: 35166 - DNA, 1635 bp, Muscodor strobelii
  misc_feature: SGI cDNA ID NO. 572168
  misc_feature: Encodes the peptide sequence at SEQ ID NO 35167
atgtctgctgcacagcttctcaaccccaaggccgagtcccggcggcggggtgaagctctcaaagtcaacatcagtgccggcgagggtctgcaggatgtcctcaagtccaatctcggccctctgggcaccatcaagatgctggtcgacggctctggacagatcaaactcaccaaagacggcaacgtcctgctgcgtgagatgcagatccagaaccccaccgccgtcatgatcgcccgcgctgccaccgcacaagacgacatctgcggcgacggcaccacctcggtcgtcctgctggtcggagagctgctgaagcaggccgacagatacatcgccgagggcctgcaccctcgcatcatcacagacggctttgagatcgccaagaacgagtcgctcaagttcctcgacgagttcaagctacccaaagaagtcgaccgcgaactcctcctctccgtcgcccgcacctccctatccacaaagctcaactccagcctcgccaagaagctcacccctgatatcgtcgacgccgtcctcgccatctaccaggccccggccaaacccgacctgcacatggtcgagatcatgaagatgcagcaccgcactgcctcagatacccagctcatccgtggccttgccctcgaccacggcgcaagacaccccgacatgcccaagagactcgagaacgcattcatcttgaccatgaacgtcagtttagaatacgagaagtcggagatcaactcgggcttcttctactccagcgccgaccagcgcgagaagctcgtcgagagcgagcgccgcttcgtcgactccaagctgaagaagattgtcgagctgaagaaggaggtctgcggcaatgaccccaagaagagcttcgtgattgtcaaccagaagggcatcgaccccttgtctctcgacgtcctggcaaagaatggcattttcgctctgcggagagccaagaggagaaacatggagcgtctgcagctcatctgcggaggtgttgctcagaacagcgtagaagacctgtcacccgacattctcggctgggctggcctagtgtacgagcagcagctgggcgaggagaagtacaccttcattgaggaggtcaaggatcccaagtcggtcacgctcatgatcaaaggtccaaatgctcacacgattacacaaattacggatgctgtccgcgatggccttcgaagcgtatacaacatgattgtagacaagtcagtcgtccccggcggcggtgctttccaggtaggctgcgctgctcacttgaagagcgacgctttcaagaggacggtcaagggtaaagcgaaatggggtgtcgatgcgtttgctgatgctctgctcatcatccccaagacgctggcggcaaacgctggccacgacatccaagacgcactcgcctccctccaagacgaacacgccgacggcaacgttgttggccttgaccttgttctcggtcaacccatggaccctacacttgagggtgtctacgactccttccgtgtattaagaaattgcatcgcctcgtcgtcaagtatagcgtccaacctcctgttgtgcgacgaaatgctcaaggctcgtcaaatgggtcggcaaggtggtcccggtcccggtatggacggtccggaggagtag

SEQ ID NO: 35167 - protein, 544 aa, Muscodor strobelii
  misc_feature: SGI Peptide ID NO. 572168
  misc_feature (30)..(528): Pfam Id: PF00118 Pfam Desc: TCP-1/cpn60 chaperonin family
  misc_feature (2)..(526): NCBI GI: 169847039 Blast Desc: CC1G_11835 [Coprinopsis cinerea okayama7#130] gi|116508708|gb|EAU91603.1| CC1G_11835 [Coprinopsis cinerea okayama7#130]
  misc_feature (2)..(535): NCBI GI: 254573676 Blast Desc: Subunit of the cytosolic chaperonin Cct ring complex [Pichia pastoris GS115] gi|238033746|emb|CAY71768.1| Subunit of the cytosolic chaperonin Cct ring complex [Pichia pastoris GS115]
  misc_feature (2)..(526): NCBI GI: 50427007 Blast Desc: DEHA0G14003g [Debaryomyces hansenii CBS767] gi|49657778|emb|CAG90594.1| DEHA2G13134p [Debaryomyces hansenii]
  misc_feature (2)..(526): NCBI GI: 149234619 Blast Desc: T-complex protein 1 subunit zeta [Lodderomyces elongisporus NRRL YB-4239] gi|146453298|gb|EDK47554.1| T-complex protein 1 subunit zeta [Lodderomyces elongisporus NRRL YB-4239]
  misc_feature (2)..(526): NCBI GI: 68481180 Blast Desc: potential cytosolic chaperonin CCT ring complex subunit Cct6 [Candida albicans SC5314] gi|68481321|ref|XP_715435.1| potential cytosolic chaperonin CCT
  misc_feature (2)..(526): NCBI GI: 238881213 Blast Desc: T-complex protein 1 subunit zeta [Candida albicans WO-1]
  misc_feature (2)..(526): NCBI GI: 241955100 Blast Desc: actin/tublulin assembly protein; molecular chaperone, ; subunit of the cytosolic chaperonin Cct ring complex, [Candida dubliniensis CD36] gi|223643612|emb|CAX42494.1| actin/tublulin ;
  misc_feature (2)..(526): NCBI GI: 255729094 Blast Desc: T-complex protein 1 subunit zeta [Candida tropicalis MYA-3404] gi|240132541|gb|EER32098.1| T-complex protein 1 subunit zeta [Candida tropicalis MYA-3404]
  misc_feature (3)..(535): NCBI GI: 50307769 Blast Desc: protein product [Kluyveromyces lactis] gi|49643012|emb|CAH00974.1| KLLA0D18458p [Kluyveromyces lactis]
  misc_feature (1)..(531): NCBI GI: 85091533 Blast Desc: T-complex protein 1 subunit zeta [Neurospora crassa OR74A] gi|28920341|gb|EAA29712.1| T-complex protein 1 subunit zeta [Neurospora crassa OR74A]
MSAAQLLNPKAESRRRGEALKVNISAGEGLQDVLKSNLGPLGTIKMLVDGSGQIKLTKDGNVLLREMQIQNPTAVMIARAATAQDDICGDGTTSVVLLVGELLKQADRYIAEGLHPRIITDGFEIAKNESLKFLDEFKLPKEVDRELLLSVARTSLSTKLNSSLAKKLTPDIVDAVLAIYQAPAKPDLHMVEIMKMQHRTASDTQLIRGLALDHGARHPDMPKRLENAFILTMNVSLEYEKSEINSGFFYSSADQREKLVESERRFVDSKLKKIVELKKEVCGNDPKKSFVIVNQKGIDPLSLDVLAKNGIFALRRAKRRNMERLQLICGGVAQNSVEDLSPDILGWAGLVYEQQLGEEKYTFIEEVKDPKSVTLMIKGPNAHTITQITDAVRDGLRSVYNMIVDKSVVPGGGAFQVGCAAHLKSDAFKRTVKGKAKWGVDAFADALLIIPKTLAANAGHDIQDALASLQDEHADGNVVGLDLVLGQPMDPTLEGVYDSFRVLRNCIASSSSIASNLLLCDEMLKARQMGRQGGPGPGMDGPEE

SEQ ID NO: 35168 - DNA, 5532 bp, Muscodor strobelii
  misc_feature: SGI EST ID NO. CUFF.84225.0
  misc_feature: Variant of the nucleotide sequence at SEQ ID NO 35166
aaaagttcagagagctcccgcatcacacatccccaccatcgtctgttgtttaaggcagcctcaactcaccaccacagacgtgtcgtcccagagctgccaacgcccaacgacgacataccaaactgccatgtctgctgcacagcttctcaaccccaaggccgagtcccgggtctgtcctacgatttccgccagccaactactcccatgctaacagtcttgcagcggcggggtgaagctctcaaagtcaacatcagtgccggcgagggtctgcaggatgtcctcaagtccaatctcggccctctgggcaccatcaagatgctggtcgacggctctggacagatcaaactcaccaaagacggcaacgtcctgctgcgtgagatgcagatccagaaccccaccgccgtcatgatcgcccgcgctgccaccgcacaagacgacatctgcggcgacggcaccacctcggtcgtcctgctggtcggagagctgctgaagcaggccgacagatacatcgccgagggcctgcaccctcgcatcatcacagacggctttgagatcgccaagaacgagtcgctcaagttcctcgacgagttcaagctacccaaagaagtcgaccgcgaactcctcctctccgtcgcccgcacctccctatccacaaagctcaactccagcctcgccaagaagctcacccctgatatcgtcgacgccgtcctcgccatctaccaggccccggccaaacccgacctgcacatggtcgagatcatgaagatgcagcaccgcactgcctcagatacccagctcatccgtggccttgccctcgaccacggcgcaagacaccccgacatgcccaagagactcgagaacgcattcatcttgaccatgaacgtcagtttagaatacgagaagtcggagatcaactcgggcttcttctactccagcgccgaccagcgcgagaagctcgtcgagagcgagcgccgcttcgtcgactccaagctgaagaagattgtcgagctgaagaaggaggtctgcggcaatgaccccaagaagagcttcgtgattgtcaaccagaagggcatcgaccccttgtctctcgacgtcctggcaaagaatggcattttcgctctgcggagagccaagaggagaaacatggagcgtctgcagctcatctgcggaggtgttgctcagaacagcgtagaagacctgtcacccgacattctcggctgggctggcctagtgtacgagcagcagctgggcgaggagaagtacaccttcattgaggaggtcaaggatcccaagtcggtcacgctcatgatcaaaggtccaaatgctcacacgattacacaaattacggatgctgtccgcgatggccttcgaagcgtatacaacatgattgtagacaagtcagtcgtccccggcggcggtgctttccaggtaggctgcgctgctcacttgaagagcgacgctttcaagaggacggtcaagggtaaagcgaaatggggtgtcgatgcgtttgctgatgctctgctcatcatccccaagacgctggcggcaaacgctggccacgacatccaagacgcactcgcctccctccaagacgaacacgccgacggcaacgttgttggccttgaccttgttctcggtcaacccatggaccctacacttgagggtgtctacgactccttccgtgtattaagaaattgcatcgcctcgtcgtcaagtatagcgtccaacctcctgttgtgcgacgaaatgctcaaggctcgtcaaatgggtcggcaaggtggtcccggtcccggtatggacggtccggaggagtagaagggttagatcttatccaaaaggtgtttataaatcaggtggggctcataggatcgaatgctaatgtctctgccataatgatgaccaaattctcttattttcttcgctgtccgcgatattgataccacagaaccccagaagctgcgtctcgttgcgcgacaggagactggtcatcgagcaattggggatcgccaccagaactaccgttcgtctttgccattgccaagacatgcacctccgacccgggtatctcgccatcctcgcccacaagcatgtcatttcttgactttgaccgccaacggcagcccacgcggagattatgcacggcgacggttcccaccaccacctgcctttcccgggaaacggcgacgcatacgcgatcctatcggatttcttgagtatggtgtgagatttaacgattgatatgtgatgatggtcagaggatggtatttgagtatctagaacagtcgtagaagctatggtaattgagtgtataaaaggtgtgagaatcatagatgccctccgacctaggtcttcctgttctgtgctggcgacgagaccgtgaatagcatctcaattgacaatccccaacttcacataccacttcctcgccaccaaatttgaagccctcgagatatttcaaaatgcgcatctcactcccctccctcaccctcaccaccctcctcctcgccacaaccacgatgtccttcccccagcccgcaccccgccaagcacccaccgtcggccccgcagcaggatctctcgtcgtagtaggcggcggcacactagacgataaaatctacgccgaagtagtcacccgcgcgcacggcggcccaataatcgtaatcaccaccgcagacggcgaacaggaaacatacccacaagactatcccccagcgcccacactcttgcgactaggcgctagttccgtaacagtactacatacatacgacccagcagtagcagacacagactccttcatcgcgccgctcctcaacgcaacaggtatatggttcgtaggcggtcggcaatggcgtctcgtggacgcatacgcagggactaaagcagaagccgcgttccggggtgtgttagataggggtggtgttattgggggaagtagtgcgggtgcgagtatccaggctagttttcttgcacgcggtgatacggcgaataatcaggttatggttggtgatcatacggtgggttttgggtatttacggggtgtggctgtggatcaacatgtccttgttagaggacggcagtttgatatgtttgatattttgaaggagtatcctgagcttttggggttggggtgtgatgagaatacggcgttggttgttgagggagacagagcgacgattttgggacattcttattgtggggtttgggatgggaagttttgggcgagggaggggagtgatatgaagactattccgcctgttgaccagagattctattttttgagggagggggatgtatatgatatggctgcgagggaggttgttgtcgctacttgaggggggcattattggtgaacagccatatcctagtatgacaaaatgaatacacatgtgtcacaatatggtgcaatgaagagagaccgaatatgaccaggaaagaacttcttttcgctaatccggcaaaatgcgtagagacgcccaagtatgtacagctaaacagtatctcagatatcgactccatgcttcgaacaagcaaaagagcattgtgctcatcgtttcttgccaaatgtagatccttcgaaaccagcacgacccttggatttctttgcaaagccgcctttcttctttccggctttaccgagtagtttttcgtctcgccgattcctaatgttctcttctctcttccgctgtcgttcctggatgcccttggcgacgccctctttcctagctgcccattccttggtgctcttctttttggtgtgttctttgcgcttgacagcctttttgagcattttctcatcgtccctgatcttctctccttcagctcgtctccttgcggtgagccagacctccttctcctcaacgtcctttcgtttatcgtcatccatggccgccagtcgcttcttctggttctcaaccttttgtaaagcagatttgggatcgactggtcccttcttctggttcttgttgaggacatgcgtgaggtcatgcgataattgggagccatcaccgaagccgacacgaccgaaggcgaaattgacattctcatcatcaaggtcgatattcgggctgagaagaccgcgtggggagccgcgtgcggatgcaagggcctcttctctcttctcttcctccaacagcctggccttctgtctaagttcctttttatgtgctttgcgctctgcttgtttctgtcgacgggattcgattaattcttgccgcgtccgaattggcttgccgtccctgtcagcttttctggcatcacggagggcttgtattctcgctgccaggcgggctcggagtgccgcgctgtctgctggtattttgatgtgcttgggtttttcggaagtagggtcggtggatgagacggatgttgtggtactgggggcttgaccggtggaatctgccggggtgccattggtgtcgaatatgggagattgtggggtatcgttaggtgaagtcacagacgccgagtcttgctgctcttcttgttcggcctcgggtatttctgaatcctcagtatcctccgcatcgtctatgtcttcgacatactcttgggcactcacttcagcgtcatcttctctggccggcagctcggtttcgtggtcggcagatgacgatgtgccaggtttaccaggccttgtgccaagcttgatcttgttgacgcccttgatggatctccgattgaactcggcttcttcctcacgcagtctctgtcgttcggccttgcgttctttccgggcggccttcttctcttccttccgcttctctttctccgtgagctcggcctcctcctcggtctgcttctgcttcttcttggcttcctttgccgtcttcttcttcatgccctgacgaggctgctcgggctcgatgccgtcgacctctgaccagtcatcctcgtcgccgtcttgcatctggtctcgcttccgcttcttacgagcttgctcatccatgacatcttttgcgcttcggttcagggcactatcggggtcgagtttgttccgcctggcctcggcggcttgggccttggtttgcttcttctgcttccattggtcctgcagagcattgaagttggtaagtcatcatggacgacgaggatgaggttatgcacagtacacggcacgactaagaatggtcgggtgggcagaggaggctgacgtacggatttgtcttcgccatagtacatcttggccgggatgagggacagcaggccatcgaaagccttctgtgaattgaggagtcgctcctataagtcatccggtgttggtcatcaatgttttatccagagctcacggcttcggcttcagtcgcgcagctaccctgcacaccgcccgggagggcgtggcgggggaagaagatggcaaatgtacgaaccttgagcgccgagtccgccatcgtgttacgcgcttcgtcaggccgtcgacagtcgtctgtatgcaagagcctcgggccacgactgtcgtcgcaaaattccggtgtgggcgatagtgcgtgtccgcggatgtcggattcgtaggcatcgaacgttacgagactcgtg

SEQ ID NO: 35169 - DNA, 1608 bp, Muscodor strobelii
  misc_feature: SGI cDNA ID NO. 572169
  misc_feature: Reduced expression when VOC is produced
  misc_feature: Encodes the peptide sequence at SEQ ID NO 35170
atggcggactcggcgctcaaggagcgactcctcaattcacagaaggctttcgatggcctgctgtccctcatcccggccaagatgtactatggcgaagacaaatccgaccaatggaagcagaagaagcaaaccaaggcccaagccgccgaggccaggcggaacaaactcgaccccgatagtgccctgaaccgaagcgcaaaagatgtcatggatgagcaagctcgtaagaagcggaagcgagaccagatgcaagacggcgacgaggatgactggtcagaggtcgacggcatcgagcccgagcagcctcgtcagggcatgaagaagaagacggcaaaggaagccaagaagaagcagaagcagaccgaggaggaggccgagctcacggagaaagagaagcggaaggaagagaagaaggccgcccggaaagaacgcaaggccgaacgacagagactgcgtgaggaagaagccgagttcaatcggagatccatcaagggcgtcaacaagatcaagcttggcacaaggcctggtaaacctggcacatcgtcatctgccgaccacgaaaccgagctgccggccagagaagatgacgctgaagtgagtgcccaagagtatgtcgaagacatagacgatgcggaggatactgaggattcagaaatacccgaggccgaacaagaagagcagcaagactcggcgtctgtgacttcacctaacgataccccacaatctcccatattcgacaccaatggcaccccggcagattccaccggtcaagcccccagtaccacaacatccgtctcatccaccgaccctacttccgaaaaacccaagcacatcaaaataccagcagacagcgcggcactccgagcccgcctggcagcgagaatacaagccctccgtgatgccagaaaagctgacagggacggcaagccaattcggacgcggcaagaattaatcgaatcccgtcgacagaaacaagcagagcgcaaagcacataaaaaggaacttagacagaaggccaggctgttggaggaagagaagagagaagaggcccttgcatccgcacgcggctccccacgcggtcttctcagcccgaatatcgaccttgatgatgagaatgtcaatttcgccttcggtcgtgtcggcttcggtgatggctcccaattatcgcatgacctcacgcatgtcctcaacaagaaccagaagaagggaccagtcgatcccaaatctgctttacaaaaggttgagaaccagaagaagcgactggcggccatggatgacgataaacgaaaggacgttgaggagaaggaggtctggctcaccgcaaggagacgagctgaaggagagaagatcagggacgatgagaaaatgctcaaaaaggctgtcaagcgcaaagaacacaccaaaaagaagagcaccaaggaatgggcagctaggaaagagggcgtcgccaagggcatccaggaacgacagcggaagagagaagagaacattaggaatcggcgagacgaaaaactactcggtaaagccggaaagaagaaaggcggctttgcaaagaaatccaagggtcgtgctggtttcgaaggatctacatttggcaagaaacgatga

SEQ ID NO: 35170 - protein, 535 aa, Muscodor strobelii
  misc_feature: SGI Peptide ID NO. 572169
  misc_feature (314)..(525): Pfam Id: PF04935 Pfam Desc: Surfeit locus protein 6
  misc_feature (314)..(504): Pfam Id: PF04935 Pfam Desc: Surfeit locus protein 6
  misc_feature (1)..(504): NCBI GI: 85092801 Blast Desc: NCU06090 [Neurospora crassa OR74A] gi|28920992|gb|EAA30316.1| [Neurospora crassa OR74A]
  misc_feature (226)..(529): NCBI GI: 256732906 Blast Desc: NECHADRAFT_99906 [Nectria haematococca mpVI 77-13-4]
  misc_feature (226)..(503): NCBI GI: 46123935 Blast Desc: FG06345.1 [Gibberella zeae PH-1]
  misc_feature (7)..(529): NCBI GI: 145255602 Blast Desc: An18g05650 [Aspergillus niger] gi|134084607|emb|CAK97483.1| protein product [Aspergillus niger]
  misc_feature (1)..(528): NCBI GI: 171679459 Blast Desc: protein product [Podospora anserina] gi|170939355|emb|CAP64583.1| protein product [Podospora anserina]
  misc_feature (242)..(532): NCBI GI: 145610883 Blast Desc: MGG_00840 [Magnaporthe grisea 70-15] gi|145018219|gb|EDK02498.1| MGG_00840 [Magnaporthe grisea 70-15]
  misc_feature (1)..(529): NCBI GI: 67539064 Blast Desc: AN5702.2 [Aspergillus nidulans FGSC A4] gi|40743605|gb|EAA62795.1| AN5702.2 [Aspergillus nidulans FGSC A4] gi|259484822|tpe|CBF81372.1| TPA: 60S ribosome biogenesis A4]
  misc_feature (234)..(523): NCBI GI: 116203679 Blast Desc: CHGG_09723 [Chaetomium globosum CBS 148.51] gi|88175851|gb|EAQ83319.1| CHGG_09723 [Chaetomium globosum CBS 148.51]
  misc_feature (1)..(535): NCBI GI: 238844143 Blast Desc: conserved [Microsporum canis CBS 113480]
  misc_feature (1)..(534): NCBI GI: 225679001 Blast Desc: PABG_07446 [Paracoccidioides brasiliensis Pb03]
  misc_feature: Useful for introducing or modulating the production of volatile compounds
MADSALKERLLNSQKAFDGLLSLIPAKMYYGEDKSDQWKQKKQTKAQAAEARRNKLDPDSALNRSAKDVMDEQARKKRKRDQMQDGDEDDWSEVDGIEPEQPRQGMKKKTAKEAKKKQKQTEEEAELTEKEKRKEEKKAARKERKAERQRLREEEAEFNRRSIKGVNKIKLGTRPGKPGTSSSADHETELPAREDDAEVSAQEYVEDIDDAEDTEDSEIPEAEQEEQQDSASVTSPNDTPQSPIFDTNGTPADSTGQAPSTTTSVSSTDPTSEKPKHIKIPADSAALRARLAARIQALRDARKADRDGKPIRTRQELIESRRQKQAERKAHKKELRQKARLLEEEKREEALASARGSPRGLLSPNIDLDDENVNFAFGRVGFGDGSQLSHDLTHVLNKNQKKGPVDPKSALQKVENQKKRLAAMDDDKRKDVEEKEVWLTARRRAEGEKIRDDEKMLKKAVKRKEHTKKKSTKEWAARKEGVAKGIQERQRKREENIRNRRDEKLLGKAGKKKGGFAKKSKGRAGFEGSTFGKKR

SEQ ID NO: 35171 - DNA, 4780 bp, Muscodor strobelii
  misc_feature: SGI EST ID NO. CUFF.84226.3
  misc_feature: Variant of the nucleotide sequence at SEQ ID NO 35169
cacgagtctcgtaacgttcgatgcctacgaatccgacatccgcggacacgcactatcgcccacaccggaattttgcgacgacagtcgtggcccgaggctcttgcatacagacgactgtcgacggcctgacgaagcgcgtaacacgatggcggactcggcgctcaaggagcgactcctcaattcacagaaggctttcgatggcctgctgtccctcatcccggccaagatgtactatggcgaagacaaatccgaccaatggaagcagaagaagcaaaccaaggcccaagccgccgaggccaggcggaacaaactcgaccccgatagtgccctgaaccgaagcgcaaaagatgtcatggatgagcaagctcgtaagaagcggaagcgagaccagatgcaagacggcgacgaggatgactggtcagaggtcgacggcatcgagcccgagcagcctcgtcagggcatgaagaagaagacggcaaaggaagccaagaagaagcagaagcagaccgaggaggaggccgagctcacggagaaagagaagcggaaggaagagaagaaggccgcccggaaagaacgcaaggccgaacgacagagactgcgtgaggaagaagccgagttcaatcggagatccatcaagggcgtcaacaagatcaagcttggcacaaggcctggtaaacctggcacatcgtcatctgccgaccacgaaaccgagctgccggccagagaagatgacgctgaagtgagtgcccaagagtatgtcgaagacatagacgatgcggaggatactgaggattcagaaatacccgaggccgaacaagaagagcagcaagactcggcgtctgtgacttcacctaacgataccccacaatctcccatattcgacaccaatggcaccccggcagattccaccggtcaagcccccagtaccacaacatccgtctcatccaccgaccctacttccgaaaaacccaagcacatcaaaataccagcagacagcgcggcactccgagcccgcctggcagcgagaatacaagccctccgtgatgccagaaaagctgacagggacggcaagccaattcggacgcggcaagaattaatcgaatcccgtcgacagaaacaagcagagcgcaaagcacataaaaaggaacttagacagaaggccaggctgttggaggaagagaagagagaagaggcccttgcatccgcacgcggctccccacgcggtcttctcagcccgaatatcgaccttgatgatgagaatgtcaatttcgccttcggtcgtgtcggcttcggtgatggctcccaattatcgcatgacctcacgcatgtcctcaacaagaaccagaagaagggaccagtcgatcccaaatctgctttacaaaaggttgagaaccagaagaagcgactggcggccatggatgacgataaacgaaaggacgttgaggagaaggaggtctggctcaccgcaaggagacgagctgaaggagagaagatcagggacgatgagaaaatgctcaaaaaggctgtcaagcgcaaagaacacaccaaaaagaagagcaccaaggaatgggcagctaggaaagagggcgtcgccaagggcatccaggaacgacagcggaagagagaagagaacattaggaatcggcgagacgaaaaactactcggtaaagccggaaagaagaaaggcggctttgcaaagaaatccaagggtcgtgctggtttcgaaggatctacatttggcaagaaacgatgagcacaatgctcttttgcttgttcgaagcatggagtcgatatctgagatactgtttagctgtacatacttgggcgtctctacgcattttgccggattagcgaaaagaagttctttcctggtcatattcggtctctcttcattgcaccatattgtgacacatgtgtattcattttgtcatactaggatatggctgttcaccaataatgcccccctcaagtagcgacaacaacctccctcgcagccatatcatatacatccccctccctcaaaaaatagaatctctggtcaacaggcggaatagtcttcatatcactcccctccctcgcccaaaacttcccatcccaaaccccacaataagaatgtcccaaaatcgtcgctctgtctccctcaacaaccaacgccgtattctcatcacaccccaaccccaaaagctcaggatactccttcaaaatatcaaacatatcaaactgccgtcctctaacaaggacatgttgatccacagccacaccccgtaaatacccaaaacccaccgtatgatcaccaaccataacctgattattcgccgtatcaccgcgtgcaagaaaactagcctggatactcgcacccgcactacttcccccaataacaccacccctatctaacacaccccggaacgcggcttctgctttagtccctgcgtatgcgtccacgagacgccattgccgaccgcctacgaaccatatacctgttgcgttgaggagcggcgcgatgaaggagtctgtgtctgctactgctgggtcgtatgtatgtagtactgttacggaactagcgcctagtcgcaagagtgtgggcgctgggggatagtcttgtgggtatgtttcctgttcgccgtctgcggtggtgattacgattattgggccgccgtgcgcgcgggtgactacttcggcgtagattttatcgtctagtgtgccgccgcctactacgacgagagatcctgctgcggggccgacggtgggtgcttggcggggtgcgggctgggggaaggacatcgtggttgtggcgaggaggagggtggtgagggtgagggaggggagtgagatgcgcattttgaaatatctcgagggcttcaaatttggtggcgaggaagtggtatgtgaagttggggattgtcaattgagatgctattcacggtctcgtcgccagcacagaacaggaagacctaggtcggagggcatctatgattctcacaccttttatacactcaattaccatagcttctacgactgttctagatactcaaataccatcctctgaccatcatcacatatcaatcgttaaatctcacaccatactcaagaaatccgataggatcgcgtatgcgtcgccgtttcccgggaaaggcaggtggtggtgggaaccgtcgccgtgcataatctccgcgtgggctgccgttggcggtcaaagtcaagaaatgacatgcttgtgggcgaggatggcgagatacccgggtcggaggtgcatgtcttggcaatggcaaagacgaacggtagttctggtggcgatccccaattgctcgatgaccagtctcctgtcgcgcaacgagacgcagcttctggggttctgtggtatcaatatcgcggacagcgaagaaaataagagaatttggtcatcattatggcagagacattagcattcgatcctatgagccccacctgatttataaacaccttttggataagatctaacccttctactcctccggaccgtccataccgggaccgggaccaccttgccgacccatttgacgagccttgagcatttcgtcgcacaacaggaggttggacgctatacttgacgacgaggcgatgcaatttcttaatacacggaaggagtcgtagacaccctcaagtgtagggtccatgggttgaccgagaacaaggtcaaggccaacaacgttgccgtcggcgtgttcgtcttggagggaggcgactaggaggaaatcagcgccgtggacgagttgaacggaagagctcaatacttacgtgcgtcttggatgtcgtggccagcgtttgccgccagcgtcttggggatgatgagcagagcatcagcaaacgcatcgacaccccatttcgctttacccttgaccgtcctcttgaaagcgtcgctcttcaagtgagcagcgcagcctacctggaaagcaccgccgccggggacgactgacttgtctacaatcatgttgtatacgcttcgaaggccatcgcggacagcatccgtaatttgtgtaatcgtgtgagcatttggacctttgatcatgagcgtgaccgacttgggatccttgacctcctcaatgaaggtgtacttctcctcgcccagctgctgctcgtacactaggccagcccagccgagaatgtcgggtgacaggtcttctacgctgttctgagcaacacctccgcagatgagctgcagacgctccatgtttctcctcttggctctccgcagagcgaaaatgccattctttgccaggacgtcgagagacaaggggtcgatgcccttctggttgacaatcacgaagctcttcttggggtcattgccgcagacctccttcttcagctcgacaatcttcttcagcttggagtcgacgaagcggcgctcgctctcgacgagcttctcgcgctggtcggcgctggagtagaagaagcccgagttgatctccgacttctcgtattctaaactgacgttcatggtcaagatgaatgcgttctcgagtctcttgggcatgtcggggtgtcttgcgccgtggtcgagggcaaggccacggatgagctgggtatctgaggcagtgcggtgctgcatcttcatgatctcgaccatgtgcaggtcgggtttggccggggcctggtagatggcgaggacggcgtcgacgatatcaggggtgagcttcttggcgaggctggagttgagctttgtggatagggaggtgcgggcgacggagaggaggagttcgcggtcgacttctttgggtagcttgaactcgtcgaggaactagac

SEQ ID NO: 35172 - DNA, 690 bp, Muscodor strobelii
  misc_feature: SGI cDNA ID NO. 572170
  misc_feature: Encodes the peptide sequence at SEQ ID NO 35173
aatcgcgacaatcccactgaaaacgggtcccaactccacatcgacaccttcaaagtctacgagggtggtgaggccagctggccgctccagtcgcagcgaggttttgccgaaattgcagtggaccctggctggaaagatgaaatcgctaagatgcgctatgctgcttcgcttgccggcattgaggtgcctggtttccgcgctgatgagtatttggtcatcaaagaagacgagcttgaagaattgcgccgtcaggcaaagctcggccagacggccatgacattgtatgtcaagaattctgatcgacgtaagttaaacatatgcacagcccatttgagacagaccaatatcgacaattatctgacgagtatgcagtccggagatgatgaggacaccagtactggcactggccctattgctgtcggagacaccgacaccgaagccgatatgcctgacgcccacggccagaacaacagtgtcgacatcgccgctgaagacgtgcgccacgagaacggagttcaaatgatgatgttgaccctgtcgtcgcctatgccgatgccgacaatgccaacaatgttgatgatgagcaagatgactacatctagactcgcttataaactcgagactcccacaaggtcaatgcgcctttgcatacaggagtatctggaagatttatttgatgaattcggctga

SEQ ID NO: 35173 - protein, 229 aa, Muscodor strobelii
  misc_feature: SGI Peptide ID NO. 572170
NRDNPTENGSQLHIDTFKVYEGGEASWPLQSQRGFAEIAVDPGWKDEIAKMRYAASLAGIEVPGFRADEYLVIKEDELEELRRQAKLGQTAMTLYVKNSDRRKLNICTAHLRQTNIDNYLTSMQSGDDEDTSTGTGPIAVGDTDTEADMPDAHGQNNSVDIAAEDVRHENGVQMMMLTLSSPMPMPTMPTMLMMSKMTTSRLAYKLETPTRSMRLCIQEYLEDLFDEFG

SEQ ID NO: 35174 - DNA, 568 bp, Muscodor strobelii
  misc_feature: SGI EST ID NO. CUFF.83709.0
  misc_feature: Variant of the nucleotide sequence at SEQ ID NO 35172
atcaaagaagacgagcttgaagaattgcgccgtcaggcaaagctcggccagacggccatgacattgtatgtcaagaattctgatcgactccggagatgatgaggacaccagtactggcactggccctattgctgtcggagacaccgacaccgaagccgatatgcctgacgcccacggccagaacaacagtgtcgacatcgccgctgaagacgtgcgccacgagaacggagttcaaatgatgatgttgaccctgtcgtcgcctatgccgatgccgacaatgccaacaatgttgatgatgagcaagatgactacatctagactcgcttataaactcgagactcccacaaggtcaatgcgcctttgcatacaggagtatctggaagatttatttgatgaattcggctgactatgtggtgaaacccctggctacacaacttaaccgcttaatcggaatgcacgatggacaggtatcagacagtttttatggcatgagaatgcttaaagctcccattctcaaggcgacttgatgagcgtcgctggttcttataatgtcaaaattgcgttgctt

SEQ ID NO: 35175 - DNA, 336 bp, Muscodor strobelii
  misc_feature: SGI cDNA ID NO. 572171
  misc_feature: Reduced expression when VOC is produced
  misc_feature: Encodes the peptide sequence at SEQ ID NO 35176
agcactattgctttcaattcgcgatggaagtatattctgcaacttcgattcttcaaacaattacatgctgagcagaagaatcccgaggatagggcggcggctgcggtgtggtggtgggttgtgctcgcgcatgaacttgcgcataacattattcagccgcataatgctgatcatagctactataccgagtccttcatccagaattatttcccgaagatgatgcttatcgcgacgagaatggcgaatacggaaccaccgcagctacaggctccgcttgtgccgcagagagctggaacgaagggttctgaggctccaccaccgtatagggaacgttga

SEQ ID NO: 35176 - protein, 111 aa, Muscodor strobelii
  misc_feature: SGI Peptide ID NO. 572171
  misc_feature (1)..(74): NCBI GI: 145607161 Blast Desc: MGG_04037 [Magnaporthe grisea 70-15] gi|145014759|gb|EDJ99327.1| MGG_04037 [Magnaporthe grisea 70-15]
  misc_feature (1)..(93): NCBI GI: 46123439 Blast Desc: FG06097.1 [Gibberella zeae PH-1]
  misc_feature (1)..(79): NCBI GI: 156048576 Blast Desc: SS1G_09019 [Sclerotinia sclerotiorum 1980] gi|154693416|gb|EDN93154.1| SS1G_09019 [Sclerotinia sclerotiorum 1980]
  misc_feature (1)..(108): NCBI GI: 256731424 Blast Desc: [Nectria haematococca mpVI 77-13-4]
  misc_feature (2)..(108): NCBI GI: 164426926 Blast Desc: NCU03811 [Neurospora crassa OR74A] gi|157071533|gb|EAA31964.2| conserved [Neurospora crassa OR74A]
  misc_feature (1)..(74): NCBI GI: 171694105 Blast Desc: protein product [Podospora anserina] gi|170947001|emb|CAP73805.1| protein product [Podospora anserina]
  misc_feature (2)..(108): NCBI GI: 16944574 Blast Desc: [Neurospora crassa]
  misc_feature (2)..(82): NCBI GI: 145250147 Blast Desc: An15g00480 [Aspergillus niger] gi|134082100|emb|CAK42217.1| protein product [Aspergillus niger]
  misc_feature (2)..(96): NCBI GI: 261191009 Blast Desc: HATPase_c domain-containing protein [Ajellomyces dermatitidis SLH14081] gi|239590957|gb|EEQ73538.1| HATPase_c domain-containing protein [Ajellomyces dermatitidis SLH14081]
  misc_feature (2)..(96): NCBI GI: 239613139 Blast Desc: HATPase_c domain-containing protein [Ajellomyces dermatitidis ER-3]
  misc_feature: Useful for introducing or modulating the production of volatile compounds
STIAFNSRWKYILQLRFFKQLHAEQKNPEDRAAAAVWWWVVLAHELAHNIIQPHNADHSYYTESFIQNYFPKMMLIATRMANTEPPQLQAPLVPQRAGTKGSEAPPPYRER

SEQ ID NO: 35177 - DNA, 567 bp, Muscodor strobelii
  misc_feature: SGI EST ID NO. CUFF.83713.0
  misc_feature: Variant of the nucleotide sequence at SEQ ID NO 35175
caacttcgattcttcaaacaattacatgctgagcagaagaatcccgaggatagggcggcggctgcggtgtggtggtgggttgtgctcgcgcatgaacttgcgcataacattattcagccgcataatgctgatcatagctactataccgagtccttcatccagaattatttcccgaagatgatgcttatcgcgacgagaatggcgaatacggaaccaccgcagctacaggctccgcttgtgccgcagagagctggaacgaagggttctgaggctccaccaccgtatagggaacgttgaggtgttgatgcctgggtttggtagatgtacaccattagtggaaacaagacatcagatgcgagatgttaaatattagagagacaatcatgctattgtgtatggggagtgcccggcgtattgttgcattgggtggcgcttgatacatatatttagattgagcgcatagagacactggcgccttttcgcatggcgttctggatgcgggtttgttgtgatacatagtagggaatatacagagtttttttattacgttacttagagcttctgggc

SEQ ID NO: 35178 - DNA, 351 bp, Muscodor strobelii
  misc_feature: SGI cDNA ID NO. 572172
  misc_feature: Encodes the peptide sequence at SEQ ID NO 35179
atgcgatcccacgatgccctcaatagcgaagacgcaaagcaagcccagtctgaggccataaaaggagctggatacggtgcactaaaatggggcgctgcggcggctgcggtggctggtcttggttatgccatgtcgccggtatatcgtgggctgactctgcagtttaaagtatatcttcaaatgtcaggcatgatagtaggtggcatgatcgaagcagattcaaggatgaggcaatatgagcatcatattcgtactcagcggcggatagcacagaatcgagctatgtgggagagtttagagatggaggatgatgagctaccgcccaggaggacgtctgaaccgaagaaatga

SEQ ID NO: 35179 - protein, 116 aa, Muscodor strobelii
  misc_feature: SGI Peptide ID NO. 572172
  misc_feature (1)..(105): NCBI GI: 116206664 Blast Desc: CHGG_02625 [Chaetomium globosum CBS 148.51] gi|88183222|gb|EAQ90690.1| CHGG_02625 [Chaetomium globosum CBS 148.51]
  misc_feature (10)..(105): NCBI GI: 85102769 Blast Desc: NCU01299 [Neurospora crassa OR74A] gi|16944588|emb|CAD11363.1| [Neurospora crassa] gi|28922930|gb|EAA32149.1| [Neurospora crassa OR74A]
  misc_feature (1)..(102): NCBI GI: 46125647 Blast Desc: FG07201.1 [Gibberella zeae PH-1]
  misc_feature (10)..(100): NCBI GI: 171692211 Blast Desc: protein product [Podospora anserina] gi|170946054|emb|CAP72855.1| protein product [Podospora anserina]
  misc_feature (1)..(116): NCBI GI: 261351649 Blast Desc: conserved [Verticillium albo-atrum VaMs.102]
  misc_feature (1)..(102): NCBI GI: 256731357 Blast Desc: NECHADRAFT_84743 [Nectria haematococca mpVI 77-13-4]
  misc_feature (1)..(100): NCBI GI: 189190422 Blast Desc: conserved [Pyrenophora tritici-repentis Pt-1C-BFP] gi|187973156|gb|EDU40655.1| conserved [Pyrenophora tritici-repentis Pt-1C-BFP]
  misc_feature (1)..(102): NCBI GI: 145609345 Blast Desc: MGG_07527 [Magnaporthe grisea 70-15] gi|145016724|gb|EDK01154.1| MGG_07527 [Magnaporthe grisea 70-15]
  misc_feature (29)..(105): NCBI GI: 156064853 Blast Desc: SS1G_00434 [Sclerotinia sclerotiorum 1980] gi|154691296|gb|EDN91034.1| SS1G_00434 [Sclerotinia sclerotiorum 1980]
  misc_feature (8)..(105): NCBI GI: 169611869 Blast Desc: SNOG_09049 [Phaeosphaeria nodorum SN15] gi|111062121|gb|EAT83241.1| SNOG_09049 [Phaeosphaeria nodorum SN15]
MRSHDALNSEDAKQAQSEAIKGAGYGALKWGAAAAAVAGLGYAMSPVYRGLTLQFKVYLQMSGMIVGGMIEADSRMRQYEHHIRTQRRIAQNRAMWESLEMEDDELPPRRTSEPKK

SEQ ID NO: 35180 - DNA, 2432 bp, Muscodor strobelii
  misc_feature: SGI EST ID NO. CUFF.83760.0
  misc_feature: Variant of the nucleotide sequence at SEQ ID NO 35178
taacttctttgtagtaagtgacctgacctgtaactattagaaaccagctcttcgtcctaaaacccacggccccgcgaaaagtcgtgagaactagctaacttaatacctttccggctgctagatctcctcgactgtgcttctggcggtcgcagattcttcacaactaagcgtggttacatgggaactggacctgtcgacatgcagattggagatagtgttgctttgctcatgggtagcgaagtaccattcatcttgcgcagttgcatgcctcgaaggtgtgacagggcggtgatacatgttctctttacacagggaacaactttcattcgcgccggtaagggagccacagtcttggagacaggggctggccattgttcaagtgaacaccaggcttatcgcgtagttggggatgcctatgttcaaggcctcgtgagaaaggaagaaaatgcccaacagattgcatcgggaacgatattcctggtgtaaataaacgagggccattcatttagatgtattttatattgaccacatgatacccagtctgattccagcatcctgcgatttaaggggcctgggcgttacgggcagattgctccacctcgaaataccgttgagggaatgtagaatacaggtacatgctctgaaacattgctagtattgtcgagaacgagacaaatgagaatcaatcgtattcaatacgcatagaataagatgactataccgctatgcttgggaataataacagcaatgccgtcgggtgccagatgtaaaacgatgacgcaggaaatacaatcggcgggtcagactccaaagcccgacagctccaccaaacaagctcccgcatgcaccatcacaccaacgtcgtgatgagattatcggcaacactgtttccaaccatatcttctatctcaagctatcctcgactactcgaacaccacgtgtagtctcaattggctccttaaaacaagctgcgcgcattttgagccgagctatcggcctttatacccctgccggccgcacaaattcctcatcaaataccgatcttctggactaccagatgcgcatgcaccgcatgacatagattatgcgatcccacgatgccctcaatagcgaagacgcaaagcaagcccagtctgaggccataaaaggagctggatacggtgcactaaaatggggcgctgcggcggctgcggtggctggtcttggttatgccatgtcgccggtatatcgtgggctgactctgcagtttaaagtatatcttcaaatgtcaggcatgatagtaggtggcatgatcgaagcagattcaaggatgaggcaatatgagcatcatattcgtactcagcggcggatagcacagaatcgagctatgtgggagagtttagagatggaggatgatgagctaccgcccaggaggacgtctgaaccgaagaaatgatgttcattaccgtcgtgaacttgtcctctatagtcttttctcattgttccgacgtctgtacaaaagcacttctgtctgtaaatacttacatgtatcattcagctacatgaagggaacatggaatgtttcccgcccgagaaagcacctaagatgtccgtccatctcgcgaaacgccatgctatgcaagttccattacctctccgtcaccaattttcaccctcctccccatagacttaagtctcttacaagatcctctatttggacttgacctcaaatttcttaggatccatgttgatcttgcacaagcgcgcaacgcagccgctgagctgaagcagagtctgcacaccctcgaggatcttcatatgcgtgaatccgatctcgcgaataaattctagcttcgtgtgctcgccgagcgttggaatggtcttggttaccttgaacatggtactgataatatcatggcaagagtatcccaaatcccacagctccttgagggtgtccagcgcactatcaatgttgccctcgtgacaagcttttagcatggcctgcaccttgatcggatgcggggagtcgacaaccttgaacacgttgtctccgctgacaaacccgaaaccagccgatgtactctgcaagttattgatagcctgtcgcatgtctccctcagcactgaatacgagggcagccagtccctcgtcgctgtattcgactttctccgcttcgatgatttgcataagtcgcttcacgacctgtgcatcggtcaatcgcccgtatcgtagaatagcacaacgcgactggagtggctcgatgatcttgttggactggttgcaggcgaaggcaaaacgcgtcgtgtttgagtagatctccatcgtacggcgcagagcttgttgtgcgcccgaagtcatgctgtcagcttcgtcgagaatgacaagcttatgcctgcctgcgggcaatgtgaccttcttctgagcgaagcctttaattcggtttcgtactacat

SEQ ID NO: 35181 - DNA, 1077 bp, Muscodor strobelii
  misc_feature: SGI cDNA ID NO. 572173
  misc_feature: Encodes the peptide sequence at SEQ ID NO 35182
atgccggtcgcaaagccagttgagcagaaaggcgaatcatcgacctcagctgccaagaaaattctcgcctcaactactagcacttcgaccacatacgaactgccatgggttgagaaatacagacctgtcttcctagacgatgtagtcggcaatacagaaacgatcgagcgattgaagatcatagcaaaagatggcaatatgccacacgtcatcatatccggcatgcctggtattggcaagactaccagtgtcctgtgtctggctagacaactgcttggcgacgcgtacaaagaggccgtgttggagcttaatgctagtgacgaacgaggtatcgatgtagtacgaaaccgaattaaaggcttcgctcagaagaaggtcacattgcccgcaggcaggcataagcttgtcattctcgacgaagctgacagcatgacttcgggcgcacaacaagctctgcgccgtacgatggagatctactcaaacacgacgcgttttgccttcgcctgcaaccagtccaacaagatcatcgagccactccagtcgcgttgtgctattctacgatacgggcgattgaccgatgcacaggtcgtgaagcgacttatgcaaatcatcgaagcggagaaagtcgaatacagcgacgagggactggctgccctcgtattcagtgctgagggagacatgcgacaggctatcaataacttgcagagtacatcggctggtttcgggtttgtcagcggagacaacgtgttcaaggttgtcgactccccgcatccgatcaaggtgcaggccatgctaaaagcttgtcacgagggcaacattgatagtgcgctggacaccctcaaggagctgtgggatttgggatactcttgccatgatattatcagtaccatgttcaaggtaaccaagaccattccaacgctcggcgagcacacgaagctagaatttattcgcgagatcggattcacgcatatgaagatcctcgagggtgtgcagactctgcttcagctcagcggctgcgttgcgcgcttgtgcaagatcaacatggatcctaagaaatttgaggtcaagtccaaatag

SEQ ID NO: 35182 - protein, 358 aa, Muscodor strobelii
  misc_feature: SGI Peptide ID NO. 572173
  misc_feature (69)..(240): Pfam Id: PF00004 Pfam Desc: ATPase family associated with various cellular activities (AAA)
  misc_feature (254)..(343): Pfam Id: PF08542 Pfam Desc: Replication factor C
  misc_feature (69)..(91): Pfam Id: PF07726 Pfam Desc: ATPase family associated with various cellular activities (AAA)
  misc_feature (1)..(358): NCBI GI: 39972449 Blast Desc: conserved [Magnaporthe grisea 70-15] gi|145016723|gb|EDK01153.1| conserved [Magnaporthe grisea 70-15]
  misc_feature (1)..(358): NCBI GI: 261351650 Blast Desc: replication factor C subunit 4 [Verticillium albo-atrum VaMs.102]
  misc_feature (1)..(355): NCBI GI: 46125645 Blast Desc: FG07200.1 [Gibberella zeae PH-1]
  misc_feature (1)..(358): NCBI GI: 116206666 Blast Desc: conserved [Chaetomium globosum CBS 148.51] gi|88183223|gb|EAQ90691.1| conserved [Chaetomium globosum CBS 148.51]
  misc_feature (1)..(358): NCBI GI: 28950096 Blast Desc: REPLICATION FACTOR C (40 KDA SUBUNIT) [Neurospora crassa]
  misc_feature (11)..(356): NCBI GI: 154322657 Blast Desc: conserved [Botryotinia fuckeliana B05.10] gi|150848005|gb|EDN23198.1| conserved [Botryotinia fuckeliana B05.10]
  misc_feature (1)..(354): NCBI GI: 171692201 Blast Desc: protein product [Podospora anserina] gi|170946049|emb|CAP72850.1| protein product [Podospora anserina]
  misc_feature (1)..(358): NCBI GI: 164426330 Blast Desc: activator 1 37 kDa subunit [Neurospora crassa OR74A] gi|157071292|gb|EDO65226.1| activator 1 37 kDa subunit [Neurospora crassa OR74A]
  misc_feature (11)..(354): NCBI GI: 238842758 Blast Desc: replication factor C subunit 4 [Microsporum canis CBS 113480]
  misc_feature (10)..(354): NCBI GI: 119196513 Blast Desc: conserved [Coccidioides immitis RS]
  misc_feature (40)..(298): SWISSPROT Homolog: EC 2.7.7.7 DNA-directed DNA polymerase
MPVAKPVEQKGESSTSAAKKILASTTSTSTTYELPWVEKYRPVFLDDVVGNTETIERLKIIAKDGNMPHVIISGMPGIGKTTSVLCLARQLLGDAYKEAVLELNASDERGIDVVRNRIKGFAQKKVTLPAGRHKLVILDEADSMTSGAQQALRRTMEIYSNTTRFAFACNQSNKIIEPLQSRCAILRYGRLTDAQVVKRLMQIIEAEKVEYSDEGLAALVFSAEGDMRQAINNLQSTSAGFGFVSGDNVFKVVDSPHPIKVQAMLKACHEGNIDSALDTLKELWDLGYSCHDIISTMFKVTKTIPTLGEHTKLEFIREIGFTHMKILEGVQTLLQLSGCVARLCKINMDPKKFEVKSK

SEQ ID NO: 35183 - DNA, 3080 bp, Muscodor strobelii
  misc_feature: SGI EST ID NO. CUFF.83761.1
  misc_feature: Variant of the nucleotide sequence at SEQ ID NO 35181
cagcattaacccattttagactagcggtaccatgagctgcgacgcgccttcaatgttgctcatccccagcacgcgtaaagtgattttgggtgggctgcaagaatcggaaagcatcgtcccaacacatctttttaaacgacagttctctacctcaacacagcctcgcacagcaagatgccggtcgcaaagccagttgagcagaaaggcgaatcatcgacctcagctgccaagaaaattctcgcctcaactactagcacttcgaccacatacgaactgccatgggttgagaaatacagacctgtcttcctagacgatgtagtcggcaatacagaaacgatcgagcgattgaagatcatagcaaaagatggcaatatgccacacgtcatcatatccggcatgcctggtattggcaagactaccagtgtcctgtgtctggctagacaactgcttggcgacgcgtacaaagaggccgtgttggagcttaatgctagtgacgaacgaggtatcgatgtagtacgaaaccgaattaaaggcttcgctcagaagaaggtcacattgcccgcaggcaggcataagcttgtcattctcgacgaagctgacagcatgacttcgggcgcacaacaagctctgcgccgtacgatggagatctactcaaacacgacgcgttttgccttcgcctgcaaccagtccaacaagatcatcgagccactccagtcgcgttgtgctattctacgatacgggcgattgaccgatgcacaggtcgtgaagcgacttatgcaaatcatcgaagcggagaaagtcgaatacagcgacgagggactggctgccctcgtattcagtgctgagggagacatgcgacaggctatcaataacttgcagagtacatcggctggtttcgggtttgtcagcggagacaacgtgttcaaggttgtcgactccccgcatccgatcaaggtgcaggccatgctaaaagcttgtcacgagggcaacattgatagtgcgctggacaccctcaaggagctgtgggatttgggatactcttgccatgatattatcagtaccatgttcaaggtaaccaagaccattccaacgctcggcgagcacacgaagctagaatttattcgcgagatcggattcacgcatatgaagatcctcgagggtgtgcagactctgcttcagctcagcggctgcgttgcgcgcttgtgcaagatcaacatggatcctaagaaatttgaggtcaagtccaaatagaggatcttgtaagagacttaagtctatggggaggagggtgaaaattggtgacggagaggtaatggaacttgcatagcatggcgtttcgcgagatggacggacatcttaggtgctttctcgggcgggaaacattccatgttcccttcatgtagctgaatgatacatgtaagtatttacagacagaagtgcttttgtacagacgtcggaacaatgagaaaagactatagaggacaagttcacgacggtaatgaacatcatttcttcggttcagacgtcctcctgggcggtagctcatcatcctccatctctaaactctcccacatagctcgattctgtgctatccgccgctgagtacgaatatgatgctcatattgcctcatccttgaatctgcttcgatcatgccacctactatcatgcctgacatttgaagatatctgtgagcttgtcagttggtcacgtgctctctcatatgatgttgcaggagtcgatgatgactctgatcatagacctccgtccatgaacagtctatagcagttccatagatgaataggcgaggagaaggtgttcggcctacactttaaactgcagagtcagcccacgatataccggcgacatggcataaccaagaccagccaccgcagccgccgcagcgccccattttagtgcaccgtatccagctccttttatggcctcagactgggcttgctttgcgtcttcgctattgagggcatcgtgggatcgcataatctatgtcatgcggtgcatgcgcatctggtagtccagaagatcggtatttgatgaggaatttgtgcggccggcaggggtataaaggccgatagctcggctcaaaatgcgcgcagcttgttttaaggagccaattgagactacacgtggtgttcgagtagtcgaggatagcttgagatagaagatatggttggaaacagtgttgccgataatctcatcacgacgttggtgtgatggtgcatgcgggagcttgtttggtggagctgtcgggctttggagtctgacccgccgattgtatttcctgcgtcatcgttttacatctggcacccgacggcattgctgttattattcccaagcatagcggtatagtcatcttattctatgcgtattgaatacgattgattctcatttgtctcgttctcgacaatactagcaatgtttcagagcatgtacctgtattctacattccctcaacggtatttcgaggtggagcaatctgcccgtaacgcccaggccccttaaatcgcaggatgctggaatcagactgggtatcatgtggtcaatataaaatacatctaaatgaatggccctcgtttatttacaccaggaatatcgttcccgatgcaatctgttgggcattttcttcctttctcacgaggccttgaacataggcatccccaactacgcgataagcctggtgttcacttgaacaatggccagcccctgtctccaagactgtggctcccttaccggcgcgaatgaaagttgttccctgtgtaaagagaacatgtatcaccgccctgtcacaccttcgaggcatgcaactgcgcaagatgaatggtacttcgctacccatgagcaaagcaacactatctccaatctgcatgtcgacaggtccagttcccatgtaaccacgcttagttgtgaagaatctgcgaccgccagaagcacagtcgaggagatctagcagccggaaaggtattaagttagctagttctcacgacttttcgcggggccgtgggttttaggacgaagagctggtttctaatagttacaggtcaggtcacttactacaaagaagtta

SEQ ID NO: 35184 - DNA, 1329 bp, Muscodor strobelii
  misc_feature: SGI cDNA ID NO. 572174
  misc_feature: Reduced expression when VOC is produced
  misc_feature: Encodes the peptide sequence at SEQ ID NO 35185
atgatgtccaagagggccttttcatccgcacaccaagcaaccaaggccacgaaatgggttcctaagtctggcacttatcccaagggattcaaggtcaacggcacgatagtgggtgtgaaacccagcaataccaccaagcccgatctcgcattcattgcctcggaaacaccatgcgcagcagcggcggtggtcacgaagacgaagtttcatgctgcgcccatttcattctgcaaggatctactcaaaacacaaagctcgaatattcgcggagtcatcatcaactcaggaaatgccaatgcggtgacgggacctggtggtctggcagatgccgctgctatgtcacaggaggccgataagtgcttgaacgcagagaactcgacgctggttatgagcacaggcgtcattggacaaaggctaccgatcaagaagatcctcgatggcgtgcccgtcgcccatcaagggctcggggactctcacaaacactggatgacttgtgcaacggccatttgcactaccgacacatttcccaaattagtatccaagactttctctcttccatcttcgccatcaattgagtacagtattgccggtctcaccaaaggtgcgggtatgatctgcccgaacatggctacacttttaggtgtcattgctacagatgccccgatcgcggctccggcgctgcagactgcccttaaagccgcaacgcacaactcttttaacagcgtcagtgttgacaatgacatgtccactaacgatattgttgccgtgctcgccaacggcgctgcaggcgggaaggaagtgacgaccgaggctactgcagattttgaggctttccagaccgttctatccgatctcgccaccgaccttgcacaactattggttcgcgatggcgagggtgctaccaagttcattactattcgggtcactgatgctttgagtgaagctggtgcgcgacagattgcggccacagttgcccaatcctcactcttcaagactgctatgtacggcaaggatgccaactggggaagaattgtggcatcggccgggtcggcattcgtccgaccagggcagacacaagtcgacgatgcaccagatttaaacccagacaccacgacagtgtcgcttatccctgctgatggaagcgcagagctgaagcttcttgtggacggtgttccagaggttgtcgacgagacgcgggcagcggagatcttagagcatgaggacatcgagattataatcagtttaggcacaggatcacatgaggccacacattggacgtgtgatatgagccacgaatatgtcactattaatggcgactacaggacatag

SEQ ID NO: 35185 - protein, 442 aa, Muscodor strobelii
  misc_feature: SGI Peptide ID NO. 572174
  misc_feature (30)..(442): Pfam Id: PF01960 Pfam Desc: ArgJ family
  misc_feature (5)..(442): NCBI GI: 171692203 Blast Desc: protein product [Podospora anserina] gi|170946050|emb|CAP72851.1| protein product [Podospora anserina]
  misc_feature (5)..(442): NCBI GI: 145607385 Blast Desc: MGG_04210 [Magnaporthe grisea 70-15] gi|145014953|gb|EDJ99521.1| MGG_04210 [Magnaporthe grisea 70-15]
  misc_feature (3)..(442): NCBI GI: 154311381 Blast Desc: BC1G_06543 [Botryotinia fuckeliana B05.10] gi|150850940|gb|EDN26133.1| BC1G_06543 [Botryotinia fuckeliana B05.10]
  misc_feature (18)..(442): NCBI GI: 116206668 Blast Desc: CHGG_02627 [Chaetomium globosum CBS 148.51] gi|88183224|gb|EAQ90692.1| CHGG_02627 [Chaetomium globosum CBS 148.51]
  misc_feature (7)..(442): NCBI GI: 28950097 Blast Desc: glutamate N-acetyltransferase precursor [Neurospora crassa]
  misc_feature (18)..(442): NCBI GI: 164426328 Blast Desc: NCU10468 [Neurospora crassa OR74A] gi|157071291|gb|EDO65225.1| NCU10468 [Neurospora crassa OR74A]
  misc_feature (5)..(442): NCBI GI: 256731423 Blast Desc: [Nectria haematococca mpVI 77-13-4]
  misc_feature (1)..(442): NCBI GI: 46123433 Blast Desc: FG06094.1 [Gibberella zeae PH-1]
  misc_feature (5)..(442): NCBI GI: 261351643 Blast Desc: arginine biosynthesis bifunctional protein argJ [Verticillium albo-atrum VaMs.102]
  misc_feature (18)..(442): NCBI GI: 258571744 Blast Desc: ArgJ family protein [Uncinocarpus reesii 1704] gi|237904945|gb|EEP79346.1| ArgJ family protein [Uncinocarpus reesii 1704]
  misc_feature (17)..(442): SWISSPROT Homolog: EC 2.3.1.1 Amino-acid N-acetyltransferase
  misc_feature (17)..(442): SWISSPROT Homolog: EC 2.3.1.35 Glutamate N-acetyltransferase
  misc_feature: Useful for introducing or modulating the production of volatile compounds
MMSKRAFSSAHQATKATKWVPKSGTYPKGFKVNGTIVGVKPSNTTKPDLAFIASETPCAAAAVVTKTKFHAAPISFCKDLLKTQSSNIRGVIINSGNANAVTGPGGLADAAAMSQEADKCLNAENSTLVMSTGVIGQRLPIKKILDGVPVAHQGLGDSHKHWMTCATAICTTDTFPKLVSKTFSLPSSPSIEYSIAGLTKGAGMICPNMATLLGVIATDAPIAAPALQTALKAATHNSFNSVSVDNDMSTNDIVAVLANGAAGGKEVTTEATADFEAFQTVLSDLATDLAQLLVRDGEGATKFITIRVTDALSEAGARQIAATVAQSSLFKTAMYGKDANWGRIVASAGSAFVRPGQTQVDDAPDLNPDTTTVSLIPADGSAELKLLVDGVPEVVDETRAAEILEHEDIEIIISLGTGSHEATHWTCDMSHEYVTINGDYRT

SEQ ID NO: 35186 - DNA, 2664 bp, Muscodor strobelii
  misc_feature: SGI EST ID NO. CUFF.83724.0
  misc_feature: Variant of the nucleotide sequence at SEQ ID NO 35184
gaaaaacatgccgatttgaagcttgcaggccaattgctcttgtcaatccagtattctctcttatctggatgggcaattgactcaattgcttcaagatgatgtccaagagggccttttcatccgcacaccaagcaaccaaggccacgaaatgggttcctaagtctggcacttatcccaagggattcaaggtcaacggcacgatagtgggtgtgaaacccagcaataccaccaagcccgatctcgcattcattgcctcggaaacaccatgcgcagcagcggcggtggtcacgaagacgaagtttcatgctgcgcccatttcattctgcaaggatctactcaaaacacaaagctcgaatattcgcggagtcatcatcaactcaggaaatgccaatgcggtgacgggacctggtggtctggcagatgccgctgctatgtcacaggaggccgataagtgcttgaacgcagagaactcgacgctggttatgagcacaggcgtcattggacaaaggctaccgatcaagaagatcctcgatggcgtgcccgtcgcccatcaagggctcggggactctcacaaacactggatgacttgtgcaacggccatttgcactaccgacacatttcccaaattagtatccaagactttctctcttccatcttcgccatcaattgagtacagtattgccggtctcaccaaaggtgcgggtatgatctgcccgaacatggctacacttttaggtgtcattgctacagatgccccgatcgcggctccggcgctgcagactgcccttaaagccgcaacgcacaactcttttaacagcgtcagtgttgacaatgacatgtccactaacgatattgttgccgtgctcgccaacggcgctgcaggcgggaaggaagtgacgaccgaggctactgcagattttgaggctttccagaccgttctatccgatctcgccaccgaccttgcacaactattggttcgcgatggcgagggtgctaccaagttcattactattcgggtcactgatgctttgagtgaagctggtgcgcgacagattgcggccacagttgcccaatcctcactcttcaagactgctatgtacggcaaggatgccaactggggaagaattgtggcatcggccgggtcggcattcgtccgaccagggcagacacaagtcgacgatgcaccagatttaaacccagacaccacgacagtgtcgcttatccctgctgatggaagcgcagagctgaagcttcttgtggacggtgttccagaggttgtcgacgagacgcgggcagcggagatcttagagcatgaggacatcgagattataatcagtttaggcacaggatcacatgaggccacacattggacgtgtgatatgagccacgaatatgtcactattaatggcgactacaggacatagaacagaagtaagcactacaagatcaaaacccatagagagaattaaatgatatccatcgtcctaccagatgcaccaaactcgcaattcacagctcctcctatgcggtgcgtcctcactcccgggcagagtgaacgcactatgcggacacatgaacttgatcccgctattgtccgtcttgagcgcatcgctatcatagaacttaagagcaagcacctcctctggcttctgctgatcgatgtaaaaccacttatgacgtcctccatccccagactgcgggggtctgggcagcacattctcattgtagtactcctcaacacagcccggcctatttctgtagatccgaggcaagacagtgtactcgaagtcaaagtcccgcgtatccatgacagctaatgggtcgcgctgcacagtctcaaagggtcgccagatactaaacattgcgtatcgcggcccttcgtaaccgcgaccatcccattcccattgcccacccttgcctgctgccatgtcgccagctcctgactcgacaccagcttttcgcatcgcgtcgtcttcggctgctatgatctcgtctctgagacgaaagaattctgttctctcctcctctgtcgtgtattcatctctcttgttttccgtgaaccaagatcccgtcatcgcacgcagatgcgctctcgcacctccaggcgagtagtctgagtgcgtgataaagaatggcgtgagagtcttctcaccccgtcttgggtgtttggggtcaacttggtttggctcgaacccggatgatgcatctctgagggtatgattgatgactactgccgagcgagcgcctagctgttctttgaggagtgagacgatagatgggtaatattgagatgctaatatctctggattcgaggttgacgaaggtgcaggagatataggtaggggctgatgaaagatttggaagccgtaggcttcgtgagtatagcttgataggggcgcgttacgcagatttgttacaggaaggtcgtaagactttatgaggttggaatttggactgaacattgacacatcgtcgattcctgggggcgttgaggatgagtagtagttaaaaggggcgagaaaggtcttcgccggtcccttctccccgtcatatgtcatactcttttctttcgtgatagttgatgttaccgtcgccatgattgatgtaaatcgtgatatagctagctttagatttgtatcagaaattcgatcacgcagaatgaat

SEQ ID NO: 35187 - DNA, 1113 bp, Muscodor strobelii
  misc_feature: SGI cDNA ID NO. 572175
  misc_feature: Reduced expression when VOC is produced
  misc_feature: Encodes the peptide sequence at SEQ ID NO 35188
atggcgacggtaacatcaactatcacgaaagaaaagagtatgacatatgacggggagaagggaccggcgaagacctttctcgccccttttaactactactcatcctcaacgcccccaggaatcgacgatgtgtcaatgttcagtccaaattccaacctcataaagtcttacgaccttcctgtaacaaatctgcgtaacgcgcccctatcaagctatactcacgaagcctacggcttccaaatctttcatcagcccctacctatatctcctgcaccttcgtcaacctcgaatccagagatattagcatctcaatattacccatctatcgtctcactcctcaaagaacagctaggcgctcgctcggcagtagtcatcaatcataccctcagagatgcatcatccgggttcgagccaaaccaagttgaccccaaacacccaagacggggtgagaagactctcacgccattctttatcacgcactcagactactcgcctggaggtgcgagagcgcatctgcgtgcgatgacgggatcttggttcacggaaaacaagagagatgaatacacgacagaggaggagagaacagaattctttcgtctcagagacgagatcatagcagccgaagacgacgcgatgcgaaaagctggtgtcgagtcaggagctggcgacatggcagcaggcaagggtgggcaatgggaatgggatggtcgcggttacgaagggccgcgatacgcaatgtttagtatctggcgaccctttgagactgtgcagcgcgacccattagctgtcatggatacgcgggactttgacttcgagtacactgtcttgcctcggatctacagaaataggccgggctgtgttgaggagtactacaatgagaatgtgctgcccagacccccgcagtctggggatggaggacgtcataagtggttttacatcgatcagcagaagccagaggaggtgcttgctcttaagttctatgatagcgatgcgctcaagacggacaatagcgggatcaagttcatgtgtccgcatagtgcgttcactctgcccgggagtgaggacgcaccgcataggaggagctgtgaattgcgagtttggtgcatctggtag

SEQ ID NO: 35188 - protein, 370 aa, Muscodor strobelii
  misc_feature: SGI Peptide ID NO. 572175
  misc_feature (59)..(370): NCBI GI: 261354428 Blast Desc: GA4 desaturase [Verticillium albo-atrum VaMs.102]
  misc_feature (59)..(370): NCBI GI: 42661490 Blast Desc: GA4 desaturase [Fusarium proliferatum]
  misc_feature (59)..(370): NCBI GI: 16549051 Blast Desc: GA4 desaturase [Gibberella fujikuroi] gi|132449539|gb|ABO33629.1| GA4 desaturase [Fusarium proliferatum]
  misc_feature (61)..(370): NCBI GI: 211970313 Blast Desc: GA4 desaturase [Gibberella moniliformis]
  misc_feature (2)..(370): NCBI GI: 91778676 Blast Desc: Bxe_B1430 [Burkholderia xenovorans LB400] gi|91691336|gb|ABE34534.1| conserved [Burkholderia xenovorans LB400]
  misc_feature (33)..(370): NCBI GI: 91780194 Blast Desc: Bxe_C0126 [Burkholderia xenovorans LB400] gi|91692854|gb|ABE36051.1| Conserved [Burkholderia xenovorans LB400]
  misc_feature (59)..(370): NCBI GI: 46139765 Blast Desc: FG11397.1 [Gibberella zeae PH-1]
  misc_feature (243)..(370): NCBI GI: 169619475 Blast Desc: SNOG_12934 [Phaeosphaeria nodorum SN15] gi|111058614|gb|EAT79734.1| SNOG_12934 [Phaeosphaeria nodorum SN15]
  misc_feature (30)..(370): NCBI GI: 238846123 Blast Desc: GA4 desaturase [Microsporum canis CBS 113480]
  misc_feature (24)..(370): NCBI GI: 242809430 Blast Desc: conserved [Talaromyces stipitatus ATCC 10500] gi|218715992|gb|EED15414.1| conserved [Talaromyces stipitatus ATCC 10500]
  misc_feature: Useful for introducing or modulating the production of volatile compounds
MATVTSTITKEKSMTYDGEKGPAKTFLAPFNYYSSSTPPGIDDVSMFSPNSNLIKSYDLPVTNLRNAPLSSYTHEAYGFQIFHQPLPISPAPSSTSNPEILASQYYPSIVSLLKEQLGARSAVVINHTLRDASSGFEPNQVDPKHPRRGEKTLTPFFITHSDYSPGGARAHLRAMTGSWFTENKRDEYTTEEERTEFFRLRDEIIAAEDDAMRKAGVESGAGDMAAGKGGQWEWDGRGYEGPRYAMFSIWRPFETVQRDPLAVMDTRDFDFEYTVLPRIYRNRPGCVEEYYNENVLPRPPQSGDGGRHKWFYIDQQKPEEVLALKFYDSDALKTDNSGIKFMCPHSAFTLPGSEDAPHRRSCELRVWCIW

SEQ ID NO: 35189 - DNA, 2664 bp, Muscodor strobelii
  misc_feature: SGI EST ID NO. CUFF.83724.0
  misc_feature: Variant of the nucleotide sequence at SEQ ID NO 35187
attcattctgcgtgatcgaatttctgatacaaatctaaagctagctatatcacgatttacatcaatcatggcgacggtaacatcaactatcacgaaagaaaagagtatgacatatgacggggagaagggaccggcgaagacctttctcgccccttttaactactactcatcctcaacgcccccaggaatcgacgatgtgtcaatgttcagtccaaattccaacctcataaagtcttacgaccttcctgtaacaaatctgcgtaacgcgcccctatcaagctatactcacgaagcctacggcttccaaatctttcatcagcccctacctatatctcctgcaccttcgtcaacctcgaatccagagatattagcatctcaatattacccatctatcgtctcactcctcaaagaacagctaggcgctcgctcggcagtagtcatcaatcataccctcagagatgcatcatccgggttcgagccaaaccaagttgaccccaaacacccaagacggggtgagaagactctcacgccattctttatcacgcactcagactactcgcctggaggtgcgagagcgcatctgcgtgcgatgacgggatcttggttcacggaaaacaagagagatgaatacacgacagaggaggagagaacagaattctttcgtctcagagacgagatcatagcagccgaagacgacgcgatgcgaaaagctggtgtcgagtcaggagctggcgacatggcagcaggcaagggtgggcaatgggaatgggatggtcgcggttacgaagggccgcgatacgcaatgtttagtatctggcgaccctttgagactgtgcagcgcgacccattagctgtcatggatacgcgggactttgacttcgagtacactgtcttgcctcggatctacagaaataggccgggctgtgttgaggagtactacaatgagaatgtgctgcccagacccccgcagtctggggatggaggacgtcataagtggttttacatcgatcagcagaagccagaggaggtgcttgctcttaagttctatgatagcgatgcgctcaagacggacaatagcgggatcaagttcatgtgtccgcatagtgcgttcactctgcccgggagtgaggacgcaccgcataggaggagctgtgaattgcgagtttggtgcatctggtaggacgatggatatcatttaattctctctatgggttttgatcttgtagtgcttacttctgttctatgtcctgtagtcgccattaatagtgacatattcgtggctcatatcacacgtccaatgtgtggcctcatgtgatcctgtgcctaaactgattataatctcgatgtcctcatgctctaagatctccgctgcccgcgtctcgtcgacaacctctggaacaccgtccacaagaagcttcagctctgcgcttccatcagcagggataagcgacactgtcgtggtgtctgggtttaaatctggtgcatcgtcgacttgtgtctgccctggtcggacgaatgccgacccggccgatgccacaattcttccccagttggcatccttgccgtacatagcagtcttgaagagtgaggattgggcaactgtggccgcaatctgtcgcgcaccagcttcactcaaagcatcagtgacccgaatagtaatgaacttggtagcaccctcgccatcgcgaaccaatagttgtgcaaggtcggtggcgagatcggatagaacggtctggaaagcctcaaaatctgcagtagcctcggtcgtcacttccttcccgcctgcagcgccgttggcgagcacggcaacaatatcgttagtggacatgtcattgtcaacactgacgctgttaaaagagttgtgcgttgcggctttaagggcagtctgcagcgccggagccgcgatcggggcatctgtagcaatgacacctaaaagtgtagccatgttcgggcagatcatacccgcacctttggtgagaccggcaatactgtactcaattgatggcgaagatggaagagagaaagtcttggatactaatttgggaaatgtgtcggtagtgcaaatggccgttgcacaagtcatccagtgtttgtgagagtccccgagcccttgatgggcgacgggcacgccatcgaggatcttcttgatcggtagcctttgtccaatgacgcctgtgctcataaccagcgtcgagttctctgcgttcaagcacttatcggcctcctgtgacatagcagcggcatctgccagaccaccaggtcccgtcaccgcattggcatttcctgagttgatgatgactccgcgaatattcgagctttgtgttttgagtagatccttgcagaatgaaatgggcgcagcatgaaacttcgtcttcgtgaccaccgccgctgctgcgcatggtgtttccgaggcaatgaatgcgagatcgggcttggtggtattgctgggtttcacacccactatcgtgccgttgaccttgaatcccttgggataagtgccagacttaggaacccatttcgtggccttggttgcttggtgtgcggatgaaaaggccctcttggacatcatcttgaagcaattgagtcaattgcccatccagataagagagaatactggattgacaagagcaattggcctgcaagcttcaaatcggcatgtttttc

SEQ ID NO: 35190 - DNA, 882 bp, Muscodor strobelii
  misc_feature: SGI cDNA ID NO. 572176
  misc_feature: Encodes the peptide sequence at SEQ ID NO 35191
atgaagacctttcgtatcaaccttgccatattggcctatgcaactgtcgctgctgcctcagccatctacagctctacagtacacgatgcagccggcgttgtcgtccctgcaatcactcataagctgcccgtcaacatgtttcggagcaacggtattagtcaccaaaagagatatactgtgaatggcacaaacatcatctcctatagctggtgcggtgccacgcatgccaagccgccatcgggaacattcaaagacgtcaagggcacgttcaaaattcccagctactcaaccgagaatgtgcctggcgggccggggccggacgggccttggttgcttgcgcagtggctcgccatcgacgggctcactgcagacagccctgattgcccgagctttgtgaatgccgggataggacatcttaaaaactaccaaaatgtgacggataaggtttatgcattcgcaaatttttaccctgatccctacatttacttcattgatgtcccagccaagattggggatatagtccatgtaaagctgagcatcgactcaaactccacggcgacatctatcatttccaatctctcacagggcggttccgtctcgactttcatcaacggaacaggtgcgggtacactctgcggtggacagagcgtgcaatggatccttgaggatagcttctcgggcctttccgttttccctgactttgagccgactcatttcacagactgcactgcagataccacgactgggaaaactgtgaccctcaggaatagcactcatgtctacggtcaagaccgcgatggcatcatagcatgcaaaccgacagtattacatcattctagcatgaagatggaatgggttgcgctcgaaggcatgacggtttga

SEQ ID NO: 35191 - protein, 293 aa, Muscodor strobelii
  misc_feature: SGI Peptide ID NO. 572176
  misc_feature (64)..(271): NCBI GI: 116181288 Blast Desc: CHGG_01272 [Chaetomium globosum CBS 148.51] gi|88185569|gb|EAQ93037.1| CHGG_01272 [Chaetomium globosum CBS 148.51]
  misc_feature (67)..(286): NCBI GI: 70982568 Blast Desc: aspergillopepsin, putaitve [Aspergillus fumigatus Af293] gi|66844436|gb|EAL84774.1| aspergillopepsin, putaitve [Aspergillus fumigatus Af293] gi|159122948|gb|EDP48068.1| A1163]
  misc_feature (61)..(258): NCBI GI: 189193169 Blast Desc: acid protease [Pyrenophora tritici-repentis Pt-1C-BFP] gi|187978487|gb|EDU45113.1| acid protease [Pyrenophora tritici-repentis Pt-1C-BFP]
  misc_feature (61)..(285): NCBI GI: 242780216 Blast Desc: aspergillopepsin-2 precursor, [Talaromyces stipitatus ATCC 10500] gi|218719696|gb|EED19115.1| aspergillopepsin-2 precursor, [Talaromyces stipitatus ATCC 10500]
  misc_feature (30)..(252): NCBI GI: 212533183 Blast Desc: aspergillopepsin-2 precursor, [Penicillium marneffei ATCC 18224] gi|210072112|gb|EEA26201.1| aspergillopepsin-2 precursor, [Penicillium marneffei ATCC 18224]
  misc_feature (62)..(272): NCBI GI: 171695636 Blast Desc: protein product [Podospora anserina] gi|170948060|emb|CAP60224.1| protein product [Podospora anserina]
  misc_feature (61)..(286): NCBI GI: 212526204 Blast Desc: aspergillopepsin-2 precursor, [Penicillium marneffei ATCC 18224] gi|210072657|gb|EEA26744.1| aspergillopepsin-2 precursor, [Penicillium marneffei ATCC 18224]
  misc_feature (67)..(230): NCBI GI: 145249222 Blast Desc: An14g03250 [Aspergillus niger] gi|134081628|emb|CAK46562.1| protein product [Aspergillus niger]
  misc_feature (40)..(252): NCBI GI: 242777476 Blast Desc: aspergillopepsin-2 precursor, [Talaromyces stipitatus ATCC 10500] gi|218722660|gb|EED22078.1| aspergillopepsin-2 precursor, [Talaromyces stipitatus ATCC 10500]
  misc_feature (48)..(254): NCBI GI: 169604590 Blast Desc: SNOG_05309 [Phaeosphaeria nodorum SN15] gi|111066580|gb|EAT87700.1| SNOG_05309 [Phaeosphaeria nodorum SN15]
  misc_feature (53)..(234): SWISSPROT Homolog: EC 3.4.23.19 Aspergillopepsin II
MKTFRINLAILAYATVAAASAIYSSTVHDAAGVVVPAITHKLPVNMFRSNGISHQKRYTVNGTNIISYSWCGATHAKPPSGTFKDVKGTFKIPSYSTENVPGGPGPDGPWLLAQWLAIDGLTADSPDCPSFVNAGIGHLKNYQNVTDKVYAFANFYPDPYIYFIDVPAKIGDIVHVKLSIDSNSTATSIISNLSQGGSVSTFINGTGAGTLCGGQSVQWILEDSFSGLSVFPDFEPTHFTDCTADTTTGKTVTLRNSTHVYGQDRDGIIACKPTVLHHSSMKMEWVALEGMTV

SEQ ID NO: 35192 - DNA, 1157 bp, Muscodor strobelii
  misc_feature: SGI EST ID NO. CUFF.83728.0
  misc_feature: Variant of the nucleotide sequence at SEQ ID NO 35190
aaactaccaaaatgtgacggataaggtttatgcattcgcaaatttttaccctgatccctacatttacttcattgatgtcccaggtacgctgccgctgtgcccatagtaatcttagacgcaagattcccaatatgttaggcaacccgcattctctgatagcttcatagccaagattggggatatagtccatgtaaagctgagcatcgactcaaactccacggcgacatctatcatttccaatctctcacagggcggttccgtctcgactttcatcaacggaacaggtgcgggtacactctgcggtggacagagcgtgcaatggatccttgaggatagcttctcgggcctttccgttttccctgactttgagccgactcatttcacagactgcactgcagataccacgactgggaaaactgtgaccctcaggaatagcactcatgtctacggtcaagaccgcgatggcatcatagcatgcaaaccgacagtattacatcattctagcatgaagatggaatgggttgcgctcgaaggcatgacggtttgataacagtacatcaggcgcgcctccatctggatagtcctactagttgtaatacttttattatcgtaaatttgcagacgcagggaaggcatcatgatgtaacacaactgatagcagtcgtgtcttcaaggtgcgcgacgaggcaactcgaatgtcaagtctggtcgcaccaatgccatcacaccggtatcgtcaattgatatcatttcaatcaaaggacccattgcgcgtctcgcgttcgtatttcgtatttacatggttagaaaaacatttacgatggcaaaaattcgaaccgaaattcgaacttttttttttgcttcgaacgggattcgaacaggtacttcaaagatacattctagtattgaaacacaccattcgaccaacctttctaaacccactacgggtgatgactgaccgtgttattgggcttgataaagcctttgtcctgcgctcgtatcgtgggaaaccaagtggttaccgtgttgtcgcgatggcgaccgccgaatcttcgggcggcgcggctttgacatcgttgcccgggcgtagcgaggaccaacgcgcgaccatcttgttcccgctgcacctaaacaaaattgtagcttatgcacgtgct

SEQ ID NO: 35193 - DNA, 1629 bp, Muscodor strobelii
  misc_feature: SGI cDNA ID NO. 572177
  misc_feature: Encodes the peptide sequence at SEQ ID NO 35194
atggcctcggggacgaagggcatggttcaacgtcatgtcattgtccagaacttgaaatcacttgaagccttgggtgccgtgacagatatctggtcggacaagactggtaccctgacgcaaggcaagatggttgaaagacgtgcttggattgcagccttgggtacttatacagtgagcacctcctcagatccttttaatcttactgttggtgagatgcttctcgatattcgagcgcccagcgaccctgaattcggaagcgaacaagctggcaccgccaccgaagaaacacccgagaaattgctttccaatggcaaaacagctctgacattttatctgcgggcagcgtcttttgccaacatcgctaccctcagcaagaaggacaacgaatggcaagcccggtggaagcagattgccgaaattccttttgattccgatgtgaagcgtatatcgacggtgtttaggcactggccgattggcgatttatttgtatttaccaagggagctgttgaacgcgtgatcgtcaactgtaccgactatcacccacaagatagtgtgcagccggctgcgatgacagaggaattcaaccaagaaattctgaagaacatgacctcactcgctagcatggggcttcgagccttggctctggtcagcaagaaatacgatgcccagttagaggtcggggacaaggtcaaccgagaagacgtcgaggcggatcctacgttccgtggactcattggtttgtatgatcctctacgcctcgagtcagcggaagctgtacccagttgccacgaagtaggtatctcagctcacatgttgaccggtgaccatcccgaaacggcgaaagccattgccgtggaagttggtatcctaccgagccgcatggaattggtccgaagcgacattgccgactttttgcctctcgtgatcgctagatgggcgccgagcacaaaggtgtgcatgattgatgcccttcatcgacgtaagaaattctgcgctgtgactggcgacggtgtaaacgaatccccatctctcaagagagccgacgttggcattgccatgggtatggctggtagcgatgtcgcgaaggaaacatcggatttagtgctttcgggtgataacttcgccggtatcgtggcagctatcgaggaaggacgtcacattttcaacaacatccaaaagttcatcctacacgtgcttgcggagaatgtcgcaaaggctttggcactcctcatcatctttttaacatctgttgctcccgacatgggtttaggctttgagcgtgcagtgcccgacgtcatgcaacgaccaccccagtctctcaaaacaggtattttcgacctcgtacttatcattgacatggtggtctacggtatatgggttgcggctctctgtcttgccagtttcactctggttgtataccgctttggaggcggaaatcttgggacaggttgcaacgagaaatacggcgacagctggcatgttgtgttccgcgcacgggctaccacattggcgtgccttttgtggtttgccttgttcttagcatgggagatgaccgaccgacgccgatccttcttccgcatgcaaccaggctccaagaagtatttcacccagtgggctatagacgtctag

SEQ ID NO: 35194 - protein, 542 aa, Muscodor strobelii
  misc_feature: SGI Peptide ID NO. 572177
  misc_feature (27)..(357): Pfam Id: PF00702 Pfam Desc: haloacid dehalogenase-like hydrolase
  misc_feature (435)..(532): Pfam Id: PF00689 Pfam Desc: Cation transporting ATPase, C-terminus
  misc_feature (33)..(357): Pfam Id: PF00702 Pfam Desc: haloacid dehalogenase-like hydrolase
  misc_feature (1)..(542): NCBI GI: 37719564 Blast Desc: P-type Na+-ATPase [Fusarium oxysporum f. sp. lycopersici]
  misc_feature (1)..(542): NCBI GI: 171680550 Blast Desc: protein product [Podospora anserina] gi|170939902|emb|CAP65128.1| protein product [Podospora anserina]
  misc_feature (1)..(542): NCBI GI: 46120544 Blast Desc: FG04919.1 [Gibberella zeae PH-1]
  misc_feature (1)..(542): NCBI GI: 116178922 Blast Desc: CHGG_00089 [Chaetomium globosum CBS 148.51] gi|88184386|gb|EAQ91854.1| CHGG_00089 [Chaetomium globosum CBS 148.51]
  misc_feature (1)..(542): NCBI GI: 85079446 Blast Desc: calcium-transporting ATPase 3 [Neurospora crassa OR74A] gi|6688839|emb|CAB65298.1| sodium P-type ATPase [Neurospora crassa] gi|28917414|gb|EAA27118.1| ATPase 3 crassa
  misc_feature (1)..(542): NCBI GI: 189211052 Blast Desc: sodium transport ATPase 5 [Pyrenophora tritici-repentis Pt-1C-BFP] gi|187977950|gb|EDU44576.1| sodium transport ATPase 5 [Pyrenophora tritici-repentis Pt-1C-BFP]
  misc_feature (1)..(542): NCBI GI: 169624899 Blast Desc: SNOG_15715 [Phaeosphaeria nodorum SN15] gi|160705556|gb|EAT76810.2| SNOG_15715 [Phaeosphaeria nodorum SN15]
  misc_feature (1)..(542): NCBI GI: 256727868 Blast Desc: NECHADRAFT_70849 [Nectria haematococca mpVI 77-13-4]
  misc_feature (1)..(542): NCBI GI: 169613016 Blast Desc: SNOG_09636 [Phaeosphaeria nodorum SN15] gi|160702629|gb|EAT82901.2| SNOG_09636 [Phaeosphaeria nodorum SN15]
  misc_feature (1)..(542): NCBI GI: 239612714 Blast Desc: potassium/sodium efflux P-type ATPase [Ajellomyces dermatitidis ER-3]
  misc_feature (1)..(535): SWISSPROT Homolog: EC 3.6.3.7 Sodium-exporting ATPase
MASGTKGMVQRHVIVQNLKSLEALGAVTDIWSDKTGTLTQGKMVERRAWIAALGTYTVSTSSDPFNLTVGEMLLDIRAPSDPEFGSEQAGTATEETPEKLLSNGKTALTFYLRAASFANIATLSKKDNEWQARWKQIAEIPFDSDVKRISTVFRHWPIGDLFVFTKGAVERVIVNCTDYHPQDSVQPAAMTEEFNQEILKNMTSLASMGLRALALVSKKYDAQLEVGDKVNREDVEADPTFRGLIGLYDPLRLESAEAVPSCHEVGISAHMLTGDHPETAKAIAVEVGILPSRMELVRSDIADFLPLVIARWAPSTKVCMIDALHRRKKFCAVTGDGVNESPSLKRADVGIAMGMAGSDVAKETSDLVLSGDNFAGIVAAIEEGRHIFNNIQKFILHVLAENVAKALALLIIFLTSVAPDMGLGFERAVPDVMQRPPQSLKTGIFDLVLIIDMVVYGIWVAALCLASFTLVVYRFGGGNLGTGCNEKYGDSWHVVFRARATTLACLLWFALFLAWEMTDRRRSFFRMQPGSKKYFTQWAIDV

SEQ ID NO: 35195 - DNA, 426 bp, Muscodor strobelii
  misc_feature: SGI cDNA ID NO. 572178
  misc_feature: Encodes the peptide sequence at SEQ ID NO 35196
atgaaactcctcgcgttggtacaggctgcgctattgtgcgcccagttttccagcgccaaatgctttcccccagatgttagcctcggaatccgcaatttacaaggatacatcgacaacgttattgccgatataaaacagaagaaattcgatgtcgtcgccaacgattattcgtctactggacgtagcctagcattcttagaggaggaaatacagcaaaagatctgtcactacgatcttcaaacatctgcctcgacgaagaatcaagcgatagcttatttgcgaggcgctaaggccgagttggcggtgcttaatgcagatgcgaaggaacaagattattcgaatggaatcaaagcgctttgccgggctgtgaacctatacggtggcgtcgctgcctatgtcgactctatccggaccgatggccaataa

SEQ ID NO: 35196 - protein, 141 aa, Muscodor strobelii
  misc_feature: SGI Peptide ID NO. 572178
MKLLALVQAALLCAQFSSAKCFPPDVSLGIRNLQGYIDNVIADIKQKKFDVVANDYSSTGRSLAFLEEEIQQKICHYDLQTSASTKNQAIAYLRGAKAELAVLNADAKEQDYSNGIKALCRAVNLYGGVAAYVDSIRTDGQ

SEQ ID NO: 35197 - DNA, 2989 bp, Muscodor strobelii
  misc_feature: SGI EST ID NO. CUFF.83891.1
  misc_feature: Variant of the nucleotide sequence at SEQ ID NO 35195
gcattcttctagattcatctgtctggcgatagaatgaattcatggaaatcacgagtttgaccttgatgaattcaacatacaacaatcgttcttttaacaactttgtcaatgataaagtaattgactaggtaattagactaattataggtgtcgacattccacgaaccgactctctcagggcccctacaatgtctcaaaaacctgaactgcggctttagcagttgactgagcactcgcggggttctgaccggtgaccaaacgaccatcgacgacatggaaatcatcccatatgccggaggacctcttatctgtatttatcgattagcacgggcttctgtgcatttgcatctgttgagtgttgcaattacttacaagtcgcaccgagctgagcggccaaatcctcaactagtggcttattccagctgcggagctcctccatgatgcccatggtcgtctctgcttcgcttgtgaagccggtgatagttttacctttgatcagaggctcgttggtggctgggtcgacaatgttggcaaagatggcagggccgtgacacacggatgacacaacaccgccgtttgcccagacctgttcagcgatcttctgcaagctgcgggctgtagggtagtcgatgagtgcagcatgccctgcggaagcatagaagagaccatacttcgagccgtcgagatcgctcgccttagtcatgtggtccaacttctggcggaattcactgtttgtgtcgttccatatcgcaaggtcatcgccgttcaagaaatcgggctgctgcgagagccagtccgcggtgtaagtgcccgtctctgaagcaaggtctacttcgaatcctgctgctttgagcaccttgaaggggtgaagagcctccgagataaaagcccctgtggtttctttgccttcgaagagtgtagctttggccgatgtgacggcaataagagcacggcgtggaggagacatggcgcaggtgtgagtattagataatgagaagctaaggcggtaggtatgatcttggcgagcgttcgatggcacaagatttcgaaagaccagctggaaatgtctttgaatgtttgatacttcgtgatggtgatgatactggtgaagataaaatgaaactcatattgcagatgttagacatcttcatttataggtatttacgagtgacgaagtagagacatctcaacttgagtgacggagttaactacgagctgcatatgatgatcaatgtcacgatcttgaagccccagacgagtgcctggactccgatatgtctggatcttgattctgcacctaattcacctggcggagattcggagtaggactagttgtgggctgcggagcttcggtgtatcctgattggtgactgcgataaccagcatgctcctgggagtaacggagtgctgacagattgttgtatcattgtcgctctacatacaatcgcaacagagcttgaaaaatatggagagaatgttcacgatcatggaatctcattaagaacactgggccttctatcactagatgtcaatcgtggttgatcgacatccccccttcggcgttgcgcgcattttatctccgtacacttgatgaccctgatgggcatcagcgagatcactcaaccaatgtaagaactacagcatcaagcgtacggtctcaaccattttactcccaaaagaacaacttcgtcaggatactcaaatcaactctgtcaacaatccgctaccccatagacccaatcggaaccgacaattgttagtaacccaaaaattagccctaattttcgctaacttcctcttcggtgccttggcatgcgcgagcagctcctgtgttcagctcaatggcgtgtaacatcgcgaaagctgaaaaggggaggaaatggcctaactcgaagtggccaagcgaagttgaaagtgcgatgagacattaaagattactatgttttcattattgctatcaattcaacatatcgcaccacttcttccttccaaagttcccgttaccaacgactagcgacgaacagcaaccgcaacaatgaaactcctcgcgttggtacaggctgcgctattgtgcgcccagttttccagcgccaaatgctttcccccagatgttagcctcggaatccgcaatttacaaggatacatcgacaacgttattgccgatataaaacagaagaaattcgatgtcgtcgccaacgattattcgtctactggacgtagcctagcattcttagaggaggaaatacagcaaaagatctgtcactacgatcttcaaacatctgcctcgacgaagaatcaagcgatagcttatttgcgaggcgctaaggccgagttggcggtgcttaatgcagatgcgaaggaacaagattattcgaatggaatcaaagcgctttgccgggctgtgaacctatacggtggcgtcgctgcctatgtcgactctatccggaccgatggccaataaagactctacgtgcgcatctcgtcctgcccgggatgtctttggacaggcattcatcatccgagattccccataacactactacaataatatctaatattttcgacatctgatgcaaagctagaacctctaattaatcatcatgaggaagtgccatgatacgtatatgcaaccagtctgatgcctgtttacgcgattccaagacagctacaaccatgagccctgtggatctttctgtatgaacgggcatatatgcctaggaacctgtctacagaggctgaatttcaaatgacacttcgaccccattctgcagcgagaaaactgctgcaaatgatatccaaagtgtttcgagacgcattcattgtgacctagtaggagctgttgccggatagtgagtactatgattgcttgctcctcgtctcattccgattttgatgtcaactcgaacgccaacttcgtcgcggcacgtagaacagcatctgatcggacgtgtacctaaaccacagtgagtggcttccccgtaggtaaggc

SEQ ID NO: 35198 - DNA, 720 bp, Muscodor strobelii
  misc_feature: SGI cDNA ID NO. 572179
  misc_feature: Reduced expression when VOC is produced
  misc_feature: Encodes the peptide sequence at SEQ ID NO 35199
atgtctcctccacgccgtgctcttattgccgtcacatcggccaaagctacactcttcgaaggcaaagaaaccacaggggcttttatctcggaggctcttcaccccttcaaggtgctcaaagcagcaggattcgaagtagaccttgcttcagagacgggcacttacaccgcggactggctctcgcagcagcccgatttcttgaacggcgatgaccttgcgatatggaacgacacaaacagtgaattccgccagaagttggaccacatgactaaggcgagcgatctcgacggctcgaagtatggtctcttctatgcttccgcagggcatgctgcactcatcgactaccctacagcccgcagcttgcagaagatcgctgaacaggtctgggcaaacggcggtgttgtgtcatccgtgtgtcacggccctgccatctttgccaacattgtcgacccagccaccaacgagcctctgatcaaaggtaaaactatcaccggcttcacaagcgaagcagagacgaccatgggcatcatggaggagctccgcagctggaataagccactagttgaggatttggccgctcagctcggtgcgacttataagaggtcctccggcatatgggatgatttccatgtcgtcgatggtcgtttggtcaccggtcagaaccccgcgagtgctcagtcaactgctaaagccgcagttcaggtttttgagacattgtag

SEQ ID NO: 35199 - protein, 239 aa, Muscodor strobelii
  misc_feature: SGI Peptide ID NO. 572179
  misc_feature (63)..(237): Pfam Id: PF01965 Pfam Desc: DJ-1/PfpI family
  misc_feature (1)..(239): NCBI GI: 46115024 Blast Desc: FG03354.1 [Gibberella zeae PH-1]
  misc_feature (1)..(239): NCBI GI: 212545947 Blast Desc: conserved [Penicillium marneffei ATCC 18224] gi|210064647|gb|EEA18742.1| conserved [Penicillium marneffei ATCC 18224]
  misc_feature (1)..(239): NCBI GI: 169762582 Blast Desc: [Aspergillus oryzae RIB40] gi|83770219|dbj|BAE60352.1| protein product [Aspergillus oryzae]
  misc_feature (1)..(239): NCBI GI: 121709699 Blast Desc: DJ-1/PfpI family protein [Aspergillus clavatus NRRL 1] gi|119400642|gb|EAW11067.1| DJ-1/PfpI family protein [Aspergillus clavatus NRRL 1]
  misc_feature (1)..(239): NCBI GI: 256730139 Blast Desc: [Nectria haematococca mpVI 77-13-4]
  misc_feature (2)..(239): NCBI GI: 164655164 Blast Desc: MGL_4192 [Malassezia globosa CBS 7966] gi|159102596|gb|EDP41499.1| MGL_4192 [Malassezia globosa CBS 7966]
  misc_feature (6)..(236): NCBI GI: 190348153 Blast Desc: PGUG_04657 [Pichia guilliermondii ATCC 6260]
  misc_feature (6)..(236): NCBI GI: 146413463 Blast Desc: PGUG_04657 [Pichia guilliermondii ATCC 6260]
  misc_feature (6)..(238): NCBI GI: 68471549 Blast Desc: CaO19.7882 [Candida albicans SC5314] gi|46441932|gb|EAL01225.1| CaO19.7882 [Candida albicans SC5314]
  misc_feature (6)..(238): NCBI GI: 37548637 Blast Desc: 29 kDa IgE-binging protein [Candida albicans]
  misc_feature: Useful for introducing or modulating the production of volatile compounds
MSPPRRALIAVTSAKATLFEGKETTGAFISEALHPFKVLKAAGFEVDLASETGTYTADWLSQQPDFLNGDDLAIWNDTNSEFRQKLDHMTKASDLDGSKYGLFYASAGHAALIDYPTARSLQKIAEQVWANGGVVSSVCHGPAIFANIVDPATNEPLIKGKTITGFTSEAETTMGIMEELRSWNKPLVEDLAAQLGATYKRSSGIWDDFHVVDGRLVTGQNPASAQSTAKAAVQVFETL

SEQ ID NO: 35200 - DNA, 1240 bp, Muscodor strobelii
  misc_feature: SGI EST ID NO. CUFF.83890.2
  misc_feature: Variant of the nucleotide sequence at SEQ ID NO 35198
gaattaggtgcagaatcaagatccagacatatcggagtccaggcactcgtctggggcttcaagatcgtgacattgatcatcatatgcagctcgtagttaactccgtcactcaagttgagatgtctctacttcgtcactcgtaaatacctataaatgaagatgtctaacatctgcaatatgagtttcattttatcttcaccagtatcatcaccatcacgaagtatcaaacattcaaagacatttccagctggtctttcgaaatcttgtgccatcgaacgctcgccaagatcatacctaccgccttagcttctcattatctaatactcacacctgcgccatgtctcctccacgccgtgctcttattgccgtcacatcggccaaagctacactcttcgaaggcaaagaaaccacaggggcttttatctcggaggctcttcaccccttcaaggtgctcaaagcagcaggattcgaagtagaccttgcttcagagacgggcacttacaccgcggactggctctcgcagcagcccgatttcttgaacggcgatgaccttgcgatatggaacgacacaaacagtgaattccgccagaagttggaccacatgactaaggcgagcgatctcgacggctcgaagtatggtctcttctatgcttccgcagggcatgctgcactcatcgactaccctacagcccgcagcttgcagaagatcgctgaacaggtctgggcaaacggcggtgttgtgtcatccgtgtgtcacggccctgccatctttgccaacattgtcgacccagccaccaacgagcctctgatcaaaggtaaaactatcaccggcttcacaagcgaagcagagacgaccatgggcatcatggaggagctccgcagctggaataagccactagttgaggatttggccgctcagctcggtgcgacttataagaggtcctccggcatatgggatgatttccatgtcgtcgatggtcgtttggtcaccggtcagaaccccgcgagtgctcagtcaactgctaaagccgcagttcaggtttttgagacattgtaggggccctgagagagtcggttcgtggaatgtcgacacctataattagtctaattacctagtcaattactttatcattgacaaagttgttaaaagaacgattgttgtatgttgaattcatcaaggtcaaactcgtgatttccatgaattcattctatcgccagacagatgaatctagaagaatgc

SEQ ID NO: 35201 - DNA, 756 bp, Muscodor strobelii
  misc_feature: SGI cDNA ID NO. 572180
  misc_feature: Encodes the peptide sequence at SEQ ID NO 35202
atgtcggacgtgactaccctctacttctccacccctcccattgcgaggacggtagccacagcagtctttttggcctctgtgggcgtctacacgggcatgctctcgatctatggcttcctcttccactactcgatgcttctgcagttccctccagccatccaccgatttgtgaccagcttcctcattacgtcgaaagacttgggcgtgctcatggacacgtattttgtctacacttatctgagccaactggaaaagggtaactccaagttttcgaagaaagaagatctgatctggtatctcatgtttgttggcagtgttatcattgttgccaaccaactagttaccggtgcaatgatgtatttgcacgccttgttgattgccatttgctatacggccacccaggatcagcgaggcatgcaggcccacttctacgtggttaccgttcctgcgcagcttatgccctggtgcatgcttttgatgcagcttctgttcggtggtatgggggcgttcttgttaggtctgaccggcatcttcgctgctcacctgcatgatttcctcacgcgcatctatcccgagtttggacagggcccgaatatcattccaactccgtggttcatctcttggatcataagcactcccagagttcagaacacggtctacggatcatctcacgcaccgccgagtgacaacagtggtcgcggtggtccactacctgattcgtggagaactcgaggatccgggcatcgtttgggttag

SEQ ID NO: 35202 - protein, 251 aa, Muscodor strobelii
  misc_feature: SGI Peptide ID NO. 572180
  misc_feature (11)..(204): Pfam Id: PF04511 Pfam Desc: Der1-like family
  misc_feature (2)..(251): NCBI GI: 116206670 Blast Desc: CHGG_02628 [Chaetomium globosum CBS 148.51] gi|88183225|gb|EAQ90693.1| CHGG_02628 [Chaetomium globosum CBS 148.51]
  misc_feature (1)..(251): NCBI GI: 171692205 Blast Desc: protein product [Podospora anserina] gi|170946051|emb|CAP72852.1| protein product [Podospora anserina]
  misc_feature (2)..(251): NCBI GI: 46125649 Blast Desc: FG07202.1 [Gibberella zeae PH-1]
  misc_feature (1)..(251): NCBI GI: 145607383 Blast Desc: MGG_12174 [Magnaporthe grisea 70-15] gi|145014952|gb|EDJ99520.1| MGG_12174 [Magnaporthe grisea 70-15]
  misc_feature (7)..(251): NCBI GI: 156034559 Blast Desc: SS1G_13214 [Sclerotinia sclerotiorum 1980] gi|154698618|gb|EDN98356.1| SS1G_13214 [Sclerotinia sclerotiorum 1980]
  misc_feature (2)..(251): NCBI GI: 261351664 Blast Desc: conserved [Verticillium albo-atrum VaMs.102]
  misc_feature (50)..(251): NCBI GI: 256730975 Blast Desc: NECHADRAFT_73859 [Nectria haematococca mpVI 77-13-4]
  misc_feature (1)..(251): NCBI GI: 115438504 Blast Desc: conserved [Aspergillus terreus NIH2624] gi|114188898|gb|EAU30598.1| conserved [Aspergillus terreus NIH2624]
  misc_feature (7)..(251): NCBI GI: 225562236 Blast Desc: conserved [Ajellomyces capsulatus G186AR]
  misc_feature (7)..(251): NCBI GI: 240277319 Blast Desc: conserved [Ajellomyces capsulatus H143]
MSDVTTLYFSTPPIARTVATAVFLASVGVYTGMLSIYGFLFHYSMLLQFPPAIHRFVTSFLITSKDLGVLMDTYFVYTYLSQLEKGNSKFSKKEDLIWYLMFVGSVIIVANQLVTGAMMYLHALLIAICYTATQDQRGMQAHFYVVTVPAQLMPWCMLLMQLLFGGMGAFLLGLTGIFAAHLHDFLTRIYPEFGQGPNIIPTPWFISWIISTPRVQNTVYGSSHAPPSDNSGRGGPLPDSWRTRGSGHRLG

SEQ ID NO: 35203 - DNA, 1243 bp, Muscodor strobelii
  misc_feature: SGI EST ID NO. CUFF.83972.1
  misc_feature: Variant of the nucleotide sequence at SEQ ID NO 35201
gcggggcctgatctgctggcccaagctctattgcgctacagtacctgtcgaaaatgacacgattcaaatccttttctttccttccttcttgccaaccatccgaagctccccattctttccattggtcacccaatatgtacagggcggcgcagttgttggctgcctgcttgccgattgtgcttaagtcatcttcttcacctcgagtctgccttgcctcgcaaacactgcaattcaaacgcgggtttgcattagccttatattccactgcctaactacctagcctcttccgccgccctggtttgagtaggacatttgactctaaattatctaccagacccaaagaactgaagatcttccgagagtcgtcaaacagtcctagtccttcatcatgtcggacgtgactaccctctacttctccacccctcccattgcgaggacggtagccacagcagtctttttggcctctgtgggcgtctacacgggcatgctctcgatctatggcttcctcttccactactcgatgcttctgcagttccctccagccatccaccgatttgtgaccagcttcctcattacgtcgaaagacttgggcgtgctcatggacacgtattttgtctacacttatctgagccaactggaaaagggtaactccaagttttcgaagaaagaagatctgatctggtatctcatgtttgttggcagtgttatcattgttgccaaccaactagttaccggtgcaatgatgtatttgcacgccttgttgattgccatttgctatacggccacccaggatcagcgaggcatgcaggcccacttctacgtggttaccgttcctgcgcagcttatgccctggtgcatgcttttgatgcagcttctgttcggtggtatgggggcgttcttgttaggtctgaccggcatcttcgctgctcacctgcatgatttcctcacgcgcatctatcccgagtttggacagggcccgaatatcattccaactccgtggttcatctcttggatcataagcactcccagagttcagaacacggtctacggatcatctcacgcaccgccgagtgacaacagtggtcgcggtggtccactacctgattcgtggagaactcgaggatccgggcatcgtttgggttagtaatgagtcgagatgtacgaaaagtaatgaagtatgacacataattagccatcgcgaatatcattatatgatatatgacagaacagctgctttcgcact

SEQ ID NO: 35204 - DNA, 1071 bp, Muscodor strobelii
  misc_feature: SGI cDNA ID NO. 572181
  misc_feature: Encodes the peptide sequence at SEQ ID NO 35205
atgcatgagcctagcagacagcctcatgcattcacacttaacttgagaggatatgctgtgcgaattgattcggaccactttcagaatcccacagaacaagaaattgcggagtatccatggaaatttatagggtataaaggattcactgcgtacgctgcctcagacgccgatttctttgctctccggcgttttgatcgtctgcatattcggtcgcttctaatcctccaggatcatctctctgagctggaagagagactggatcaagtcgacagcaagtttggcgagaaaaatactaaacttgtgggggccaagccgcctagagtcatcaatattgctgatttccaaaatgacccagtaggggatgatttgagggacatcaataatggcactatccgggatgatctgccagagagagtggcgcttacaatggagctcacagccaagcttcgagaatatggtataacgcaatcggatttttcggacgatgatgtgtacgagaagctgatccttgtttcagacgaggctgtattaagatattcgcggatgcgactcctgtgtcctgctccggaacgaaatattaagaacatcgaaacatggttcgaagacaatgaaggaaccatcatggaaaacgaaacggaattcatccagcatcgcgacgaactcatatccatgacatttccaaagtcgatagctcggcgctggttcgaggaccaagtcatctgccgtgccaacacaaaattgggtttgttcaagaaacgacctccgcgatctgcgacagacacatacgacgagaaagcggtctacacgttcagtgataaggccgtcgacatattcgaatctataacagtctttgtgttagcgactttaatgttgatcgcaccgttgtggatccttgacagtcttgacagcttgcgacataaactcatcgtcatcactattttcgtgatagcttgcctgggattcttgagccttgctacattgggacgcccatttgagaagctggctgcgaccgctgggtacgcggccgtattggtagtgttcttgcaattaggttccgaaggcaaagactga

SEQ ID NO: 35205 - protein, 356 aa, Muscodor strobelii
  misc_feature: SGI Peptide ID NO. 572181
  misc_feature (30)..(352): NCBI GI: 256732079 Blast Desc: NECHADRAFT_80333 [Nectria haematococca mpVI 77-13-4]
  misc_feature (31)..(352): NCBI GI: 189204077 Blast Desc: PTRG_08042 [Pyrenophora tritici-repentis Pt-1C-BFP] gi|187985473|gb|EDU50961.1| PTRG_08042 [Pyrenophora tritici-repentis Pt-1C-BFP]
  misc_feature (35)..(339): NCBI GI: 171685542 Blast Desc: protein product [Podospora anserina] gi|170942732|emb|CAP68385.1| protein product [Podospora anserina]
  misc_feature (22)..(352): NCBI GI: 169619281 Blast Desc: SNOG_12835 [Phaeosphaeria nodorum SN15] gi|111058515|gb|EAT79635.1| SNOG_12835 [Phaeosphaeria nodorum SN15]
  misc_feature (29)..(152): NCBI GI: 261355016 Blast Desc: conserved [Verticillium albo-atrum VaMs.102]
  misc_feature (203)..(340): NCBI GI: 261355016 Blast Desc: conserved [Verticillium albo-atrum VaMs.102]
  misc_feature (30)..(152): NCBI GI: 169605277 Blast Desc: SNOG_05661 [Phaeosphaeria nodorum SN15] gi|111065605|gb|EAT86725.1| SNOG_05661 [Phaeosphaeria nodorum SN15]
  misc_feature (44)..(348): NCBI GI: 46138151 Blast Desc: FG10590.1 [Gibberella zeae PH-1]
  misc_feature (18)..(348): NCBI GI: 145244036 Blast Desc: An11g05410 [Aspergillus niger] gi|134079214|emb|CAL00388.1| protein product [Aspergillus niger]
  misc_feature (24)..(340): NCBI GI: 256721705 Blast Desc: NECHADRAFT_82461 [Nectria haematococca mpVI 77-13-4]
MHEPSRQPHAFTLNLRGYAVRIDSDHFQNPTEQEIAEYPWKFIGYKGFTAYAASDADFFALRRFDRLHIRSLLILQDHLSELEERLDQVDSKFGEKNTKLVGAKPPRVINIADFQNDPVGDDLRDINNGTIRDDLPERVALTMELTAKLREYGITQSDFSDDDVYEKLILVSDEAVLRYSRMRLLCPAPERNIKNIETWFEDNEGTIMENETEFIQHRDELISMTFPKSIARRWFEDQVICRANTKLGLFKKRPPRSATDTYDEKAVYTFSDKAVDIFESITVFVLATLMLIAPLWILDSLDSLRHKLIVITIFVIACLGFLSLATLGRPFEKLAATAGYAAVLVVFLQLGSEGKD

SEQ ID NO: 35206 - DNA, 2253 bp, Muscodor strobelii
  misc_feature: SGI cDNA ID NO. 572182
  misc_feature: Encodes the peptide sequence at SEQ ID NO 35207
atggacgaccggagaacctcctcattatctattatgctggacatgcaagacacaatcctgccggggggatattttcccatctggcaaccacggtcagagttcgagaaaggcaagcaaattgacacagcgacctttcatcctctcttagtccgtgcggaggaggactcgcctgatgttttgctactttacgactgttgcttttctctcgcttcgcatcgatcaaattcaaataacagccgagcagaggtggaaggtttgtttgcgggtgggtttgaatctgaggttcccatccccgggcaagattcattcactaaacatctcactgatgcacttgcgactgctcccgatatggggcgaatcttgacagtggctgaacttcaccgccaaataattgttcggctccaaagttttcacacgcaagcaatcttcgatgcggacaatgcgattcgtaaatgtagtgaaacaggaaagattctccacaccaagtcggttcgggtcacgccatcacacttatttctcgccgggaatgaaaagccgcggttcattgttcttcagccactgaactccaaaggctcaggggaggaccacgatttggaagaggaacctgactacacgaaatatccaaaggtgcttttggcaatcagattgcaagacgatgtcgacattgaacgtgaagtgaaagaatggatcctcaatgctcctccaggcgtagtggagtttcggggaatcttctctagcttttccagcctcctgatgcttgaagtaccaatcgagatttgggacttgctgccaccttgcccggccgtattttatatatccttcacgaccaaacctctgagcctctctccgcccgatcctgtgaataaagtcaatttcgacgcacctgctgcttcccaatcaaatgagacatccacggacatgatagagaaagtgtttttaccttcccataccaggcgaacaagcccagattcgactaaagagatttctggaacacggtccattcagggtcaagtgctgttcgccgctcagacatcatcacaacgggggcttgtttatctattggatcgagcagatatccacataaagcgactattgcaggattggcgtacgcttgcacaaaatgatggtatatcacgggaagattggcttctccgccatttcggcttaatattggaaagagaaagcaaaagctctacccaatacgaactcccgtccctagaagaacatcaggagtttatttctcgctacctatctacacatgagtttctaagccacgacaatccgatgatcgacataacctctcgtcttaatccatttttctcttggaaatatgacggcgaagttgatggtcacaggggatccgcgacgaatccgacgtcagtcctcagttcgatgtgggattctcaaattggaaggtctattcggagcaatgactctcgatcacaagcaagtcttcgcgaggaagcattcaatgaatctgtcgatatgtcgacacttatacatgagcgatctgatcctgaaagtgatacaatttctgctcgtcagacgactggacgcaggagatcacagtttaacctagtctcgaggtctttggacacagcaagggaacctcaacatcctccatcacctagaaatgttgacgcaagtacggttcaagtgcctcagagtcatagtaacaccatacatggtactcctggtactgttgagcagatcgatcccagatttcaagtggagcccagtcaaaagttccaacccggagaagtatttaagatactctggtctgaaccaatgtctcaattgcgcggtggcgaagaccctatttctgagatccagtcattccgtgactctggcgggcgattctatgttggctaccgtcgctttatcgtcgtttcaacagatgaaagtcatcactctacatgcatccctattttgacatacgacagaagaggacttctcaaaaagggcacaaaacctaataagcacggcattgtatatgaaatttccaagaaaccaagacctttaaaaaatgagcctactctaggctttgacccagtcgctatcgaactatacgccgagggcgaaactattgccagagaatcgcgggtcaattacagtaagcttgtcacgattgaacacaatgttaaggtgtttttcattggtcgcgtacattctgagcatctggatgttgtggcatatgcgaccaataactgttgggaggacaaaatccacaagggaaagaaatcgaaaaagtga

SEQ ID NO: 35207 - protein, 750 aa, Muscodor strobelii
  misc_feature: SGI Peptide ID NO. 572182
  misc_feature (551)..(741): NCBI GI: 171694199 Blast Desc: protein product [Podospora anserina] gi|170947048|emb|CAP73853.1| protein product [Podospora anserina]
  misc_feature (532)..(741): NCBI GI: 116198307 Blast Desc: CHGG_07309 [Chaetomium globosum CBS 148.51] gi|88178588|gb|EAQ86056.1| CHGG_07309 [Chaetomium globosum CBS 148.51]
  misc_feature (530)..(743): NCBI GI: 261360893 Blast Desc: conserved [Verticillium albo-atrum VaMs.102]
  misc_feature (552)..(750): NCBI GI: 256728503 Blast Desc: NECHADRAFT_101892 [Nectria haematococca mpVI 77-13-4]
  misc_feature (571)..(741): NCBI GI: 164426824 Blast Desc: NCU03698 [Neurospora crassa OR74A] gi|16944564|emb|CAC18183.2| [Neurospora crassa] gi|157071492|gb|EAA32238.2| [Neurospora crassa OR74A]
  misc_feature (587)..(730): NCBI GI: 145605557 Blast Desc: MGG_09196 [Magnaporthe grisea 70-15] gi|145013370|gb|EDJ98011.1| MGG_09196 [Magnaporthe grisea 70-15]
  misc_feature (21)..(276): NCBI GI: 116191399 Blast Desc: CHGG_05417 [Chaetomium globosum CBS 148.51] gi|88181330|gb|EAQ88798.1| CHGG_05417 [Chaetomium globosum CBS 148.51]
  misc_feature (542)..(733): NCBI GI: 121716288 Blast Desc: ACLA_073620 [Aspergillus clavatus NRRL 1] gi|119403910|gb|EAW14327.1| ACLA_073620 [Aspergillus clavatus NRRL 1]
  misc_feature (447)..(727): NCBI GI: 67540406 Blast Desc: AN6373.2 [Aspergillus nidulans FGSC A4] gi|40739567|gb|EAA58757.1| AN6373.2 [Aspergillus nidulans FGSC A4] gi|259479408|tpe|CBF69602.1| TPA: conserved [Aspergillus FGSC
  misc_feature (560)..(722): NCBI GI: 255933217 Blast Desc: Pc12g12680 [Penicillium chrysogenum Wisconsin 54-1255] gi|211582698|emb|CAP80895.1| Pc12g12680 [Penicillium chrysogenum Wisconsin 54-1255]
MDDRRTSSLSIMLDMQDTILPGGYFPIWQPRSEFEKGKQIDTATFHPLLVRAEEDSPDVLLLYDCCFSLASHRSNSNNSRAEVEGLFAGGFESEVPIPGQDSFTKHLTDALATAPDMGRILTVAELHRQIIVRLQSFHTQAIFDADNAIRKCSETGKILHTKSVRVTPSHLFLAGNEKPRFIVLQPLNSKGSGEDHDLEEEPDYTKYPKVLLAIRLQDDVDIEREVKEWILNAPPGVVEFRGIFSSFSSLLMLEVPIEIWDLLPPCPAVFYISFTTKPLSLSPPDPVNKVNFDAPAASQSNETSTDMIEKVFLPSHTRRTSPDSTKEISGTRSIQGQVLFAAQTSSQRGLVYLLDRADIHIKRLLQDWRTLAQNDGISREDWLLRHFGLILERESKSSTQYELPSLEEHQEFISRYLSTHEFLSHDNPMIDITSRLNPFFSWKYDGEVDGHRGSATNPTSVLSSMWDSQIGRSIRSNDSRSQASLREEAFNESVDMSTLIHERSDPESDTISARQTTGRRRSQFNLVSRSLDTAREPQHPPSPRNVDASTVQVPQSHSNTIHGTPGTVEQIDPRFQVEPSQKFQPGEVFKILWSEPMSQLRGGEDPISEIQSFRDSGGRFYVGYRRFIVVSTDESHHSTCIPILTYDRRGLLKKGTKPNKHGIVYEISKKPRPLKNEPTLGFDPVAIELYAEGETIARESRVNYSKLVTIEHNVKVFFIGRVHSEHLDVVAYATNNCWEDKIHKGKKSKK

SEQ ID NO: 35208 - DNA, 638 bp, Muscodor strobelii
  misc_feature: SGI EST ID NO. CUFF.83794.0
  misc_feature: Variant of the nucleotide sequence at SEQ ID NO 35206
aggatttcaagtggagcccagtcaaaagttccaacccggagaagtatttaagatactctggtctgaaccaatgtctcaattgcgcggtggcgaagaccctatttctgagatccagtcattccgtgactctggcgggcgattctatgttggctaccgtcgctttatcgtcgtttcaacagatgaaagtcatcactctacatgcatccctattttgacatacgacagaagaggacttctcaaaaagggcacaaaacctaataagcacggcattgtatatgaaatttccaagaaaccaagacctttaaaaaatgagcctactctaggctttgacccagtcgctatcgaactatacgccgagggcgaaactattgccagagaatcgcgggtcaattacagtaagcttgtcacgattgaacacaatgttaaggtgtttttcattggtcgcgtacattctgagcatctggatgttgtggcatatgcgaccaataactgttgggaggacaaaatccacaagggaaagaaatcgaaaaagtgacgggaagaaaacacggagacttaaagtaaatgcattgcgtagtatcggttgcccactattcgcttcacatacacaagtttttacagtcttcttccattgcaca

SEQ ID NO: 35209 - DNA, 1737 bp, Muscodor strobelii
  misc_feature: SGI cDNA ID NO. 572183
  misc_feature: Encodes the peptide sequence at SEQ ID NO 35210
atgatctctggctactcgtatgttcaagtagaaggcgccggagagacagcgttcatttgggttcccgcgttggatcaacacacatacgaccaattaaaagcttcaacgtctattgtatacgatgttcagtattacgagttgcttaacgaagctcttggctcatatggtgagattatgtcggctaatgggtatgcacccaaggcgcagaggtaccgcggaggagacgatgtggcgttcgactttcagcgtacgatagatgagataggaggtggagacggcatgcaccagcacaagctcaaaaaagattcgaagtctctttctcgaagagcggtgggaatagtctccaaaagctttacttttcacccgtctccgaattctttgccaaagaatcaagtctggaacaatgactcgagcggatcctttgaccgatcaggtgcacttgaaccttatcagtattggtatgatgggactgcaggctgggacaacgagaaaaatcagggctatactgttttcatggttggcgagtcctgggtatacaaagatcacccaatcacgatcgctaatgagtctgtacctcaggaatggaaagcccctggtgcccagggcacgttggaatcgatctcggctgacgaatacaacgatgcaagtctagagccagcagaagacaacggtcatggttcaagtgtagcagccttcgtcaatggctttagactcgggacgtgcaagcggtgtcatgttgcttggtttctggtaaatgattgggaaaatcacaaaactaaccgcattacatgtgagacgcttgctcaactaagcaaagcgtataagtatatcatagaaaggggtcttcaaggtaaggcggtgatcgtgatgtccttcacctggaatgtgactgtctttacaccggccggtctgcgatctgcaaagtatttccttgacaagcttgacgcattggacgtggtgcttgttgccgcctctggaaatcttcgtcaggagctaggctggaaaatcacacattatccagccaaatttggtgatccggatatgaacaataatccatacggacaaatacagaacttgataactgtgggagcaacaaatttctacggtaccgaggcttcctttagtcagggggacgactatctgacaacatactcccctggtggtgatctcgtctgggagccgaacgacccaacttcaaacaggggaccatgggttcagaattacggcacatcactatcggcgccggccgttgctggaattgctgcctatcttcgatcattagattcgcctttcaaagaagcacttaaaaaaccggccaatgtcaagaagatgatcgagttcttggcacatagataccatgtgcagagaaaagataacagcgggatcgaggttgtcccccaagcccataccagaccagttgcatggaatggccaagtgcaaatcatggtcaatggcgtgattgaaagccacagttgtctatcggactatgacactatctctgagtgggataccatcggcgcatgcgatggtatcaatcttgatatgatgcaaatgggacccggagagagcactgggaattgcgatgctcaagccagaccggtcgtcagagacgatggaggtaagtgccctctgcaatcggacacaggtggatccaaaggacccattgaacagtcagtctgtgcctacaacaaccgttggacccgactcaacaacatcgacgagttcagctcctactag

SEQ ID NO: 35210 - protein, 578 aa, Muscodor strobelii
  misc_feature: SGI Peptide ID NO. 572183
  misc_feature (358)..(427): Pfam Id: PF00082 Pfam Desc: Subtilase family
  misc_feature (5)..(569): NCBI GI: 171684561 Blast Desc: protein product [Podospora anserina] gi|170942241|emb|CAP67893.1| protein product [Podospora anserina]
  misc_feature (5)..(552): NCBI GI: 226287372 Blast Desc: glucan 1,3-beta-glucosidase [Paracoccidioides brasiliensis Pb18]
  misc_feature (16)..(549): NCBI GI: 240277417 Blast Desc: exo-beta-1,3-glucanase [Ajellomyces capsulatus H143]
  misc_feature (5)..(543): NCBI GI: 225557305 Blast Desc: glycan 1,3-beta-glucosidase precursor [Ajellomyces capsulatus G186AR]
  misc_feature (5)..(552): NCBI GI: 225677886 Blast Desc: glucan 1,3-beta-glucosidase [Paracoccidioides brasiliensis Pb03]
  misc_feature (7)..(549): NCBI GI: 154278814 Blast Desc: [Ajellomyces capsulatus NAm1] gi|150412163|gb|EDN07550.1| [Ajellomyces capsulatus NAm1]
  misc_feature (5)..(551): NCBI GI: 226287720 Blast Desc: glucan 1,3-beta-glucosidase [Paracoccidioides brasiliensis Pb18]
  misc_feature (7)..(549): NCBI GI: 225554237 Blast Desc: glucan 1,3-beta-glucosidase precursor [Ajellomyces capsulatus G186AR]
  misc_feature (5)..(551): NCBI GI: 225678219 Blast Desc: [Paracoccidioides brasiliensis Pb03]
  misc_feature (5)..(527): NCBI GI: 240280211 Blast Desc: exo-beta-1,3-glucanase [Ajellomyces capsulatus H143]
MISGYSYVQVEGAGETAFIWVPALDQHTYDQLKASTSIVYDVQYYELLNEALGSYGEIMSANGYAPKAQRYRGGDDVAFDFQRTIDEIGGGDGMHQHKLKKDSKSLSRRAVGIVSKSFTFHPSPNSLPKNQVWNNDSSGSFDRSGALEPYQYWYDGTAGWDNEKNQGYTVFMVGESWVYKDHPITIANESVPQEWKAPGAQGTLESISADEYNDASLEPAEDNGHGSSVAAFVNGFRLGTCKRCHVAWFLVNDWENHKTNRITCETLAQLSKAYKYIIERGLQGKAVIVMSFTWNVTVFTPAGLRSAKYFLDKLDALDVVLVAASGNLRQELGWKITHYPAKFGDPDMNNNPYGQIQNLITVGATNFYGTEASFSQGDDYLTTYSPGGDLVWEPNDPTSNRGPWVQNYGTSLSAPAVAGIAAYLRSLDSPFKEALKKPANVKKMIEFLAHRYHVQRKDNSGIEVVPQAHTRPVAWNGQVQIMVNGVIESHSCLSDYDTISEWDTIGACDGINLDMMQMGPGESTGNCDAQARPVVRDDGGKCPLQSDTGGSKGPIEQSVCAYNNRWTRLNNIDEFSSY

SEQ ID NO: 35211 - DNA, 417 bp, Muscodor strobelii
  misc_feature: SGI cDNA ID NO. 572184
  misc_feature: Encodes the peptide sequence at SEQ ID NO 35212
atgcaatggaatgtacaggcgcagtcacaaggctcagctgcaatgtgggatagtcacttccgggtcggtggtggcaacggaactgatctggacgcagcgacttgcccaaaatatgccttcaacgaacagtgtattgcagcgtcattgatgttccatgttactaagcaagcatcaggatatttcgaaaatgtctgggcttgggtggctgaccatgacgccgatctgcctattcatggcacagatgataaatatatcaatcaaatatctgtttatggtgctcgtggcattttgatcgagtcccaagggccctcttggttttacggaacgagctcagagcattcggtgctgtataattatcagattagtcaagctacaaacgtcagtttactgcgcgaactgcctagaatcaacgaataa

SEQ ID NO: 35212 - protein, 138 aa, Muscodor strobelii
  misc_feature: SGI Peptide ID NO. 572184
  misc_feature (1)..(129): NCBI GI: 226287372 Blast Desc: glucan 1,3-beta-glucosidase [Paracoccidioides brasiliensis Pb18]
  misc_feature (1)..(129): NCBI GI: 261199001 Blast Desc: exo-beta-1,3-glucanase [Ajellomyces dermatitidis SLH14081] gi|239595054|gb|EEQ77635.1| exo-beta-1,3-glucanase [Ajellomyces dermatitidis SLH14081]
  misc_feature (1)..(129): NCBI GI: 239609834 Blast Desc: exo-beta-1,3-glucanase [Ajellomyces dermatitidis ER-3]
  misc_feature (1)..(136): NCBI GI: 226287720 Blast Desc: glucan 1,3-beta-glucosidase [Paracoccidioides brasiliensis Pb18]
  misc_feature (1)..(129): NCBI GI: 240280211 Blast Desc: exo-beta-1,3-glucanase [Ajellomyces capsulatus H143]
  misc_feature (1)..(129): NCBI GI: 226279450 Blast Desc: glucan 1,3-beta-glucosidase [Paracoccidioides brasiliensis Pb01]
  misc_feature (1)..(129): NCBI GI: 225554237 Blast Desc: glucan 1,3-beta-glucosidase precursor [Ajellomyces capsulatus G186AR]
  misc_feature (1)..(129): NCBI GI: 225683498 Blast Desc: exo-1,3-beta-D-glucanase [Paracoccidioides brasiliensis Pb03]
  misc_feature (1)..(129): NCBI GI: 240277417 Blast Desc: exo-beta-1,3-glucanase [Ajellomyces capsulatus H143]
  misc_feature (1)..(129): NCBI GI: 154278814 Blast Desc: [Ajellomyces capsulatus NAm1] gi|150412163|gb|EDN07550.1| [Ajellomyces capsulatus NAm1]
  misc_feature (13)..(127): SWISSPROT Homolog: EC 3.2.1.58 Glucan 1,3-beta-glucosidase
MQWNVQAQSQGSAAMWDSHFRVGGGNGTDLDAATCPKYAFNEQCIAASLMFHVTKQASGYFENVWAWVADHDADLPIHGTDDKYINQISVYGARGILIESQGPSWFYGTSSEHSVLYNYQISQATNVSLLRELPRINE

SEQ ID NO: 35213 - DNA, 819 bp, Muscodor strobelii
  misc_feature: SGI cDNA ID NO. 572185
  misc_feature: Encodes the peptide sequence at SEQ ID NO 35214
atgaacgatatgccgctctcgtcgactgtcaatggtcagacatacgtgccaacaggtattcattggcaggcttcgcaggctactatgctccaaaatcttattttcaatatgcctcatgcaactagtgcgactgcttctactcatgtaggcatatttacggagaatggcagtggtggttttgtctcagatctgacgttcaacggcggtgcgatcggatggcgagcagggtcacaacagtatacggcacgtaatctaacgttcttcggctgcctaacatcagttcaaatggtctgggcttgggggttcaattggcaagcaataactattcatggtggtgctatcggattcaatatcagcggacacggaggcgacaatggtcaaggcattggctcggtctctatcattgatgcgcctatcggcatcttgaccagttcccagaacactggaccaagcatcatacttgacaatctctacgtcaataatgttgaccaaatcgtgcgacaggaggatggcgcaacgttgcttaatggcaccgcgctatactatcgctcaaaaccgcaatacgaaagtgctgggcctgccaggtttctcgtcgcgacgcagaacaatatttcgaatgacggctcaggtgatcaatcaagtgcgataaatgctttcttactgaaagcaagagagaaccgacaaatagcctttttccctgctggaatataccaaattggcagtactgtcttcattcccactggatcccgtgtccaaggctcaagttggtcccagattcagggcgcaggcttctacttctcagacatgaggaacccgtaa

SEQ ID NO: 35214 - protein, 272 aa, Muscodor strobelii
  misc_feature: SGI Peptide ID NO. 572185
  misc_feature (1)..(272): NCBI GI: 171684561 Blast Desc: protein product [Podospora anserina] gi|170942241|emb|CAP67893.1| protein product [Podospora anserina]
  misc_feature (1)..(272): NCBI GI: 225554237 Blast Desc: glucan 1,3-beta-glucosidase precursor [Ajellomyces capsulatus G186AR]
  misc_feature (1)..(272): NCBI GI: 261199001 Blast Desc: exo-beta-1,3-glucanase [Ajellomyces dermatitidis SLH14081] gi|239595054|gb|EEQ77635.1| exo-beta-1,3-glucanase [Ajellomyces dermatitidis SLH14081]
  misc_feature (1)..(272): NCBI GI: 239609834 Blast Desc: exo-beta-1,3-glucanase [Ajellomyces dermatitidis ER-3]
  misc_feature (1)..(272): NCBI GI: 240280211 Blast Desc: exo-beta-1,3-glucanase [Ajellomyces capsulatus H143]
  misc_feature (1)..(272): NCBI GI: 225677886 Blast Desc: glucan 1,3-beta-glucosidase [Paracoccidioides brasiliensis Pb03]
  misc_feature (1)..(272): NCBI GI: 226279450 Blast Desc: glucan 1,3-beta-glucosidase [Paracoccidioides brasiliensis Pb01]
  misc_feature (1)..(272): NCBI GI: 240276550 Blast Desc: 1,3-beta glucanase [Ajellomyces capsulatus H143]
  misc_feature (1)..(272): NCBI GI: 154278814 Blast Desc: [Ajellomyces capsulatus NAm1] gi|150412163|gb|EDN07550.1| [Ajellomyces capsulatus NAm1]
  misc_feature (25)..(272): NCBI GI: 225683498 Blast Desc: exo-1,3-beta-D-glucanase [Paracoccidioides brasiliensis Pb03]
  misc_feature (10)..(272): SWISSPROT Homolog: EC 3.2.1.58 Glucan 1,3-beta-glucosidase
MNDMPLSSTVNGQTYVPTGIHWQASQATMLQNLIFNMPHATSATASTHVGIFTENGSGGFVSDLTFNGGAIGWRAGSQQYTARNLTFFGCLTSVQMVWAWGFNWQAITIHGGAIGFNISGHGGDNGQGIGSVSIIDAPIGILTSSQNTGPSIILDNLYVNNVDQIVRQEDGATLLNGTALYYRSKPQYESAGPARFLVATQNNISNDGSGDQSSAINAFLLKARENRQIAFFPAGIYQIGSTVFIPTGSRVQGSSWSQIQGAGFYFSDMRNP

SEQ ID NO: 35215 - DNA, 1740 bp, Muscodor strobelii
  misc_feature: SGI cDNA ID NO. 572186
  misc_feature: Encodes the peptide sequence at SEQ ID NO 35216
atgaagtcacaaattcttctcagctcactgttccttgcgcctctggcatttgcgctgcaagtcaccccggactctgcgtgtgcggccctttgcctagatagtccggaaggagatgcgtcagacccagatgcttccaacacgtcgcctagtgatatcacatgcacagacgatggttacgagacttcgactcggggtgtgaagtttaagaactgtgtcaactgcttgcagaacagcaatgcgacaagtaatgcagagagtgacatttcgtggtttctatacaacattcgatactccttagatgtgtgcttgtttggatttccggggaatgcctcgaagccagtctcatcgccttgtgccatcaaatatgcttgtcaaccactcaaaactgctctcgaggccgatgggctgaactccacggcgaacccgtacgattattgctcagccgatggcaactttctcgataatgcacacttagatacgtgtgtccagtgttttgctgcgagtccgaatcaagcctacatgtcgaattttgtcacggctctcaaagcaggctgtgagcagcagcccgacgcaggagccttgctcagcctgagtggtgcgctgttcacagattcaacggtcaacataaccagcccgccggattcatctaagggaaacgagagtttcaatatattctcgacgggggccattgttggcatcgctgtaggaggtgcattgcttctctttggcagtctggcactcttctgggttcatcatcgccggcaaaagcgcctgtatcgtgatatgactagttcccagaacgatccgcgaactgggagtagatctatcagtactccgcttcatggagcatactccgcagcggagaaaaacatggcgacaccaatgagcgactacgaacttcgcgcacagagaatttatacaaacaactctgagtattacgacatgctggagaaggaaatccaatctcaacgtgtgaactacgctcctgatcctaaccatccactgtcgggggccccaggtgttttgccagcccatcatgcttatctccctcgaactcatagccgtcagtcctcagtcaatgcatctcctcaaccaccacaacctatcaagaccaacaaacccgactcttatgctttacaagcatatttgaccgcggctgaggatgcacactccatcagcttattgcctccacctccaccaaggttacactcggtgataggggaaagaagctcatcgtccaatcgtgggccatctcccagtgtgcctccttcccatagccgcgactcatctgttggtagtcgtggaccttcccctgatcgccggcctctccttgacccaggcaaacctcagggcagtacagagctgagacctcctccaccaccaccgaaccaaccgtccaaaattccatctctttctttcccatcagttcctcgtattcgaatacctaaaaagtatacacctccgaggattacagtccaaggtgcaactccaattgatgggtcttctgggcttctttctcatgcaaatagcgacccacaagcagagatatctataggcctagatatcagcaatcccgtcgcctctcacgagccccgctttggagaaagtcagtgggaaaggcgccagaaattgcccccacagtcgttggtcatcgagcagacagctaccgaccgccgacctcaaccatgggttcaatctgaggttgagatcaagagcggtaagagcacgctctacggctaa

SEQ ID NO: 35216 - protein, 579 aa, Muscodor strobelii
  misc_feature: SGI Peptide ID NO. 572186
  misc_feature (9)..(533): NCBI GI: 256730973 Blast Desc: NECHADRAFT_105297 [Nectria haematococca mpVI 77-13-4]
  misc_feature (7)..(533): NCBI GI: 46125651 Blast Desc: FG07203.1 [Gibberella zeae PH-1]
  misc_feature (21)..(579): NCBI GI: 261351663 Blast Desc: conserved [Verticillium albo-atrum VaMs.102]
  misc_feature (7)..(351): NCBI GI: 145607381 Blast Desc: MGG_04209 [Magnaporthe grisea 70-15] gi|145014951|gb|EDJ99519.1| MGG_04209 [Magnaporthe grisea 70-15]
  misc_feature (3)..(274): NCBI GI: 261351655 Blast Desc: conserved [Verticillium albo-atrum VaMs.102]
  misc_feature (20)..(257): NCBI GI: 256731347 Blast Desc: NECHADRAFT_96181 [Nectria haematococca mpVI 77-13-4]
  misc_feature (2)..(246): NCBI GI: 39972439 Blast Desc: MGG_07521 [Magnaporthe grisea 70-15] gi|145016718|gb|EDK01148.1| MGG_07521 [Magnaporthe grisea 70-15]
  misc_feature (6)..(265): NCBI GI: 46125661 Blast Desc: FG07208.1 [Gibberella zeae PH-1]
  misc_feature (1)..(273): NCBI GI: 46125655 Blast Desc: FG07205.1 [Gibberella zeae PH-1]
  misc_feature (15)..(284): NCBI GI: 154323167 Blast Desc: BC1G_00926 [Botryotinia fuckeliana B05.10] gi|150848260|gb|EDN23453.1| BC1G_00926 [Botryotinia fuckeliana B05.10]
MKSQILLSSLFLAPLAFALQVTPDSACAALCLDSPEGDASDPDASNTSPSDITCTDDGYETSTRGVKFKNCVNCLQNSNATSNAESDISWFLYNIRYSLDVCLFGFPGNASKPVSSPCAIKYACQPLKTALEADGLNSTANPYDYCSADGNFLDNAHLDTCVQCFAASPNQAYMSNFVTALKAGCEQQPDAGALLSLSGALFTDSTVNITSPPDSSKGNESFNIFSTGAIVGIAVGGALLLFGSLALFWVHHRRQKRLYRDMTSSQNDPRTGSRSISTPLHGAYSAAEKNMATPMSDYELRAQRIYTNNSEYYDMLEKEIQSQRVNYAPDPNHPLSGAPGVLPAHHAYLPRTHSRQSSVNASPQPPQPIKTNKPDSYALQAYLTAAEDAHSISLLPPPPPRLHSVIGERSSSSNRGPSPSVPPSHSRDSSVGSRGPSPDRRPLLDPGKPQGSTELRPPPPPPNQPSKIPSLSFPSVPRIRIPKKYTPPRITVQGATPIDGSSGLLSHANSDPQAEISIGLDISNPVASHEPRFGESQWERRQKLPPQSLVIEQTATDRRPQPWVQSEVEIKSGKSTLYG

SEQ ID NO: 35217 - DNA, 2945 bp, Muscodor strobelii
  misc_feature: SGI EST ID NO. CUFF.83837.0
  misc_feature: Variant of the nucleotide sequence at SEQ ID NO 35215
gctttcaggaagatggcaaagcttcttccttgaacatggaggcataggtagccaaaaggcgcaacatggttttggaggaagtagatctctcgttggaaataacgattcttcgtttatccatccccgctcccgttgtcagctttaaccaaggagggctaaagaacaagacattttgtttccaagcgcgcatacgtagacccacgaacacttgtccgcactcttactattggttctatgagccgcggcagaaaacaacagggtcgccgaagctggccagcgtctagaagtctccccctgctccctggtcagatctttcgattgttccctgtaagcctactcgcctgagcttaggtccaccaaccagcagtcaacttttccactattgcccaatctgcagctccggtctctccaacttctccattcaacacacacaattggctcgctaaagttgttcgcaatatgccaattaggcgtcaaagaccagccttgatcctcgcctgcacgcgactttgcttccgtcgaagtctgattgggcaagcgttcagtcgtgaatatcccagccgaccaccttctacacaggcgttcatgtctattaacggaaatggtgggtacccagagctgctcagctcccgctcatcctcagactattcgcatactagtagtcatgacagccgccgtatatcatacatccagaacgctggtgctggtttttccacgtcttcactcatgaacgtccgggaaacagcgaaagctttgtgatccgacgtatcatcgtcatatcttcttcggtcgtcctccggttgacagatcattgatacctgtcatgctgggagcattgcggttttcgttgcccttcctcccccttaccctcacataactctcttctgcttcagttaagagcgcgatgaagtcacaaattcttctcagctcactgttccttgcgcctctggcatttgcgctgcaagtcaccccggactctgcgtgtgcggccctttgcctagatagtccggaaggagatgcgtcagacccagatgcttccaacacgtcgcctagtgatatcacatgcacagacgatggttacgagacttcgactcggggtgtgaagtttaagaactgtgtcaactgcttgcagaacagcaatgcgacaagtaatgcagagagtgacatttcgtggtttctatacaacattcgatactccttagatgtgtgcttgtttggatttccggggaatgcctcgaagccagtctcatcgccttgtgccatcaaatatgcttgtcaaccactcaaaactgctctcgaggccgatgggctgaactccacggcgaacccgtacgattattgctcagccgatggcaactttctcgataatgcacacttagatacgtgtgtccagtgttttgctgcgagtccgaatcaagcctacatgtcgaattttgtcacggctctcaaagcaggctgtgagcagcagcccgacgcaggagccttgctcagcctgagtggtgcgctgttcacagattcaacggtcaacataaccagcccgccggattcatctaagggaaacgagagtttcaatatattctcgacgggggccattgttggcatcgctgtaggaggtgcattgcttctctttggcagtctggcactcttctgggttcatcatcgccggcaaaagcgcctgtatcgtgatatgactagttcccagaacgatccgcgaactgggagtagatctatcagtactccgcttcatggagcatactccgcagcggagaaaaacatggcgacaccaatgagcgactacgaacttcgcgcacagagaatttatacaaacaactctgagtattacgacatgctggagaaggaaatccaatctcaacgtgtgaactacgctcctgatcctaaccatccactgtcgggggccccaggtgttttgccagcccatcatgcttatctccctcgaactcatagccgtcagtcctcagtcaatgcatctcctcaaccaccacaacctatcaagaccaacaaacccgactcttatgctttacaagcatatttgaccgcggctgaggatgcacactccatcagcttattgcctccacctccaccaaggttacactcggtgataggggaaagaagctcatcgtccaatcgtgggccatctcccagtgtgcctccttcccatagccgcgactcatctgttggtagtcgtggaccttcccctgatcgccggcctctccttgacccaggcaaacctcagggcagtacagagctgagacctcctccaccaccaccgaaccaaccgtccaaaattccatctctttctttcccatcagttcctcgtattcgaatacctaaaaagtatacacctccgaggattacagtccaaggtgcaactccaattgatgggtcttctgggcttctttctcatgcaaatagcgacccacaagcagagatatctataggcctagatatcagcaatcccgtcgcctctcacgagccccgctttggagaaagtcagtgggaaaggcgccagaaattgcccccacagtcgttggtcatcgagcagacagctaccgaccgccgacctcaaccatgggttcaatctgaggttgagatcaagagcggtaagagcacgctctacggctaagctcaattctctgtataattacttaatgcatgataacggcgcatatggcaagataccacattcaaggttgtttcaggacagtttggttttggatttcattgggatagcatcacatttggcaggatttgtgtgacgtgggccaaacgctcgatctacgcaacgttgtgatcgttcctagtagtctttcaggtataagcaataaaattgtacgtgaagacatgcaaaatgaggaacaagctgaagaagatctttggtccgcttctaagtgcatttgttcgcatatttactacgtataaatcac

SEQ ID NO: 35218 - DNA, 2937 bp, Muscodor strobelii
  misc_feature: SGI cDNA ID NO. 572187
  misc_feature: Elevated expression when VOC is produced
  misc_feature: Encodes the peptide sequence at SEQ ID NO 35219
atgaggataggctgcctccaattttcgcctttggttggtgatatagacaacaacctcaatcgcgcagatgcggttctgagcaaagcgaaccccgaaaaccttgatcttctcgtacttcccgagcttgcttttactgggtacaacttcaaatcgctccaacacattagcccatttcttgagcctaagggctccggaatcaccgcgctatgggctcgaaccgttgcattgaaatttaattgcgttgttactgtcggttatcctgagaaggttgacgtcaaagcaaaatggcccacgtgggcgcccgaatactataattccgttatcgtggttaatcccgatggcgaaacgattggcaattacaggaagaatcatctgtattataccgacgagacgtgggcccttgaaggacaacaaggcttctatgaaggtttcataccaggtcttggtaacaccgcgatgggaatttgcatggatatcaatccttacaaatttgaagcgccatggcacgccttcgagtttgcttttcattgcctagaagtcgaggccaatatagttatcgtgacaatggcatggctaacgcgagaggatgcgcgcttgttcagtcgcatgccgaatgaacctgacatggacacattgacttattggatcacgcgacttgagcctataattcgggccgataacaaggacgagatcattatcgtcttttgtaatcgtactggcatagaagatgatgccgtttatgccggaacaagcgcggttgttggggtcaaagacggtgaggtcaatgtctatggcctgctcggtcgaggccagaaggatttgttggttgtggataccgaagctgccccctatgccaaacttgtctatcgccctgaagataactctacagtagcctctgttgtcgagtctacacacgggtctcaagcacccgacaaaggcgaggctgacaaacctcagagggaagaatcaccaacttcgcaatcatcatctagaaaagattcgaaacaggcttctaagattgcgaaagattccgcatcttcagcgatacaaaggcaagcaagccaaccccattcaccttcaagtcaaaaatcacagtcgagtcaacgatcgcactcaagcagaagatctcgatccagtcatcagtcacgctccagtccgcaatcccagactagccagaaatcggagtccagccaaagatcccacaaaagcagacaaactaattgcgatgtgaaaccagaggcacgtccgccgccatcagtgggtgccacgaaggattttgactatgttcctctgagtcttggaacgagagctggcagtgatagaagtacgagatccatgcagggatcggtctcgtcacaaacgtcttccaactctaggaagtcaaagggcagagacctagcgaagccctcaacatctgtaggatatagctctcgtagacagtcatccaggagagaaacaccacgttcgcccccgattcaaattccaccgcctcggactgaaaacaacgacacggtcccaacgccaactggacctagcccaacacctcttgccgtccggcccaaattggtgatccccagcgatggaagtagacgatcttctaagccacatgtccccacgcctcatcctagcagctcagctagcgctagtactaggtttcaaggtggaaacctctcgatacaacaacaaaatgagctcctcactccttcgactgctattgataatatgacaccacagtccccaaatcgattcttttggattgagtccgattcgttgttgcagacaccgatggaccacaggatatggacgcctgccctggctgactcgccaactctaagcgtgcgcacgcctgctacctcgcaagcgtacgtcaagaacactgccacagtgaaagctcaaccgattgagccacagctgaccaaaggcgtatcagcatctctgacaaggcctatgaatgccagcaaaccaataactgaactcaagtcatcgcaacaggctgcggactcccagaatgagttccaagataccggagcctcagaaagtcagccaaagatcattgaccggaacgattcaccattcgggaatcgcccagattgggctatcattgcaaagcgcctggatgctttatcgccccagccagattctatctttcacaaagaactaacgcgattccgcctcgtccgaactcaaatgtgccaggaagcagtcacatacctgaagaagaatccggcactatgccagatcgcccatcttcgccaaaatctcgcaatgcaagccggaatcccaagaggctcttctatcccggcgcgacggcccagtgcgcccagttttagatttcgaactcccgctgaattcgaggctgagatcaagcggatatcaccagaatggtccgtccaagctcattacggcgacagtgggacgggcgacccaaatgaaattattggtgagattattgtgcgccgctcgcctagttgtgctgtccatggaagaactgtagaagacggtactcctcaggaagagccttcctctgaccattcgagcattcatgagaccaatccagatgtgaatccagcagtgcaaccggcggatatcgcgacgttgaagcaacagactaaggattcgaatactacggctcttagaccgcaaggtaccgatgatcccagtgtccacgcgatagctgaagttgttacagagccaagtccaaacaactatacctattccgttgagactctgacaagtcccaaaggttcgccggcaactcctcaatctctttttaatccccctacacccaaagccatggtacttcttcgaggtgatgacgattccataccgaccactcccctgacagcgcctttcgtccaagatctgaaggttgctaaatttgcaatccaggcgataaatagtgatgctgtaccaagaccaaagagtgcggtgtggtag

SEQ ID NO: 35219 - protein, 978 aa, Muscodor strobelii
  misc_feature: SGI Peptide ID NO. 572187
  misc_feature (2)..(190): Pfam Id: PF00795 Pfam Desc: Carbon-nitrogen hydrolase
  misc_feature (2)..(130): Pfam Id: PF00795 Pfam Desc: Carbon-nitrogen hydrolase
  misc_feature (1)..(340): NCBI GI: 256731352 Blast Desc: NECHADRAFT_71806 [Nectria haematococca mpVI 77-13-4]
  misc_feature (11)..(338): NCBI GI: 46125653 Blast Desc: FG07204.1 [Gibberella zeae PH-1]
  misc_feature (1)..(291): NCBI GI: 145607377 Blast Desc: MGG_12173 [Magnaporthe grisea 70-15] gi|145014949|gb|EDJ99517.1| MGG_12173 [Magnaporthe grisea 70-15]
  misc_feature (1)..(530): NCBI GI: 39941370 Blast Desc: MGG_05596 [Magnaporthe grisea 70-15] gi|145022274|gb|EDK06294.1| MGG_05596 [Magnaporthe grisea 70-15]
  misc_feature (1)..(291): NCBI GI: 156034561 Blast Desc: SS1G_13215 [Sclerotinia sclerotiorum 1980] gi|154698619|gb|EDN98357.1| SS1G_13215 [Sclerotinia sclerotiorum 1980]
  misc_feature (1)..(292): NCBI GI: 85102747 Blast Desc: NCU01294 [Neurospora crassa OR74A] gi|28922925|gb|EAA32144.1| [Neurospora crassa OR74A] gi|28950095|emb|CAD70858.1| related to amino-terminal amidase
  misc_feature (1)..(287): NCBI GI: 116206684 Blast Desc: CHGG_02635 [Chaetomium globosum CBS 148.51] gi|88183232|gb|EAQ90700.1| CHGG_02635 [Chaetomium globosum CBS 148.51]
  misc_feature (1)..(308): NCBI GI: 154317366 Blast Desc: BC1G_03585 [Botryotinia fuckeliana B05.10] gi|150845002|gb|EDN20195.1| BC1G_03585 [Botryotinia fuckeliana B05.10]
  misc_feature (46)..(287): NCBI GI: 171692215 Blast Desc: protein product [Podospora anserina] gi|170946056|emb|CAP72857.1| protein product [Podospora anserina]
  misc_feature (1)..(290): NCBI GI: 145607698 Blast Desc: MGG_10123 [Magnaporthe grisea 70-15] gi|145015230|gb|EDJ99766.1| MGG_10123 [Magnaporthe grisea 70-15]
  misc_feature: Useful for introducing or modulating the production of volatile compounds
MRIGCLQFSPLVGDIDNNLNRADAVLSKANPENLDLLVLPELAFTGYNFKSLQHISPFLEPKGSGITALWARTVALKFNCVVTVGYPEKVDVKAKWPTWAPEYYNSVIVVNPDGETIGNYRKNHLYYTDETWALEGQQGFYEGFIPGLGNTAMGICMDINPYKFEAPWHAFEFAFHCLEVEANIVIVTMAWLTREDARLFSRMPNEPDMDTLTYWITRLEPIIRADNKDEIIIVFCNRTGIEDDAVYAGTSAVVGVKDGEVNVYGLLGRGQKDLLVVDTEAAPYAKLVYRPEDNSTVASVVESTHGSQAPDKGEADKPQREESPTSQSSSRKDSKQASKIAKDSASSAIQRQASQPHSPSSQKSQSSQRSHSSRRSRSSHQSRSSPQSQTSQKSESSQRSHKSRQTNCDVKPEARPPPSVGATKDFDYVPLSLGTRAGSDRSTRSMQGSVSSQTSSNSRKSKGRDLAKPSTSVGYSSRRQSSRRETPRSPPIQIPPPRTENNDTVPTPTGPSPTPLAVRPKLVIPSDGSRRSSKPHVPTPHPSSSASASTRFQGGNLSIQQQNELLTPSTAIDNMTPQSPNRFFWIESDSLLQTPMDHRIWTPALADSPTLSVRTPATSQAYVKNTATVKAQPIEPQLTKGVSASLTRPMNASKPITELKSSQQAADSQNEFQDTGASESQPKIIDRNDSPFGNRPDWAIIAKRLDALSPQPDSIFHKELTRFRLVRTQMCQEAVTYLKKNPALCQIAHLRQNLAMQAGIPRGSSIPARRPSAPSFRFRTPAEFEAEIKRISPEWSVQAHYGDSGTGDPNEIIGEIIVRRSPSCAVHGRTVEDGTPQEEPSSDHSSIHETNPDVNPAVQPADIATLKQQTKDSNTTALRPQGTDDPSVHAIAEVVTEPSPNNYTYSVETLTSPKGSPATPQSLFNPPTPKAMVLLRGDDDSIPTTPLTAPFVQDLKVAKFAIQAINSDAVPRPKSAVW

SEQ ID NO: 35220 - DNA, 344 bp, Muscodor strobelii
  misc_feature: SGI EST ID NO. CUFF.83874.0
  misc_feature: Variant of the nucleotide sequence at SEQ ID NO 35218
gtcaattttgacatcactttcgcattcgggggtcgtcttgcactcgcatcgcatttgcgtgtcggtctactttgccttctaaggcggtgtgcagaggttgcgggctgaaggcgatattgtcttgagacagtcgatgcgatcaaatatcaagatgaggataggctgcctccaattttcgcctttggttggtgatatagacaacaacctcaatcgcgcagatgcggttctgagcaaagcgaaccccgaaaaccttgatcttctcgtacttcccgagcttgcttttactgggtacaacttcaaatcgctccaacacattagcccatttcttgagcctaagggctccg

SEQ ID NO: 35221 - DNA, 1242 bp, Muscodor strobelii
  misc_feature: SGI cDNA ID NO. 572188
  misc_feature: Elevated expression when VOC is produced
  misc_feature: Encodes the peptide sequence at SEQ ID NO 35222
atgcttgtctccaaaggctctccctgcgagaagaactgcggcaataccctaaatggattgtcagaggatcaggtcgtctgcgatgatacgtcctacacaagctcgtccctcggccaagtcttcaagtcctgcgtaacctgcgaatcaacaagcatctacacaactacgcaaggtaaccagaccgcgtcagacctggggtcaatgctttggaacatgcgttatgctgcaaaccagtgtatatttcacgatggtgattattccgtctgctccacgtcgcgagcctgcggaccgtttttagacgcccttcagtacggcaacctctcaacttccgtcctcccctacggctattgcagtcaatggggggatcccgatttcttctcaaagtgtaccagctgtctactggcatctaactcaccgatacttcgcaacttcatgtccatccttgacggagcttgtacggagttggtccaacctccgaatatcatatctctggagggtggcaatatcttctcaaactcatatgtcaacgtcacggcatccgcggctacagaagctgttcacacacacaacaacgtcggtcccctgacttatggcgctctggcgggtatcgtcatcggcggtgttgtcgtacttcttgcgttggtaggctgcggtgtggtcatcaacggcaagcggcgcagaaagcagtatctacgaaagcgagaggaccagatgaagaattggcccacaccacaaatggcagggggcgagacgtttgagacaccaattagtcaacggccgctgcggggtggcggatggggtgactcccctattagtgctgccacggcagatggttctttcccccacgggcggtacttttcgccttacgcgtctcaatacaacagtcctgtgagcgctgtagaaggtccaggcactatgatgtggccgcaggacagaccccacgacatcggtgtcgccatcagcccggataacgaggcatcatattcgccttggtcggatcacaagggtaaggatagagaacacgtggacgacgatgaaaatggatttgctatgcaagacgtatcatatggcaccaaaaacatggaacaacatacacccgtctcacatccacaccaagtatacaacccaccaatcctaagacaccctggctatgggagatacacggataccagcccggtcagccctgccgagggcgtgggtgagagacatgtgaactattcgggaccctcgtcatcattctaa

SEQ ID NO: 35222 - protein, 413 aa, Muscodor strobelii
  misc_feature: SGI Peptide ID NO. 572188
  misc_feature (1)..(341): NCBI GI: 46125655 Blast Desc: FG07205.1 [Gibberella zeae PH-1]
  misc_feature (1)..(316): NCBI GI: 171692217 Blast Desc: protein product [Podospora anserina] gi|170946057|emb|CAP72858.1| protein product [Podospora anserina]
  misc_feature (1)..(314): NCBI GI: 116206686 Blast Desc: CHGG_02636 [Chaetomium globosum CBS 148.51] gi|88183233|gb|EAQ90701.1| CHGG_02636 [Chaetomium globosum CBS 148.51]
  misc_feature (7)..(320): NCBI GI: 261351660 Blast Desc: conserved [Verticillium albo-atrum VaMs.102]
  misc_feature (1)..(301): NCBI GI: 256731350 Blast Desc: NECHADRAFT_63536 [Nectria haematococca mpVI 77-13-4]
  misc_feature (1)..(322): NCBI GI: 85099657 Blast Desc: NCU01291 [Neurospora crassa OR74A] gi|28922354|gb|EAA31592.1| [Neurospora crassa OR74A] gi|28950092|emb|CAD70855.1| conserved [Neurospora crassa]
  misc_feature (1)..(301): NCBI GI: 39944390 Blast Desc: MGG_04206 [Magnaporthe grisea 70-15] gi|145014946|gb|EDJ99514.1| MGG_04206 [Magnaporthe grisea 70-15]
  misc_feature (7)..(267): NCBI GI: 154323165 Blast Desc: BC1G_00925 [Botryotinia fuckeliana B05.10] gi|150848259|gb|EDN23452.1| BC1G_00925 [Botryotinia fuckeliana B05.10]
  misc_feature (7)..(300): NCBI GI: 156064433 Blast Desc: SS1G_00224 [Sclerotinia sclerotiorum 1980] gi|154691086|gb|EDN90824.1| SS1G_00224 [Sclerotinia sclerotiorum 1980]
  misc_feature (3)..(234): NCBI GI: 256731347 Blast Desc: NECHADRAFT_96181 [Nectria haematococca mpVI 77-13-4]
  misc_feature: Useful for introducing or modulating the production of volatile compounds
MLVSKGSPCEKNCGNTLNGLSEDQVVCDDTSYTSSSLGQVFKSCVTCESTSIYTTTQGNQTASDLGSMLWNMRYAANQCIFHDGDYSVCSTSRACGPFLDALQYGNLSTSVLPYGYCSQWGDPDFFSKCTSCLLASNSPILRNFMSILDGACTELVQPPNIISLEGGNIFSNSYVNVTASAATEAVHTHNNVGPLTYGALAGIVIGGVVVLLALVGCGVVINGKRRRKQYLRKREDQMKNWPTPQMAGGETFETPISQRPLRGGGWGDSPISAATADGSFPHGRYFSPYASQYNSPVSAVEGPGTMMWPQDRPHDIGVAISPDNEASYSPWSDHKGKDREHVDDDENGFAMQDVSYGTKNMEQHTPVSHPHQVYNPPILRHPGYGRYTDTSPVSPAEGVGERHVNYSGPSSSF

SEQ ID NO: 35223 - DNA, 2122 bp, Muscodor strobelii
  misc_feature: SGI EST ID NO. CUFF.83862.0
  misc_feature: Variant of the nucleotide sequence at SEQ ID NO 35221
ccgcccccaagcttccccatttgagatgggatatgcaactattctgctcgggagagcatttggtaggtagtcacatttcgggccgctcgactccatcttctgaacagccgtccaacacactcctcgcccccttagcctcaggcacacagcctgttctaatcttcatatcacattggataccaacagacatattataagtttcacgtcacagtagcttaggcgccctgatgaaacttgtgtgcaagctgctgtactacgcaatgcgaaagtcgagtatcgcacccgtcgtctccaccgcgtgattcgtctgctgagcgttctgcacgtcgagacattctcgaccaacaacgactttgctcgcgagcagaccttagcaaagctctcgtgcatttatatcactaccgtcccatccccccgtggaatcatctaatgccgagcctgtgttatacccattgactgctgaaccgcgaacacgacttcgtctctatctggaccacggaactacccacacttcaagtctatcatctatcccttgagctgcgtagagtatttaggtcttgatatagacggcaccatgcttgtctccaaaggctctccctgcgagaagaactgcggcaataccctaaatggattgtcagaggatcaggtcgtctgcgatgatacgtcctacacaagctcgtccctcggccaagtcttcaagtcctgcgtaacctgcgaatcaacaagcatctacacaactacgcaaggtaaccagaccgcgtcagacctggggtcaatgctttggaacatgcgttatgctgcaaaccagtgtatatttcacgatggtgattattccgtctgctccacgtcgcgagcctgcggaccgtttttagacgcccttcagtacggcaacctctcaacttccgtcctcccctacggctattgcagtcaatggggggatcccgatttcttctcaaagtgtaccagctgtctactggcatctaactcaccgatacttcgcaacttcatgtccatccttgacggagcttgtacggagttggtccaacctccgaatatcatatctctggagggtggcaatatcttctcaaactcatatgtcaacgtcacggcatccgcggctacagaagctgttcacacacacaacaacgtcggtcccctgacttatggcgctctggcgggtatcgtcatcggcggtgttgtcgtacttcttgcgttggtaggctgcggtgtggtcatcaacggcaagcggcgcagaaagcagtatctacgaaagcgagaggaccagatgaagaattggcccacaccacaaatggcagggggcgagacgtttgagacaccaattagtcaacggccgctgcggggtggcggatggggtgactcccctattagtgctgccacggcagatggttctttcccccacgggcggtacttttcgccttacgcgtctcaatacaacagtcctgtgagcgctgtagaaggtccaggcactatgatgtggccgcaggacagaccccacgacatcggtgtcgccatcagcccggataacgaggcatcatattcgccttggtcggatcacaagggtaaggatagagaacacgtggacgacgatgaaaatggatttgctatgcaagacgtatcatatggcaccaaaaacatggaacaacatacacccgtctcacatccacaccaagtatacaacccaccaatcctaagacaccctggctatgggagatacacggataccagcccggtcagccctgccgagggcgtgggtgagagacatgtgaactattcgggaccctcgtcatcattctaatgtctccaatgggtgtgaaaagtatgaattggtctcttcttggagttgagttgacttggaaaggcgccttagcgatgattggaactgtcttccggcctgaaatcgccaaagcttttaggagttgacaatggtaatgatatggatgtatcgatttcgctgttgtaactatacccttttatttttgctcaaattcatatcattatctattctcaatcgcgatattcttcgcgacataccatagctgcaaggagtgacattgctattgagcacacgtgtagagaatgggccatgtgaagtgaattatca

SEQ ID NO: 35224 - DNA, 1464 bp, Muscodor strobelii
  misc_feature: SGI cDNA ID NO. 572189
  misc_feature: Reduced expression when VOC is produced
  misc_feature: Encodes the peptide sequence at SEQ ID NO 35225
atggcggcgcagcagaaggacattccggcgggcgaccagttcgcgatcaagccgaccaacgtcacgcccgccgtcgacaccagcaactggccattgctgctgaagaactacgaccagctgctcgttcgcaccggccacttcaccccgatccccaacggcagcgcgcccctctcccgcgacctcaagagctacatcagctccggcgtcatcaacctcgacaagccctccaacccctccagccacgaggtcgtcgcctgggtgaaacgcatcctccgctgcgagaagacgggccacagcggcaccctcgaccccaaagtcaccggctgcctgatcgtctgcgtcgaccgcgccacgaggctcgtcaagtcccagcagggcgccggaaaggaatatgtcgccgtcatccgcctccacgacaagctgcccggcggcgaggcccagttcgcacgcgctctcgagaccctgactggtgccctcttccaacgccctcccctaatctcggccgtcaagcgtcagctgcgtatccgtaccatccacgagtccaagcttatcgagttcgacaacgaccgccaccttggtattttctgggtctcttgcgaagctggcacatatatccgtactctttgtgttcacttgggtctgctcctcggtgtcggcgcccacatgcaggaactgcgacgtgtacgaagtggtgctatggacgagacaaaggacctggttacactgcacgatgttctcgatgcacagtggcagtacgacaacacgcgcgacgagtcttacctccgaaaagtcattgctcctctcgagacccttcttacatcctacaagcgcattgtggtcaaggactccacggtcaatgccatttgctacggtgctaagctcatgattcctggcctgttaagatacgagaacaacattgaggcacacgaagaagtcgtcctcatgaccaccaagggtgaggctatcgccctcggcattgcgatgatgtcgactgttgagatgtctacctgcgaccacggtgttgtcgccaaagtgaagagatgtatcatggagcgggacttgtacccccgtaggtggggtcttggcccgactgccactgagaagaagaagctcaaggcctccggcaagctcgacaagtttggacgcgccaatgagcagacccctgccaagtggacttccgagtacaaggactacggcgcccctgccggcgatgccgctcccaccaccgatgtgaccatgtctgaagcccctgctgctgtcgccgaaacaaccacgacgataaccgagaccgccacgaatggagacgaacctgcagcagacgatgacaagaagaagcgcaagaagcacgatggagagacggcagaggagaaggccgagcgcaagaggaggaaagccgagaagaaggcagccaaggaggccaagcgggcctcgattggcaagaaggatgacacagactctgattag

SEQ ID NO: 35225 - protein, 487 aa, Muscodor strobelii
  misc_feature: SGI Peptide ID NO. 572189
  misc_feature (26)..(84): Pfam Id: PF08068 Pfam Desc: DKCLD (NUC011) domain
  misc_feature (276)..(349): Pfam Id: PF01472 Pfam Desc: PUA domain
  misc_feature (88)..(226): Pfam Id: PF01509 Pfam Desc: TruB family pseudouridylate synthase (N terminal domain)
  misc_feature (1)..(453): NCBI GI: 212536058 Blast Desc: pseudouridylate synthase family protein [Penicillium marneffei ATCC 18224] gi|210070584|gb|EEA24674.1| pseudouridylate synthase family protein [Penicillium marneffei ATCC 18224]
  misc_feature (14)..(453): NCBI GI: 225562235 Blast Desc: centromere/microtubule binding protein CBF5 [Ajellomyces capsulatus G186AR]
  misc_feature (1)..(453): NCBI GI: 145609335 Blast Desc: centromere/microtubule binding protein CBF5 [Magnaporthe grisea 70-15] gi|145016715|gb|EDK01145.1| centromere/microtubule binding protein CBF5 [Magnaporthe grisea
  misc_feature (1)..(453): NCBI GI: 258571411 Blast Desc: centromere/microtubule-binding protein cbf5 [Uncinocarpus reesii 1704] gi|237904779|gb|EEP79180.1| centromere/microtubule-binding protein cbf5 [Uncinocarpus reesii
  misc_feature (14)..(453): NCBI GI: 239613209 Blast Desc: centromere/microtubule binding protein CBF5 [Ajellomyces dermatitidis ER-3]
  misc_feature (14)..(453): NCBI GI: 156048188 Blast Desc: SS1G_08825 [Sclerotinia sclerotiorum 1980] gi|154693222|gb|EDN92960.1| SS1G_08825 [Sclerotinia sclerotiorum 1980]
  misc_feature (14)..(453): NCBI GI: 225685065 Blast Desc: centromere/microtubule-binding protein cbf5 [Paracoccidioides brasiliensis Pb03]
  misc_feature (14)..(453): NCBI GI: 261190865 Blast Desc: centromere/microtubule binding protein CBF5 [Ajellomyces dermatitidis SLH14081] gi|239590885|gb|EEQ73466.1| centromere/microtubule binding protein CBF5 [Ajellomyces
  misc_feature (14)..(453): NCBI GI: 154302967 Blast Desc: centromere/microtubule binding protein CBF5 [Botryotinia fuckeliana B05.10] gi|150855151|gb|EDN30343.1| centromere/microtubule binding protein CBF5 [Botryotinia B05.10]
  misc_feature (14)..(487): NCBI GI: 70998678 Blast Desc: pseudouridylate synthase family protein [Aspergillus fumigatus Af293] gi|3334142|sp|O43102.1|CBF5_ASPFU RecName: Full=Centromere/microtubule-binding protein cbf5; AltName: factor
  misc_feature: Useful for introducing or modulating the production of volatile compounds
MAAQQKDIPAGDQFAIKPTNVTPAVDTSNWPLLLKNYDQLLVRTGHFTPIPNGSAPLSRDLKSYISSGVINLDKPSNPSSHEVVAWVKRILRCEKTGHSGTLDPKVTGCLIVCVDRATRLVKSQQGAGKEYVAVIRLHDKLPGGEAQFARALETLTGALFQRPPLISAVKRQLRIRTIHESKLIEFDNDRHLGIFWVSCEAGTYIRTLCVHLGLLLGVGAHMQELRRVRSGAMDETKDLVTLHDVLDAQWQYDNTRDESYLRKVIAPLETLLTSYKRIVVKDSTVNAICYGAKLMIPGLLRYENNIEAHEEVVLMTTKGEAIALGIAMMSTVEMSTCDHGVVAKVKRCIMERDLYPRRWGLGPTATEKKKLKASGKLDKFGRANEQTPAKWTSEYKDYGAPAGDAAPTTDVTMSEAPAAVAETTTTITETATNGDEPAADDDKKKRKKHDGETAEEKAERKRRKAEKKAAKEAKRASIGKKDDTDSD

SEQ ID NO: 35226 - DNA, 2315 bp, Muscodor strobelii
  misc_feature: SGI EST ID NO. CUFF.84003.0
  misc_feature: Variant of the nucleotide sequence at SEQ ID NO 35224
ccgacacaacccaagaatatctggtagcatcagaattctacagcaacacttcgtcctgcgacgaccctgtctcgagtatatttattctcttgggaaatagacataaatatattactacccgacaatggcggcgcagcagaaggacattccggcgggcgaccagttcgcgatcaagccgaccaacgtcacgcccgccgtcgacaccagcaactggccattgctgctgaagaactacgaccagctgctcgttcgcaccggccacttcaccccgatccccaacggcagcgcgcccctctcccgcgacctcaagagctacatcagctccggcgtcatcaacctcgacaagccctccaacccctccagccacgaggtcgtcgcctgggtgaaacgcatcctccgctgcgagaagacgggccacagcggcaccctcgaccccaaagtcaccggctgcctgatcgtctgcgtcgaccgcgccacgaggctcgtcaagtcccagcagggcgccggaaaggaatatgtcgccgtcatccgcctccacgacaagctgcccggcggcgaggcccagttcgcacgcgctctcgagaccctgactggtgccctcttccaacgccctcccctaatctcggccgtcaagcgtcagctgcgtatccgtaccatccacgagtccaagcttatcgagttcgacaacgaccgccaccttggtattttctgggtctcttgcgaagctggcacatatatccgtactctttgtgttcacttgggtctgctcctcggtgtcggcgcccacatgcaggaactgcgacgtgtacgaagtggtgctatggacgagacaaaggacctggttacactgcacgatgttctcgatgcacagtggcagtacgacaacacgcgcgacgagtcttacctccgaaaagtcattgctcctctcgagacccttcttacatcctacaagcgcattgtggtcaaggactccacggtcaatgccatttgctacggtgctaagctcatgattcctggcctgttaagatacggtgaatctctctttttcaactctttccatgttggcatgttggcagtaatgactaacgtgcacagcagagaacaacattgaggcacacgaagaagtcgtcctcatgaccaccaagggtgaggctatcgccctcggcattgcgatgatgtcgactgttgagatgtctacctgcgaccacggtgttgtcgccaaagtgaagagatgtatcatggagcgggacttgtacccccgtaggtggggtcttggcccgactgccactgagaagaagaagctcaaggcctccggcaagctcgacaagtttggacgcgccaatgagcagacccctgccaagtggacttccgagtacaaggactacggcgcccctgccggcgatgccgctcccaccaccgatgtgaccatgtctgaagcccctgctgctgtcgccgaaacaaccacgacgataaccgagaccgccacgaatggagacgaacctgcagcagacgatgacaagaagaagcgcaagaagcacgatggagagacggcagaggagaaggccgagcgcaagaggaggaaagccgagaagaaggcagccaaggaggccaagcgggcctcgattggcaagaaggatgacacagactctgattagtataagtgtcgtgtctgaattctgttctcggtggtttcctgtgataccatgttggcttttcatctagctagcttttatcactttcttcatgtgtcggcgtttctgctgtatcatacagtttcaaagggtggaaaatggcgttccggaatgctgcttctatggcttcagcatcatgttcttgatcaaagatacgggtcgtacgttctgcaatgcgggctaggtaaatagcatgtcaagttcgtatgagtcatgtcaattctactatctatcaaaaagattctatttcatgtgaaagtggtctacattctcaatgtcagacatcttgctcgctaaaattcagtactgggcacagttatcgatgtaatcaagccggtaacgccagctaggaacaccataagcaacgaagaacactgcaagatgatatgttctaattaggagtgaaaatcatttccatccttcactgtgagaacggccatgacagagttcaactatcgagtgtgtaagctgaagaggcaaagggaccaacatctaaagtggaacatgaggtcttcccatctaggtaattagcgtctatcgtgatacttcgatcgacaatcaaatccatgtgcccttctacaattcgagaacttcagaggcttcggaaacgtaaattcaccttgg

SEQ ID NO: 35227 - DNA, 1545 bp, Muscodor strobelii
  misc_feature: SGI cDNA ID NO. 572190
  misc_feature: Elevated expression when VOC is produced
  misc_feature: Encodes the peptide sequence at SEQ ID NO 35228
atgaaggcgtctcaattcgtctacatagccttcgcgcttcttttctcatcttcatccgctttgaaagttacacctaattcgccatgcgtaccactatgcgttggtacaagcgctaatgataacgaccctaattcctacggaaccgagaatgatgacatcagctgctatgacactgactacgcgacgacacccgctggtcgacgattccaaagctgtatgacatgtctacaagacagcacattttctcagggagcagaaactgatcagcattggtttctctacaatttaagatacgcatttgacaactgcatatttggcttcccaaatgcgactggcgtgccatcaacaccatgctccacgagcactgcttgcggtggatttcgcgatgcattgacgcaggatgatttaaacccaaacagcccagcgtacgactattgtgagatagatgggggtgaccttggcgacacttcaatcaccaaatgcgccggctgtgtagctgctactgataatgagagttatttggttaactttcttatcgctttacaagcaggttgcagtcagcgtccagccgccgggtcaagattaagtctgaatggcacagttttctcaaacactcgtatcgaaagtacagatggttcatctaaagattccgggaaccaactatctctgtccacagcagccatcgttggcatcgctattggtatcgcggtagtcgtgggcgcaattgcaggaacaaccttcatctgctgccgcaagcgacaaaaccgaagacgtcgtcttggacttgagtccagtccccgacgtacccaccaccgtcctgactcatctctctccttcagatgccaaacgcatgtcacgccccggactccagccttccccgatctatcacaaaccaccatcgaagaagagaaggattacgcggacccatactccgccctcggttctcatccccctgctagagacctatcaatatcgaaagccatatcaccggactgggaaccacagccacagcctcagcccctaaaatcaaacatcccgtcattctcccgccccggccccaaactccggtccctacaaaccatatccacaaccacacccacagtcccagagaatgtgcattactccacatctcctaaagcatcttacttctcaccccaagacgtgacgccaatcagcacaacaagcaacaacagcacggcacagcttctgccactgcgaccctacgtccctgccgattacggattttcatcgccgcaaatcggaagttcagctgacggcacgttcagcacaccgtcctctgccaacactgcttcgccgctactaagtcagaggtgggagagggcaaaccaaggttcgatgtcaccagtatgggaagtccctcaacgtgagcacgacctaaacacctcatcccgcgtggctggggcccttgagcgtatgggcgttcctcctagcccaggtaaaggcaggagagttagtaagactgggagtccgatagagtcgaaggagataaatgtgtacttccctgccccgccgaccaagaggtga

SEQ ID NO: 35228 - protein, 514 aa, Muscodor strobelii
  misc_feature: SGI Peptide ID NO. 572190
  misc_feature (22)..(513): NCBI GI: 256731347 Blast Desc: NECHADRAFT_96181 [Nectria haematococca mpVI 77-13-4]
  misc_feature (8)..(376): NCBI GI: 261351655 Blast Desc: conserved [Verticillium albo-atrum VaMs.102]
  misc_feature (2)..(418): NCBI GI: 39972439 Blast Desc: MGG_07521 [Magnaporthe grisea 70-15] gi|145016718|gb|EDK01148.1| MGG_07521 [Magnaporthe grisea 70-15]
  misc_feature (6)..(303): NCBI GI: 46125661 Blast Desc: FG07208.1 [Gibberella zeae PH-1]
  misc_feature (19)..(513): NCBI GI: 171692223 Blast Desc: protein product [Podospora anserina] gi|170946060|emb|CAP72861.1| protein product [Podospora anserina]
  misc_feature (10)..(381): NCBI GI: 256730973 Blast Desc: NECHADRAFT_105297 [Nectria haematococca mpVI 77-13-4]
  misc_feature (1)..(266): NCBI GI: 46125651 Blast Desc: FG07203.1 [Gibberella zeae PH-1]
  misc_feature (9)..(256): NCBI GI: 261351660 Blast Desc: conserved [Verticillium albo-atrum VaMs.102]
  misc_feature (6)..(233): NCBI GI: 145607381 Blast Desc: MGG_04209 [Magnaporthe grisea 70-15] gi|145014951|gb|EDJ99519.1| MGG_04209 [Magnaporthe grisea 70-15]
  misc_feature (11)..(210): NCBI GI: 156064437 Blast Desc: SS1G_00226 [Sclerotinia sclerotiorum 1980] gi|154691088|gb|EDN90826.1| SS1G_00226 [Sclerotinia sclerotiorum 1980]
  misc_feature: Useful for introducing or modulating the production of volatile compounds
MKASQFVYIAFALLFSSSSALKVTPNSPCVPLCVGTSANDNDPNSYGTENDDISCYDTDYATTPAGRRFQSCMTCLQDSTFSQGAETDQHWFLYNLRYAFDNCIFGFPNATGVPSTPCSTSTACGGFRDALTQDDLNPNSPAYDYCEIDGGDLGDTSITKCAGCVAATDNESYLVNFLIALQAGCSQRPAAGSRLSLNGTVFSNTRIESTDGSSKDSGNQLSLSTAAIVGIAIGIAVVVGAIAGTTFICCRKRQNRRRRLGLESSPRRTHHRPDSSLSFRCQTHVTPRTPAFPDLSQTTIEEEKDYADPYSALGSHPPARDLSISKAISPDWEPQPQPQPLKSNIPSFSRPGPKLRSLQTISTTTPTVPENVHYSTSPKASYFSPQDVTPISTTSNNSTAQLLPLRPYVPADYGFSSPQIGSSADGTFSTPSSANTASPLLSQRWERANQGSMSPVWEVPQREHDLNTSSRVAGALERMGVPPSPGKGRRVSKTGSPIESKEINVYFPAPPTKR

SEQ ID NO: 35229 - DNA, 2688 bp, Muscodor strobelii
  misc_feature: SGI EST ID NO. CUFF.84487.1
  misc_feature: Variant of the nucleotide sequence at SEQ ID NO 35227
tttgcttccaagggcgcttcgcgatagttacaacacggtacaccgaagactgatccatttcgacgccatcttctcgtgttgcctataagtttgataatcgcgtactctgaatattgagaaataataacgcagaccacttctaaacatcgacccgcagctcggccacgatgtatgttcccgatgacagttcgaccgaacctatctcttctgcccatctcggtccgtagacagagcttggacagccgttcgcgcaaggatgttcatctcaattgcaagtggcccgcttgccgcccgcgacctgcatgttggccactagaggaagctcccccatagatcaatagcaaatcacagccccagcaagctcgggcaattttacatcactcgtccaaatatttgcgacgtcgtacttctgacggtgagctagggcatgtccgaaatgttcatcctactagaccaagaacgatagtgattacttttcaatagtgttgatctcggcggtagacgggtgagtggaccatgctggcgatgtgacccatcccttaccaagccaaatctcatatatctctgaaggatgtgatactatatgtgatcagctcgtcctaggcattttgatctcttcacgtttttctgtacttgtgcgcttcgtttctgatatcgggtagtctgttcattctttcacaggctcggcttcctttcgcaacataatcgatcttcagcaggctgaatatcgtcatttgataattaatcttcttgtaatatcgtacagccaaatctcgagtcgtgcagagcactcctcgtcgtctcctttaccaatcaaaaccaagtcccgccgtctcagcattcacttacactaccgaaacaagatgaaggcgtctcaattcgtctacatagccttcgcgcttcttttctcatcttcatccgctttgaaagttacacctaattcgccatgcgtaccactatgcgttggtacaagcgctaatgataacgaccctaattcctacggaaccgagaatgatgacatcagctgctatgacactgactacgcgacgacacccgctggtcgacgattccaaagctgtatgacatgtctacaagacagcacattttctcagggagcagaaactgatcagcattggtttctctacaatttaagatacgcatttgacaactgcatatttggcttcccaaatgcgactggcgtgccatcaacaccatgctccacgagcactgcttgcggtggatttcgcgatgcattgacgcaggatgatttaaacccaaacagcccagcgtacgactattgtgagatagatgggggtgaccttggcgacacttcaatcaccaaatgcgccggctgtgtagctgctactgataatgagagttatttggttaactttcttatcgctttacaagcaggttgcagtcagcgtccagccgccgggtcaagattaagtctgaatggcacagttttctcaaacactcgtatcgaaagtacagatggttcatctaaagattccgggaaccaactatctctgtccacagcagccatcgttggcatcgctattggtatcgcggtagtcgtgggcgcaattgcaggaacaaccttcatctgctgccgcaagcgacaaaaccgaagacgtcgtcttggacttgagtccagtccccgacgtacccaccaccgtcctgactcatctctctccttcagatgccaaacgcatgtcacgccccggactccagccttccccgatctatcacaaaccaccatcgaagaagagaaggattacgcggacccatactccgccctcggttctcatccccctgctagagacctatcaatatcgaaagccatatcaccggactgggaaccacagccacagcctcagcccctaaaatcaaacatcccgtcattctcccgccccggccccaaactccggtccctacaaaccatatccacaaccacacccacagtcccagagaatgtgcattactccacatctcctaaagcatcttacttctcaccccaagacgtgacgccaatcagcacaacaagcaacaacagcacggcacagcttctgccactgcgaccctacgtccctgccgattacggattttcatcgccgcaaatcggaagttcagctgacggcacgttcagcacaccgtcctctgccaacactgcttcgccgctactaagtcagaggtgggagagggcaaaccaaggttcgatgtcaccagtatgggaagtccctcaacgtgagcacgacctaaacacctcatcccgcgtggctggggcccttgagcgtatgggcgttcctcctagcccaggtaaaggcaggagagttagtaagactgggagtccgatagagtcgaaggagataaatgtgtacttccctgccccgccgaccaagaggtgacgggccatcaggagggacgtgatgagttacgatatactaacagtgtgaggatgtaatgaagtacaaactatgataccaattgaacattttgagatgagaaatacgcagggagcccgattgatgtgataatctgatcatgcagtgcctttgtttgagtgacaatgggatatgaagcttggccctgagacttcaattatgtgcggatgccaattaaggcaaggacgcacattgatagaggatcttgtcgaaatataatatgtgcaacaagactggcccatta

SEQ ID NO: 35230 - DNA, 525 bp, Muscodor strobelii
  misc_feature: SGI cDNA ID NO. 572191
  misc_feature: Encodes the peptide sequence at SEQ ID NO 35231
atgtcgggcctcttgcggctttaccctatcgtgaagacatggaacaaagtcgttgaggagtatactcaaaggctcttaggatttccaggagataagcttccggccatatctgccatggcagccaatctagtgcaaatggcgaaggacgagagaagtgttgacttcaagtatcgcgctggcttgatgattggcattgaaggagaagattctagttggaaaggggaactactttggacagccagtcagcccgcggcgctcattggcaaaattggcggtgccttcgccccgtcctggtcttgggcttcagttcaatcaccggtgaataggtgggaatctactgcttttgactcctgggaagaagacggtgttcgtttgctcgagctcagagcgccattgcacgatgaacggaatcctttcggcgcagtcaagggaggaacattgaagaggggcaagaatattgtcgacgagtcgggatcttcaagttcgaatttcgacggcacatatatatcggtaacgaaatgctag

SEQ ID NO: 35231 - protein, 174 aa, Muscodor strobelii
  misc_feature: SGI Peptide ID NO. 572191
  misc_feature (9)..(143): NCBI GI: 256723135 Blast Desc: NECHADRAFT_81177 [Nectria haematococca mpVI 77-13-4]
  misc_feature (9)..(107): NCBI GI: 171695492 Blast Desc: protein product [Podospora anserina] gi|170947988|emb|CAP60152.1| protein product [Podospora anserina]
  misc_feature (8)..(157): NCBI GI: 256728256 Blast Desc: NECHADRAFT_87861 [Nectria haematococca mpVI 77-13-4]
  misc_feature (14)..(108): NCBI GI: 171679082 Blast Desc: protein product [Podospora anserina] gi|170937612|emb|CAP62271.1| protein product [Podospora anserina]
  misc_feature (13)..(148): NCBI GI: 164427540 Blast Desc: NCU03015 [Neurospora crassa OR74A] gi|157071786|gb|EAA36165.2| [Neurospora crassa OR74A]
  misc_feature (10)..(147): NCBI GI: 256720853 Blast Desc: NECHADRAFT_85575 [Nectria haematococca mpVI 77-13-4]
  misc_feature (13)..(148): NCBI GI: 16945382 Blast Desc: related to tol protein [Neurospora crassa]
  misc_feature (10)..(154): NCBI GI: 116206180 Blast Desc: CHGG_02383 [Chaetomium globosum CBS 148.51] gi|88182980|gb|EAQ90448.1| CHGG_02383 [Chaetomium globosum CBS 148.51]
  misc_feature (7)..(171): NCBI GI: 115402789 Blast Desc: [Aspergillus terreus NIH2624] gi|114189317|gb|EAU31017.1| [Aspergillus terreus NIH2624]
  misc_feature (14)..(173): NCBI GI: 40882307 Blast Desc: related to tol protein [Neurospora crassa]
MSGLLRLYPIVKTWNKVVEEYTQRLLGFPGDKLPAISAMAANLVQMAKDERSVDFKYRAGLMIGIEGEDSSWKGELLWTASQPAALIGKIGGAFAPSWSWASVQSPVNRWESTAFDSWEEDGVRLLELRAPLHDERNPFGAVKGGTLKRGKNIVDESGSSSSNFDGTYISVTKC

SEQ ID NO: 35232 - DNA, 1122 bp, Muscodor strobelii
  misc_feature: SGI cDNA ID NO. 572192
  misc_feature: Encodes the peptide sequence at SEQ ID NO 35233
atgcaggatgccggctacgaatacatcaacctcgacgactgctggtcggtaaaaggtggccgtgatagtacaacacagcagcttgttccggacacgaccaaattccctgacgggatatccggtcttgctgataagattcacgacatgggattcaaaatcggtatctacagcagtgcagggacgaaaacttgtgctggctggcccgccagtataggttttgagagcatcgacgccgagacctggtctgcctggggtattgactatttaaaatacgacaattgcaaccgtccctcaaactggacagatgaatgccaagcctgcacattcgatatcaacaatcccggcaactacgggaacggaacatgtgtggataacaataactactgtcccgcgggttacgactacactcaatccaatacctcaacgcgatacgcaatcatgagagatgcgctacaagcgcagaaccgaacgattctgtatagtctgtgtgaatggggattacagggcgttcaagaatggggcaatgagactggcaattcctggaggatgagtggtgacatcacggcggatttcccatctgtcctttcgatcttgaaccagaactcatttatcgtcaacgatgtcgatttctgggggcacaacgacgcagatatgctggaaatcggtaatggtctcacgctcgccgaagagcggacgcactttgctttttgggctgctatgaagagtcctttactcatcggcacgaacctcgcaacaacatctaacgactctgtggccatcctcctgaacaagtatcttctagcattcaatcaagaccctgtcttcggcgcagcagcgaaaccgtataaatggggcactaacccggattacaccttcaattatacgaacccggcggaattttggtctggggcgagctcagctgggacactcgtgctgatgctgaatactttagatgaaggccggaatatgactgcggacttcagtgaggttccgcaactagatgagggcgggacttataacgtattggatgtgtggactggtgaaagcctgggttcgtttactggcagcattgcgacggaggtgggcacacatgatactgcggctttactgttgactgcgtag

SEQ ID NO: 35233 - protein, 373 aa, Muscodor strobelii
  misc_feature: SGI Peptide ID NO. 572192
  misc_feature (1)..(320): Pfam Id: PF02065 Pfam Desc: Melibiase
  misc_feature (5)..(68): Pfam Id: PF02065 Pfam Desc: Melibiase
  misc_feature (1)..(371): NCBI GI: 226536997 Blast Desc: alpha galactosidase precursor [Aspergillus fumigatus]
  misc_feature (1)..(371): NCBI GI: 70985246 Blast Desc: alpha-galactosidase [Aspergillus fumigatus Af293] gi|66845757|gb|EAL86091.1| alpha-galactosidase [Aspergillus fumigatus Af293] gi|159125948|gb|EDP51064.1| alpha-galactosidase
  misc_feature (1)..(371): NCBI GI: 238485606 Blast Desc: alpha-galactosidase AglB [Aspergillus flavus NRRL3357] gi|220698920|gb|EED55259.1| alpha-galactosidase AglB [Aspergillus flavus NRRL3357]
  misc_feature (1)..(371): NCBI GI: 119499125 Blast Desc: alpha-galactosidase [Neosartorya fischeri NRRL 181] gi|119414484|gb|EAW24423.1| alpha-galactosidase [Neosartorya fischeri NRRL 181]
  misc_feature (1)..(371): NCBI GI: 169771801 Blast Desc: [Aspergillus oryzae RIB40] gi|83768229|dbj|BAE58368.1| protein product [Aspergillus oryzae]
  misc_feature (1)..(371): NCBI GI: 3821271 Blast Desc: alpha-galactosidase 1 [Penicillium simplicissimum]
  misc_feature (1)..(371): NCBI GI: 121719230 Blast Desc: alpha-galactosidase [Aspergillus clavatus NRRL 1] gi|119404525|gb|EAW14901.1| alpha-galactosidase [Aspergillus clavatus NRRL 1]
  misc_feature (1)..(371): NCBI GI: 255955485 Blast Desc: Pc21g14820 [Penicillium chrysogenum Wisconsin 54-1255] gi|211590206|emb|CAP96379.1| Pc21g14820 [Penicillium chrysogenum Wisconsin 54-1255]
  misc_feature (1)..(372): NCBI GI: 156763774 Blast Desc: alpha-galactosidase [Talaromyces emersonii]
  misc_feature (1)..(371): NCBI GI: 1580816 Blast Desc: alpha-galactosidase [Hypocrea jecorina]
  misc_feature (5)..(372): SWISSPROT Homolog: EC 3.2.1.22 Alpha-galactosidase
MQDAGYEYINLDDCWSVKGGRDSTTQQLVPDTTKFPDGISGLADKIHDMGFKIGIYSSAGTKTCAGWPASIGFESIDAETWSAWGIDYLKYDNCNRPSNWTDECQACTFDINNPGNYGNGTCVDNNNYCPAGYDYTQSNTSTRYAIMRDALQAQNRTILYSLCEWGLQGVQEWGNETGNSWRMSGDITADFPSVLSILNQNSFIVNDVDFWGHNDADMLEIGNGLTLAEERTHFAFWAAMKSPLLIGTNLATTSNDSVAILLNKYLLAFNQDPVFGAAAKPYKWGTNPDYTFNYTNPAEFWSGASSAGTLVLMLNTLDEGRNMTADFSEVPQLDEGGTYNVLDVWTGESLGSFTGSIATEVGTHDTAALLLTA

SEQ ID NO: 35234 - DNA, 1948 bp, Muscodor strobelii
  misc_feature: SGI EST ID NO. CUFF.83872.0
  misc_feature: Variant of the nucleotide sequence at SEQ ID NO 35232
cgattatgagcaagtagaaataaacatcagatttcgggctcgcagcttgcgatctgtaacctattgtcgcattcatcgcaatgtaaacatttcagaagcgatacgccatggacagattattcgcaacatgacccgaatccgatagaggcatcattaaatcctccgtccattcgaattctctaaaaatatatttgataacccatgcagcgaccctccgataggaaattcgggatatgctggagcgaatacgacctccggacggggagggcggggtcgcccgtacattttgaactactgcatcgtagatcttaagcatcaagcattgcatcataacagcagtgactgccgatgacttgtgaagcgttaaaatgtgtatataagcattaaatacgagttggactggcccttggaatgcaatgaatgtgctccttaatggtggtctttggatttgcccccgcctgccagtagagaaaaatccccaattaagtgaagaaatcatgagattaatcatcagcacatttttgctttcagtctctactgtatctgctctagaatgggcagatggaacaggaagactcccagcgctgggctggaattcgtggaatgcatacggatgcgacatcaatgagactgtgtttcttgacagtgcaaaatacatggttgacttgggtttacaagatgccggctacgaatacatcaacctcgacgactgctggtcggtaaaaggtggccgtgatagtacaacacagcagcttgttccggacacgaccaaattccctgacgggatatccggtcttgctgataagattcacgacatgggattcaaaatcggtatctacagcagtgcagggacgaaaacttgtgctggctggcccgccagtataggttttgagagcatcgacgccgagacctggtctgcctggggtattgactatttaaaatacgacaattgcaaccgtccctcaaactggacagatgaatgccaagcctgcacattcgatatcaacaatcccggcaactacgggaacggaacatgtgtggataacaataactactgtcccgcgggttacgactacactcaatccaatacctcaacgcgatacgcaatcatgagagatgcgctacaagcgcagaaccgaacgattctgtatagtctgtgtgaatggggattacagggcgttcaagaatggggcaatgagactggcaattcctggaggatgagtggtgacatcacggcggatttcccatctgtcctttcgatcttgaaccagaactcatttatcgtcaacgatgtcgatttctgggggcacaacgacgcagatatgctggaaatcggtaatggtctcacgctcgccgaagagcggacgcactttgctttttgggctgctatgaagagtcctttactcatcggcacgaacctcgcaacaacatctaacgactctgtggccatcctcctgaacaagtatcttctagcattcaatcaagaccctgtcttcggcgcagcagcgaaaccgtataaatggggcactaacccggattacaccttcaattatacgaacccggcggaattttggtctggggcgagctcagctgggacactcgtgctgatgctgaatactttagatgaaggccggaatatgactgcggacttcagtgaggttccgcaactagatgagggcgggacttataacgtattggatgtgtggactggtgaaagcctgggttcgtttactggcagcattgcgacggaggtgggcacacatgatactgcggctttactgttgactgcgtagttgaggtcattgggaccactaaactgtgtcttggtgttttgtagtgttgacgatgttgatgcgttagacaccggggtatatacgtatgctgactgtggccgctatatatgctgctctacgcaaatgccatactatttatagacatttaaatgtcg

SEQ ID NO: 35235 - DNA, 849 bp, Muscodor strobelii
  misc_feature: SGI cDNA ID NO. 572193
  misc_feature: Encodes the peptide sequence at SEQ ID NO 35236
atgttgactcgaatcctagttgcatcgcttctcagcagcagccttgtcgcaggcgctgttctgaaacaagcaagggccgcgtcggacgccgaaaaccttgctcaatttcgagcaaatcgactagctcgtcgaggagagccatcaacaggagacgatctccccgacgaaggagaacaccccaataaactcgatcaggttgagacagctttctatgatgcactggcattggctgtctatactatagatcatattacagacgataccgacgtattcccgcattacttcaatgaagaagaccgtggggagatcacacgtatctttggtgatcttgccaatggtggtagtggccatgataagctagatgatcttctagtccagaccacggactccaacgacctttgcgacggacgaactctatcatatttgaagaacgatgacagtccttacatcgtcctttgccccaatgccttcaataaaaaggcagtgagtgagctgaatggagccgaccccgctaccgacaatcggtatgttagatgtgaagatctcggagacactgtgagctatcgtatgaatacactcggaatgatgctactccatgagtatatgcattatgatcccatgattcaggcttccttcggttcaattgttgattacgatgacggttatgggcccgtgaatgtttatgacaaacttgataagtccaagactcggacaaacgccgatagctacgcctactacgcttcacatctcttctggaatagtctatgcgatactgacttcggtgcccctcgagctggagaggacgataacgatccggactgcggagatcaaacttgtaatcaaggttaa

SEQ ID NO: 35236 - protein, 282 aa, Muscodor strobelii
  misc_feature: SGI Peptide ID NO. 572193
  misc_feature (41)..(279): NCBI GI: 171679293 Blast Desc: protein product [Podospora anserina] gi|170939272|emb|CAP64500.1| protein product [Podospora anserina]
  misc_feature (120)..(279): NCBI GI: 171683091 Blast Desc: protein product [Podospora anserina] gi|170941505|emb|CAP67157.1| protein product [Podospora anserina]
  misc_feature (65)..(269): NCBI GI: 256726583 Blast Desc: [Nectria haematococca mpVI 77-13-4]
  misc_feature (65)..(271): NCBI GI: 169611749 Blast Desc: SNOG_08989 [Phaeosphaeria nodorum SN15] gi|160702358|gb|EAT83181.2| SNOG_08989 [Phaeosphaeria nodorum SN15]
MLTRILVASLLSSSLVAGAVLKQARAASDAENLAQFRANRLARRGEPSTGDDLPDEGEHPNKLDQVETAFYDALALAVYTIDHITDDTDVFPHYFNEEDRGEITRIFGDLANGGSGHDKLDDLLVQTTDSNDLCDGRTLSYLKNDDSPYIVLCPNAFNKKAVSELNGADPATDNRYVRCEDLGDTVSYRMNTLGMMLLHEYMHYDPMIQASFGSIVDYDDGYGPVNVYDKLDKSKTRTNADSYAYYASHLFWNSLCDTDFGAPRAGEDDNDPDCGDQTCNQG

SEQ ID NO: 35237 - DNA, 948 bp, Muscodor strobelii
  misc_feature: SGI EST ID NO. CUFF.83878.1
  misc_feature: Variant of the nucleotide sequence at SEQ ID NO 35235
cattacttcaatgaagaagaccgtggggagatcacacgtatctttggtgatcttgccaatggtggtagtggccatgataagctagatgatcttctagtccagaccacggactccaacgacctttgcgacggacgaactctatcatatttgaagaacgatgacagtccttacatcgtcctttgccccaatgccttcaataaaaaggcagtgagtgagctgaatggagccgaccccgctaccgacaatcggtatgttagatgtgaagatctcggagacactgtgagctatcgtatgaatacactcggaatgatgctactccatgagtatatgcattatgatcccatgattcaggcttccttcggttcaattgttgattacgatgacggttatgggcccgtgaatgtttatgacaaacttgataagtccaagactcggacaaacgccgatagctacgcctactacgcttcagtaagatctaccaagagactcaattatgaggttctcaactttagagaatctttattatcaaacttagacctggtgtctgacgtgtttcatagcatctcttctggaatagtctatgcgatactgacttcggtgcccctcgagctggagaggacgataacgatccggactgcggagatcaaacttgtaatcaaggttaaagacttgtttacgtacatgttgtaagtatcagagaatgacgtattgtcttgaagatccagtatatcgggtgctgtacccgcgtaaatacatgttttaccttttatcacatgtctccatacttactggccttctgtgcttggaccgtcgagcacatgtcacataaaacacgtacatacatacaaaggaatatacgcacatattgtattgtagtcaatcaagaaagtattagagcatctcatatgattgtggactggaaagaggccgagcgactgactttccggg

SEQ ID NO: 35238 - DNA, 753 bp, Muscodor strobelii
  misc_feature: SGI cDNA ID NO. 572194
  misc_feature: Encodes the peptide sequence at SEQ ID NO 35239
atggcaacagccgacaccccaaagatcaaagttgagctctccttatcaccagaaacgcattgcttcattcgccagtctgcgcccaccatcaccctcaaactctccctcttggagtcgtcaacatcgcatcccgtcacgttgtatatcgagaagacgccactagatatcagacatgcactttcacatcgcggattcacaataatcgatctgactgagcgatgcgatgttgcaaacaccacattcgtgaacaacgcaatgcgtatggcgaatccgcgactgcgcgtgcggggctcgaatgaggagaaatacttcgtcacgttgcacccttcgcaggcggaagatccgcctcagtctaaagatgacgccaagaatgaaggaatatggctgtcgtatccgttcggtcgtggcaacttccgtccacagccatggtcagttgtccagctcggccacgaagtggatgaaaacgggaatcaacgcaacatccgaaggtccaaggaggtcacaggcgttgatggtctacagcctggtcacgagtatgagattggcatggacgtcaatgaactacagcggagcgtcatgtgggcaccggtgccaaaggaggacattttacttgaggcagggtataaaggcgacggtaaaaacctggatgactactcatggatcaaggatcgcccgattgattttcaagttggaactgtgaagttaaagattctcgaggacgagaatggggatggtggtacagaagcagactaa

SEQ ID NO: 35239 - protein, 250 aa, Muscodor strobelii
  misc_feature: SGI Peptide ID NO. 572194
  misc_feature (8)..(222): NCBI GI: 171679295 Blast Desc: protein product [Podospora anserina] gi|170939273|emb|CAP64501.1| protein product [Podospora anserina]
  misc_feature (145)..(222): NCBI GI: 171683093 Blast Desc: protein product [Podospora anserina] gi|170941506|emb|CAP67158.1| protein product [Podospora anserina]
MATADTPKIKVELSLSPETHCFIRQSAPTITLKLSLLESSTSHPVTLYIEKTPLDIRHALSHRGFTIIDLTERCDVANTTFVNNAMRMANPRLRVRGSNEEKYFVTLHPSQAEDPPQSKDDAKNEGIWLSYPFGRGNFRPQPWSVVQLGHEVDENGNQRNIRRSKEVTGVDGLQPGHEYEIGMDVNELQRSVMWAPVPKEDILLEAGYKGDGKNLDDYSWIKDRPIDFQVGTVKLKILEDENGDGGTEAD

SEQ ID NO: 35240 - DNA, 1343 bp, Muscodor strobelii
  misc_feature: SGI EST ID NO. CUFF.83884.0
  misc_feature: Variant of the nucleotide sequence at SEQ ID NO 35238
tagcaattgaaacccccacacgtcagacgtaagacagaaactacgtcattgttttaactcgtacttgaatacggcccatttccctcgattccgaagcaatttcgatacgtcgtatgagttgtatttctcgcgcagtaatctgatcaccggcttcacaacttacgctaaagcgaccgaaaaatcacctttttgccatactgaaacaaacactacgaacaatttggatgttagcattggtatcttgagagaccgtcatctactatggcaacagccgacaccccaaagatcaaagttgagctctccttatcaccagaaacgcattgcttcattcgccagtctgcgcccaccatcaccctcaaactctccctcttggagtcgtcaacatcgcatcccgtcacgttgtatatcgagaagacgccactagatatcagacatgcactttcacatcgcggattcacaataatcgatctgactgagcgatgcgatgttgcaaacaccacattcgtgaacaacgcaatgcgtatggcgaatccgcgactgcgcgtgcggggctcgaatgaggagaaatacttcgtcacgttgcacccttcgcaggcggaagatccgcctcagtctaaagatgacgccaagaatgaaggaatatggctgtcgtatccgttcggtcgtggcaacttccgtccacagccatggtcagttgtccagctcggccacgaagtggatgaaaacgggaatcaacgcaacatccgaaggtccaaggaggtcacaggcgttgatggtctacagcctggtcacgagtatgagattggcatggacgtcaatgaactacagcggagcgtcatgtgggcaccggtgccaaaggaggacattttacttgaggcagggtataaaggcgacggtaaaaacctggatgactactcatggatcaaggatcgcccgattgattttcaagttggaactgtgaagttaaagattctcgaggacgagaatggggatggtggtacagaagcagactaagcatcatatggatatcaaggatttagggagaatggaatctaaagcatgatgcccggagatgaccagcaaatcaagacttgagcggagtcgccaagtcgtacttcgacgacgaatgtataagactagggaagattgattcaagatttcagatccgtggacgacctgggggtgcttgacagatacgaaaattcaaggtctcattcgctttattgggcaactcattcatttccagattatcaggtgattgtttcatatttgtaaccaaaacatgcctacatagcttgtgtgcagacttgatggaaaaatgatatatccaaattctaccctca

SEQ ID NO: 35241 - DNA, 1707 bp, Muscodor strobelii
  misc_feature: SGI cDNA ID NO. 572195
  misc_feature: Encodes the peptide sequence at SEQ ID NO 35242
atgaacgaattgacaatcccgcccgaagttttcttccaattcgatgatccttttgaactgcaacccgtgtcagcagtgccagcacctgagacgcccgctatacccgccgcaactgttgttcctgaacagcttgatacaaataacgaacgtgaagacgaacttgtctatcacaatggtactcagttttggcttatgactgcttctgtggcaatcatgatgttcttgacgaacttcgaagttcccgtcgtcacaacggctcttgtcagcatcacagatgacttaggggagtttcagaatgtgagctgggtggttgctgcgtacttgatcggatacgtcgccgttatcgtcatctgtgcaaagttttcagacatatttgggcacaaatcaatcttcgttttgtccattggactcttcacgatattcagcgcagcttgcagtgcatcacagactttagtccaattgatcgtattccgggcttttcaaggtgtagccggcggaggttgcttttcgctatgcacaattgttgctaccgaactggtcccgccagccaagtacacccagttcgtttccaatatctcagtagtcaacgccttgtcgctactgctaggtccaatcatcggaggcgcaatcgcatctcgcactagttggcgatggatatttatcatcaatgtgccaattgcccttcctgcgctgatcatgatcatccatgccatgcccaaggactttccgtatcacgatcagccgaaccaccaaccaaaaggtctcggacatatgttctctaaagagacgctgagccgaatcgacattccgggaaccattctgatcctccttgcgacgttagctctagcatctggcttcgaagaagctgacaaaaagttcccatggagatctgcctatgtcattacacttttgactgcatccggactcctctggattgcattaattatgtgcgaacgatatgtcaccaaatcttcactagcgagagagcctgtcctaccatggcgattcttcaagaaccgccagatgatgggcatattgcttaacttcgtatttttgggtgggccgacgctcataagcatctttttgattcctcaacgcttccaacttgtatatggtacatcgggcttgaccgccggcgtgaagctcattccgttcacgataacgcttccatttggtgctatctttgcttccatccttgcaggaaaagcgaagattccggctctctatctagtgatatcaggtgctctcctgcagatcatcggcttctctgtgctaggcacactcccgaccactgcttcagtacccgcaagaatctatggtggcgagttcttagcgggtcttggctgtggtacaaacttctcgctcttattcataatgattcctttgataaacgaaagccgggatcgcgccgtcggtatgggctctggtgctcagttcagaagtatgggtagtactgttgtactggcaattgctacttcagtcttcaacacttatgcacggcctaagctacaagagcttattggtgcttcaagcgtggatgatctcactagtagcacacttgcgtcgctcccaacggcggtataccaagaagttcgacacgtactcgcggagggatataatcgtcaattcatagtgttgactgtttccgccgctctgcaggttccggcatcgttgctcatgtggcaaaaaaagcaattaagggtgtag

SEQ ID NO: 35242 - protein, 568 aa, Muscodor strobelii
  misc_feature: SGI Peptide ID NO. 572195
  misc_feature (69)..(492): Pfam Id: PF07690 Pfam Desc: Major Facilitator Superfamily
  misc_feature (69)..(239): Pfam Id: PF07690 Pfam Desc: Major Facilitator Superfamily
  misc_feature (57)..(568): NCBI GI: 212533541 Blast Desc: multidrug resistance protein fnx1, [Penicillium marneffei ATCC 18224] gi|210072291|gb|EEA26380.1| multidrug resistance protein fnx1, [Penicillium marneffei ATCC 18224]
  misc_feature (15)..(568): NCBI GI: 225556984 Blast Desc: drug resistance transporter EmrB/QacA subfamily [Ajellomyces capsulatus G186AR]
  misc_feature (53)..(496): NCBI GI: 154294994 Blast Desc: BC1G_13363 [Botryotinia fuckeliana B05.10] gi|150844492|gb|EDN19685.1| BC1G_13363 [Botryotinia fuckeliana B05.10]
  misc_feature (27)..(563): NCBI GI: 242773497 Blast Desc: efflux pump antibiotic resistance protein, [Talaromyces stipitatus ATCC 10500] gi|218721871|gb|EED21289.1| efflux pump antibiotic resistance protein, [Talaromyces ATCC
  misc_feature (26)..(564): NCBI GI: 256728111 Blast Desc: NECHADRAFT_53897 [Nectria haematococca mpVI 77-13-4]
  misc_feature (42)..(567): NCBI GI: 67526853 Blast Desc: AN3884.2 [Aspergillus nidulans FGSC A4] gi|40739959|gb|EAA59149.1| AN3884.2 [Aspergillus nidulans FGSC A4] gi|259481548|tpe|CBF75171.1| TPA: MFS multidrug transporter,
  misc_feature (79)..(567): NCBI GI: 169769094 Blast Desc: [Aspergillus oryzae RIB40] gi|83766875|dbj|BAE57015.1| protein product [Aspergillus oryzae]
  misc_feature (122)..(568): NCBI GI: 242810792 Blast Desc: efflux pump antibiotic resistance protein, [Talaromyces stipitatus ATCC 10500] gi|218716280|gb|EED15702.1| efflux pump antibiotic resistance protein, [Talaromyces ATCC
  misc_feature (30)..(568): NCBI GI: 156060439 Blast Desc: SS1G_02358 [Sclerotinia sclerotiorum 1980] gi|154699766|gb|EDN99504.1| SS1G_02358 [Sclerotinia sclerotiorum 1980]
  misc_feature (32)..(564): NCBI GI: 212545512 Blast Desc: MFS multidrug transporter, [Penicillium marneffei ATCC 18224] gi|210065879|gb|EEA19973.1| MFS multidrug transporter, [Penicillium marneffei ATCC 18224]
MNELTIPPEVFFQFDDPFELQPVSAVPAPETPAIPAATVVPEQLDTNNEREDELVYHNGTQFWLMTASVAIMMFLTNFEVPVVTTALVSITDDLGEFQNVSWVVAAYLIGYVAVIVICAKFSDIFGHKSIFVLSIGLFTIFSAACSASQTLVQLIVFRAFQGVAGGGCFSLCTIVATELVPPAKYTQFVSNISVVNALSLLLGPIIGGAIASRTSWRWIFIINVPIALPALIMIIHAMPKDFPYHDQPNHQPKGLGHMFSKETLSRIDIPGTILILLATLALASGFEEADKKFPWRSAYVITLLTASGLLWIALIMCERYVTKSSLAREPVLPWRFFKNRQMMGILLNFVFLGGPTLISIFLIPQRFQLVYGTSGLTAGVKLIPFTITLPFGAIFASILAGKAKIPALYLVISGALLQIIGFSVLGTLPTTASVPARIYGGEFLAGLGCGTNFSLLFIMIPLINESRDRAVGMGSGAQFRSMGSTVVLAIATSVFNTYARPKLQELIGASSVDDLTSSTLASLPTAVYQEVRHVLAEGYNRQFIVLTVSAALQVPASLLMWQKKQLRV

SEQ ID NO: 35243 - DNA, 396 bp, Muscodor strobelii
  misc_feature: SGI cDNA ID NO. 572196
  misc_feature: Elevated expression when VOC is produced
  misc_feature: Encodes the peptide sequence at SEQ ID NO 35244
atgccgtacacggtaaacttgttctgcatgcgaaacccaaagatcacgccagagcagttcagagaccatttcgaaaatgtccatgtgccattagtgcgaaaactggccggcgacaagttcccgctctcacacacgagacgatatcttagtcgaacccaagatccagtcgaccaacgcagctttccggccaagatagtgctaggaacacaatatgatttcgcctatgatgcaatcgtcgaatttgtcttcgaagacgaggccggatttcagactttctttagtttcatgtcaaatgaggagaatagcaagctgcgcgaggaagacgagagcatgttcctcgacgtgtctcggacgaccgctgttgttctgggagatatcagagagacgaagaaatga

SEQ ID NO: 35244 - protein, 131 aa, Muscodor strobelii
  misc_feature: SGI Peptide ID NO. 572196
  misc_feature (1)..(129): NCBI GI: 256725421 Blast Desc: NECHADRAFT_83030 [Nectria haematococca mpVI 77-13-4]
  misc_feature (1)..(129): NCBI GI: 238499091 Blast Desc: conserved [Aspergillus flavus NRRL3357] gi|220692533|gb|EED48879.1| conserved [Aspergillus flavus NRRL3357]
  misc_feature (19)..(129): NCBI GI: 169778524 Blast Desc: [Aspergillus oryzae RIB40] gi|83772465|dbj|BAE62594.1| protein product [Aspergillus oryzae]
  misc_feature (3)..(127): NCBI GI: 197725413 Blast Desc: HypE [Aspergillus ochraceoroseus]
  misc_feature (3)..(131): NCBI GI: 238497409 Blast Desc: aflMa/ hypE/ [Aspergillus flavus NRRL3357] gi|220694820|gb|EED51164.1| aflMa/ hypE/ [Aspergillus flavus NRRL3357]
  misc_feature (3)..(126): NCBI GI: 89212404 Blast Desc: E [Aspergillus parasiticus] gi|89212410|gb|ABD63567.1| E [Aspergillus parasiticus] gi|89212416|gb|ABD63570.1| E [Aspergillus parasiticus] gi|89212420|gb|ABD63572.1| E E E E E E
  misc_feature (3)..(126): NCBI GI: 89212406 Blast Desc: E [Aspergillus parasiticus] gi|89212414|gb|ABD63569.1| E [Aspergillus parasiticus] gi|89212428|gb|ABD63576.1| E [Aspergillus parasiticus]
  misc_feature (9)..(131): NCBI GI: 237871041 Blast Desc: E protein [Aspergillus flavus] gi|237871043|gb|ACR25963.1| E protein [Aspergillus flavus] gi|237871049|gb|ACR25966.1| E protein [Aspergillus flavus]
  misc_feature (3)..(126): NCBI GI: 89212408 Blast Desc: E [Aspergillus parasiticus]
  misc_feature (3)..(126): NCBI GI: 89212412 Blast Desc: E [Aspergillus parasiticus]
  misc_feature: Useful for introducing or modulating the production of volatile compounds
MPYTVNLFCMRNPKITPEQFRDHFENVHVPLVRKLAGDKFPLSHTRRYLSRTQDPVDQRSFPAKIVLGTQYDFAYDAIVEFVFEDEAGFQTFFSFMSNEENSKLREEDESMFLDVSRTTAVVLGDIRETKK

SEQ ID NO: 35245 - DNA, 1074 bp, Muscodor strobelii
  misc_feature: SGI cDNA ID NO. 572197
  misc_feature: Encodes the peptide sequence at SEQ ID NO 35246
atgtcttctcaaacagtgtttcgcctcacctctcgcaatggcttcgatggcatacaatccttcaaagaacctatcccctcgcccagtcaaggtgaggtattagtgaaggttcggggcatagggctaaattatcgtgatgtcgccattgcccataatcaataccctttccccgtcaaggacaacgtgatcctttgtgccgacgtggcaggcactgtcatggagatcggaccgcaatacaaaagttcaaatgtcaaccacgtgatacatacttctccaaccttgctcgctgttggagactctgtgacagttataccgagtccgactggtcttgccgaacacgcatggggaggtgcctcagatggattcctgtgtgaatatgtcgtgctccccattgacacgctggtcaagagcccgaagaaatgcactacgaccgaagagttcatgcggctagctggtagaccggtggtggtcgtaaccgcctggaactgtctttatggcttgaaacctcttaaagcaggtgacacggtcttggccctcggcactggtggcgtttcattaactgcggtggcattggcaaaagctgcaggagcgaccattatcatcacgtcttccagcgacaagaagctcgaactcgtccaggctcagtatggcgcggaccatgtaatcaactataagacgcatcccaattgggcggccgaggtcatgcgtatcacgaataaccagggtgtacaacaagttgtggagataggcggccaaggctcccttcagcaaagtctggactgtacggcaagagatggtattgtttccgtcatcgggttcctagcccctgcagatgaagcacaaaatgcgggatccaatgtcgccatgtcagttttgaacaaggcatgtatcattcgtggcattcttggcggctcgaaacaacagcttgaagatgcttatcaatttatggcgcgtcataaagtcgatgtacacgtcgataagacctttggcttcacccgcgacgagattatcgcgtcattgaagtacctcgagtccggggcacacattgggaaagtgtgtatcagcacagcatag

SEQ ID NO: 35246 - protein, 357 aa, Muscodor strobelii
  misc_feature: SGI Peptide ID NO. 572197
  misc_feature (30)..(137): Pfam Id: PF08240 Pfam Desc: Alcohol dehydrogenase GroES-like domain
  misc_feature (172)..(318): Pfam Id: PF00107 Pfam Desc: Zinc-binding dehydrogenase
  misc_feature (1)..(354): NCBI GI: 256721564 Blast Desc: NECHADRAFT_37345 [Nectria haematococca mpVI 77-13-4]
  misc_feature (1)..(354): NCBI GI: 255956769 Blast Desc: Pc21g21650 [Penicillium chrysogenum Wisconsin 54-1255] gi|211590848|emb|CAP97062.1| Pc21g21650 [Penicillium chrysogenum Wisconsin 54-1255]
  misc_feature (3)..(354): NCBI GI: 145231204 Blast Desc: An01g14780 [Aspergillus niger] gi|134055996|emb|CAK44175.1| protein product [Aspergillus niger]
  misc_feature (1)..(355): NCBI GI: 199428775 Blast Desc: DEHA2A00154p [Debaryomyces hansenii]
  misc_feature (1)..(355): NCBI GI: 50405399 Blast Desc: DEHA0A00154g [Debaryomyces hansenii CBS767]
  misc_feature (7)..(354): NCBI GI: 218531402 Blast Desc: Alcohol dehydrogenase zinc-binding domain protein [Methylobacterium chloromethanicum CM4] gi|218523705|gb|ACK84290.1| Alcohol dehydrogenase zinc-binding
  misc_feature (7)..(354): NCBI GI: 240139896 Blast Desc: alcohol dehydrogenase [Methylobacterium extorquens AM1] gi|240009870|gb|ACS41096.1| alcohol dehydrogenase [Methylobacterium extorquens AM1]
  misc_feature (7)..(354): NCBI GI: 163852562 Blast Desc: alcohol dehydrogenase [Methylobacterium extorquens PA1] gi|163664167|gb|ABY31534.1| Alcohol dehydrogenase zinc-binding domain protein [Methylobacterium extorquens PA1]
  misc_feature (7)..(354): NCBI GI: 254562320 Blast Desc: alcohol dehydrogenase [Methylobacterium extorquens DM4] gi|254269598|emb|CAX25569.1| alcohol dehydrogenase [Methylobacterium extorquens DM4]
  misc_feature (7)..(354): NCBI GI: 46202914 Blast Desc: COG0604: NADPH:quinone reductase and related Zn-dependent oxidoreductases [Magnetospirillum magnetotacticum MS-1]
  misc_feature (18)..(326): SWISSPROT Homolog: EC 1.1.1.1 Alcohol dehydrogenase
MSSQTVFRLTSRNGFDGIQSFKEPIPSPSQGEVLVKVRGIGLNYRDVAIAHNQYPFPVKDNVILCADVAGTVMEIGPQYKSSNVNHVIHTSPTLLAVGDSVTVIPSPTGLAEHAWGGASDGFLCEYVVLPIDTLVKSPKKCTTTEEFMRLAGRPVVVVTAWNCLYGLKPLKAGDTVLALGTGGVSLTAVALAKAAGATIIITSSSDKKLELVQAQYGADHVINYKTHPNWAAEVMRITNNQGVQQVVEIGGQGSLQQSLDCTARDGIVSVIGFLAPADEAQNAGSNVAMSVLNKACIIRGILGGSKQQLEDAYQFMARHKVDVHVDKTFGFTRDEIIASLKYLESGAHIGKVCISTA

SEQ ID NO: 35247 - DNA, 1263 bp, Muscodor strobelii
  misc_feature: SGI cDNA ID NO. 572198
  misc_feature: Encodes the peptide sequence at SEQ ID NO 35248
atgcctccaggtcgacgtaaagtcgatgttgcaccttgtcctttctgcagtaagaccttcaagagacaagagcacaagctgcgccatgaacgcacgcatactcacgaaaaaccatatgcttgtgactgtgggcaacacttcgctagacaggatttacttaggcgccatgcacgactttcccacaagcagtctcaagcgtcggaaccggccgtttccccgcgtagcaccttggatgccagtgagaccgatcttatttgggcacctgaattgaacttttctgatattatgccggaaacattcttgagcatgaatttcttcaccgtcgagcctgagactaggaatcagttgccaactccatccacccgggctagttttgatgatttcacatcttcactgccacgcgcaaacatcgtagaggacggaatggtcttcggcgaggataatgaatctctggagctgtcaggtaattcaggcgacattgacgctaatcgtagatctcgtctcgagccgtggtcaatgtcaaaggcagtctatgatagaatcctgtctgatatccaggaatatgttcccacacccccagcaggcttcaaacctccaacctgtaactatctatgctgcggaatggaggtctactttagatgtgctcagaaatatctgccattcatacatatccctaccttcgctgccgagaaacatggaagtgagcttctgctagcgattgcgtctatcggccagctatataggtatgagaagtccaagtcttatggactatatttcattgcggaggctatcctactagaaaaaaagcggcgcgaacagctgcgattggcatccaatatcttatcggaagtagaggatgctgcacctgatgacatggcaaggctagagaggatccgaacgctcattcttctcatgatgttcgcatcatgggctgatcaaaaggttagactcagcgccgtttcaatgggaagtgaactagcgatgttagccagagctcacggaatataccgtccagaaagtgagacacgagaggaggattggcttgcttggatcgcttccgagcagagacggagaactctgctggctgcgtatataatgttgaacttacaaagctttgtcttcgacgtcccacctctcattcttaatgctgaggttggtctgcttttacccgactctgctgaagtgcatagtggctggcagtggccgatggccatcgcaaacctctttctgaaccgcccgtcggtcaatcgatggctagactag

SEQ ID NO: 35248 - protein, 420 aa, Muscodor strobelii
  misc_feature: SGI Peptide ID NO. 572198
  misc_feature (170)..(408): NCBI GI: 145231202 Blast Desc: An01g14770 [Aspergillus niger] gi|134055995|emb|CAK44174.1| protein product [Aspergillus niger]
  misc_feature (156)..(390): NCBI GI: 255956771 Blast Desc: Pc21g21660 [Penicillium chrysogenum Wisconsin 54-1255] gi|211590849|emb|CAP97063.1| Pc21g21660 [Penicillium chrysogenum Wisconsin 54-1255]
  misc_feature (170)..(396): NCBI GI: 256724069 Blast Desc: NECHADRAFT_51514 [Nectria haematococca mpVI 77-13-4]
  misc_feature (13)..(392): NCBI GI: 255941398 Blast Desc: Pc16g11660 [Penicillium chrysogenum Wisconsin 54-1255] gi|211586091|emb|CAP93836.1| Pc16g11660 [Penicillium chrysogenum Wisconsin 54-1255]
  misc_feature (124)..(395): NCBI GI: 70998540 Blast Desc: C2H2 transcription factor (AmdA) [Aspergillus fumigatus Af293] gi|66851628|gb|EAL91954.1| C2H2 transcription factor (AmdA), [Aspergillus fumigatus Af293]
  misc_feature (124)..(395): NCBI GI: 159126273 Blast Desc: C2H2 transcription factor (AmdA), [Aspergillus fumigatus A1163]
  misc_feature (170)..(393): NCBI GI: 256723991 Blast Desc: NECHADRAFT_12626 [Nectria haematococca mpVI 77-13-4]
  misc_feature (124)..(395): NCBI GI: 119498479 Blast Desc: C2H2 transcription factor (AmdA), [Neosartorya fischeri NRRL 181] gi|119414161|gb|EAW24100.1| C2H2 transcription factor (AmdA), [Neosartorya fischeri NRRL 181]
  misc_feature (171)..(395): NCBI GI: 121712732 Blast Desc: C2H2 transcription factor (AmdA), [Aspergillus clavatus NRRL 1] gi|119402130|gb|EAW12551.1| C2H2 transcription factor (AmdA), [Aspergillus clavatus NRRL 1]
  misc_feature (124)..(401): NCBI GI: 67523629 Blast Desc: AN2270.2 [Aspergillus nidulans FGSC A4] gi|454103|gb|AAA97487.1| regulatory protein [Emericella nidulans] gi|40744687|gb|EAA63843.1| AN2270.2 [Aspergillus nidulans FGSC ;
MPPGRRKVDVAPCPFCSKTFKRQEHKLRHERTHTHEKPYACDCGQHFARQDLLRRHARLSHKQSQASEPAVSPRSTLDASETDLIWAPELNFSDIMPETFLSMNFFTVEPETRNQLPTPSTRASFDDFTSSLPRANIVEDGMVFGEDNESLELSGNSGDIDANRRSRLEPWSMSKAVYDRILSDIQEYVPTPPAGFKPPTCNYLCCGMEVYFRCAQKYLPFIHIPTFAAEKHGSELLLAIASIGQLYRYEKSKSYGLYFIAEAILLEKKRREQLRLASNILSEVEDAAPDDMARLERIRTLILLMMFASWADQKVRLSAVSMGSELAMLARAHGIYRPESETREEDWLAWIASEQRRRTLLAAYIMLNLQSFVFDVPPLILNAEVGLLLPDSAEVHSGWQWPMAIANLFLNRPSVNRWLD

SEQ ID NO: 35249 - DNA, 4856 bp, Muscodor strobelii
  misc_feature: SGI EST ID NO. CUFF.83982.3
  misc_feature: Variant of the nucleotide sequence at SEQ ID NO 35247
aaaaagcgatcgccttttgatgaaattaagcgagcaatcttgaaagaatttgtcacttattttttcacccctccgagaacacgtgcactcctaccctagaaggaatttgccagccctgccataccgacacttgttctacccgccaccattatgtaccgaaacaactggaatcgtctgaagccacatgcacctaaggattgtatcgatcattctacataattcggccacgatgcctccaggtcgacgtaaagtcgatgttgcaccttgtcctttctgcagtaagaccttcaagagacaagagcacaagctgcgccatgaacgcacgcatactcacgaaaaaccatatgcttgtgactgtgggcaacacttcgctagacaggatttacttaggcgccatgcacgactttcccacaagcagtctcaagcgtcggaaccggccgtttccccgcgtagcaccttggatgccagtgagaccgatcttatttgggcacctgaattgaacttttctgatattatgccggaaacattcttgagcatgaatttcttcaccgtcgagcctgagactaggaatcagttgccaactccatccacccgggctagttttgatgatttcacatcttcactgccacgcgcaaacatcgtagaggacggaatggtcttcggcgaggataatgaatctctggagctgtcaggtaattcaggcgacattgacgctaatcgtagatctcgtctcgagccgtggtcaatgtcaaaggcagtctatgatagaatcctgtctgatatccaggaatatgttcccacacccccagcaggcttcaaacctccaacctgtaactatctatgctgcggaatggaggtctactttagatgtgctcagaaatatctgccattcatacatatccctaccttcgctgccgagaaacatggaagtgagcttctgctagcgattgcgtctatcggccagctatataggtatgagaagtccaagtcttatggactatatttcattgcggaggctatcctactagaaaaaaagcggcgcgaacagctgcgattggcatccaatatcttatcggaagtagaggatgctgcacctgatgacatggcaaggctagagaggatccgaacgctcattcttctcatgatgttcgcatcatgggctgatcaaaaggttagactcagcgccgtttcaatgggaagtgaactagcgatgttagccagagctcacggaatataccgtccagaaagtgagacacgagaggaggattggcttgcttggatcgcttccgagcagagacggagaactctgctggctgcgtatataatgttgaacttacaaagctttgtcttcgacgtcccacctctcattcttaatgctgaggttggtctgcttttacccgactctgctgaagtgtgggaagcagacgatgtcgcgcagtggaagagcatcacacaccaaccaagtcgaccctttcttcaagccagtcgtgccctgttcaatagagctgagctcactgaaggcgctcgcatctcgccactttcgagctatctcttgattcatggagtattacaaagaatatacgtggaaaatcatagtagtgatcaccacctttccgaagcaagtatagcatgtttcgaaagggcacttcgaaaatggcaagccttatccaccgatgtgacatgcctcgatccgcattcatccaaagcaccaatcggccttatgtctgccgccctcctccggctagcctatcttgacttgtatgcttatattggctcttcaagaagcttgtacctgggagatcgaatgtgtgccgttaatcggcttccccaaatattccccagatcttctggcacaagcaaggcggttttgtttgcagctcatgctcttagcataccagtgcgaataggggtagagtacatggcgaccacaaaaacttcaatatggtgtgttgagcattctctttgcagtttgaagagtgggttggtgctaagagattggctggagatgttgtctctaattgtaaaatcatctggcttcgactcgcttcagaatgtggagaaaaagcttctaagcacaatcaaaagtatcataagagaaacatcatttgccgacacattagacatcgtcgaagacgaatcaaacagcatttatcgaatggccaacactacaatcagaatctgggccgagatcttccaaggtacgcatgtcttccagctagacaaccaaattgggtggagtttcaagtacatggcggaatctatgctgtgctgatacacactttcccaatgtgtgccccggactcgaggtacttcaatgacgcgataatctcgtcgcgggtgaagccaaaggtcttatcgacgtgtacatcgactttatgacgcgccataaattgataagcatcttcaagctgttgtttcgagccgccaagaatgccacgaatgatacatgccttgttcaaaactgacatggcgacattggatcccgcattttgtgcttcatctgcaggggctaggaacccgatgacggaaacaataccatctcttgccgtacagtccagactttgctgaagggagccttggccgcctatctccacaacttgttgtacaccctggttattcgtgatacgcatgacctcggccgcccaattgggatgcgtcttatagttgattacatggtccgcgccatactgagcctggacgagttcgagcttcttgtcgctggaagacgtgatgataatggtcgctcctgcagcttttgccaatgccaccgcagttaatgaaacgccaccagtgcctgatacatacagtgagcgacgcccacctcacataggggcaatttaccctaatttctgatgggggctaggttgcttaccgagggccaagaccgtgtcacctgctttaagaggtttcaagccataaagacagttccaggcggttacgaccaccaccggtctaccagctagccgcatgaactcttcggtcgtagtgcatttcttcgggctcttgaccagcgtgtcaatggggagcacgacatattcacacaggaatccatctgaggcacctccccatgcgtgttcggcaagaccagtcggactcggtataactgtcacagagtctccaacagcgagcaaggttggagaagtatgtatcacgtggttgacatttgaacttttgtattgcggtccgatctccatgacagtgcctgccacgtcggcacaaaggatcactattatcactaggagtcagttgtgcttgccgcaatcgccccttttctgtgcaagtggccagaagacgcatgggaagagagatgtttaccgttgtccttgacggggaaagggtattgattatgggcaatggcgacatcacgataatttagccctatgccccgaaccttcactaatacctcaccttgactgggcgaggggataggttctttgaaggattgtatgccatcgaagccattgcgagaggtgaggcgaaacactgtttgagaagacatgttgtcggtctatggttggagcagaggagagcgatgatgataactgaggatttttagagccgatgttgcgagcgaactgcaagataatgccttgaatgagaactcgaacgtttctagatgccggcttatatacaacttaacatcttacgaatctacggccgccatgttttcttctccaatggcaccattttgttttaccgagccatcgtagattgcttgtgtaagcgttcgcttttctaccccaattgaggcacttgcggcggccgccgctgagacccgatgatcaattgcgctagtgaaaaaaaggatttatttcattatcaaagtgtgttttgttagacttgttcactgccagatggaatgtgtgtttggagtaaaattacacaattggggtagaaatagtgtgttggagacgaaaaagcatagatagcgttgtatgactttggcatcttgttaagcattaataacgtccgtaaattccagtggatccgaatagtttaaaagtattaggtaaatttgctagttcaacgacaacttggtacgaaatatcatagtgcgacgtgataaaatattagaaaatggtgaagagacagagcatagtcgtaagaatagatggcatattgttactagacacagcatcaatccatgctgacggacttttctattacgctgacaagaccttctcacaagagtgaacattcgaaattcgccaatctattgtatatcgagccaatcagttctcgtcaaagctcaccatactcggattgatctgcactctcactctctatctgttctgtaagttggattcatttcttcgtctctctgatatctcccagaacaacagcggtcgtccgagacacgtcgaggaacatgctctcgtcttcctcgcgcagcttgctattctcctcatttgacatgaaactaaagaaagtctgaaatccggcctcgtcttcgaagacaaattcgacgattgcatcataggcgaaatcatattgtgttcctagcactatcttggccggaaagctgcgttggtcgactggatcttgggttcgactaagatatcgtctcgtgtgtgagagcgggaacttgtcgccggccagttttcgcactaatggcacatggacattttcgaaatggtctctgaactgctctggcgtgatctttgggtttcgcatgcagaacaagtttaccgtgtacggcatctttagcacagattggagttcagataatatcgtccttaaatatgccgtggatacgatgaaacgaaacaaggagtgctttgaattactggagaaaataatttgagactggtgacaatagggatgttgaaatcagcgttgcaagggagaagactttc

SEQ ID NO: 35250 - DNA, 1275 bp, Muscodor strobelii
  misc_feature: SGI cDNA ID NO. 572199
  misc_feature: Encodes the peptide sequence at SEQ ID NO 35251
atgcctccaggtcgacgtaaagtcgatgttgcaccttgtcctttctgcagtaagaccttcaagagacaagagcacaagctgcgccatgaacgcacgcatactcacgaaaaaccatatgcttgtgactgtgggcaacacttcgctagacaggatttacttaggcgccatgcacgactttcccacaagcagtctcaagcgtcggaaccggccgtttccccgcgtagcaccttggatgccagtgagaccgatcttatttgggcacctgaattgaacttttctgatattatgccggaaacattcttgagcatgaatttcttcaccgtcgagcctgagactaggaatcagttgccaactccatccacccgggctagttttgatgatttcacatcttcactgccacgcgcaaacatcgtagaggacggaatggtcttcggcgaggataatgaatctctggagctgtcaggtaattcaggcgacattgacgctaatcgtagatctcgtctcgagccgtggtcaatgtcaaaggcagtctatgatagaatcctgtctgatatccaggaatatgttcccacacccccagcaggcttcaaacctccaacctgtaactatctatgctgcggaatggaggtctactttagatgtgctcagaaatatctgccattcatacatatccctaccttcgctgccgagaaacatggaagtgagcttctgctagcgattgcgtctatcggccagctatataggtatgagaagtccaagtcttatggactatatttcattgcggaggctatcctactagaaaaaaagcggcgcgaacagctgcgattggcatccaatatcttatcggaagtagaggatgctgcacctgatgacatggcaaggctagagaggatccgaacgctcaatttcacaatagttcttctcatgatgttcgcatcatgggctgatcaaaaggttagactcagcgccgtttcaatgggaagtgaactagcgatgttagccagagctcacggaatataccgtccagaaagtgagacacgagaggaggattggcttgcttggatcgcttccgagcagagacggagaactctgctggctgcgtatataatgttgaacttacaaagctttgtcttcgacgtcccacctctcattcttaatgctgaggttggtctgcttttacccgactctgctgaagtgcatagtggctggcagtggccgatggccatcgcaaacctctttctgaaccgcccgtcggtcaatcgatggctagactag

SEQ ID NO: 35251 - protein, 424 aa, Muscodor strobelii
  misc_feature: SGI Peptide ID NO. 572199
  misc_feature (170)..(412): NCBI GI: 145231202 Blast Desc: An01g14770 [Aspergillus niger] gi|134055995|emb|CAK44174.1| protein product [Aspergillus niger]
  misc_feature (156)..(394): NCBI GI: 255956771 Blast Desc: Pc21g21660 [Penicillium chrysogenum Wisconsin 54-1255] gi|211590849|emb|CAP97063.1| Pc21g21660 [Penicillium chrysogenum Wisconsin 54-1255]
  misc_feature (170)..(400): NCBI GI: 256724069 Blast Desc: NECHADRAFT_51514 [Nectria haematococca mpVI 77-13-4]
  misc_feature (13)..(397): NCBI GI: 255941398 Blast Desc: Pc16g11660 [Penicillium chrysogenum Wisconsin 54-1255] gi|211586091|emb|CAP93836.1| Pc16g11660 [Penicillium chrysogenum Wisconsin 54-1255]
  misc_feature (170)..(397): NCBI GI: 256723991 Blast Desc: NECHADRAFT_12626 [Nectria haematococca mpVI 77-13-4]
  misc_feature (124)..(399): NCBI GI: 70998540 Blast Desc: C2H2 transcription factor (AmdA) [Aspergillus fumigatus Af293] gi|66851628|gb|EAL91954.1| C2H2 transcription factor (AmdA), [Aspergillus fumigatus Af293]
  misc_feature (124)..(399): NCBI GI: 159126273 Blast Desc: C2H2 transcription factor (AmdA), [Aspergillus fumigatus A1163]
  misc_feature (124)..(399): NCBI GI: 119498479 Blast Desc: C2H2 transcription factor (AmdA), [Neosartorya fischeri NRRL 181] gi|119414161|gb|EAW24100.1| C2H2 transcription factor (AmdA), [Neosartorya fischeri NRRL 181]
  misc_feature (171)..(399): NCBI GI: 121712732 Blast Desc: C2H2 transcription factor (AmdA), [Aspergillus clavatus NRRL 1] gi|119402130|gb|EAW12551.1| C2H2 transcription factor (AmdA), [Aspergillus clavatus NRRL 1]
  misc_feature (124)..(405): NCBI GI: 67523629 Blast Desc: AN2270.2 [Aspergillus nidulans FGSC A4] gi|454103|gb|AAA97487.1| regulatory protein [Emericella nidulans] gi|40744687|gb|EAA63843.1| AN2270.2 [Aspergillus nidulans FGSC ;
MPPGRRKVDVAPCPFCSKTFKRQEHKLRHERTHTHEKPYACDCGQHFARQDLLRRHARLSHKQSQASEPAVSPRSTLDASETDLIWAPELNFSDIMPETFLSMNFFTVEPETRNQLPTPSTRASFDDFTSSLPRANIVEDGMVFGEDNESLELSGNSGDIDANRRSRLEPWSMSKAVYDRILSDIQEYVPTPPAGFKPPTCNYLCCGMEVYFRCAQKYLPFIHIPTFAAEKHGSELLLAIASIGQLYRYEKSKSYGLYFIAEAILLEKKRREQLRLASNILSEVEDAAPDDMARLERIRTLNFTIVLLMMFASWADQKVRLSAVSMGSELAMLARAHGIYRPESETREEDWLAWIASEQRRRTLLAAYIMLNLQSFVFDVPPLILNAEVGLLLPDSAEVHSGWQWPMAIANLFLNRPSVNRWLD

SEQ ID NO: 35252 - DNA, 4856 bp, Muscodor strobelii; identical to SEQ ID NO: 35249
  misc_feature: SGI EST ID NO. CUFF.83982.3
  misc_feature: Variant of the nucleotide sequence at SEQ ID NO 35250

SEQ ID NO: 35253 - DNA, 1017 bp, Muscodor strobelii
  misc_feature: SGI cDNA ID NO. 572200
  misc_feature: Encodes the peptide sequence at SEQ ID NO 35254
atgcaagatgacgagactctgtcaattcctgccaaagggcaggtttccccctgcgacccaagactagaagcgccagatgaacgtgatttagagatccaaccaccggatcacttcacaaagtccattgcggacgcaccacagccaaattcgcttcggtcatcgccgctgatgccggttcttgataacaatcgtgcccatctcatgcacaagggtcaaaaagacgacacaggcccgagagacggccaagctaccagaaaccctgcatttatgccaatgtctcgccacggtcagttaatgtgcgaaaaggcagaaattattggcaaaagtaccgtcgtcacggccgacatcattggtattatcgatgggcggtttttcctctcggaggaagactggacgtgctatcgccgagactccttttcctgcacttgtgcatatacacttgagcgtcacatacccaacgcgccattatactacatccctctcgacgcgggcatccccatcaaagttcttcgacttgctgtgagcatctcggcggtcaaggatgagaacgacacacagattattgacttgattcagcgtacggacttgacagataatgcatcccctgcaaactcaaagaaacaaatactgctgcccagcctttctcagaggatatcttcctcgcgattccaaagctctgcgatagactcgaaatccacggaacataccttcgagaagattcaattcaagcaggcgtcgagacacagtcacatgccgaaggcggctcgcaagtactaccgcttagtcattggtctccatgcttatgtcggggatacattggacaccaatgaagggtatgtcaatatagctgagcggcgatcggaaaagattgtcgttcgcctccgtcgcggaggctgcacataccaagttgatatcgacccaagccgcctactcaataccccattgtttgagcctccacctatcaggtatgacgatgcaaatgcgtctacagagcagagcgagaggtcgactctgtaa

SEQ ID NO: 35254 - protein, 338 aa, Muscodor strobelii
  misc_feature: SGI Peptide ID NO. 572200
  misc_feature (130)..(313): Pfam Id: PF05224 Pfam Desc: NDT80 / PhoG like DNA-binding family
  misc_feature (130)..(293): Pfam Id: PF05224 Pfam Desc: NDT80 / PhoG like DNA-binding family
  misc_feature (107)..(304): NCBI GI: 256726924 Blast Desc: NECHADRAFT_33281 [Nectria haematococca mpVI 77-13-4]
  misc_feature (33)..(304): NCBI GI: 46136387 Blast Desc: FG09709.1 [Gibberella zeae PH-1]
  misc_feature (108)..(298): NCBI GI: 164429275 Blast Desc: NCU09915 [Neurospora crassa OR74A] gi|16945421|emb|CAB91351.2| related to meiosis-specific protein NDT80 [Neurospora crassa] gi|157073009|gb|EAA28965.2| [Neurospora
  misc_feature (55)..(298): NCBI GI: 171683339 Blast Desc: protein product [Podospora anserina] gi|170941629|emb|CAP67283.1| protein product [Podospora anserina]
  misc_feature (96)..(298): NCBI GI: 261352443 Blast Desc: conserved [Verticillium albo-atrum VaMs.102]
  misc_feature (108)..(298): NCBI GI: 145613626 Blast Desc: MGG_01475 [Magnaporthe grisea 70-15] gi|145020683|gb|EDK04812.1| MGG_01475 [Magnaporthe grisea 70-15]
  misc_feature (16)..(298): NCBI GI: 116194632 Blast Desc: CHGG_03914 [Chaetomium globosum CBS 148.51] gi|88179827|gb|EAQ87295.1| CHGG_03914 [Chaetomium globosum CBS 148.51]
  misc_feature (96)..(298): NCBI GI: 145252628 Blast Desc: An16g05190 [Aspergillus niger] gi|134083380|emb|CAK97373.1| protein product [Aspergillus niger]
  misc_feature (87)..(295): NCBI GI: 189210277 Blast Desc: conserved [Pyrenophora tritici-repentis Pt-1C-BFP] gi|187977563|gb|EDU44189.1| conserved [Pyrenophora tritici-repentis Pt-1C-BFP]
  misc_feature (111)..(298): NCBI GI: 261192146 Blast Desc: conserved [Ajellomyces dermatitidis SLH14081] gi|239589355|gb|EEQ71998.1| conserved [Ajellomyces dermatitidis SLH14081] gi|239615075|gb|EEQ92062.1| conserved [Ajellomyces
MQDDETLSIPAKGQVSPCDPRLEAPDERDLEIQPPDHFTKSIADAPQPNSLRSSPLMPVLDNNRAHLMHKGQKDDTGPRDGQATRNPAFMPMSRHGQLMCEKAEIIGKSTVVTADIIGIIDGRFFLSEEDWTCYRRDSFSCTCAYTLERHIPNAPLYYIPLDAGIPIKVLRLAVSISAVKDENDTQIIDLIQRTDLTDNASPANSKKQILLPSLSQRISSSRFQSSAIDSKSTEHTFEKIQFKQASRHSHMPKAARKYYRLVIGLHAYVGDTLDTNEGYVNIAERRSEKIVVRLRRGGCTYQVDIDPSRLLNTPLFEPPPIRYDDANASTEQSERSTL

SEQ ID NO: 35255 - DNA, 689 bp, Muscodor strobelii
  misc_feature: SGI EST ID NO. CUFF.83903.0
  misc_feature: Variant of the nucleotide sequence at SEQ ID NO 35253
gccaatgtctcgccacggtcagttaatgtgcgaaaaggcagaaattattggcaaaagtaccgtcgtcacggccgacatcattggtattatcgatgggcggtttttcctctcggaggaagactggacgtgctatcgccgagactccttttcctgcacttgtgcatatacacttgagcgtcacatacccaacgcgccattatactacatccctctcgacgcgggcatccccatcaaagttcttcgacttgctgtgagcatctcggcggtcaaggatgagaacgacacacagattattgacttgattcagcgtacggacttgacagataatgcatcccctgcaaactcaaagaaacaaatactgctgcccagcctttctcagaggatatcttcctcgcgattccaaagctctgcgatagactcgaaatccacggaacataccttcgagaagattcaattcaagcaggcgtcgagacacagtcacatgccgaaggcggctcgcaagtactaccgcttagtcattggtctccatgcttatgtcggggatacattggacaccaatgaagggtatgtcaatatagctgagcggcgatcggaaaagattgtcgttcgcctccgtcgcggaggctgcacataccaagttgatatcgacccaagccgcctactcaataccccattgtttgagcctccac

SEQ ID NO: 35256 - DNA, 1122 bp, Muscodor strobelii
  misc_feature: SGI cDNA ID NO. 572201
  misc_feature: Encodes the peptide sequence at SEQ ID NO 35257
atggccgatttgtctatcgacatattcaaccaccaagtagccatcggtcttggtaatgtgttatggtcctggcaatgcgacgaccgcgacgacagcgagatttacaaatcgcaagttgctaaagcgaaacgatatctccaattctatgaagcattggtactcgattaccatgatgagttcacgggagaaactcaacttttcgcaactcatggtgatatcttcaaggctatctcactgctgcagacgaacacagggttgactcgagcagagttttctgatctcatatcgccagtcaaatcgtcagcaattactcaaagtgacctgatgcatgcaactaatctcattgtcaagatcattgcgatgattgattgttccaatctgcacgatcgcgctgagcgacttgaagaaggtaccttgagaatttcctggcggaatgcggtcccatacgagaagtacgttcaagacctattcccagtacaagatcatccgatatggtctagcaagaacagtcaaaatggacctctacttgccaggaagtctcatttgaaggccacaaagctaaagaaacatctcggtttgacttttcgaccgacgcacgatatccacaatcacctgcgccttgatcttcgacgcaacgagttacagatattccattacgcttcattcctgaaagaaaatctcagagcaacgaggactcccgttcaccatagatgtaccctaccgaggcaactccaactagagatacttgattctactcagttaattctcttccctctgcacgacgcgaagtgtcggagattactgaaaacgctagtttccaaaagcgactatgcgttcgaccccgaaatcgagaggttcgagttcaactcgatctgtgacccatgcgaacggaacatctcatatgttttctttgccgatcgactggaggaattataccaagagttgcaaaaccctcagccaacttggctggacaagcaattggaacgtcgaagcggagccagacacatgatgctagtaaccttcgtgggtgttatttttgcggttcttcttggtgttttttccttgatcttgagttccgtccagacctggattgcttatcaggcctggaaatacccagcctag

SEQ ID NO: 35257 - protein, 373 aa, Muscodor strobelii
  misc_feature: SGI Peptide ID NO. 572201
  misc_feature (1)..(232): NCBI GI: 171678555 Blast Desc: protein product [Podospora anserina] gi|170937347|emb|CAP62005.1| protein product [Podospora anserina]
  misc_feature (17)..(231): NCBI GI: 119474243 Blast Desc: NFIA_004580 [Neosartorya fischeri NRRL 181] gi|119407150|gb|EAW17100.1| conserved [Neosartorya fischeri NRRL 181]
  misc_feature (114)..(291): NCBI GI: 46109592 Blast Desc: FG01678.1 [Gibberella zeae PH-1]
  misc_feature (10)..(355): NCBI GI: 116208408 Blast Desc: CHGG_03497 [Chaetomium globosum CBS 148.51] gi|88184094|gb|EAQ91562.1| CHGG_03497 [Chaetomium globosum CBS 148.51]
  misc_feature (62)..(262): NCBI GI: 154313215 Blast Desc: BC1G_05609 [Botryotinia fuckeliana B05.10] gi|150849694|gb|EDN24887.1| BC1G_05609 [Botryotinia fuckeliana B05.10]
  misc_feature (45)..(369): NCBI GI: 171682608 Blast Desc: protein product [Podospora anserina] gi|170941263|emb|CAP66913.1| protein product [Podospora anserina]
  misc_feature (69)..(370): NCBI GI: 171682624 Blast Desc: protein product [Podospora anserina] gi|170941271|emb|CAP66921.1| protein product [Podospora anserina]
  misc_feature (63)..(370): NCBI GI: 256725458 Blast Desc: NECHADRAFT_83107 [Nectria haematococca mpVI 77-13-4]
  misc_feature (182)..(334): NCBI GI: 169612093 Blast Desc: SNOG_09163 [Phaeosphaeria nodorum SN15] gi|111062235|gb|EAT83355.1| SNOG_09163 [Phaeosphaeria nodorum SN15]
  misc_feature (20)..(231): NCBI GI: 46138075 Blast Desc: FG10552.1 [Gibberella zeae PH-1]
MADLSIDIFNHQVAIGLGNVLWSWQCDDRDDSEIYKSQVAKAKRYLQFYEALVLDYHDEFTGETQLFATHGDIFKAISLLQTNTGLTRAEFSDLISPVKSSAITQSDLMHATNLIVKIIAMIDCSNLHDRAERLEEGTLRISWRNAVPYEKYVQDLFPVQDHPIWSSKNSQNGPLLARKSHLKATKLKKHLGLTFRPTHDIHNHLRLDLRRNELQIFHYASFLKENLRATRTPVHHRCTLPRQLQLEILDSTQLILFPLHDAKCRRLLKTLVSKSDYAFDPEIERFEFNSICDPCERNISYVFFADRLEELYQELQNPQPTWLDKQLERRSGARHMMLVTFVGVIFAVLLGVFSLILSSVQTWIAYQAWKYPA

SEQ ID NO: 35258 - DNA, 1330 bp, Muscodor strobelii
  misc_feature: SGI EST ID NO. CUFF.83912.0
  misc_feature: Variant of the nucleotide sequence at SEQ ID NO 35256
ctacgacatatctgttattaaggtaactaactcatggccgatttgtctatcgacatattcaaccaccaagtagccatcggtcttggtaatgtgttatggtcctggcaatgcgacgaccgcgacgacagcgagatttacaaatcgcaagttgctaaagcgaaacgatatctccaattctatgaagcattggtactcgattaccatgatgagttcacgggagaaactcaacttttcgcaactcatggtgatatcttcaaggctatctcactgctgcagacgaacacagggttgactcgagcagagttttctgatctcatatcgccagtcaaatcgtcagcaattactcaaagtgacctgatgcatgcaactaatctcattgtcaagatcattgcgatgattgattgttccaatctgcacgatcgcgctgagcgacttgaagaaggtaccttgagaatttcctggcggaatgcggtcccatacgagaagtacgttcaagacctattcccagtacaagatcatccgatatggtctagcaagaacagtcaaaatggacctctacttgccaggaagtctcatttgaaggccacaaagctaaagaaacatctcggtttgacttttcgaccgacgcacgatatccacaatcacctgcgccttgatcttcgacgcaacgagttacagatattccattacgcttcattcctgaaagaaaatctcagagcaacgaggactcccgttcaccaatgtaccctaccgaggcaactccaactagagatacttgattctactcagttaattctcttccctctgcacgacgcgaagtgtcggagattactgaaaacgctagtttccaaaagcgactatgcgttcgaccccgaaatcgagaggttcgagttcaactcgatctgtgacccatgcgaacggaacatctcatatgttttctttgccgatcgactggaggaattataccaagagttgcaaaaccctcagccaacttggctggacaagcaattggaacgtcgaagcggagccagacacatgatgctagtaaccttcgtgggtgttatttttgcggttcttcttggtgttttttccttgatcttgagttccgtccagacctggattgcttatcaggcctggaaatacccagcctagcagttcaataagtaaaagataggcgccggaaagaaatatcacgggtagtcatcaaggccacactgtttacatattcagtctagtataatcatgttaggtaaccagaaatagcttaaggacaacgtatttcgcgccagaacaatgaaactccgtcctcggcgatcaagaggccttcgcg

SEQ ID NO: 35259 - DNA, 1014 bp, Muscodor strobelii
  misc_feature: SGI cDNA ID NO. 572202
  misc_feature: Elevated expression when VOC is produced
  misc_feature: Encodes the peptide sequence at SEQ ID NO 35260
atggccgatttgtctatcgacatattcaaccaccaagtagccatcggtcttggtaatgtgttatggtcctggcaatgcgacgaccgcgacgacagcgagatttacaaatcgcaagttgctaaagcgaaacgatatctccaattctatgaagcattggtactcgattaccatgatgagttcacgggagaaactcaacttttcgcaactcatggtgatatcttcaaggctatctcactgctgcagacgaacacagggttgactcgagcagagttttctgatctcatatcgccagtcaaatcgtcagcaattactcaaagtgacctgatgcatgcaactaatctcattgtcaagatcattgcgatgattgattgttccaatctgcacgatcgcgctgagcgacttgaagaaggtaccttgagaatttcctggcggaatgcggtcccatacgagaagtacgttcaagacctattcccagtacaagatcatccgatatggtctagcaagaacagtcaaaatggacctctacttgccaggaagtctcatttgaaggccacaaagctaaagaaacatctcggtttgacttttcgaccgacgcacgatatccacaatcacctgcgccttgatcttcgacgcaacgagttacagatattccattacgcttcattcctgaaagaaaatctcagagcaacgaggactcccgttcaccatagatgtaccctaccgaggcaactccaactagagatacttgattctactcagttaattctcttccctctgcacgacgcgaagtgtcggagattactgaaaacgctagtttccaaaagcgactatgcgttcgaccccgaaatcgagaggttcgagttcaactcgatctgtgacccatgcgaacggaacatctcatatgttttctttgccgatcgactggaggaattataccaagagttgcaaaaccctcagccaacttggctggacaagcaattggaacgtcgaagcggagccagacacagtgcgtag

SEQ ID NO: 35260 - protein, 337 aa, Muscodor strobelii
  misc_feature: SGI Peptide ID NO. 572202
  misc_feature (1)..(232): NCBI GI: 171678555 Blast Desc: protein product [Podospora anserina] gi|170937347|emb|CAP62005.1| protein product [Podospora anserina]
  misc_feature (17)..(231): NCBI GI: 119474243 Blast Desc: NFIA_004580 [Neosartorya fischeri NRRL 181] gi|119407150|gb|EAW17100.1| conserved [Neosartorya fischeri NRRL 181]
  misc_feature (114)..(291): NCBI GI: 46109592 Blast Desc: FG01678.1 [Gibberella zeae PH-1]
  misc_feature (62)..(262): NCBI GI: 154313215 Blast Desc: BC1G_05609 [Botryotinia fuckeliana B05.10] gi|150849694|gb|EDN24887.1| BC1G_05609 [Botryotinia fuckeliana B05.10]
  misc_feature (10)..(335): NCBI GI: 116208408 Blast Desc: CHGG_03497 [Chaetomium globosum CBS 148.51] gi|88184094|gb|EAQ91562.1| CHGG_03497 [Chaetomium globosum CBS 148.51]
  misc_feature (63)..(332): NCBI GI: 256725458 Blast Desc: NECHADRAFT_83107 [Nectria haematococca mpVI 77-13-4]
  misc_feature (45)..(335): NCBI GI: 171682608 Blast Desc: protein product [Podospora anserina] gi|170941263|emb|CAP66913.1| protein product [Podospora anserina]
  misc_feature (182)..(336): NCBI GI: 169612093 Blast Desc: SNOG_09163 [Phaeosphaeria nodorum SN15] gi|111062235|gb|EAT83355.1| SNOG_09163 [Phaeosphaeria nodorum SN15]
  misc_feature (20)..(231): NCBI GI: 46138075 Blast Desc: FG10552.1 [Gibberella zeae PH-1]
  misc_feature (44)..(228): NCBI GI: 154315471 Blast Desc: BC1G_04308 [Botryotinia fuckeliana B05.10] gi|150847248|gb|EDN22441.1| BC1G_04308 [Botryotinia fuckeliana B05.10]
  misc_feature: Useful for introducing or modulating the production of volatile compounds
MADLSIDIFNHQVAIGLGNVLWSWQCDDRDDSEIYKSQVAKAKRYLQFYEALVLDYHDEFTGETQLFATHGDIFKAISLLQTNTGLTRAEFSDLISPVKSSAITQSDLMHATNLIVKIIAMIDCSNLHDRAERLEEGTLRISWRNAVPYEKYVQDLFPVQDHPIWSSKNSQNGPLLARKSHLKATKLKKHLGLTFRPTHDIHNHLRLDLRRNELQIFHYASFLKENLRATRTPVHHRCTLPRQLQLEILDSTQLILFPLHDAKCRRLLKTLVSKSDYAFDPEIERFEFNSICDPCERNISYVFFADRLEELYQELQNPQPTWLDKQLERRSGARHSA

SEQ ID NO: 35261 - DNA, 1330 bp, Muscodor strobelii; identical to SEQ ID NO: 35258
  misc_feature: SGI EST ID NO. CUFF.83912.0
  misc_feature: Variant of the nucleotide sequence at SEQ ID NO 35259

SEQ ID NO: 35262 - DNA, 1011 bp, Muscodor strobelii
  misc_feature: SGI cDNA ID NO. 572203
  misc_feature: Encodes the peptide sequence at SEQ ID NO 35263
atggccgatttgtctatcgacatattcaaccaccaagtagccatcggtcttggtaatgtgttatggtcctggcaatgcgacgaccgcgacgacagcgagatttacaaatcgcaagttgctaaagcgaaacgatatctccaattctatgaagcattggtactcgattaccatgatgagttcacgggagaaactcaacttttcgcaactcatggtgatatcttcaaggctatctcactgctgcagacgaacacagggttgactcgagcagagttttctgatctcatatcgccagtcaaatcgtcagcaattactcaaagtgacctgatgcatgcaactaatctcattgtcaagatcattgcgatgattgattgttccaatctgcacgatcgcgctgagcgacttgaagaaggtaccttgagaatttcctggcggaatgcggtcccatacgagaagtacgttcaagacctattcccagtacaagatcatccgatatggtctagcaagaacagtcaaaatggacctctacttgccaggaagtctcatttgaaggccacaaagctaaagaaacatctcggtttgacttttcgaccgacgcacgatatccacaatcacctgcgccttgatcttcgacgcaacgagttacagatattccattacgcttcattcctgaaagaaaatctcagagcaacgaggactcccgttcaccaatgtaccctaccgaggcaactccaactagagatacttgattctactcagttaattctcttccctctgcacgacgcgaagtgtcggagattactgaaaacgctagtttccaaaagcgactatgcgttcgaccccgaaatcgagaggttcgagttcaactcgatctgtgacccatgcgaacggaacatctcatatgttttctttgccgatcgactggaggaattataccaagagttgcaaaaccctcagccaacttggctggacaagcaattggaacgtcgaagcggagccagacacagtgcgtag

SEQ ID NO: 35263 - protein, 336 aa, Muscodor strobelii
  misc_feature: SGI Peptide ID NO. 572203
  misc_feature (1)..(232): NCBI GI: 171678555 Blast Desc: protein product [Podospora anserina] gi|170937347|emb|CAP62005.1| protein product [Podospora anserina]
  misc_feature (17)..(231): NCBI GI: 119474243 Blast Desc: NFIA_004580 [Neosartorya fischeri NRRL 181] gi|119407150|gb|EAW17100.1| conserved [Neosartorya fischeri NRRL 181]
  misc_feature (114)..(290): NCBI GI: 46109592 Blast Desc: FG01678.1 [Gibberella zeae PH-1]
  misc_feature (10)..(334): NCBI GI: 116208408 Blast Desc: CHGG_03497 [Chaetomium globosum CBS 148.51] gi|88184094|gb|EAQ91562.1| CHGG_03497 [Chaetomium globosum CBS 148.51]
  misc_feature (62)..(261): NCBI GI: 154313215 Blast Desc: BC1G_05609 [Botryotinia fuckeliana B05.10] gi|150849694|gb|EDN24887.1| BC1G_05609 [Botryotinia fuckeliana B05.10]
  misc_feature (63)..(331): NCBI GI: 256725458 Blast Desc: NECHADRAFT_83107 [Nectria haematococca mpVI 77-13-4]
  misc_feature (182)..(335): NCBI GI: 169612093 Blast Desc: SNOG_09163 [Phaeosphaeria nodorum SN15] gi|111062235|gb|EAT83355.1| SNOG_09163 [Phaeosphaeria nodorum SN15]
  misc_feature (45)..(334): NCBI GI: 171682608 Blast Desc: protein product [Podospora anserina] gi|170941263|emb|CAP66913.1| protein product [Podospora anserina]
  misc_feature (20)..(231): NCBI GI: 46138075 Blast Desc: FG10552.1 [Gibberella zeae PH-1]
  misc_feature (44)..(245): NCBI GI: 154315471 Blast Desc: BC1G_04308 [Botryotinia fuckeliana B05.10] gi|150847248|gb|EDN22441.1| BC1G_04308 [Botryotinia fuckeliana B05.10]
MADLSIDIFNHQVAIGLGNVLWSWQCDDRDDSEIYKSQVAKAKRYLQFYEALVLDYHDEFTGETQLFATHGDIFKAISLLQTNTGLTRAEFSDLISPVKSSAITQSDLMHATNLIVKIIAMIDCSNLHDRAERLEEGTLRISWRNAVPYEKYVQDLFPVQDHPIWSSKNSQNGPLLARKSHLKATKLKKHLGLTFRPTHDIHNHLRLDLRRNELQIFHYASFLKENLRATRTPVHQCTLPRQLQLEILDSTQLILFPLHDAKCRRLLKTLVSKSDYAFDPEIERFEFNSICDPCERNISYVFFADRLEELYQELQNPQPTWLDKQLERRSGARHSA

SEQ ID NO: 35264 - DNA, 1330 bp, Muscodor strobelii; identical to SEQ ID NO: 35258
  misc_feature: SGI EST ID NO. CUFF.83912.0
  misc_feature: Variant of the nucleotide sequence at SEQ ID NO 35262

SEQ ID NO: 35265 - DNA, 1263 bp, Muscodor strobelii
  misc_feature: SGI cDNA ID NO. 572204
  misc_feature: Encodes the peptide sequence at SEQ ID NO 35266
atgatcgagagagtcaatcacgcggggcgtagagaaagaaaagacttcgaggaaccacgtaataaagacattttcacagctcatacggatcgatcggcgtcctctcagactgaaatagaagaggcacaaaatgttacttggcggcaaatacgaccatcatacgagaatgacgggatcactgacaaagcgagaaagttagcagaggacttgaatgatcctgagatcaacgaggcaataagatctcctgagccacggcgtgacctccgccgcattattgttgaccccatcaaatccttgatttttatcatcattctcgcctgggctaacattgttctcttcacggcgggcgccatcctcgctagattccggatcagcggaaatatgaatcgccacactaccaaaaggatagaagaggaagtacccgcgccaaagaccaaagaagagttcacaaaaggcatcgacgacttcgtgaagaagcacaagctgcacaaattctttccagaaagcgatagtcctttcttgaatgccattgtggagaaggctctcaaggtacaaaatgacacaaactcgacgttgaataaagtggcaaatacggaagaccttataaagcttgcattgtaccaacctgtcatttactgcgacgacagtggatcaatgcgacttaagaaagatagccaagaaaaccgttgggcggcccagcaagaccttgtccgacgaatcgcagccatttgtacacgcgtggtgcctgataatcttgggattcatctgagattcattaatagcagtcttctgagtgtcgataacctgagagagaccgatattgggaaagtcatctccagcacggagccgggaggctacacagagatcggaactcacctacgcaagcgaatcctagagcctctagtctataatcagaaaatgaagagaccactgtttatctctatcatcattgatggaatcccgggtggtcctagaggatcgctggaaactcgagacacacttaaagatgagatcgccgaatgccagatgtaccttttaaaccacgggcttccttcacgcgttttccaaataagtcaaattggcagtgatacggatgcgaaagatttcttgaagatattgaagaattcagatctgaacaatgtctacgtcactgctgagcgactagattcgatgtttgacaagttgaagccaaatgataaaggcttggaggcatggctatttcaaacactaatcgaacctattctgggtttggactctgattag

SEQ ID NO: 35266 - protein, 420 aa, Muscodor strobelii
  misc_feature: SGI Peptide ID NO. 572204
  misc_feature (145)..(420): NCBI GI: 239608059 Blast Desc: ankyrin repeat protein [Ajellomyces dermatitidis ER-3]
  misc_feature (145)..(420): NCBI GI: 261200124 Blast Desc: ankyrin repeat protein [Ajellomyces dermatitidis SLH14081] gi|239594671|gb|EEQ77252.1| ankyrin repeat protein [Ajellomyces dermatitidis SLH14081]
  misc_feature (112)..(415): NCBI GI: 242216096 Blast Desc: [Postia placenta Mad-698-R] gi|220727037|gb|EED80969.1| [Postia placenta Mad-698-R]
  misc_feature (63)..(406): NCBI GI: 146324866 Blast Desc: ankyrin repeat protein [Aspergillus fumigatus Af293] gi|129556620|gb|EAL86852.2| ankyrin repeat protein [Aspergillus fumigatus Af293]
  misc_feature (63)..(406): NCBI GI: 159123340 Blast Desc: ankyrin repeat protein [Aspergillus fumigatus A1163]
  misc_feature (61)..(411): NCBI GI: 46112169 Blast Desc: FG02877.1 [Gibberella zeae PH-1]
  misc_feature (61)..(375): NCBI GI: 256725367 Blast Desc: NECHADRAFT_45674 [Nectria haematococca mpVI 77-13-4]
  misc_feature (147)..(392): NCBI GI: 154277796 Blast Desc: [Ajellomyces capsulatus NAm1] gi|150413316|gb|EDN08699.1| [Ajellomyces capsulatus NAm1]
  misc_feature (125)..(420): NCBI GI: 261187420 Blast Desc: ankyrin repeat protein [Ajellomyces dermatitidis SLH14081] gi|239594685|gb|EEQ77266.1| ankyrin repeat protein [Ajellomyces dermatitidis SLH14081]
  misc_feature (147)..(420): NCBI GI: 240280508 Blast Desc: ankyrin repeat protein [Ajellomyces capsulatus H143]
MIERVNHAGRRERKDFEEPRNKDIFTAHTDRSASSQTEIEEAQNVTWRQIRPSYENDGITDKARKLAEDLNDPEINEAIRSPEPRRDLRRIIVDPIKSLIFIIILAWANIVLFTAGAILARFRISGNMNRHTTKRIEEEVPAPKTKEEFTKGIDDFVKKHKLHKFFPESDSPFLNAIVEKALKVQNDTNSTLNKVANTEDLIKLALYQPVIYCDDSGSMRLKKDSQENRWAAQQDLVRRIAAICTRVVPDNLGIHLRFINSSLLSVDNLRETDIGKVISSTEPGGYTEIGTHLRKRILEPLVYNQKMKRPLFISIIIDGIPGGPRGSLETRDTLKDEIAECQMYLLNHGLPSRVFQISQIGSDTDAKDFLKILKNSDLNNVYVTAERLDSMFDKLKPNDKGLEAWLFQTLIEPILGLDSD

SEQ ID NO: 35267 - DNA, 524 bp, Muscodor strobelii
  misc_feature: SGI EST ID NO. CUFF.83921.0
  misc_feature: Variant of the nucleotide sequence at SEQ ID NO 35265
gaaggctctcaaggtacaaaatgacacaaactcgacgttgaataaagtggcaaatacggaagaccttataaagcttgcattgtaccaacctgtcatttactgcgacgacagtggatcaatgcgacttaagaaagatagccaagaaaaccgttgggcggcccagcaagaccttgtccgacgaatcgcagccatttgtacacgcgtggtgcctgataatcttgggattcatctgagattcattaatagcagtcttctgagtgtcgataacctgagagagaccgatattgggaaagtcatctccagcacggagccgggaggctacacagagatcggaactcacctacgcaagcgaatcctagagcctctagtctataatcagaaaatgaagagaccactgtttatctctatcatcattgatggaatcccgggtggtcctagaggatcgctggaaactcgagacacacttaaagatgagatcgccgaatgccagatgtaccttttaaaccacgggcttccttcacgcg

SEQ ID NO: 35268 - DNA, 468 bp, Muscodor strobelii
  misc_feature: SGI cDNA ID NO. 572205
  misc_feature: Elevated expression when VOC is produced
  misc_feature: Encodes the peptide sequence at SEQ ID NO 35269
atgaagttctctaccatcctcacatctctcgccttcgctgcccttgggcaagcagaattatcagaacgatctggaacgaagttgacacaagcagaggcttcatctcgtctctccgctgctggtatcgccgtgacatcaagcggtggctgcacagacaagaacactccgacttgcacatctctgtctggagtctactctggcacagttcagggagcaatcactcttaagggcgcttgtggatgctcgcttacgattacgggaggaacagaggtgggacatgcctcaggaacttacagtcacgcgaacggatacaaattcgatttcgcaaagaactcggctttgaactcatacgtcaccaactcgttcaccaaaattgccaaccgaggcgatggatatcctcagtggcaggccgcatctggcaacatttactgtgatgagggaagtcactgggatgtgacgtattactaa

SEQ ID NO: 35269 - protein, 155 aa, Muscodor strobelii
  misc_feature: SGI Peptide ID NO. 572205
  misc_feature (1)..(154): NCBI GI: 238583265 Blast Desc: MPER_10579 [Moniliophthora perniciosa FA553] gi|215453311|gb|EEB91117.1| MPER_10579 [Moniliophthora perniciosa FA553]
  misc_feature (1)..(155): NCBI GI: 169863005 Blast Desc: CC1G_05607 [Coprinopsis cinerea okayama7#130] gi|116500808|gb|EAU83703.1| CC1G_05607 [Coprinopsis cinerea okayama7#130]
  misc_feature (2)..(154): NCBI GI: 163840614 Blast Desc: RSal33209_1872 [Renibacterium salmoninarum ATCC 33209] gi|162954090|gb|ABY23605.1| RSal33209_1872 [Renibacterium salmoninarum ATCC 33209]
  misc_feature (27)..(154): NCBI GI: 256679609 Blast Desc: SSPB78_25049 [Streptomyces sp. SPB78]
  misc_feature (1)..(147): NCBI GI: 238578157 Blast Desc: MPER_12334 [Moniliophthora perniciosa FA553] gi|215450070|gb|EEB89552.1| MPER_12334 [Moniliophthora perniciosa FA553]
  misc_feature (2)..(155): NCBI GI: 239991016 Blast Desc: SrosN1_27174 [Streptomyces roseosporus NRRL 11379]
  misc_feature (26)..(155): NCBI GI: 261355524 Blast Desc: conserved [Verticillium albo-atrum VaMs.102]
  misc_feature (2)..(155): NCBI GI: 29829247 Blast Desc: SAV_2705 [Streptomyces avermitilis MA-4680] gi|29606354|dbj|BAC70416.1| [Streptomyces avermitilis MA-4680]
  misc_feature (1)..(155): NCBI GI: 256818480 Blast Desc: SgriT_35789 [Streptomyces griseoflavus Tu4000]
  misc_feature (5)..(155): NCBI GI: 117164667 Blast Desc: conserved [Streptomyces ambofaciens ATCC 23877]
  misc_feature: Useful for introducing or modulating the production of volatile compounds
MKFSTILTSLAFAALGQAELSERSGTKLTQAEASSRLSAAGIAVTSSGGCTDKNTPTCTSLSGVYSGTVQGAITLKGACGCSLTITGGTEVGHASGTYSHANGYKFDFAKNSALNSYVTNSFTKIANRGDGYPQWQAASGNIYCDEGSHWDVTYY

SEQ ID NO: 35270 - DNA, 1143 bp, Muscodor strobelii
  misc_feature: SGI EST ID NO. CUFF.83931.0
  misc_feature: Variant of the nucleotide sequence at SEQ ID NO 35268
ccgaattcaactcatacgattatttttaatacattcattgtataattagtttgaatagtcattcttttcattacttattcagaatgaagttctctaccatcctcacatctctcgccttcgctgcccttgggcaagcagaattatcagaacgatctggaacgaagttgacacaagcagaggcttcatctcgtctctccgctgctggtatcgccgtgacatcaagcggtggctgcacagacaagaacactccgacttgcacatctctgtctggagtctactctggcacagttcagggagcaatcactcttaagggcgcttgtggatgctcgcttacgattacgggaggaacagaggtgggacatgcctcaggaacttacagtcacgcgaacggatacaaattcgatttcgcaaagaactcggctttgaactcatacgtcaccaactcgttcaccaaaattgccaaccgaggcgatggatatcctcagtggcaggccgcatctggcaacatttactgtgatgagggaagtcactgggatgtgacgtattactaaatgttgaatgaggttgagaggaccggggagaaatcgggaatagtcgctgtcgtagaagatactgtggcatgagtatgtgaaaatgaatcgtatcatcaatgtaaatgatgcgaacccgtagcgctgggcatcatattacttacagaatgacgatgcaaatcttacgagcaagtttcacgaatccgagacttttagatatgcgcagcaagaagagggtcgaatgaatgcaacgatgaacctgtcggctgctaccgcatcaaaagattttgctgaatttggcatgtatgtgttaaaagaactatgaacacgactctatattctgattccttgcaagagcgtttgtcttgctctagccgttgctgcgaaaacataatcgcgagaaaattgcctactgaacattcaccccaggttttgaagagtttccctgacggtggattattgtgcctttagacttcgtggtgagcaatgaaggctgtgagcttcggtgcagcaaatgcgggtcaagatagaaaactaatgaacgacagggctcttcgttaaggaagccacttcggtctggtgtttccaagacgatgaactcggatcctctttc

SEQ ID NO: 35271 - DNA, 1548 bp, Muscodor strobelii
  misc_feature: SGI cDNA ID NO. 572206
  misc_feature: Encodes the peptide sequence at SEQ ID NO 35272
atgagtcctgagccatcaaacgttctgcgccgctccgcgcggctcgcacacgcccaggtgaactcagcagcttctcctcctctcaagcgtcgtcgtagtgaggagcctgaagagtcactgccgccaaagaagtataagataaaagtgaagggctacccagtccacggccacccggcactaaacttatcgtcagaggccacatctgccgtcaactcgtcgctgccctctgcggagttgccacctgccgtcagctcaccaccacccgtggcaccgtcatcgccatggttcacatcaaacttcacctcctcgccggctcccatgtcaacaccgtcagggtcaacgtcaaccctgccatcatcaccgcctgccgcgtctcacgatgcaggaaaccacgaagcaggcccgtatgagaccgcggctgctgttgttgctcagaccatcttagagcgcgaagcagccctgggactacaagctctcggcaatcagtctgggtcctcgaccatctcgccgccgccggagccccgtgagccgcccacacggactagtgcagagcgacaactcgacgaagctgccgctagacctgctgggcatcatccgggtgccagtaaccatccacagcaagggggtagtccagtccttcctcctatagtcgctcccgctcctgccttcacaggcttcgattccatcggtgtgtggtacgctaaccctttctaccccggcaactactattccagccggcatgggttcatagactaccaagaaggagatgcggtagatcgagaggcggtcgaggattattacaatcggcaggacatactcaatacgctcctgccacctggccaactcccagcactccgagacatcgtaccggagtttgagcactgccgcccccaaggtcgtaaatctgggacgactcatctggatgtccagcttcgtaacggtactccgttcagtgatcgattggtcaccgatgccccttccgacgatatcatcgccccaaacgatgtcgtcggtccaagaagcacggcagggagaccagccgccgtcgatatggaggtcggcacttacgaagacatgaagctttgggataatagagaggcttatcacagaggagagcgagcacttcattgcctgccgcatgagactctgagacttgttgatggtcagatatttggaggtcagtttggaggagactttgacgagtaccaagaagatggtgaaaagaagaaagttcgtgagcagtataatggccacaagaccagggttgaaaattgggtcagggatggactcgcgaaggaacatatcaagatgctcaagaatacctacgacagagttgccacactttccgcaattcgaattgaggtgcccgaggctttcgacaacattggtggtatcatgtttgctgcatctgctcgtatccatcccggatggaagtcgtccatggggaaaaacccggccctcgtcgacacatgtgccaaggtcatggccatcgaaatcgacacagacgccgatgctgtcgccgagaacattctgacaagtagacgatag

SEQ ID NO: 35272 - protein, 515 aa, Muscodor strobelii
  misc_feature: SGI Peptide ID NO. 572206
MSPEPSNVLRRSARLAHAQVNSAASPPLKRRRSEEPEESLPPKKYKIKVKGYPVHGHPALNLSSEATSAVNSSLPSAELPPAVSSPPPVAPSSPWFTSNFTSSPAPMSTPSGSTSTLPSSPPAASHDAGNHEAGPYETAAAVVAQTILEREAALGLQALGNQSGSSTISPPPEPREPPTRTSAERQLDEAAARPAGHHPGASNHPQQGGSPVLPPIVAPAPAFTGFDSIGVWYANPFYPGNYYSSRHGFIDYQEGDAVDREAVEDYYNRQDILNTLLPPGQLPALRDIVPEFEHCRPQGRKSGTTHLDVQLRNGTPFSDRLVTDAPSDDIIAPNDVVGPRSTAGRPAAVDMEVGTYEDMKLWDNREAYHRGERALHCLPHETLRLVDGQIFGGQFGGDFDEYQEDGEKKKVREQYNGHKTRVENWVRDGLAKEHIKMLKNTYDRVATLSAIRIEVPEAFDNIGGIMFAASARIHPGWKSSMGKNPALVDTCAKVMAIEIDTDADAVAENILTSRR

SEQ ID NO: 35273 - DNA, 2166 bp, Muscodor strobelii
  misc_feature: SGI cDNA ID NO. 572208
  misc_feature: Encodes the peptide sequence at SEQ ID NO 35274
atggatcgccaatccgcgtattccgtctcggtcttccccgggcgcgagggtcccaacgaggactcccgcatgcaaatccaggagcagctggtcaacttcatcatgcagttcagacacgacaacatcttcatatacagagaccaattgcgcgagaatgccctgctcaacaagttctactgcgacgtcaacatcacagacctcatcaagtacaacgaggagcttgcacaccgtctggtcacggagccagcagagatcatccctctgttcgagaccgccctaagaaaatgcacacgccgaatcgtattccctcacaatccagacgccaagatcccagagcaccagctcctcatccactccaccgccgaggatgtctctatacgaaacttggactctgagaccatcgcgcgccttgttagggtatcaggcatcgtgattggcgcttccgtcatgtcatccaaggccaccgagctgcacatccagtgccgcaactgccagcatgggcagactgtccccgtgctaggtggtttcaccggcgtcacattgcctcgccaatgcggcagaaatcgtgcaccaaacgatcccactgagaaatgcccactcgacccctatttcgtcatccacgagaaatccgagtttgtcgaccagcaaatcatcaagcttcaagaggcccccgatcaagtccccgtcggagagcttcccagacatgtcctgatatctgccgaccgctaccttaccaacagagtagtccccggctcccgatgtaccatcatgggtatcttctccatctaccagaacaagggttctaagaactcttccacaggtggcgcagtggccatccgtacaccatacctccgatgtgttggcatccaaacagacacagactcgaccgcaaagggattgtcaatgttctctgaagaagaagagcaggagttcctcgagctcagcaggcgacccgatctttacaacatcatggctgactgcattgcgccttccatctatggtaatcgagacatcaagaaagccattctatgtctgctactcggcggttcgaaaaagatattacctgacggaatgaagctaagaggagacatcaatgtgctccttcttggtgatcctggtacggcgaagtcgcaattgctcaaattcgtcgagaaggccgcacccatctccatctacacatccggcaagggttcatcagcagccggtctgacagcctcggtacaacgcgatcactcgaccagagaattctacttggaaggtggtgccatggttcttgctgatgggggtgttgtctgtatcgacgagttcgacaagatgagagacgaggacagagtagccatccacgaagccatggaacagcagactatctcgattgccaaagcaggtatcacgacgatcctcaatgcacgaacatcggtgcttgcggccgccaatcccatcttcggacgttacgacgacatgaagactcccggcgagaacatcgactttcaaaccacgattctgtcacgtttcgacatgatcttcatcgtcaaagacgagcacacgcgcgacaaggacgaacgaatcgccaagcacgtcatgggcatccacatgggcggccgcggcatcgaagagcaagtcgaaggcgaagtacccgtagagaccatgcgccgctacctcagctactgtaaatcccgctgcgcaccccgcctctccccagaagcagcagagaaactatcctcccacttcgtatccatccgtcgacaagtccacgcctccgaaatcgaagccaacacgcgctcctcaatccccatcacagtccggcaactcgaagccatagtccgcataaccgaagccctcgcgaaactcacgctctcccccatcgcgacggaatcccacgtcgacgaagccattcgtctcttcctctgctccaccatggacgccgtgaaccagggctccaaccagggtagtaaggagctcaatgaagaagtgggcagagtcgaggcggagttgaagaggagattgccgatcgggtggagtacgagtctcgcgagtctgagaagagagatggtggaggggaaggggtttagtgagcagagtcttaatagagcgttgatgttattgcagagacgggataccgttatgtttcggaatcaggggagtcaggtttatcggaatggtgcctag

SEQ ID NO: 35274 - protein, 721 aa, Muscodor strobelii
  misc_feature: SGI Peptide ID NO. 572208
  misc_feature (307)..(639): Pfam Id: PF00493 Pfam Desc: MCM2/3/5 family
  misc_feature (1)..(721): NCBI GI: 46124799 Blast Desc: FG06777.1 [Gibberella zeae PH-1]
  misc_feature (1)..(721): NCBI GI: 256731398 Blast Desc: [Nectria haematococca mpVI 77-13-4]
  misc_feature (1)..(721): NCBI GI: 116199161 Blast Desc: conserved [Chaetomium globosum CBS 148.51] gi|88179015|gb|EAQ86483.1| conserved [Chaetomium globosum CBS 148.51]
  misc_feature (1)..(721): NCBI GI: 85103534 Blast Desc: DNA replication licensing factor mcm5 [Neurospora crassa OR74A] gi|18376245|emb|CAD21359.1| cell division control protein nda4 [Neurospora crassa] gi|28923084|gb|EAA32301.1| DNA
  misc_feature (1)..(721): NCBI GI: 171694069 Blast Desc: protein product [Podospora anserina] gi|170946983|emb|CAP73787.1| protein product [Podospora anserina]
  misc_feature (1)..(721): NCBI GI: 39948003 Blast Desc: MGG_08646 [Magnaporthe grisea 70-15] gi|145010270|gb|EDJ94926.1| MGG_08646 [Magnaporthe grisea 70-15]
  misc_feature (1)..(720): NCBI GI: 261202766 Blast Desc: DNA replication licensing factor mcm5 [Ajellomyces dermatitidis SLH14081] gi|239590694|gb|EEQ73275.1| DNA replication licensing factor mcm5 [Ajellomyces dermatitidis DNA
  misc_feature (1)..(720): NCBI GI: 226281289 Blast Desc: DNA replication licensing factor mcm5 [Paracoccidioides brasiliensis Pb01]
  misc_feature (1)..(720): NCBI GI: 225684966 Blast Desc: DNA replication licensing factor mcm5 [Paracoccidioides brasiliensis Pb03] gi|226294276|gb|EEH49696.1| DNA replication licensing factor mcm5 [Paracoccidioides Pb18]
  misc_feature (1)..(720): NCBI GI: 240277529 Blast Desc: DNA replication licensing factor mcm5 [Ajellomyces capsulatus H143]
MDRQSAYSVSVFPGREGPNEDSRMQIQEQLVNFIMQFRHDNIFIYRDQLRENALLNKFYCDVNITDLIKYNEELAHRLVTEPAEIIPLFETALRKCTRRIVFPHNPDAKIPEHQLLIHSTAEDVSIRNLDSETIARLVRVSGIVIGASVMSSKATELHIQCRNCQHGQTVPVLGGFTGVTLPRQCGRNRAPNDPTEKCPLDPYFVIHEKSEFVDQQIIKLQEAPDQVPVGELPRHVLISADRYLTNRVVPGSRCTIMGIFSIYQNKGSKNSSTGGAVAIRTPYLRCVGIQTDTDSTAKGLSMFSEEEEQEFLELSRRPDLYNIMADCIAPSIYGNRDIKKAILCLLLGGSKKILPDGMKLRGDINVLLLGDPGTAKSQLLKFVEKAAPISIYTSGKGSSAAGLTASVQRDHSTREFYLEGGAMVLADGGVVCIDEFDKMRDEDRVAIHEAMEQQTISIAKAGITTILNARTSVLAAANPIFGRYDDMKTPGENIDFQTTILSRFDMIFIVKDEHTRDKDERIAKHVMGIHMGGRGIEEQVEGEVPVETMRRYLSYCKSRCAPRLSPEAAEKLSSHFVSIRRQVHASEIEANTRSSIPITVRQLEAIVRITEALAKLTLSPIATESHVDEAIRLFLCSTMDAVNQGSNQGSKELNEEVGRVEAELKRRLPIGWSTSLASLRREMVEGKGFSEQSLNRALMLLQRRDTVMFRNQGSQVYRNGA

SEQ ID NO: 35275 - DNA, 4885 bp, Muscodor strobelii
  misc_feature: SGI EST ID NO. CUFF.84485.0
  misc_feature: Variant of the nucleotide sequence at SEQ ID NO 35273
ctgcccctcgttcgagcgcttgaaaacaccaagtttctattgcgagcgcaaattatccattgtttttgttctgaattctagttgaaccaaagagaagaagcatttgacttttattcgagatggatcgccaatccgcgtattccgtctcggtcttccccgggcgcgagggtcccaacgaggactcccgcatgcaaatccaggagcagctggtcaacttcatcatgcagttcagacacgacaacatcttcatatacagagaccaattgcgcgagaatgccctgctcaacaagttctactgcgacgtcaacatcacagacctcatcaagtacaacgaggagcttgcacaccgtctggtcacggagccagcagagatcatccctctgttcgagaccgccctaagaaaatgcacacgccgaatcgtattccctcacaatccagacgccaagatcccagagcaccagctcctcatccactccaccgccgaggatgtctctatacgaaacttggactctgagaccatcgcgcgccttgttagggtatcaggcatcgtgattggcgcttccgtcatgtcatccaaggccaccgagctgcacatccagtgccgcaactgccagcatgggcagactgtccccgtgctaggtggtttcaccggcgtcacattgcctcgccaatgcggcagaaatcgtgcaccaaacgatcccactgagaaatgcccactcgacccctatttcgtcatccacgagaaatccgagtttgtcgaccagcaaatcatcaagcttcaagaggcccccgatcaagtccccgtcggagagcttcccagacatgtcctgatatctgccgaccgctaccttaccaacagagtagtccccggctcccgatgtaccatcatgggtatcttctccatctaccagaacaagggttctaagaactcttccacaggtggcgcagtggccatccgtacaccatacctccgatgtgttggcatccaaacagacacagactcgaccgcaaagggattgtcaatgttctctgaagaagaagagcaggagttcctcgagctcagcaggcgacccgatctttacaacatcatggctgactgcattgcgccttccatctatggtaatcgagacatcaagaaagccattctatgtctgctactcggcggttcgaaaaagatattacctgacggaatgaagctaagaggagacatcaatgtgctccttcttggtgatcctggtacggcgaagtcgcaattgctcaaattcgtcgagaaggccgcacccatctccatctacacatccggcaagggttcatcagcagccggtctgacagcctcggtacaacgcgatcactcgaccagagaattctacttggaaggtggtgccatggttcttgctgatgggggtgttgtctgtatcgacgagttcgacaagatgagagacgaggacagagtagccatccacgaagccatggaacagcagactatctcgattgccaaagcaggtatcacgacgatcctcaatgcacgaacatcggtgcttgcggccgccaatcccatcttcggacgttacgacgacatgaagactcccggcgagaacatcgactttcaaaccacgattctgtcacgtttcgacatgatcttcatcgtcaaagacgagcacacgcgcgacaaggacgaacgaatcgccaagcacgtcatgggcatccacatgggcggccgcggcatcgaagagcaagtcgaaggcgaagtacccgtagagaccatgcgccgctacctcagctactgtaaatcccgctgcgcaccccgcctctccccagaagcagcagagaaactatcctcccacttcgtatccatccgtcgacaagtccacgcctccgaaatcgaagccaacacgcgctcctcaatccccatcacagtccggcaactcgaagccatagtccgcataaccgaagccctcgcgaaactcacgctctcccccatcgcgacggaatcccacgtcgacgaagccattcgtctcttcctctgctccaccatggacgccgtgaaccagggctccaaccagggtagtaaggagctcaatgaagaagtgggcagagtcgaggcggagttgaagaggagattgccgatcgggtggagtacgagtctcgcgagtctgagaagagagatggtggaggggaaggggtttagtgagcagagtcttaatagagcgttgatgttattgcagagacgggataccgttatgtttcggaatcaggggagtcaggtttatcggaatggtgcctagtttgttaggtataaggggtgagagggtagtgatgagatgatgaggggggagtgcctgggagtgcctggagttccttgtgatgagaggagcatgactgaatgagcatgagatattgtggattgggctgctggactggactgattaggtagataccgagggtctggagttccggctttgatggacttgttgtatagcatgtgctaagttgcttgaggctgattgattcggtcaaaatatataatgttgagtcgatttgctaaactcatcttcaatcaagaaagacaggtgtaataaatctaaatctacactgcacgaactgtataaacccctcctgtacatgcgagcagggttaaatgcgcacgcatttcgaataatgaaaaacatactacgaagacatcggcgaataaatggtggcagacaacaaatcgagttacaagatctaagaaatatattcgatctataaaactcagtccgatgacatcaatatcattcaaatagcacatttataatcctccttcgtaaccaatcgttagggaatcgtcaagagtccgcccccacgctacctatacacatctccctttcccctttccctcaggcaagaccaggacatacactacgcaaaagcaatagtattgtcatccctaataaaagccacaacacccagcgcactttccccacccacgaccgcgggaccacggacgacaatctcgcccttataactatcatccgtgatcttatgcgcgccagtattccgcagcatgacctcggtgctgcttaatggtggaccgaaatgtgatcccgtaccgttacccgagacgcggtagtcgtggtattgagtctgcgccacggcaccagcgcactgcggcgcggaaagggcgtagatgatgcgtgctcccgtgaagacacgaaggtccgaaagagcgagttcagaaagactaggtttggcagtcgtcgatactgggtgggctacgtacaaaagacgcagtttgcctggtgttgtgccgatatttgggcgcgcggaatcgttccaggaggctaggaaagaagcagcaggcatggcgccattctgcacaaggctacgggtctgcacccagtgagagagggaagcgagggccgacgacactttacccttggtctcgccgagggtcttggtcaacgtctctggggtggcgacaatgatcgtcggggcgaccccttgagtcgccagtgcgagatctggcgcatctgctacggagctgaaggctaccgaggcattgctgtatatagcagtgagagtcaagaccagagtaaaggaggaagagagagaagcggcgggtaggaaaagatcagcgggcccaaatcgttccttggttgggatagcggtcatttgagctgaaacaccagacacgagatttccttgcgtgaactgaaccatttcctctacagtgttgggcgtcttccagaacatgataacgtcgggtgcaacggacttggcatcagcagccgggagttcagtgccagctgcctgaggattatcgttaagaatatcctgccaggtcgaaacgttcacttttccgcccatgccctgaggcacttcattccagtcgagatgtttgttgccctcgtcgacgacccagatgagctgtcgcaatgccggatagcttttaacaacggtatcgaagggaaaagcaccaggagaagtgaccacagtgtcggcacccgattgctgaagcatggagatgacggaggcttcgggctcaccaaagggcaggagaacagctgtcaagttatagaaactacaggcaaacagagtagccatgtattccacggaattgggtaagtaaatagcaaccttcttccctccctgagatgagatgtgttggccgaccaagttgatttgacgggtaatgtcatctgagacctattagtctaaatgcaaatcaaggactcatatatggtatagttttaccaagtttatgctcaatgaccttcgatttgccatgaaccgtaagaatgcgacctctggcattagatggggcagcaccatcttcagcgggagggccattgatagccctcctccagatatctctcagatcaccatcccgacccattgaccacttggaagcaccggcatctttcacgtttagaccactattcagtggcatgctgtgaggcgccgtgttggagcggtagatgggggactccccttcttgacggacaggtgaaccatgagcctgacgggccaagaacatggggtgaacatcaggctcgacgcgggtggtgatggcgtaggtgacaataagagtcaatatggtgacgatgcctgttgagtagacattccattggctgatgagagagctcaagctctcgtcgagcgttgcgagggcgctccctacgctcatattggggtttgcctggggtatataagtcaggcagatttaggtttggtttagcatacgatagtcaggcagcttgggtttaatcaagcaccaggcaaacaaaacatacaaacaccctccagatatttcggaggcgcagagaaatattgaaatcaacgattcctctgctgacacggaggattcctggagtatccggatgattgaacgtgtgctcactgcggc

SEQ ID NO: 35276 - DNA, 1101 bp, Muscodor strobelii
  misc_feature: SGI cDNA ID NO. 572209
  misc_feature: Encodes the peptide sequence at SEQ ID NO 35277
atgcttcagcaatcgggtgccgacactgtggtcacttctcctggtgcttttcccttcgataccgttgttaaaagctatccggcattgcgacagctcatctgggtcgtcgacgagggcaacaaacatctcgactggaatgaagtgcctcagggcatgggcggaaaagtgaacgtttcgacctggcaggatattcttaacgataatcctcaggcagctggcactgaactcccggctgctgatgccaagtccgttgcacccgacgttatcatgttctggaagacgcccaacactgtagaggaaatggttcagttcacgcaaggaaatctcgtgtctggtgtttcagctcaaatgaccgctatcccaaccaaggaacgatttgggcccgctgatcttttcctacccgccgcttctctctcttcctcctttactctggtcttgactctcactgctatatacagcaatgcctcggtagccttcagctccgtagcagatgcgccagatctcgcactggcgactcaaggggtcgccccgacgatcattgtcgccaccccagagacgttgaccaagaccctcggcgagaccaagggtaaagtgtcgtcggccctcgcttccctctctcactgggtgcagacccgtagccttgtgcagaatggcgccatgcctgctgcttctttcctagcctcctggaacgattccgcgcgcccaaatatcggcacaacaccaggcaaactgcgtcttttgtacgtagcccacccagtatcgacgactgccaaacctagtctttctgaactcgctctttcggaccttcgtgtcttcacgggagcacgcatcatctacgccctttccgcgccgcagtgcgctggtgccgtggcgcagactcaataccacgactaccgcgtctcgggtaacggtacgggatcacatttcggtccaccattaagcagcaccgaggtcatgctgcggaatactggcgcgcataagatcacggatgatagttataagggcgagattgtcgtccgtggtcccgcggtcgtgggtggggaaagtgcgctgggtgttgtggcttttattagggatgacaatactattgcttttgcgtag

SEQ ID NO: 35277 - protein, 366 aa, Muscodor strobelii
  misc_feature: SGI Peptide ID NO. 572209
  misc_feature (1)..(366): NCBI GI: 85103530 Blast Desc: NCU01170 [Neurospora crassa OR74A] gi|18376246|emb|CAD21360.1| conserved [Neurospora crassa] gi|28923083|gb|EAA32300.1| conserved [Neurospora crassa OR74A]
  misc_feature (1)..(366): NCBI GI: 256731388 Blast Desc: [Nectria haematococca mpVI 77-13-4]
  misc_feature (1)..(364): NCBI GI: 145612966 Blast Desc: MGG_08307 [Magnaporthe grisea 70-15] gi|145020048|gb|EDK04276.1| MGG_08307 [Magnaporthe grisea 70-15]
  misc_feature (1)..(366): NCBI GI: 46124855 Blast Desc: FG06805.1 [Gibberella zeae PH-1]
  misc_feature (1)..(366): NCBI GI: 116199163 Blast Desc: CHGG_07737 [Chaetomium globosum CBS 148.51] gi|88179016|gb|EAQ86484.1| CHGG_07737 [Chaetomium globosum CBS 148.51]
  misc_feature (1)..(365): NCBI GI: 171694067 Blast Desc: protein product [Podospora anserina] gi|170946982|emb|CAP73786.1| protein product [Podospora anserina]
  misc_feature (1)..(365): NCBI GI: 156050123 Blast Desc: SS1G_07648 [Sclerotinia sclerotiorum 1980] gi|154692049|gb|EDN91787.1| SS1G_07648 [Sclerotinia sclerotiorum 1980]
  misc_feature (1)..(365): NCBI GI: 261351690 Blast Desc: conserved [Verticillium albo-atrum VaMs.102]
  misc_feature (1)..(365): NCBI GI: 154317930 Blast Desc: BC1G_02948 [Botryotinia fuckeliana B05.10] gi|150843606|gb|EDN18799.1| BC1G_02948 [Botryotinia fuckeliana B05.10]
  misc_feature (1)..(353): NCBI GI: 169615749 Blast Desc: SNOG_11037 [Phaeosphaeria nodorum SN15] gi|160703037|gb|EAT81536.2| SNOG_11037 [Phaeosphaeria nodorum SN15]
MLQQSGADTVVTSPGAFPFDTVVKSYPALRQLIWVVDEGNKHLDWNEVPQGMGGKVNVSTWQDILNDNPQAAGTELPAADAKSVAPDVIMFWKTPNTVEEMVQFTQGNLVSGVSAQMTAIPTKERFGPADLFLPAASLSSSFTLVLTLTAIYSNASVAFSSVADAPDLALATQGVAPTIIVATPETLTKTLGETKGKVSSALASLSHWVQTRSLVQNGAMPAASFLASWNDSARPNIGTTPGKLRLLYVAHPVSTTAKPSLSELALSDLRVFTGARIIYALSAPQCAGAVAQTQYHDYRVSGNGTGSHFGPPLSSTEVMLRNTGAHKITDDSYKGEIVVRGPAVVGGESALGVVAFIRDDNTIAFA

SEQ ID NO: 35278 - DNA, 4970 bp, Muscodor strobelii
  misc_feature: SGI EST ID NO. CUFF.84486.1
  misc_feature: Variant of the nucleotide sequence at SEQ ID NO 35276
gccgcagtgagcacacgttcaatcatccggatactccaggaatcctccgtgtcagcagaggaatcgttgatttcaatatttctctgcgcctccgaaatatctggagggtgtttgtatgttttgtttgcctggtgcttgattaaacccaagctgcctgactatcgtatgctaaaccaaacctaaatctgcctgacttatataccccaggcaaaccccaatatgagcgtagggagcgccctcgcaacgctcgacgagagcttgagctctctcatcagccaatggaatgtctactcaacaggcatcgtcaccatattgactcttattgtcacctacgccatcaccacccgcgtcgagcctgatgttcaccccatgttcttggcccgtcaggctcatggttcacctgtccgtcaagaaggggagtcccccatctaccgctccaacacggcgcctcacagcatgccactgaatagtggtctaaacgtgaaagatgccggtgcttccaagtggtcaatgggtcgggatggtgatctgagagatatctggaggagggctatcaatggccctcccgctgaagatggtgctgccccatctaatgccagaggtcgcattcttacggttcatggcaaatcgaaggtcattgagcataaacttgatgacattacccgtcaaatcaacttggtcggccaacacatctcatctcagggagggaagaaggttgctatttacttacccaattccgtggaatacatggctactctgtttgcctgtagtttctataacttgacagctgttctcctgccctttggtgagcccgaagcctccgtcatctccatgcttcagcaatcgggtgccgacactgtggtcacttctcctggtgcttttcccttcgataccgttgttaaaagctatccggcattgcgacagctcatctgggtcgtcgacgagggcaacaaacatctcgactggaatgaagtgcctcagggcatgggcggaaaagtgaacgtttcgacctggcaggatattcttaacgataatcctcaggcagctggcactgaactcccggctgctgatgccaagtccgttgcacccgacgttatcatgttctggaagacgcccaacactgtagaggaaatggttcagttcacgcaaggaaatctcgtgtctggtgtttcagctcaaatgaccgctatcccaaccaaggaacgatttgggcccgctgatcttttcctacccgccgcttctctctcttcctcctttactctggtcttgactctcactgctatatacagcaatgcctcggtagccttcagctccgtagcagatgcgccagatctcgcactggcgactcaaggggtcgccccgacgatcattgtcgccaccccagagacgttgaccaagaccctcggcgagaccaagggtaaagtgtcgtcggccctcgcttccctctctcactgggtgcagacccgtagccttgtgcagaatggcgccatgcctgctgcttctttcctagcctcctggaacgattccgcgcgcccaaatatcggcacaacaccaggcaaactgcgtcttttgtacgtagcccacccagtatcgacgactgccaaacctagtctttctgaactcgctctttcggaccttcgtgtcttcacgggagcacgcatcatctacgccctttccgcgccgcagtgcgctggtgccgtggcgcagactcaataccacgactaccgcgtctcgggtaacggtacgggatcacatttcggtccaccattaagcagcaccgaggtcatgctgcggaatactggcgcgcataagatcacggatgatagttataagggcgagattgtcgtccgtggtcccgcggtcgtgggtggggaaagtgcgctgggtgttgtggcttttattagggatgacaatactattgcttttgcgtagtgtatgtcctggtcttgcctgagggaaaggggaaagggagatgtgtataggtagcgtgggggcggactcttgacgattccctaacgattggttacgaaggaggattataaatgtgctatttgaatgatattgatgtcatcggactgagttttatagatcgaatatatttcttagatcttgtaactcgatttgttgtctgccaccatttattcgccgatgtcttcgtagtatgtttttcattattcgaaatgcgtgcgcatttaaccctgctcgcatgtacaggaggggtttatacagttcgtgcagtgtagatttagatttattacacctgtctttcttgattgaagatgagtttagcaaatcgactcaacattatatattttgaccgaatcaatcagcctcaagcaacttagcacatgctatacaacaagtccatcaaagccggaactccagaccctcggtatctacctaatcagtccagtccagcagcccaatccacaatatctcatgctcattcagtcatgctcctctcatcacaaggaactccaggcactcccaggcactcccccctcatcatctcatcactaccctctcaccccttatacctaacaaactaggcaccattccgataaacctgactcccctgattccgaaacataacggtatcccgtctctgcaataacatcaacgctctattaagactctgctcactaaaccccttcccctccaccatctctcttctcagactcgcgagactcgtactccacccgatcggcaatctcctcttcaactccgcctcgactctgcccacttcttcattgagctccttactaccctggttggagccctggttcacggcgtccatggtggagcagaggaagagacgaatggcttcgtcgacgtgggattccgtcgcgatgggggagagcgtgagtttcgcgagggcttcggttatgcggactatggcttcgagttgccggactgtgatggggattgaggagcgcgtgttggcttcgatttcggaggcgtggacttgtcgacggatggatacgaagtgggaggatagtttctctgctgcttctggggagaggcggggtgcgcagcggctgtggggggttggttagttatcgggttttgctgggatggagtattttgggaggagtggaagcgaaacttacgatttacagtagctgaggtagcggcgcatggtctctacgggtacttcgccttcgacttgctcttcgatgccgcggccgcccatgtggatgcccatgacgtgcttggcgattcgttcgtccttgtcgcgcgtgtgctcgtctttgacgatgaagatcatgtcgaaacgtgacagaatcgtggtttgaaagtcgatgttctcgccgggagtcttcatgtcgtcgtaacgtccgaagatgggattggcggccgcaagcaccgatgttcgtgcattgaggatcgtcgtgatacctgctttggcaatcgagatagtctgctgttccatggcttcgtggatggctactctgtcctcgtctctcatcttgtcgaactcgtcgatacagacaacacccccatcagcaagaaccatggcaccaccttccaagtagaattctctggtcgagtgatcgcgttgtaccgaggctgtcagaccggctgctgatgaacccttgccggatgtgtagatggagatgggtgcggccttctcgacgaatttgagcaattgcgacttcgccgtaccaggatcaccaagaaggagcacattgatgtctcctcttagcttcattccgtcaggtaatatctttttcgaaccgccgagtagcagacatagaatggctttcttgatgtctcgattaccatagatggaaggcgcaatgcagtcagccatgatgttgtaaagatcgggtcgcctgctgagctcgaggaactcctgctcttcttcttcagagaacattgacaatccctttgcggtcgagtctgtgtctgtttggatgccaacacatcggaggtatggtgtacggatggccactgcgccacctgtggaagagttcttagaacccttgttctggtagatggagaagatacccatgatggtacatcgggagccggggactactctgttggtaaggtagcggtcggcagatatcaggacatgtctgggaagctctccgacggggacttgatcgggggcctcttgaagcttgatgatttgctggtcgacaaactcggatttctcgtggatgacgaaataggggtcgagtgggcatttctcagtgggatcgtttggtgcacgatttctgccgcattggcgaggcaatgtgacgccggtgaaaccacctagcacggggacagtctgcccatgctggcagttgcggcactggatgtgcagctcggtggccttggatgacatgacggaagcgccaatcacgatgcctgataccctaacaaggcgcgcgatggtctcagagtccaagtttcgtatagagacatcctcggcggtggagtggatgaggagctggtgctctgggatcttggcgtctggattgtgagggaatacgattcggcgtgtgcattttcttagggcggtctcgaactggttgcaggtgttagtctccatgtattcttgcagaagtagaatgtcattgtcagagtggaacacaccagagggatgatctctgctggctccgtgaccagacggtgtgcaagctcctcgttgtacttgatgaggtctgtgatgttgacgtcgcagtagaacttgttgagcagggcattctcgcgcaattggtctctgtatatgaagatgttgtcgtgtctgaactgcatgatgaagttgaccagctgctcctggatttgcatgcgggagtcctcgttgggaccctcgcgcccggggaagaccgagacggaatacgcggattggcgatccatctcgaataaaagtcaaatgcttcttctctttggttcaactagaattcagaacaaaaacaatggataatttgcgctcgcaatagaaacttggtgttttcaagcgctcgaacgaggggcag

SEQ ID NO: 35279 - DNA, 1713 bp, Muscodor strobelii
  misc_feature: SGI cDNA ID NO. 572210
  misc_feature: Encodes the peptide sequence at SEQ ID NO 35280
atgagcgtagggagcgccctcgcaacgctcgacgagagcttgagctctctcatcagccaatggaatgtctactcaacaggcatcgtcaccatattgactcttattgtcacctacgccatcaccacccgcgtcgagcctgatgttcaccccatgttcttggcccgtcaggctcatggttcacctgtccgtcaagaaggggagtcccccatctaccgctccaacacggcgcctcacagcatgccactgaatagtggtctaaacgtgaaagatgccggtgcttccaagtggtcaatgggtcgggatggtgatctgagagatatctggaggagggctatcaatggccctcccgctgaagatggtgctgccccatctaatgccagaggtcgcattcttacggttcatggcaaatcgaaggtcattgagcataaacttgatgacattacccgtcaaatcaacttggtcggccaacacatctcatctcagggagggaagaaggttgctatttacttacccaattccgtggaatacatggctactctgtttgcctgtagtttctataacttgacagctgttctcctgccctttggtgagcccgaagcctccgtcatctccatgcttcagcaatcgggtgccgacactgtggtcacttctcctggtgcttttcccttcgataccgttgttaaaagctatccggcattgcgacagctcatctgggtcgtcgacgagggcaacaaacatctcgactggaatgaagtgcctcagggcatgggcggaaaagtgaacgtttcgacctggcaggatattcttaacgataatcctcaggcagctggcactgaactcccggctgctgatgccaagtccgttgcacccgacgttatcatgttctggaagacgcccaacactgtagaggaaatggttcagttcacgcaaggaaatctcgtgtctggtgtttcagctcaaatgaccgctatcccaaccaaggaacgatttgggcccgctgatcttttcctacccgccgcttctctctcttcctcctttactctggtcttgactctcactgctatatacagcaatgcctcggtagccttcagctccgtagcagatgcgccagatctcgcactggcgactcaaggggtcgccccgacgatcattgtcgccaccccagagacgttgaccaagaccctcggcgagaccaagggtaaagtgtcgtcggccctcgcttccctctctcactgggtgcagacccgtagccttgtgcagaatggcgccatgcctgctgcttctttcctagcctcctggaacgattccgcgcgcccaaatatcggcacaacaccaggcaaactgcgtcttttgtacgtagcccacccagtatcgacgactgccaaacctagtctttctgaactcgctctttcggaccttcgtgtcttcacgggagcacgcatcatctacgccctttccgcgccgcagtgcgctggtgccgtggcgcagactcaataccacgactaccgcgtctcgggtaacggtacgggatcacatttcggtccaccattaagcagcaccgaggtcatgctgcggaatactggcgcgcataagatcacggatgatagttataagggcgagattgtcgtccgtggtcccgcggtcgtgggtggggaaagtgcgctgggtgttgtggcttttattagggatgacaatactattgcttttgcgtag

SEQ ID NO: 35280 - protein, 570 aa, Muscodor strobelii
  misc_feature: SGI Peptide ID NO. 572210
  misc_feature (163)..(222): Pfam Id: PF00501 Pfam Desc: AMP-binding enzyme
  misc_feature (7)..(570): NCBI GI: 85103530 Blast Desc: NCU01170 [Neurospora crassa OR74A] gi|18376246|emb|CAD21360.1| conserved [Neurospora crassa] gi|28923083|gb|EAA32300.1| conserved [Neurospora crassa OR74A]
  misc_feature (1)..(568): NCBI GI: 145612966 Blast Desc: MGG_08307 [Magnaporthe grisea 70-15] gi|145020048|gb|EDK04276.1| MGG_08307 [Magnaporthe grisea 70-15]
  misc_feature (9)..(570): NCBI GI: 256731388 Blast Desc: [Nectria haematococca mpVI 77-13-4]
  misc_feature (7)..(570): NCBI GI: 116199163 Blast Desc: CHGG_07737 [Chaetomium globosum CBS 148.51] gi|88179016|gb|EAQ86484.1| CHGG_07737 [Chaetomium globosum CBS 148.51]
  misc_feature (2)..(569): NCBI GI: 261351690 Blast Desc: conserved [Verticillium albo-atrum VaMs.102]
  misc_feature (9)..(570): NCBI GI: 46124855 Blast Desc: FG06805.1 [Gibberella zeae PH-1]
  misc_feature (7)..(569): NCBI GI: 171694067 Blast Desc: protein product [Podospora anserina] gi|170946982|emb|CAP73786.1| protein product [Podospora anserina]
  misc_feature (1)..(569): NCBI GI: 156050123 Blast Desc: SS1G_07648 [Sclerotinia sclerotiorum 1980] gi|154692049|gb|EDN91787.1| SS1G_07648 [Sclerotinia sclerotiorum 1980]
  misc_feature (1)..(569): NCBI GI: 154317930 Blast Desc: BC1G_02948 [Botryotinia fuckeliana B05.10] gi|150843606|gb|EDN18799.1| BC1G_02948 [Botryotinia fuckeliana B05.10]
  misc_feature (10)..(569): NCBI GI: 189210116 Blast Desc: conserved [Pyrenophora tritici-repentis Pt-1C-BFP] gi|187977483|gb|EDU44109.1| conserved [Pyrenophora tritici-repentis Pt-1C-BFP]
MSVGSALATLDESLSSLISQWNVYSTGIVTILTLIVTYAITTRVEPDVHPMFLARQAHGSPVRQEGESPIYRSNTAPHSMPLNSGLNVKDAGASKWSMGRDGDLRDIWRRAINGPPAEDGAAPSNARGRILTVHGKSKVIEHKLDDITRQINLVGQHISSQGGKKVAIYLPNSVEYMATLFACSFYNLTAVLLPFGEPEASVISMLQQSGADTVVTSPGAFPFDTVVKSYPALRQLIWVVDEGNKHLDWNEVPQGMGGKVNVSTWQDILNDNPQAAGTELPAADAKSVAPDVIMFWKTPNTVEEMVQFTQGNLVSGVSAQMTAIPTKERFGPADLFLPAASLSSSFTLVLTLTAIYSNASVAFSSVADAPDLALATQGVAPTIIVATPETLTKTLGETKGKVSSALASLSHWVQTRSLVQNGAMPAASFLASWNDSARPNIGTTPGKLRLLYVAHPVSTTAKPSLSELALSDLRVFTGARIIYALSAPQCAGAVAQTQYHDYRVSGNGTGSHFGPPLSSTEVMLRNTGAHKITDDSYKGEIVVRGPAVVGGESALGVVAFIRDDNTIAFA

SEQ ID NO: 35281 - DNA, 4970 bp, Muscodor strobelii; identical to SEQ ID NO: 35278
  misc_feature: SGI EST ID NO. CUFF.84486.1
  misc_feature: Variant of the nucleotide sequence at SEQ ID NO 35279

SEQ ID NO: 35282 - DNA, 810 bp, Muscodor strobelii
  misc_feature: SGI cDNA ID NO. 572211
  misc_feature: Encodes the peptide sequence at SEQ ID NO 35283
atggcctccaaaacagtcctgtctactcccaccaaggcccccgcagagcccgtcacagacagcccgggcacctggcggcatcctcgtctccaggagatcacccaccgacaagaagcatgcactttcaccgataagaacatcaagcacatagctatcaatgctgctctgatcttgctcactttcttcttgcactccacggtctgcaagtatcttccctcccggcgctctgctcctcacatctggaattatgagtggtacacatacattgccctcctcctcctaccgctcttcaacatagcctataacctctggcccttgatccgagccaaggacgacctctccgacatcccccttacaccagcacagcgccagctactcggtctccctccttcgtctgcgccgcctacgccaggctctgtctacagcaccccgccccgttactcccgaacgccctcagtcggctcggcagcaagcagacgcagcttctcaagctccccgctctccaacccggcgagtcccacacccgccggaaacggctcgccgggcttcgcctccccaaaccaccacctactccagaaggctatgtttggcgcccgtcgctcatcgcgtagttccatcggatcaccaggcagcccattaggtgtgtcaaccggcacatcgctcttcggaggcggcctcgagagccctagtccgagcccctcgcccgggaagcgcagcagtgtagctctgagcagcaagtggcggtatgagaaggggttgtatgacaagaacagctttagagactcggtcggcaacacgatgtacacttaa

SEQ ID NO: 35283 - protein, 269 aa, Muscodor strobelii
  misc_feature: SGI Peptide ID NO. 572211
  misc_feature (23)..(150): Pfam Id: PF08058 Pfam Desc: Nuclear pore complex component
  misc_feature (58)..(150): Pfam Id: PF08058 Pfam Desc: Nuclear pore complex component
  misc_feature (6)..(266): NCBI GI: 116199165 Blast Desc: CHGG_07738 [Chaetomium globosum CBS 148.51] gi|88179017|gb|EAQ86485.1| CHGG_07738 [Chaetomium globosum CBS 148.51]
  misc_feature (7)..(252): NCBI GI: 256730976 Blast Desc: NECHADRAFT_84749 [Nectria haematococca mpVI 77-13-4]
  misc_feature (1)..(252): NCBI GI: 39946406 Blast Desc: MGG_08308 [Magnaporthe grisea 70-15] gi|145020047|gb|EDK04275.1| MGG_08308 [Magnaporthe grisea 70-15]
  misc_feature (1)..(252): NCBI GI: 171694065 Blast Desc: protein product [Podospora anserina] gi|170946981|emb|CAP73785.1| protein product [Podospora anserina]
  misc_feature (1)..(267): NCBI GI: 242792792 Blast Desc: conserved [Talaromyces stipitatus ATCC 10500] gi|218718616|gb|EED18036.1| conserved [Talaromyces stipitatus ATCC 10500]
  misc_feature (1)..(251): NCBI GI: 85100203 Blast Desc: NCU06674 [Neurospora crassa OR74A] gi|28922453|gb|EAA31685.1| [Neurospora crassa OR74A] gi|28950122|emb|CAD70902.1| conserved [Neurospora crassa]
  misc_feature (1)..(251): NCBI GI: 169780818 Blast Desc: [Aspergillus oryzae RIB40] gi|238504984|ref|XP_002383721.1| conserved [Aspergillus flavus NRRL3357] gi|83773613|dbj|BAE63740.1| protein product oryzae]
  misc_feature (8)..(252): NCBI GI: 261351691 Blast Desc: conserved [Verticillium albo-atrum VaMs.102]
  misc_feature (1)..(267): NCBI GI: 212535334 Blast Desc: conserved [Penicillium marneffei ATCC 18224] gi|210070222|gb|EEA24312.1| conserved [Penicillium marneffei ATCC 18224]
  misc_feature (1)..(251): NCBI GI: 261202372 Blast Desc: nuclear pore complex component protein [Ajellomyces dermatitidis SLH14081] gi|239590497|gb|EEQ73078.1| nuclear pore complex component protein [Ajellomyces dermatitidis SLH14081]
MASKTVLSTPTKAPAEPVTDSPGTWRHPRLQEITHRQEACTFTDKNIKHIAINAALILLTFFLHSTVCKYLPSRRSAPHIWNYEWYTYIALLLLPLFNIAYNLWPLIRAKDDLSDIPLTPAQRQLLGLPPSSAPPTPGSVYSTPPRYSRTPSVGSAASRRSFSSSPLSNPASPTPAGNGSPGFASPNHHLLQKAMFGARRSSRSSIGSPGSPLGVSTGTSLFGGGLESPSPSPSPGKRSSVALSSKWRYEKGLYDKNSFRDSVGNTMYT

SEQ ID NO: 35284 - DNA, 1463 bp, Muscodor strobelii
  misc_feature: SGI EST ID NO. CUFF.83948.0
  misc_feature: Variant of the nucleotide sequence at SEQ ID NO 35282
tagcaacccgaaatgcaggtgcatgggcatttagtgcaaccgcccatggcagtcgcgaacaaaacaaaagacctgacttcacctcgacctcatctgcctgtcgaccagctagcgacggctgcttttgcagcacaacgacttctactaacccacaggtatactgacggcatagcgaggcaagctacgtcttgattcttgctgtctcaattggttctcgacaaacaagccctccgatcaatcgagaatctccgatccctgcacagtcgcatatctcgagtcgatgattccacaactgtcgactcgttgcgcatagtcagttccgtcgcggatcttcgcctcttcgtgaggcattaccatctgccaacatggcctccaaaacagtcctgtctactcccaccaaggcccccgcagagcccgtcacagacagcccgggcacctggcggcatcctcgtctccaggagatcacccaccgacaagaagcatgcactttcaccgataagaacatcaagcacatagctatcaatgctgctctgatcttgctcactttcttcttgcactccacggtctgcaagtatcttccctcccggcgctctgctcctcacatctggaattatgagtggtacacatacattgccctcctcctcctaccgctcttcaacatagcctataacctctggcccttgatccgagccaaggacgacctctccgacatcccccttacaccagcacagcgccagctactcggtctccctccttcgtctgcgccgcctacgccaggctctgtctacagcaccccgccccgttactcccgaacgccctcagtcggctcggcagcaagcagacgcagcttctcaagctccccgctctccaacccggcgagtcccacacccgccggaaacggctcgccgggcttcgcctccccaaaccaccacctactccagaaggctatgtttggcgcccgtcgctcatcgcgtagttccatcggatcaccaggcagcccattaggtgtgtcaaccggcacatcgctcttcggaggcggcctcgagagccctagtccgagcccctcgcccgggaagcgcagcagtgtagctctgagcagcaagtggcggtatgagaaggggttgtatgacaagaacagctttagagactcggtcggcaacacgatgtacacttaatgatggcaatggcattggcatggcgttttgcgatataatccttctttgggttctgaaatttggacaagacgcattttgtctggatgtggatagagatgtatgagtaatgactgtgtaatacatgctcggggtgtggttaatggaaagagatcatgaagaatatgcttagttcctgcgtcacttgctaatgcgatatgaatactaacattattgttggtgtggggatttgaaatgacatttcccatggagcttgccatctccactgctcaattttgatcctgagctttg

SEQ ID NO: 35285 - DNA, 348 bp, Muscodor strobelii
  misc_feature: SGI cDNA ID NO. 572214
  misc_feature: Encodes the peptide sequence at SEQ ID NO 35286
atggcatccaaccctgcgacttccgtccggatcaccgccagcgacatgatcgctctcgccaaagacaagctcgccgcccgagccggcttccaagacggtgccacggccaaggcccactacgaatcacttctcctccctcactaccgccccagcgatacgtccaacacgcgtcagacttctcgcgacaacaactctgccgacaaatctgccccaacgcgtgtcaagactgagacccacgaccgttccacgtcccgctaccctccgacctcgaggatggagaggtttgagcttggcagtggattacgaaaagatagcttcacgagcaggaaagcgtggtgcagatgctga

SEQ ID NO: 35286 - protein, 115 aa, Muscodor strobelii
  misc_feature: SGI Peptide ID NO. 572214
MASNPATSVRITASDMIALAKDKLAARAGFQDGATAKAHYESLLLPHYRPSDTSNTRQTSRDNNSADKSAPTRVKTETHDRSTSRYPPTSRMERFELGSGLRKDSFTSRKAWCRC

SEQ ID NO: 35287 - DNA, 774 bp, Muscodor strobelii
  misc_feature: SGI cDNA ID NO. 572215
  misc_feature: Elevated expression when VOC is produced
  misc_feature: Encodes the peptide sequence at SEQ ID NO 35288
cgctcatttcaggagaagcttaccattcagctggggaagaagatttctggcaatatccaatacacagaagtggttgaactgaccaagaatcagggcactgaagctacgtggttccaactaggggccaaagagggtggcgacatcgacatcttcggacccgagcaggtcttaggatatcaaggacccgtacgtggttggagaacgggaggagaaaccgatgacgaaagagcaagagaatcagctattgcactagctcacttattccgatttgggcagatttttcacttacgaagcggttcccaggattcagcgccgttccaggtaacggcaataccaacagggaaccatgccggggagtttcgattcaagtttgaaaacaaagggatcgagaaactttatttcgcagttcttatcctcagtccggggtttcatgtcaagcaattatttccaaatgaagatgctctccacacagtacctgcaggcgagatgaaatcattccagtttcgcttattgccacccgagaagctgacgaacaacggagccaatgatggacaacatgaatttcgcgatatcatccgcaccgttgtgagcagcaagcggctatccctcaagagcatggaaatgcctgacatttggaatgctgatcaatgggatcatcagatgttgaatggtttgggcagggatgcagaactttcagaggactttagttggtggatacatgatgtgccaaagttgacgaagataacaagtcaaccacacagcaagactccttaa

SEQ ID NO: 35288 - protein, 257 aa, Muscodor strobelii
  misc_feature: SGI Peptide ID NO. 572215
  misc_feature: Useful for introducing or modulating the production of volatile compounds
RSFQEKLTIQLGKKISGNIQYTEVVELTKNQGTEATWFQLGAKEGGDIDIFGPEQVLGYQGPVRGWRTGGETDDERARESAIALAHLFRFGQIFHLRSGSQDSAPFQVTAIPTGNHAGEFRFKFENKGIEKLYFAVLILSPGFHVKQLFPNEDALHTVPAGEMKSFQFRLLPPEKLTNNGANDGQHEFRDIIRTVVSSKRLSLKSMEMPDIWNADQWDHQMLNGLGRDAELSEDFSWWIHDVPKLTKITSQPHSKTP

SEQ ID NO: 35289 - DNA, 5443 bp, Muscodor strobelii
  misc_feature: SGI EST ID NO. CUFF.84141.2
  misc_feature: Variant of the nucleotide sequence at SEQ ID NO 35287
actaggtaccacgttacgtatcgggctggtgtgatggtcctcctgctgattgcccgactttcaggagccttctttagatgatagattactctgctcgctttcccatcgtcgcattctcttgcatcgttaagaaacagactggtcatgattggacctttcatctgaccactcggccgtcagacatgcagcattgaactaacagccagaaggcgccactagaagtggaaaaaccttaacagctggaagtggaaagactcattgatttcaatttcatgccgccgtgagaataagcctcttctgtagccttatcaggcagtcatcttgctatcacttctgcagtgttatatattgaggacttctgtcccctaccgagccaattgccgttggcaagtcactcagtcttttctgtattaatgcagtcagcagagcggagtggattttcggcaacacctcgcctctctttgctttgataagtagcctcggtgaaaacatcagcagatagatactgcagagagctgaagtgcaagtctagttctgatgaaaaaacagcaaatcccgacctctcatcaaaggccatcattgcagacttcctctccaagttcttggactacctagttaaaacgggtattctcggagcctcatgatgtagacatacagcgggagttgcaatctcgcaaggcgccttttcatagtccagctagtagctcatcagtatattcatgtaggctatggattaataccacttgccccatttttaatgaagattcatactcctatatatattagattttcattgcacttctatttatttctggagaggtttatagggctcgtgcccaaagctctattactatataaactcatttcaatcagacttcagtttggatcttcaacagaaacggcaacaacggtcccactcattatattgaatttatccaacttctctgacggctcactcggtggctttcccgagctgcacaagatggtgacgccaactgtgccaaaacgatttgctctgcttgtcggagtagacttgtatctcaacgacggttcaagacggcacacagatggcagagttgtatctctcacgcacttgaaaggggccttaaacgatgtcacatatattcaatcacttcttcgagatcagtttcaattccatgaattcaccattctcacctgttctccatcccaaaacaacgccagtgttcctcaggagctagtgcatgacaggcccacacatgccaacatcgaaagggcatttgacaatatacgtgacaaggctgatcctggcgatattttctttttccacttctccggacatggcgcgccgttagagccgaccaccaagtcgcctaactttggccatgggaaggacctatctctgatgacggcggacttctgctgtggggaacccgcagtccgagggtggcagctgaacaattggttacgggcatttaataagaagggggttcgagcagtccttcttctcgatagttgctactctggaggggcttatcgagctggtacccagttccgatctcccgagaactggacaccacctcccaacgttcctgcagatgaagccgctgtgcaagggacacagaaaaaacctggtcaccgtgatggagagcttggcgagtgctgggatattaatccgaagggctttgtgctaatggcggcttgtcgaggcacggaaagagcagcagagaaaaatgaggatgggagagtatatggcgcgttcaccctcgcacttatgaagtacttccaagactcgtcgaatccgtcaacttcaacgtaccacgctattcgtgatcgtacagcgagtctgattgcatcatgggacctagtacagaagccccaggttttcggccgggacagattggtgtttctcgaagactatgagccaatttcggctacaccgattttggggatgctaaatgacggcatcgtttctctccctgttggcaaagttcatggcatcagcagaggagccgagttcatcacagttacaacaagttctagaatcatcgtttcgatattcgagactaatgatctagagagcaaggcgaagattgtagggacctcgtttgctcaggatccgccgcagcctattgggttcattccatatcggtggaactcggagaagaccttaaacattatcattgacccaattctagggcgctcatttcaggagaagcttaccattcagctggggaagaagatttctggcaatatccaatacacagaagtggttgaactgaccaagaatcagggcactgaagctacgtggttccaactaggggccaaagagggtggcgacatcgacatcttcggacccgagcaggtcttaggatatcaaggacccgtacgtggttggagaacgggaggagaaaccgatgacgaaagagcaagagaatcagctattgcactagctcacttattccgatttgggcagatttttcacttacgaagcggttcccaggattcagcgccgttccaggtaacggcaataccaacagggaaccatgccggggagtttcgattcaagtttgaaaacaaagggatcgagaaactttatttcgcagttcttatcctcagtccggggtttcatgtcaagcaattatttccaaatgaagatgctctccacacagtacctgcaggcgagatgaaatcattccagtttcgcttattgccacccgagaagctgacgaacaacggagccaatgatggacaacatgaatttcgcgatatcatccgcaccgttgtgagcagcaagcggctatccctcaagagcatggaaatgcctgacatttggaatgctgatcaatgggatcatcagatgttgaatggtttgggcagggatgcagaactttcagaggactttagttggtggatacatgatgtgccaaagttgacgaagataacaagtcaaccacacagcaagactccttaacgctattggaatgatggagacggttgagacttcagtgttacaaaccaacaggataggggcccgttgggaagaccaaatgcagaacccagacgaacgaatatgccatcaagaggtcaatccgagccaacagcacctgacgacagcgagactcaacgccccgcagtgctgatacacaggaacattaccccgccataccctaaaatggtttgcacaagcgtgtgagccccatgaaagtcaaaaccaactgcaaatagcttgagtattgaactcgagagaatcccgaaggcctgaacggtagaaatcccataatgctaaatggatggacctttgatgggatcgatcatcgcgtgatgtgcaccagcgcgtctgcaactaaaaatctatctagctggtgatgaacgccatgtcagtacgcgtatctagtctgctgatgtagttctagctgttctattagccaaggaagaagatacagcacttaaatgagaagccacatgaccaatgcgcattctatactttatgactttcggcccgcgcaacagccatagacaaggccactcaacactatgaaaagcctgcaaccccagctttccgagcgatcgcggaggctggggtgtgaaagtcggggttgatctatttacggcgttccttcgaagcaaccgtcttacaaacatggtcaggagccatgttgagattgtggagggcgtgagagaggattacgtcggctgtataacactcttctctgcgaactccgagtatgtgcattagttgcaaggagactcgaagctacagtcacgcaataagacctgccaatttgccgacgagcacccggataactaccgatatctcggttggtagagatgagaagccacaccctcttttttatttttattttatttttctaaccaaggccggatgcgttggttttcgatgtgtgctcggatatttgtacgagataagacttttcatgaagaggcagtgtaaagtcagctagccatacggctttgagaattaaagcaagatcagaaaaaggaaaggggcaaatcaagactcgacataaaatgtagttcactccccacaaagaaagcagtcatttccttggccacacgacccggggtgaaggaagatgccccgctgggcggcttgcttgtacactctggctcagcctaattcagtgcttgatgagcccgaaaacagggttcgtgtgctagggagccgttttagacgtcgacagcggcactcggtaatgatatgttaatatagagcgtcacgggtagaaaagggtaacttagaagacagctttatccatgcggcctctggcctgtggttgaggctactacgttgagacattatgatatggcccggtctgcaatgacctaatcctcagcatctgcaccacgctttcctgctcgtgaagctatcttttcgtaatccactgccaagctcaaacctctccatcctcgaggtcggagggtagcgggacgtggaacggtcgtgggtctcagtcttgacacgcgttggggcagatttgtcggcagagttgttgtcgcgagaagtctgacgcgtgttggacgtatcgctggggcggtagtgagggaggagaagtgattcgtagtgggccttggccgtggcaccgtcttggaagccggctcgggcggcgagcttgtcctagttgacctgaacatggcgtcagtaggtggtgcaataacagtgggagtaagacgcacaactggcttcgtctcaaagcattcctagactttggcgagagcgatcatgtcgctggcggtgatccggacggaagtcgcagggttggatgccatcttggttgttgtcgcaaggagaagcgagggacggatgatgggaattgcgaagagggcgtttaaatgagaatggagtgattgatgatgcggtaggcagacgttggttttgtcgatcaaagggaaaggaaggcttgaaaacaacgagttacatacagtaggtaaccctagtgagtgcattcccgtttccggatggttggcacttggttttttttaggaaaggtgaggaagtgtatccgaaaggggaaaggagagcccactatttcatcttctgtacatagtgcctaagcaccagcccgagccttcactactagcccgtaagcattgaccatcgagcgacgcatgctgctcgtgattgttgtccattgcccagaccttccatcgatcatagaagctcaatgtggggaatatttcagagtggacaagcaggattgtagggagagtttagaagactgttatatcttttattatttttgagttggggtttgtgcggtatccagccggtgtataccccttgcaggataagaacatcatgagcaacaggccaaggggttttgtttttcaatggtaataaatgacgagttgtgggtatgccaaaatgctaaaaccccttggagcagctcacaattccaaccttcctcttcatgtttgtggggacctgctctccagtcaactt

SEQ ID NO: 35290 - DNA, 246 bp, Muscodor strobelii
  misc_feature: SGI cDNA ID NO. 572216
  misc_feature: Encodes the peptide sequence at SEQ ID NO 35291
atggcgtccaaccccacgacctctggtcgattgggacaagcttgcggcccgagccggtttcaaagatggtgccacggccgaggcccacttctcttccctcgcgaccgcgccggcgagacgcccgacacgcccgacacgcgacagaaccctcgcggcaatgatgctacctcaatgcgagtcaacaccgagacctacgacccttgcatgacccgtcacttctccgactttgaggatggagagatctga

SEQ ID NO: 35291 - protein, 81 aa, Muscodor strobelii
  misc_feature: SGI Peptide ID NO. 572216
MASNPTTSGRLGQACGPSRFQRWCHGRGPLLFPRDRAGETPDTPDTRQNPRGNDATSMRVNTETYDPCMTRHFSDFEDGEI

SEQ ID NO: 35292 - DNA, 2321 bp, Muscodor strobelii
  misc_feature: SGI EST ID NO. CUFF.84007.1
  misc_feature: Variant of the nucleotide sequence at SEQ ID NO 35290
cagagaataacatagagcattacttggctaagacggcaagaccgcttgcagtaatacccaaagaacaacctttgctggtgacttttatattttgaaggcataaatatatcgcagattgaattaggaaagcagtaatatagcaaccatgaaggatgacaaaggaaacgatatatcgagagagagaaaaaactacagcctcatgcccgttctctgccgcccgccacaatggcgttcggccatggctgtcccagagatctgtcatatatcgtcgcgactgcggggaccacattgcctcgcattgtgtacgcgccagaacgtatgagtctctgcaattctcgaggctgctagtcgaaggtcgacttcgttctcttgctaccaggcagtaaagggtaaagaacgcattgcaagggtagggttgatggggaaggcgtctctcgtagtgtgtacacctgccccgcactgctgaagctggccactgccgtccactccaccccgccagatctctttcctttcaccgcatccacatctacaaccacaaccacactcttcactctcgtcgacttgcctcacactcgacactcacgacccactccatactctataaggccataccatgactagcacgcaggaccgggttcttttctggaaccctgccacctgtccaacatgcggcaaggaccacattccgatcagcaagcaggcgaccatccaagtagtctgccccagtccgaaggagttctaggagagcatcctcgacgaggctacctgggtccaagcatgggatatacgtgacgcctttgctgccttgaaacacgaccagcccttgaacatcgccaccaccatggcaggagtcggcttgcccgccatcaatttggacgatatcgagcgatgggctaatccggatagcacctttggccccgctacccaagcccacgacgccttcgatctgtcggccactgagaccttacgccaactcgagcgatgcgctgacaaagccatgaccctgtccaactccggccgcctcagtcaagtcctgctcgctaccgaggcccagcagaaagtcctcgctactttgtggcacaaataccgcaagatcaacaaggagcagggccgctagatttccccggtccgtcttgatgctggaaactccgttcgcatgcaatggtggagtagaccgtgcagcaaggatactagaggtgctgatcaagaactatcggccgcccgcaggaccaggattgccaaggtcctcgtccctttcattgccgcctggcgtgctgatagccgtgcccatcccatgagcagtgccgtctgtaagagttgtatgtgaacaggatgggaaagatgactacatgcaactgatgagagagctggatggtggtacgcgaggagcatggtagaggaaacgacaaaggaaaagaaaggaagatggacttctggccaagtagatagctggctaagtaaaagcttgactgtttcggattgctaattcggcatggccctcttatgagtgtgtcgctcacttaccgtgatcagcctcgtgctacataagtctagtgtattacctagtgtttacgacttgggggatatggatgaggcatatccatctagtttaacgcctttcagatgtaataaaccactgatctttgactggacgctcgattgtctagggacgtctaccgaagagatatactagggcaggagatagtggttgtggggacgggtataaaccccgctctccccagtgtcaccccaaacaacaccacactaaggtgcgcctcccccacgacgatccaagttagcgtttctgccgacgcggggttagtttagcaaatgggctggggcatgtttcttcaagcccttcttcgttctttctcttgccccccccacgaagaaagccatcgtctagatccaccgcgtaacccacccattctcatccgaataactcttcgcattccaatcatccgttccccttcgttgcggcacaagcacgatggcgtccaaccccacgacctctggtcagatcacggctagcgacatggtggctgtcgccaaagtctaggagtgctttgcgacgaagccaattgtcgattgggacaagcttgcggcccgagccggtttcaaagatggtgccacggccgaggcccacttctcttccctcgcgaccgcgccggcgagacgcccgacacgcccgacacgcgacagaaccctcgcggcaatgatgctacctcaatgcgagtcaacaccgagacctacgacccttgcatgacccgtcacttctccgactttgaggatggagagatctgagctgggagttagacatg

SEQ ID NO: 35293 - DNA, 399 bp, Muscodor strobelii
  misc_feature: SGI cDNA ID NO. 572217
  misc_feature: Encodes the peptide sequence at SEQ ID NO 35294
atgcggcaaggaccacattccgatcagcaagcaggcgaccatccaagtagtctgccccagtccgaaggagttctaggagagcatcctcgacgaggctacctgcccttgaacatcgccaccaccatggcaggagtcggcttgcccgccatcaatttggacgatatcgagcgatgggctaatccggatagcacctttggccccgctacccaagcccacgacgccttcgatctgtcggccactgagaccttacgccaactcgagcgatgcgctgacaaagccatgaccctgtccaactccggccgcctcagtcaagtcctgctcgctaccgaggcccagcagaaagtcctcgctactttgtggcacaaataccgcaagatcaacaaggagcagggccgctag

SEQ ID NO: 35294 - protein, 132 aa, Muscodor strobelii
  misc_feature: SGI Peptide ID NO. 572217
MRQGPHSDQQAGDHPSSLPQSEGVLGEHPRRGYLPLNIATTMAGVGLPAINLDDIERWANPDSTFGPATQAHDAFDLSATETLRQLERCADKAMTLSNSGRLSQVLLATEAQQKVLATLWHKYRKINKEQGR

SEQ ID NO: 35295 - DNA, 2321 bp, Muscodor strobelii; identical to SEQ ID NO: 35292
  misc_feature: SGI EST ID NO. CUFF.84007.1
  misc_feature: Variant of the nucleotide sequence at SEQ ID NO 35293

SEQ ID NO: 35296 - DNA, 705 bp, Muscodor strobelii
  misc_feature: SGI cDNA ID NO. 572218
  misc_feature: Encodes the peptide sequence at SEQ ID NO 35297
atgactgaaccagctgcacagactacggtcgcagacctcgttgcaaccccaattccgttgatggccacggtgccgggtatcaagccacaccctacgatgaatgagttttacacgaaaatttcctttgaccatcttcgagagttgaaagggttcagcttcgaaaatctaaagtgcatgtttggcgacttgtggagcaagccaggagttgtaacagcaaaggagtttgacaagatccaagatgagtcgacagtagagtacatgttggaaaatgagtcggagttaaacgatgccgctaagaaatggatcccgttaattacaaagccctcagtcatacataatgctgctgaactactcgagcgcttcgacgtgaagccaggagacattgttttgaagcctaatcagccgttaaagcaaaagagaaatcttgccatcaccgacaaatcatcaaaaccaaagaaactctctgttgctacgctgcggccagattggcttatcttcaacaagacaggctcagaagatggtgaacatatccatacctatgtcgttggagacgacaagctaagtgccgactttgatccagctttgttagtccatttgggagggattggcggtactgacaacgaaaccggaataaagcattgcgaaactgcgccaaattcgaagttgtcagcggctatgtgggctctgaagcaagttggcacgtaa

SEQ ID NO: 35297 - protein, 234 aa, Muscodor strobelii
  misc_feature: SGI Peptide ID NO. 572218
MTEPAAQTTVADLVATPIPLMATVPGIKPHPTMNEFYTKISFDHLRELKGFSFENLKCMFGDLWSKPGVVTAKEFDKIQDESTVEYMLENESELNDAAKKWIPLITKPSVIHNAAELLERFDVKPGDIVLKPNQPLKQKRNLAITDKSSKPKKLSVATLRPDWLIFNKTGSEDGEHIHTYVVGDDKLSADFDPALLVHLGGIGGTDNETGIKHCETAPNSKLSAAMWALKQVGT

SEQ ID NO: 35298 - DNA, 397 bp, Muscodor strobelii
  misc_feature: SGI EST ID NO. CUFF.83987.0
  misc_feature: Variant of the nucleotide sequence at SEQ ID NO 35296
caaaggagtttgacaagatccaagatgagtcgacagtagagtacatgttggaaaatgagtcggagttaaacgatgccgctaagaaatggatcccgttaattacaaagccctcagtcatacataatgctgctgaactactcgagcgcttcgacgtgaagccaggagacattgttttgaagcctaatcagccgttaaagcaaaagagaaatcttgccatcaccgacaaatcatcaaaaccaaagaaactctctgttgctacgctgcggccagattggcttatcttcaacaagacaggctcagaagatggtgaacatatccatacctatgtcgttggagacgacaagctaagtgccgactttgatccagctttgttagtccatttgggagggattggcgg

SEQ ID NO: 35299 - DNA, 1137 bp, Muscodor strobelii
  misc_feature: SGI cDNA ID NO. 572219
  misc_feature: Elevated expression when VOC is produced
  misc_feature: Encodes the peptide sequence at SEQ ID NO 35300
atggagctcaccaagttcctcgccgttgtggcagccttcctgcccattgcctacggtgccccttcgccagtggcgaacagcctgcacccagacatcctggctgccatgaagcgtgacttgggactggactcccagcaggccacccatcgtgttgctcgggagctcgcacacaccgaggtcatcaacgcgctgaagagctctctgggtgaggctttcgccggcgcttgggtctccgaggagggcaagaccctcaacgttgccgtcagcgacgagaccttggccgccgatgtcaccgctgccggtgccacccccgtgaccgtcgccaacagcctctccaagctcgaggctgctaaggctgcacttgacgccaagtacgttcacgctgagacggtcgccaagagagctgccgaccttggcattgccgcctactacgtcgatgtcacctccaataagcttatcttggaggctctctcgagcaacactgctgaggctgaggccttggccgctgaggtcggactcgctgctggtgagttcgatgtcgtcaccgttgacgctatgcccgagaccttcatcaccgttcagggtggtaccgcctactacatcaacaacgccgcccgctgctccatcggtttcaccgtcaccaccggtttcgtctcggctggtcactgtggtaccaccggcagcgctgcggaggccaccaccggcgcccagatcggaaccttcgctggctccgtcttccccggcaacgccgacatgtcctacatccgcaccacctctggaaataccctttccggcaccatcaacggctacggctctggcaacctccccgtctctggcagcactgttgccggcgtcggatcttccatctgccgatccggatctaccactggtgtccactgcggtaccgtcggtgcccttggcgccaccgtcaactacgccgagggatccgtcactggcctcacccgtaccagcgtctgcgctgagcccggtgactctggcggttctttctactctggtgctcaggcccagggtgtcacctcaggaggttccggtgactgcacccgcggtggaaccacctacttccagcccgtaaacgagattctctccacctacggcctcactctggtccgctcttaa

SEQ ID NO: 35300 - protein, 378 aa, Muscodor strobelii
  misc_feature: SGI Peptide ID NO. 572219
  misc_feature (193)..(368): Pfam Id: PF00089 Pfam Desc: Trypsin
  misc_feature (274)..(368): Pfam Id: PF00089 Pfam Desc: Trypsin
  misc_feature (1)..(377): NCBI GI: 145611928 Blast Desc: MGG_11691 [Magnaporthe grisea 70-15] gi|145019139|gb|EDK03418.1| MGG_11691 [Magnaporthe grisea 70-15]
  misc_feature (1)..(376): NCBI GI: 5042248 Blast Desc: Chymotrypsin [Metarhizium anisopliae] gi|6433954|emb|CAB60729.1| chymotrypsin [Metarhizium anisopliae]
  misc_feature (1)..(377): NCBI GI: 169598102 Blast Desc: SNOG_01849 [Phaeosphaeria nodorum SN15] gi|111068941|gb|EAT90061.1| SNOG_01849 [Phaeosphaeria nodorum SN15]
  misc_feature (32)..(375): NCBI GI: 284031935 Blast Desc: peptidase alpha-lytic pro domain protein [Kribbella flavida DSM 17836] gi|283811228|gb|ADB33067.1| peptidase alpha-lytic pro domain protein [Kribbella flavida DSM 17836]
  misc_feature (3)..(377): NCBI GI: 115374572 Blast Desc: serine protease C [Stigmatella aurantiaca DW4/3-1] gi|115368442|gb|EAU67397.1| serine protease C [Stigmatella aurantiaca DW4/3-1]
  misc_feature (15)..(376): NCBI GI: 124517186 Blast Desc: preprocellulomonadin [Cellulomonas bogoriensis]
  misc_feature (22)..(376): NCBI GI: 270501228 Blast Desc: peptidase S1 and S6 chymotrypsin/Hap [Micromonospora aurantiaca ATCC 27029] gi|270321891|gb|EFA32821.1| peptidase S1 and S6 chymotrypsin/Hap [Micromonospora aurantiaca ATCC 27029]
  misc_feature (32)..(376): NCBI GI: 257055965 Blast Desc: trypsin family protease proenzyme [Saccharomonospora viridis DSM 43017] gi|256585837|gb|ACU96970.1| trypsin family protease proenzyme [Saccharomonospora viridis DSM 43017]
  misc_feature (19)..(378): NCBI GI: 282866384 Blast Desc: peptidase alpha-lytic pro domain protein [Streptomyces sp. ACTE] gi|282558780|gb|EFB64337.1| peptidase alpha-lytic pro domain protein [Streptomyces sp. ACTE]
  misc_feature (30)..(375): NCBI GI: 21223051 Blast Desc: serine protease precursor [Streptomyces coelicolor A3(2)] gi|7288066|emb|CAB81861.1| serine protease precursor [Streptomyces coelicolor A3(2)]
  misc_feature (9)..(376): SWISSPROT Homolog: EC 3.4.21.12 Alpha-lytic endopeptidase
  misc_feature: Useful for introducing or modulating the production of volatile compounds
MELTKFLAVVAAFLPIAYGAPSPVANSLHPDILAAMKRDLGLDSQQATHRVARELAHTEVINALKSSLGEAFAGAWVSEEGKTLNVAVSDETLAADVTAAGATPVTVANSLSKLEAAKAALDAKYVHAETVAKRAADLGIAAYYVDVTSNKLILEALSSNTAEAEALAAEVGLAAGEFDVVTVDAMPETFITVQGGTAYYINNAARCSIGFTVTTGFVSAGHCGTTGSAAEATTGAQIGTFAGSVFPGNADMSYIRTTSGNTLSGTINGYGSGNLPVSGSTVAGVGSSICRSGSTTGVHCGTVGALGATVNYAEGSVTGLTRTSVCAEPGDSGGSFYSGAQAQGVTSGGSGDCTRGGTTYFQPVNEILSTYGLTLVRS

SEQ ID NO: 35301 - DNA, 1617 bp, Muscodor strobelii
  misc_feature: SGI cDNA ID NO. 572220
  misc_feature: Reduced expression when VOC is produced
  misc_feature: Encodes the peptide sequence at SEQ ID NO 35302
atgagtaccaccgtcgttagtcagactataagcgatagattcgagactgaaagttcgtcggtttgggctcaaaatcggacatctgtcgcctcggaaaacagttatgcgcttcaagagcgactcacgaacccgccgcttgagaccagccattctcatcaggcaaaatcacgtctagcgctcaccttggctgtactgcaaccatgcctcgtgagcttcttctcaagtttctcaaatggcatcatcacagtcggtcttccgacaatcgcagcggcagtctctcttgagcgcgggctttacacatggccttcttccgtcttcggtctgacatccgggtctcttcttctggtcgccggtgcagtctcagatctactaggcgccagatatgtcgagcttttcggcattctcctgctcggtgtagcaaccattgcatgtggactttcaacaactggtatccagcttatcattttccgggcactgcaaggcgtcgcgcttgcggcgcatctaccagcctcggtttctctggtgtccgcagcactaccgagtggcaaggtgagaaatattggtttcgcgtgcctgggactcagtcaaccactaggctttgcttttgggcttgtcctcggcggtatccttatccaacgcgttgggtgggcaattgggttctacctagcgggtggcccagtcctagctatcgcgttcgttggctattggacattgcccaaaccgccaaatgaccaaattcgagatgtgggtgcgaagaccattctccgaaaactgtacaccgacatcgattggattggtgccggtctcgcgagtctcggcttggccttactgtcatacgttcttgcgtttctaagcgcagacctgaacagtgtcagggctccagcaaatgccagtctgcttgcgatcagcttcgcatcactagctgcattcccaatatggatgcactatcgcgagaagaaggggaagtcggcacttattcccaattctttgtggaagaagttaccattcacgactgtttgtatcatgctggcgctcacctatggtcaacaaaattctatggaactgtactcaagtctgtatttccaggaagtccaatctgcctcaacgcttacgacttcgctttatctactgcccaacttgacagcagggacactcatcaatttagcaatgggcctagtcgttcatcgcatctctgctcgctggcttgttgcgggcgcctgtctgctttgcgcgatcggcccgctcttgatggctattgtgaacccagactggagctactggtacctagaattctgggctcagatcttcgcaccactaggcggcgatgtgctgttcaccgttggtctactcgtagtatctgatagtttcccggagaaaactcagagtcttgccggcgctgtgttcaacactgcggcgcaactgggtcttacgctcggtgtcggtatctgccaggtcgtgtccctgagtgtcgaagaggagagtggttccgcagagaatgcattgctcaagggctaccgagctagtttctggacccagacggcatatatgctgacatgtgttgtccttgcaattactgggttgcgacgtattggcactgtgggtctgaagagggagtaa

SEQ ID NO: 35302 - protein, 538 aa, Muscodor strobelii
  misc_feature: SGI Peptide ID NO. 572220
  misc_feature (67)..(480): Pfam Id: PF07690 Pfam Desc: Major Facilitator Superfamily
  misc_feature (1)..(538): NCBI GI: 169612882 Blast Desc: SNOG_09569 [Phaeosphaeria nodorum SN15] gi|111061714|gb|EAT82834.1| SNOG_09569 [Phaeosphaeria nodorum SN15]
  misc_feature (30)..(538): NCBI GI: 169617293 Blast Desc: SNOG_11824 [Phaeosphaeria nodorum SN15] gi|160703380|gb|EAT80868.2| SNOG_11824 [Phaeosphaeria nodorum SN15]
  misc_feature (29)..(538): NCBI GI: 145229617 Blast Desc: An01g06940 [Aspergillus niger] gi|134055225|emb|CAK43812.1| protein product [Aspergillus niger]
  misc_feature (53)..(538): NCBI GI: 256728372 Blast Desc: NECHADRAFT_87739 [Nectria haematococca mpVI 77-13-4]
  misc_feature (33)..(538): NCBI GI: 115402835 Blast Desc: conserved [Aspergillus terreus NIH2624] gi|114189340|gb|EAU31040.1| conserved [Aspergillus terreus NIH2624]
  misc_feature (70)..(538): NCBI GI: 212543215 Blast Desc: MFS transporter, [Penicillium marneffei ATCC 18224] gi|210066669|gb|EEA20762.1| MFS transporter, [Penicillium marneffei ATCC 18224]
  misc_feature (38)..(537): NCBI GI: 46114778 Blast Desc: FG03231.1 [Gibberella zeae PH-1]
  misc_feature (28)..(538): NCBI GI: 121700460 Blast Desc: MFS transporter, [Aspergillus clavatus NRRL 1] gi|119396637|gb|EAW07069.1| MFS transporter, [Aspergillus clavatus NRRL 1]
  misc_feature (3)..(538): NCBI GI: 171678119 Blast Desc: protein product [Podospora anserina] gi|170937129|emb|CAP61786.1| protein product [Podospora anserina]
  misc_feature (74)..(538): NCBI GI: 238482279 Blast Desc: MFS transporter, [Aspergillus flavus NRRL3357] gi|220700428|gb|EED56766.1| MFS transporter, [Aspergillus flavus NRRL3357]
  misc_feature: Useful for introducing or modulating the production of volatile compounds
MSTTVVSQTISDRFETESSSVWAQNRTSVASENSYALQERLTNPPLETSHSHQAKSRLALTLAVLQPCLVSFFSSFSNGIITVGLPTIAAAVSLERGLYTWPSSVFGLTSGSLLLVAGAVSDLLGARYVELFGILLLGVATIACGLSTTGIQLIIFRALQGVALAAHLPASVSLVSAALPSGKVRNIGFACLGLSQPLGFAFGLVLGGILIQRVGWAIGFYLAGGPVLAIAFVGYWTLPKPPNDQIRDVGAKTILRKLYTDIDWIGAGLASLGLALLSYVLAFLSADLNSVRAPANASLLAISFASLAAFPIWMHYREKKGKSALIPNSLWKKLPFTTVCIMLALTYGQQNSMELYSSLYFQEVQSASTLTTSLYLLPNLTAGTLINLAMGLVVHRISARWLVAGACLLCAIGPLLMAIVNPDWSYWYLEFWAQIFAPLGGDVLFTVGLLVVSDSFPEKTQSLAGAVFNTAAQLGLTLGVGICQVVSLSVEEESGSAENALLKGYRASFWTQTAYMLTCVVLAITGLRRIGTVGLKRE

SEQ ID NO: 35303 - DNA, 2098 bp, Muscodor strobelii
  misc_feature: SGI EST ID NO. CUFF.84011.2
  misc_feature: Variant of the nucleotide sequence at SEQ ID NO 35301
ccacagtccagatttttcaatgacgcatttgcgaattcttcacgtaagactgtcattgatcgatcctgggaaatatcttttttaactgtatcttaaagtcgtcaatcaccgcgcaatctaagccttcgctcactgatcagtgtttcatgagttgatgcagttaatagcaggcattgtcggagttcggagcttaatctgcgacgcttaattggccaattggaaattcacctggtgcgagcgctgcatcatacagttaatgatgagtaccaccgtcgttagtcagactataagcgatagattcgagactgaaagttcgtcggtttgggctcaaaatcggacatctgtcgcctcggaaaacagttatgcgcttcaagagcgactcacgaacccgccgcttgagaccagccattctcatcaggcaaaatcacgtctagcgctcaccttggctgtactgcaaccatgcctcgtgagcttcttctcaagtttctcaaatggcatcatcacagtcggtcttccgacaatcgcagcggcagtctctcttgagcgcgggctttacacatggccttcttccgtcttcggtctgacatccgggtctcttcttctggtcgccggtgcagtctcagatctactaggcgccagatatgtcgagcttttcggcattctcctgctcggtgtagcaaccattgcatgtggactttcaacaactggtatccagcttatcattttccgggcactgcaaggcgtcgcgcttgcggcgcatctaccagcctcggtttctctggtgtccgcagcactaccgagtggcaaggtgagaaatattggtttcgcgtgcctgggactcagtcaaccactaggctttgcttttgggcttgtcctcggcggtatccttatccaacgcgttgggtgggcaattgggttctacctagcgggtggcccagtcctagctatcgcgttcgttggctattggacattgcccaaaccgccaaatgaccaaattcgagatgtgggtgcgaagaccattctccgaaaactgtacaccgacatcgattggattggtgccggtctcgcgagtctcggcttggccttactgtcatacgttcttgcgtttctaagcgcagacctgaacagtgtcagggctccagcaaatgccagtctgcttgcgatcagcttcgcatcactagctgcattcccaatatggatgcactatcgcgagaagaaggggaagtcggcacttattcccaattctttgtggaagaagttaccattcacgactgtttgtatcatgctggcgctcacctatggtcaacaaaattctatggaactgtactcaagtctgtatttccaggaagtccaatctgcctcaacgcttacgacttcgctttatctactgcccaacttgacagcagggacactcatcaatttagcaatgggcctagtcgttcatcgcatctctgctcgctggcttgttgcgggcgcctgtctgctttgcgcgatcggcccgctcttgatggctattgtgaacccagactggagctactggtacctagaattctgggctcagatcttcgcaccactaggcggcgatgtgctgttcaccgttggtctactcgtagtatctgatagtttcccggagaaaactcagagtcttgccggcgctgtgttcaacactgcggcgcaactgggtcttacgctcggtgtcggtatctgccaggtcgtgtccctgagtgtcgaagaggagagtggttccgcagagaatgcattgctcaagggctaccgagctagtttctggacccagacggcatatatgctgacatgtgttgtccttgcaattactgggttgcgacgtattggcactgtgggtctgaagagggagtaaactagctgtatttatcaacatggctgaggaaactgaatcatgcgagggagatcgcattcgactgcaccatgtccaagacagtgaactactcatggcgagagcaatgggctgtggcgaagttggctgctacgaattgacaatacgtagaacacgagaccatcttggctgcttagcatgtatatagctgtacaaatatcacgaaaggaacccattttaagtaag

SEQ ID NO: 35304 - DNA, 1656 bp, Muscodor strobelii
  misc_feature: SGI cDNA ID NO. 572221
  misc_feature: Elevated expression when VOC is produced
  misc_feature: Encodes the peptide sequence at SEQ ID NO 35305
atggagcttcttcattacgtatctatcgctggcgtgtacagcctaattgccgccacgtcctatctgttcttagtcgcaacataccgcgttctccttcaccctctcagtagatacccaggcccactaaccgccaaactttcaaatctgtacggcgggatccattccatcagcaagagctatcatctggaaacatggcaaaatcatcagaaatatggtcctgttgtacgccaagggcccaatcgacttgtcttcaattcggcaaatgcgatgcaagacatttatacaactactagacttaccaaatcttacgcatatgcgaagtccagaatcgcgcctagtccaacgctctttgacaccatcgagaccgacaagcaccgtcagcgacgcaaggttatgagccaagcgatcactgagaagtccatgcgagaattcgagcctgtcatgctgggccagattgacatcttccttcgacggctccttaaatcagctaagacaggcgagccggtcaacttatcagacagctgccaacgtctcggtgttgacgtagtcggtctgctcgcattcgggtacgagctaaagctcttgacagaagacacatatcaaatcatcccaggttcaatggcgtttgtgaatagtcgcatcaatctgtacctgcaacttcccgaaatctccttcatcgaaccatacatgaagaaggtcggggtcaaacaacgagagaagttcacaggtgttgtacagaatatgatccggacgcgcttgggcaagggtactcacgcacagagagacttatactccttcgttcatgagagcattgagggtgataacaaacagctcatgggcacggagctctgggcagactcaatgttcttcctcactgccggtatgtcaagtaccctctccagctccccctcgacccccaacaagggatcgctggctgactcacatcaaggcggcacaacaacggctaccactatgagctccgtgttctggtatcttcttcgtaatccagaatggcaagagagattagtgcacgagatcaggagcacgttcgatacagccgaagacatccgatctgggtcgaagctctcaagttgtaagtacctgcgcgctgtcattgatgaatcgcttcgcctctctcccccttcgcttgcaattctctggcgagaacaagcatatgatgatccgaagaggggtgagccgctcatcatcgacggccatataattccgcctggtaccgaggttggcgtcagtctctactccctcatgcacaatgaggagtattttccagatccattcgccttcaagccggatcgctggctggcgcccgaggatcccaatgagccagattctagcaaggcagccagagaattggcacatagggcattcacgcccttctctctcggtgcacgaggatgtccaggtaaggcaatggcgtacatggaggatggacttggcatcgcaaagacgctctggtactttgacctgtcgcgtgttccaggaaagcttggcgagattggtggtggtaaggccggtgacaagaagggacgtcaccgcgtcgatgagtatcaactgtatgataatgtgacggccagtcacgatggaccttatgtattgcttaatccccgctcggatttggggaaggatctagtaatctga

SEQ ID NO: 35305 - protein, 551 aa, Muscodor strobelii
  misc_feature: SGI Peptide ID NO. 572221
  misc_feature (39)..(519): Pfam Id: PF00067 Pfam Desc: Cytochrome P450
  misc_feature (320)..(496): Pfam Id: PF00067 Pfam Desc: Cytochrome P450
  misc_feature (9)..(542): NCBI GI: 121710976 Blast Desc: benzoate 4-monooxygenase cytochrome P450 [Aspergillus clavatus NRRL 1] gi|119401254|gb|EAW11678.1| benzoate 4-monooxygenase cytochrome P450 [Aspergillus clavatus NRRL 1]
  misc_feature (15)..(542): NCBI GI: 145256217 Blast Desc: An10g00660 [Aspergillus niger CBS 513.88] gi|134078632|emb|CAK40505.1| protein product [Aspergillus niger]
  misc_feature (25)..(542): NCBI GI: 255954725 Blast Desc: Pc21g10830 [Penicillium chrysogenum Wisconsin 54-1255] gi|211589826|emb|CAP95980.1| Pc21g10830 [Penicillium chrysogenum Wisconsin 54-1255]
  misc_feature (15)..(546): NCBI GI: 85092131 Blast Desc: NCU06895 [Neurospora crassa OR74A] gi|28920645|gb|EAA30006.1| conserved [Neurospora crassa OR74A]
  misc_feature (16)..(542): NCBI GI: 169782556 Blast Desc: [Aspergillus oryzae RIB40] gi|83774484|dbj|BAE64607.1| protein product [Aspergillus oryzae]
  misc_feature (2)..(542): NCBI GI: 242771379 Blast Desc: cytochrome P450, [Talaromyces stipitatus ATCC 10500] gi|218721449|gb|EED20867.1| cytochrome P450, [Talaromyces stipitatus ATCC 10500]
  misc_feature (1)..(545): NCBI GI: 169596678 Blast Desc: SNOG_01106 [Phaeosphaeria nodorum SN15] gi|111071481|gb|EAT92601.1| SNOG_01106 [Phaeosphaeria nodorum SN15]
  misc_feature (16)..(542): NCBI GI: 238492179 Blast Desc: cytochrome P450, [Aspergillus flavus NRRL3357] gi|220695820|gb|EED52162.1| cytochrome P450, [Aspergillus flavus NRRL3357]
  misc_feature (21)..(537): NCBI GI: 256733020 Blast Desc: [Nectria haematococca mpVI 77-13-4]
  misc_feature (21)..(537): NCBI GI: 46123381 Blast Desc: FG06068.1 [Gibberella zeae PH-1]
  misc_feature (35)..(481): SWISSPROT Homolog: EC 1.14.13.12 Benzoate 4-monooxygenase
  misc_feature: Useful for introducing or modulating the production of volatile compounds
MELLHYVSIAGVYSLIAATSYLFLVATYRVLLHPLSRYPGPLTAKLSNLYGGIHSISKSYHLETWQNHQKYGPVVRQGPNRLVFNSANAMQDIYTTTRLTKSYAYAKSRIAPSPTLFDTIETDKHRQRRKVMSQAITEKSMREFEPVMLGQIDIFLRRLLKSAKTGEPVNLSDSCQRLGVDVVGLLAFGYELKLLTEDTYQIIPGSMAFVNSRINLYLQLPEISFIEPYMKKVGVKQREKFTGVVQNMIRTRLGKGTHAQRDLYSFVHESIEGDNKQLMGTELWADSMFFLTAGMSSTLSSSPSTPNKGSLADSHQGGTTTATTMSSVFWYLLRNPEWQERLVHEIRSTFDTAEDIRSGSKLSSCKYLRAVIDESLRLSPPSLAILWREQAYDDPKRGEPLIIDGHIIPPGTEVGVSLYSLMHNEEYFPDPFAFKPDRWLAPEDPNEPDSSKAARELAHRAFTPFSLGARGCPGKAMAYMEDGLGIAKTLWYFDLSRVPGKLGEIGGGKAGDKKGRHRVDEYQLYDNVTASHDGPYVLLNPRSDLGKDLVI

SEQ ID NO: 35306 - DNA, 2127 bp, Muscodor strobelii
  misc_feature: SGI EST ID NO. CUFF.84128.3
  misc_feature: Variant of the nucleotide sequence at SEQ ID NO 35304
gcgactgctacctaacgtctcatagacacgttaagacgccaagcccctgacaggcagaaacttggatatgggagctccagtatctggatactcgcgctctgacatctgcgggcatccgcctttcctcacctttgagatacggctctgcccggcgtatatcatgggagcataattgctctctattcctcttcagccaccttcgcgttactaggatcaactatcgggcaacccgttttcgtctagcatcatggagcttcttcattacgtatctatcgctggcgtgtacagcctaattgccgccacgtcctatctgttcttagtcgcaacataccgcgttctccttcaccctctcagtagatacccaggcccactaaccgccaaactttcaaatctgtacggcgggatccattccatcagcaagagctatcatctggaaacatggcaaaatcatcagaaatatggtcctgttgtacgccaagggcccaatcgacttgtcttcaattcggcaaatgcgatgcaagacatttatacaactactagacttaccaaatcttacgcatatgcgaagtccagaatcgcgcctagtccaacgctctttgacaccatcgagaccgacaagcaccgtcagcgacgcaaggttatgagccaagcgatcactgagaagtccatgcgagaattcgagcctgtcatgctgggccagattgacatcttccttcgacggctccttaaatcagctaagacaggcgagccggtcaacttatcagacagctgccaacgtctcggtgttgacgtagtcggtctgctcgcattcgggtacgagctaaagctcttgacagaagacacatatcaaatcatcccaggttcaatggcgtttgtgaatagtcgcatcaatctgtacctgcaacttcccgaaatctccttcatcgaaccatacatgaagaaggtcggggtcaaacaacgagagaagttcacaggtgttgtacagaatatgatccggacgcgcttgggcaagggtactcacgcacagagagacttatactccttcgttcatgagagcattgagggtgataacaaacagctcatgggcacggagctctgggcagactcaatgttcttcctcactgccggcggcacaacaacggctaccactatgagctccgtgttctggtatcttcttcgtaatccagaatggcaagagagattagtgcacgagatcaggagcacgttcgatacagccgaagacatccgatctgggtcgaagctctcaagttgtaagtacctgcgcgctgtcattgatgaatcgcttcgcctctctcccccttcgcttgcaattctctggcgagaacaagcatatgatgatccgaagaggggtgagccgctcatcatcgacggccatataattccgcctggtaccgaggttggcgtcagtctctactccctcatgcacaatgaggagtattttccagatccattcgccttcaagccggatcgctggctggcgcccgaggatcccaatgagccagattctagcaaggcagccagagaattggcacatagggcattcacgcccttctctctcggtgcacgaggatgtccaggtaaggcaatggcgtacatggaggatggacttggcatcgcaaagacgctctggtactttgacctgtcgcgtgttccaggaaagcttggcgagattggtggtggtaaggccggtgacaagaagggacgtcaccgcgtcgatgagtatcaactgtatgataatgtgacggccagtcacgatggaccttatgtattgcttaatccccgctcggatttggggaaggatctagtaatctgagcatatccggttcatacttcagtcgcgtatggcgtcggactgccaaagactgactgggaacttcgcaacaattgattttagaccctggcgtcatcaaggctggaacgcgtagttgtataacatatgcatgattttttgcactcataagcgcgtctttagcgccccgtgctgaactgaatcgatgacgtgaactcggcaggaagtacgcgacgccagaacggtgctgaaaatccagcgcattatcggccgtagcaatggacaccagggcaccatttcaattacttcagtctcgc

SEQ ID NO: 35307 - DNA, 1473 bp, Muscodor strobelii
  misc_feature: SGI cDNA ID NO. 572222
  misc_feature: Reduced expression when VOC is produced
  misc_feature: Encodes the peptide sequence at SEQ ID NO 35308
atgactgacttggtgcgacttcgtcttgtaggtcctgttgtacgccaagggcccaatcgacttgtcttcaattcggcaaatgcgatgcaagacatttatacaactactagacttaccaaatcttacgcatatgcgaagtccagaatcgcgcctagtccaacgctctttgacaccatcgagaccgacaagcaccgtcagcgacgcaaggttatgagccaagcgatcactgagaagtccatgcgagaattcgagcctgtcatgctgggccagattgacatcttccttcgacggctccttaaatcagctaagacaggcgagccggtcaacttatcagacagctgccaacgtctcggtgttgacgtagtcggtctgctcgcattcgggtacgagctaaagctcttgacagaagacacatatcaaatcatcccaggttcaatggcgtttgtgaatagtcgcatcaatctgtacctgcaacttcccgaaatctccttcatcgaaccatacatgaagaaggtcggggtcaaacaacgagagaagttcacaggtgttgtacagaatatgatccggacgcgcttgggcaagggtactcacgcacagagagacttatactccttcgttcatgagagcattgagggtgataacaaacagctcatgggcacggagctctgggcagactcaatgttcttcctcactgccggtatgtcaagtaccctctccagctccccctcgacccccaacaagggatcgctggctgactcacatcaaggcggcacaacaacggctaccactatgagctccgtgttctggtatcttcttcgtaatccagaatggcaagagagattagtgcacgagatcaggagcacgttcgatacagccgaagacatccgatctgggtcgaagctctcaagttgtaagtacctgcgcgctgtcattgatgaatcgcttcgcctctctcccccttcgcttgcaattctctggcgagaacaagcatatgatgatccgaagaggggtgagccgctcatcatcgacggccatataattccgcctggtaccgaggttggcgtcagtctctactccctcatgcacaatgaggagtattttccagatccattcgccttcaagccggatcgctggctggcgcccgaggatcccaatgagccagattctagcaaggcagccagagaattggcacatagggcattcacgcccttctctctcggtgcacgaggatgtccaggtaaggcaatggcgtacatggaggatggacttggcatcgcaaagacgctctggtactttgacctgtcgcgtgttccaggaaagcttggcgagattggtggtggtaaggccggtgacaagaagggacgtcaccgcgtcgatgagtatcaactgtatgataatgtgacggccagtcacgatggaccttatgtattgcttaatccccgctcggatttggggaaggatctagtaatctga

SEQ ID NO: 35308 - protein, 490 aa, Muscodor strobelii
  misc_feature: SGI Peptide ID NO. 572222
  misc_feature (1)..(458): Pfam Id: PF00067 Pfam Desc: Cytochrome P450
  misc_feature (259)..(435): Pfam Id: PF00067 Pfam Desc: Cytochrome P450
  misc_feature (11)..(481): NCBI GI: 121710976 Blast Desc: benzoate 4-monooxygenase cytochrome P450 [Aspergillus clavatus NRRL 1] gi|119401254|gb|EAW11678.1| benzoate 4-monooxygenase cytochrome P450 [Aspergillus clavatus NRRL 1]
  misc_feature (157)..(488): NCBI GI: 156056276 Blast Desc: SS1G_05490 [Sclerotinia sclerotiorum 1980] gi|154703274|gb|EDO03013.1| SS1G_05490 [Sclerotinia sclerotiorum 1980]
  misc_feature (11)..(481): NCBI GI: 145256217 Blast Desc: An10g00660 [Aspergillus niger CBS 513.88] gi|134078632|emb|CAK40505.1| protein product [Aspergillus niger]
  misc_feature (11)..(481): NCBI GI: 255954725 Blast Desc: Pc21g10830 [Penicillium chrysogenum Wisconsin 54-1255] gi|211589826|emb|CAP95980.1| Pc21g10830 [Penicillium chrysogenum Wisconsin 54-1255]
  misc_feature (19)..(481): NCBI GI: 145241738 Blast Desc: An09g02000 [Aspergillus niger] gi|134078055|emb|CAK40138.1| protein product [Aspergillus niger]
  misc_feature (11)..(481): NCBI GI: 242771379 Blast Desc: cytochrome P450, [Talaromyces stipitatus ATCC 10500] gi|218721449|gb|EED20867.1| cytochrome P450, [Talaromyces stipitatus ATCC 10500]
  misc_feature (11)..(485): NCBI GI: 85092131 Blast Desc: NCU06895 [Neurospora crassa OR74A] gi|28920645|gb|EAA30006.1| conserved [Neurospora crassa OR74A]
  misc_feature (10)..(482): NCBI GI: 258572362 Blast Desc: conserved [Uncinocarpus reesii 1704] gi|237905213|gb|EEP79614.1| conserved [Uncinocarpus reesii 1704]
  misc_feature (11)..(484): NCBI GI: 169596678 Blast Desc: SNOG_01106 [Phaeosphaeria nodorum SN15] gi|111071481|gb|EAT92601.1| SNOG_01106 [Phaeosphaeria nodorum SN15]
  misc_feature (11)..(476): NCBI GI: 46123381 Blast Desc: FG06068.1 [Gibberella zeae PH-1]
  misc_feature (55)..(420): SWISSPROT Homolog: EC 1.14.13.12 Benzoate 4-monooxygenase
  misc_feature: Useful for introducing or modulating the production of volatile compounds
MTDLVRLRLVGPVVRQGPNRLVFNSANAMQDIYTTTRLTKSYAYAKSRIAPSPTLFDTIETDKHRQRRKVMSQAITEKSMREFEPVMLGQIDIFLRRLLKSAKTGEPVNLSDSCQRLGVDVVGLLAFGYELKLLTEDTYQIIPGSMAFVNSRINLYLQLPEISFIEPYMKKVGVKQREKFTGVVQNMIRTRLGKGTHAQRDLYSFVHESIEGDNKQLMGTELWADSMFFLTAGMSSTLSSSPSTPNKGSLADSHQGGTTTATTMSSVFWYLLRNPEWQERLVHEIRSTFDTAEDIRSGSKLSSCKYLRAVIDESLRLSPPSLAILWREQAYDDPKRGEPLIIDGHIIPPGTEVGVSLYSLMHNEEYFPDPFAFKPDRWLAPEDPNEPDSSKAARELAHRAFTPFSLGARGCPGKAMAYMEDGLGIAKTLWYFDLSRVPGKLGEIGGGKAGDKKGRHRVDEYQLYDNVTASHDGPYVLLNPRSDLGKDLVI

SEQ ID NO: 35309 - DNA, 2127 bp, Muscodor strobelii; identical to SEQ ID NO: 35306
  misc_feature: SGI EST ID NO. CUFF.84128.3
  misc_feature: Variant of the nucleotide sequence at SEQ ID NO 35307

SEQ ID NO: 35310 - DNA, 660 bp, Muscodor strobelii
  misc_feature: SGI cDNA ID NO. 572223
  misc_feature: Encodes the peptide sequence at SEQ ID NO 35311
atgcggtttctttgtttccatgggaagggtacgaatgcgaagatattcgagcaacagacagagaacattcggcatgcgcttgggccggagcatgagttcgtttttgtgaatggaacggtctcagtcaaatcgatgaatggtattcacagccagaaatatcaagaccaacttgaacagtatctcagcttcgacgtgttcaacgtagagcagttcgaaggtctgtacatgaaactaaggaagtatatcaagtcttcagagccttttgacggagtcatggggttttctgagggggcaaccttggccgcatcgatggttttccggcaaaggtcacagccaagacaggacaagttcaaatgcgccatcttcttctcttcaataaccccattgagtattcatgcttctatagaaggagaacttcgtttcttgtccaagtctatcgatggatctttgatcaatctccccacagtacacatatggtcaaacacagatactactcctccgggggtgggacaagtcctagcggatctatgctgcgcagatagtcggcagatagtacaacatagcatgggtcacgaagtaccagggtcatactctgacggaggactggcggagtcagtgcgtgctattgaacgtgtaattgaaatgacgaagtcatcgtaa

SEQ ID NO: 35311 - protein, 219 aa, Muscodor strobelii
  misc_feature: SGI Peptide ID NO. 572223
  misc_feature (1)..(219): Pfam Id: PF03959 Pfam Desc: Serine hydrolase (FSH1)
  misc_feature (1)..(216): NCBI GI: 242810819 Blast Desc: DUF341 domain protein [Talaromyces stipitatus ATCC 10500] gi|218716286|gb|EED15708.1| DUF341 domain protein [Talaromyces stipitatus ATCC 10500]
  misc_feature (1)..(213): NCBI GI: 242821117 Blast Desc: conserved [Talaromyces stipitatus ATCC 10500] gi|218712537|gb|EED11962.1| conserved [Talaromyces stipitatus ATCC 10500]
  misc_feature (1)..(214): NCBI GI: 145235491 Blast Desc: An03g05130 [Aspergillus niger] gi|134058079|emb|CAK49165.1| protein product [Aspergillus niger]
  misc_feature (1)..(199): NCBI GI: 238501528 Blast Desc: conserved [Aspergillus flavus NRRL3357] gi|220692235|gb|EED48582.1| conserved [Aspergillus flavus NRRL3357]
  misc_feature (1)..(216): NCBI GI: 145250479 Blast Desc: An15g02140 [Aspergillus niger] gi|134082273|emb|CAK42317.1| protein product [Aspergillus niger]
  misc_feature (1)..(213): NCBI GI: 145244152 Blast Desc: An11g05950 [Aspergillus niger] gi|134079269|emb|CAK40751.1| protein product [Aspergillus niger]
  misc_feature (1)..(194): NCBI GI: 261353179 Blast Desc: DUF341 domain-containing protein [Verticillium albo-atrum VaMs.102]
  misc_feature (1)..(219): NCBI GI: 115386852 Blast Desc: [Aspergillus terreus NIH2624] gi|114190965|gb|EAU32665.1| [Aspergillus terreus NIH2624]
  misc_feature (11)..(213): NCBI GI: 212532261 Blast Desc: conserved [Penicillium marneffei ATCC 18224] gi|210071651|gb|EEA25740.1| conserved [Penicillium marneffei ATCC 18224]
  misc_feature (1)..(213): NCBI GI: 145259393 Blast Desc: An04g10020 [Aspergillus niger] gi|134074981|emb|CAK39061.1| protein product [Aspergillus niger]
MRFLCFHGKGTNAKIFEQQTENIRHALGPEHEFVFVNGTVSVKSMNGIHSQKYQDQLEQYLSFDVFNVEQFEGLYMKLRKYIKSSEPFDGVMGFSEGATLAASMVFRQRSQPRQDKFKCAIFFSSITPLSIHASIEGELRFLSKSIDGSLINLPTVHIWSNTDTTPPGVGQVLADLCCADSRQIVQHSMGHEVPGSYSDGGLAESVRAIERVIEMTKSS

SEQ ID NO: 35312 - DNA, 587 bp, Muscodor strobelii
  misc_feature: SGI EST ID NO. CUFF.84022.0
  misc_feature: Variant of the nucleotide sequence at SEQ ID NO 35310
tggaacggtctcagtcaaatcgatgaatggtattcacagccagaaatatcaagaccaacttgaacagtatctcagcttcgacgtgttcaacgtagagcagttcgaaggtctgtacatgaaactaaggaagtatatcaagtcttcagagccttttgacggagtcatggggttttctgagggggcaaccttggccgcatcgatggttttccggcaaaggtcacagccaagacaggacaagttcaaatgcgccatcttcttctcttcaataaccccattgagtattcatgcttctatagaaggagaacttcgtttcttgtccaagtctatcgatggatctttgatcaatctccccacagtacacatatggtcaaacacagatactactcctccgggggtgggacaagtcctagcggatctatgctgcgcagatagtcggcagatagtacaacatagcatgggtcacgaagtaccagggtcatactctgacggaggactggcggagtcagtgcgtgctattgaacgtgtaattgaaatgacgaagtcatcgtaatagatacttgggtttatactcatgaaatagcctctta

SEQ ID NO: 35313 - DNA, 1713 bp, Muscodor strobelii
  misc_feature: SGI cDNA ID NO. 572224
  misc_feature: Encodes the peptide sequence at SEQ ID NO 35314
atggcttcggcatcgtcgtcccttgcaaatactagccgcgatggctttaacgacaatccaggtaccaattcaaccacagaaaatgatgttaagcttagcggagaagaacgtctttctccgactgctgagaaaaagcaaggacctgggacagaggccagccaggaccacaaaacatatcttcgcggacctcgattctggatgattagttcgataattggcatactgttcttcattgtccatgtcgaaatttccatcgtcaccacgacactggtcgtcattgctagtgacataggcggatttgaacttgccagctggatcttgaccagctatcttctcggctatgtcggtgtcattgtcatgtttgctaagctgagtgacatattcggccgcaaagtcatatatgtaacttgtatcttcatattcaccgtcttctcgggcgcttgtggagctgcgcagtccacgacacaactcatcatactacgagcattccaaggagtcggagggggaggttgcttctccatgagcactgtcttcttgatcgagctggtacctcctcacaagtatgccaagttcgtggcgtttgctgggatctcgatcgccttggctctaacgtcagggccgatcttgggtggcgctattagcacaaacaccacgtggaggtggatttttctgatcaatgttccaatcggtgcctttgctctcttgctagcgatactgggaataccgaacggctttccatttcacgatcagccgcaccgacagctgaagaatacattgtcccggaaaaatctcgcacgagttgatatactgggctcaagtttgatattactcgcaagcttgtccctcacagcaggattccaagaagctgatctccgattcccatggagatctgcctacgttataactcttatcacggtatctggattactatggatagctttattcgcctgggagcggcgagtcacgaaagcggagggagtcatcgagcccgtgttcccttggagatttgtcactgaccgcgtcgttgtcggtgtatacgtcggattcattctactcggtggtccaatgaccgtcacgaactttcagctccctcaaagattccaactcgtcaatcagctctccgccctcgatgccggcgtccgagtcgtgccgttcggtggtgccatacccatcgggaccatcctagcagctaacatactcaataaaacaaagacgccgccgatttacatcgtattagccggggctgcgttacaaatcataggcttttcactcatggcaacgctcccctatacaccatacattccggcaaagatgtatgggtttcagattctagcgggattcggggcgggtgcaaattatcaaactttgtatctaatgataccattcgttgtgcagccccgagacagagccgttggtgttggttccgcaaatcaatttcggatgatgggatccgcttttggcctagcaatcgcaacaactgtattcaatggatacgcgttgccttcgctccgcagcttgggcattgaggattacgatgctgttatcaatgggcgacacactccagggttcgcagactctggttcggatgatgcttacagacgtgtgctagcagaagcatatgatcgccagctgattgtactggcagtcctcgctgctgcccaaatacccgcggccttcttgatgtggaagaagaggcaggtagttctgggctag

SEQ ID NO: 35314 - protein, 570 aa, Muscodor strobelii
  misc_feature: SGI Peptide ID NO. 572224
  misc_feature (72)..(488): Pfam Id: PF07690 Pfam Desc: Major Facilitator Superfamily
  misc_feature (72)..(286): Pfam Id: PF07690 Pfam Desc: Major Facilitator Superfamily
  misc_feature (295)..(488): Pfam Id: PF07690 Pfam Desc: Major Facilitator Superfamily
  misc_feature (119)..(187): Pfam Id: PF00083 Pfam Desc: Sugar (and other) transporter
  misc_feature (5)..(564): NCBI GI: 242773497 Blast Desc: efflux pump antibiotic resistance protein, [Talaromyces stipitatus ATCC 10500] gi|218721871|gb|EED21289.1| efflux pump antibiotic resistance protein, [Talaromyces ATCC
  misc_feature (81)..(567): NCBI GI: 169769094 Blast Desc: [Aspergillus oryzae RIB40] gi|83766875|dbj|BAE57015.1| protein product [Aspergillus oryzae]
  misc_feature (59)..(497): NCBI GI: 154294994 Blast Desc: BC1G_13363 [Botryotinia fuckeliana B05.10] gi|150844492|gb|EDN19685.1| BC1G_13363 [Botryotinia fuckeliana B05.10]
  misc_feature (72)..(567): NCBI GI: 212533541 Blast Desc: multidrug resistance protein fnx1, [Penicillium marneffei ATCC 18224] gi|210072291|gb|EEA26380.1| multidrug resistance protein fnx1, [Penicillium marneffei ATCC 18224]
  misc_feature (29)..(564): NCBI GI: 67526853 Blast Desc: AN3884.2 [Aspergillus nidulans FGSC A4] gi|40739959|gb|EAA59149.1| AN3884.2 [Aspergillus nidulans FGSC A4] gi|259481548|tpe|CBF75171.1| TPA: MFS multidrug transporter,
  misc_feature (14)..(565): NCBI GI: 256728111 Blast Desc: NECHADRAFT_53897 [Nectria haematococca mpVI 77-13-4]
  misc_feature (33)..(565): NCBI GI: 225556984 Blast Desc: drug resistance transporter EmrB/QacA subfamily [Ajellomyces capsulatus G186AR]
  misc_feature (43)..(564): NCBI GI: 156060439 Blast Desc: SS1G_02358 [Sclerotinia sclerotiorum 1980] gi|154699766|gb|EDN99504.1| SS1G_02358 [Sclerotinia sclerotiorum 1980]
  misc_feature (29)..(478): NCBI GI: 238839253 Blast Desc: ComD [Microsporum canis CBS 113480]
  misc_feature (39)..(565): NCBI GI: 212545512 Blast Desc: MFS multidrug transporter, [Penicillium marneffei ATCC 18224] gi|210065879|gb|EEA19973.1| MFS multidrug transporter, [Penicillium marneffei ATCC 18224]
MASASSSLANTSRDGFNDNPGTNSTTENDVKLSGEERLSPTAEKKQGPGTEASQDHKTYLRGPRFWMISSIIGILFFIVHVEISIVTTTLVVIASDIGGFELASWILTSYLLGYVGVIVMFAKLSDIFGRKVIYVTCIFIFTVFSGACGAAQSTTQLIILRAFQGVGGGGCFSMSTVFLIELVPPHKYAKFVAFAGISIALALTSGPILGGAISTNTTWRWIFLINVPIGAFALLLAILGIPNGFPFHDQPHRQLKNTLSRKNLARVDILGSSLILLASLSLTAGFQEADLRFPWRSAYVITLITVSGLLWIALFAWERRVTKAEGVIEPVFPWRFVTDRVVVGVYVGFILLGGPMTVTNFQLPQRFQLVNQLSALDAGVRVVPFGGAIPIGTILAANILNKTKTPPIYIVLAGAALQIIGFSLMATLPYTPYIPAKMYGFQILAGFGAGANYQTLYLMIPFVVQPRDRAVGVGSANQFRMMGSAFGLAIATTVFNGYALPSLRSLGIEDYDAVINGRHTPGFADSGSDDAYRRVLAEAYDRQLIVLAVLAAAQIPAAFLMWKKRQVVLG

SEQ ID NO: 35315 - DNA, 594 bp, Muscodor strobelii
  misc_feature: SGI EST ID NO. CUFF.84026.0
  misc_feature: Variant of the nucleotide sequence at SEQ ID NO 35313
ggcaaagatgtatgggtttcagattctagcgggattcggggcgggtgcaaattatcaaactttgtatctaatgataccattcgttgtgcagccccgagacagagccgttggtgttggttccgcaaatcaatttcggatgatgggatccgcttttggcctagcaatcgcaacaactgtattcaatggatacgcgttgccttcgctccgcagcttgggcattgaggattacgatgctgttatcaatgggcgacacactccagggttcgcagactctggttcggatgatgcttacagacgtgtgctagcagaagcatatgatcgccagctgattgtactggcagtcctcgctgctgcccaaatacccgcggccttcttgatgtggaagaagaggcaggtagttctgggctaggatcatataggtgctctcaacatagtccggtatacacttgccttgtccatgccgtctgactttattaagagacctttcgcggacttatttgtacaataatctctctcaaactacggtgttggctgttttgtggcgtcatgggcattgcactctttatatgactcaatttcctcagtctaagccag

SEQ ID NO: 35316 - DNA, 900 bp, Muscodor strobelii
  misc_feature: SGI cDNA ID NO. 572225
  misc_feature: Encodes the peptide sequence at SEQ ID NO 35317
atgttctttgccaagacggcgattctactagagtggatgcgaatcttcgttcctgatcatactcggaactatttcttctatatctgctgctttctgattgcgctgaactcgggtgtgtatacggcgggcactattgcgaccaactttgcctgcactcctcgagagaaggcatggcatcgatgggtggaaggccactgtatcgatcgtcatcagcttgacaccaactctgctgccttcaacttggcaatcgacgttcttattttgttgctgccacagcgaatcatctggacattgcagatgaccaaaaacaaaaagatcggtgtttccattatcttctcagttggaattctagccgttgtgagcgccgcgggtcggacatacgcaactgtaacactcgactacgggggtgatgtcacatacggtgtctccgtcaaccttctgtgggggtttgccgagcttactgcggtgctgattgtcttttgtatcaccgcggtacctaaagcgatcggtgagagccgaattctcacgaatatcatacactccatcagatcgtggacccgactatctcacgcagaagacgaacgatcggcaaagtccctttcacgatcggccaatagtaaagaacataaaagaaatgtgtatactggtagctcttacgagcatgtggacacgtcagtccctaagatcgtgacccttagcgatgatagcaagtcgggtgattatgaattaggtagcataggtccccaggacgttgaggcccaaaacattctgcgcgtcaccgaaatcaagaccgacgacaagcctgtctcacagtcatcagcgaacaaagctacgcataagctccagcacccatggatggacgcagctcatggcaactcaccaaggactaggcagcgatga

SEQ ID NO: 35317 - protein, 299 aa, Muscodor strobelii
  misc_feature: SGI Peptide ID NO. 572225
  misc_feature (5)..(273): NCBI GI: 256727941 Blast Desc: NECHADRAFT_26479 [Nectria haematococca mpVI 77-13-4]
  misc_feature (3)..(285): NCBI GI: 46118221 Blast Desc: FG04693.1 [Gibberella zeae PH-1]
  misc_feature (5)..(290): NCBI GI: 145607555 Blast Desc: MGG_04339 [Magnaporthe grisea 70-15] gi|145015080|gb|EDJ99648.1| MGG_04339 [Magnaporthe grisea 70-15]
  misc_feature (3)..(290): NCBI GI: 238505010 Blast Desc: conserved [Aspergillus flavus NRRL3357] gi|220689848|gb|EED46198.1| conserved [Aspergillus flavus NRRL3357]
  misc_feature (5)..(285): NCBI GI: 256731204 Blast Desc: NECHADRAFT_85215 [Nectria haematococca mpVI 77-13-4]
  misc_feature (5)..(206): NCBI GI: 145248463 Blast Desc: An13g03450 [Aspergillus niger] gi|134081233|emb|CAK41741.1| protein product [Aspergillus niger]
  misc_feature (1)..(277): NCBI GI: 16945439 Blast Desc: related to integral membrane protein PTH11 [Neurospora crassa]
  misc_feature (1)..(277): NCBI GI: 164423873 Blast Desc: NCU07769 [Neurospora crassa OR74A] gi|157070267|gb|EAA29027.2| [Neurospora crassa OR74A]
  misc_feature (1)..(269): NCBI GI: 238489453 Blast Desc: conserved [Aspergillus flavus NRRL3357] gi|220698352|gb|EED54692.1| conserved [Aspergillus flavus NRRL3357]
  misc_feature (5)..(178): NCBI GI: 169781106 Blast Desc: [Aspergillus oryzae RIB40] gi|83773758|dbj|BAE63883.1| protein product [Aspergillus oryzae]
MFFAKTAILLEWMRIFVPDHTRNYFFYICCFLIALNSGVYTAGTIATNFACTPREKAWHRWVEGHCIDRHQLDTNSAAFNLAIDVLILLLPQRIIWTLQMTKNKKIGVSIIFSVGILAVVSAAGRTYATVTLDYGGDVTYGVSVNLLWGFAELTAVLIVFCITAVPKAIGESRILTNIIHSIRSWTRLSHAEDERSAKSLSRSANSKEHKRNVYTGSSYEHVDTSVPKIVTLSDDSKSGDYELGSIGPQDVEAQNILRVTEIKTDDKPVSQSSANKATHKLQHPWMDAAHGNSPRTRQR

SEQ ID NO: 35318 - DNA, 456 bp, Muscodor strobelii
  misc_feature: SGI cDNA ID NO. 572226
  misc_feature: Encodes the peptide sequence at SEQ ID NO 35319
atgaccgaatatgcgtatcttttccgtcgaaagtctcagcgaggcaaggcattatctactgagctacgaacagccatggagcctattgcagtcattggattctctttcaagcttccaggggacgtcgaagacgacttggcactttggcgtgtacttgaatcaggagagaatctgatgactgaatggcccgttgaccgcctctccaccgatagctttcacgatggaggctcaaaggcccagaacactatacacgcgcgtggcggctactttgtcaaggatgatccggcggctttcgatgccccattcttctcgatgacagcaaaggaggctgccgcaatggatccacagcagcgatggatcttggaaacatcgtatcgagcttttgaaaatggtgcgtttggtatcaagctgaagtcatatttctctaacatttgcaattctagctggtatttctaa

SEQ ID NO: 35319 - protein, 151 aa, Muscodor strobelii
  misc_feature: SGI Peptide ID NO. 572226
  misc_feature (27)..(130): Pfam Id: PF00109 Pfam Desc: Beta-ketoacyl synthase, N-terminal domain
  misc_feature (29)..(149): NCBI GI: 256727768 Blast Desc: NECHADRAFT_46230 [Nectria haematococca mpVI 77-13-4]
  misc_feature (26)..(135): NCBI GI: 46118226 Blast Desc: FG04694.1 [Gibberella zeae PH-1]
  misc_feature (24)..(136): NCBI GI: 145607551 Blast Desc: MGG_12214 [Magnaporthe grisea 70-15] gi|145015078|gb|EDJ99646.1| MGG_12214 [Magnaporthe grisea 70-15]
  misc_feature (26)..(136): NCBI GI: 40806899 Blast Desc: polyketide synthase [Gibberella moniliformis]
  misc_feature (30)..(135): NCBI GI: 45272094 Blast Desc: polyketide synthase [Gibberella zeae]
  misc_feature (14)..(136): NCBI GI: 145250871 Blast Desc: An15g04140 [Aspergillus niger] gi|134082473|emb|CAK97281.1| protein product [Aspergillus niger]
  misc_feature (22)..(138): NCBI GI: 189195356 Blast Desc: phenolpthiocerol synthesis polyketide synthase ppsA [Pyrenophora tritici-repentis Pt-1C-BFP] gi|187979895|gb|EDU46521.1| phenolpthiocerol synthesis polyketide
  misc_feature (12)..(139): NCBI GI: 189188208 Blast Desc: phenolpthiocerol synthesis polyketide synthase ppsA [Pyrenophora tritici-repentis Pt-1C-BFP] gi|187972049|gb|EDU39548.1| phenolpthiocerol synthesis polyketide
  misc_feature (12)..(136): NCBI GI: 40787380 Blast Desc: polyketide synthase [Cochliobolus heterostrophus]
  misc_feature (26)..(139): NCBI GI: 89242103 Blast Desc: polyketide synthase [Alternaria solani]
  misc_feature (22)..(133): SWISSPROT Homolog: EC 2.3.1.111 Mycocerosate synthase
  misc_feature: Useful for fungicidal and/or biocontrol applications
MTEYAYLFRRKSQRGKALSTELRTAMEPIAVIGFSFKLPGDVEDDLALWRVLESGENLMTEWPVDRLSTDSFHDGGSKAQNTIHARGGYFVKDDPAAFDAPFFSMTAKEAAAMDPQQRWILETSYRAFENGAFGIKLKSYFSNICNSSWYF

SEQ ID NO: 35320 - DNA, 7419 bp, Muscodor strobelii
  misc_feature: SGI cDNA ID NO. 572227
  misc_feature: Encodes the peptide sequence at SEQ ID NO 35321
atgggaactacaggaacagctactgctcttattgcaaatagggtcagttggtacttcaacttgaaaggtcctagcgtgtatgtagacacggcatgctccagcagcatggttgcctttgaccttgcgtgcaagtcgttacaagtcggcgatgcttctgcggctgtggttgttggttcgagtttgatgttatcccccgagacatctcttaacctttctaatatgaacttccttggtcccgatggcatatgccatagctttgatcatcgagcgaatggatacgggagggcagagggtatcattgccatcgtactcaagcctctgactcaagcattgagagatggtgacatgattcgagctataattcgagctactggatctaatcaagacgggcatacgcctggtattacacaaccaagcgcagaagctcaagaaacattaatcagacgcgtatacgagagagctggtttgagcttcaacgacactcgctacattgaagcacatggaactggaactctaataggagaccctatagagatgaaggctattgggagagtgtttagaagtagtcgctcacaagacgagccgctttacgtgggttctatcaaatcaaatattggccatcttgaaggtggcagtggtcttgctggagtcctaaaagcgatcctcatgcttgagaaagggcatattcctcccaatgcgcttttcgaaaagatgaatccgcatattgacgcagagttttttcatactgtagttccgactcattgtgtaccatggccggcgcagggaatacgaagggtatctgtaaactctttcggtcttggcggcactaactcccatgctatacttgacgatgcgctgagttacttgaacgatcatggattgacaggcaaccacaatacaaagtcggcagccgataactctcaagctgcctgcaacggtgtctcacatctagaagctgaacatcatagatatccgaagctaaatgggattcgtacacctgatgacaaggtcatggtgaatgggatcaatgggaatcactcaaactcagagtctcaagagaacaccttggagaaacagactcatcggctgttagtctggtcagcagcggacaaaggaacgctgagtcgtatggtccggagttacgaggattattaccaaagcagtatcaacggcgatgccaagtctttaccttccctctcctacacattgtccgagcgacgcagtcgcctaccttggcggacattcgccgtagcaacgtcgtttgttgacataagagacgacgaggacaagccgttctctgctgcgaagttcagtcgtacgtctgacgaagtcgagcttggatttgtctttactggacaaggcgcgcaatatgcgggaatgggcatagaactgctctgctatcccgtattcaagcaaacgctgctgcgagcagaatctgctttccgacgcttgggatgcccgtggtctttggtagacgaattgcagaatgacagcaacataaaccgcccggagtacagccagcctctgtgcactgcccttcaattggcccttgtcgagctcttgaagagcttcggcatcgcccctcgtgctgttgttggtcattcatcgggggaaatagcagcagcctacacgataggagctctctcatttgactcagcgtgtagagttgcttactatcggggcctactcgcaaatcaacttcggagcactgggccatcaggagtgatgatgtccgtgaatctttcggaaaaagacataccaagctatgtagacaagatacagtcctctatctcacgagcctcgatacacatatcgtgcgtgaatagtcctggaaactgtactgtcgctggacgagaagacgtcattgatgaactgaagagatggttggaccaagaccagattttcgcacaaaagataaacacaggagttgcttatcattctccagccatggctgtagtgtcacaactatacgtagatctcatgggacgcctcgagcctggtgaggatgacgagacagatgttgcgatgatctcgtctgtgaccggcaaggcaatctcgtcccgtacactatgcacggcacagtattgggccgacaacttgacgtccaccgtgaggttctcagatgctgcaactgagctcatgcgacagtcaacttcgtcattcgaaagacgaactgtcactgatttcattgaagttggcccgcactccgcccttcggcggccgatactggatattctcaaacaacaccaagccaagtcacggagccaagtcgcatatcactcagtgcttactaagtctagaagcgcagtcgaaacgacattggagttggtcggtcaattgttttgcaagtgttatccggtgtcgataaaaactgcaaaccaacaacctgacggtgaccacaaccaccctgcgtttctagtagactgcccgtcatatccttttgaccattctcggaagtactggttcgagtccagatttagtcgtgactatcgactgcggaagcgtaccggggcgtatctgcttgggaagcaggcgtacgattggaatcccttagagccgaagtggcgcaacatactgagtccaagctccatgccttggctcggcgatcacgtcgtaaacgataccgtgttactaccaggcatggggatgctctcaatggcaatcgaggcactaatccagatgtgtgacgagcaacgtcaagtgtcgggcttttacttcaaggatgcgagttttctgagcccggtaacgatcggcgtcggcgacagcaatgaagaggaaactgagacagtactccaggcacagcccatacggacagaatacgagaaagaatctagcttgtttcaaatcaagctattctcgtatcatggtggtgtctgtagcgagtgcttcaaggccactgcggagatccagtacgttgaagatgccacacaagtagacggcggcaaagaagcgcgtctcgagcaggccgccattacaagtcaatatcaggaggctgtgcggtctgcacaatctatcattgatagcggctcattctataagtactcatccgatgctggcattcgctacggcaagtcgttccagctcctagaggacatacgatgggataacagaggtgccgccgttgcacatatcgatcttgggaaagttgatcaactcgatgggctcaaaatcgaagcacatccggctctgcttgacgccatcatccatctcatgatggttccgctatccaaaggcctgtcagagcagtctgacacccttatcccccataagcttcacaacacgtggatatctgcagacggatggagatcgcatcagacatcgtcgatagaggctctatcgattttgaaagctagccccacgcgttctggagcgagcacaacgacctacgctttagcagacgatggtgccgtcttattctctatcgaggaactcgtgatgaccaccgtgtcgcacaacgaagctacttctaaaaagaaaatgccgctttatgggatcgaatggaaaccacaaatgagtcttctcaacccgactcagctgaacgagattatctattcgatgcctgctagatccgatactgaaatgctgttggatacgaatgcgtcgacgaacggcacaagttcgtccgagactcaagaagatgaaagtactatggtggagtccattcatcggctagaccgcggattgtcatcggcaatgtacaaagtccttgctacattgacggatttcgacttgtcgtcgtcgtcatcgcacatccagaaatttgtagactcgctgagatactacagcaagataatcgcaacccctgaggacacgcttgctggtattaatgacttagaggctcttctagtcgagtgtgaacagaatattcccacgtggggtcttttcccgaccgttgcacgcaatcttgagaatatcatccttggcaagacagacgctctggacctcgtcttctctaccaacctggcagcaggcttttatagttccatatttgctaaagtatgcgatcgccgcttctacaattatctcgacttattgacgcacgaaagtcccactctgaagatccttgaggtcggcgcaggaacaggcggtctcacgtcgcacgttctgaatatacttggagacatcgagcagcaaacgggatcaacgcgattctcgagctacacattcactgacctgtccccaacctttttcgagagcgcgcaggagaagtttataggcttccaggatcgaatggatttccagcgcttcgatgtcagtgacacaagacagaccgagagcggcatcaagtacggcacgtatgatgtagtgatcgctggcagtgtactgcatatcaccgccgacctcaaggccaccgtccgcaaaatccgcagcttgctcaagccaggcggaaaattgttgaatctggagtttgttacaccctctagtccgttcgcctgcgttggcttcggcgtcattcctacttggtggcagagtgccgacaaatggaggcggcatagtccgctggtcacagaagccacgtgggatgccgtattgagagacagcggattctcaggtaatgatgtcgtgataagagattttgaggatgagatctgccacatctcgagcatgatggcatcaacggcaatagtagatgaagagccagcaaagctaaaatgcgttatagtgattgatgacgctatcgctgatcaagtttacctggcagccgccttacagaatcaatcttgttacgcagagatctactcactcgaggggtttcaggccgctatcattgtcgatagtgatatcgtaatatctctccttgaagtaggcaagcccgttctggcgactgtggcgagtactacattcactcatctcaaaacaattgtgcagaaggcgagtaatttgctgtgggtagcatcgtcaagggcaggtgatcagccaacaaaccatgtcatgactgggtttgtaagatctctacgatccgaggcattcgacaaacgcctggcgactctgaatatcgaaatgcggctggatgacatcatgggagattgtatcaagtacgtagaagcagtggttgacgctgttttcgtcgggtcttcccctgaggtggagttcatggttcaagatgggtatctcactacaggccgagtcgtcaaggatgttgagtcaaccgagaccatgcactcgctactatacccccagcgtgagaaagcgccatggcaaacagggcctccgctcgtgttatctattggaacaccaggtctcttggacacgctggaattcaaagacgataccgactatcatgcgcggccacttactcctgatgaagtggaaatcgaagcgaaagcatgggcacttagctttcgcgatgtgttcattgccgctggccgcttgcccggcgaagatatgggattcgaatgtgctgggatagtgactagagtcagttccatcaatgcgagccgtctcggcggcgcggaagtgatacgtccaggagatagggttgtcttgtgcgtgcccggatgcatgcggatgtatccacgaagctctgtcgacacggtgtaccgaatacccgactcgttgtcttttgaagatgctgtagctgcagtgaacccaggtatcacagcatatcatgctttggtaaacatggcacgtctcacgcaaggggagaagatcctcattcactccgcatctggtagcacgggccaaatggccgtttgggtagcgaagatgctgggcgctgaagtatacgtgactgtcggatttgacgagaagaaagacttcttgatgcagagtccattcaacatccccgccgactacatcttctacagtcgtaacaactcgttcgccaaaggtatcatgcgcatcacccatggctatggcgttgatgttgttcttaactcattatctggcagtgcccttcaggcgtcgtgggactgcattgcgccatacggacgcttcgtcgagttgggaaaggcagacattgcggctaactcgtctctccccatgtccggcttcaagaagaatgtctccttcatggcaattgatcttcatcatatttcaatatccaaccctcggctcatgcgcagtgttttgcttgctgtgaaagaactgatcgctgacggtgttatacacaatcccgctcctctttacacgtactccgtatctgatacagagaaagcattccggtctatgcaaagcgggagaaatatgggtagaatcatcttaaccgtgcctaacgatgctggaaaactggtcgtgcctaaattccttcggcggagaagctcttggagttttagcaatgatgcatcatacctagttgccggcggttttggcggtttaggacgttccatcgtaagatggatggtgtctaaaggagtaaaatatctcatgctgccctcgagatcgggtgcctcttcagccgctgcgctatcacttctcgacgaactgcgagctgcaggcgtccatgtagcccattcagcatgcgacgtctcttcgtcttcctcgttggagggattccttcagaactgcgcctccgaaatgccgatgatcagaggatgtatcaatgcaacgatggatcttcaggacggtattttcgaaaacatggcccacgagcaatggcagcgtacgatacgctccaaagtcgacacgtcttggaatttgcatcagctgctgcccaggaatctcgacttcttcattctgctttcctccttgtcgggcatatatggaagcatcgcgcaatccaactacgcgggtggctgcacgtttcaagacgcgttggcctcgcatcgcgccgcatatgacagtaataacggcaacagcttgtccatagacatcggctggatgcgcaccatcggtatcgttgccgagaatgaggagtatcagcgaaatcgcgtgaacgcacgtgacatggcgccgatagaggagtctgaattcctcgcgcttctcaacctcgcgtgtgagccgcgcagcggccttactagccgacggaatcaaattctaattggcgccataactcacgcagacttcatcgcacgtaatgagcagcctatcacgcaggtagaagtaccgctcttctccggttttagtagggttgtcggcggcgcggaccgcctcggaggctcaaaggcggatggggatggagaagactttgcgtcgttatttcgagacgcgtcatcgacagagcggcgttcggctatctttctgcgggcgctagtggcgaagctggcgcgcgctttggcaatcgcttcagatgagattaacgttcgcaagccgctctcgagctacggcgttgactcgctgatggcagtcgagctgaggaactggatcggtcaggattttcgggccaatgtcgctgttttcgacatcatgggcggacgcgcgatgacggcggtcgcagatttggtgacggggaagacagaagtgtcgaatctagctgtataa

SEQ ID NO: 35321 - protein, 2472 aa, Muscodor strobelii
  misc_feature: SGI Peptide ID NO. 572227
  misc_feature (447)..(787): Pfam Id: PF00698 Pfam Desc: Acyl transferase domain
  misc_feature (2095)..(2261): Pfam Id: PF00106 Pfam Desc: short chain dehydrogenase
  misc_feature (1880)..(2029): Pfam Id: PF00107 Pfam Desc: Zinc-binding dehydrogenase
  misc_feature (1)..(110): Pfam Id: PF00109 Pfam Desc: Beta-ketoacyl synthase, N-terminal domain
  misc_feature (118)..(236): Pfam Id: PF02801 Pfam Desc: Beta-ketoacyl synthase, C-terminal domain
  misc_feature (2095)..(2277): Pfam Id: PF08659 Pfam Desc: KR domain
  misc_feature (1355)..(1467): Pfam Id: PF08241 Pfam Desc: Methyltransferase domain
  misc_feature (1355)..(1465): Pfam Id: PF08242 Pfam Desc: Methyltransferase domain
  misc_feature (448)..(753): Pfam Id: PF00698 Pfam Desc: Acyl transferase domain
  misc_feature (4)..(110): Pfam Id: PF00109 Pfam Desc: Beta-ketoacyl synthase, N-terminal domain
  misc_feature (2395)..(2439): Pfam Id: PF00550 Pfam Desc: Phosphopantetheine attachment site
  misc_feature (4)..(2465): NCBI GI: 256727768 Blast Desc: NECHADRAFT_46230 [Nectria haematococca mpVI 77-13-4]
  misc_feature (1)..(2467): NCBI GI: 145607551 Blast Desc: MGG_12214 [Magnaporthe grisea 70-15] gi|145015078|gb|EDJ99646.1| MGG_12214 [Magnaporthe grisea 70-15]
  misc_feature (3)..(2467): NCBI GI: 40806899 Blast Desc: polyketide synthase [Gibberella moniliformis]
  misc_feature (3)..(2467): NCBI GI: 46118226 Blast Desc: FG04694.1 [Gibberella zeae PH-1]
  misc_feature (5)..(2466): NCBI GI: 119497865 Blast Desc: polyketide synthase, [Neosartorya fischeri NRRL 181] gi|119413854|gb|EAW23793.1| polyketide synthase, [Neosartorya fischeri NRRL 181]
  misc_feature (5)..(2466): NCBI GI: 159128679 Blast Desc: polyketide synthase, [Aspergillus fumigatus A1163]
  misc_feature (5)..(2466): NCBI GI: 146322741 Blast Desc: polyketide synthase [Aspergillus fumigatus Af293] gi|129556779|gb|EAL87227.2| polyketide synthase, [Aspergillus fumigatus Af293]
  misc_feature (6)..(2466): NCBI GI: 121711140 Blast Desc: polyketide synthase, [Aspergillus clavatus NRRL 1] gi|119401336|gb|EAW11760.1| polyketide synthase, [Aspergillus clavatus NRRL 1]
  misc_feature (5)..(2467): NCBI GI: 145259396 Blast Desc: An04g10030 [Aspergillus niger] gi|134074982|emb|CAK39062.1| protein product [Aspergillus niger]
  misc_feature (4)..(2467): NCBI GI: 238501530 Blast Desc: polyketide synthase, [Aspergillus flavus NRRL3357] gi|220692236|gb|EED48583.1| polyketide synthase, [Aspergillus flavus NRRL3357]
  misc_feature: Useful for fungicidal and/or biocontrol applications
MGTTGTATALIANRVSWYFNLKGPSVYVDTACSSSMVAFDLACKSLQVGDASAAVVVGSSLMLSPETSLNLSNMNFLGPDGICHSFDHRANGYGRAEGIIAIVLKPLTQALRDGDMIRAIIRATGSNQDGHTPGITQPSAEAQETLIRRVYERAGLSFNDTRYIEAHGTGTLIGDPIEMKAIGRVFRSSRSQDEPLYVGSIKSNIGHLEGGSGLAGVLKAILMLEKGHIPPNALFEKMNPHIDAEFFHTVVPTHCVPWPAQGIRRVSVNSFGLGGTNSHAILDDALSYLNDHGLTGNHNTKSAADNSQAACNGVSHLEAEHHRYPKLNGIRTPDDKVMVNGINGNHSNSESQENTLEKQTHRLLVWSAADKGTLSRMVRSYEDYYQSSINGDAKSLPSLSYTLSERRSRLPWRTFAVATSFVDIRDDEDKPFSAAKFSRTSDEVELGFVFTGQGAQYAGMGIELLCYPVFKQTLLRAESAFRRLGCPWSLVDELQNDSNINRPEYSQPLCTALQLALVELLKSFGIAPRAVVGHSSGEIAAAYTIGALSFDSACRVAYYRGLLANQLRSTGPSGVMMSVNLSEKDIPSYVDKIQSSISRASIHISCVNSPGNCTVAGREDVIDELKRWLDQDQIFAQKINTGVAYHSPAMAVVSQLYVDLMGRLEPGEDDETDVAMISSVTGKAISSRTLCTAQYWADNLTSTVRFSDAATELMRQSTSSFERRTVTDFIEVGPHSALRRPILDILKQHQAKSRSQVAYHSVLTKSRSAVETTLELVGQLFCKCYPVSIKTANQQPDGDHNHPAFLVDCPSYPFDHSRKYWFESRFSRDYRLRKRTGAYLLGKQAYDWNPLEPKWRNILSPSSMPWLGDHVVNDTVLLPGMGMLSMAIEALIQMCDEQRQVSGFYFKDASFLSPVTIGVGDSNEEETETVLQAQPIRTEYEKESSLFQIKLFSYHGGVCSECFKATAEIQYVEDATQVDGGKEARLEQAAITSQYQEAVRSAQSIIDSGSFYKYSSDAGIRYGKSFQLLEDIRWDNRGAAVAHIDLGKVDQLDGLKIEAHPALLDAIIHLMMVPLSKGLSEQSDTLIPHKLHNTWISADGWRSHQTSSIEALSILKASPTRSGASTTTYALADDGAVLFSIEELVMTTVSHNEATSKKKMPLYGIEWKPQMSLLNPTQLNEIIYSMPARSDTEMLLDTNASTNGTSSSETQEDESTMVESIHRLDRGLSSAMYKVLATLTDFDLSSSSSHIQKFVDSLRYYSKIIATPEDTLAGINDLEALLVECEQNIPTWGLFPTVARNLENIILGKTDALDLVFSTNLAAGFYSSIFAKVCDRRFYNYLDLLTHESPTLKILEVGAGTGGLTSHVLNILGDIEQQTGSTRFSSYTFTDLSPTFFESAQEKFIGFQDRMDFQRFDVSDTRQTESGIKYGTYDVVIAGSVLHITADLKATVRKIRSLLKPGGKLLNLEFVTPSSPFACVGFGVIPTWWQSADKWRRHSPLVTEATWDAVLRDSGFSGNDVVIRDFEDEICHISSMMASTAIVDEEPAKLKCVIVIDDAIADQVYLAAALQNQSCYAEIYSLEGFQAAIIVDSDIVISLLEVGKPVLATVASTTFTHLKTIVQKASNLLWVASSRAGDQPTNHVMTGFVRSLRSEAFDKRLATLNIEMRLDDIMGDCIKYVEAVVDAVFVGSSPEVEFMVQDGYLTTGRVVKDVESTETMHSLLYPQREKAPWQTGPPLVLSIGTPGLLDTLEFKDDTDYHARPLTPDEVEIEAKAWALSFRDVFIAAGRLPGEDMGFECAGIVTRVSSINASRLGGAEVIRPGDRVVLCVPGCMRMYPRSSVDTVYRIPDSLSFEDAVAAVNPGITAYHALVNMARLTQGEKILIHSASGSTGQMAVWVAKMLGAEVYVTVGFDEKKDFLMQSPFNIPADYIFYSRNNSFAKGIMRITHGYGVDVVLNSLSGSALQASWDCIAPYGRFVELGKADIAANSSLPMSGFKKNVSFMAIDLHHISISNPRLMRSVLLAVKELIADGVIHNPAPLYTYSVSDTEKAFRSMQSGRNMGRIILTVPNDAGKLVVPKFLRRRSSWSFSNDASYLVAGGFGGLGRSIVRWMVSKGVKYLMLPSRSGASSAAALSLLDELRAAGVHVAHSACDVSSSSSLEGFLQNCASEMPMIRGCINATMDLQDGIFENMAHEQWQRTIRSKVDTSWNLHQLLPRNLDFFILLSSLSGIYGSIAQSNYAGGCTFQDALASHRAAYDSNNGNSLSIDIGWMRTIGIVAENEEYQRNRVNARDMAPIEESEFLALLNLACEPRSGLTSRRNQILIGAITHADFIARNEQPITQVEVPLFSGFSRVVGGADRLGGSKADGDGEDFASLFRDASSTERRSAIFLRALVAKLARALAIASDEINVRKPLSSYGVDSLMAVELRNWIGQDFRANVAVFDIMGGRAMTAVADLVTGKTEVSNLAV

SEQ ID NO: 35322 - DNA, 2419 bp, Muscodor strobelii
  misc_feature: SGI EST ID NO. CUFF.84064.1
  misc_feature: Variant of the nucleotide sequence at SEQ ID NO 35320
ctggagtttgttacaccctctagtccgttcgcctgcgttggcttcggcgtcattcctacttggtggcagagtgccgacaaatggaggcggcatagtccgctggtcacagaagccacgtgggatgccgtattgagagacagcggattctcaggtaatgatgtcgtgataagagattttgaggatgagatctgccacatctcgagcatgatggcatcaacggcaatagtagatgaagagccagcaaagctaaaatgcgttatagtgattgatgacgctatcgctgatcaagtttacctggcagccgccttacagaatcaatcttgttacgcagagatctactcactcgaggggtttcaggccgctatcattgtcgatagtgatatcgtaatatctctccttgaagtaggcaagcccgttctggcgactgtggcgagtactacattcactcatctcaaaacaattgtgcagaaggcgagtaatttgctgtgggtagcatcgtcaagggcaggtgatcagccaacaaaccatgtcatgactgggtttgtaagatctctacgatccgaggcattcgacaaacgcctggcgactctgaatatcgaaatgcggctggatgacatcatgggagattgtatcaagtacgtagaagcagtggttgacgctgttttcgtcgggtcttcccctgaggtggagttcatggttcaagatgggtatctcactacaggccgagtcgtcaaggatgttgagtcaaccgagaccatgcactcgctactatacccccagcgtgagaaagcgccatggcaaacagggcctccgctcgtgttatctattggaacaccaggtctcttggacacgctggaattcaaagacgataccgactatcatgcgcggccacttactcctgatgaagtggaaatcgaagcgaaagcatgggcacttagctttcgcgatgtgttcattgccgctggccgcttgcccggcgaagatatgggattcgaatgtgctgggatagtgactagagtcagttccatcaatgcgagccgtctcggcggcgcggaagtgatacgtccaggagatagggttgtcttgtgcgtgcccggatgcatgcggatgtatccacgaagctctgtcgacacggtgtaccgaatacccgactcgttgtcttttgaagatgctgtagctgcagtgaacccaggtatcacagcatatcatgctttggtaaacatggcacgtctcacgcaaggggagaagatcctcattcactccgcatctggtagcacgggccaaatggccgtttgggtagcgaagatgctgggcgctgaagtatacgtgactgtcggatttgacgagaagaaagacttcttgatgcagagtccattcaacatccccgccgactacatcttctacagtcgtaacaactcgttcgccaaaggtatcatgcgcatcacccatggctatggcgttgatgttgttcttaactcattatctggcagtgcccttcaggcgtcgtgggactgcattgcgccatacggacgcttcgtcgagttgggaaaggcagacattgcggctaactcgtctctccccatgtccggcttcaagaagaatgtctccttcatggcaattgatcttcatcatatttcaatatccaaccctcggctcatgcgcagtgttttgcttgctgtgaaagaactgatcgctgacggtgttatacacaatcccgctcctctttacacgtactccgtatctgatacagagaaagcattccggtctatgcaaagcgggagaaatatgggtagaatcatcttaaccgtgcctaacgatgctggaaaactggtcgtgcctgtaagtcttttctaaactaaatgttgaatgttgacgattgaatcacccaatctaactaccgtcatattgtagaaattccttcggcggagaagctcttggagttttagcaatgatgcatcatacctagttgccggcggttttggcggtttaggacgttccatcgtaagatggatggtgtctaaaggagtaaaatatctcatgctgccctcgagatcgggtgcctcttcagccgctgcgctatcacttctcgacgaactgcgagctgcaggcgtccatgtagcccattcagcatgcgacgtctcttcgtcttcctcgttggagggattccttcagaactgcgcctccgaaatgccgatgatcagaggatgtatcaatgcaacgatggatcttcaggacggtattttcgaaaacatggcccacgagcaatggcagcgtacgatacgctccaaagtcgacacgtcttggaatttgcatcagctgctgcccaggaatctcgacttcttcattctgctttcctccttgtcgggcatatatggaagcatcgcgcaatccaactacgcgggtggctgcacgtttcaag

SEQ ID NO: 35323 - DNA, 2733 bp, Muscodor strobelii
  misc_feature: SGI cDNA ID NO. 572228
  misc_feature: Encodes the peptide sequence at SEQ ID NO 35324
atgcggtccttatgcattttcttgctagcagtgtcgcaagtgtcaggagacgatatagggtttgtcaacggtctgttgaatctctcgattgccaactttgacttctccatcattcgcgattcggggacgctcgcttcattgcgacccgctggccaaaatgagaccgatttcctcccatttgacttgatgacgcgcggtagtcgcctagaaaatggcacatacagttggggagatctgacaatccgataccgccccgtgaacaccagcatgtggatggagagaaactcggcggcagcacgcaccccagtgatagacatcgctggccaggaagatgcaatcgtcgcctcaagtctggatcccactatctctgtcacgcctctagcgttaacgcgggaatggatcgacgtcgacggtgacttaggtcttcgattcaagatcaagaataacgcgattgggtctatcgagactggcagtttaggctttgcaatagcagtgaacaatatcttcaccggtaggaaggctgaggaaatgtatacaaagtgtttcttcgccgacccttatatcgggatggacgctgcctatgttcagatgactcccttgagtggaatcggacctgcccttgttgtgacgcctctcctcaatacatcgacccctatggaggcttatcgttggctggaagaggagagccactctggtaccaggatcggttcgaatggcttcgagggctttttcgaatggcagatcctaacgggcgcatatgctgaaaacgagtgggctggcgtggaaccctggaacaagccttccaccaagatcctatcgcctagcgaagagtacgtgtttggtgttcgcttcagtgttgctgacagtattcgggatatcgacagcgtgctccagcagcgtactcagacaccaacagcgacaagtgtccccggtttcatcatcccacgtgactctccatcgagtctatatctccgctcaccgtctccagtcgccagtctcattgtgagccccgaaggtgctctagtagtgactgaacagcagtcgtcacttgaagaaaatgataattcgcttgtctccttcgtggtgcaacctggcgcgtttgcctttggccgtgtccgtttgagcattacatacgaggatggtgggctgcagacaattcattacttcgtgactaagtctagcaccgaggccgtggcagaccttggtcgcttcctcgctaccgagcattggtttgagaacgatgacccgtttggacgaagtccatctatcatgggctttgataacaaagaacaggcgattatagaacaagatgtacgcactaggcctgcaggcctgagcgatgagggcggtgccggagcttacgtagcattggccatgaagcagattttccacccaaatgtagaggagatcaagaagcttgagaagtttatcgatggcgtcctatggggaacagtccagcgcgaggactactcagtgattcgcagtgcgttctactacgagcctgacctaatgccaaactacatatatgacccgaatatcgactggaattcgggtcaatcaatggatcgcgacactgcatttgagatcaatcgagcctacaactacgtctggcccgctgcggcgtactgggctatgtatcgtgtcggccgggcgtatactgatgtactaacgacacgcgattggagctggtatcttgatcaggcagcgcagactatcttacgctgcatgcagccagatgtcgcgtatactgatgctggactcatgggtgagactgtatttggcagaatcctcgaggatctcctacgtgaagagcacagtgcagtgcagaatgtgtcgagtgtcctagaaaaccgcgcaactctatggtcacaagaggattacccatttggcagtgaaatgtcatgggactcaacgggccaagagggtgtcttttactggtcgagatacttcaatcataccagtacgaaagatgctgctctcaattctgttcttgggtatacaccaacagtccctcactggggttataacggtaatgcgcggcgctattgggatttcgtcgtcgctggcaaggagcaatttgtcgagcgacagatacatcattacgggtcaggacttaatgcgctggcgctgctctctgcgttcaaagacaatccggcagatatctacctattgcgtgttggctacggagctattagcggggctctctccaatatccatggggacgggttcgcctcatgcgccatgcacgcttggcctgagcatctgtattgggatgggtatagcgccgactacgggccgaatttccacggtctttcgctcggatccggtgtgtttctcgtgcaggacccggatctgaaccgactcgtagcatacggtgggttggtcgaggaaagcaacggcactgctaatgtcgtcttggtagatcccatcagacaacggatcttcttgccatctggcacagagatatctatttcagctggcattatcaaatcatttcgatatgatctggcctcgggggcagtgtcgctcacgctcggcagactcccagatgcccctgttgcagcgtctactgtcatatgggtgcgcagcatcagtcgccaccagagtccagaatcgacgactgactatattgtgagcgttgacaataagacagctgttcaggagaggggtggctggcttgtagcaacggtgacagactccgttttagtcgacattaaggacggttcgcagtag

SEQ ID NO: 35324 - protein, 910 aa, Muscodor strobelii
  misc_feature: SGI Peptide ID NO. 572228
  misc_feature (17)..(905): NCBI GI: 238506215 Blast Desc: conserved [Aspergillus flavus NRRL3357] gi|220689022|gb|EED45373.1| conserved [Aspergillus flavus NRRL3357]
  misc_feature (4)..(905): NCBI GI: 115436840 Blast Desc: conserved [Aspergillus terreus NIH2624] gi|114188472|gb|EAU30172.1| conserved [Aspergillus terreus NIH2624]
  misc_feature (26)..(898): NCBI GI: 154305050 Blast Desc: BC1G_08615 [Botryotinia fuckeliana B05.10] gi|150853778|gb|EDN28970.1| BC1G_08615 [Botryotinia fuckeliana B05.10]
  misc_feature (17)..(903): NCBI GI: 256728187 Blast Desc: NECHADRAFT_53801 [Nectria haematococca mpVI 77-13-4]
  misc_feature (17)..(905): NCBI GI: 261361666 Blast Desc: conserved [Verticillium albo-atrum VaMs.102]
  misc_feature (6)..(894): NCBI GI: 255940036 Blast Desc: Pc16g04350 [Penicillium chrysogenum Wisconsin 54-1255] gi|211585410|emb|CAP93105.1| Pc16g04350 [Penicillium chrysogenum Wisconsin 54-1255]
  misc_feature (8)..(905): NCBI GI: 119482483 Blast Desc: NFIA_093360 [Neosartorya fischeri NRRL 181] gi|119409424|gb|EAW19373.1| conserved [Neosartorya fischeri NRRL 181]
  misc_feature (17)..(905): NCBI GI: 71002896 Blast Desc: conserved [Aspergillus fumigatus Af293] gi|66853767|gb|EAL94091.1| conserved [Aspergillus fumigatus Af293] gi|159130181|gb|EDP55295.1| conserved [Aspergillus A1163]
  misc_feature (2)..(905): NCBI GI: 156052521 Blast Desc: SS1G_06426 [Sclerotinia sclerotiorum 1980] gi|154704206|gb|EDO03945.1| SS1G_06426 [Sclerotinia sclerotiorum 1980]
  misc_feature (17)..(905): NCBI GI: 169785239 Blast Desc: [Aspergillus oryzae RIB40] gi|83775828|dbj|BAE65947.1| protein product [Aspergillus oryzae]
MRSLCIFLLAVSQVSGDDIGFVNGLLNLSIANFDFSIIRDSGTLASLRPAGQNETDFLPFDLMTRGSRLENGTYSWGDLTIRYRPVNTSMWMERNSAAARTPVIDIAGQEDAIVASSLDPTISVTPLALTREWIDVDGDLGLRFKIKNNAIGSIETGSLGFAIAVNNIFTGRKAEEMYTKCFFADPYIGMDAAYVQMTPLSGIGPALVVTPLLNTSTPMEAYRWLEEESHSGTRIGSNGFEGFFEWQILTGAYAENEWAGVEPWNKPSTKILSPSEEYVFGVRFSVADSIRDIDSVLQQRTQTPTATSVPGFIIPRDSPSSLYLRSPSPVASLIVSPEGALVVTEQQSSLEENDNSLVSFVVQPGAFAFGRVRLSITYEDGGLQTIHYFVTKSSTEAVADLGRFLATEHWFENDDPFGRSPSIMGFDNKEQAIIEQDVRTRPAGLSDEGGAGAYVALAMKQIFHPNVEEIKKLEKFIDGVLWGTVQREDYSVIRSAFYYEPDLMPNYIYDPNIDWNSGQSMDRDTAFEINRAYNYVWPAAAYWAMYRVGRAYTDVLTTRDWSWYLDQAAQTILRCMQPDVAYTDAGLMGETVFGRILEDLLREEHSAVQNVSSVLENRATLWSQEDYPFGSEMSWDSTGQEGVFYWSRYFNHTSTKDAALNSVLGYTPTVPHWGYNGNARRYWDFVVAGKEQFVERQIHHYGSGLNALALLSAFKDNPADIYLLRVGYGAISGALSNIHGDGFASCAMHAWPEHLYWDGYSADYGPNFHGLSLGSGVFLVQDPDLNRLVAYGGLVEESNGTANVVLVDPIRQRIFLPSGTEISISAGIIKSFRYDLASGAVSLTLGRLPDAPVAASTVIWVRSISRHQSPESTTDYIVSVDNKTAVQERGGWLVATVTDSVLVDIKDGSQ

SEQ ID NO: 35325 - DNA, 2909 bp, Muscodor strobelii
  misc_feature: SGI EST ID NO. CUFF.84070.0
  misc_feature: Variant of the nucleotide sequence at SEQ ID NO 35323
tgtcgatgcctagacgagaaacgctcaatgagcccatgtggtccacattgtatcgtgtttctgacctcacatgaacctggatcatcatgcggtccttatgcattttcttgctagcagtgtcgcaagtgtcaggagacgatatagggtttgtcaacggtctgttgaatctctcgattgccaactttgacttctccatcattcgcgattcggggacgctcgcttcattgcgacccgctggccaaaatgagaccgatttcctcccatttgacttgatgacgcgcggtagtcgcctagaaaatggcacatacagttggggagatctgacaatccgataccgccccgtgaacaccagcatgtggatggagagaaactcggcggcagcacgcaccccagtgatagacatcgctggccaggaagatgcaatcgtcgcctcaagtctggatcccactatctctgtcacgcctctagcgttaacgcgggaatggatcgacgtcgacggtgacttaggtcttcgattcaagatcaagaataacgcgattgggtctatcgagactggcagtttaggctttgcaatagcagtgaacaatatcttcaccggtaggaaggctgaggaaatgtatacaaagtgtttcttcgccgacccttatatcgggatggacgctgcctatgttcagatgactcccttgagtggaatcggacctgcccttgttgtgacgcctctcctcaatacatcgacccctatggaggcttatcgttggctggaagaggagagccactctggtaccaggatcggttcgaatggcttcgagggctttttcgaatggcagatcctaacgggcgcatatgctgaaaacgagtgggctggcgtggaaccctggaacaagccttccaccaagatcctatcgcctagcgaagagtacgtgtttggtgttcgcttcagtgttgctgacagtattcgggatatcgacagcgtgctccagcagcgtactcagacaccaacagcgacaagtgtccccggtttcatcatcccacgtgactctccatcgagtctatatctccgctcaccgtctccagtcgccagtctcattgtgagccccgaaggtgctctagtagtgactgaacagcagtcgtcacttgaagaaaatgataattcgcttgtctccttcgtggtgcaacctggcgcgtttgcctttggccgtgtccgtttgagcattacatacgaggatggtgggctgcagacaattcattacttcgtgactaagtctagcaccgaggccgtggcagaccttggtcgcttcctcgctaccgagcattggtttgagaacgatgacccgtttggacgaagtccatctatcatgggctttgataacaaagaacaggcgattatagaacaagatgtacgcactaggcctgcaggcctgagcgatgagggcggtgccggagcttacgtagcattggccatgaagcagattttccacccaaatgtagaggagatcaagaagcttgagaagtttatcgatggcgtcctatggggaacagtccagcgcgaggactactcagtgattcgcagtgcgttctactacgagcctgacctaatgccaaactacatatatgacccgaatatcgactggaattcgggtcaatcaatggatcgcgacactgcatttgagatcaatcgagcctacaactacgtctggcccgctgcggcgtactgggctatgtatcgtgtcggccgggcgtatactgatgtactaacgacacgcgattggagctggtatcttgatcaggcagcgcagactatcttacgctgcatgcagccagatgtcgcgtatactgatgctggactcatgggtgagactgtatttggcagaatcctcgaggatctcctacgtgaagagcacagtgcagtgcagaatgtgtcgagtgtcctagaaaaccgcgcaactctatggtcacaagaggattacccatttggcagtgaaatgtcatgggactcaacgggccaagagggtgtcttttactggtcgagatacttcaatcataccagtacgaaagatgctgctctcaattctgttcttgggtatacaccaacagtccctcactggggttataacggtaatgcgcggcgctattgggatttcgtcgtcgctggcaaggagcaatttgtcgagcgacagatacatcattacgggtcaggacttaatgcgctggcgctgctctctgcgttcaaagacaatccggcagatatctacctattgcgtgttggctacggagctattagcggggctctctccaatatccatggggacgggttcgcctcatgcgccatgcacgcttggcctgagcatctgtattgggatgggtatagcgccgactacgggccgaatttccacggtctttcgctcggatccggtgtgtttctcgtgcaggacccggatctgaaccgactcgtagcatacggtgggttggtcgaggaaagcaacggcactgctaatgtcgtcttggtagatcccatcagacaacggatcttcttgccatctggcacagagatatctatttcagctggcattatcaaatcatttcgatatgatctggcctcgggggcagtgtcgctcacgctcggcagactcccagatgcccctgttgcagcgtctactgtcatatgggtgcgcagcatcagtcgccaccagagtccagaatcgacgactgactatattgtgagcgttgacaataagacagctgttcaggagaggggtggctggcttgtagcaacggtgacagactccgttttagtcgacattaaggacggttcgcagtaggcgcgcattacttaatcgtccaaatagcatgcaattgcaaagtactgtcatggtacgtctcgtatcaattcattactcacaatgacacgg

SEQ ID NO: 35326 - DNA, 1743 bp, Muscodor strobelii
  misc_feature: SGI cDNA ID NO. 572229
  misc_feature: Elevated expression when VOC is produced
  misc_feature: Encodes the peptide sequence at SEQ ID NO 35327
atgactgcaataacccatgagcccaggatcctcgtccccgagaaggtgtctccggatggattggctttattgtccacggactacgaagtagattcccgacccaaaggcgtatctccggaagagcttctgactctaattcctaatgtcgatgcgcttattgtgcgatccgagaccaaagtgaccgccgaggtcttaaatgccgggacgagtctccgtgttgtcgcgcgcgcaggtgtgggagtggataatatcgacgtgaaagctgctacagcacgcggaatcatcgtcgtcaactcacctgctggtaatatcgtagcagctgccgagcataccgtcgccttactgcttgcaactgcgcgaaatgtcgggcgcgccgatcgaagtaccaaagagggacgatgggacagaggcaagcttgtcggcgttgaggtaggaagaaagaccctcggaatcgttgggctgggcaaagtcgggatgaacgttgcgagaatgtgcattggtctcggcatgaaagtcatcgcatttgatccatacgcaagtgcggatatcgcccgacaagctggtgttgagcgaatagtgccaacgctcaacgaaatgttgccagaaatcgacttccttacgatccacacgccactgatagcctcaacactcgatctgattggggcaaaggagttcaccatgatgagaaaaacagcacgcgctttgaatgttgccagaggtggtgtgtataacgaagccgcccttctggacgccctcaataatggagtcattgcgggtgctgggatcgacgtcttcaccaaagaacctcctgagccgaacacaccggcatgggagctttcgcgccacgataaagtcgtcgcaacgcctcatcttggagccagtacggttgaggcacaagagaatgtcgctgttgatgtttgtacgcaggtagctgctgtgccatatgcgaagctcgtggagcgcatgggcgggttatacacgcagcattttgcctcctccacaacaacctccgtaggggccaagcaattcgagcttgtctaccgtggtgacttggccggtgtctcgaacacacgtcccttactcgcagccttaataagggggttggtatcgccattctcggacgcaggaggtagcgaggtaaatatcgtcaatgctactgctgtcgcacgggagaagggcatcatgattagcgaagtgcatgctcacagcgagggaggagctgggaagaaagattctgtttatgcaagtcttgtgaccctaagagccttacctgcagcgaccgcagacaacaaagtccagcggaagaatggtaatggacaaatcattgagggctatgtgtcgggaaataatgtctacatctcgcgacttgaccggttcacatccagcttcacgcccgacggtactctgctgattctgcacaactatgatgagcccggaaaaattggaggtgttggttcagtccttggacggttcggtatcaatattcgattcatgcaggtcgcgagcttggataagaagcttccaagtagcccgccgagcccaccagctgatgccgaaagtctggtactgacgagactggattcagcagttcagggtctggaagaatctggcaataccgggataaaagcaaatggtgacgaagccctcatgattttaggtgtggatggggacgtcacaaaggaggtgctacaagacttgagaaatgacgagggtattctcaacgctaatgcgcccgttgtctag

SEQ ID NO: 35327 - protein, 580 aa, Muscodor strobelii
  misc_feature: SGI Peptide ID NO. 572229
  misc_feature (10)..(320): Pfam Id: PF00389 Pfam Desc: D-isomer specific 2-hydroxyacid dehydrogenase, catalytic domain
  misc_feature (112)..(292): Pfam Id: PF02826 Pfam Desc: D-isomer specific 2-hydroxyacid dehydrogenase, NAD binding domain
  misc_feature (4)..(574): NCBI GI: 261359562 Blast Desc: D-3-phosphoglycerate dehydrogenase [Verticillium albo-atrum VaMs.102]
  misc_feature (8)..(574): NCBI GI: 39971783 Blast Desc: MGG_07207 [Magnaporthe grisea 70-15] gi|145019699|gb|EDK03927.1| MGG_07207 [Magnaporthe grisea 70-15]
  misc_feature (5)..(576): NCBI GI: 256727105 Blast Desc: [Nectria haematococca mpVI 77-13-4]
  misc_feature (8)..(574): NCBI GI: 116202061 Blast Desc: CHGG_08915 [Chaetomium globosum CBS 148.51] gi|88177433|gb|EAQ84901.1| CHGG_08915 [Chaetomium globosum CBS 148.51]
  misc_feature (9)..(574): NCBI GI: 46135935 Blast Desc: FG09483.1 [Gibberella zeae PH-1]
  misc_feature (8)..(574): NCBI GI: 171681876 Blast Desc: protein product [Podospora anserina] gi|170940897|emb|CAP66547.1| protein product [Podospora anserina]
  misc_feature (5)..(576): NCBI GI: 189201403 Blast Desc: D-3-phosphoglycerate dehydrogenase [Pyrenophora tritici-repentis Pt-1C-BFP] gi|187984137|gb|EDU49625.1| D-3-phosphoglycerate dehydrogenase [Pyrenophora tritici-repentis
  misc_feature (5)..(576): NCBI GI: 169619920 Blast Desc: SNOG_13160 [Phaeosphaeria nodorum SN15] gi|111058367|gb|EAT79487.1| SNOG_13160 [Phaeosphaeria nodorum SN15]
  misc_feature (8)..(576): NCBI GI: 240105592 Blast Desc: D-3-phosphoglycerate dehydrogenase, [Coccidioides posadasii C735 delta SOWgp]
  misc_feature (8)..(576): NCBI GI: 119480099 Blast Desc: d-3-phosphoglycerate dehydrogenase [Neosartorya fischeri NRRL 181] gi|119408232|gb|EAW18181.1| d-3-phosphoglycerate dehydrogenase [Neosartorya fischeri NRRL
  misc_feature (7)..(500): SWISSPROT Homolog: EC 1.1.1.95 Phosphoglycerate dehydrogenase
  misc_feature: Useful for introducing or modulating the production of volatile compounds
MTAITHEPRILVPEKVSPDGLALLSTDYEVDSRPKGVSPEELLTLIPNVDALIVRSETKVTAEVLNAGTSLRVVARAGVGVDNIDVKAATARGIIVVNSPAGNIVAAAEHTVALLLATARNVGRADRSTKEGRWDRGKLVGVEVGRKTLGIVGLGKVGMNVARMCIGLGMKVIAFDPYASADIARQAGVERIVPTLNEMLPEIDFLTIHTPLIASTLDLIGAKEFTMMRKTARALNVARGGVYNEAALLDALNNGVIAGAGIDVFTKEPPEPNTPAWELSRHDKVVATPHLGASTVEAQENVAVDVCTQVAAVPYAKLVERMGGLYTQHFASSTTTSVGAKQFELVYRGDLAGVSNTRPLLAALIRGLVSPFSDAGGSEVNIVNATAVAREKGIMISEVHAHSEGGAGKKDSVYASLVTLRALPAATADNKVQRKNGNGQIIEGYVSGNNVYISRLDRFTSSFTPDGTLLILHNYDEPGKIGGVGSVLGRFGINIRFMQVASLDKKLPSSPPSPPADAESLVLTRLDSAVQGLEESGNTGIKANGDEALMILGVDGDVTKEVLQDLRNDEGILNANAPVV

SEQ ID NO: 35328 - DNA, 1207 bp, Muscodor strobelii
  misc_feature: SGI EST ID NO. CUFF.84094.0
  misc_feature: Variant of the nucleotide sequence at SEQ ID NO 35326
tggcttttctcatgatgaaggttaaaagtgtagactaccccattcggatttgaaagtatacttgtagctacgacgagtattgccattgttcgtcgctcgcccttcgattattgaacgtagatcaagcctacgacgtcaaagggaaaatatctgcttgaaaaacctgtctcggggtacggaaaagcacgagggcagctcgacccccttgcttcactcgctcgggctactaaccccaaagcaaggtgctttttcgagtatcgatttgtaaagctacgctgtcatcaacttagacaaaaaatgactgcaataacccatgagcccaggatcctcgtccccgagaaggtgtctccggatggattggctttattgtccacggactacgaagtagattcccgacccaaaggcgtatctccggaagagcttctgactctaattcctaatgtcgatgcgcttattgtgcgatccgagaccaaagtgaccgccgaggtcttaaatgccgggacgagtctccgtgttgtcgcgcgcgcaggtgtgggagtggataatatcgacgtgaaagctgctacagcacgcggaatcatcgtcgtcaactcacctgctggtaatatcgtagcagctgccgagcataccgtcgccttactgcttgcaactgcgcgaaatgtcgggcgcgccgatcgaagtaccaaagagggacgatgggacagaggcaagcttgtcggcgttgaggtaggaagaaagaccctcggaatcgttgggctgggcaaagtcgggatgaacgttgcgagaatgtgcattggtctcggcatgaaagtcatcgcatttgatccatacgcaagtgcggatatcgcccgacaagctggtgttgagcgaatagtgccaacgctcaacgaaatgttgccagaaatcgacttccttacgatccacacgccactgatagcctcaacactcgatctgattggggcaaaggagttcaccatgatgagaaaaacagcacgcgctttgaatgttgccagaggtggtgtgtataacgaagccgcccttctggacgccctcaataatggagtcattgcgggtgctgggatcgacgtcttcaccaaagaacctcctgagccgaacacaccggcatgggagctttcgcgccacgataaagtcgtcgcaacgcctcatcttggagccagtacggttgaggcacaagagaatgtcgctg

SEQ ID NO: 35329 - DNA, 549 bp, Muscodor strobelii
  misc_feature: SGI cDNA ID NO. 572230
  misc_feature: Encodes the peptide sequence at SEQ ID NO 35330
atgtcttccatacgcctccaaccacttgccgccgtcgcccgacacgtttcgcgtcccgctatcagatcagcggcccggcccgcgtttggacgacgatatttgaatacagatacagcgcccattctctattcggcacatgcaaaggtcaaaggagctcgtaccggacatgtcgagggcgacgaccttcagatcggtctgactatggcaaaagcgctgggcggtaaaggcgacaagggcaagacgaatcccgaagaactcttcgctgctggttacggcgcatgttttcagtctgcaatgaacgcggtagcagcgtccatggggatgcgaatgccgacaaacccagacgatagcattgttgagagcaccgtacatctcgtcggcgatatgaaacaacttgatatgggcattcgcgtggatatgaaggtcagcattcggggacttgaaaaagatcagattgagaagattgttgcgaaggcgaaagaggtgtgcccttacagccgggcgacgcagggtaacgtcacaacgacgattgagtctgtccagttataa

SEQ ID NO: 35330 - protein, 182 aa, Muscodor strobelii
  misc_feature: SGI Peptide ID NO. 572230
  misc_feature (55)..(178): Pfam Id: PF02566 Pfam Desc: OsmC-like protein
  misc_feature (33)..(181): NCBI GI: 46109800 Blast Desc: FG01782.1 [Gibberella zeae PH-1]
  misc_feature (18)..(177): NCBI GI: 169618297 Blast Desc: SNOG_12340 [Phaeosphaeria nodorum SN15] gi|111059033|gb|EAT80153.1| SNOG_12340 [Phaeosphaeria nodorum SN15]
  misc_feature (41)..(180): NCBI GI: 73539381 Blast Desc: OsmC-like protein [Ralstonia eutropha JMP134] gi|72122718|gb|AAZ64904.1| OsmC-like protein [Ralstonia eutropha JMP134]
  misc_feature (41)..(179): NCBI GI: 187926969 Blast Desc: OsmC family protein [Ralstonia pickettii 12J] gi|241665298|ref|YP_002983657.1| OsmC family protein [Ralstonia pickettii 12D] gi|187728723|gb|ACD29887.1| OsmC family protein
  misc_feature (40)..(168): NCBI GI: 15888188 Blast Desc: organic hydroperoxide resistance protein [Agrobacterium tumefaciens str. C58] gi|15155834|gb|AAK86654.1| organic hydroperoxide resistance protein [Agrobacterium str. C58]
  misc_feature (41)..(177): NCBI GI: 251788974 Blast Desc: OsmC family protein [Dickeya zeae Ech1591] gi|247537595|gb|ACT06216.1| OsmC family protein [Dickeya zeae Ech1591]
  misc_feature (41)..(179): NCBI GI: 17548547 Blast Desc: organic hydroperoxide resistance protein [Ralstonia solanacearum GMI1000] gi|17430795|emb|CAD17477.1| organic hydroperoxide resistance protein [Ralstonia solanacearum GMI1000]
  misc_feature (41)..(179): NCBI GI: 207728327 Blast Desc: organic hydroperoxide resistance protein [Ralstonia solanacearum MolK2] gi|206591573|emb|CAQ57185.1| organic hydroperoxide resistance protein [Ralstonia solanacearum]
  misc_feature (41)..(179): NCBI GI: 83749124 Blast Desc: RRSL_00921 [Ralstonia solanacearum UW551] gi|83724183|gb|EAP71357.1| RRSL_00921 [Ralstonia solanacearum UW551]
  misc_feature (41)..(173): NCBI GI: 154252697 Blast Desc: OsmC family protein [Parvibaculum lavamentivorans DS-1] gi|154156647|gb|ABS63864.1| OsmC family protein [Parvibaculum lavamentivorans DS-1]
MSSIRLQPLAAVARHVSRPAIRSAARPAFGRRYLNTDTAPILYSAHAKVKGARTGHVEGDDLQIGLTMAKALGGKGDKGKTNPEELFAAGYGACFQSAMNAVAASMGMRMPTNPDDSIVESTVHLVGDMKQLDMGIRVDMKVSIRGLEKDQIEKIVAKAKEVCPYSRATQGNVTTTIESVQL

SEQ ID NO: 35331 - DNA, 1572 bp, Muscodor strobelii
  misc_feature: SGI cDNA ID NO. 572231
  misc_feature: Encodes the peptide sequence at SEQ ID NO 35332
atgagtatcatctacaccgtgatggtagtactcaagtatgccactctgttcttgttttcgtggaccatgtacggcgtattctatcgcctcatacttcatcctttcagcagttatccagggcctttcttagccaagctcaccgatggatatgccggattttatgccattctcagacgtccacacctaaacacctatcagaatttgcagaaatatggacccgtataccgggaaggtcccgaccgcctagtgtttagttctctacaggcattgcatgatatctacttccatccaagcatcagtaagggccgtgcctaccagacaggaggatccgagaatctttttagcacgccaaataatgatgagcatcgaagaaagcggaggatcattggtaaagtcgtgtctgaccgatcactgcgttcattctccactatcatgagtgtacaaatcaatatattcctgcgaaaacttttacaatcatgcgaagacggccgaatcgtcaatctcacgccagcatgccgaaatcttgccatggacattgccggtcatctatcttttggatatccccttaacacgcaaaccgacgcaacgaatcagctgatacatagcgccatggccggtgcactctatacctccaatttgtctttcacttggccagtactcaagattgtccgcccgattctcagctggtttgggaagaagaaagccgaagagttccagaagatgatacggaagatgatcgtagcacgaacatctgaagcgaaggacgccaaggctggcttctattctgccgtaactggaaatgaagaggctgaaggaaacctcgatgcaaatgaaatatggggcgaggccctatttttcgtgagcgctggtggtactacagttgctacagccgtatgcggaatgtttttccatctctctcggcaccccgaggtctataagagacttgcatcagagattcgcgaatcgttctcgtcgggtgacgagatcattagtggaccgaagctgtcgtcgtgcaggtatctacgtgccgtgatcgacgaatctcttcgcttggcgccgccatccctcgccaccctgtggcgcgaaatcgataagtcatctatttcgccgttcgtagtcgatgggaacatcattccccggggcaccgaagtaggtgtacatctttatagtgtcttacatgacccggataactatgcagacccatttgcattccgtccggctcgttggcttgggccagaagatggtggaccgccagatactgtacaaaggcgagaggaactagccaaaatgcgcagagctcaggtctccttcggtataggcgatcgaagctgcgccgggaaatccatggcgtacattgagactagtatggccattgctcgggcactctggtatttcgactttgagatgccggctggagacgccggtaagcttggagcgggagcaggcgagagtgatggtccatgggctgcgcctgaccagtttcaattagaagatatcctcgtcgctgatcatgatggacctaatatgattttcaaacttcgtgatgagtattggcgagagctggtggtatag

SEQ ID NO: 35332 - protein, 523 aa, Muscodor strobelii
  misc_feature: SGI Peptide ID NO. 572231
  misc_feature (39)..(496): Pfam Id: PF00067 Pfam Desc: Cytochrome P450
  misc_feature (293)..(410): Pfam Id: PF00067 Pfam Desc: Cytochrome P450
  misc_feature (217)..(521): NCBI GI: 156056276 Blast Desc: SS1G_05490 [Sclerotinia sclerotiorum 1980] gi|154703274|gb|EDO03013.1| SS1G_05490 [Sclerotinia sclerotiorum 1980]
  misc_feature (1)..(514): NCBI GI: 169596678 Blast Desc: SNOG_01106 [Phaeosphaeria nodorum SN15] gi|111071481|gb|EAT92601.1| SNOG_01106 [Phaeosphaeria nodorum SN15]
  misc_feature (3)..(514): NCBI GI: 154313085 Blast Desc: BC1G_05544 [Botryotinia fuckeliana B05.10] gi|150849629|gb|EDN24822.1| BC1G_05544 [Botryotinia fuckeliana B05.10]
  misc_feature (28)..(515): NCBI GI: 242771379 Blast Desc: cytochrome P450, [Talaromyces stipitatus ATCC 10500] gi|218721449|gb|EED20867.1| cytochrome P450, [Talaromyces stipitatus ATCC 10500]
  misc_feature (16)..(514): NCBI GI: 145256217 Blast Desc: An10g00660 [Aspergillus niger CBS 513.88] gi|134078632|emb|CAK40505.1| protein product [Aspergillus niger]
  misc_feature (1)..(514): NCBI GI: 189206195 Blast Desc: cytochrome P450 3A31 [Pyrenophora tritici-repentis Pt-1C-BFP] gi|187975525|gb|EDU42151.1| cytochrome P450 3A31 [Pyrenophora tritici-repentis Pt-1C-BFP]
  misc_feature (21)..(514): NCBI GI: 212529440 Blast Desc: benzoate 4-monooxygenase cytochrome P450, [Penicillium marneffei ATCC 18224] gi|210074275|gb|EEA28362.1| benzoate 4-monooxygenase cytochrome P450, [Penicillium marneffei ATCC
  misc_feature (16)..(514): NCBI GI: 121710976 Blast Desc: benzoate 4-monooxygenase cytochrome P450 [Aspergillus clavatus NRRL 1] gi|119401254|gb|EAW11678.1| benzoate 4-monooxygenase cytochrome P450 [Aspergillus clavatus NRRL 1]
  misc_feature (2)..(515): NCBI GI: 169603764 Blast Desc: SNOG_04890 [Phaeosphaeria nodorum SN15] gi|111066161|gb|EAT87281.1| SNOG_04890 [Phaeosphaeria nodorum SN15]
  misc_feature (217)..(521): NCBI GI: 156060449 Blast Desc: SS1G_02363 [Sclerotinia sclerotiorum 1980] gi|154699771|gb|EDN99509.1| SS1G_02363 [Sclerotinia sclerotiorum 1980]
  misc_feature (107)..(468): SWISSPROT Homolog: EC 1.14.14.1 Unspecific monooxygenase
MSIIYTVMVVLKYATLFLFSWTMYGVFYRLILHPFSSYPGPFLAKLTDGYAGFYAILRRPHLNTYQNLQKYGPVYREGPDRLVFSSLQALHDIYFHPSISKGRAYQTGGSENLFSTPNNDEHRRKRRIIGKVVSDRSLRSFSTIMSVQINIFLRKLLQSCEDGRIVNLTPACRNLAMDIAGHLSFGYPLNTQTDATNQLIHSAMAGALYTSNLSFTWPVLKIVRPILSWFGKKKAEEFQKMIRKMIVARTSEAKDAKAGFYSAVTGNEEAEGNLDANEIWGEALFFVSAGGTTVATAVCGMFFHLSRHPEVYKRLASEIRESFSSGDEIISGPKLSSCRYLRAVIDESLRLAPPSLATLWREIDKSSISPFVVDGNIIPRGTEVGVHLYSVLHDPDNYADPFAFRPARWLGPEDGGPPDTVQRREELAKMRRAQVSFGIGDRSCAGKSMAYIETSMAIARALWYFDFEMPAGDAGKLGAGAGESDGPWAAPDQFQLEDILVADHDGPNMIFKLRDEYWRELVV

SEQ ID NO: 35333 - DNA, 1794 bp, Muscodor strobelii
  misc_feature: SGI cDNA ID NO. 572232
  misc_feature: Encodes the peptide sequence at SEQ ID NO 35334
atggccgaccccgtgcaaagaaccgcttctccctacactgatccaacagtgaaaggacccaagtctcaacagctttcttccggtctcgcccactctcttcttcaggacaacaagatgattcctaacaacaaggtcaataagaccgctctccaccccagtggtgttgaacctcaacacgaaagggaacatacagaactcgaggaagagctgcacgagaaggcacatatcgactacgacagagttgcaatcattcccaacccctctgtcgcagccctatacgaagatgctttggtctacgaaatgggctcagccattgcctcgagtggcgccttaacagcttactccggtgcaaagactgggcgatcaccatcagataagcgaattgtgaaagagtcatcgtcagaaaatgatatttggtggggacccgtcaacaagccaatggctcctgaggtctggaagatcaaccgcgaacgtgctattgactacctcaacacgagaacgaggatctacgttgtcgatggctatgctggctgggacgagaagtatagaatcagagtacgcgtcatctgcgctcgtgcataccatgctctgttcatgaggaacatgcttatccgccctcctcgtgaggcgcttgagcatttccaccccgattatactatctacaatgctggcacattccctgccaaccgcttcaccgagggtatgacatctggaacctcagtcgccattaattttgccgacaaggagatggtcatcctcggtaccgagtacgccggcgaaatgaagaagggagtattcacggttttgttctacgagatgcctatcaagcataacgtcctgacgctacactcttctgccaacgagggtaagaacggtgatgttaccctcttcttcggtctgtctggtaccggcaagactactctttcggccgaccctaaccgaatgctgattggcgacgacgagcactgctggagtgaccgtggcgtcttcaacattgagggcggctgctacgccaagactattggtctttcggccgagaaggagcctgacattttcggtgccattcgcttcggatcggtccttgaaaatgttgttttcgaccaggacactcgtattgtcgactatgacgactcaactctgaccgaaaatacgcgttgcgcgtatccgatcgaatacatcgagaacgccaagatcccctgcctatctgaaagccaccctagcaacattatcttgttgacttgcgatgcccgtggtgtgctacccccaatctccaagctcgacagtgcccagaccatgttccacttcatctctgggtacacttcgaagatggccggaacggaagatggtatcactgagccccaagctaccttctcgtcctgcttcgctcagcccttcttagctcttcaccccatgaagtatgctaaaatgctggcggagaagattgagaaacactctgccaatgcctggttattgaacactggttgggttggtgccggttacgtccacggcggcaagcgttgccctctgaaatatacgcgtgccatccttgacgccatccactccggtgagctcgccaaggtcgagtacgagacctatggtgttttcaatctccaggtgcccaagacctgccccaaggtgccctccgagctgctcaaccccaaaacggcctggacagccggcgcggagagcttcgaccaggaggtcactaagttgggtgccctcttcaacgagaacttcaaaaagtacgaatcagaggctacggatgacgtcaaggccgctgcaccagtcgtttaa

SEQ ID NO: 35334 - protein, 597 aa, Muscodor strobelii
  misc_feature: SGI Peptide ID NO. 572232
  misc_feature (79)..(550): Pfam Id: PF01293 Pfam Desc: Phosphoenolpyruvate carboxykinase
  misc_feature (1)..(597): NCBI GI: 171681824 Blast Desc: protein product [Podospora anserina] gi|170940871|emb|CAP66521.1| protein product [Podospora anserina]
  misc_feature (1)..(597): NCBI GI: 226407489 Blast Desc: phosphoenolpyruvate carboxykinase [Epichloe festucae]
  misc_feature (39)..(597): NCBI GI: 256733455 Blast Desc: [Nectria haematococca mpVI 77-13-4]
  misc_feature (39)..(597): NCBI GI: 46128447 Blast Desc: FG08601.1 [Gibberella zeae PH-1]
  misc_feature (3)..(597): NCBI GI: 156060285 Blast Desc: phosphoenolpyruvate carboxykinase [Sclerotinia sclerotiorum 1980] gi|154699689|gb|EDN99427.1| phosphoenolpyruvate carboxykinase [Sclerotinia sclerotiorum 1980]
  misc_feature (39)..(597): NCBI GI: 145611356 Blast Desc: phosphoenolpyruvate carboxykinase [Magnaporthe grisea 70-15] gi|145018658|gb|EDK02937.1| phosphoenolpyruvate carboxykinase [Magnaporthe grisea 70-15]
  misc_feature (42)..(597): NCBI GI: 154292650 Blast Desc: phosphoenolpyruvate carboxykinase [Botryotinia fuckeliana B05.10] gi|150845865|gb|EDN21058.1| phosphoenolpyruvate carboxykinase [Botryotinia fuckeliana B05.10]
  misc_feature (42)..(597): NCBI GI: 85095814 Blast Desc: phosphoenolpyruvate carboxykinase [Neurospora crassa OR74A] gi|52783201|sp|Q7RVS9.1|PPCK_NEUCR RecName: Full=Phosphoenolpyruvate carboxykinase [ATP] phosphoenolpyruvate
  misc_feature (45)..(595): NCBI GI: 238837921 Blast Desc: phosphoenolpyruvate carboxykinase AcuF [Microsporum canis CBS 113480]
  misc_feature (45)..(597): NCBI GI: 259487277 Blast Desc: TPA: Phosphoenolpyruvate carboxykinase [ATP] (EC 4.1.1.49) [Source:UniProtKB/Swiss-Prot;Acc:Q96UL8] [Aspergillus nidulans FGSC A4]
  misc_feature (42)..(597): SWISSPROT Homolog: EC 4.1.1.49 Phosphoenolpyruvate carboxykinase (ATP)
MADPVQRTASPYTDPTVKGPKSQQLSSGLAHSLLQDNKMIPNNKVNKTALHPSGVEPQHEREHTELEEELHEKAHIDYDRVAIIPNPSVAALYEDALVYEMGSAIASSGALTAYSGAKTGRSPSDKRIVKESSSENDIWWGPVNKPMAPEVWKINRERAIDYLNTRTRIYVVDGYAGWDEKYRIRVRVICARAYHALFMRNMLIRPPREALEHFHPDYTIYNAGTFPANRFTEGMTSGTSVAINFADKEMVILGTEYAGEMKKGVFTVLFYEMPIKHNVLTLHSSANEGKNGDVTLFFGLSGTGKTTLSADPNRMLIGDDEHCWSDRGVFNIEGGCYAKTIGLSAEKEPDIFGAIRFGSVLENVVFDQDTRIVDYDDSTLTENTRCAYPIEYIENAKIPCLSESHPSNIILLTCDARGVLPPISKLDSAQTMFHFISGYTSKMAGTEDGITEPQATFSSCFAQPFLALHPMKYAKMLAEKIEKHSANAWLLNTGWVGAGYVHGGKRCPLKYTRAILDAIHSGELAKVEYETYGVFNLQVPKTCPKVPSELLNPKTAWTAGAESFDQEVTKLGALFNENFKKYESEATDDVKAAAPVV

SEQ ID NO: 35335 - DNA, 2704 bp, Muscodor strobelii
  misc_feature: SGI EST ID NO. CUFF.84299.1
  misc_feature: Variant of the nucleotide sequence at SEQ ID NO 35333
attggctaacccttaccaccaccacgtacctccttcgcgttgtgctcctacgtcagtctaactcacgtacaaagaaagaacacatagtcgactagtaaatcggtagtctgcagtagtaccacgaggtcccttcccgatgttgcaggggtcttcagcaggagtactccggtttgaattcgtgccccagtgcccaatcaatgtctaagtcataacgttggccagtggaatgtctcgaaccgccgtcatgggctccacgggtgctgtctttcatatatatcctcggtctcggtccatgactagcaaaccgaaaacctacttatccaacagtccatatcccgactacctaaggagtgccccatataatctttttcgaaattgcccgttgcctatagccttgaacccagtagccgcccggataccccataatctcacgatgtcgagaactttaagaaccatggccgaccccgtgcaaagaaccgcttctccctacactgatccaacagtgaaaggacccaagtctcaacagctttcttccggtctcgcccactctcttcttcaggacaacaagatgattcctaacaacaaggtcaataagaccgctctccaccccagtggtgttgaacctcaacacgaaagggaacatacagaactcgaggaagagctgcacgagaaggcacatatcgactacgacagagttgcaatcattcccaacccctctgtcgcagccctatacgaagatgctttggtctacgaaatgggctcagccattgcctcgagtggcgccttaacagcttactccggtgcaaagactgggcgatcaccatcagataagcgaattgtgaaagagtcatcgtcagaaaatgatatttggtggggacccgtcaacaagccaatggctcctgaggtctggaagatcaaccgcgaacgtgctattgactacctcaacacgagaacgaggatctacgttgtcgatggctatgctggctgggacgagaagtatagaatcagagtacgcgtcatctgcgctcgtgcataccatgctctgttcatgaggaacatgcttatccgccctcctcgtgaggcgcttgagcatttccaccccgattatactatctacaatgctggcacattccctgccaaccgcttcaccgagggtatgacatctggaacctcagtcgccattaattttgccgacaaggagatggtcatcctcggtaccgagtacgccggcgaaatgaagaagggagtattcacggttttgttctacgagatgcctatcaagcataacgtcctgacgctacactcttctgccaacgagggtaagaacggtgatgttaccctcttcttcggtctgtctggtaccggcaagactactctttcggccgaccctaaccgaatgctgattggcgacgacgagcactgctggagtgaccgtggcgtcttcaacattgagggcggctgctacgccaagactattggtctttcggccgagaaggagcctgacattttcggtgccattcgcttcggatcggtccttgaaaatgttgttttcgaccaggacactcgtattgtcgactatgacgactcaactctgaccgaaaatacgcgttgcgcgtatccgatcgaatacatcgagaacgccaagatcccctgcctatctgaaagccaccctagcaacattatcttgttgacttgcgatgcccgtggtgtgctacccccaatctccaagctcgacagtgcccagaccatgttccacttcatctctgggtacacttcgaagatggccggaacggaagatggtatcactgagccccaagctaccttctcgtcctgcttcgctcagcccttcttagctcttcaccccatgaagtatgctaaaatgctggcggagaagattgagaaacactctgccaatgcctggttattgaacactggttgggttggtgccggttacgtccacggcggcaagcgttgccctctgaaatatacgcgtgccatccttgacgccatccactccggtgagctcgccaaggtcgagtacgagacctatggtgttttcaatctccaggtgcccaagacctgccccaaggtgccctccgagctgctcaaccccaaaacggcctggacagccggcgcggagagcttcgaccaggaggtcactaagttgggtgccctcttcaacgagaacttcaaaaagtacgaatcagaggctacggatgacgtcaaggccgctgcaccagtcgtttaaaaagcaagcaaggcgcaaatgagactcatgtttttcggcattgataccataaacaaaaccacttctcagtaggccttccgcctcggtttggatttgatggtgccaagggaatggcacgactcgagggcgggctgaagcgaacacgcaatacgctacaccacacactgtggaaggacctggcaaagcaacgccagcttttctaatgtctgcttctagatgacatacatgacgagacttgttgggaatgtggcactttcctcgttgaattatgagatattcattgtacattttcatagcactggatagctgtgtccgactaatggacccaacacgccatcagcggcaagagaatttcaattaaacatttcaagaaagattgcaaagtagctcccgatgatagtcatacttcgtagttttgtgtcacgtcgggtattcagtatatgagttatggttcac

SEQ ID NO: 35336 - DNA, 3072 bp, Muscodor strobelii
  misc_feature: SGI cDNA ID NO. 572233
  misc_feature: Encodes the peptide sequence at SEQ ID NO 35337
atggcgcttgctatcaggaacgcgggacgcctaaagcctgaggctcggctcggagaggcaatcaaagaattcgaagcaagtctaattccggatcaaagaatgtctttcaagtcaattagaaccgagacgcaaaactcattaccgacactgtgcgacattatgcagctcactgccgaagtcgaccttgaggcccgcaaaggtgttgggggctcaagaatacgacgatgctttggtcctcgcttaacgaaaatgcttgaggttctgcagcaatttgtgtctataggagacgttgtcattggcggctcgcagaacctgatcgcttccggtgtctggtcactcgttcgcgtgactgttctgacagcatcgcgctttactacatatatggataagctgtcagagcttttgatggatgccgggcgatcagctccacgctatcaggagctcgtggcaatctatccggattcaaaacctttgcaggcgcttcattgcgagtatttgatcgtcatagtacaactctgtcgacacgtagtcacggtctgcaatcagtcttcaatgggacaacttaaatcatttctcaaagattttgatgtatcgacctatggcaccgagctgcagaaacatgctcgtgcgatcaaagagcaacagcggttagaagaggcgcgatcaatctctaagacacgatctattgtcttatctaaggtggcagcagaattacgacgtgagcagctggaaaagaaggctaaaattctgaaagcatgttcgacttttgactatcaacagtcttggaaaatggcacggaaatgcggcgatgcgctatggattcgcgacaacgtgcagtactgtcattggcgagacaactctgcgtggccagctgcatggccaatccttctcttacttggtaggctcggggccggtaagacagtccttctcgccaacttggtggacgatcttcatatccacctggactacatcgttgcttatttcttttgccgaagtgaccagccacagtcgttggatgcccaaacggtcataggttgcttgacacggcaggttgtggatgcactgactccagaaaccgcggctaagctgccttatagtgatgagtctgtcctggacgagggacagctccacagcctgtacaactctctagtgatcaatgggcggcatatatgtttcgttattgatgggattgaggagcttggcgtagccgcaagacgtgagattgtcgaattttttaagcacgttcgatcacgcgttcgcctgaaactatgcatttctcatcgtctcgccgctgataaacgtccacgagacgaacttagtacacttaagcctcagactgaattacttatcccgaaacataacccggatatccagatcttcgtcaagtccaagcttgcttcgtgtcttgaggctggtgagctatcagtaaatgaccccgccatcgtgctggatatccagagagcattagaaatcggcgctcaggggatgtttttgtgggtggccttgcagatacaaggaatatgtgctcagaaaacagacagagatattcgcacagcattgttagacctaccaaaggaccttccatcaacctttacgagaattctatttcatgctagagaaacggcgcctgggtttcagcagcgactactgcatcttattatagcagccttccgtcccctgacggtggaagagctccgtgaagcacttagtgtcgcgccatgtcgtcctgtatgggactcatctacgtacataaatgacatatacgccgtcctgtcttctggtggaagcctcctcgttgttgacgaagagcataccaccgttcacttcacccatcccagtgtccagcaattcctgctagggaattttgggacaaatgaagactttaggatcgacatgaaagaggctcaaacagaaatggcccaaaccgtggtaacatatctaagctatgatatgttcgaccgccgggtcacgaaccgagggccgaccttgctagcccaagtcgcaccacagaagatcatcacatcagctctaccttcgacaagccgatcacggcagctggcgctttatctcttgcggtcaaagaagcagcccgattttgacgtcggcaaggcgcttgctgattatgggccctcgcgtatgacccccgatcctgtctggtttttccgatacgcgaaggagaattgggtagcgcacactaaggatttgtccagcggatctcacgatttgattccgctgatacagaaactggtccagagaggcaaaatagacacgaagtcgccattattgtggtcaattataaactcacatgtgagcatataccgatcacaaatactccatcgccgcctctggctctcccatataactgcggctctaagacacatgcggacggattgggatgatttcgaatttgaactagatcgagttgagccgcaattttttgccagattgcttcttctggcaacaactttcaaagtatatgaaattgccgatcacatcatagaaaagtacaacaaaaccatgccactagcaacgctcttccatgatgtgcttggcattagcactaacccgttggcgctcggatggatcattatccatttcttaagccgcgcacgtgaagggagaccagatctctgggacaatgacaccgggtatgttgaacgaatgccgttagatttgtgggcttcaggccggatcaagagaatattcggaacaccctgttatgacgtgcatatgaatgggacgttatgcgaagactaccacgcggacttgggaaacgagactgtgttattaaaggccggccagaaagtaggcatgctgagccgagactatttacactggacagaaaagacgaacagccacgtcgcaatcagagacccttctcgaaaagtatttattttcgttccttcgaggctcatttggtggggctcggggccgtcggcagagctttggccttgccctcagggccacaccgggatcgattttggtacggtgtcgttgtgtagctgcaacatcccccaccggtatcatcacttgttcagcgaactaggtgatctaagatcgacacgagactaa

SEQ ID NO: 35337 - protein, 1023 aa, Muscodor strobelii
  misc_feature: SGI Peptide ID NO. 572233
  misc_feature (1)..(764): NCBI GI: 212531293 Blast Desc: NACHT domain protein [Penicillium marneffei ATCC 18224] gi|210071167|gb|EEA25256.1| NACHT domain protein [Penicillium marneffei ATCC 18224]
  misc_feature (12)..(782): NCBI GI: 171696018 Blast Desc: protein product [Podospora anserina] gi|170948251|emb|CAP60415.1| protein product [Podospora anserina]
  misc_feature (10)..(731): NCBI GI: 255941202 Blast Desc: Pc16g10620 [Penicillium chrysogenum Wisconsin 54-1255] gi|211585993|emb|CAP93732.1| Pc16g10620 [Penicillium chrysogenum Wisconsin 54-1255]
  misc_feature (1)..(758): NCBI GI: 159122543 Blast Desc: NACHT domain protein [Aspergillus fumigatus A1163]
  misc_feature (1)..(758): NCBI GI: 70984507 Blast Desc: NACHT domain protein [Aspergillus fumigatus Af293] gi|66845387|gb|EAL85722.1| NACHT domain protein [Aspergillus fumigatus Af293]
  misc_feature (1)..(758): NCBI GI: 119467408 Blast Desc: NFIA_049530 [Neosartorya fischeri NRRL 181] gi|119405662|gb|EAW15613.1| conserved [Neosartorya fischeri NRRL 181]
  misc_feature (1)..(735): NCBI GI: 46139341 Blast Desc: FG11185.1 [Gibberella zeae PH-1]
  misc_feature (1)..(761): NCBI GI: 169607931 Blast Desc: SNOG_07030 [Phaeosphaeria nodorum SN15] gi|111064561|gb|EAT85681.1| SNOG_07030 [Phaeosphaeria nodorum SN15]
  misc_feature (1)..(891): NCBI GI: 242821743 Blast Desc: NACHT domain protein [Talaromyces stipitatus ATCC 10500] gi|218712663|gb|EED12088.1| NACHT domain protein [Talaromyces stipitatus ATCC 10500]
  misc_feature (1)..(751): NCBI GI: 212541775 Blast Desc: aminohydrolase, [Penicillium marneffei ATCC 18224] gi|210065949|gb|EEA20042.1| aminohydrolase, [Penicillium marneffei ATCC 18224]
MALAIRNAGRLKPEARLGEAIKEFEASLIPDQRMSFKSIRTETQNSLPTLCDIMQLTAEVDLEARKGVGGSRIRRCFGPRLTKMLEVLQQFVSIGDVVIGGSQNLIASGVWSLVRVTVLTASRFTTYMDKLSELLMDAGRSAPRYQELVAIYPDSKPLQALHCEYLIVIVQLCRHVVTVCNQSSMGQLKSFLKDFDVSTYGTELQKHARAIKEQQRLEEARSISKTRSIVLSKVAAELRREQLEKKAKILKACSTFDYQQSWKMARKCGDALWIRDNVQYCHWRDNSAWPAAWPILLLLGRLGAGKTVLLANLVDDLHIHLDYIVAYFFCRSDQPQSLDAQTVIGCLTRQVVDALTPETAAKLPYSDESVLDEGQLHSLYNSLVINGRHICFVIDGIEELGVAARREIVEFFKHVRSRVRLKLCISHRLAADKRPRDELSTLKPQTELLIPKHNPDIQIFVKSKLASCLEAGELSVNDPAIVLDIQRALEIGAQGMFLWVALQIQGICAQKTDRDIRTALLDLPKDLPSTFTRILFHARETAPGFQQRLLHLIIAAFRPLTVEELREALSVAPCRPVWDSSTYINDIYAVLSSGGSLLVVDEEHTTVHFTHPSVQQFLLGNFGTNEDFRIDMKEAQTEMAQTVVTYLSYDMFDRRVTNRGPTLLAQVAPQKIITSALPSTSRSRQLALYLLRSKKQPDFDVGKALADYGPSRMTPDPVWFFRYAKENWVAHTKDLSSGSHDLIPLIQKLVQRGKIDTKSPLLWSIINSHVSIYRSQILHRRLWLSHITAALRHMRTDWDDFEFELDRVEPQFFARLLLLATTFKVYEIADHIIEKYNKTMPLATLFHDVLGISTNPLALGWIIIHFLSRAREGRPDLWDNDTGYVERMPLDLWASGRIKRIFGTPCYDVHMNGTLCEDYHADLGNETVLLKAGQKVGMLSRDYLHWTEKTNSHVAIRDPSRKVFIFVPSRLIWWGSGPSAELWPCPQGHTGIDFGTVSLCSCNIPHRYHHLFSELGDLRSTRD

SEQ ID NO: 35338 - DNA, 2975 bp, Muscodor strobelii
  misc_feature: SGI EST ID NO. CUFF.84134.0
  misc_feature: Variant of the nucleotide sequence at SEQ ID NO 35336
cagagcttttgatggatgccgggcgatcagctccacgctatcaggagctcgtggcaatctatccggattcaaaacctttgcaggcgcttcattgcgagtatttgatcgtcatagtacaactctgtcgacacgtagtcacggtctgcaatcagtcttcaatgggacaacttaaatcatttctcaaagattttgatgtatcgacctatggcaccgagctgcagaaacatgctcgtgcgatcaaagagcaacagcggttagaagaggcgcgatcaatctctaagacacgatctattgtcttatctaaggtggcagcagaattacgacgtgagcagctggaaaagaaggctaaaattctgaaagcatgttcgacttttgactatcaacagtcttggaaaatggcacggaaatgcggcgatgcgctatggattcgcgacaacgtgcagtactgtcattggcgagacaactctgcgtggccagctgcatggccaatccttctcttacttggtaggctcggggccggtaagacagtccttctcgccaacttggtggacgatcttcatatccacctggactacatcgttgcttatttcttttgccgaagtgaccagccacagtcgttggatgcccaaacggtcataggttgcttgacacggcaggttgtggatgcactgactccagaaaccgcggctaagctgccttatagtgatgagtctgtcctggacgagggacagctccacagcctgtacaactctctagtgatcaatgggcggcatatatgtttcgttattgatgggattgaggagcttggcgtagccgcaagacgtgagattgtcgaattttttaagcacgttcgatcacgcgttcgcctgaaactatgcatttctcatcgtctcgccgctgataaacgtccacgagacgaacttagtacacttaagcctcagactgaattacttatcccgaaacataacccggatatccagatcttcgtcaagtccaagcttgcttcgtgtcttgaggctggtgagctatcagtaaatgaccccgccatcgtgctggatatccagagagcattagaaatcggcgctcaggggatgtttttgtgggtggccttgcagatacaaggaatatgtgctcagaaaacagacagagatattcgcacagcattgttagacctaccaaaggaccttccatcaacctttacgagaattctatttcatgctagagaaacggcgcctgggtttcagcagcgactactgcatcttattatagcagccttccgtcccctgacggtggaagagctccgtgaagcacttagtgtcgcgccatgtcgtcctgtatgggactcatctacgtacataaatgacatatacgccgtcctgtcttctggtggaagcctcctcgttgttgacgaagagcataccaccgttcacttcacccatcccagtgtccagcaattcctgctagggaattttgggacaaatgaagactttaggatcgacatgaaagaggctcaaacagaaatggcccaaaccgtggtaacatatctaagctatgatatgttcgaccgccgggtcacgaaccgagggccgaccttgctagcccaagtcgcaccacagaagatcatcacatcagctctaccttcgacaagccgatcacggcagctggcgctttatctcttgcggtcaaagaagcagcccgattttgacgtcggcaaggcgcttgctgattatgggccctcgccggatctcacgatttgattccgctgatacagaaactggtccagagaggcaaaatagacacgaagtcgccattattgtggtcaattataaactcacatgtgagcatataccgatcacaaatactccatcgccgcctctggctctcccatataactgcggctctaagacacatgcggacggattgggatgatttcgaatttgaactagatcgagttgagccgcaattttttgccagattgcttcttctggcaacaactttcaaagtatatgaaattgccgatcacatcatagaaaagtacaacaaaaccatgccactagcaacgctcttccatgatgtgcttggcattagcactaacccgttggcgctcggatggatcattatccatttcttaagccgcgcacgtgaagggagaccagatctctgggacaatgacaccgggtatgttgaacgaatgccgttagatttgtgggcttcaggccggatcaagagaatattcggaacaccctgttatgacgtgcatatgaatgggacgttatgcgaagactaccacgcggacttgggaaacgagactgtgttattaaaggccggccagaaagtaggcatgctgagccgagactatttacactggacagaaaagacgaacagccacgtcgcaatcagagacccttctcgaaaagtatttattttcgttccttcgaggctcatttggtggggctcggggccgtcggcagagctttggccttgccctcagggccacaccgggatcgattttggtacggtgtcgttgtgtagctgcaacatcccccaccggtatcatcacttgttcagcgaactaggtgatctaagatcgacacgagactaacgggtgccgtctattacggccgccgtattacgaccctcataaatttgagtgcttccgccaatcaatccttgactagcaagggtaagcattcatagtagaggaagattaatactgcatttcaagctactgcaagatcaacacattgaacaggcatcttttttgactgcatgtgccctatagcaataatatgaagtcggaacaaagttagtcgctcacggattaccaggaaccacacatccgccagcaaagagttctccgaaccttactccagaagacttttcaattctattgataaactgacaggtcttcgacctccggaaagacaatgttaaagcacttattactgcgagtcaaatggacaactctactttca

SEQ ID NO: 35339 - DNA, 3336 bp, Muscodor strobelii
  misc_feature: SGI cDNA ID NO. 572234
  misc_feature: Encodes the peptide sequence at SEQ ID NO 35340
atggatggcgattgggaagaggcggcccgtgtgtcgtttccgccgcccgcgccgcgcgccttgactccgtcagccgtgtcctgtctcgcctttgacagcttccaggagctgttgtgggctggcaacgaatatggacgcgtctcctcgtactatggcgcaaagctccagctgtatacctccttcaaggtccactcctaccaggacaagttcgccgtcggccagattctgttcaacgagaagggtgttatcgtggtcggcagccgtggcgtctacatgcgccaccgacgcggcttctccatatggtccctcaggggtgcagaccagaagagacttggggagccgctcaagcttcccgagggcgaaatcatccacgacgacatgaaggagctacgatgtatgagctttacgtctaagggcacaagcgaaatcttggtagctggcgagcaggatgtcatgttggtcatcgacaccaacaagggcgagatcatcaagcgagtaccgacagatcacaggtatatgattatgcggagaagcagtcgctacatctgcgctgctacgcccgccggtgctgtacacatcattgattcggtcactttccagatcctcaagatctggaatgcccacacggctatgatccacgatatggatgcccagcacgacttcatagtgacctgcgggtactcgcttaggcagcacggccattacatgccagaccctttcgtcaacgtgtatgatctcaaaaacatgagctcgctcagtcctatcccctttcctgccggtgccgcctacgtgcgcatgcacccccgcatgtccaccaccagtcttgtcatgtcgcagagcggacagatgcatgttgttgatcttatgaatcctaatgctagtaatgttcgtcaagtccacagcattgcggtttccatggtggaaattgccccttctggggaagctgttgctttggccgatcacgattgcaccattcagctttggggctcgccccataagcttcattttaccgaattcgctcggcctatagagactggtgataccccgtcgcatgtacctagaattgactttgattcattcgatacgcctctcagctctgttggtatgccgtactatagagaagtactgctgtctgcatggccgagcaattcagtaacacaagtcggtgctccgcccgtgaagatcgacgctcagatggtggccggattcaaggaagacaaatggggctggtatggtaaaaacactcgtacaggccgccgaaaccaagttgaagacccacgcatcatcgagagtcctcagagcagcctcaagccccccaaattcttgagtgaaaaggcccgtgaattagcgaaatcgccttccggtaccccagcaccagaggagatcattccagaccacccaatcattgttctacaagatagcaagcttgaaagccataagtttgaggtgcccgagctataccagaatatcgaaatcaagtatagcaaattcggcattgatgacttcgatttcggctaccatacagacacacgacgactgggtctgcttgaagaggaaacccacgcagcttcaaaaagtttcatgttgcaacaactaactagattccttttgcttcaatcggcccagaacttcagtaccatggccaggtcctaccagaattccagcgtcaggggcccatccccaaccgcatttgaggaactgttccgaaccgtggcagttaattctatcaagtgcaataactgtaagattgagacaaataaaacggataataatacgatggtcaatgagctcatgtatccaccaaacatactgaatgtgaggatatctgatgaccatgtcagcattggcgatagaatggctgacagtgaaaagaaacccggtccgagaaaccaacgtgttaagggcacgacgttttcccaggtcttgaagatgagtgtggagcgagaagttgttgagaagggatggtgtcccacctgccggcgttattccaacttgtctataaggaagactattcaacagatgccaagtgtattggtgctcaccgctgccatcagcaatgacgagcatcgtcgtctttgggcaacacccggctggttaccagaggagatcggggtcatcgtcgaccatggcaacgtattctgctatgaaggggacgatttgaagctgcacatacaacgcggcatgcacaatattaacgtctattctcttactggactcgcggctcatatcgagggtggtcagcaacggtcgcatcttgtagccatggctaacgttgcacactcggccccgcatactcctgagaacagccagtggtatctgtttaatgactttcatgtaaaacccatcccgtcaagagaggcattgacgttcaatacatcttggaagacgccctccgtcattacgtatcaggtaaagactgccaacaacaagctcgatcacagctggaaacagaacattgattcccggctcttgtatctggatcttcagcccaacagaactgagaaaacatatcggacattagttcgcgagaccgagcccgtaggatccgacagcgtctttgcactcgataccgagttcgtcaagatttcccagtctgaaatcgaggttcactcagatggcgactcgaaaatcatccgtcctaccgtccatgccctagccagagcatcgctcgtcagaggcagcggcatggatgaaggcgaaccattcatcgacgactatatcactatcaaggagaaggtcgtggactatctgacattgtactccgggatcacggccgaagatctggacaagacaatcgccgcgcaaaggggccataacctagttccattgaagatcgcatacaagaagatatggatccttctaaacctgggttgcaaattcctcggtcacggcttaaaacaagatttcagggtgatcaatatacacataccgaaaacacagatcatcgacacgatcgaactattcttcataccccagcgtctgcggaagctcagcctgcagttcctggcgcatatggtgctgaaggaggacatccagctgacgactcacgactctatcgaagacgcgaggacggcgctgaggttgtataggaagtaccaggagtattcggaggcgggcatcttggacacgatgctcgtggagatttacgctaagggcgcgaactcgaacttcaaaccgcctgtgagagggggaagtgggggtgtggtcttgccgtataggacggatacaccgggcaatggaggggagggtgtggtagagccgccgacgacgccgtctaagaggtcgggctcgagtgctgtgcttacgccggggagtacgccgcttagggggcggtag

SEQ ID NO: 35340 - protein, 1111 aa, Muscodor strobelii
  misc_feature: SGI Peptide ID NO. 572234
  misc_feature (852)..(1029): Pfam Id: PF00929 Pfam Desc: Exonuclease
  misc_feature (1)..(1108): NCBI GI: 46128025 Blast Desc: FG08390.1 [Gibberella zeae PH-1]
  misc_feature (1)..(1077): NCBI GI: 116202135 Blast Desc: CHGG_08952 [Chaetomium globosum CBS 148.51] gi|88177470|gb|EAQ84938.1| CHGG_08952 [Chaetomium globosum CBS 148.51]
  misc_feature (1)..(1065): NCBI GI: 256733937 Blast Desc: NECHADRAFT_91728 [Nectria haematococca mpVI 77-13-4]
  misc_feature (43)..(1094): NCBI GI: 261360733 Blast Desc: PAB-dependent poly(A)-specific ribonuclease subunit PAN2 [Verticillium albo-atrum VaMs.102]
  misc_feature (1)..(1100): NCBI GI: 121930455 Blast Desc: PAB-dependent poly(A)-specific ribonuclease subunit PAN2 [Verticillium albo-atrum VaMs.102]
  misc_feature (1)..(1067): NCBI GI: 212529172 Blast Desc: PAB-dependent poly(A)-specific ribonuclease subunit (Pan2), [Penicillium marneffei ATCC 18224] gi|210074141|gb|EEA28228.1| PAB-dependent poly(A)-specific ATCC
  misc_feature (1)..(1070): NCBI GI: 189191286 Blast Desc: PAB-dependent poly(A)-specific ribonuclease subunit pan2 [Pyrenophora tritici-repentis Pt-1C-BFP] gi|187973588|gb|EDU41087.1| PAB-dependent poly(A)-specific pan2
  misc_feature (1)..(1110): NCBI GI: 239615718 Blast Desc: PAB-dependent poly(A)-specific ribonuclease subunit pan2 [Ajellomyces dermatitidis ER-3]
  misc_feature (1)..(1110): NCBI GI: 261198126 Blast Desc: PAB-dependent poly(A)-specific ribonuclease subunit pan2 [Ajellomyces dermatitidis SLH14081] gi|239595428|gb|EEQ78009.1| PAB-dependent poly(A)-specific pan2
  misc_feature (1)..(1110): NCBI GI: 226289512 Blast Desc: PAB-dependent poly(A)-specific ribonuclease subunit pan2 [Paracoccidioides brasiliensis Pb18]
  misc_feature (1)..(1063): SWISSPROT Homolog: EC 3.1.13.4 Poly(A)-specific ribonuclease
MDGDWEEAARVSFPPPAPRALTPSAVSCLAFDSFQELLWAGNEYGRVSSYYGAKLQLYTSFKVHSYQDKFAVGQILFNEKGVIVVGSRGVYMRHRRGFSIWSLRGADQKRLGEPLKLPEGEIIHDDMKELRCMSFTSKGTSEILVAGEQDVMLVIDTNKGEIIKRVPTDHRYMIMRRSSRYICAATPAGAVHIIDSVTFQILKIWNAHTAMIHDMDAQHDFIVTCGYSLRQHGHYMPDPFVNVYDLKNMSSLSPIPFPAGAAYVRMHPRMSTTSLVMSQSGQMHVVDLMNPNASNVRQVHSIAVSMVEIAPSGEAVALADHDCTIQLWGSPHKLHFTEFARPIETGDTPSHVPRIDFDSFDTPLSSVGMPYYREVLLSAWPSNSVTQVGAPPVKIDAQMVAGFKEDKWGWYGKNTRTGRRNQVEDPRIIESPQSSLKPPKFLSEKARELAKSPSGTPAPEEIIPDHPIIVLQDSKLESHKFEVPELYQNIEIKYSKFGIDDFDFGYHTDTRRLGLLEEETHAASKSFMLQQLTRFLLLQSAQNFSTMARSYQNSSVRGPSPTAFEELFRTVAVNSIKCNNCKIETNKTDNNTMVNELMYPPNILNVRISDDHVSIGDRMADSEKKPGPRNQRVKGTTFSQVLKMSVEREVVEKGWCPTCRRYSNLSIRKTIQQMPSVLVLTAAISNDEHRRLWATPGWLPEEIGVIVDHGNVFCYEGDDLKLHIQRGMHNINVYSLTGLAAHIEGGQQRSHLVAMANVAHSAPHTPENSQWYLFNDFHVKPIPSREALTFNTSWKTPSVITYQVKTANNKLDHSWKQNIDSRLLYLDLQPNRTEKTYRTLVRETEPVGSDSVFALDTEFVKISQSEIEVHSDGDSKIIRPTVHALARASLVRGSGMDEGEPFIDDYITIKEKVVDYLTLYSGITAEDLDKTIAAQRGHNLVPLKIAYKKIWILLNLGCKFLGHGLKQDFRVINIHIPKTQIIDTIELFFIPQRLRKLSLQFLAHMVLKEDIQLTTHDSIEDARTALRLYRKYQEYSEAGILDTMLVEIYAKGANSNFKPPVRGGSGGVVLPYRTDTPGNGGEGVVEPPTTPSKRSGSSAVLTPGSTPLRGR

SEQ ID NO: 35341 - DNA, 4162 bp, Muscodor strobelii
  misc_feature: SGI EST ID NO. CUFF.84462.4
  misc_feature: Variant of the nucleotide sequence at SEQ ID NO 35339
gaagcgaggaagaacattacgaaacaagagcttagcgggaaggcgagaggcaaagaaacgctcgttacttgaagatggcatgtgctacccgggattgcgtagcttgatgcaggcgcgataaataccctggactacagagtcttggcgctggcgcaacatcgatcagcccaccatcgtcacagcattttgcatgcatttgctcttcatttaatgtcccggatagtaatattactgcctgaatttgttggcggcgcattgcgactctctttccgactccagccggcggacaatgaccgatcgccaagatggatggcgattgggaagaggcggcccgtgtgtcgtttccgccgcccgcgccgcgcgccttgactccgtcagccgtgtcctgtctcgcctttgacagcttccaggagctgttgtgggctggcaacgaatatggacgcgtctcctcgtactatggcgcaaagctccagctgtatacctccttcaaggtccactcctaccaggacaagttcgccgtcggccagattctgttcaacgagaagggtgttatcgtggtcggcagccgtggcgtctacatgcgccaccgacgcggcttctccatatggtccctcaggggtgcagaccagaagagacttggggagccgctcaagcttcccgagggcgaaatcatccacgacgacatgaaggagctacgatgtatgagctttacgtctaagggcacaagcgaaatcttggtagctggcgagcaggatgtcatgttggtcatcgacaccaacaagggcgagatcatcaagcgagtaccgacagatcacaggtatatgattatgcggagaagcagtcgctacatctgcgctgctacgcccgccggtgctgtacacatcattgattcggtcactttccagatcctcaagatctggaatgcccacacggctatgatccacgatatggatgcccagcacgacttcatagtgacctgcgggtactcgcttaggcagcacggccattacatgccagaccctttcgtcaacgtgtatgatctcaaaaacatgagctcgctcagtcctatcccctttcctgccggtgccgcctacgtgcgcatgcacccccgcatgtccaccaccagtcttgtcatgtcgcagagcggacagatgcatgttgttgatcttatgaatcctaatgctagtaatgttcgtcaagtccacagcattgcggtttccatggtggaaattgccccttctggggaagctgttgctttggccgatcacgattgcaccattcagctttggggctcgccccataagcttcattttaccgaattcgctcggcctatagagactggtgataccccgtcgcatgtacctagaattgactttgattcattcgatacgcctctcagctctgttggtatgccgtactatagagaagtactgctgtctgcatggccgagcaattcagtaacacaagtcggtgctccgcccgtgaagatcgacgctcagatggtggccggattcaaggaagacaaatggggctggtatggtaaaaacactcgtacaggccgccgaaaccaagttgaagacccacgcatcatcgagagtcctcagagcagcctcaagccccccaaattcttgagtgaaaaggcccgtgaattagcgaaatcgccttccggtaccccagcaccagaggagatcattccagaccacccaatcattgttctacaagatagcaagcttgaaagccataagtttgaggtgcccgagctataccagaatatcgaaatcaagtatagcaaattcggcattgatgacttcgatttcggttatttcaataaatcgcagtattccggactgcagaatcaccttgtcaatgcatacgtgaacccattactacagattatgcactatactccacttatccgaaacatagccctccaacatgcagcaacagcgtgcgtcgatgagctatgtttcttatgcgagctcggattcctctttgatatgctctataaagcagaaggagaagcttgccaggcctctaacctgattagaacacttagctaccatacagacacacgacgactgggtctgcttgaagaggaaacccacgcagcttcaaaaagtttcatgttgcaacaactaactagattccttttgcttcaatcggcccagaacttcagtaccatggccaggtcctaccagaattccagcgtcaggggcccatccccaaccgcatttgaggaactgttccgaaccgtggcagttaattctatcaagtgcaataactgtaagattgagacaaataaaacggataataatacgatggtcaatgagctcatgtatccaccaaacatactgaataaacccggtccgagaaaccaacgtgttaagggcacgacgttttcccaggtcttgaagatgagtgtggagcgagaagttgttgagaagggatggtgtcccacctgccggcgttattccaacttgtctataaggaagactattcaacagatgccaagtgtattggtgctcaccgctgccatcagcaatgacgagcatcgtcgtctttgggcaacacccggctggttaccagaggagatcggggtcatcgtcgaccatggcaacgtattctgctatgaaggggacgatttgaagctgcacatacaacgcggcatgcacaatattaacgtctattctcttactggactcgcggctcatatcgagggtggtcagcaacggtcgcatcttgtagccatggctaacgttgcacactcggccccgcatactcctgagaacagccagtggtatctgtttaatgactttcatgtaaaacccatcccgtcaagagaggcattgacgttcaatacatcttggaagacgccctccgtcattacgtatcaggtaaagactgccaacaacaagctcgatcacagctggaaacagaacattgattcccggctcttgtatctggatcttcagcccaacagaactgagaaaacatatcggacattagttcgcgagaccgagcccgtaggatccgacagcgtctttgcactcgataccgagttcgtcaagatttcccagtctgaaatcgaggttcactcagatggcgactcgaaaatcatccgtcctaccgtccatgccctagccagagcatcgctcgtcagaggcagcggcatggatgaaggcgaaccattcatcgacgactatatcactatcaaggagaaggtcgtggactatctgacattgtactccgggatcacggccgaagatctggacaagacaatcgccgcgcaaaggggccataacctagttccattgaagatcgcatacaagaagatatggatccttctaaacctgggttgcaaattcctcggtcacggcttaaaacaagatttcagggtgatcaatatacacataccgaaaacacagatcatcgacacgatcgaactattcttcataccccagcgtctgcggaagctcagcctgcagttcctggcgcatatggtgctgaaggaggacatccagctgacgactcacgactctatcgaagacgcgaggacggcgctgaggttgtataggaagtaccaggagtattcggaggcgggcatcttggacacgatgctcgtggagatttacgctaagggcgcgaactcgaacttcaaaccgcctgtgagagggggaagtgggggtgtggtcttgccgtataggacggatacaccgggcaatggaggggagggtgtggtagagccgccgacgacgccgtctaagaggtcgggctcgagtgctgtgcttacgccggggagtacgccgcttagggggcggtagagggggaggggaagttgagacagagaatgatgggatgatgagttgctggacggagagatgaccgagcgggcgggggtgattgaacttgataggacgagaatcaaatatcgtagtgaaccgagaatcccgtgtgaacgattggtttgcagtgggaagactatccgtgagactgaggtatttacgtaaggggagatcgtagtcatagcatttagactaatgagagggatggggtggccgaacaacagttttctaagctttctaacatttaacctagatcacatcatgaaccataattttcttatcccatcacagagtacacttacgtgggtatcacgtactag

SEQ ID NO: 35342 - DNA, 1317 bp, Muscodor strobelii
  misc_feature: SGI cDNA ID NO. 572235
  misc_feature: Elevated expression when VOC is produced
  misc_feature: Encodes the peptide sequence at SEQ ID NO 35343
atggcgtcctccacggtaattgaaatctctcgccgggaccttcaggcacttgaaactccaccatcggcttcaatcaccgatctcaaggtgctttcctcttacaattggatcgaggcacctagcgccacgccgacgattgctgtccctgggagccctgctctctgggcagctccaaaagggcctcagcggctaactaaggactctggacttatatacatcgcccagaattctgctcgtcaccccgacagtcccctcgagcccctgttccgtgcaatttacaagtcgaattccgcatttgatatccggtcgactgacgttgtgactgatcgcaacaatatccggaaacttctccaattcgtcgaccccgactctgccaaagatggcgttgaagaattcaccattcgaatcgagacgataggcaacactgcacttttctcacgcgaggaggcaaaaactatggagtatattggtgccaatgagtttaggggcttcggtcacgagttcgaaaaggcgtataccgtcgatcaaattgacaagagcaccggccatcacagaatcatctcttaccgtctgggcggcctgaaattcatcgtacgccacgaaaccgacggatatgttgatgcgtatgataaagacttgccttgtcccacccattccgttggccacgtaccccaagatgagctggccgacattttgggatcgttgtctatatctccggatgcctccaagttagtagtcaaacagggaggccgtatgatccctcaggattccacacttgaaatcaagacacgggcaatccatcggccactcgttgttgaggacatcgcgccgcagctctgggtaagtcaaactctgaagctcgtgcgagcttatcaccagaagggcatctttcaagaaccgcgagttgaggacgtgactgcccaagtcaaggcgtgggaaggacgcaagcagaagcagttgaaaacaatggtagccctaattcagaacatcgtcagccacgtgaaggagcttggaggtgttgttacgctaaattactcgccacggactgacaaactgttgctgcgccgcgagaaaggggagaaaagaatgctgcctcaggacctgtatctgaagtggaatgcgcaaacctaccaggcgccggtcactattgatgacgctagttgcgaaaaccccaatgacgttgagcaattcgaggcgggtttatcaaaaataagtaagaaaaatgacgaaacagctgacaatcgtagcctaacaaagtcgcagaaaggaacatggatggatgatttgaaacccaaaatcactaggaactcgcattga

SEQ ID NO: 35343 - protein, 438 aa, Muscodor strobelii
  misc_feature: SGI Peptide ID NO. 572235
  misc_feature (1)..(404): NCBI GI: 258572252 Blast Desc: geranylgeranyl pyrophosphate synthetase [Uncinocarpus reesii 1704] gi|237905158|gb|EEP79559.1| geranylgeranyl pyrophosphate synthetase [Uncinocarpus reesii 1704]
  misc_feature (1)..(369): NCBI GI: 212533095 Blast Desc: conserved [Penicillium marneffei ATCC 18224] gi|210072068|gb|EEA26157.1| conserved [Penicillium marneffei ATCC 18224]
  misc_feature (1)..(379): NCBI GI: 121710528 Blast Desc: conserved [Aspergillus clavatus NRRL 1] gi|119401030|gb|EAW11454.1| conserved [Aspergillus clavatus NRRL 1]
  misc_feature (1)..(371): NCBI GI: 242820998 Blast Desc: conserved [Talaromyces stipitatus ATCC 10500] gi|218712513|gb|EED11938.1| conserved [Talaromyces stipitatus ATCC 10500]
  misc_feature (1)..(371): NCBI GI: 145236373 Blast Desc: An06g00030 [Aspergillus niger] gi|134075287|emb|CAL00753.1| protein product [Aspergillus niger]
  misc_feature (1)..(371): NCBI GI: 169772267 Blast Desc: [Aspergillus oryzae RIB40] gi|83768463|dbj|BAE58600.1| protein product [Aspergillus oryzae]
  misc_feature (24)..(375): NCBI GI: 238846043 Blast Desc: conserved [Microsporum canis CBS 113480]
  misc_feature (1)..(375): NCBI GI: 119471092 Blast Desc: NFIA_055760 [Neosartorya fischeri NRRL 181] gi|119406276|gb|EAW16227.1| conserved [Neosartorya fischeri NRRL 181]
  misc_feature (1)..(380): NCBI GI: 240281418 Blast Desc: conserved [Ajellomyces capsulatus H143]
  misc_feature (24)..(384): NCBI GI: 225555198 Blast Desc: conserved [Ajellomyces capsulatus G186AR]
  misc_feature: Useful for introducing or modulating the production of volatile compounds
MASSTVIEISRRDLQALETPPSASITDLKVLSSYNWIEAPSATPTIAVPGSPALWAAPKGPQRLTKDSGLIYIAQNSARHPDSPLEPLFRAIYKSNSAFDIRSTDVVTDRNNIRKLLQFVDPDSAKDGVEEFTIRIETIGNTALFSREEAKTMEYIGANEFRGFGHEFEKAYTVDQIDKSTGHHRIISYRLGGLKFIVRHETDGYVDAYDKDLPCPTHSVGHVPQDELADILGSLSISPDASKLVVKQGGRMIPQDSTLEIKTRAIHRPLVVEDIAPQLWVSQTLKLVRAYHQKGIFQEPRVEDVTAQVKAWEGRKQKQLKTMVALIQNIVSHVKELGGVVTLNYSPRTDKLLLRREKGEKRMLPQDLYLKWNAQTYQAPVTIDDASCENPNDVEQFEAGLSKISKKNDETADNRSLTKSQKGTWMDDLKPKITRNSH

SEQ ID NO: 35344 - DNA, 1969 bp, Muscodor strobelii
  misc_feature: SGI EST ID NO. CUFF.84144.0
  misc_feature: Variant of the nucleotide sequence at SEQ ID NO 35342
gcggtcagtatctctgtcctgccttcggccgaaacacaaccgaggaaaatagtcacacggatctttctctctttccccagaatttttgattattctgttgtcttttcgctgcaaattataaacccctcccggagccgctcccaagatgattccttgccgtaagctcaaggctccatttcttgacatgcactgcaaccatctgtgatatcaatgcgccaactagccaataaacatactccaagccgttacgccgcatacgatgtgctggataaggccattgttatagtcgaccaagaaatggcttgtcttaaccgcccaggtccacctaacgcggacaagaactcgattcctgccacttcttgacaatcgagattgtataattcctgctgtgatcatggcgtcctccacggtaattgaaatctctcgccgggaccttcaggcacttgaaactccaccatcggcttcaatcaccgatctcaaggtgctttcctcttacaattggatcgaggcacctagcgccacgccgacgattgctgtccctgggagccctgctctctgggcagctccaaaagggcctcagcggctaactaaggactctggacttatatacatcgcccagaattctgctcgtcaccccgacagtcccctcgagcccctgttccgtgcaatttacaagtcgaattccgcatttgatatccggtcgactgacgttgtgactgatcgcaacaatatccggaaacttctccaattcgtcgaccccgactctgccaaagatggcgttgaagaattcaccattcgaatcgagacgataggcaacactgcacttttctcacgcgaggaggcaaaaactatggagtatattggtgccaatgagtttaggggcttcggtcacgagttcgaaaaggcgtataccgtcgatcaaattgacaagagcaccggccatcacagaatcatctcttaccgtctgggcggcctgaaattcatcgtacgccacgaaaccgacggatatgttgatgcgtatgataaagacttgccttgtcccacccattccgttggccacgtaccccaagatgagctggccgacattttgggatcgttgtctatatctccggatgcctccaagttagtagtcaaacagggaggccgtatgatccctcaggattccacacttgaaatcaagacacgggcaatccatcggccactcgttgttgaggacatcgcgccgcagctctgggtaagtcaaactctgaagctcgtgcgagcttatcaccagaagggcatctttcaagaaccgcgagttgaggacgtgactgcccaagtcaaggcgtgggaaggacgcaagcagaagcagttgaaaacaatggtagccctaattcagaacatcgtcagccacgtgaaggagcttggaggtgttgttacgctaaattactcgccacggactgacaaactgttgctgcgccgcgagaaaggggagaaaagaatgctgcctcaggacctgtatctgaagtggaatgcgcaaacctaccaggcgccggtcactattgatgacgctagttgcgaaaaccccaatgacgttgagcaattcgaggcgggtttatcaaaaataaaaaggaacatggatggatgatttgaaacccaaaatcactaggaactcgcattgacaagcaagcagagagcaggattaactggtgatgtacggaggaaggagctgctgaatctgtgggatggtgtgtcaccattgataaagaatgttacaacaggtgctttgatgattcagctgtctctacagtaggtcaacagcggggatggctttcaaactagtagtactcacttgagtttacgatgatgacttttcggtctgagtattttcgaccttttcaaatttcaaattgtcgctctactgtatccttgggttcgtattaatatatagtccctttgtagtctgaggagattatcgataattgagacg

SEQ ID NO: 35345 - DNA, 2127 bp, Muscodor strobelii
  misc_feature: SGI cDNA ID NO. 572236
  misc_feature: Encodes the peptide sequence at SEQ ID NO 35346
atgtccgacctcaactcgtgggaagacgaccctgctgcgcaggacgacaacctgtcgcgccagacgcagcagatgaacctcaacaacaacaacaataatccggcccaagccaacaccttccgccccggtgccgcctctttccagcccaccgcccagacgttccagccccagcagtacggccaaggctacggccagtatcagcaacaaggctactacggcggcggccagaactactatccccagtacggacagcagcaaggatacggccaaggatacggtcagacttacggccagcaaggtggctacggaaaccagggctacggccagcaacagtatccccaataccagcagcagcaagcccccgctcagcagcaacagcagcaacctcagcaggttccgactatcgccaagcgatccgacgacctcaacaagccaatagccactaaagaagggggcgcaaaggtcttgagcataggcggcgatgcgcccaaacctaagcctgccgccgctgcccccgccaaggttctctccatcggagtcccagcaccacccaaggacgagcccaagaaggaagatgcgcccaaagaggaggctcctgcagagacagctgccaaggtcaccgctgcgaaagccatcgagaagacgggtgagaccatgaagcccgccaagtcttcaagcggcaagacgtcacccacaccgtcatccggccggtccagtcccactagaggtggtgcgaagaaggaggctcgcgatgccgatgccgttgtccaagcccagactgccgatgtcgacgacgataccctgaaggacctctacggcaaggaacacgtcaacgtcatcttcttgggccacgtcgacgcgggcaagagtaccctaggcggaagtatcctctacgccaccggcatggtggacgagagaacgatggacaagtacaagcgggaggccaaggatctcggccgtgagacgtggtacctctcctgggccctcgatctcactaaggaggaacgatccaagggcaagacggtcgaggttgggcgtggcttcttcgagacggagaagcgccgatacagtattctcgatgcccccggccacaagacatatgtcccgtctatgattggtggtgcttctcaggcagatgttggtgttttagtgattagtgcacgaaagggcgagtacgagaccggtttcgagaagggtggccagacacgcgagcatgccatgctggctaagacacagggcgttaacaaattggtggtcgccatcaacaagatggacgatcccacggtgaactggtcgcatgaccgatacaaggagtgcactaccaagctcgccgctttcttgaagggtacaggatacaacctgaagacggacgtacaattcatgccaatcgctgcgcagcagacgatgggcatcaaggaccgtatccccgctggtgttgccccttggtacgacggcccttccctattggagtacttggacaatatgcaggcgttggagcgcaaggtcaacgcgccgttcatgatggctatcaacggaaaataccgagatctgggtaccatggttgagggcaagattgaggccggtgtctgcaaaaagaacatgacccttattatgatgcccaaccaagagaaggtcgaaatcgctgctctgtatggcgagacggaagacgaggtccccattgcccagtgtggtgatcaggtccgcatgcgtcttcgaggtattgaggaagacgacatctccccgggtttcgtgctatgctcgcccaagcggttggtgcacaacgtcaaggctttcgaagcacagatcaggatcttggagctgaagtccattctgagcgcaggcttcaactgcgtgcttcatgtgcacgccgccatcgaagaggtgacctttgctgctttactccataaattgcagaagggaactggaaggaagagcaaagtgccccccacacacgcgaagaggggcgacagcattatcgctcgtatggaggtcactggtggtgctggatccgtatgcatagagacattcgaggacgcgccgcaattaggtcgtttcactctgcgtgaccagggtcaaactattgctattggcaagatcactaagctcatcgctgaagaggcggcttag

SEQ ID NO: 35346 - protein, 708 aa, Muscodor strobelii
  misc_feature: SGI Peptide ID NO. 572236
  misc_feature (518)..(586): Pfam Id: PF03144 Pfam Desc: Elongation factor Tu domain 2
  misc_feature (274)..(497): Pfam Id: PF00009 Pfam Desc: Elongation factor Tu GTP binding domain
  misc_feature (592)..(703): Pfam Id: PF03143 Pfam Desc: Elongation factor Tu C-terminal domain
  misc_feature (1)..(706): NCBI GI: 156060267 Blast Desc: SS1G_02272 [Sclerotinia sclerotiorum 1980] gi|154699680|gb|EDN99418.1| SS1G_02272 [Sclerotinia sclerotiorum 1980]
  misc_feature (1)..(706): NCBI GI: 154292672 Blast Desc: BC1G_14662 [Botryotinia fuckeliana B05.10] gi|150845876|gb|EDN21069.1| BC1G_14662 [Botryotinia fuckeliana B05.10]
  misc_feature (121)..(708): NCBI GI: 25299452 Blast Desc: BC1G_14662 [Botryotinia fuckeliana B05.10] gi|150845876|gb|EDN21069.1| BC1G_14662 [Botryotinia fuckeliana B05.10]
  misc_feature (121)..(708): NCBI GI: 85097294 Blast Desc: eukaryotic peptide chain release factor GTP-binding subunit [Neurospora crassa OR74A] gi|28921907|gb|EAA31180.1| eukaryotic peptide chain release factor GTP-binding subunit
  misc_feature (1)..(705): NCBI GI: 116202141 Blast Desc: CHGG_08955 [Chaetomium globosum CBS 148.51] gi|88177473|gb|EAQ84941.1| CHGG_08955 [Chaetomium globosum CBS 148.51]
  misc_feature (133)..(708): NCBI GI: 39974809 Blast Desc: MGG_00449 [Magnaporthe grisea 70-15] gi|145018659|gb|EDK02938.1| MGG_00449 [Magnaporthe grisea 70-15]
  misc_feature (154)..(707): NCBI GI: 256733454 Blast Desc: NECHADRAFT_58889 [Nectria haematococca mpVI 77-13-4]
  misc_feature (154)..(707): NCBI GI: 46128451 Blast Desc: FG08603.1 [Gibberella zeae PH-1]
  misc_feature (129)..(691): NCBI GI: 171681932 Blast Desc: protein product [Podospora anserina] gi|170940925|emb|CAP66575.1| protein product [Podospora anserina]
  misc_feature (129)..(690): NCBI GI: 2832315 Blast Desc: translation release factor eRF3 [Podospora anserina]
MSDLNSWEDDPAAQDDNLSRQTQQMNLNNNNNNPAQANTFRPGAASFQPTAQTFQPQQYGQGYGQYQQQGYYGGGQNYYPQYGQQQGYGQGYGQTYGQQGGYGNQGYGQQQYPQYQQQQAPAQQQQQQPQQVPTIAKRSDDLNKPIATKEGGAKVLSIGGDAPKPKPAAAAPAKVLSIGVPAPPKDEPKKEDAPKEEAPAETAAKVTAAKAIEKTGETMKPAKSSSGKTSPTPSSGRSSPTRGGAKKEARDADAVVQAQTADVDDDTLKDLYGKEHVNVIFLGHVDAGKSTLGGSILYATGMVDERTMDKYKREAKDLGRETWYLSWALDLTKEERSKGKTVEVGRGFFETEKRRYSILDAPGHKTYVPSMIGGASQADVGVLVISARKGEYETGFEKGGQTREHAMLAKTQGVNKLVVAINKMDDPTVNWSHDRYKECTTKLAAFLKGTGYNLKTDVQFMPIAAQQTMGIKDRIPAGVAPWYDGPSLLEYLDNMQALERKVNAPFMMAINGKYRDLGTMVEGKIEAGVCKKNMTLIMMPNQEKVEIAALYGETEDEVPIAQCGDQVRMRLRGIEEDDISPGFVLCSPKRLVHNVKAFEAQIRILELKSILSAGFNCVLHVHAAIEEVTFAALLHKLQKGTGRKSKVPPTHAKRGDSIIARMEVTGGAGSVCIETFEDAPQLGRFTLRDQGQTIAIGKITKLIAEEAA

SEQ ID NO: 35347 - DNA, 2889 bp, Muscodor strobelii
  misc_feature: SGI EST ID NO. CUFF.84151.0
  misc_feature: Variant of the nucleotide sequence at SEQ ID NO 35345
cagacagcggtatttgagtaaccttcgcgctgtcgagttctaccccgccaggccaccgctaagccccgccaacacgcgatgaaggacattgaggtgtcttaagccatcgtcaaacagccatcaatcagcacgtgaagagccaatatagagttgaatatagtaaaactctgatcatagacaagggaactgttttcgataaacaacaaacgtagatatcccctgatttgtagtgttggctataactactgctgtcccaagctgggctttgaggtgcagtgtactctgcttttcttagtcgcacaaaaagtttccgggacttgtcacagcttcccatcttttgtttcttctacctcgccgtccattcttcctcacaccgactcatccaccatcaagacgcagaagcgcgcccgcacaccgtcaccatgtccgacctcaactcgtgggaagacgaccctgctgcgcaggacgacaacctgtcgcgccagacgcagcagatgaacctcaacaacaacaacaataatccggcccaagccaacaccttccgccccggtgccgcctctttccagcccaccgcccagacgttccagccccagcagtacggccaaggctacggccagtatcagcaacaaggctactacggcggcggccagaactactatccccagtacggacagcagcaaggatacggccaaggatacggtcagacttacggccagcaaggtggctacggaaaccagggctacggccagcaacagtatccccaataccagcagcagcaagcccccgctcagcagcaacagcagcaacctcagcaggttccgactatcgccaagcgatccgacgacctcaacaagccaatagccactaaagaagggggcgcaaaggtcttgagcataggcggcgatgcgcccaaacctaagcctgccgccgctgcccccgccaaggttctctccatcggagtcccagcaccacccaaggacgagcccaagaaggaagatgcgcccaaagaggaggctcctgcagagacagctgccaaggtcaccgctgcgaaagccatcgagaagacgggtgagaccatgaagcccgccaagtcttcaagcggcaagacgtcacccacaccgtcatccggccggtccagtcccactagaggtggtgcgaagaaggaggctcgcgatgccgatgccgttgtccaagcccagactgccgatgtcgacgacgataccctgaaggacctctacggcaaggaacacgtcaacgtcatcttcttgggccacgtcgacgcgggcaagagtaccctaggcggaagtatcctctacgccaccggcatggtggacgagagaacgatggacaagtacaagcgggaggccaaggatctcggccgtgagacgtggtacctctcctgggccctcgatctcactaaggaggaacgatccaagggcaagacggtcgaggttgggcgtggcttcttcgagacggagaagcgccgatacagtattctcgatgcccccggccacaagacatatgtcccgtctatgattggtggtgcttctcaggcagatgttggtgttttagtgattagtgcacgaaagggcgagtacgagaccggtttcgagaagggtggccagacacgcgagcatgccatgctggctaagacacagggcgttaacaaattggtggtcgccatcaacaagatggacgatcccacggtgaactggtcgcatgaccgatacaaggagtgcactaccaagctcgccgctttcttgaagggtacaggatacaacctgaagacggacgtacaattcatgccaatcgctgcgcagcagacgatgggcatcaaggaccgtatccccgctggtgttgccccttggtacgacggcccttccctattggagtacttggacaatatgcaggcgttggagcgcaaggtcaacgcgccgttcatgatggctatcaacggaaaataccgagatctgggtaccatggttgagggcaagattgaggccggtgtctgcaaaaagaacatgacccttattatgatgcccaaccaagagaaggtcgaaatcgctgctctgtatggcgagacggaagacgaggtccccattgcccagtgtggtgatcaggtccgcatgcgtcttcgaggtattgaggaagacgacatctccccgggtttcgtgctatgctcgcccaagcggttggtgcacaacgtcaaggctttcgaagcacagatcaggatcttggagctgaagtccattctgagcgcaggcttcaactgcgtgcttcatgtgcacgccgccatcgaagaggtgacctttgctgctttactccataaattgcagaagggaactggaaggaagagcaaagtgccccccacacacgcgaagaggggcgacagcattatcgctcgtatggaggtcactggtggtgctggatccgtatgcatagagacattcgaggacgcgccgcaattaggtcgtttcactctgcgtgaccagggtcaaactattgctattggcaagatcactaagctcatcgctgaagaggcggcttagaagaccaatgctgaggatgagtaatgtggtctaccataaggcgggggctatagcttcagaggaggtggcgccgtcatgtttgcagtcaggccatgacaaatgtcgatgattttccgacctcctatagaccatgaaagacgaagactatgatgatgaatgaaacatgtctgcggcaaaagcatcgacagggtgctggaatggaggccatatctagacatgaaagaatcaaaactgttacattttgcatctgctcacaaccacatgttgatgtaaaagatagtctagcaagcagactgctttgattgaattattctatccctacaatatacttgctgtagac

SEQ ID NO: 35348 - DNA, 1869 bp, Muscodor strobelii
  misc_feature: SGI cDNA ID NO. 572237
  misc_feature: Encodes the peptide sequence at SEQ ID NO 35349
atggacgcattcctgactaggctgtcttaccatgccaccagcttcgccatacgctcctgcttcgccctcacttccaagtatgtcatcagtcacggttgcaagctcttgactactatagaccacaatcccttgcgcctcgagttgagccgcctacaacgtcgcctagcccgtaagatcgaattggtatcgccaatattggaaaaaatagaactccgatacactcggggagactctactctcgagcctgtagtacgggttgcaaggagcctacgggaagatatagaatctctcgaagaacgactgagggtcgccaacttcaacccagcacaagatcaaaatggcagccgagattctcaggccgctgctgcgaagcggcaggttgaactccacgagatcatgggtgacatgaaggagctgattacgagcatcgacgatgcaattccactaatcaacttatggatatctgcgattggcggagtacaatcaccccccgactccttttcgcccattcgcttgttacaagccagcatgttgttgaacgtcggcgacactcagtttatcctggacccaagtcaacctatgcagatcggtccagacttctcactttcaatgtatatgctcttccgtggccatgcttcaagcgatgaagggcaagagccatatggcgttgaagagggccagagaaaacccatgtggcaagaagtcatacacaaggcgcgagtgcgacttctccgtgtgtctctcgacgacgaaacgccattgacgaacagcatggcaggtatgactctccgttcacgttatgcatacgagctccagatcgtggaagatttggatgacggacgtgtacatacgtgggagggtgctgatcagcaaccaacagcttatgatggcttacctttagcgggcatccgagacattgtaccaattcatcaaattgccaaggttttctatgccgatgttggaaagatcctcaacatcaataatgatgatggcgcttcaatgagcccggtattgttactgaaaagagatgtcggcgcccagccagcatacgagctttcttcagcatcagtaccactcgatacgccatctcagctttcaagcactgagaccggcacaatagataactcttgtgagtccgatgacgatgtgcaggacgagatagacatgcagcttcagcaggaattcttttctcgaggccagtcgcctgagacccaaattgtccgtgctgccatcgccgaaactcaatcggaagataaacataaacggattcctcataatctcgacccagaatggattgcattcgaagttttcgataatgagggcgatggatcatctgagtctgattcggactcgacaagcggggaaaaggatacgtccgacttgatagaggaacctgttaacccagaaaaagactgtctgcccagacacaccacccgcccttctgtagatccgaaccttataacacaattgaatcgtatgaacatcaacacctcccgtccctcatcacgcgactctcctgctctgaccaacagctccgatccaccatctactgttgtgcgtctcaatggcgatgttatggcagcggatgcgacagctgagcagagcccaataaacctaatagagcggtctccattcggcgcaataaaaacctcgctctcactactcgagatgctccttcgtctcacgagcctacaagagttcgagcagactacacatctcgcggcctcagatcacgtattgagattctatctcgacgaatctgcatccaatagtgggttgagcggacgagagaaatgggctgcgagcgcagaggctgagaaaaaggtcgggtttgacccctacggtcgtgatcaggaaagatacaaataa

SEQ ID NO: 35349 - protein, 622 aa, Muscodor strobelii
  misc_feature: SGI Peptide ID NO. 572237
  misc_feature (1)..(347): Pfam Id: PF05508 Pfam Desc: RanGTP-binding protein
  misc_feature (1)..(614): NCBI GI: 116202143 Blast Desc: CHGG_08956 [Chaetomium globosum CBS 148.51] gi|88177474|gb|EAQ84942.1| CHGG_08956 [Chaetomium globosum CBS 148.51]
  misc_feature (1)..(614): NCBI GI: 25465828 Blast Desc: CHGG_08956 [Chaetomium globosum CBS 148.51] gi|88177474|gb|EAQ84942.1| CHGG_08956 [Chaetomium globosum CBS 148.51]
  misc_feature (1)..(614): NCBI GI: 256733942 Blast Desc: NECHADRAFT_36818 [Nectria haematococca mpVI 77-13-4]
  misc_feature (1)..(614): NCBI GI: 46128453 Blast Desc: FG08604.1 [Gibberella zeae PH-1]
  misc_feature (1)..(614): NCBI GI: 156060269 Blast Desc: SS1G_02273 [Sclerotinia sclerotiorum 1980] gi|154699681|gb|EDN99419.1| SS1G_02273 [Sclerotinia sclerotiorum 1980]
  misc_feature (1)..(614): NCBI GI: 164426033 Blast Desc: NCU04789 [Neurospora crassa OR74A] gi|157071173|gb|EAA31179.2| conserved [Neurospora crassa OR74A]
  misc_feature (1)..(614): NCBI GI: 119480157 Blast Desc: RanGTP-binding protein, [Neosartorya fischeri NRRL 181] gi|119408261|gb|EAW18210.1| RanGTP-binding protein, [Neosartorya fischeri NRRL 181]
  misc_feature (1)..(614): NCBI GI: 146322805 Blast Desc: RanGTP-binding protein [Aspergillus fumigatus Af293] gi|129556811|gb|EAL87576.2| RanGTP-binding protein [Aspergillus fumigatus Af293]
  misc_feature (1)..(614): NCBI GI: 189201605 Blast Desc: ran GTP-binding protein [Pyrenophora tritici-repentis Pt-1C-BFP] gi|187984238|gb|EDU49726.1| ran GTP-binding protein [Pyrenophora tritici-repentis Pt-1C-BFP]
  misc_feature (1)..(614): NCBI GI: 67523249 Blast Desc: AN2081.2 [Aspergillus nidulans FGSC A4] gi|40745757|gb|EAA64913.1| AN2081.2 [Aspergillus nidulans FGSC A4] gi|259487450|tpe|CBF86139.1| TPA: RanGTP-binding protein FGSC
MDAFLTRLSYHATSFAIRSCFALTSKYVISHGCKLLTTIDHNPLRLELSRLQRRLARKIELVSPILEKIELRYTRGDSTLEPVVRVARSLREDIESLEERLRVANFNPAQDQNGSRDSQAAAAKRQVELHEIMGDMKELITSIDDAIPLINLWISAIGGVQSPPDSFSPIRLLQASMLLNVGDTQFILDPSQPMQIGPDFSLSMYMLFRGHASSDEGQEPYGVEEGQRKPMWQEVIHKARVRLLRVSLDDETPLTNSMAGMTLRSRYAYELQIVEDLDDGRVHTWEGADQQPTAYDGLPLAGIRDIVPIHQIAKVFYADVGKILNINNDDGASMSPVLLLKRDVGAQPAYELSSASVPLDTPSQLSSTETGTIDNSCESDDDVQDEIDMQLQQEFFSRGQSPETQIVRAAIAETQSEDKHKRIPHNLDPEWIAFEVFDNEGDGSSESDSDSTSGEKDTSDLIEEPVNPEKDCLPRHTTRPSVDPNLITQLNRMNINTSRPSSRDSPALTNSSDPPSTVVRLNGDVMAADATAEQSPINLIERSPFGAIKTSLSLLEMLLRLTSLQEFEQTTHLAASDHVLRFYLDESASNSGLSGREKWAASAEAEKKVGFDPYGRDQERYK

SEQ ID NO: 35350 - DNA, 2243 bp, Muscodor strobelii
  misc_feature: SGI EST ID NO. CUFF.84153.0
  misc_feature: Variant of the nucleotide sequence at SEQ ID NO 35348
tgcacctttgcacatgggaatattctgtagcaactgccatttgcctcgtagcatactcgacatatgacatcaatgcatcccaaatacacaactttcgaagctgcttgtcaggagcgccgtcttttgccatggacgcattcctgactaggctgtcttaccatgccaccagcttcgccatacgctcctgcttcgccctcacttccaagtatgtcatcagtcacggttgcaagctcttgactactatagaccacaatcccttgcgcctcgagttgagccgcctacaacgtcgcctagcccgtaagatcgaattggtatcgccaatattggaaaaaatagaactccgatacactcggggagactctactctcgagcctgtagtacgggttgcaaggagcctacgggaagatatagaatctctcgaagaacgactgagggtcgccaacttcaacccagcacaagatcaaaatggcagccgagattctcaggccgctgctgcgaagcggcaggttgaactccacgagatcatgggtgacatgaaggagctgattacgagcatcgacgatgcaattccactaatcaacttatggatatctgcgattggcggagtacaatcaccccccgactccttttcgcccattcgcttgttacaagccagcatgttgttgaacgtcggcgacactcagtttatcctggacccaagtcaacctatgcagatcggtccagacttctcactttcaatgtatatgctcttccgtggccatgcttcaagcgatgaagggcaagagccatatggcgttgaagagggccagagaaaacccatgtggcaagaagtcatacacaaggcgcgagtgcgacttctccgtgtgtctctcgacgacgaaacgccattgacgaacagcatggcaggtatgactctccgttcacgttatgcatacgagctccagatcgtggaagatttggatgacggacgtgtacatacgtgggagggtgctgatcagcaaccaacagcttatgatggcttacctttagcgggcatccgagacattgtaccaattcatcaaattgccaaggttttctatgccgatgttggaaagatcctcaacatcaataatgatgatggcgcttcaatgagcccggtattgttactgaaaagagatgtcggcgcccagccagcatacgagctttcttcagcatcagtaccactcgatacgccatctcagctttcaagcactgagaccggcacaatagataactcttgtgagtccgatgacgatgtgcaggacgagatagacatgcagcttcagcaggaattcttttctcgaggccagtcgcctgagacccaaattgtccgtgctgccatcgccgaaactcaatcggaagataaacataaacggattcctcataatctcgacccagaatggattgcattcgaagttttcgataatgagggcgatggatcatctgagtctgattcggactcgacaagcggggaaaaggatacgtccgacttgatagaggaacctgttaacccagaaaaagactgtctgcccagacacaccacccgcccttctgtagatccgaaccttataacacaattgaatcgtatgaacatcaacacctcccgtccctcatcacgcgactctcctgctctgaccaacagctccgatccaccatctactgttgtgcgtctcaatggcgatgttatggcagcggatgcgacagctgagcagagcccaataaacctaatagagcggtctccattcggcgcaataaaaacctcgctctcactactcgagatgctccttcgtctcacgagcctacaagagttcgagcagactacacatctcgcggcctcagatcacgtattgagattctatctcgacgaatctgcatccaatagtgggttgagcggacgagagaaatgggctgcgagcgcagaggctgagaaaaaggtcgggtttgacccctacggtcgtgatcaggaaagatacaaataacgaaggtatgaaaggtatatgctgctccggaattttctctggagtcgcaaagcgacatcgaagtacctagtgcctatgaagcaacgttttgggccaatcaccattctggcgctgacttcccgttgtgtctgcgaattcaatgactgaggaatggagagaatatgttgtatttcggcgttgatggtagataagtgtgcattagaaatacactagatggttaagatgaaatcaagtcatttgagccct

SEQ ID NO: 35351 - DNA, 1065 bp, Muscodor strobelii
  misc_feature: SGI cDNA ID NO. 572238
  misc_feature: Encodes the peptide sequence at SEQ ID NO 35352
atgatccgttcttacattgtggcagcagtgctcgcactggcctctatcgtctacgctcaatgcggctcgggcacaccagacgccaaagtgaccggctcaggaagctctttcacagcaacgaaaggctcgagctccgtgtacactggctccgactaccgtgctgcgatccaagccgcactcgactcaatcagcactggtcaacgcgtttccgtcatcgcatctggctcaatcggtgccaacactatcagcattagcagtggcaagatctttgagggttgcggtaccatcaacactgctaacagagctggtcacggcgccattgaatcgctgaatacggcggacgtgcagattccgtacctcacgatgacgggaaatccgtactttggcctgcgattctacggtactcggaatctttctctaggtaaaattactatgaacctcagtggtggtttgggcatacgcttcgatcgggacgaagcggccaactcaaatgtgaagatggatgtcatcaacgtcaccggtgctgggagccatgctgttgagacttggaacattgacggcctcaccgtcaatcaggtcatcgcaacaaacgtcggcgaatgcggcttgctgatccagaagactacgaatgctaaaattgggaccgtcaatggtaataatgttgctgcaggcaatggttatgccaccttccgaatggcgaacaacaacggtcagaaatccgatggcagttacggcacaaacgtatacgtcgataaagtcatctcccgcgggggcgggagaggcgtattctgtgtctcgcaatcaggtgccgctgaaatcaagagcgtcgacctcgcaagcaatggtaataacgccatcttgattgagaactgctacaacgtcaagatcctcggtggtaccgtacaaggtggaggcgaggtgcgaatctcatcccgtacggagttccctgtgactaaagacgtctcgattaccctgacggtgaacgataatactgtaaaagaatctccttgcggtgagaacattacgtggaatatctcgggcaacgcaggaaaatcaatttgttaa

SEQ ID NO: 35352 - protein, 354 aa, Muscodor strobelii
  misc_feature: SGI Peptide ID NO. 572238
  misc_feature (1)..(354): NCBI GI: 256724305 Blast Desc: NECHADRAFT_53463 [Nectria haematococca mpVI 77-13-4]
  misc_feature (3)..(354): NCBI GI: 169856171 Blast Desc: CC1G_11246 [Coprinopsis cinerea okayama7#130] gi|116504171|gb|EAU87066.1| CC1G_11246 [Coprinopsis cinerea okayama7#130]
  misc_feature (1)..(354): NCBI GI: 169771787 Blast Desc: [Aspergillus oryzae RIB40] gi|83768222|dbj|BAE58361.1| protein product [Aspergillus oryzae]
  misc_feature (1)..(354): NCBI GI: 159125843 Blast Desc: conserved [Aspergillus fumigatus A1163]
  misc_feature (1)..(354): NCBI GI: 70985446 Blast Desc: conserved [Aspergillus fumigatus Af293] gi|66845857|gb|EAL86191.1| conserved [Aspergillus fumigatus Af293]
  misc_feature (21)..(354): NCBI GI: 116201453 Blast Desc: CHGG_08611 [Chaetomium globosum CBS 148.51] gi|88177129|gb|EAQ84597.1| CHGG_08611 [Chaetomium globosum CBS 148.51]
  misc_feature (1)..(354): NCBI GI: 171691126 Blast Desc: protein product [Podospora anserina] gi|170945511|emb|CAP71623.1| protein product [Podospora anserina]
  misc_feature (6)..(354): NCBI GI: 39942552 Blast Desc: MGG_03356 [Magnaporthe grisea 70-15] gi|145015633|gb|EDK00123.1| MGG_03356 [Magnaporthe grisea 70-15]
  misc_feature (5)..(354): NCBI GI: 67903880 Blast Desc: AN8927.2 [Aspergillus nidulans FGSC A4] gi|40744905|gb|EAA64061.1| AN8927.2 [Aspergillus nidulans FGSC A4] gi|259486632|tpe|CBF84640.1| TPA: conserved [Aspergillus FGSC
  misc_feature (1)..(354): NCBI GI: 119499333 Blast Desc: NFIA_041050 [Neosartorya fischeri NRRL 181] gi|119414588|gb|EAW24527.1| conserved [Neosartorya fischeri NRRL 181]
MIRSYIVAAVLALASIVYAQCGSGTPDAKVTGSGSSFTATKGSSSVYTGSDYRAAIQAALDSISTGQRVSVIASGSIGANTISISSGKIFEGCGTINTANRAGHGAIESLNTADVQIPYLTMTGNPYFGLRFYGTRNLSLGKITMNLSGGLGIRFDRDEAANSNVKMDVINVTGAGSHAVETWNIDGLTVNQVIATNVGECGLLIQKTTNAKIGTVNGNNVAAGNGYATFRMANNNGQKSDGSYGTNVYVDKVISRGGGRGVFCVSQSGAAEIKSVDLASNGNNAILIENCYNVKILGGTVQGGGEVRISSRTEFPVTKDVSITLTVNDNTVKESPCGENITWNISGNAGKSIC

SEQ ID NO: 35353 - DNA, 444 bp, Muscodor strobelii
  misc_feature: SGI EST ID NO. CUFF.84173.0
  misc_feature: Variant of the nucleotide sequence at SEQ ID NO 35351
ggcgtattctgtgtctcgcaatcaggtgccgctgaaatcaagagcgtcgacctcgcaagcaatggtaataacgccatcttgattgagaactgctacaacgtcaagatcctcggtggtaccgtacaaggtggaggcgaggtgcgaatctcatcccgtacggagttccctgtgactaaagacgtctcgattaccctgacggtgaacgataatactgtaaaagaatctccttgcggtgagaacattacgtggaatatctcgggcaacgcaggaaaatcaatttgttaagcgcgagtgagctgaacgtgtatggcttgtcgccaattgagacatatgctggttgggttgattgcgaagtcatggggtgcatctcggcatgcgaactacacatcattttgtgcaatacagtcaaaaatcgaagctcttttttcatagaggaagtcgtac

SEQ ID NO: 35354 - DNA, 1158 bp, Muscodor strobelii
  misc_feature: SGI cDNA ID NO. 572239
  misc_feature: Encodes the peptide sequence at SEQ ID NO 35355
atgggtatcaacaaccctctcccgtcgtctcttgcatccgaatgtaaaaagtgcggcaagatcttaactgctttcatcgacccgagacaacctttaggtcctgacaaggtcatcccaccgcatattcttgcaaacgcaaagggtcttgccattctcaccgttctcaaagccgggttcctaggatctggtcgtttcggctccggcctcgtcgtcgctcgtcttcccgatggcaactggtctgctccctctgccatcgtcacagccggcggtggtttcggtggccagatcggcttcgaattgaccgacttcgtcttcatcctcaacgactcccacgccgttaagacattctcccaacagggttccattacacttggtggaaatgtatccattgctgccggtccgataggtcgcaatgctgaagctgctggcgcagcgtcactcaagagtgtggcaggtatcttcagctacagcaagaccaagggactgtttgccggtgtttcgctcgagggctctgctatagtagagcgcagagatgcaaacgagaaactgtacggtcagcgcttgactgctgcccagattcttaccggttccatgcggccaccacctcaagccgcacctctgctcgacattctcaattcaagagcgttcagcggctcacgtaccggcacgatgcacgacggagacagcatgtacaatgcctcccccgtatacgacgatcgccacgacgacgtagtctggaatggtcagaggggaagcgcatacggcgagggccagttcaatgcgccgcagagatcgtctacgtggcgagaggacgacttccagcgcccagcgggcggcggactaagtcgatcgaatacgagcgctgtggacgatgattatgtataccgcgatcgccctgttggtggcgcctcaaatgacggaccttcgagaccgacagcgccaaaaccgaactttgcgagtaaacaggctctgatgaagaaaaacgaggctgtcgctttgttcacatttgacgctgatcagcctggtgatctggcattcaagaaaggagatataattacggtgttgaagaagacggagagtgataacgactggtggaccggtatgattggcaacaaacacggtatattcccgagcaattacgtcaagatgaaggaataa

SEQ ID NO: 35355 - protein, 385 aa, Muscodor strobelii
  misc_feature: SGI Peptide ID NO. 572239
  misc_feature (87)..(218): Pfam Id: PF04366 Pfam Desc: Family of function (DUF500)
  misc_feature (328)..(384): Pfam Id: PF00018 Pfam Desc: SH3 domain
  misc_feature (329)..(383): Pfam Id: PF07653 Pfam Desc: Variant SH3 domain
  misc_feature (1)..(385): NCBI GI: 46135963 Blast Desc: FG09497.1 [Gibberella zeae PH-1]
  misc_feature (1)..(385): NCBI GI: 256727691 Blast Desc: [Nectria haematococca mpVI 77-13-4]
  misc_feature (1)..(385): NCBI GI: 116202635 Blast Desc: CHGG_09202 [Chaetomium globosum CBS 148.51] gi|88177720|gb|EAQ85188.1| CHGG_09202 [Chaetomium globosum CBS 148.51]
  misc_feature (1)..(385): NCBI GI: 85085600 Blast Desc: NCU03888 [Neurospora crassa OR74A] gi|28918620|gb|EAA28291.1| NCU03888 [Neurospora crassa OR74A]
  misc_feature (1)..(385): NCBI GI: 156060607 Blast Desc: SS1G_02443 [Sclerotinia sclerotiorum 1980] gi|154699850|gb|EDN99588.1| SS1G_02443 [Sclerotinia sclerotiorum 1980]
  misc_feature (1)..(381): NCBI GI: 259481235 Blast Desc: TPA: DUF500 and SH3 domain protein (AFU_orthologue; AFUA_6G07880) [Aspergillus nidulans FGSC A4]
  misc_feature (1)..(381): NCBI GI: 115398920 Blast Desc: ATEG_05871 [Aspergillus terreus NIH2624] gi|114191932|gb|EAU33632.1| ATEG_05871 [Aspergillus terreus NIH2624]
  misc_feature (1)..(378): NCBI GI: 67527829 Blast Desc: AN4168.2 [Aspergillus nidulans FGSC A4] gi|40740239|gb|EAA59429.1| AN4168.2 [Aspergillus nidulans FGSC A4]
  misc_feature (1)..(381): NCBI GI: 121699417 Blast Desc: DUF500 and SH3 domain protein [Aspergillus clavatus NRRL 1] gi|119396156|gb|EAW06588.1| DUF500 and SH3 domain protein [Aspergillus clavatus NRRL 1]
  misc_feature (1)..(382): NCBI GI: 145243508 Blast Desc: An11g02770 [Aspergillus niger] gi|134078954|emb|CAK96906.1| protein product [Aspergillus niger]
MGINNPLPSSLASECKKCGKILTAFIDPRQPLGPDKVIPPHILANAKGLAILTVLKAGFLGSGRFGSGLVVARLPDGNWSAPSAIVTAGGGFGGQIGFELTDFVFILNDSHAVKTFSQQGSITLGGNVSIAAGPIGRNAEAAGAASLKSVAGIFSYSKTKGLFAGVSLEGSAIVERRDANEKLYGQRLTAAQILTGSMRPPPQAAPLLDILNSRAFSGSRTGTMHDGDSMYNASPVYDDRHDDVVWNGQRGSAYGEGQFNAPQRSSTWREDDFQRPAGGGLSRSNTSAVDDDYVYRDRPVGGASNDGPSRPTAPKPNFASKQALMKKNEAVALFTFDADQPGDLAFKKGDIITVLKKTESDNDWWTGMIGNKHGIFPSNYVKMKE

SEQ ID NO: 35356 - DNA, 5573 bp, Muscodor strobelii
  misc_feature: SGI EST ID NO. CUFF.85111.1
  misc_feature: Variant of the nucleotide sequence at SEQ ID NO 35354
ccacattgaacatcatctcctagaattccaattcgctatcgaaaccaggcatccctttttctttgcgctcataaatattcaacagctgtctctccatctgttacttgcatattgccctgcgcacacgacaacttctcctcctcatcatacgaactcctgcgaccatgtccagacgggcgcccaaccccgctgccgagcgggctgcccagaaccagcagacgatcaaaagcctgctgaaattggaacccaacaaagtatgcgccgactgcaagaagaacaaacatccgcgatgggccagctggaatttgggtatctttatctgcattcgctgctccggcatccaccgcggcatgggcactcacatctccagagtcaagtcggtcgacctggattcttggaccgatgagcagctgcaaagcgtcctcaactggggcaatgcgcgtgccaacaaatactgggaggccaagcttgccgccagccacgtcccggccgaagccaagatcgagaacttcataaggactaaatacgaactcaagcgatgggtcatggatgggcccatgccaaaccccgccgacctggacgccgagggcgacgacgaggtgcccctgagcatcgtcaaggagaaacagagcattgagagaaaagtgtcacttcgcaacgctgccactgccgttcctccaccgcctggcgctgccccgccagccgaccttatcggcggcgatgaacctctccccagagccagcaccgctggacctcctgctcaaccacgtgtaccgccaaaagccccaccggctcccccgaaggcggccaaccctaaagactcactgttaggcttggatttcttgggagaggcgccctcggcccctcctcggccggccagtactacgggtacaggcggcatgggcggccagtcgagaccagatctcaagcaatccatcctttccctctatgcggccgctcctccacgaccacaaccgcaaacccaacagtcaggccatgcatcatccggctctttcagtggcttcggcggaatgcagtctccccccatgcagtcaccttcctcaggatatcagcaacagggcgccggcggtgggttgaacgatgccttcgccagcctcagcttcggcaacatgacgtcgcctaagagcccaccggtcgatgccttcgccaatctaactgccaaacgatcccccccgccctcgcaacagacacaatcaagtttctctagcttgggtggcggcagtttcttcgactccaagcctaatcaacctgcgccacagcacgaaaagaagccatccatgaactcgtcagacagcttcggcgctttcagctccaccagcatgtctcccaagccctctcagccaacagcagcagcatgtggcttcggagatatgttcgattggtcatcccccgcgcaagccaaagctcccgcgcctaaacccaagcccgccgctgctcccgcgcaggctcccaaaccaaactccgttttcaacctctctcagccccaaaacccagctccgccaccagccgcctcgaagcccgtcgcagtgaacacctccgacgccgacgtatggggaaacgcatggggcaaccccgagcctgccgctcctgcgcctcctccggtctcgaagcctgccgctaatgacttcggaggctggggcagcagcatgggcggcggatcactcgcgaaccagagtattgtccccggtgcgtccggcggcttcgcgaccacgccgaaggtggctgctgacgaagaatttggcggatgggcgagtagcacggggaaccagggaggaaacgcaaatgcgaagtctggcggtggatttggaaatgatgatttattcagcaacgtgtggcagtagacgcttcgcgggctgtggatacacgcatactcaggacgcatggtctttagcaagcatgtttgcagacgggatgctcgtgcagatatgccattgcgtgccattgtatcatggctggctgtacataacgcggcatgaagacgcaaaatagaaaatcaaccatgaaatgaaaggagtgaagttcctaatgatgtgatatttccccgatggaaaccaatatgaattaatcagtgctgtcaagacttaacgcctatgctatgctgttgttctttgtgaagtcatccctccagtagggatggcccagactattactacatcatctgtcggcaatctcaaaacgagtcctgtaggcgcacgctgctccgacgatactcagatctttgcacacggagactattggagccgctccatccgaagttctaccagtatccaacctctcttgtgaggccatagtcttgaagctgtgctccttctcccgtcatttctcgcggctcgtccattcgattcgtcggcttcaaagttccttaccatttccgccgcctgacgaattcaatccatcgtgttttaccagtagctgtgttctcgtgggattgatctaaaatatcaacttaagcccataatacaccaccaagaaaacaccaatgacgatcccagagagtttcagtatcgcgactttattccccgatgcggccatgcggcctagtctgcctgcggatccgcgtagttgtgaggacatgtttccgaatgtgtcgctctacgtacacacaccctattagcatatctcttctcccaactgggttgaaattccgtgtaggtatataggatcggatcgggccttggaaattgggagagtaatagagggatagagcaagagaagggggtctcgcacagtgttgtcgatgacgtcttgggcgcgcgcattgtcgtagatgtcgacggtgatgccgcgcagggaagatacttttgcggagagctcttcgagcctgtggttgttttggcgctcgcgctcgtaggcttcggacatttttacggttgtttagttggtattgtggtgagtgtggggatacgacaaggcgacggctcgagttctttgtcgtcggtgtgtctcttgcgatctctagacactgctaggcaaccggaattcgggatggtgagttcctccggcctcggatggggaggataaatcgcgagcgcgctggcgtggttactatgtctactgctgccgagattactgatgggttcgtattctatggaattgggttcggatttggattcgtcgattgtagtggttgcattgtccgaaactcgacatgcagttagagtctgagaaaggggccaaggagatggttgaggcgctgggatgacgcagactgtggcgtaggagcctggggttcgcgagctaacggtcgcctgcgccacagctatgtgagtacaggtcggctgctcgccttgtccaaaaggttatccccacgttttaggtgggacagctggaggggttcttccggcttgacagacgagacatggtatgagatggcctaaattaccatgtcaagcttgtggcagagccgacagcgtgacgacaggcgcttttgtcttcgtcatctcaacggcaaacaatgcagcaggcagctgtatctcacgagtgagccgcaggaggaaaataaaagagcttggagctcatgaatgaaatctcatgacttcgtcccttaccttcttgtacctattctttcactcatcctcatcataacgaagattgcctattaatagtacctgttaatacctatcatcgtcataactccagtagaccagcattgacaattgtcactgacgcataaataagttgtacacccatatactgaaattcgacccgtcactcgtcacccgtcatactattccaaatctcgcctggctgcctcaacgaaacccccgcagtcaccacgctacaatagcccagatttatatccagtcgaacagtggacacccctttggttaggtactcgtcatatccaccacgactcacgccccgtcagctgttacttgccgcctcccgggaccctctctaattccccaacgccgcatctccaacgacatcccactctgcacatacccataccgaactcccgcattacatacctgcctgacaacaccaccagagccccatcgtcagttccctttgacggtcgccatgggtatcaacaaccctctcccgtcgtctcttgcatccgaatgtaaaaagtgcggcaagatcttaactgctttcatcgacccgagacaacctttaggtcctgacaaggtcatcccaccgcatattcttgcaaacgcaaagggtcttgccattctcaccgttctcaaagccgggttcctaggatctggtcgtttcggctccggcctcgtcgtcgctcgtcttcccgatggcaactggtctgctccctctgccatcgtcacagccggcggtggtttcggtggccagatcggcttcgaattgaccgacttcgtcttcatcctcaacgactcccacgccgttaagacattctcccaacagggttccattacacttggtggaaatgtatccattgctgccggtccgataggtcgcaatgctgaagctgctggcgcagcgtcactcaagagtgtggcaggtatcttcagctacagcaagaccaagggactgtttgccggtgtttcgctcgagggctctgctatagtagagcgcagagatgcaaacgagaaactgtacggtcagcgcttgactgctgcccagattcttaccggttccatgcggccaccacctcaagccgcacctctgctcgacattctcaattcaagagcgttcagcggctcacgtaccggcacgatgcacgacggagacagcatgtacaatgcctcccccgtatacgacgatcgccacgacgacgtagtctggaatggtcagaggggaagcgcatacggcgagggccagttcaatgcgccgcagagatcgtctacgtggcgagaggacgacttccagcgcccagcgggcggcggactaagtcgatcgaatacgagcgctgtggacgatgattatgtataccgcgatcgccctgttggtggcgcctcaaatgacggaccttcgagaccgacagcgccaaaaccgaactttgcgagtaaacaggctctgatgaagaaaaacgaggctgtcgctttgttcacatttgacgctgatcagcctggtgatctggcattcaagaaaggagatataattacggtgttgaagaagacggagagtgataacgactggtggaccggtatgattggcaacaaacacggtatattcccgagcaattacgtcaagatgaaggaataagatacagatcgaagaggcatgcgatgttcatgatatgtgtgtagtagactgcacgcacgcaacggagaagcgtagtgttgtcgacggcatagaatctgaagggccgaagattggaggggacaagaagtgcagatgtgcatttacaaaatcgaatacggacagactatttgcaactggggcattatcggatgactatgagatgagatggcgaggttatgtgtttcgcgcaaattagtttgagcctcatgataccttatctcgaaattgagtttttgatttggtgcgattgggctattatacttttctacgaggaccgtgaacttgtgctgatatgtgaacgatgtgtagatattcacaggtgactccttttc

SEQ ID NO: 35357 - DNA, 294 bp, Muscodor strobelii
  misc_feature: SGI cDNA ID NO. 572240
  misc_feature: Reduced expression when VOC is produced
  misc_feature: Encodes the peptide sequence at SEQ ID NO 35358
atgtccgaagcctacgagcgcgagcgccaaaacaaccacaggctcgaagagctctccgcaaaagtatcttccctgcgcggcatcaccgtcgacatctacgacaatgcgcgcgcccaagacgtcatcgacaacactagcgacacattcggaaacatgtcctcacaactacgcggatccgcaggcagactaggccgcatggccgcatcggggaataaagtcgcgatactgaaactctctgggatcgtcattggtgttttcttggtggtgtattatgggcttaagttgatattttag

SEQ ID NO: 35358 - protein, 97 aa, Muscodor strobelii
  misc_feature: SGI Peptide ID NO. 572240
  misc_feature (1)..(97): NCBI GI: 46135965 Blast Desc: FG09498.1 [Gibberella zeae PH-1]
  misc_feature (1)..(97): NCBI GI: 39940574 Blast Desc: conserved [Magnaporthe grisea 70-15] gi|145010812|gb|EDJ95468.1| conserved [Magnaporthe grisea 70-15]
  misc_feature (1)..(97): NCBI GI: 256727113 Blast Desc: [Nectria haematococca mpVI 77-13-4]
  misc_feature (1)..(97): NCBI GI: 261359423 Blast Desc: conserved [Verticillium albo-atrum VaMs.102]
  misc_feature (1)..(97): NCBI GI: 171682380 Blast Desc: protein product [Podospora anserina] gi|170941149|emb|CAP66799.1| protein product [Podospora anserina]
  misc_feature (1)..(91): NCBI GI: 154314132 Blast Desc: BC1G_05009 [Botryotinia fuckeliana B05.10] gi|150849155|gb|EDN24348.1| BC1G_05009 [Botryotinia fuckeliana B05.10]
  misc_feature (1)..(96): NCBI GI: 85085604 Blast Desc: NCU03889 [Neurospora crassa OR74A] gi|28918621|gb|EAA28292.1| conserved [Neurospora crassa OR74A]
  misc_feature (1)..(96): NCBI GI: 156060603 Blast Desc: SS1G_02441 [Sclerotinia sclerotiorum 1980] gi|154699848|gb|EDN99586.1| SS1G_02441 [Sclerotinia sclerotiorum 1980]
  misc_feature (1)..(97): NCBI GI: 238837932 Blast Desc: SNARE [Microsporum canis CBS 113480]
  misc_feature (1)..(91): NCBI GI: 169618211 Blast Desc: SNOG_12295 [Phaeosphaeria nodorum SN15] gi|111058988|gb|EAT80108.1| SNOG_12295 [Phaeosphaeria nodorum SN15]
  misc_feature: Useful for introducing or modulating the production of volatile compounds
MSEAYERERQNNHRLEELSAKVSSLRGITVDIYDNARAQDVIDNTSDTFGNMSSQLRGSAGRLGRMAASGNKVAILKLSGIVIGVFLVVYYGLKLIF

SEQ ID NO: 35359 - DNA, 5831 bp, Muscodor strobelii
  misc_feature: SGI EST ID NO. CUFF.85110.0
  misc_feature: Variant of the nucleotide sequence at SEQ ID NO 35357
gaaaaggagtcacctgtgaatatctacacatcgttcacatatcagcacaagttcacggtcctcgtagaaaagtataatagcccaatcgcaccaaatcaaaaactcaatttcgagataaggtatcatgaggctcaaactaatttgcgcgaaacacataacctcgccatctcatctcatagtcatccgataatgccccagttgcaaatagtctgtccgtattcgattttgtaaatgcacatctgcacttcttgtcccctccaatcttcggcccttcagattctatgccgtcgacaacactacgcttctccgttgcgtgcgtgcagtctactacacacatatcatgaacatcgcatgcctcttcgatctgtatcttattccttcatcttgacgtaattgctcgggaatataccgtgtttgttgccaatcataccggtcctatctcatgttagctctccacaacctaagtcatgtgataaaaaagtccaacttaccaccagtcgttatcactctccgtcttcttcaacaccgtaattatatctcctttcttgaatgccagatcaccaggctgatcagcgtcaaatgtgaacaaagcgacagcctcgtttttcttcatcagagcctgtttactcgcaaagttcggttttggcgctgtcggtctcgaaggtccgtcatttgaggcgccaccaacagggcgatcgcggtatacataatcatcgtccacagcgctcgtattcgatcgacttagtccgccgcccgctgggcgctggaagtcgtcctctcgccacgtagacgatctctgcggcgcattgaactggccctcgccgtatgcgcttcccctctgaccattccagactacgtcgtcgtggcgatcgtcgtatacgggggaggcattgtacatgctgtctccgtcgtgcatcgtgccggtacgtgagccgctgaacgctcttgaattgagaatgtcgagcagaggtgcggcttgaggtggtggccgcatggaaccggtaagaatctgggcagcagtcaagcgctgaccgtacagtttctcgtttgcatctctgcgctctactatagcagagccctcgagcgaaacaccggcaaacagtcccttggtcttgctgtagctgaagatacctgccacactcttgagtgacgctgcgccagcagcttcagcattgcgacctatcggaccggcagcaatggatacatttccaccaagtgtaatggaaccctgttgggagaatgtcttaacggcgtgggagtcgttgaggatgaagacgaagtcggtcaattcgaagccgatctggccaccgaaaccaccgccggctgtgacgatggcagagggagcagaccagttgccatcgggaagacgagcgacgacgaggccggagccgaaacgaccagatcctaggaacccggctttgagaacggtgagaatggcaagaccctaaaagcaatacgtcagtggtcggtgtctcggttgagtaaggtgacactagcaccgggatgtagggccaggcagcgagccttgggcaaacggagactcacctttgcgtttgcaagaatatgcggtgggatgaccttgtcaggacctaaaggttgtctcgggtcgatgaaagcagttaagatcttgccgcactttttacattcggctgttcgcgggtattagcattattagccttcgtagcctcgttgcgcggtattgcaaatgcggcctctggcagaccacccggcaataccaatggttcggaatgagcggggttcgactcacatgcaagagacgacgggagagggttgttgatacccatggcgaccgtcaaagggaactgacgatggggctctggtggtgttgtcaggcaggtatgtaatgcgggagttcggtatgggtatgtgcagagtgggatgtcgttggagatgcggcgttggggaattagagagggtcccgggaggcggcaagtaacagctgacggggcgtgagtcgtggtggatatgacgagtacctaaccaaaggggtgtccactgttcgactggatataaatctgggctattgtagcgtggtgactgcgggggtttcgttgaggcagccaggcgagatttggaatagtatgacgggtgacgagtgacgggtcgaatttcagtatatgggtgtacaacttatttatgcgtcagtgacaattgtcaatgctggtctactggagttatgacgatgataggtattaacaggtactattaataggcaatcttcgttatgatgaggatgagtgaaagaataggtacaagaaggtaagggacgaagtcatgagatttcattcatgagctccaagctcttttattttcctcctgcggctcactcgtgagatacagctgcctgctgcattgtttgccgttgagatgacgaagacaaaagcgcctgtcgtcacgctgtcggctctgccacaagcttgacatggtaatttaggccatctcataccatgtctcgtctgtcaagccggaagaacccctccagctgtcccacctaaaacgtggggataaccttttggacaaggcgagcagccgacctgtactcacatagctgtggcgcaggcgaccgttagctcgcgaaccccaggctcctacgccacagtctgcgtcatcccagcgcctcaaccatctccttggcccctttctcagactctaactgcatgtcgagtttcggacaatgcaaccactacaatcgacgaatccaaatccgaacccaattccatagaatacgaacccatcagtaatctcggcagcagtagacatagtaaccacgccagcgcgctcgcgatttatcctccccatccgaggccggaggaactcaccatcccgaattccggttgcctagcagtgtctagagatcgcaagagacacaccgacgacaaagaactcgagccgtcgccttgtcgtatccccacactcaccacaataccaactaaacaaccgtaaaaatgtccgaagcctacgagcgcgagcgccaaaacaaccacaggctcgaagagctctccgcaaaagtatcttccctgcgcggcatcaccgtcgacatctacgacaatgcgcgcgcccaagacgtcatcgacaacactagcgacacattcggaaacatgtcctcacaactacgcggatccgcaggcagactaggccgcatggccgcatcggggaataaagtcgcgatactgaaactctctgggatcgtcattggtgttttcttggtggtgtattatgggcttaagttgatattttagatcaatcccacgagaacacagctactggtaaaacacgatggattgaattcgtcaggcggcggaaatggtaaggaactttgaagccgacgaatcgaatggacgagccgcgagaaatgacgggagaaggagcacagcttcaagactatggcctcacaagagaggttggatactggtagaacttcggatggagcggctccaatagtctccgtgtgcaaagatctgagtatcgtcggagcagcgtgcgcctacaggactcgttttgagattgccgacagatgatgtagtaatagtctgggccatccctactggagggatgacttcacaaagaacaacagcatagcataggcgttaagtcttgacagcactgattaattcatattggtttccatcggggaaatatcacatcattaggaacttcactcctttcatttcatggttgattttctattttgcgtcttcatgccgcgttatgtacagccagccatgatacaatggcacgcaatggcatatctgcacgagcatcccgtctgcaaacatgcttgctaaagaccatgcgtcctgagtatgcgtgtatccacagcccgcgaagcgtctactgccacacgttgctgaataaatcatcatttccaaatccaccgccagacttcgcatttgcgtttcctccctggttccccgtgctactcgcccatccgccaaattcttcgtcagcagccaccttcggcgtggtcgcgaagccgccggacgcaccggggacaatactctggttcgcgagtgatccgccgcccatgctgctgccccagcctccgaagtcattagcggcaggcttcgagaccggaggaggcgcaggagcggcaggctcggggttgccccatgcgtttccccatacgtcggcgtcggaggtgttcactgcgacgggcttcgaggcggctggtggcggagctgggttttggggctgagagaggttgaaaacggagtttggtttgggagcctgcgcgggagcagcggcgggcttgggtttaggcgcgggagctttggcttgcgcgggggatgaccaatcgaacatatctccgaagccacatgctgctgctgttggctgagagggcttgggagacatgctggtggagctgaaagcgccgaagctgtctgacgagttcatggatggcttcttttcgtgctgtggcgcaggttgattaggcttggagtcgaagaaactgccgccacccaagctagagaaacttgattgtgtctgttgcgagggcgggggggatcgtttggcagttagattggcgaaggcatcgaccggtgggctcttaggcgacgtcatgttgccgaagctgaggctggcgaaggcatcgttcaacccaccgccggcgccctgttgctgatatcctgaggaaggtgactgcatggggggagactgcattccgccgaagccactgaaagagccggatgatgcatggcctgactgttgggtttgcggttgtggtcgtggaggagcggccgcatagagggaaaggatggattgcttgagatctggtctcgactggccgcccatgccgcctgtacccgtagtactggccggccgaggaggggccgagggcgcctctcccaagaaatccaagcctaacagtgagtctttagggttggccgccttcgggggagccggtggggcttttggcggtacacgtggttgagcaggaggtccagcggtgctggctctggggagaggttcatcgccgccgataaggtcggctggcggggcagcgccaggcggtggaggaacggcagtggcagcgttgcgaagtgacacttttctctcaatgctctgtttctccttgacgatgctcaggggcacctcgtcgtcgccctcggcgtccaggtcggcggggtttggcatgggcccatccatgacccatcgcttgagttcgtatttagtccttatgaagttctcgatcttggcttcggccgggacgtggctggcggcaagcttggcctcccagtatttgttggcacgcgcattgccccagttgaggacgctttgcagctgctcatcggtccaagaatccaggtcgaccgacttgactctggagatgtgagtgcccatgccgcggtggatgccggagcagcgaatgcagataaagatacccaaattccagctggcccatcgcggatctgtgttcaaaggccgagtcaattccacgtgtcacacggcgcatgttacaaatctcaaacatcaaggggacatgttatcgggaagagtggctaacgcggtatgtgggcggaactcacgtttgttcttcttgcagtcggcgcatactttgttgggttccaatttcagcaggcttttgatcgtctgctggttctgggcagcccgctcggcagcggggttgggcgcccgtctggacatggtcgcaggagttcgtatgatgaggaggagaagttgtcgtgtgcgcagggcaatatgcaagtaacagatggagagacagctgttgaatatttatgagcgcaaagaaaaagggatgcctggtttcgatagcgaattggaattctaggagatgatgttcaatgtgg

SEQ ID NO: 35360 - DNA, 1698 bp, Muscodor strobelii
  misc_feature: SGI cDNA ID NO. 572241
  misc_feature: Reduced expression when VOC is produced
  misc_feature: Encodes the peptide sequence at SEQ ID NO 35361
atgtccagacgggcgcccaaccccgctgccgagcgggctgcccagaaccagcagacgatcaaaagcctgctgaaattggaacccaacaaagtatgcgccgactgcaagaagaacaaacatccgcgatgggccagctggaatttgggtatctttatctgcattcgctgctccggcatccaccgcggcatgggcactcacatctccagagtcaagtcggtcgacctggattcttggaccgatgagcagctgcaaagcgtcctcaactggggcaatgcgcgtgccaacaaatactgggaggccaagcttgccgccagccacgtcccggccgaagccaagatcgagaacttcataaggactaaatacgaactcaagcgatgggtcatggatgggcccatgccaaaccccgccgacctggacgccgagggcgacgacgaggtgcccctgagcatcgtcaaggagaaacagagcattgagagaaaagtgtcacttcgcaacgctgccactgccgttcctccaccgcctggcgctgccccgccagccgaccttatcggcggcgatgaacctctccccagagccagcaccgctggacctcctgctcaaccacgtgtaccgccaaaagccccaccggctcccccgaaggcggccaaccctaaagactcactgttaggcttggatttcttgggagaggcgccctcggcccctcctcggccggccagtactacgggtacaggcggcatgggcggccagtcgagaccagatctcaagcaatccatcctttccctctatgcggccgctcctccacgaccacaaccgcaaacccaacagtcaggccatgcatcatccggctctttcagtggcttcggcggaatgcagtctccccccatgcagtcaccttcctcaggatatcagcaacagggcgccggcggtgggttgaacgatgccttcgccagcctcagcttcggcaacatgacgtcgcctaagagcccaccggtcgatgccttcgccaatctaactgccaaacgatcccccccgccctcgcaacagacacaatcaagtttctctagcttgggtggcggcagtttcttcgactccaagcctaatcaacctgcgccacagcacgaaaagaagccatccatgaactcgtcagacagcttcggcgctttcagctccaccagcatgtctcccaagccctctcagccaacagcagcagcatgtggcttcggagatatgttcgattggtcatcccccgcgcaagccaaagctcccgcgcctaaacccaagcccgccgctgctcccgcgcaggctcccaaaccaaactccgttttcaacctctctcagccccaaaacccagctccgccaccagccgcctcgaagcccgtcgcagtgaacacctccgacgccgacgtatggggaaacgcatggggcaaccccgagcctgccgctcctgcgcctcctccggtctcgaagcctgccgctaatgacttcggaggctggggcagcagcatgggcggcggatcactcgcgaaccagagtattgtccccggtgcgtccggcggcttcgcgaccacgccgaaggtggctgctgacgaagaatttggcggatgggcgagtagcacggggaaccagggaggaaacgcaaatgcgaagtctggcggtggatttggaaatgatgatttattcagcaacgtgtggcagtag

SEQ ID NO: 35361 - protein, 565 aa, Muscodor strobelii
  misc_feature: SGI Peptide ID NO. 572241
  misc_feature (17)..(133): Pfam Id: PF01412 Pfam Desc: GTPase activating protein for Arf
  misc_feature (17)..(127): Pfam Id: PF01412 Pfam Desc: GTPase activating protein for Arf
  misc_feature (1)..(565): NCBI GI: 39940572 Blast Desc: MGG_04954 [Magnaporthe grisea 70-15] gi|145010811|gb|EDJ95467.1| MGG_04954 [Magnaporthe grisea 70-15]
  misc_feature (1)..(565): NCBI GI: 46135967 Blast Desc: FG09499.1 [Gibberella zeae PH-1]
  misc_feature (1)..(565): NCBI GI: 154314134 Blast Desc: BC1G_05010 [Botryotinia fuckeliana B05.10] gi|150849156|gb|EDN24349.1| BC1G_05010 [Botryotinia fuckeliana B05.10]
  misc_feature (1)..(565): NCBI GI: 85085608 Blast Desc: NCU03890 [Neurospora crassa OR74A] gi|28918622|gb|EAA28293.1| conserved [Neurospora crassa OR74A]
  misc_feature (1)..(565): NCBI GI: 156060601 Blast Desc: SS1G_02440 [Sclerotinia sclerotiorum 1980] gi|154699847|gb|EDN99585.1| SS1G_02440 [Sclerotinia sclerotiorum 1980]
  misc_feature (1)..(565): NCBI GI: 171682382 Blast Desc: protein product [Podospora anserina] gi|170941150|emb|CAP66800.1| protein product [Podospora anserina]
  misc_feature (1)..(564): NCBI GI: 256727692 Blast Desc: NECHADRAFT_91279 [Nectria haematococca mpVI 77-13-4]
  misc_feature (1)..(565): NCBI GI: 169769821 Blast Desc: [Aspergillus oryzae RIB40] gi|83767239|dbj|BAE57378.1| protein product [Aspergillus oryzae]
  misc_feature (1)..(565): NCBI GI: 189201051 Blast Desc: stromal membrane-associated protein [Pyrenophora tritici-repentis Pt-1C-BFP] gi|187983961|gb|EDU49449.1| stromal membrane-associated protein [Pyrenophora tritici-repentis
  misc_feature (1)..(565): NCBI GI: 119469019 Blast Desc: stromal membrane-associated protein [Neosartorya fischeri NRRL 181] gi|119406053|gb|EAW16004.1| stromal membrane-associated protein [Neosartorya fischeri NRRL 181]
  misc_feature: Useful for introducing or modulating the production of volatile compounds
MSRRAPNPAAERAAQNQQTIKSLLKLEPNKVCADCKKNKHPRWASWNLGIFICIRCSGIHRGMGTHISRVKSVDLDSWTDEQLQSVLNWGNARANKYWEAKLAASHVPAEAKIENFIRTKYELKRWVMDGPMPNPADLDAEGDDEVPLSIVKEKQSIERKVSLRNAATAVPPPPGAAPPADLIGGDEPLPRASTAGPPAQPRVPPKAPPAPPKAANPKDSLLGLDFLGEAPSAPPRPASTTGTGGMGGQSRPDLKQSILSLYAAAPPRPQPQTQQSGHASSGSFSGFGGMQSPPMQSPSSGYQQQGAGGGLNDAFASLSFGNMTSPKSPPVDAFANLTAKRSPPPSQQTQSSFSSLGGGSFFDSKPNQPAPQHEKKPSMNSSDSFGAFSSTSMSPKPSQPTAAACGFGDMFDWSSPAQAKAPAPKPKPAAAPAQAPKPNSVFNLSQPQNPAPPPAASKPVAVNTSDADVWGNAWGNPEPAAPAPPPVSKPAANDFGGWGSSMGGGSLANQSIVPGASGGFATTPKVAADEEFGGWASSTGNQGGNANAKSGGGFGNDDLFSNVWQ

SEQ ID NO: 35362 - DNA, 5573 bp, Muscodor strobelii; identical to SEQ ID NO: 35356
  misc_feature: SGI EST ID NO. CUFF.85111.1
  misc_feature: Variant of the nucleotide sequence at SEQ ID NO 35360

SEQ ID NO: 35363 - DNA, 288 bp, Muscodor strobelii
  misc_feature: SGI cDNA ID NO. 572242
  misc_feature: Encodes the peptide sequence at SEQ ID NO 35364
atgccgtccagctcgcgtcaccaccgtacacaacacagtacctcaccttggcaagatcgccttgaagaggtatgccgcgaatatcagatacaacctcctgattatcaattagtatcagacagacgaggtggtcgtacagcctggtctagtgtcgtggttgtgtacggcaagcgtattgaagcacgctactggtatgacggtaacaacttgaataatgccagagaagatgctgctgaggccgcgctcacctggcttgcaaataattcgggtctcaacaacgggtggtga

SEQ ID NO: 35364 - protein, 95 aa, Muscodor strobelii
  misc_feature: SGI Peptide ID NO. 572242
  misc_feature (16)..(85): NCBI GI: 261359593 Blast Desc: conserved [Verticillium albo-atrum VaMs.102]
  misc_feature (9)..(85): NCBI GI: 171681900 Blast Desc: protein product [Podospora anserina] gi|170940909|emb|CAP66559.1| protein product [Podospora anserina]
  misc_feature (21)..(85): NCBI GI: 256733550 Blast Desc: NECHADRAFT_36267 [Nectria haematococca mpVI 77-13-4]
  misc_feature (17)..(89): NCBI GI: 156064699 Blast Desc: SS1G_00357 [Sclerotinia sclerotiorum 1980] gi|154691219|gb|EDN90957.1| SS1G_00357 [Sclerotinia sclerotiorum 1980]
  misc_feature (17)..(85): NCBI GI: 46128077 Blast Desc: FG08416.1 [Gibberella zeae PH-1]
  misc_feature (17)..(85): NCBI GI: 226279799 Blast Desc: conserved [Paracoccidioides brasiliensis Pb01]
  misc_feature (12)..(89): NCBI GI: 85097353 Blast Desc: NCU04805 [Neurospora crassa OR74A] gi|28921922|gb|EAA31195.1| [Neurospora crassa OR74A]
  misc_feature (17)..(85): NCBI GI: 119179934 Blast Desc: [Coccidioides immitis RS]
  misc_feature (17)..(82): NCBI GI: 121714369 Blast Desc: conserved [Aspergillus clavatus NRRL 1] gi|119402949|gb|EAW13369.1| conserved [Aspergillus clavatus NRRL 1]
  misc_feature (24)..(90): NCBI GI: 225555024 Blast Desc: conserved [Ajellomyces capsulatus G186AR]
MPSSSRHHRTQHSTSPWQDRLEEVCREYQIQPPDYQLVSDRRGGRTAWSSVVVVYGKRIEARYWYDGNNLNNAREDAAEAALTWLANNSGLNNGW

SEQ ID NO: 35365 - DNA, 227 bp, Muscodor strobelii
  misc_feature: SGI EST ID NO. CUFF.84210.0
  misc_feature: Variant of the nucleotide sequence at SEQ ID NO 35363
ccgagacccaaagctttatttgactacatataagacgactcagtctgatccataagctgttgctacgccctctgggaaaatcaagggtagccttactcttactcatcatgccgtccagctcgcgtcaccaccgtacacaacacagtacctcaccttggcaagatcgccttgaagaggtatgccgcgaatatcagatacaacctcctgattatcaattagtatcagac

SEQ ID NO: 35366 - DNA, 3036 bp, Muscodor strobelii
  misc_feature: SGI cDNA ID NO. 572243
  misc_feature: Reduced expression when VOC is produced
  misc_feature: Encodes the peptide sequence at SEQ ID NO 35367
atggaggccgtttggcaaaaggtcggccgacttgtggctcgggacgacgccgcagacgagcttctcgatctgatcaagaacccgttcaagacgaccaacacgagcgacacggccatctggtccgccctgggcacctcgctcggcttcactctcttcaccaccatcgtcttctctctcatccgaccctaccacaccgtcgtctacgcccccaagctcaagcacgccgacgagaagcatgcgccgccccctataggaaagggtatcttggcctggtgcgcgcccatctggaagctgaccgacaaggacatggtcgcccacgccggcatggacgctgccatcttcatccgcttcaccaagatgtgccgcaacatcttcctggccattgccctcgtcgccaacgccatcctcttacccatctactggacctacagcgccgacgacaagtccgggaacaccatgtggtttgccaaactgacacccgccaccgtcaaggggcagcctatctgggctgtcgtcgttttgggatatgccatcaacttcatcgtctgcttcttcctgtggtggaactaccggaaggttctgcagctacggctgacctattttgagagcgaggattaccagcgcagtctgtctggtcgcaccctgatgttgaacgacattcctaagaagatggcgtccgacgaaggtgtcgcaagaatcatcgacagccaggtcccgcagtcttccttctcgagaaccgtcatctcgcgcaacgtcaaggatatccccaacctcatcgcccagcacgacagcaccgtccgcaagctcgagaaagtactggccagatacctgaaagacccccacaatctccccgctgctcgccccatgtgttatccctccaaaaaagacccgtcctacagcacctacccaaggggccagaagatcgacgccatcgactatctcacacagcggatcagagagctggagctcgaggtcaaggaggcgcgaacgagtctggacaagcgcaacacactatcttatggttttgccagctacgacgacatttcagaagctcactcgattgcgtacgcattgcgcaacaagaagccccatggcaccaccatcgtcttggcacccaagcccaacgacatcatctgggagaacatgcccctcagctcggcggctcggcgctggcgaagactcatcaataacctgtggattcttgtcctgaccttcttttggatcgcgcccaacgcactgatcgctatcttcataaccaacatctccaacttagggctcgtttggaagtggttcgcaacccagctggccgtcaataacactttctggtctattgtgcagggtgtcgcggccccggcgctgacgtctttgatctatctagttctgcccatcatcttccgccgcctgtccatgcgtgcgggcgaccgtaccaagagcgcacgtgatcgccatgtcattgctaagctctacgcgttcttcgtcttcaacaatctcattatttactccatcttcagcaccgtttggacattcgcagccactctgaaagacgaattggattccggcactgatgtctggcagtcgattttgcaggccaatttcttcggcctcttgttcggagctctgtgcaacacgtctcctttttgggtgacgtggctcctccagcgaaatctcagcgcagccatcgatctcgcccagctgtggccgctcatgtatagttccctcgtccgcaagctggggaaccctacgccccgagagatgatcgagctgacggctcctcccatcttcgattacgccagccagtataactacttcttgttctactcgaccgtcgcgctctgcttcggcggtatccagcccctgacgctggccgctgcggccctgtatttctccatcgatgtctggctgaagagatacttgcttctctacatcttcattaccaagaacgaatctggtggtatgtcttggcgtgtgattttcaaccgcttcgtatttggcaccatcttggcgaatttagtcctatttcttgccgtgttcgttcgaggtgatgggacacacgtgatggcatttgctgctgtcccattgccattcatcatggtcattttcaagatctactgcgccaagaccttcgacactcggatccatttctacgcgacgcactcggtgaataagaatcccgagacgggcgggctgaaggatcctctccgctcgagcacgaacctggctgcgagattcggccaccctgccctttacagaaacctgatcactccaatggtacatgctaaggcgcaaaatatcttggcttcgatctacaaagggcgactttccgatgggcgcacggccgactcaggcgataccatgtctacatccggctactctgatgcctatgctatgagtaacatggattcgggcaaaccgggcaagtctgcagctctcccaggtttcgagattgttccagaatcccgccttgatttcgagtactacaagaacagatctgagttcgcatcggatcacggagctggcgtattatttggacggaacaatgacatcattcgaccgggcacgccaggcagcatgtggaccggtagcgaacccgattctcgatctcaaagtccgacacggccacccgttcctcgcatccctagtccgggtccggggcggatgttctcacctgtctctgagagcgggaccacgtatccgggaggctatgcgagaccgatgggtagcccctattcacccccaggcgagatgaaccaggcgcgtaacaatttctacgcacaaaccaacgatagcagaagtggccttgtcggcaacgcctcagccatgccagtcgcgacacccagatatagggaatccagcgtggaccgacttggcggaagggcaccgggcggagctgggatgcttggaggtggtcctcagggctacggtggtctccctcaggaagaggacttcccgacgcccgaaccccaacacgacccgacctcctacaactacttccgcgagggccggagaccgcgacgcgacaactcgggcgcctggtag

SEQ ID NO: 35367 - protein, 1011 aa, Muscodor strobelii
  misc_feature: SGI Peptide ID NO. 572243
  misc_feature (325)..(770): Pfam Id: PF02714 Pfam Desc: Domain of function DUF221
  misc_feature (325)..(717): Pfam Id: PF02714 Pfam Desc: Domain of function DUF221
  misc_feature (10)..(947): NCBI GI: 116196662 Blast Desc: CHGG_04929 [Chaetomium globosum CBS 148.51] gi|88180842|gb|EAQ88310.1| CHGG_04929 [Chaetomium globosum CBS 148.51]
  misc_feature (12)..(997): NCBI GI: 171676952 Blast Desc: protein product [Podospora anserina] gi|170936543|emb|CAP61203.1| protein product [Podospora anserina]
  misc_feature (16)..(1011): NCBI GI: 256723164 Blast Desc: NECHADRAFT_69868 [Nectria haematococca mpVI 77-13-4]
  misc_feature (16)..(1002): NCBI GI: 164423725 Blast Desc: NCU07971 [Neurospora crassa OR74A] gi|157070210|gb|EAA32868.2| conserved [Neurospora crassa OR74A]
  misc_feature (16)..(1011): NCBI GI: 46116400 Blast Desc: FG04042.1 [Gibberella zeae PH-1]
  misc_feature (8)..(1001): NCBI GI: 154314799 Blast Desc: BC1G_04741 [Botryotinia fuckeliana B05.10] gi|150848279|gb|EDN23472.1| BC1G_04741 [Botryotinia fuckeliana B05.10]
  misc_feature (11)..(808): NCBI GI: 145602231 Blast Desc: MGG_05082 [Magnaporthe grisea 70-15] gi|145010664|gb|EDJ95320.1| MGG_05082 [Magnaporthe grisea 70-15]
  misc_feature (32)..(980): NCBI GI: 261357741 Blast Desc: DUF221 family protein [Verticillium albo-atrum VaMs.102]
  misc_feature (11)..(861): NCBI GI: 255936589 Blast Desc: Pc13g08960 [Penicillium chrysogenum Wisconsin 54-1255] gi|211583941|emb|CAP91965.1| Pc13g08960 [Penicillium chrysogenum Wisconsin 54-1255]
  misc_feature (11)..(1001): NCBI GI: 70999468 Blast Desc: DUF221 domain protein [Aspergillus fumigatus Af293] gi|66852090|gb|EAL92415.1| DUF221 domain protein, [Aspergillus fumigatus Af293] gi|159127470|gb|EDP52585.1| DUF221 domain A1163]
  misc_feature: Useful for introducing or modulating the production of volatile compounds
MEAVWQKVGRLVARDDAADELLDLIKNPFKTTNTSDTAIWSALGTSLGFTLFTTIVFSLIRPYHTVVYAPKLKHADEKHAPPPIGKGILAWCAPIWKLTDKDMVAHAGMDAAIFIRFTKMCRNIFLAIALVANAILLPIYWTYSADDKSGNTMWFAKLTPATVKGQPIWAVVVLGYAINFIVCFFLWWNYRKVLQLRLTYFESEDYQRSLSGRTLMLNDIPKKMASDEGVARIIDSQVPQSSFSRTVISRNVKDIPNLIAQHDSTVRKLEKVLARYLKDPHNLPAARPMCYPSKKDPSYSTYPRGQKIDAIDYLTQRIRELELEVKEARTSLDKRNTLSYGFASYDDISEAHSIAYALRNKKPHGTTIVLAPKPNDIIWENMPLSSAARRWRRLINNLWILVLTFFWIAPNALIAIFITNISNLGLVWKWFATQLAVNNTFWSIVQGVAAPALTSLIYLVLPIIFRRLSMRAGDRTKSARDRHVIAKLYAFFVFNNLIIYSIFSTVWTFAATLKDELDSGTDVWQSILQANFFGLLFGALCNTSPFWVTWLLQRNLSAAIDLAQLWPLMYSSLVRKLGNPTPREMIELTAPPIFDYASQYNYFLFYSTVALCFGGIQPLTLAAAALYFSIDVWLKRYLLLYIFITKNESGGMSWRVIFNRFVFGTILANLVLFLAVFVRGDGTHVMAFAAVPLPFIMVIFKIYCAKTFDTRIHFYATHSVNKNPETGGLKDPLRSSTNLAARFGHPALYRNLITPMVHAKAQNILASIYKGRLSDGRTADSGDTMSTSGYSDAYAMSNMDSGKPGKSAALPGFEIVPESRLDFEYYKNRSEFASDHGAGVLFGRNNDIIRPGTPGSMWTGSEPDSRSQSPTRPPVPRIPSPGPGRMFSPVSESGTTYPGGYARPMGSPYSPPGEMNQARNNFYAQTNDSRSGLVGNASAMPVATPRYRESSVDRLGGRAPGGAGMLGGGPQGYGGLPQEEDFPTPEPQHDPTSYNYFREGRRPRRDNSGAW

SEQ ID NO: 35368 - DNA, 4112 bp, Muscodor strobelii
  misc_feature: SGI EST ID NO. CUFF.85020.0
  misc_feature: Variant of the nucleotide sequence at SEQ ID NO 35366
ctctgcagcacacatctcccatcttggcctggctagcatctttgggcatgcgatgcaacgagcgtcatcccaatccctttcttttccactcccatccctacgaacacctcacctcaccttacctcatccctcctaccacgtccgccagactgtacatacctctcctaaccttacccaaccctaaggtcgtccatcagcatcgtcaacggcatttccaacagcatcgcgtgtccgggccaggttggtctctgttctcctcccttcggccacgctctcactgcaattcgcatccgtttagtccgagattgaacatattgaatatcgacactgcgctgcatttattcctatcattcttctctccctcctgtccacgagtcagcatcggtcggctgtcatcccatccctttctctagataccccccaccggcagtaccgtctctcgatctctgccagcgtcgtcggcgtctgccctatccctgccgaatcgatgcagtcaccgagaagctatccctaagaccgatctatcttgcacggcggtcgtttcactcgctcacggccgtctaatcccccagcattgacgatccgccggtggaaatatcgaaggaaggatcaatcgaacacaaggattgtatttccatcaagatggaggccgtttggcaaaaggtcggccgacttgtggctcgggacgacgccgcagacgagcttctcgatctgatcaagaacccgttcaagacgaccaacacgagcgacacggccatctggtccgccctgggcacctcgctcggcttcactctcttcaccaccatcgtcttctctctcatccgaccctaccacaccgtcgtctacgcccccaagctcaagcacgccgacgagaagcatgcgccgccccctataggaaagggtatcttggcctggtgcgcgcccatctggaagctgaccgacaaggacatggtcgcccacgccggcatggacgctgccatcttcatccgcttcaccaagatgtgccgcaacatcttcctggccattgccctcgtcgccaacgccatcctcttacccatctactggacctacagcgccgacgacaagtccgggaacaccatgtggtttgccaaactgacacccgccaccgtcaaggggcagcctatctgggctgtcgtcgttttgggatatgccatcaacttcatcgtctgcttcttcctgtggtggaactaccggaaggttctgcagctacggctgacctattttgagagcgaggattaccagcgcagtctgtctggtcgcaccctgatgttgaacgacattcctaagaagatggcgtccgacgaaggtgtcgcaagaatcatcgacagccaggtcccgcagtcttccttctcgagaaccgtcatctcgcgcaacgtcaaggatatccccaacctcatcgcccagcacgacagcaccgtccgcaagctcgagaaagtactggccagatacctgaaagacccccacaatctccccgctgctcgccccatgtgttatccctccaaaaaagacccgtcctacagcacctacccaaggggccagaagatcgacgccatcgactatctcacacagcggatcagagagctggagctcgaggtcaaggaggcgcgaacgagtctggacaagcgcaacacactatcttatggttttgccagctacgacgacatttcagaagctcactcgattgcgtacgcattgcgcaacaagaagccccatggcaccaccatcgtcttggcacccaagcccaacgacatcatctgggagaacatgcccctcagctcggcggctcggcgctggcgaagactcatcaataacctgtggattcttgtcctgaccttcttttggatcgcgcccaacgcactgatcgctatcttcataaccaacatctccaacttagggctcgtttggaagtggttcgcaacccagctggccgtcaataacactttctggtctattgtgcagggtgtcgcggccccggcgctgacgtctttgatctatctagttctgcccatcatcttccgccgcctgtccatgcgtgcgggcgaccgtaccaagagcgcacgtgatcgccatgtcattgctaagctctacgcgttcttcgtcttcaacaatctcattatttactccatcttcagcaccgtttggacattcgcagccactctgaaagacgaattggattccggcactgatgtctggcagtcgattttgcaggccaatttcttcggcctcttgttcggagctctgtgcaacacgtctcctttttgggtgacgtggctcctccagcgaaatctcagcgcagccatcgatctcgcccagctgtggccgctcatgtatagttccctcgtccgcaagctggggaaccctacgccccgagagatgatcgagctgacggctcctcccatcttcgattacgccagccagtataactacttcttgttctactcgaccgtcgcgctctgcttcggcggtatccagcccctgacgctggccgctgcggccctgtatttctccatcgatgtctggctgaagagatacttgcttctctacatcttcattaccaagaacgaatctggtggtatgtcttggcgtgtgattttcaaccgcttcgtatttggcaccatcttggcgaatttagtcctatttcttgccgtgttcgttcgaggtgatgggacacacgtgatggcatttgctgctgtcccattgccattcatcatggtcattttcaagatctactgcgccaagaccttcgacactcggatccatttctacgcgacgcactcggtgaataagaatcccgagacgggcgggctgaaggatcctctccgctcgagcacgaacctggctgcgagattcggccaccctgccctttacagaaacctgatcactccaatggtacatgctaaggcgcaaaatatcttggcttcgatctacaaagggcgactttccgatgggcgcacggccgactcaggcgataccatgtctacatccggctactctgatgcctatgctatgagtaacatggattcgggcaaaccgggcaagtctgcagctctcccaggtttcgagattgttccagaatcccgccttgatttcgagtactacaagaacagatctgagttcgcatcggatcacggagctggcgtattatttggacggaacaatgacatcattcgaccgggcacgccaggcagcatgtggaccggtagcgaacccgattctcgatctcaaagtccgacacggccacccgttcctcgcatccctagtccgggtccggggcggatgttctcacctgtctctgagagcgggaccacgtatccgggaggctatgcgagaccgatgggtagcccctattcacccccaggcgagatgaaccaggcgcgtaacaatttctacgcacaaaccaacgatagcagaagtggccttgtcggcaacgcctcagccatgccagtcgcgacacccagatatagggaatccagcgtggaccgacttggcggaagggcaccgggcggagctgggatgcttggaggtggtcctcagggctacggtggtctccctcaggaagaggacttcccgacgcccgaaccccaacacgacccgacctcctacaactacttccgcgagggccggagaccgcgacgcgacaactcgggcgcctggtagttccctgcttatttcacgtcatgaatggagtttgggctggctgtatatagaaatttgaagcgcaatgtataaagcgtgagggaccggcgtttatgggaaatcatccatccatcaagcatgcatgtgtctaggctggtctacgggatgggttgattgaaattttcggctattatgcgcaaagaaaatggagggtgaaaaatgagcactggttgtactagaagcctttggtggatgccgaatccgccgttatgagacacacatacggattaagtccttttgtgattagcgtatttgttaatatcaccaccatgccttgcgcgtggggatatgattcttctatctcaactacttggtctcgccatctaactttctggggtttgcccggcttacatgtaggctgatggtgattgcttattgcataatttagaatattt

SEQ ID NO: 35369 - DNA, 864 bp, Muscodor strobelii
  misc_feature: SGI cDNA ID NO. 572244
  misc_feature: Encodes the peptide sequence at SEQ ID NO 35370
atgttgccgacaaatctgctcctcctcataacctcaatcgcaggcccggtgatatgtcaaacggttcaggatgattggttgagtcctctggcgagcgatatttggtatacgggacagacgaacacgattagttgggattcagacctgcagaattggtttggcgattattgtcctgcttgcgatacaagtaatgtcgatttatggattacgggcacttctgataacttctacttgatcaaatcgggcgtcgatgttcagacggacaagtcagtcgattggaaggtccccgacacatacgaagcggataaatgggtgttccgattcattccctcgggaacgaagtggcaggatggaggcgaggaaatctcgggcaatttattccagattcgcgtcacgccgacgactacgagtagttctatctcgagcactactacatcgatgacaagtacaacgacatccacgagtcctgccgcgacgacgagttccccggcaatgacttcacatcatgacgatggactgtcaactggtgcgaaagcgggcattggcgttggagcggcgatcggcgccatagcgctatttgcgcttggctttttccttgcgaagaggcaacagaagaataaagcagttgcatccggaggcgtatcttctcaggcttcgactcaacagtatcaacagcagtatccttcgtacagccagcaacttagtacgtacacggatcaaacctcatcgtggagtgccggtcatagtccacaaccgtgggatcagcagggtagcggtggtgggtatgcgaatccgtatcggcagattgagcccgctgagatgatgaatcctgaacctatggctgagttgccggcgaagaagtaa

SEQ ID NO: 35370 - protein, 287 aa, Muscodor strobelii
  misc_feature: SGI Peptide ID NO. 572244
  misc_feature (21)..(202): NCBI GI: 67522116 Blast Desc: AN1515.2 [Aspergillus nidulans FGSC A4] gi|40744615|gb|EAA63771.1| AN1515.2 [Aspergillus nidulans FGSC A4]
  misc_feature (21)..(202): NCBI GI: 259486840 Blast Desc: TPA: [Aspergillus nidulans FGSC A4]
  misc_feature (19)..(252): NCBI GI: 169621975 Blast Desc: SNOG_14199 [Phaeosphaeria nodorum SN15] gi|111057316|gb|EAT78436.1| SNOG_14199 [Phaeosphaeria nodorum SN15]
  misc_feature (151)..(205): NCBI GI: 256729031 Blast Desc: NECHADRAFT_40333 [Nectria haematococca mpVI 77-13-4]
  misc_feature (133)..(236): NCBI GI: 261194054 Blast Desc: conserved [Ajellomyces dermatitidis SLH14081] gi|239588446|gb|EEQ71089.1| conserved [Ajellomyces dermatitidis SLH14081]
  misc_feature (133)..(236): NCBI GI: 239606988 Blast Desc: conserved [Ajellomyces dermatitidis ER-3]
  misc_feature (170)..(248): NCBI GI: 189208197 Blast Desc: PTRG_10100 [Pyrenophora tritici-repentis Pt-1C-BFP] gi|187976525|gb|EDU43151.1| PTRG_10100 [Pyrenophora tritici-repentis Pt-1C-BFP]
  misc_feature (167)..(215): NCBI GI: 115433556 Blast Desc: [Aspergillus terreus NIH2624] gi|114189767|gb|EAU31467.1| [Aspergillus terreus NIH2624]
  misc_feature (172)..(285): NCBI GI: 46105162 Blast Desc: FG00209.1 [Gibberella zeae PH-1]
  misc_feature (148)..(211): NCBI GI: 156046131 Blast Desc: [Sclerotinia sclerotiorum 1980] gi|154693735|gb|EDN93473.1| [Sclerotinia sclerotiorum 1980]
MLPTNLLLLITSIAGPVICQTVQDDWLSPLASDIWYTGQTNTISWDSDLQNWFGDYCPACDTSNVDLWITGTSDNFYLIKSGVDVQTDKSVDWKVPDTYEADKWVFRFIPSGTKWQDGGEEISGNLFQIRVTPTTTSSSISSTTTSMTSTTTSTSPAATTSSPAMTSHHDDGLSTGAKAGIGVGAAIGAIALFALGFFLAKRQQKNKAVASGGVSSQASTQQYQQQYPSYSQQLSTYTDQTSSWSAGHSPQPWDQQGSGGGYANPYRQIEPAEMMNPEPMAELPAKK

SEQ ID NO: 35371 - DNA, 2127 bp, Muscodor strobelii
  misc_feature: SGI cDNA ID NO. 572245
  misc_feature: Encodes the peptide sequence at SEQ ID NO 35372
atggcgggtgcacaacttgattcagattactatccagtccacctagggctttgggtcaattggtctcgcggccccatacttggacaaactttaacactgacgcggagtgacggcggctttctcattgcctttactgccttgtttgttagcttcgtttcgacacggggatggagaattctgtctttcgcgcttcaccggtacttctcgtcgccatctccgcagaaggctgtgtatcatcagtgtcaagcagttctgcgaaattatgatatttcaaccagcgtcgtccagcttacgaatctcttctgggccaaccttcgctcagctgtcgtcccgcacattggtaggactcgaaaggcgtcgcacatttacagattagccttcttacttctgttggctatcatttatacagtagctttcactgttgcaggtggtttttcttctcagatttccactgctgtcggaaacgaagtcttggtccagagtttgaactgcggctggaccaactcagcttttaatgataacgacaattttgttcactcagttaactgggtagctaataatgtcaacaacgcagctaattatgctcaacaatgctactcaaacgaaagcgcacgagttctggattgcggccgactggtggcccgaaatatccaaactgaaattgacacacaggctccctgtcctttcctcgacgacaatgtatgtgtaagcaatgatagcaacttgcgtatcgattcgggctacatagatagcatcgatgatcttggcgtgaatactccggcaaatgggagaattcttctgaggcatgtcgcccattgcgcgcctatgcagacgcaagggtatactagccggagaaggctgcccgccgcgaacatcaacgggcaagaggttggcttcgataacgtgaccgttttccactacggcaatattacaacacaaactggagtaaaggacttcatggcaacggctcgatcgattgactcgcaatatgcatactccctatcggcagacacgactgcatactatgccaaccactttatcattggcgtgatcgtccacgtagaaaatgggactgttgtatccgaactttcagatttcgttcccctggattcaatatttcctaaggacggagatatattcctcacgtttctttctggaaacggtgtcacctacacgagcccctcaagcgacccctggtatcgagtatcgccgacaccagcaagcctgggtttgataggcgcaaatgaaacggatggcgaggagcagttctatcttccctcggaagccgcatcgcctttaggctgtatgattaaatatcaactatgtattcagaataacaatacctgtggtgttctaggagggtataatgatgcactgaacaccgcaagatccatcttgagcgcgagcgatcaaactggcaagttcatcaacagcagttgggattatttcagcaaaacactctgggatacccagcccatggctggcatcatacaacaaatgggaccgaccagtctcgattcgcagacttcgctgttccatggtcgccaggggttattaccatcaaaccagtggcagcgcgatgtcactcgctggttcgacatcgaaatggcggatatacaactagcattcctaaatgccgcttattttaacccaaccgactcatttctcctacaattaagagactatgctagtggggaggaaaatgctttttgtgagaatcagaagataaaaagtaccggatatacctcgttcagtctcttcgggctcttgttcacctacatctttggacttcttatcatagctgcttccctcttacttgagccattcttttggctcctgtacaggggatttggatacaaaccgtatgcaactattgaatgggcaactaacaccacgttgcaacttcaacgactagctcatgaaggcatcgggcttggaacttggtcacgaggaacaggtagagttcccgttacacaagaagatgatttgttaggtgtcatcgacttgacaattacgagtcatcctgtgcttgattcgcaggcgacgcgaaacaaacataatgcaagccgtgatgagaaatccccggttgcaacacatcacagtgtgatacaacaccgtgaaacatga

SEQ ID NO: 35372 - protein, 708 aa, Muscodor strobelii
  misc_feature: SGI Peptide ID NO. 572245
  misc_feature (6)..(702): NCBI GI: 189194015 Blast Desc: conserved [Pyrenophora tritici-repentis Pt-1C-BFP] gi|187978910|gb|EDU45536.1| conserved [Pyrenophora tritici-repentis Pt-1C-BFP]
  misc_feature (11)..(682): NCBI GI: 169615058 Blast Desc: SNOG_10683 [Phaeosphaeria nodorum SN15] gi|111060957|gb|EAT82077.1| SNOG_10683 [Phaeosphaeria nodorum SN15]
  misc_feature (7)..(696): NCBI GI: 115399382 Blast Desc: [Aspergillus terreus NIH2624] gi|114192163|gb|EAU33863.1| [Aspergillus terreus NIH2624]
  misc_feature (7)..(658): NCBI GI: 70986226 Blast Desc: conserved [Aspergillus fumigatus Af293] gi|66846236|gb|EAL86569.1| conserved [Aspergillus fumigatus Af293]
  misc_feature (7)..(658): NCBI GI: 159128250 Blast Desc: conserved [Aspergillus fumigatus A1163]
  misc_feature (7)..(664): NCBI GI: 119474227 Blast Desc: NFIA_004500 [Neosartorya fischeri NRRL 181] gi|119407142|gb|EAW17092.1| conserved [Neosartorya fischeri NRRL 181]
  misc_feature (13)..(647): NCBI GI: 169772941 Blast Desc: [Aspergillus oryzae RIB40] gi|83768800|dbj|BAE58937.1| protein product [Aspergillus oryzae]
  misc_feature (8)..(645): NCBI GI: 121699395 Blast Desc: ACLA_082720 [Aspergillus clavatus NRRL 1] gi|119396149|gb|EAW06581.1| ACLA_082720 [Aspergillus clavatus NRRL 1]
  misc_feature (8)..(517): NCBI GI: 115433432 Blast Desc: [Aspergillus terreus NIH2624] gi|114189705|gb|EAU31405.1| [Aspergillus terreus NIH2624]
  misc_feature (13)..(645): NCBI GI: 169618215 Blast Desc: SNOG_12297 [Phaeosphaeria nodorum SN15] gi|160703576|gb|EAT80110.2| SNOG_12297 [Phaeosphaeria nodorum SN15]
MAGAQLDSDYYPVHLGLWVNWSRGPILGQTLTLTRSDGGFLIAFTALFVSFVSTRGWRILSFALHRYFSSPSPQKAVYHQCQAVLRNYDISTSVVQLTNLFWANLRSAVVPHIGRTRKASHIYRLAFLLLLAIIYTVAFTVAGGFSSQISTAVGNEVLVQSLNCGWTNSAFNDNDNFVHSVNWVANNVNNAANYAQQCYSNESARVLDCGRLVARNIQTEIDTQAPCPFLDDNVCVSNDSNLRIDSGYIDSIDDLGVNTPANGRILLRHVAHCAPMQTQGYTSRRRLPAANINGQEVGFDNVTVFHYGNITTQTGVKDFMATARSIDSQYAYSLSADTTAYYANHFIIGVIVHVENGTVVSELSDFVPLDSIFPKDGDIFLTFLSGNGVTYTSPSSDPWYRVSPTPASLGLIGANETDGEEQFYLPSEAASPLGCMIKYQLCIQNNNTCGVLGGYNDALNTARSILSASDQTGKFINSSWDYFSKTLWDTQPMAGIIQQMGPTSLDSQTSLFHGRQGLLPSNQWQRDVTRWFDIEMADIQLAFLNAAYFNPTDSFLLQLRDYASGEENAFCENQKIKSTGYTSFSLFGLLFTYIFGLLIIAASLLLEPFFWLLYRGFGYKPYATIEWATNTTLQLQRLAHEGIGLGTWSRGTGRVPVTQEDDLLGVIDLTITSHPVLDSQATRNKHNASRDEKSPVATHHSVIQHRET

SEQ ID NO: 35373 - DNA, 6721 bp, Muscodor strobelii
  misc_feature: SGI EST ID NO. CUFF.84230.2
  misc_feature: Variant of the nucleotide sequence at SEQ ID NO 35371
cagagcactactgtgtgtgcgcaagccaaagttatgctttcgcaaagagaatgcacgacacagaagagctacggcaattacaggtggcaagagccttccaggtcatgtgttgcgcctactccaactgcgacatctgcctccataagccatcacgtctcccacgtttccctattggctagcgtgtactgaagttcaatcaatctcgcaacaatctcaccagcgagacttaggcgggcacatatagtgagacgatctctttcaacgcccataatatcagggttgcttttacaacccaaccttcggaccatgattgcctaactccatccctcccttatacctagcgaagccgataatttctgagtctcgcaacgagaataatccgccaccagcttctttttgctaatcggccgacagcctgcatgatcgcgatagacaatcagcaatcacacattggacgggacaacctgctcactgggagtaggagggttacagatgcattcagccatatcaatcagctccatgcacgctgagcaatctccaaatgtggcgctgacgtacgcctttgctacgttcgtctgaagatcttcccgcaaacgatgtcgcacgattgtcgacgttgcagaacgaacagcgcccagtctgaccccaacaatccccgacagctggacttggtcattctgtactgcagttccatcggttgcaacacaacatcatagcacgcgccaattaacgccgatactgtaagtcgacatgctgccattctatgattctacgcagctctactagggtgtgcgatgcacctctcaatcaagtgaaaagcatggctagccttatcatgtcgagaggaaattgcgcgctttccaagatctacataagctgtgatccatgtggcttaatcaaggcacatagcgtacaaaatatagcggcatatatcgcatctgtcatattaataacgggttgagcgtgactacctttcacgataccccaacacttagcgaacccaaatcacccccattgaccacaaccttatcgaccttctttcgaagccgttcgagcactatggcgggtgcacaacttgattcagattactatccagtccacctagggctttgggtcaattggtctcgcggccccatacttggacaaactttaacactgacgcggagtgacggcggctttctcattgcctttactgccttgtttgttagcttcgtttcgacacggggatggagaattctgtctttcgcgcttcaccggtacttctcgtcgccatctccgcagaaggctgtgtatcatcagtgtcaagcagttctgcgaaattatgatatttcaaccagcgtcgtccagcttacgaatctcttctgggccaaccttcgctcagctgtcgtcccgcacattggtaggactcgaaaggcgtcgcacatttacagattagccttcttacttctgttggctatcatttatacagtagctttcactgttgcaggtggtttttcttctcagatttccactgctgtcggaaacgaagtcttggtccagagtttgaactgcggctggaccaactcagcttttaatgataacgacaattttgttcactcagttaactgggtagctaataatgtcaacaacgcagctaattatgctcaacaatgctactcaaacgaaagcgcacgagttctggattgcggccgactggtggcccgaaatatccaaactgaaattgacacacaggctccctgtcctttcctcgacgacaatgtatgtgtaagcaatgatagcaacttgcgtatcgattcgggctacatagatagcatcgatgatcttggcgtgaatactccggcaaatgggagaattcttctgaggcatgtcgcccattgcgcgcctatgcagacgcaagggtatactagccggagaaggctgcccgccgcgaacatcaacgggcaagaggttggcttcgataacgtgaccgttttccactacggcaatattacaacacaaactggagtaaaggacttcatggcaacggctcgatcgattgactcgcaatatgcatactccctatcggcagacacgactgcatactatgccaaccactttatcattggcgtgatcgtccacgtagaaaatgggactgttgtatccgaactttcagatttcgttcccctggattcaatatttcctaaggacggagatatattcctcacgtttctttctggaaacggtgtcacctacacgagcccctcaagcgacccctggtatcgagtatcgccgacaccagcaagcctgggtttgataggcgcaaatgaaacggatggcgaggagcagttctatcttccctcggaagccgcatcgcctttaggctgtatgattaaatatcaactatgtattcagaataacaatacctgtggtgttctaggagggtataatgatgcactgaacaccgcaagatccatcttgagcgcgagcgatcaaactggcaagttcatcaacagcagttgggattatttcagcaaaacactctgggatacccagcccatggctggcatcatacaacaaatgggaccgaccagtctcgattcgcagacttcgctgttccatggtcgccaggggttattaccatcaaaccagtggcagcgcgatgtcactcgctggttcgacatcgaaatggcggatatacaactagcattcctaaatgccgcttattttaacccaaccgactcatttctcctacaattaagagactatgctagtggggaggaaaatgctttttgtgagaatcagaagataaaaagtaccggatatacctcgttcagtctcttcgggctcttgttcacctacatctttggacttcttatcatagctgcttccctcttacttgagccattcttttggctcctgtacaggggatttggatacaaaccgtatgcaactattgaatgggcaactaacaccacgttgcaacttcaacgactagctcatgaaggcatcgggcttggaacttggtcacgaggaacaggtagagttcccgttacacaagaagatgatttgttaggtgtcatcgacttgacaattacgagtcatcctgtgcttgattcgcaggcgacgcgaaacaaacataatgcaagccgtgatgagaaatccccggttgcaacacatcacagtgtgatacaacaccgtgaaacatgaggcagcgtagcaaaccaagatgggatcctgtaggatggagcaacaacatgagtgaccgaaatcacggtgaattactatacaatggcttatacaggagctcaacgaatcagacctgtatcaaaccgggatagatcaatttccggcaaacggcgtgtaacgaggatccgagaatgtgaggtacaaggctgtttgaatggagaggccaagctgggaaaaactccgaacgctgtgacgcagggaaactgtgtgccgtgtcgacttctgctggagttggtggctcttacggttcgggctcttgaacggggccgttattgttggtcttcgtactgttggaaccctttatattgttgacggtgcgtttgtgtacacagatacaaggccctctccagacgtgcactctcgaacttggcatattgtgagtgttggattctttcctcagctatcaactgtcgtgctccacatttcttcacctgattacgagccgctcgctacatcaacaccgtcgcttgaatcacgcgaataagcgtcggtgacgggacgatcgataatgctcgacctacgcccctcgtttactcccattacttcttcgccggcaactcagccataggttcaggattcatcatctcagcgggctcaatctgccgatacggattcgcatacccaccaccgctaccctgctgatcccacggttgtggactatgaccggcactccacgatgaggtttgatccgtgtacgtactaagttgctggctgtacgaaggatactgctgttgatactgttgagtcgaagcctgagaagatacgcctccggatgcaactgctttattcttctgttgcctcttcgcaaggaaaaagccaagcgcaaatagcgctatggcgccgatcgccgctccaacgccaatgcccgctttcgcaccagttgacagtccatcgtcatgatgtgaagtcattgccggggaactcgtcgtcgcggcaggactcgtggatgtcgttgtacttgtcatcgatgtagtagtgctcgagatagaactactcgtagtcgtcggcgtgacgcgaatctggaataaattgcccgagatttcctcgcctccatcctgccacttcgttcccgagggaatgaatcggaacacccatttatccgcttcgtatgtgtcggggaccttccaatcgactgacttgtccgtctgaacatcgacgcccgctgaacaatccgttagtccaacaacccctcgatcctcacagccaatgacgaggcaactgaggctcacatttgatcaagtagaagttatcagaagtgcccgtaatccataaatcgacattacttgtatcgcaagcaggacaataatcgccaaaccaattctgcaggtctgaatcccaactaatcgtgttcgtctgtcccgtataccaaatatcgctcgccagaggactcaaccaatcatcctgaaccgtttgacatatcaccgggcctgcgattgaggttatgaggaggagcagatttgtcggcaacatcgtgacgtgacgctcgcgaagagcacaacagaagtgagaattcggcgttgcatgcatgattgccacccaattgacttatgaatgccacaatcctatcctacccgtcctgtggtcctacactgcccctgtttccagaccctggtgataggcattcttgtggtttcgcgtatggttcgagccagggtcgatgtgccatgacgtctcgccattggagaagctcctgatgatgttctgatatcggtcagccgggtggagacgacttgcttcattcgtttatcatcccggctgtcggcgccggggctgatcctgcgatagtgaggcgtgggtttcaaatagcctattccccaacaacgactcgattaatgcgcatgatttgcgcagcacttttcttcggagtttagatggacgtataattaatatgtctatggtatctgtatcaatcctcgatactacattttcgcaaatctgatcgtcgtggaaagttcaaaaatccaataccaagtataataataaataggctctcatcctagttagctgttcagggggtatttgaggccagcacggggcacgtgatctttcagacgtccacgattcgagtgctcgaatgtcagctctggtgcttttgggagcctatatatgcagatctcaagacgtgattggatgctcgcaacattttgatcgtcagagcgagaacacttatttgacggacacctctagtttgctgatggtaggctcatagtaccgattactatagagatttgccgtacctaaaccttccgattcactagggacgtcttttcatcctaggatttcaagatttgaccgaggtcatgatcctgaccatagcctgacttgaccgttggccgtgtaatcttgaagttttatctactgcaaagaggatttcgagatgcagaatgcatgggtagtgatgaaaaagatgaagctaacatgagcgagagacttggtttctgtcagaacccacgactctacagtcataataaaaatttctattcgaattaacggtatctgccttgtctatatatatacagggagaagctactctgtatgacgactggcgaagaggtgagtaatgcaagaatcagaataacttgcacacatagggtgatgtatgaattgtagggtaagtgcaacggacgcaaatcttggcgctttccttgtccgcctggccacgagcttgaaacttgggtcctcgattacctaagcagccatgagattttcgagtcgccaatctctgctgtcgtctatcgatctgcagtatttgtccccctttcgcggcctcaagcaagctattcacgcgttaccgccaaccgttcacttgaaatcgtcaaccgtcaaaccgttcgaacatgaagccattttctcgtattagaaagaacggcccttgccagtctccacaccgttacgtcgataagtggtccgaatagagtgcacgagccagctaagcctcaaaacggggcccctttccagttagccgggtatcttagtaccacgggacggcaaaaatagaagcttttgcgattcttggcaggcagggtattagatctgcgaacccttcacgggggaatgttgggatgtcaggtttgctgcaccgggtcattgggaacacgtctcgcacgcgaggacgttgcacgttttgtacaggtatatctgtgtgctacgatctgtttaaatacaattctgagccagtctgtttacaacatctaatgtctctgaattaagtgcatacatgatatatatgatcaagatggtcatcaattgttgtggtctgtggacaatggtcttgtccaacggaaactctatttcagcccatctaaaggcaggcgcgggcttggggtcgagaacacctgtggttcgcactttcttgcacattgatcgatgcacgagtcacggcaagaaccataaacttaaagctccttcccctgactagaagtgttgttggtaaaccttccgtgcagttgtctagaaaaccttgatggaggagttgaagggtcttgttgtatcaacg

SEQ ID NO: 35374 - DNA, 735 bp, Muscodor strobelii
  misc_feature: SGI cDNA ID NO. 572246
  misc_feature: Encodes the peptide sequence at SEQ ID NO 35375
atggcgcctaccaagaaggtcacgggcgacaagtactcggttatcctgcccaccttcaacgagcgcaagaacctgccaattgttgcctggttgctgaaccgcactttcactgagaacaacctcgattgggagctcgtaattgtcgacgatggttcacccgacggaacccagatcgtcgctgagcagctcgtcaaagcctactccccgcacgtcgtcctcaagacccgatccggcaaactcggtctcggcactgcctacgttcacggtctacagttcgtcacgggcaacttcgtcatcatcatggatgccgacttctcccaccaccccaagttcatccctcagatgatcgcccgtcagaaggaggccaactacgacatcgtcactggaacacgctacgctggagatggaggcgtctacggctgggatctgaagcgcaagtttgtgtctcgcggtgccaacctgttcgccgacactgtcttgcgcccgggtgtcagtgatctgacgggaagcttccgattatataagaaggctgtgctgcagaaggttattgagagcactgagagcaagggctacaccttccagatggagatgatggtcagagccaaggctatgggatgcaccgtcgccgaggtccccattagctttgttgaccgggtttacggggagtctaagctgggtggcgatgagattgttgagtatgctaagggagtgctgaacctttggctgaaggtttaa

SEQ ID NO: 35375 - protein, 244 aa, Muscodor strobelii
  misc_feature: SGI Peptide ID NO. 572246
  misc_feature (13)..(183): Pfam Id: PF00535 Pfam Desc: Glycosyl transferase family 2
  misc_feature (1)..(244): NCBI GI: 11181548 Blast Desc: AF102883_1 mannose phospho-dolichol synthase [Hypocrea jecorina]
  misc_feature (1)..(244): NCBI GI: 156053279 Blast Desc: mannose phospho-dolichol synthase [Sclerotinia sclerotiorum 1980] gi|154704585|gb|EDO04324.1| mannose phospho-dolichol synthase [Sclerotinia sclerotiorum 1980]
  misc_feature (1)..(244): NCBI GI: 154314666 Blast Desc: BC1G_04042 [Botryotinia fuckeliana B05.10] gi|150848664|gb|EDN23857.1| BC1G_04042 [Botryotinia fuckeliana B05.10]
  misc_feature (9)..(244): NCBI GI: 256723089 Blast Desc: glycosyltransferase family 2 [Nectria haematococca mpVI 77-13-4]
  misc_feature (1)..(244): NCBI GI: 46116404 Blast Desc: FG04044.1 [Gibberella zeae PH-1]
  misc_feature (1)..(244): NCBI GI: 169610129 Blast Desc: SNOG_08158 [Phaeosphaeria nodorum SN15] gi|111063314|gb|EAT84434.1| SNOG_08158 [Phaeosphaeria nodorum SN15]
  misc_feature (1)..(244): NCBI GI: 189205270 Blast Desc: dolichol-phosphate mannosyltransferase [Pyrenophora tritici-repentis Pt-1C-BFP] gi|187986069|gb|EDU51557.1| dolichol-phosphate mannosyltransferase [Pyrenophora Pt-1C-BFP]
  misc_feature (1)..(241): NCBI GI: 85106102 Blast Desc: dolichol-phosphate mannosyltransferase [Neurospora crassa OR74A] gi|28923693|gb|EAA32862.1| dolichol-phosphate mannosyltransferase [Neurospora crassa OR74A]
  misc_feature (1)..(244): NCBI GI: 171676958 Blast Desc: protein product [Podospora anserina] gi|170936546|emb|CAP61206.1| protein product [Podospora anserina]
  misc_feature (1)..(244): NCBI GI: 39940326 Blast Desc: conserved [Magnaporthe grisea 70-15] gi|145010669|gb|EDJ95325.1| conserved [Magnaporthe grisea 70-15]
  misc_feature (10)..(241): SWISSPROT Homolog: EC 2.4.1.83 Dolichyl-phosphate beta-D-mannosyltransferase
MAPTKKVTGDKYSVILPTFNERKNLPIVAWLLNRTFTENNLDWELVIVDDGSPDGTQIVAEQLVKAYSPHVVLKTRSGKLGLGTAYVHGLQFVTGNFVIIMDADFSHHPKFIPQMIARQKEANYDIVTGTRYAGDGGVYGWDLKRKFVSRGANLFADTVLRPGVSDLTGSFRLYKKAVLQKVIESTESKGYTFQMEMMVRAKAMGCTVAEVPISFVDRVYGESKLGGDEIVEYAKGVLNLWLKV

SEQ ID NO: 35376 - DNA, 1368 bp, Muscodor strobelii
  misc_feature: SGI EST ID NO. CUFF.84236.0
  misc_feature: Variant of the nucleotide sequence at SEQ ID NO 35374
ggaggacccagacctgggatgcgggcgggtcatcccctgatccctggaccctaggtagctcccagtggatggcgggtccctcaaccgtgtccaaaaggcgtcccctcagactgaacgcgacgacggtggcatcaatcgacccttatcgccaactccatccactcatttgacaccaccacgcatcaatctttgattctgcagcttctgcagctctgcgggttcatctcagctacttatcctccaaatcgacctcatcgacctcgaagatggcgcctaccaagaaggtcacgggcgacaagtactcggttatcctgcccaccttcaacgagcgcaagaacctgccaattgttgcctggttgctgaaccgcactttcactgagaacaacctcgattgggagctcgtaattgtcgacgatggttcacccgacggaacccagatcgtcgctgagcagctcgtcaaagcctactccccgcacgtcgtcctcaagacccgatccggcaaactcggtctcggcactgcctacgttcacggtctacagttcgtcacgggcaacttcgtcatcatcatggatgccgacttctcccaccaccccaagttcatccctcagatgatcgcccgtcagaaggaggccaactacgacatcgtcactggaacacgctacgctggagatggaggcgtctacggctgggatctgaagcgcaagtttgtgtctcgcggtgccaacctgttcgccgacactgtcttgcgcccgggtgtcagtgatctgacgggaagcttccgattatataagaaggctgtgctgcagaaggttattgagagcactgagagcaagggctacaccttccagatggagatgatggtcagagccaaggctatgggatgcaccgtcgccgaggtccccattagctttgttgaccgggtttacggggagtctaagctgggtggcgatgagattgttgagtatgctaagggagtgctgaacctttggctgaaggtttaaggaaatgtcaggcatagttgtgggggactggatgagacgtggatgaagatgaatggagatgaacatcaagggccataggctgtgatagacggatcctaaaaggtttatactactcggtacggcgttgggatgcattgaggctttgcgttgtactcttatccttgcttgacctgacatcaaaggatctaatacaggccaccacgttggccgctatctacattgtgcaatacattttcccagatgtatgtcatgtctgcttgacggatctgacgtctacggactcccttgttatactagctgtcccacaagcatagcccctgaatcaattaatcaattggatggcagtcaaggcgttgcaacatcacca

SEQ ID NO: 35377 - DNA, 435 bp, Muscodor strobelii
  misc_feature: SGI cDNA ID NO. 572247
  misc_feature: Encodes the peptide sequence at SEQ ID NO 35378
atggatgccgacttctcccaccaccccaagttcatccctcagatgatcgcccgtcagaaggaggccaactacgacatcgtcactggaacacgctacgctggagatggaggcgtctacggctgggatctgaagcgcaagtttgtgtctcgcggtgccaacctgttcgccgacactgtcttgcgcccgggtgtcagtgatctgacgggaagcttccgattatataagaaggctgtgctgcagaaggttattgagagcactgagagcaagggctacaccttccagatggagatgatggtcagagccaaggctatgggatgcaccgtcgccgaggtccccattagctttgttgaccgggtttacggggagtctaagctgggtggcgatgagattgttgagtatgctaagggagtgctgaacctttggctgaaggtttaa

SEQ ID NO: 35378 - protein, 144 aa, Muscodor strobelii
  misc_feature: SGI Peptide ID NO. 572247
  misc_feature (1)..(83): Pfam Id: PF00535 Pfam Desc: Glycosyl transferase family 2
  misc_feature (1)..(144): NCBI GI: 11181548 Blast Desc: AF102883_1 mannose phospho-dolichol synthase [Hypocrea jecorina]
  misc_feature (1)..(144): NCBI GI: 256723089 Blast Desc: glycosyltransferase family 2 [Nectria haematococca mpVI 77-13-4]
  misc_feature (1)..(144): NCBI GI: 156053279 Blast Desc: mannose phospho-dolichol synthase [Sclerotinia sclerotiorum 1980] gi|154704585|gb|EDO04324.1| mannose phospho-dolichol synthase [Sclerotinia sclerotiorum 1980]
  misc_feature (1)..(144): NCBI GI: 169610129 Blast Desc: SNOG_08158 [Phaeosphaeria nodorum SN15] gi|111063314|gb|EAT84434.1| SNOG_08158 [Phaeosphaeria nodorum SN15]
  misc_feature (1)..(144): NCBI GI: 189205270 Blast Desc: dolichol-phosphate mannosyltransferase [Pyrenophora tritici-repentis Pt-1C-BFP] gi|187986069|gb|EDU51557.1| dolichol-phosphate mannosyltransferase [Pyrenophora Pt-1C-BFP]
  misc_feature (1)..(144): NCBI GI: 154314666 Blast Desc: BC1G_04042 [Botryotinia fuckeliana B05.10] gi|150848664|gb|EDN23857.1| BC1G_04042 [Botryotinia fuckeliana B05.10]
  misc_feature (1)..(144): NCBI GI: 46116404 Blast Desc: FG04044.1 [Gibberella zeae PH-1]
  misc_feature (1)..(141): NCBI GI: 85106102 Blast Desc: dolichol-phosphate mannosyltransferase [Neurospora crassa OR74A] gi|28923693|gb|EAA32862.1| dolichol-phosphate mannosyltransferase [Neurospora crassa OR74A]
  misc_feature (1)..(144): NCBI GI: 171676958 Blast Desc: protein product [Podospora anserina] gi|170936546|emb|CAP61206.1| protein product [Podospora anserina]
  misc_feature (1)..(144): NCBI GI: 154284546 Blast Desc: dolichol-phosphate mannosyltransferase [Ajellomyces capsulatus NAm1] gi|150406709|gb|EDN02250.1| dolichol-phosphate mannosyltransferase [Ajellomyces capsulatus NAm1] mannose G186AR]
  misc_feature (1)..(141): SWISSPROT Homolog: EC 2.4.1.83 Dolichyl-phosphate beta-D-mannosyltransferase
MDADFSHHPKFIPQMIARQKEANYDIVTGTRYAGDGGVYGWDLKRKFVSRGANLFADTVLRPGVSDLTGSFRLYKKAVLQKVIESTESKGYTFQMEMMVRAKAMGCTVAEVPISFVDRVYGESKLGGDEIVEYAKGVLNLWLKV

SEQ ID NO: 35379 - DNA, 1368 bp, Muscodor strobelii; identical to SEQ ID NO: 35376
  misc_feature: SGI EST ID NO. CUFF.84236.0
  misc_feature: Variant of the nucleotide sequence at SEQ ID NO 35377

SEQ ID NO: 35380 - DNA, 870 bp, Muscodor strobelii
  misc_feature: SGI cDNA ID NO. 572248
  misc_feature: Encodes the peptide sequence at SEQ ID NO 35381
atgtcggacagaatagcacagctcaccagccacttgaactaccccaagggtatgctcgcaggccaaacagcaatcataacaggaagtggtcaaggcatcggcgccgaagccgcccgtcttttcgcaaacgaaggagcaaaagtagtagtttcagacattgatgcagcaaaagcgaaagcaacagcagatagtataaacgccgcatcacccaaccgggccatcgcagtagcaggcgacatcctagacacaacctaccaagccaacctcgtaaaagcagcagcagacttcggcggcggcaaaatccacatcatcgtgaataatgcgggatatacctgggacggcgtaatccacaagatgaaagacgagcaatgggacacgatcataaacctgcacgggaccgctcccttcaaactcattcgggcagctgcaccatacttcagagtcaaggacggagagccaagatgtattattaatatctcttccacctccggaatccacggaaacgccggacagatcaattacgcgatggctaaagcgggcgtggcgggtatgacgaaggcgatagcgaaagaatggggtccgatgttcggcgttagggcgaatacgattgcttttgggcatattcagacgagacttacacaggcgaaagagaagggggcttttgtactagggccgaagggggagaagattgatcttgggataccggagaagcagagtgctgttccgaaggagatgttgcatgctgatataccgttgaggagacccggtatgcctagtgaggctgcgagcgtgatattggctgtggctagtccgttgtttagttatgttacagggcagactattatggttacgggcgggaggaatatgtag

SEQ ID NO: 35381 - protein, 289 aa, Muscodor strobelii
  misc_feature: SGI Peptide ID NO. 572248
  misc_feature (22)..(193): Pfam Id: PF00106 Pfam Desc: short chain dehydrogenase
  misc_feature (23)..(198): Pfam Id: PF08659 Pfam Desc: KR domain
  misc_feature (1)..(289): NCBI GI: 46116406 Blast Desc: FG04045.1 [Gibberella zeae PH-1]
  misc_feature (1)..(289): NCBI GI: 238486976 Blast Desc: 3-oxoacyl-(acyl-carrier-protein) reductase, [Aspergillus flavus NRRL3357] gi|220699605|gb|EED55944.1| 3-oxoacyl-(acyl-carrier-protein) reductase, [Aspergillus flavus
  misc_feature (3)..(289): NCBI GI: 238838210 Blast Desc: short-chain dehydrogenase/reductase SDR [Microsporum canis CBS 113480]
  misc_feature (1)..(289): NCBI GI: 156053277 Blast Desc: SS1G_06806 [Sclerotinia sclerotiorum 1980] gi|154704584|gb|EDO04323.1| SS1G_06806 [Sclerotinia sclerotiorum 1980]
  misc_feature (1)..(289): NCBI GI: 154314662 Blast Desc: BC1G_04040 [Botryotinia fuckeliana B05.10] gi|150848662|gb|EDN23855.1| BC1G_04040 [Botryotinia fuckeliana B05.10]
  misc_feature (3)..(289): NCBI GI: 258563714 Blast Desc: conserved [Uncinocarpus reesii 1704] gi|237908109|gb|EEP82510.1| conserved [Uncinocarpus reesii 1704]
  misc_feature (3)..(289): NCBI GI: 240108319 Blast Desc: oxidoreductase,short chain dehydrogenase, [Coccidioides posadasii C735 delta SOWgp]
  misc_feature (3)..(289): NCBI GI: 119187103 Blast Desc: CIMG_03599 [Coccidioides immitis RS]
  misc_feature (2)..(289): NCBI GI: 189204364 Blast Desc: 3-oxoacyl-(acyl-carrier-protein) reductase [Pyrenophora tritici-repentis Pt-1C-BFP] gi|187985616|gb|EDU51104.1| 3-oxoacyl-(acyl-carrier-protein)
  misc_feature (1)..(289): NCBI GI: 67537528 Blast Desc: AN4934.2 [Aspergillus nidulans FGSC A4] gi|40741822|gb|EAA61012.1| AN4934.2 [Aspergillus nidulans FGSC A4] gi|259482195|tpe|CBF76445.1| TPA: reductase, (AFU_orthologue;
  misc_feature (19)..(286): SWISSPROT Homolog: EC 1.1.1.100 3-oxoacyl-[acyl-carrier-protein] reductase
MSDRIAQLTSHLNYPKGMLAGQTAIITGSGQGIGAEAARLFANEGAKVVVSDIDAAKAKATADSINAASPNRAIAVAGDILDTTYQANLVKAAADFGGGKIHIIVNNAGYTWDGVIHKMKDEQWDTIINLHGTAPFKLIRAAAPYFRVKDGEPRCIINISSTSGIHGNAGQINYAMAKAGVAGMTKAIAKEWGPMFGVRANTIAFGHIQTRLTQAKEKGAFVLGPKGEKIDLGIPEKQSAVPKEMLHADIPLRRPGMPSEAASVILAVASPLFSYVTGQTIMVTGGRNM

SEQ ID NO: 35382 - DNA, 1511 bp, Muscodor strobelii
  misc_feature: SGI EST ID NO. CUFF.84239.0
  misc_feature: Variant of the nucleotide sequence at SEQ ID NO 35380
cggcaagccggggcggaattctggggtatggctccagccatccctcagcgctagcttctctccaataaagagttctcccatcatacgcaattcggaggattctagaagttgaagatttaatctcacatcggcttcatccaatctcattttgctttgtgctaagaacctcatttggctcaatcgtaaccgtgccgctcatatagaccacacatttttgagattcatacacacaaacgcaagatgtcggacagaatagcacagctcaccagccacttgaactaccccaagggtatgctcgcaggccaaacagcaatcataacaggaagtggtcaaggcatcggcgccgaagccgcccgtcttttcgcaaacgaaggagcaaaagtagtagtttcagacattgatgcagcaaaagcgaaagcaacagcagatagtataaacgccgcatcacccaaccgggccatcgcagtagcaggcgacatcctagacacaacctaccaagccaacctcgtaaaagcagcagcagacttcggcggcggcaaaatccacatcatcgtgaataatgcgggatatacctgggacggcgtaatccacaagatgaaagacgagcaatgggacacgatcataaacctgcacgggaccgctcccttcaaactcattcgggcagctgcaccatacttcagagtcaaggacggagagccaagatgtattattaatatctcttccacctccggaatccacggaaacgccggacagatcaattacgcgatggctaaagcgggcgtggcgggtatgacgaaggcgatagcgaaagaatggggtccgatgttcggcgttagggcgaatacgattgcttttgggcatattcagacgagacttacacaggcgaaagagaagggggcttttgtactagggccgaagggggagaagattgatcttgggataccggagaagcagagtgctgttccgaaggagatgttgcatgctgatataccgttgaggagacccggtatgcctagtgaggctgcgagcgtgatattggctgtggctagtccgttgtttagttatgttacagggcagactattatggttacgggcgggaggaatatgtagattagataatctgaggctgaatgagaacgactttgaattggttatggcctggcataagctactctacaatatgcttcaaccgcgaggcaacaagagtaatgcgcgtcgtgaggacaggatatgtgccataagtcgcatgcaatcccgcagacgccggtctggaattgcggacgctggtgggaaattcgatgaatcaacgagaattatataggcgtactgggcagtgattgagtcacgtgcgtatcctcaattgctcatggacatttcgacttcaaggcggtgcgtatgggggctgcgtgggcattgcatccagctaatgtgccagtgtcagtaactaccacacaaagcacagggcagaatgcgacttcaactttctgaggtagcgtgtactttaaagtatg

SEQ ID NO: 35383 - DNA, 1983 bp, Muscodor strobelii
  misc_feature: SGI cDNA ID NO. 572249
  misc_feature: Encodes the peptide sequence at SEQ ID NO 35384
atgctatttcaagagaacgatcgaataatttacagctacgactcagagcaactatggatagaggcatggggcccaaacgctttgcgcgtgcgagccaccaagattgcacgcatgccagctcaggactgggctctactgtccctagctgagaaaattgcccctgagatcgcaattacaaatagcgagggatctataatcaacgggaaagctaaagctatcgttacgtcgagtggtaaactgacagtattcaactcgaaaggcgacacactactagaagagtatgtacgaactcgcaaagatgtcacagatcccaagtgcagcgccattgaggtccaggcgcgagagttcaagccagcgctcgcggggagtgactacagcctaacagcgcggtttgaaagtttagaccccaatgagaagctttttggaatgggtcaatatcaacaacctttcttgaacttgaaaggacacgatttggaactcgcgcacagaaactctcaggcctctgttcccttcttactctcttctcttgggtatggacttctctggaataatccggcggtcggtcgagcagttctagggtgtaatgttatgagttttgaagcatattcaaccgacgtcctcgattactggattgtagcaggggacacaccggcagagatcgtggaagcatatgctggagttacaggaaccgttcctatgatgcctgaatatggcttaggattctggcagtgcaagcttcgctatcagacccaagaagaacttcttgaagttgcgcgagagtataaacgaagaaatctgcctttggatttgatcgttatcgacttcttccattggcctctacagggtgaatggaaattcgaccgaacgtactggcctaaccctcatgctatggtgaaggagttggaggagatgaatgtcgagttaatggtatccatctggccgactgttgacaagcgatcggagaacttcgaagagatgctcgaaaagggttacctcattcgcgttgaccgaggcgtccgcaccggtctccacttccagggcgatactattcatattgacacaactaacccggctgcgcgtgaatatttctggggcaaggcaaaagataactactactcgaaaggcattaaagtgttctggcttgatgaggcagaaccagagtatgccgtctatgacttcgacaactaccgttaccatgctggaccaaacgtgcgcataggtaatatctaccccgttgagtattctcgagctttctacgaaggtcttgcaaaagaagggcacaaggacatagtcaatcttgttcgttgcgcttgggcaggtagtcagaagtacggcgctctagtctggagtggtgatatcgcatcttcctggtccagtttccgcaatcaactagccgcggggctgcacatgggtatctccggtctaccatggtggacgactgacattggcggctttcacggcggagaccccaatgacgaggcctttcgcgaactgtttgttcgatggttccagtggggcgcattctgtcctgtctttcggctccatggggatagagaaccccgccagcctcaacatggcgaaacgggaggcgcgacttgccgcagcggtgcagcgaatgaagtttggtcttatggtgaagaagtctacgagatctgcaagaactatatggccacgcgagagagcatgagatcctacacccgtggtctcatgacacaggctcacgagaagggtacgccggtcatgcggaccttgttctatgagttccccgaagataagacttgttggtcgaccgctgaacagtacatgtatggtgataagtacctggtctgccctgtgatgcgacctcgtatgaggaagctcacagtatatttaccggcgggcgtgaaatggcatgccactagtggtggcgatgtgcttgaaggcggccaaatattcgaagcagactgtccgcttgattacatgccggtatttgaaagggtataa

SEQ ID NO: 35384 - protein, 660 aa, Muscodor strobelii
  misc_feature: SGI Peptide ID NO. 572249
  misc_feature (210)..(660): Pfam Id: PF01055 Pfam Desc: Glycosyl hydrolases family 31
  misc_feature (210)..(657): Pfam Id: PF01055 Pfam Desc: Glycosyl hydrolases family 31
  misc_feature (1)..(660): NCBI GI: 169614484 Blast Desc: SNOG_10386 [Phaeosphaeria nodorum SN15] gi|160702751|gb|EAT81780.2| SNOG_10386 [Phaeosphaeria nodorum SN15]
  misc_feature (1)..(659): NCBI GI: 46128991 Blast Desc: FG08797.1 [Gibberella zeae PH-1]
  misc_feature (1)..(659): NCBI GI: 256729526 Blast Desc: NECHADRAFT_84195 [Nectria haematococca mpVI 77-13-4]
  misc_feature (1)..(659): NCBI GI: 154315848 Blast Desc: BC1G_04496 [Botryotinia fuckeliana B05.10] gi|150846892|gb|EDN22085.1| BC1G_04496 [Botryotinia fuckeliana B05.10]
  misc_feature (6)..(659): NCBI GI: 67541913 Blast Desc: AN7120.2 [Aspergillus nidulans FGSC A4] gi|40742135|gb|EAA61325.1| AN7120.2 [Aspergillus nidulans FGSC A4] gi|259483556|tpe|CBF79042.1| TPA: conserved [Aspergillus FGSC
  misc_feature (1)..(659): NCBI GI: 255940194 Blast Desc: Pc16g05220 [Penicillium chrysogenum Wisconsin 54-1255] gi|211585489|emb|CAP93192.1| Pc16g05220 [Penicillium chrysogenum Wisconsin 54-1255]
  misc_feature (5)..(660): NCBI GI: 242796399 Blast Desc: glycosyl hydrolase, [Talaromyces stipitatus ATCC 10500] gi|218719378|gb|EED18798.1| glycosyl hydrolase, [Talaromyces stipitatus ATCC 10500]
  misc_feature (1)..(660): NCBI GI: 145229211 Blast Desc: An01g04880 [Aspergillus niger] gi|134055015|emb|CAK37022.1| protein product [Aspergillus niger]
  misc_feature (5)..(657): NCBI GI: 212536652 Blast Desc: glycosyl hydrolase, [Penicillium marneffei ATCC 18224] gi|210070881|gb|EEA24971.1| glycosyl hydrolase, [Penicillium marneffei ATCC 18224]
  misc_feature (1)..(660): NCBI GI: 115388401 Blast Desc: conserved [Aspergillus terreus NIH2624] gi|114195790|gb|EAU37490.1| conserved [Aspergillus terreus NIH2624]
  misc_feature (131)..(657): SWISSPROT Homolog: EC 3.2.1.20 Alpha-glucosidase
MLFQENDRIIYSYDSEQLWIEAWGPNALRVRATKIARMPAQDWALLSLAEKIAPEIAITNSEGSIINGKAKAIVTSSGKLTVFNSKGDTLLEEYVRTRKDVTDPKCSAIEVQAREFKPALAGSDYSLTARFESLDPNEKLFGMGQYQQPFLNLKGHDLELAHRNSQASVPFLLSSLGYGLLWNNPAVGRAVLGCNVMSFEAYSTDVLDYWIVAGDTPAEIVEAYAGVTGTVPMMPEYGLGFWQCKLRYQTQEELLEVAREYKRRNLPLDLIVIDFFHWPLQGEWKFDRTYWPNPHAMVKELEEMNVELMVSIWPTVDKRSENFEEMLEKGYLIRVDRGVRTGLHFQGDTIHIDTTNPAAREYFWGKAKDNYYSKGIKVFWLDEAEPEYAVYDFDNYRYHAGPNVRIGNIYPVEYSRAFYEGLAKEGHKDIVNLVRCAWAGSQKYGALVWSGDIASSWSSFRNQLAAGLHMGISGLPWWTTDIGGFHGGDPNDEAFRELFVRWFQWGAFCPVFRLHGDREPRQPQHGETGGATCRSGAANEVWSYGEEVYEICKNYMATRESMRSYTRGLMTQAHEKGTPVMRTLFYEFPEDKTCWSTAEQYMYGDKYLVCPVMRPRMRKLTVYLPAGVKWHATSGGDVLEGGQIFEADCPLDYMPVFERV

SEQ ID NO: 35385 - DNA, 835 bp, Muscodor strobelii
  misc_feature: SGI EST ID NO. CUFF.84263.0
  misc_feature: Variant of the nucleotide sequence at SEQ ID NO 35383
tcgaaaggcattaaagtgttctggcttgatgaggcagaaccagagtatgccgtctatgacttcgacaactaccgttaccatgctggaccaaacgtgcgcataggtaatatctaccccgttgagtattctcgagctttctacgaaggtcttgcaaaagaagggcacaaggacatagtcaatcttgttcgttgcgcttgggcaggtagtcagaagtacggcgctctagtctggagtggtgatatcgcatcttcctggtccagtttccgcaatcaactagccgcggggctgcacatgggtatctccggtctaccatggtggacgactgacattggcggctttcacggcggagaccccaatgacgaggcctttcgcgaactgtttgttcgatggttccagtggggcgcattctgtcctgtctttcggctccatggggatagagaaccccgccagcctcaacatggcgaaacgggaggcgcgacttgccgcagcggtgcagcgaatgaagtttggtcttatggtgaagaagtctacgagatctgcaagaactatatggccacgcgagagagcatgagatcctacacccgtggtctcatgacacaggctcacgagaagggtacgccggtcatgcggaccttgttctatgagttccccgaagataagacttgttggtcgaccgctgaacagtacatgtatggtgataagtacctggtctgccctgtgatgcgacctcgtatgaggaagctcacagtatatttaccggcgggcgtgaaatggcatgccactagtggtggcgatgtgcttgaaggcggccaaatattcgaagcagactgtccgc

SEQ ID NO: 35386 - DNA, 903 bp, Muscodor strobelii
  misc_feature: SGI cDNA ID NO. 572250
  misc_feature: Encodes the peptide sequence at SEQ ID NO 35387
atgatcttggcaacagacgatgttcatacgcctctagctattgcggctcttaaagcagggaaacatgtgttcatagagaatccattgactctttcgctactctcggctcaggcaattatagatgccgagaaagcagccggcggaaatcgactgtttgtaggctacatgggacgttacgcaccgtctcatactcaagctttcatgcgcgagatattgacgatccctaagattctatatgcccgcgtgcgcgacttttctggtacgaacgccgatttcactacgcagagcggtactttcgccataaagcctacagactgtcctcgcaggagtggtgctgagcgtgatgctcgtctcgaggacctcttcaaagaagcctttccaagccaagagattactaccgctcaccgtcaatattgccgattcctgggtagtctagcatcacatgatatctctttaatgcgggagacgttgggattgcccgagaaaatcagcagtgtatcagcagatgagccattctatactgccatgatgagctttaagaacaaggacgggtcatcgtactctgttacttacgagagtggcattgacacggtgcctgtttctgatgcccacttggctgtctatggcgagaagaagcgtgtgacaatcaaggtaagccacccatatgtgaagggtctatcgatcacggtcgaggtcgatgaggtgaatgaacatggcaagacccagtctcggacgatgcttttgtcgtacgaggacacatacaagacggagcttcgagaagtgtacgagtggggagcaaacggcaagccaattaagacaacgactgaggatgctatacgggacattcgaatctatgatatgatgtataaatcatggaaccagggtactaagccttcgtgctaa

SEQ ID NO: 35387 - protein, 300 aa, Muscodor strobelii
  misc_feature: SGI Peptide ID NO. 572250
  misc_feature (9)..(55): Pfam Id: PF01408 Pfam Desc: Oxidoreductase family, NAD-binding Rossmann fold
  misc_feature (1)..(295): NCBI GI: 261357206 Blast Desc: myo-inositol 2-dehydrogenase [Verticillium albo-atrum VaMs.102]
  misc_feature (1)..(290): NCBI GI: 212535832 Blast Desc: NAD binding Rossmann fold oxidoreductase, [Penicillium marneffei ATCC 18224] gi|210070471|gb|EEA24561.1| NAD binding Rossmann fold oxidoreductase, [Penicillium marneffei ATCC 18224]
  misc_feature (1)..(290): NCBI GI: 242794109 Blast Desc: NAD binding Rossmann fold oxidoreductase, [Talaromyces stipitatus ATCC 10500] gi|218718893|gb|EED18313.1| NAD binding Rossmann fold oxidoreductase, [Talaromyces stipitatus ATCC 10500]
  misc_feature (1)..(288): NCBI GI: 256726343 Blast Desc: NECHADRAFT_94735 [Nectria haematococca mpVI 77-13-4]
  misc_feature (6)..(294): NCBI GI: 119500476 Blast Desc: NAD binding Rossmann fold oxidoreductase, [Neosartorya fischeri NRRL 181] gi|119415160|gb|EAW25098.1| NAD binding Rossmann fold oxidoreductase, [Neosartorya fischeri NRRL 181]
  misc_feature (6)..(294): NCBI GI: 159125276 Blast Desc: NAD binding Rossmann fold oxidoreductase, [Aspergillus fumigatus A1163]
  misc_feature (6)..(294): NCBI GI: 70993920 Blast Desc: NAD binding Rossmann fold oxidoreductase [Aspergillus fumigatus Af293] gi|66849441|gb|EAL89769.1| NAD binding Rossmann fold oxidoreductase, [Aspergillus fumigatus Af293]
  misc_feature (1)..(291): NCBI GI: 256735630 Blast Desc: NECHADRAFT_75682 [Nectria haematococca mpVI 77-13-4]
  misc_feature (6)..(294): NCBI GI: 67523113 Blast Desc: AN2013.2 [Aspergillus nidulans FGSC A4] gi|40745689|gb|EAA64845.1| AN2013.2 [Aspergillus nidulans FGSC A4] gi|259487380|tpe|CBF86012.1| TPA: NAD binding Rossmann fold
  misc_feature (1)..(295): NCBI GI: 255940750 Blast Desc: Pc16g08230 [Penicillium chrysogenum Wisconsin 54-1255] gi|211585767|emb|CAP93493.1| Pc16g08230 [Penicillium chrysogenum Wisconsin 54-1255]
MILATDDVHTPLAIAALKAGKHVFIENPLTLSLLSAQAIIDAEKAAGGNRLFVGYMGRYAPSHTQAFMREILTIPKILYARVRDFSGTNADFTTQSGTFAIKPTDCPRRSGAERDARLEDLFKEAFPSQEITTAHRQYCRFLGSLASHDISLMRETLGLPEKISSVSADEPFYTAMMSFKNKDGSSYSVTYESGIDTVPVSDAHLAVYGEKKRVTIKVSHPYVKGLSITVEVDEVNEHGKTQSRTMLLSYEDTYKTELREVYEWGANGKPIKTTTEDAIRDIRIYDMMYKSWNQGTKPSC

SEQ ID NO: 35388 - DNA, 387 bp, Muscodor strobelii
  misc_feature: SGI cDNA ID NO. 572251
  misc_feature: Encodes the peptide sequence at SEQ ID NO 35389
atgcgtgctcctatcatcatctcaaacatcgtcgctactatcaagctcatcaacgcagcagcagacccaaggatccacgacgagttcagagtcacatttctcgggtcatatatcaatagaccatatctatcatttaatgtctctgcaccggataactatgttgagggagtgaaggggttttcggacacagagtgcagggatatctcccttctcgacgccaagaagcgtgcgaataatacgggcggatacacaagctgtacagctgatagcccgccggtgttggaggtaaaggtgacttatccttataccgttcccttcgaggttaggaacccgcctgagttttgtgttcctgtaacggacatcgaagagtcgtgcgcaaggccatag

SEQ ID NO: 35389 - protein, 128 aa, Muscodor strobelii
  misc_feature: SGI Peptide ID NO. 572251
MRAPIIISNIVATIKLINAAADPRIHDEFRVTFLGSYINRPYLSFNVSAPDNYVEGVKGFSDTECRDISLLDAKKRANNTGGYTSCTADSPPVLEVKVTYPYTVPFEVRNPPEFCVPVTDIEESCARP

SEQ ID NO: 35390 - DNA, 2382 bp, Muscodor strobelii
  misc_feature: SGI cDNA ID NO. 572252
  misc_feature: Encodes the peptide sequence at SEQ ID NO 35391
atgcggttctcggcagctctcttagcactcctgtcaggcgttgctataggagacgatcatggactcagacacagatcttaccattcatatccgacagcgccaggaagtccctcctacccatccgacgggaaatgtgactattggttggaaggtatgaagcatcagggcatcgcgtctttcaatcccagccctgaggagtaccaggtgtggcgcaacgtcaaagacttcggtgccaagggtgacggcgtacacgacgataccaaggcgatccaggaggccattagcagcggcaacagatgtgcacccggcaagtgtgcctcgaccaccacgagcccggccctcgtctactttccgagtggtacttacatagtgtccgactccatcgttgactactatcatacctccatcgtcggaaatccgaactgcatgccagtgatcaagacagcttccaacttttcggcatcttttgtcttggacggcaaccaatatcagccgagtggtaccacgggatggggcgctacaaatgtgttcttcagtcagatcaggaacttgatcattgacacgacgctcgcatctccctccaaaaagattactgcattgcactggactgtttcgcaggcaacatcgctgcagaacgttgtcttcaacctgtctgccaagaacggcaccaagcatgagggtgtctttattgccgaaggttccggaggcttcctcggcgacctagttttccacggtggcaactatggtctcgatgttggaaaccagcaattcacgatgcgcaatctcacatttcataatgccaacacagccataaatcagctgtggtcatggggctgggcttacaagggaataagcatcaacgactgcaaggtaggcatcaacatgtcggctcttaatgacgaaggggctcaaaccgtagggtcaatcacccttctagacagtgagatcaacaacactcccattggcgttatcacaggccgcggtacaccttcaaaccccgatgctggtggcaatctgatcatcgaaaacattgccatcgataacgtccccatcatgattcaaggcccgggcaagacgaccgttctcgagggatcgtctggctctgttgtgattcctgcgtggggccaagggcacgggtttgacaagggcagtacaaagcagtcgacttttcagggtgacataaccccgaaccagcgaccatcaacgcttatggcgggtagccacttctacgagcgctcaaagcccaagtacaatgacctctcagctcaagacttcatcagcgcccgggaactaggagctaagggtgatggcaaagccgacgataccgctgccctcaaccttgctattttccgtgccgtaagtgaaggcaaggtcctgttccttgacgccggctactaccgcgtgaccaaaacagtcttcattcccgctggctcacgcatcgtcggcgaagcctggcctgtgatcatctccagcgggcccttcttcgccgacatgcacaacccgcagcccgttgtgaagatcggcgtcccaggtgaacctggggcaatcgagtggtccgacacatttgttagtactcaaggcgcacaagccggcgcaattctaatcgaatacaacctcgctgcacatacagccgcgccctcgggcctctgggaagtgcacgcgcgcattggcgggtttgccggatcacaacttcaggctgagcaatgccccaagactcccaatacaaccgtaacgcccgcgacgctgaacagtgactgtattgcatcattcttgactgtgcacgtgacgaagttgtcgtcgggcttgtacttcgagaacaattggttctgggtggctgaccatgatatcgaagatccggatctcacgcaaatcacgatctacggtggtcgcggcatgctgatcgagagcgaggttggtggtgtgtatctatatggcacgggcgtggagcaccacgtcatgtacgagtatcacttcgtgggaacgaaggatatcgtcatgacccaacctcagaccgagacggcgtattatcagccgaatcccgatgtgttgattccgtttccacgagtgacccggctgcatgatccggtgtttaagaagggcgattttggatgggggttccgggtcgttgatagtagcgacgtgatggtgtatagctgcggactgtacagcttcttcaacgactatgatgtgtcctgctcacagactgactacgatggagattgtcagcgcagcatctttagtgttgagaatagcagtgtcgctgtatatggattcagcactgtcggagcgctggatatggtcacactggatggaaagggggttgtgcaggcgaagaataatcgggatggctttgttgatacgttggctttgtttcgctcttaa

SEQ ID NO: 35391 - protein, 793 aa, Muscodor strobelii
  misc_feature: SGI Peptide ID NO. 572252
  misc_feature (46)..(791): NCBI GI: 116203155 Blast Desc: CHGG_09462 [Chaetomium globosum CBS 148.51] gi|88177980|gb|EAQ85448.1| CHGG_09462 [Chaetomium globosum CBS 148.51]
  misc_feature (47)..(792): NCBI GI: 189195418 Blast Desc: beta-1,3-exoglucanase [Pyrenophora tritici-repentis Pt-1C-BFP] gi|187979926|gb|EDU46552.1| beta-1,3-exoglucanase [Pyrenophora tritici-repentis Pt-1C-BFP]
  misc_feature (43)..(793): NCBI GI: 145604054 Blast Desc: MGG_14087 [Magnaporthe grisea 70-15] gi|145012148|gb|EDJ96804.1| MGG_14087 [Magnaporthe grisea 70-15]
  misc_feature (46)..(789): NCBI GI: 85096041 Blast Desc: NCU09791 [Neurospora crassa OR74A] gi|28921670|gb|EAA30953.1| NCU09791 [Neurospora crassa OR74A]
  misc_feature (47)..(793): NCBI GI: 156045880 Blast Desc: SS1G_09216 [Sclerotinia sclerotiorum 1980] gi|154693612|gb|EDN93350.1| SS1G_09216 [Sclerotinia sclerotiorum 1980]
  misc_feature (47)..(793): NCBI GI: 154321772 Blast Desc: BC1G_01033 [Botryotinia fuckeliana B05.10] gi|150850280|gb|EDN25473.1| BC1G_01033 [Botryotinia fuckeliana B05.10]
  misc_feature (46)..(793): NCBI GI: 119472314 Blast Desc: NFIA_057650 [Neosartorya fischeri NRRL 181] gi|119406464|gb|EAW16415.1| conserved [Neosartorya fischeri NRRL 181]
  misc_feature (47)..(793): NCBI GI: 70992457 Blast Desc: exo-beta-1,3-glucanase [Aspergillus fumigatus Af293] gi|66848710|gb|EAL89039.1| exo-beta-1,3-glucanase, [Aspergillus fumigatus Af293]
  misc_feature (47)..(793): NCBI GI: 159124647 Blast Desc: exo-beta-1,3-glucanase, [Aspergillus fumigatus A1163]
  misc_feature (46)..(793): NCBI GI: 171682856 Blast Desc: protein product [Podospora anserina] gi|170941387|emb|CAP67037.1| protein product [Podospora anserina]
  misc_feature (47)..(791): SWISSPROT Homolog: EC 3.2.1.58 Glucan 1,3-beta-glucosidase
MRFSAALLALLSGVAIGDDHGLRHRSYHSYPTAPGSPSYPSDGKCDYWLEGMKHQGIASFNPSPEEYQVWRNVKDFGAKGDGVHDDTKAIQEAISSGNRCAPGKCASTTTSPALVYFPSGTYIVSDSIVDYYHTSIVGNPNCMPVIKTASNFSASFVLDGNQYQPSGTTGWGATNVFFSQIRNLIIDTTLASPSKKITALHWTVSQATSLQNVVFNLSAKNGTKHEGVFIAEGSGGFLGDLVFHGGNYGLDVGNQQFTMRNLTFHNANTAINQLWSWGWAYKGISINDCKVGINMSALNDEGAQTVGSITLLDSEINNTPIGVITGRGTPSNPDAGGNLIIENIAIDNVPIMIQGPGKTTVLEGSSGSVVIPAWGQGHGFDKGSTKQSTFQGDITPNQRPSTLMAGSHFYERSKPKYNDLSAQDFISARELGAKGDGKADDTAALNLAIFRAVSEGKVLFLDAGYYRVTKTVFIPAGSRIVGEAWPVIISSGPFFADMHNPQPVVKIGVPGEPGAIEWSDTFVSTQGAQAGAILIEYNLAAHTAAPSGLWEVHARIGGFAGSQLQAEQCPKTPNTTVTPATLNSDCIASFLTVHVTKLSSGLYFENNWFWVADHDIEDPDLTQITIYGGRGMLIESEVGGVYLYGTGVEHHVMYEYHFVGTKDIVMTQPQTETAYYQPNPDVLIPFPRVTRLHDPVFKKGDFGWGFRVVDSSDVMVYSCGLYSFFNDYDVSCSQTDYDGDCQRSIFSVENSSVAVYGFSTVGALDMVTLDGKGVVQAKNNRDGFVDTLALFRS

SEQ ID NO: 35392 - DNA, 3025 bp, Muscodor strobelii
  misc_feature: SGI EST ID NO. CUFF.84282.0
  misc_feature: Variant of the nucleotide sequence at SEQ ID NO 35390
cgcgtacacttacaccaattttcgctcctactacgacggattgccgactatcctcattacagcgatggtgatcccgactttgattgggtcgcggaatgtcatccatcatcaagggtctcgcgaaaatcctatggcaggcctgtaattgttcttcaaataccgtagccatgcgctctcaagaagtctttcttgccatcatggtcatttcgacgttgagatctccttcgtcaaaaaaccttgagtgagcctgaggctcgtccactcctttaactcttcgttctgtctactcattcacaatgcggttctcggcagctctcttagcactcctgtcaggcgttgctataggagacgatcatggactcagacacagatcttaccattcatatccgacagcgccaggaagtccctcctacccatccgacgggaaatgtgactattggttggaaggtatgaagcatcagggcatcgcgtctttcaatcccagccctgaggagtaccaggtgtggcgcaacgtcaaagacttcggtgccaagggtgacggcgtacacgacgataccaaggcgatccaggaggccattagcagcggcaacagatgtgcacccggcaagtgtgcctcgaccaccacgagcccggccctcgtctactttccgagtggtacttacatagtgtccgactccatcgttgactactatcatacctccatcgtcggaaatccgaactgcatgccagtgatcaagacagcttccaacttttcggcatcttttgtcttggacggcaaccaatatcagccgagtggtaccacgggatggggcgctacaaatgtgttcttcagtcagatcaggaacttgatcattgacacgacgctcgcatctccctccaaaaagattactgcattgcactggactgtttcgcaggcaacatcgctgcagaacgttgtcttcaacctgtctgccaagaacggcaccaagcatgagggtgtctttattgccgaaggttccggaggcttcctcggcgacctagttttccacggtggcaactatggtctcgatgttggaaaccagcaattcacgatgcgcaatctcacatttcataatgccaacacagccataaatcagctgtggtcatggggctgggcttacaagggaataagcatcaacgactgcaaggtaggcatcaacatgtcggctcttaatgacgaaggggctcaaaccgtagggtcaatcacccttctagacagtgagatcaacaacactcccattggcgttatcacaggccgcggtacaccttcaaaccccgatgctggtggcaatctgatcatcgaaaacattgccatcgataacgtccccatcatgattcaaggcccgggcaagacgaccgttctcgagggatcgtctggctctgttgtgattcctgcgtggggccaagggcacgggtttgacaagggcagtacaaagcagtcgacttttcagggtgacataaccccgaaccagcgaccatcaacgcttatggcgggtagccacttctacgagcgctcaaagcccaagtacaatgacctctcagctcaagacttcatcagcgcccgggaactaggagctaagggtgatggcaaagccgacgataccgctgccctcaaccttgctattttccgtgccgtaagtgaaggcaaggtcctgttccttgacgccggctactaccgcgtgaccaaaacagtcttcattcccgctggctcacgcatcgtcggcgaagcctggcctgtgatcatctccagcgggcccttcttcgccgacatgcacaacccgcagcccgttgtgaagatcggcgtcccaggtgaacctggggcaatcgagtggtccgacacatttgttagtactcaaggcgcacaagccggcgcaattctaatcgaatacaacctcgctgcacatacagccgcgccctcgggcctctgggaagtgcacgcgcgcattggcgggtttgccggatcacaacttcaggctgagcaatgccccaagactcccaatacaaccgtaacgcccgcgacgctgaacagtgactgtattgcatcattcttgactgtgcacgtgacgaagttgtcgtcgggcttgtacttcgagaacaattggttctgggtggctgaccatgatatcgaagatccggatctcacgcaaatcacgatctacggtggtcgcggcatgctgatcgagagcgaggttggtggtgtgtatctatatggcacgggcgtggagcaccacgtcatgtacgagtatcacttcgtgggaacgaaggatatcgtcatgacccaacctcagaccgagacggcgtattatcagccgaatcccgatgtgttgattccgtttccacgagtgacccggctgcatgatccggtgtttaagaagggcgattttggatgggggttccgggtcgttgatagtagcgacgtgatggtgtatagctgcggactgtacagcttcttcaacgactatgatgtgtcctgctcacagactgactacgatggagattgtcagcgcagcatctttagtgttgagaatagcagtgtcgctgtatatggattcagcactgtcggagcgctggatatggtcacactggatggaaagggggttgtgcaggcgaagaataatcgggatggctttgttgatacgttggctttgtttcgctcttaagagtatgattgcttcggcatcgatcatcgcctttggtaatcgaacctttatcctggtatagagaccccgagaccgttctctatatcttgtaataattaccatcgtgcaactactcggtctcttgaggatgatgcctttggtaaatcaattgtcttgacactcgtttcctttgcgatctctgcccatctcagagtagtatagatcgtacggttcatgggatccgatgctcctgaccgccaggtatcagttcgttcaagcctggacgtgcatatataccgtagataacacttcgctgtcacggcttggggatgcgggcaagagatatcgtcgtagttacaagatctaag

SEQ ID NO: 35393 - DNA, 393 bp, Muscodor strobelii
  misc_feature: SGI cDNA ID NO. 572253
  misc_feature: Encodes the peptide sequence at SEQ ID NO 35394
atggcgtcaccggactacaactaccgcctcgtccctaaccacccgaaggccgttggcatcatcacgactagtggcaagttcaagtgtttttgtgacacgtgcctgatgtcggaagttgcagcagcggagactgctcgtcgcaggaacagggtccacgtggtcggctccggccttgctgttctgagcaatactcacgctgtcatcgggtcgcatcttgcgaataaggcccctttctcaatgtacagcgagaaccagtttacccgagatctcgtctgtccggttaacggttgcggcgccacaccaatgaacaaccatgctcttatccgccatatgggcagaaatcatagcgatatgcagttcagtaccgcagatctacgtcccctcacagtctaa

SEQ ID NO: 35394 - protein, 130 aa, Muscodor strobelii
  misc_feature: SGI Peptide ID NO. 572253
MASPDYNYRLVPNHPKAVGIITTSGKFKCFCDTCLMSEVAAAETARRRNRVHVVGSGLAVLSNTHAVIGSHLANKAPFSMYSENQFTRDLVCPVNGCGATPMNNHALIRHMGRNHSDMQFSTADLRPLTV

SEQ ID NO: 35395 - DNA, 1197 bp, Muscodor strobelii
  misc_feature: SGI cDNA ID NO. 572254
  misc_feature: Encodes the peptide sequence at SEQ ID NO 35396
atgcgcgtacatgattggaaaagcgcaattgttgcgttggtactcgccgctggagtaaccgggttgaccaccaatgacttttgcaagaaaaatgcttgtgctaagacagttattgcacacaatcagcaagccagcaaagactgttcgagctatctggtcaaaaccgtaactccaaagccgagcaccacggctgttactaaaacgtcgactatcacaaacacagtcacgacctccacgaccgtcgaggttgatgtcacaagtttctcgactgactatgagacggtcacggagacggacacagcttacgataccgctactatcgaatcgacagttacgcaagatgtacctgtggcgactgttgaggtgacggtaacgcagaccgtgggcgacagccccatccccaagcgaaccgtaagcccagcggcgataacatccaagaagctgccatcttatgctttgtcgcgcggcgtgtgctgcgaaagggagtatatctcagcatgctcttgcctaggtgttcgctcctcgaccacgacgctccccgcccagactgtgtcgactaccaagaccacaacgattcttgtgctcgctacgtccgtcagcactgtgtaccagacgagcaccgagattattgctacgacccatgtatctaccgtcgacgagacagatacaatcaccaatactgccacaacaaccacgacggtcgacaaccctgtaaccgtcactatgcctgttgcgaccgtctctgtaacaccatgttccgtcttcaacatcctcgtccagtcttcaggcgcagataacggtcgttatcttaccatcaacggcgactacgccgctacgactaacgatccaacccaggctcagcagttcacccttgactccgcgacgagtcaggtccatccatactacggtctaagtccctcgaatgaccaaaaggccagacggtttgccggttcaaacgccgcgcttggcgccttcctgatctcgtccgcaaatagtgcgctgacatgccaggttggcgataaagtgacgtgcactattggaactgccaatacctggtatcgctgccctggcttcctcaacaacattcagtttgcggacccccatgtcatcatggggaacccgacgtatagaacgtactgttcccaagtcttgacgtgcaacgtcgctaaccaggtcgcgactgtctgctcagtgtag

SEQ ID NO: 35396 - protein, 398 aa, Muscodor strobelii
  misc_feature: SGI Peptide ID NO. 572254
  misc_feature (28)..(263): NCBI GI: 85108690 Blast Desc: NCU06983 [Neurospora crassa OR74A] gi|28924233|gb|EAA33387.1| [Neurospora crassa OR74A]
  misc_feature (14)..(220): NCBI GI: 171689738 Blast Desc: protein product [Podospora anserina] gi|170944831|emb|CAP70943.1| protein product [Podospora anserina]
  misc_feature (29)..(192): NCBI GI: 46117392 Blast Desc: FG04538.1 [Gibberella zeae PH-1]
MRVHDWKSAIVALVLAAGVTGLTTNDFCKKNACAKTVIAHNQQASKDCSSYLVKTVTPKPSTTAVTKTSTITNTVTTSTTVEVDVTSFSTDYETVTETDTAYDTATIESTVTQDVPVATVEVTVTQTVGDSPIPKRTVSPAAITSKKLPSYALSRGVCCEREYISACSCLGVRSSTTTLPAQTVSTTKTTTILVLATSVSTVYQTSTEIIATTHVSTVDETDTITNTATTTTTVDNPVTVTMPVATVSVTPCSVFNILVQSSGADNGRYLTINGDYAATTNDPTQAQQFTLDSATSQVHPYYGLSPSNDQKARRFAGSNAALGAFLISSANSALTCQVGDKVTCTIGTANTWYRCPGFLNNIQFADPHVIMGNPTYRTYCSQVLTCNVANQVATVCSV

SEQ ID NO: 35397 - DNA, 1053 bp, Muscodor strobelii
  misc_feature: SGI cDNA ID NO. 572255
  misc_feature: Reduced expression when VOC is produced
  misc_feature: Encodes the peptide sequence at SEQ ID NO 35398
atgagttgcgcctgccgcaccacgtcgctccggatcttcatccagagcctcacggagctgcgcgtcgccaattccgtccacacgcgatctgcacgactgcatcatctctcatcgcctatcacgacgtttcgccgctctgcagcgttgctcaatcgtgcctcgagtgcttgccatcccacacgtggcttcaagtcaacacgatgcctccatgagccggccgatgcagcggcagcggccgagtccccgagtgcgactacccgtggagacgatgcacgcgatcccgagatacgtgcagactatgcaccatcgcctagatccgcgcctgcgctcgacatagatagtgccaagaatactggtgccgtcctcgactacacacccgagtccatcgatcagctcgttgctaatctggcgaacgaggaccgcccagaagacatcacttcgaataacgaagacgcaaagcacagcccaccgtcccgcaccaaacccccagttggtggcagctcgctcaagcggcgcaagatcatcaaggcagaacccaagcccgccccgcctgcaagcagcgaatacacaccctggacaaaagagaactggcagatccagaaagcagccctcaaagagaaattccccgagggttggaagccacgtaagcgtctatctcccgacgccttagacgggatccgggcgctgcactcgcaattcccacagcaatataccacggaagtgctagcgaagcatttcgaaatctcgcctgaagccattcgtcggatcttgaagagcaagtggagccccagtccggaggaggagcagaatagacaggagcgatggcataatcgcggtaagaatatttggtcacatatggcggagctgggcaagaagccgccgaggaaatggagggcggagggtatcaagagagatccgagatggaatgagaagagggggccgaagaattattggccgtatcagcctcaccgggaagaagatggcgagcagggtgagggcgaagatgagagcggagagagcacgcagcggaagctttctgggaagcttttttga

SEQ ID NO: 35398 - protein, 350 aa, Muscodor strobelii
  misc_feature: SGI Peptide ID NO. 572255
  misc_feature (163)..(314): NCBI GI: 116205075 Blast Desc: CHGG_10421 [Chaetomium globosum CBS 148.51] gi|88176549|gb|EAQ84017.1| CHGG_10421 [Chaetomium globosum CBS 148.51]
  misc_feature (197)..(312): NCBI GI: 171689604 Blast Desc: protein product [Podospora anserina] gi|170944764|emb|CAP70875.1| protein product [Podospora anserina]
  misc_feature (1)..(310): NCBI GI: 85082647 Blast Desc: NCU01506 [Neurospora crassa OR74A] gi|7801042|emb|CAB91438.1| conserved [Neurospora crassa] gi|28918037|gb|EAA27719.1| [Neurospora crassa OR74A]
  misc_feature (177)..(312): NCBI GI: 261356762 Blast Desc: conserved [Verticillium albo-atrum VaMs.102]
  misc_feature (1)..(312): NCBI GI: 39952299 Blast Desc: MGG_01792 [Magnaporthe grisea 70-15] gi|145020350|gb|EDK04479.1| MGG_01792 [Magnaporthe grisea 70-15]
  misc_feature (1)..(312): NCBI GI: 46109140 Blast Desc: FG01452.1 [Gibberella zeae PH-1]
  misc_feature (1)..(309): NCBI GI: 256730833 Blast Desc: NECHADRAFT_26980 [Nectria haematococca mpVI 77-13-4]
  misc_feature (1)..(314): NCBI GI: 156055982 Blast Desc: SS1G_05343 [Sclerotinia sclerotiorum 1980] gi|154703127|gb|EDO02866.1| SS1G_05343 [Sclerotinia sclerotiorum 1980]
  misc_feature (197)..(312): NCBI GI: 169624818 Blast Desc: SNOG_15673 [Phaeosphaeria nodorum SN15] gi|111055928|gb|EAT77048.1| SNOG_15673 [Phaeosphaeria nodorum SN15]
  misc_feature (195)..(293): NCBI GI: 255946365 Blast Desc: Pc20g14750 [Penicillium chrysogenum Wisconsin 54-1255] gi|211588685|emb|CAP86804.1| Pc20g14750 [Penicillium chrysogenum Wisconsin 54-1255]
  misc_feature: Useful for introducing or modulating the production of volatile compounds
MSCACRTTSLRIFIQSLTELRVANSVHTRSARLHHLSSPITTFRRSAALLNRASSACHPTRGFKSTRCLHEPADAAAAAESPSATTRGDDARDPEIRADYAPSPRSAPALDIDSAKNTGAVLDYTPESIDQLVANLANEDRPEDITSNNEDAKHSPPSRTKPPVGGSSLKRRKIIKAEPKPAPPASSEYTPWTKENWQIQKAALKEKFPEGWKPRKRLSPDALDGIRALHSQFPQQYTTEVLAKHFEISPEAIRRILKSKWSPSPEEEQNRQERWHNRGKNIWSHMAELGKKPPRKWRAEGIKRDPRWNEKRGPKNYWPYQPHREEDGEQGEGEDESGESTQRKLSGKLF

SEQ ID NO: 35399 - DNA, 1330 bp, Muscodor strobelii
  misc_feature: SGI EST ID NO. CUFF.84296.0
  misc_feature: Variant of the nucleotide sequence at SEQ ID NO 35397
gcaccttgtctccgcatgaagacccttggcgtccggtctgtttgagacccaactttttttcgactccaaactctgcatctggcaacggcgtcgttaaatcgggttgaagtaacgagtttttcgcaattcatcggccgaggagcaccatcacatgcatttctgctctcgaaaatgagttgcgcctgccgcaccacgtcgctccggatcttcatccagagcctcacggagctgcgcgtcgccaattccgtccacacgcgatctgcacgactgcatcatctctcatcgcctatcacgacgtttcgccgctctgcagcgttgctcaatcgtgcctcgagtgcttgccatcccacacgtggcttcaagtcaacacgatgcctccatgagccggccgatgcagcggcagcggccgagtccccgagtgcgactacccgtggagacgatgcacgcgatcccgagatacgtgcagactatgcaccatcgcctagatccgcgcctgcgctcgacatagatagtgccaagaatactggtgccgtcctcgactacacacccgagtccatcgatcagctcgttgctaatctggcgaacgaggaccgcccagaagacatcacttcgaataacgaagacgcaaagcacagcccaccgtcccgcaccaaacccccagttggtggcagctcgctcaagcggcgcaagatcatcaaggcagaacccaagcccgccccgcctgcaagcagcgaatacacaccctggacaaaagagaactggcagatccagaaagcagccctcaaagagaaattccccgagggttggaagccacgtaagcgtctatctcccgacgccttagacgggatccgggcgctgcactcgcaattcccacagcaatataccacggaagtgctagcgaagcatttcgaaatctcgcctgaagccattcgtcggatcttgaagagcaagtggagccccagtccggaggaggagcagaatagacaggagcgatggcataatcgcggtaagaatatttggtcacatatggcggagctgggcaagaagccgccgaggaaatggagggcggagggtatcaagagagatccgagatggaatgagaagagggggccgaagaattattggccgtatcagcctcaccgggaagaagatggcgagcagggtgagggcgaagatgagagcggagagagcacgcagcggaagctttctgggaagcttttttgagactgattgagatgaaaggatgagaagctgtaatatattgtgattataaaacttactcttgtataaaaggaacgaaacataaatgctgatctccgcgctgtagtgc

SEQ ID NO: 35400 - DNA, 1431 bp, Muscodor strobelii
  misc_feature: SGI cDNA ID NO. 572256
  misc_feature: Encodes the peptide sequence at SEQ ID NO 35401
atggcctacgcatacgcagacggcaagctccaagtgggcaagaagctagaaaagttcggtctcaagttcatatggacagcgcagcactcatcaccagaagacttagagccactcatccactcctacgacacgatatgtcaagaggccgtcgaggaaatggacaaggtatcccctccaccatatgccttctccccgcccgaagatggaaatatcgagggtgctatcaagcaagatggtgagaagaaaccaagacgagatctgtacgagttgatgcaagagatggcgcccaagaatgataaaattggcagactatgggatcaggttaacactgtcccggagtgggtagactgggcacaaatcgaaagaggacaaaaagtattctttcgctacggcggtccctgtatcgttaccctcacatttctctcacttctcggcggcatgggcagcggccgtacagtcgaaacactggatcgcacaggcggtttcaacgccaaagtcgtgcgcaggcggctcctcgaaacaacacaacacacactaaacgtgcacaaggacctacgctccatccaaccaggcggcgacggcttcacaaactccgttcgcgtccgactgctgcacacggcagtgcgtcgccgcataatggccatggcagccgagcaacccacctactacaacatcgccgaatacggcgcccccatcaacgacctagacagtctaggcaccataatgacgttctgctgcgtccccatctggatgggcctcccgcggcaaggcatatacctacgcgcccaagaaaaactggattacctcgctctatggcgatacatcgcctacctcatggggtcaccgcacgactggctagctaccgaagaaaatgcaaaggcaatgatggagtccctcctaatgtccgagtttaagccctcgaaagccagcgctatactagcgaacaatatcataactggtctgcgagaccaaccgcccacgaacgccagcgcggattttatgagggcgcagacgtactggttgaatgggacggagctgagtgaggcgctagagattgaacgaccgggtgtttattatagtgcgcttgtcctgggccagtgtatgttgttctgtgttatggggtatatatacagaagctttgacgggttggaccagtggaatattaatatcatcaaaaagacgttttttaatatcctactccacgataaatcgcgaggtgcgctgggttatacgtcgaaattccatttcaagtatatacccgaatttgctaccatgtctacggaacgaggcgagccggagagagcggggcattggttgctgagacctggtgttgagcggacggcgttgatatcgcttgttactttctcgtcgatgattggcgctggtatgtggtttgggagtaaggctttgttgtcaattttgggacattag

SEQ ID NO: 35401 - protein, 476 aa, Muscodor strobelii
  misc_feature: SGI Peptide ID NO. 572256
  misc_feature (19)..(426): NCBI GI: 189199214 Blast Desc: conserved [Pyrenophora tritici-repentis Pt-1C-BFP] gi|187983043|gb|EDU48531.1| conserved [Pyrenophora tritici-repentis Pt-1C-BFP]
  misc_feature (19)..(431): NCBI GI: 154310327 Blast Desc: BC1G_07083 [Botryotinia fuckeliana B05.10] gi|150851415|gb|EDN26608.1| BC1G_07083 [Botryotinia fuckeliana B05.10]
  misc_feature (19)..(430): NCBI GI: 226289002 Blast Desc: conserved [Paracoccidioides brasiliensis Pb18]
  misc_feature (19)..(461): NCBI GI: 226284336 Blast Desc: conserved [Paracoccidioides brasiliensis Pb01]
  misc_feature (17)..(470): NCBI GI: 121719150 Blast Desc: conserved [Aspergillus clavatus NRRL 1] gi|119404501|gb|EAW14877.1| conserved [Aspergillus clavatus NRRL 1]
  misc_feature (17)..(467): NCBI GI: 119499067 Blast Desc: NFIA_039700 [Neosartorya fischeri NRRL 181] gi|119414455|gb|EAW24394.1| conserved [Neosartorya fischeri NRRL 181]
  misc_feature (23)..(431): NCBI GI: 115437500 Blast Desc: conserved [Aspergillus terreus NIH2624] gi|114188641|gb|EAU30341.1| conserved [Aspergillus terreus NIH2624]
  misc_feature (19)..(460): NCBI GI: 169624816 Blast Desc: SNOG_15672 [Phaeosphaeria nodorum SN15] gi|160705245|gb|EAT77047.2| SNOG_15672 [Phaeosphaeria nodorum SN15]
  misc_feature (19)..(430): NCBI GI: 225681796 Blast Desc: conserved [Paracoccidioides brasiliensis Pb03]
  misc_feature (19)..(461): NCBI GI: 239607109 Blast Desc: conserved [Ajellomyces dermatitidis ER-3]
MAYAYADGKLQVGKKLEKFGLKFIWTAQHSSPEDLEPLIHSYDTICQEAVEEMDKVSPPPYAFSPPEDGNIEGAIKQDGEKKPRRDLYELMQEMAPKNDKIGRLWDQVNTVPEWVDWAQIERGQKVFFRYGGPCIVTLTFLSLLGGMGSGRTVETLDRTGGFNAKVVRRRLLETTQHTLNVHKDLRSIQPGGDGFTNSVRVRLLHTAVRRRIMAMAAEQPTYYNIAEYGAPINDLDSLGTIMTFCCVPIWMGLPRQGIYLRAQEKLDYLALWRYIAYLMGSPHDWLATEENAKAMMESLLMSEFKPSKASAILANNIITGLRDQPPTNASADFMRAQTYWLNGTELSEALEIERPGVYYSALVLGQCMLFCVMGYIYRSFDGLDQWNINIIKKTFFNILLHDKSRGALGYTSKFHFKYIPEFATMSTERGEPERAGHWLLRPGVERTALISLVTFSSMIGAGMWFGSKALLSILGH

SEQ ID NO: 35402 - DNA, 2799 bp, Muscodor strobelii
  misc_feature: SGI EST ID NO. CUFF.84479.0
  misc_feature: Variant of the nucleotide sequence at SEQ ID NO 35400
cggccgtacagtcgaaacactggatcgcacaggcggtttcaacgccaaagtcgtgcgcaggcggctcctcgaaacaacacaacacacactaaacgtgcacaaggacctacgctccatccaaccaggcggcgacggcttcacaaactccgttcgcgtccgactgctgcacacggcagtgcgtcgccgcataatggccatggcagccgagcaacccacctactacaacatcgccgaatacggcgcccccatcaacgacctagacagtctaggcaccataatgacgttctgctgcgtccccatctggatgggcctcccgcggcaaggcatatacctacgcgcccaagaaaaactggattacctcgctctatggcgatacatcgcctacctcatggggtcaccgcacgactggctagctaccgaagaaaatgcaaaggcaatgatggagtccctcctaatgtccgagtttaagccctcgaaagccagcgctatactagcgaacaatatcataactggtctgcgagaccaaccgcccacgaacgccagcgcggattttatgagggcgcagacgtactggttgaatgggacggagctgagtgaggcgctagagattgaacgaccgggtgtttattatagtgcgcttgtcctgggccagtgtatgttgttctgtgttatggggtatatatacagaagctttgacgggttggaccagtggaatattaatatcatcaaaaagacgttttttaatatcctactccacgataaatcgcgaggtgcgctgggttatacgtcgaaattccatttcaagtatatacccgaatttgctaccatgtctacggaacgaggcgagccggagagagcggggcattggttgctgagacctggtgttgagcggacggcgttgatatcgcttgttactttctcgtcgatgattggcgctggtatgtggtttgggagtaaggctttgttgtcaattttgggacattaggggagggttttgatggcagagaagttgtgatttgagcatgggaatgatacctcgtccctcttgtatttgctcgcgcaatactgaaaatgccatttccaattaagattttctgtttccaagcatggcattattgctatctgcatattcctgctgatttgtaccttccgtctttttgaagctgggtaaggtatgtaaagattgtctaccggtacaacggcagagagtcgtaattcagcctttaccctgtcatagccattgcaccataccgcaatcctccaaatacacacgatactccatcacattgcaggtatactaaaactctgaagtcttaatctcaagatcaatttcatactcatctactatttagtatgatctattttcatcccctctttaccatcacgactctctcttgtcttgttctaaacgttgtggttgccatcattgtggatttcgtgcttagcccaatcccagaaccgtcatgcttccaacgtagtatcgtacactcagcgcttttatcacgcaagtaaaaacattattgatatgcgatcccaatgctccaattaccatgaccctagacgcctcgaatgaaatcatactcgtacaaacacctcgtatcgcctgagtcttactccataagctcgacgggcggccgcgaagtgtgtgccatgatgggtttctccgccgtagggctcatggccatgggcgaatcggtcatgtcatcaacagagatggcgggcaagttggggctgccgccgtgctcctcgggatggaagatcaaggtgctgctgcggctgcgggtagggaacaaagcaccgtctgtgggcgagatgggtgagatgtctgcagcgggcgagggcgcgtggtggtggagcttagccagagcctcggctagatcctcggcatggacttgcttgttcggcgcatcctccaatttcatctcccagccgtggggcggtgatgggggagggctgatgaagaatagctttccggcatcgggcaggttgaggtggttgtccttgttgagatccaagggggtgtgctggccgaagtagacgcggcaccgctcgcccatgatcgcctcgccatcccaaatagcgcggaccttgatggcagcctgttcgtcgaggaaagagacgacgatgcgacggaatgattttaagggagaccatgtgtagattggggcaaagttctcgatcagtcctcgtatcgtctgcaagttgtcgggccgaaagacctcgacatcgttgaggttagtgatcagaagggtgttggtgggcggggtgggttgtgtaagtggcggtatgctggacaggtcgagactgagattagactttgaggagccacggcgctcgagaagtggccgtccgggagatgttggtgatgtaggcgacgagggcgaagacgttggtgataatgacccaggcataattgttattgtatgtggtatttttgtagtatttgcgagtctgatggtggtagtcttgcgcgaaggtggcgatattgctgttgcaattgttgtttgccgtgcgtggcaggcagtggtacagcagatgtacgatgatggtgtgtagtacgactgttggcgctcagtacgatctctgttggttgcgtaactgttcgtttggcgaagactgttagtcctttggcaatattctcgtctttgaagatacagagaagagagaggaggaaaaacaagatttgagtacggtagcaatggcaatatgtatgtggtcagaagtggctgcgcagacaagtgggttgactgcttgtcgggttgccaatgcccgagatacaaatcactgcaacgaggtgga

SEQ ID NO: 35403 - DNA, 801 bp, Muscodor strobelii
  misc_feature: SGI cDNA ID NO. 572257
  misc_feature: Reduced expression when VOC is produced
  misc_feature: Encodes the peptide sequence at SEQ ID NO 35404
atgcctgggtcattatcaccaacgtcttcgccctcgtcgcctacatcaccaacatctcccggacggccacttctcgagcgccgtggctcctcaaagtctaatctcagtctcgacctgtccagcataccgccacttacacaacccaccccgcccaccaacacccttctgatcactaacctcaacgatgtcgaggtctttcggcccgacaacttgcagacgatacgaggactgatcgagaactttgccccaatctacacatggtctcccttaaaatcattccgtcgcatcgtcgtctctttcctcgacgaacaggctgccatcaaggtccgcgctatttgggatggcgaggcgatcatgggcgagcggtgccgcgtctacttcggccagcacacccccttggatctcaacaaggacaaccacctcaacctgcccgatgccggaaagctattcttcatcagccctcccccatcaccgccccacggctgggagatgaaattggaggatgcgccgaacaagcaagtccatgccgaggatctagccgaggctctggctaagctccaccaccacgcgccctcgcccgctgcagacatctcacccatctcgcccacagacggtgctttgttccctacccgcagccgcagcagcaccttgatcttccatcccgaggagcacggcggcagccccaacttgcccgccatctctgttgatgacatgaccgattcgcccatggccatgagccctacggcggagaaacccatcatggcacacacttcgcggccgcccgtcgagcttatggagtaa

SEQ ID NO: 35404 - protein, 266 aa, Muscodor strobelii
  misc_feature: SGI Peptide ID NO. 572257
  misc_feature (63)..(262): Pfam Id: PF04847 Pfam Desc: Calcipressin
  misc_feature (12)..(266): NCBI GI: 154310329 Blast Desc: BC1G_07084 [Botryotinia fuckeliana B05.10] gi|150851416|gb|EDN26609.1| BC1G_07084 [Botryotinia fuckeliana B05.10]
  misc_feature (34)..(265): NCBI GI: 39942276 Blast Desc: MGG_03218 [Magnaporthe grisea 70-15] gi|145015790|gb|EDK00280.1| MGG_03218 [Magnaporthe grisea 70-15]
  misc_feature (12)..(266): NCBI GI: 156055986 Blast Desc: SS1G_05345 [Sclerotinia sclerotiorum 1980] gi|154703129|gb|EDO02868.1| SS1G_05345 [Sclerotinia sclerotiorum 1980]
  misc_feature (20)..(265): NCBI GI: 261356884 Blast Desc: conserved [Verticillium albo-atrum VaMs.102]
  misc_feature (43)..(265): NCBI GI: 85082640 Blast Desc: NCU01504 [Neurospora crassa OR74A] gi|7801046|emb|CAB91442.1| related to nebula protein [Neurospora crassa] gi|28918035|gb|EAA27717.1| conserved [Neurospora crassa
  misc_feature (35)..(265): NCBI GI: 46109136 Blast Desc: FG01450.1 [Gibberella zeae PH-1]
  misc_feature (32)..(265): NCBI GI: 116205073 Blast Desc: CHGG_10420 [Chaetomium globosum CBS 148.51] gi|88176548|gb|EAQ84016.1| CHGG_10420 [Chaetomium globosum CBS 148.51]
  misc_feature (34)..(265): NCBI GI: 256730834 Blast Desc: [Nectria haematococca mpVI 77-13-4]
  misc_feature (34)..(266): NCBI GI: 171689608 Blast Desc: protein product [Podospora anserina] gi|170944766|emb|CAP70877.1| protein product [Podospora anserina]
  misc_feature (34)..(265): NCBI GI: 240110967 Blast Desc: Calcipressin family protein [Coccidioides posadasii C735 delta SOWgp]
  misc_feature: Useful for introducing or modulating the production of volatile compounds
MPGSLSPTSSPSSPTSPTSPGRPLLERRGSSKSNLSLDLSSIPPLTQPTPPTNTLLITNLNDVEVFRPDNLQTIRGLIENFAPIYTWSPLKSFRRIVVSFLDEQAAIKVRAIWDGEAIMGERCRVYFGQHTPLDLNKDNHLNLPDAGKLFFISPPPSPPHGWEMKLEDAPNKQVHAEDLAEALAKLHHHAPSPAADISPISPTDGALFPTRSRSSTLIFHPEEHGGSPNLPAISVDDMTDSPMAMSPTAEKPIMAHTSRPPVELME

SEQ ID NO: 35405 - DNA, 2775 bp, Muscodor strobelii
  misc_feature: SGI cDNA ID NO. 572258
  misc_feature: Encodes the peptide sequence at SEQ ID NO 35406
atggaggcccttgctgccgttgggctcgccagtaacattctccagtttattgaacttgggttcaaagtcgttcaacaatcgaaggagctctactctagggatgctagtgcctataatgaggctctagagctgaccacgcaagagatgaaacggttcagccgagacctcgctgaccgtatggagataaataatcagaccagcggtctaacaaaacctacagtaccagaagacaatattgccctattgaagctctctcttgcgtgccagaagtgctcagatgagctgctggaactcttgggtcggctgcagaacaagaaccctggaaacattttcaggtcgattcgggttgcattacgagatatgaggaaaggagacgagaaagcgcgcctagaacagactcttgacaggttgcgcaaccaaatgaacatcttgctagacaaattaactcgtgaagagactttggcaaagctgaaaacaatcgaagttgcttccgactcagttttggccacgaacaaatctgtgctaggaatactgcacgagatccagaccggcaatccattgggacatcgacttgaaaaaatgatggaaaattttcatgacagcttgtcgcgtaggatagtgtcggaaactatggccgcattggatggcggcggattgtacgcacggttcgatgaggtatcagaagcacatacttctacattcgaatggattctttccaaacctatcccaatggtagcggttaagccagacgacagctactatagacacgaggccaatgccaagttcgtaaaatggctacaatccggtcaaggaatctttcatatttcagggaaacctggagccgggaagtccacgttgatgaaattcctttgccaaagcccaaagacgaaggaatatctctaccaatggtgtggtggagttgataggctcgtatttgctcagtcattcttctggagacatggaacgtcgttgcaaaagagtttgattgggttgatgcgcagcatcctccatcagatattttccacctgcccggagctagttcctcggcacacagaagagctgagagtaaacttgcaaagttttgttgttgatccaatgtcaaaattcgatcacactgcaagcttcgctagtaatattacttacaaactgtctagttctgtggataatcaagtgcgagagactttcgagcgcattttgagcgatccgctatcctttgaagggcggcgtttcgtctttttcattgatggacttgatgaattcgaggggcgtcacatcgatttggtccacaaactaaatgagtgggctcttgccagtcatactgaaaagcatctcaagatatgcgtttccagtcgcgagtggaacgaattcatggatggctttgcgcactgtcccaagctgaagattcaccattgcacagaaaacgatatacaggatgacggcgaagttagattcatgcacagcacggccctagagttcgtcaaccaatctcacatcaagcgcaggattaacgaggaagtcggcaatgttgatcgtctgcagcggttttgctacacattacttgctacaatgaagtatggctgtcctccggcctactacacccgctccatcagcgaaaacgaactcactgaggagtcgccatttgtggacgatctcatggcgcttatggaatgggagtttaggggacgaaggtcatggcctacacctcgtctagaacacctggaaggccccccatcttggtatcttgagtttctccgacattttgaagctgtgtcacatagtcggctttcagctattgatgtttctaatccagcccaatgtgggaataatgaggttgggattcaaccaggcgcagacattgacgttctatggcacgaactcgacggcgggcctacattatgggagattagccgaatcgatgccaagttgcacacgcaagtgttcgcacttcaatttcttatatttgagtttctcgaatccaaggatctccagcctttggctcaagcttgccaaattgaaccctgcgcaaaagtcgcccagcttctaacagctaggaacctgatgatactctgtgactacccggaataccacagacttcttcgcatgctgaggttgatgcttgaggccggttcttgtccaaatcacccattaatctatgacattctgactctggattatttcattttcttgtatctatttcctcctctgtatgacctgggcttttctcactattgtgatgctcgggaagacgaggcgacttcattcatccttccgttccagctagttcatctatgtctacgctacggggcgagatcacgactagagatcgtctttaccgactgctatcgaccaatggcggttggtgaaaaggatatcgtgcgattgagactgagagccaagtcaaatcgtcaggataataatcggcgtgatggtgatgatcgtggagaatcgttttatatgcacctcaactgccctctcgcgtctattgcaagggagcgcaatggcattttgcatgcaggcgacatattccgcatctggtttcctgacgactatggagtactacaagccctcatggatcgaaatgaggaggacccaagcgaagcaacgaagctcccacattatctcgacaatgagtatcgtgacgaacgagactatacgctgattgagtttggccagccccttacagatcgcaaaagtcattacgatgcgcccagccatgaaacattagcagcgaaatgtgaagtatttgatttttgggacgagagagaatggcaataa

SEQ ID NO: 35406 - protein, 924 aa, Muscodor strobelii
  misc_feature: SGI Peptide ID NO. 572258
  misc_feature (1)..(476): NCBI GI: 171692629 Blast Desc: protein product [Podospora anserina] gi|170946263|emb|CAP73064.1| protein product [Podospora anserina]
  misc_feature (69)..(477): NCBI GI: 115490985 Blast Desc: [Aspergillus terreus NIH2624] gi|114196980|gb|EAU38680.1| [Aspergillus terreus NIH2624]
  misc_feature (1)..(477): NCBI GI: 115383708 Blast Desc: [Aspergillus terreus NIH2624] gi|114196093|gb|EAU37793.1| [Aspergillus terreus NIH2624]
  misc_feature (2)..(502): NCBI GI: 169616506 Blast Desc: SNOG_11426 [Phaeosphaeria nodorum SN15] gi|160703200|gb|EAT81134.2| SNOG_11426 [Phaeosphaeria nodorum SN15]
  misc_feature (1)..(477): NCBI GI: 261190024 Blast Desc: conserved [Ajellomyces dermatitidis SLH14081] gi|239591250|gb|EEQ73831.1| conserved [Ajellomyces dermatitidis SLH14081]
  misc_feature (1)..(477): NCBI GI: 226284602 Blast Desc: conserved [Paracoccidioides brasiliensis Pb01]
  misc_feature (15)..(476): NCBI GI: 115402693 Blast Desc: [Aspergillus terreus NIH2624] gi|114189269|gb|EAU30969.1| [Aspergillus terreus NIH2624]
  misc_feature (1)..(477): NCBI GI: 225684243 Blast Desc: conserved [Paracoccidioides brasiliensis Pb03]
  misc_feature (1)..(477): NCBI GI: 226293863 Blast Desc: conserved [Paracoccidioides brasiliensis Pb18]
  misc_feature (1)..(504): NCBI GI: 256725921 Blast Desc: NECHADRAFT_82115 [Nectria haematococca mpVI 77-13-4]
MEALAAVGLASNILQFIELGFKVVQQSKELYSRDASAYNEALELTTQEMKRFSRDLADRMEINNQTSGLTKPTVPEDNIALLKLSLACQKCSDELLELLGRLQNKNPGNIFRSIRVALRDMRKGDEKARLEQTLDRLRNQMNILLDKLTREETLAKLKTIEVASDSVLATNKSVLGILHEIQTGNPLGHRLEKMMENFHDSLSRRIVSETMAALDGGGLYARFDEVSEAHTSTFEWILSKPIPMVAVKPDDSYYRHEANAKFVKWLQSGQGIFHISGKPGAGKSTLMKFLCQSPKTKEYLYQWCGGVDRLVFAQSFFWRHGTSLQKSLIGLMRSILHQIFSTCPELVPRHTEELRVNLQSFVVDPMSKFDHTASFASNITYKLSSSVDNQVRETFERILSDPLSFEGRRFVFFIDGLDEFEGRHIDLVHKLNEWALASHTEKHLKICVSSREWNEFMDGFAHCPKLKIHHCTENDIQDDGEVRFMHSTALEFVNQSHIKRRINEEVGNVDRLQRFCYTLLATMKYGCPPAYYTRSISENELTEESPFVDDLMALMEWEFRGRRSWPTPRLEHLEGPPSWYLEFLRHFEAVSHSRLSAIDVSNPAQCGNNEVGIQPGADIDVLWHELDGGPTLWEISRIDAKLHTQVFALQFLIFEFLESKDLQPLAQACQIEPCAKVAQLLTARNLMILCDYPEYHRLLRMLRLMLEAGSCPNHPLIYDILTLDYFIFLYLFPPLYDLGFSHYCDAREDEATSFILPFQLVHLCLRYGARSRLEIVFTDCYRPMAVGEKDIVRLRLRAKSNRQDNNRRDGDDRGESFYMHLNCPLASIARERNGILHAGDIFRIWFPDDYGVLQALMDRNEEDPSEATKLPHYLDNEYRDERDYTLIEFGQPLTDRKSHYDAPSHETLAAKCEVFDFWDEREWQ

SEQ ID NO: 35407 - DNA, 1194 bp, Muscodor strobelii
  misc_feature: SGI EST ID NO. CUFF.84315.0
  misc_feature: Variant of the nucleotide sequence at SEQ ID NO 35405
tgacattgcatgctgactgaggggcttggcgcagcataaacaattcgctttctccccatgtcaatggaacatcgttttctctccgaatacgtagttagttggatttcagagtttgctgcccttaggcagtcaccaacatggaggcccttgctgccgttgggctcgccagtaacattctccagtttattgaacttgggttcaaagtcgttcaacaatcgaaggagctctactctagggatgctagtgcctataatgaggctctagagctgaccacgcaagagatgaaacggttcagccgagacctcgctgaccgtatggagataaataatcagaccagcggtctaacaaaacctacagtaccagaagacaatattgccctattgaagctctctcttgcgtgccagaagtgctcagatgagctgctggaactcttgggtcggctgcagaacaagaaccctggaaacattttcaggtcgattcgggttgcattacgagatatgaggaaaggagacgagaaagcgcgcctagaacagactcttgacaggttgcgcaaccaaatgaacatcttgctagacaaattaactcgtgaagagactttggcaaagctgaaaacaatcgaagttgcttccgactcagttttggccacgaacaaatctgtgctaggaatactgcacgagatccagaccggcaatccattgggacatcgacttgaaaaaatgatggaaaattttcatgacagcttgtcgcgtaggatagtgtcggaaactatggccgcattggatggcggcggattgtacgcacggttcgatgaggtatcagaagcacatacttctacattcgaatggattctttccaaacctatcccaatggtagcggttaagccagacgacagctactatagacacgaggccaatgccaagttcgtaaaatggctacaatccggtcaaggaatctttcatatttcagggaaacctggagccgggaagtccacgttgatgaaattcctttgccaaagcccaaagacgaaggaatatctctaccaatggtgtggtggagttgataggctcgtatttgctcagtcattcttctggagacatggaacgtcgttgcaaaagagtttgattgggttgatgcgcagcatcctccatcagatattttccacctgcccggagctagttcctcggcacacagaag

SEQ ID NO: 35408 - DNA, 1107 bp, Muscodor strobelii
  misc_feature: SGI cDNA ID NO. 572259
  misc_feature: Encodes the peptide sequence at SEQ ID NO 35409
atgcctgagactactgaaacggccgaattcatgtctatagctgttccttttctactttcagagcctttcaaatcgtccgaaactaatctaccgagtcgcataccagcaacaaaatactacgctgggaaagataccttaatatatgctcccgaaaccctggacgagtacgtcaaccctggaatcggcgaagatccactcggtggccgggaccgacgccgggttctttatcgactctacaagaacgaggaagagagacatgtcatgaaagtccatcaattatggatgttcaaattcggaaaccgcgtgacgtatgcctctacagcccgtaaactggataggtggagctatatgggattgtcattcgcaattcacccagatgcaagtctggcaacaattatgcagaaggtcattgagtcattggaggacgaaagtgtccctgaatctccggggtccatattcaccatttccgccaagtccattgcagacttgtcagagcgagtcgatatctatgttagagacgaagaaagggagtctattaatatgacggatgagacagaatacatctacgaaatcaacgacattcgcgaagaactctctatgatcaagacgatcatgctacagcaagaggagatttggcggagttttgcaacacacgcatggcctggccaacagtactggcctgatggatatactggcccattcagagtcccggaggacccatacgaggacggcatcaagtatatagcgactgaaattgaagcaccgcaaagtactctcgctaaatacctgcggaaaatagcgttgctggacgagaacgcagaacgagtcgaacgatcaatccagactcggttagagctcaaacataggcactttgcctggaaagaaaccaaagctatgtcggttatgagtgcttccatctttggcttcactattgtcaccgtcatattcaccccgctttccttcgccgccagtctctttgctctgccagttgatcgattttctcgaaaccagaaaccatcagaaagcggggactttgtgtatagcgcgggctatgttgccaaatggttcagtaagtttcttaaaaaaagcacagtattcgacatgtga

SEQ ID NO: 35409 - protein, 368 aa, Muscodor strobelii
  misc_feature: SGI Peptide ID NO. 572259
  misc_feature (44)..(335): NCBI GI: 169613761 Blast Desc: SNOG_10013 [Phaeosphaeria nodorum SN15] gi|111061228|gb|EAT82348.1| SNOG_10013 [Phaeosphaeria nodorum SN15]
  misc_feature (182)..(364): NCBI GI: 169615727 Blast Desc: SNOG_11027 [Phaeosphaeria nodorum SN15] gi|160703031|gb|EAT81526.2| SNOG_11027 [Phaeosphaeria nodorum SN15]
  misc_feature (179)..(355): NCBI GI: 70996130 Blast Desc: ankyrin repeat protein [Aspergillus fumigatus Af293] gi|66850455|gb|EAL90782.1| ankyrin repeat protein [Aspergillus fumigatus Af293] gi|159131573|gb|EDP56686.1| ankyrin repeat
  misc_feature (179)..(352): NCBI GI: 121701093 Blast Desc: ankyrin repeat protein [Aspergillus clavatus NRRL 1] gi|119396954|gb|EAW07385.1| ankyrin repeat protein [Aspergillus clavatus NRRL 1]
  misc_feature (179)..(352): NCBI GI: 119495022 Blast Desc: ankyrin repeat protein [Neosartorya fischeri NRRL 181] gi|119412469|gb|EAW22410.1| ankyrin repeat protein [Neosartorya fischeri NRRL 181]
  misc_feature (179)..(352): NCBI GI: 115492215 Blast Desc: conserved [Aspergillus terreus NIH2624] gi|114197595|gb|EAU39295.1| conserved [Aspergillus terreus NIH2624]
  misc_feature (179)..(355): NCBI GI: 255941688 Blast Desc: Pc16g13140 [Penicillium chrysogenum Wisconsin 54-1255] gi|211586236|emb|CAP93984.1| Pc16g13140 [Penicillium chrysogenum Wisconsin 54-1255]
  misc_feature (23)..(356): NCBI GI: 169617431 Blast Desc: SNOG_11894 [Phaeosphaeria nodorum SN15] gi|111059818|gb|EAT80938.1| SNOG_11894 [Phaeosphaeria nodorum SN15]
  misc_feature (179)..(333): NCBI GI: 145230782 Blast Desc: An01g12480 [Aspergillus niger] gi|134055776|emb|CAK37300.1| protein product [Aspergillus niger]
  misc_feature (179)..(355): NCBI GI: 67517003 Blast Desc: AN0782.2 [Aspergillus nidulans FGSC A4] gi|40746268|gb|EAA65424.1| AN0782.2 [Aspergillus nidulans FGSC A4] gi|259488938|tpe|CBF88794.1| TPA: ankyrin repeat protein FGSC
MPETTETAEFMSIAVPFLLSEPFKSSETNLPSRIPATKYYAGKDTLIYAPETLDEYVNPGIGEDPLGGRDRRRVLYRLYKNEEERHVMKVHQLWMFKFGNRVTYASTARKLDRWSYMGLSFAIHPDASLATIMQKVIESLEDESVPESPGSIFTISAKSIADLSERVDIYVRDEERESINMTDETEYIYEINDIREELSMIKTIMLQQEEIWRSFATHAWPGQQYWPDGYTGPFRVPEDPYEDGIKYIATEIEAPQSTLAKYLRKIALLDENAERVERSIQTRLELKHRHFAWKETKAMSVMSASIFGFTIVTVIFTPLSFAASLFALPVDRFSRNQKPSESGDFVYSAGYVAKWFSKFLKKSTVFDM

SEQ ID NO: 35410 - DNA, 1503 bp, Muscodor strobelii
  misc_feature: SGI cDNA ID NO. 572260
  misc_feature: Reduced expression when VOC is produced
  misc_feature: Encodes the peptide sequence at SEQ ID NO 35411
atgtgggcgtctcggcttcgcgttgccacaagactggctggaactcaaccagctctgaggagttggaagccttcctattgctggtcgacttgccgttacggctcatcacaagcatctccatctccatctccatctccgtctccatcacagcaaccgcccacaagtccctcaatctccaacacaaccacgatagatggcgcgacctacaccaccgactcctggttcaatgtgccccccaacatagtcgcccaagtgccccgccgtctacacctgcagcccgaccaccccatctccatcacccgccagatcatcgagtccgtcttccccttgcccacattcacataccacaacacattctcccccgtcgtatcagcctaccaaaacttcgactctctggggtttccccccgaccacccgggccgcgcaaagaccgacacatactacatcaacgagaccaccttactccgcactcacacctccgcccacgaagaagacgtcttccgcaccaacaacgcttcgggctacttaatatccgccgacgtctaccgccgcgacgagatagaccgcacgcactaccccatcttccaccagctcgaaggcgcgcggtcctgggataggacaaaagtgcccagcggcgacatcgcagcagcagtatgggccgatctagaagccctccccacccacgacatctccgtcgaagatcccaacccgcccttccatgctggtaaccccctgcagagtgaacatcactccgaagcagaagcagaagccatcgccgcacacctcaagcgctccctcgagctgatggtcgtcgagatattcacgcgcgcccaacaagctgcgcgtaagacagacccggacttcaaggatgagccgctgcaggttagatgggtggaggcttacttccccttcacgagcccgagttgggagcttgaagtctattataatggggattggctagagtgtctcgggtctggagttacgaaacagagtctttatatcaactcagggatcccgcatagacttggttggacatttgggctaggtctggacagacttgccatgctacttttcaacataccagatatccgtctcttctggtcccgcgacgagcgattcctcagccagttcgcaggcgtatcgtccgatctttccaaactccgccgcttccagcctttctcaaaatacccaggctgttacaaagatgtttcattctggctctcgagttctacttctgctgctggtggagggggcaagggaacgagtgcgctggacttccatgacaatgacgttatggagattgtgcgctccgtggcgggtgatctggtggaggatgtgaaacttactgatgcatttacgcatccgaagagtgggaagaggagtttgtgttataggattaattacaggagtttggagagaacgttgactaatcaggagacgaatgtgcttcatgagaagattagagagaaacttgttgagagctttggggtcgagcttaggtga

SEQ ID NO: 35411 - protein, 500 aa, Muscodor strobelii
  misc_feature: SGI Peptide ID NO. 572260
  misc_feature (394)..(500): Pfam Id: PF03147 Pfam Desc: Ferredoxin-fold anticodon binding domain
  misc_feature (79)..(377): Pfam Id: PF01409 Pfam Desc: tRNA synthetases class II core domain (F)
  misc_feature (293)..(377): Pfam Id: PF01409 Pfam Desc: tRNA synthetases class II core domain (F)
  misc_feature (122)..(161): Pfam Id: PF01409 Pfam Desc: tRNA synthetases class II core domain (F)
  misc_feature (181)..(200): Pfam Id: PF01409 Pfam Desc: tRNA synthetases class II core domain (F)
  misc_feature (61)..(500): NCBI GI: 85082668 Blast Desc: phenylalanyl-tRNA synthetase, mitochondrial precursor [Neurospora crassa OR74A] gi|16416062|emb|CAB91431.2| related to mitochondrial phenylalanyl-tRNA synthetase (MSF1) [Neurospora
  misc_feature (31)..(500): NCBI GI: 154310349 Blast Desc: BC1G_07094 [Botryotinia fuckeliana B05.10] gi|150851426|gb|EDN26619.1| BC1G_07094 [Botryotinia fuckeliana B05.10]
  misc_feature (49)..(500): NCBI GI: 256730835 Blast Desc: [Nectria haematococca mpVI 77-13-4]
  misc_feature (49)..(500): NCBI GI: 46109134 Blast Desc: FG01449.1 [Gibberella zeae PH-1]
  misc_feature (9)..(500): NCBI GI: 261356883 Blast Desc: phenylalanyl-tRNA synthetase [Verticillium albo-atrum VaMs.102]
  misc_feature (3)..(500): NCBI GI: 145608300 Blast Desc: MGG_03217 [Magnaporthe grisea 70-15] gi|145015791|gb|EDK00281.1| MGG_03217 [Magnaporthe grisea 70-15]
  misc_feature (53)..(500): NCBI GI: 156056004 Blast Desc: phenylalanine-tRNA synthetase [Sclerotinia sclerotiorum 1980] gi|154703138|gb|EDO02877.1| phenylalanine-tRNA synthetase [Sclerotinia sclerotiorum 1980]
  misc_feature (74)..(500): NCBI GI: 171689610 Blast Desc: protein product [Podospora anserina] gi|170944767|emb|CAP70878.1| protein product [Podospora anserina]
  misc_feature (32)..(500): NCBI GI: 212533909 Blast Desc: phenylalanyl-tRNA synthetase alpha subunit (PodG), [Penicillium marneffei ATCC 18224] gi|210072475|gb|EEA26564.1| phenylalanyl-tRNA synthetase alpha subunit (PodG), [Penicillium
  misc_feature (23)..(500): NCBI GI: 71001908 Blast Desc: phenylalanyl-tRNA synthetase alpha subunit (PodG) [Aspergillus fumigatus Af293] gi|66853273|gb|EAL93597.1| phenylalanyl-tRNA synthetase alpha subunit (PodG), [Aspergillus
  misc_feature (76)..(500): SWISSPROT Homolog: EC 6.1.1.20 Phenylalanine--tRNA ligase
  misc_feature: Useful for introducing or modulating the production of volatile compounds
MWASRLRVATRLAGTQPALRSWKPSYCWSTCRYGSSQASPSPSPSPSPSQQPPTSPSISNTTTIDGATYTTDSWFNVPPNIVAQVPRRLHLQPDHPISITRQIIESVFPLPTFTYHNTFSPVVSAYQNFDSLGFPPDHPGRAKTDTYYINETTLLRTHTSAHEEDVFRTNNASGYLISADVYRRDEIDRTHYPIFHQLEGARSWDRTKVPSGDIAAAVWADLEALPTHDISVEDPNPPFHAGNPLQSEHHSEAEAEAIAAHLKRSLELMVVEIFTRAQQAARKTDPDFKDEPLQVRWVEAYFPFTSPSWELEVYYNGDWLECLGSGVTKQSLYINSGIPHRLGWTFGLGLDRLAMLLFNIPDIRLFWSRDERFLSQFAGVSSDLSKLRRFQPFSKYPGCYKDVSFWLSSSTSAAGGGGKGTSALDFHDNDVMEIVRSVAGDLVEDVKLTDAFTHPKSGKRSLCYRINYRSLERTLTNQETNVLHEKIREKLVESFGVELR

SEQ ID NO: 35412 - DNA, 1762 bp, Muscodor strobelii
  misc_feature: SGI EST ID NO. CUFF.84333.0
  misc_feature: Variant of the nucleotide sequence at SEQ ID NO 35410
ttggcgatagcttcatgcatcagattgtgtgcaccgggcagttgacgggttgaaggcacgatgtgggcgtctcggcttcgcgttgccacaagactggctggaactcaaccagctctgaggagttggaagccttcctattgctggtcgacttgccgttacggctcatcacaagcatctccatctccatctccatctccgtctccatcacagcaaccgcccacaagtccctcaatctccaacacaaccacgatagatggcgcgacctacaccaccgactcctggttcaatgtgccccccaacatagtcgcccaagtgccccgccgtctacacctgcagcccgaccaccccatctccatcacccgccagatcatcgagtccgtcttccccttgcccacattcacataccacaacacattctcccccgtcgtatcagcctaccaaaacttcgactctctggggtttccccccgaccacccgggccgcgcaaagaccgacacatactacatcaacgagaccaccttactccgcactcacacctccgcccacgaagaagacgtcttccgcaccaacaacgcttcgggctacttaatatccgccgacgtctaccgccgcgacgagatagaccgcacgcactaccccatcttccaccagctcgaaggcgcgcggtcctgggataggacaaaagtgcccagcggcgacatcgcagcagcagtatgggccgatctagaagccctccccacccacgacatctccgtcgaagatcccaacccgcccttccatgctggtaaccccctgcagagtgaacatcactccgaagcagaagcagaagccatcgccgcacacctcaagcgctccctcgagctgatggtcgtcgagatattcacgcgcgcccaacaagctgcgcgtaagacagacccggacttcaaggatgagccgctgcaggttagatgggtggaggcttacttccccttcacgagcccgagttgggagcttgaagtctattataatggggattggctagagtgtctcgggtctggagttacgaaacagagtctttatatcaactcagggatcccgcatagacttggttggacatttgggctaggtctggacagacttgccatgctacttttcaacataccagatatccgtctcttctggtcccgcgacgagcgattcctcagccagttcgcaggcgtatcgtccgatctttccaaactccgccgcttccagcctttctcaaaatacccaggctgttacaaagatgtttcattctggctctcgagttctacttctgctgctggtggagggggcaagggaacgagtgcgctggacttccatgacaatgacgttatggagattgtgcgctccgtggcgggtgatctggtggaggatgtgaaacttactgatgcatttacgcatccgaagagtgggaagaggagtttgtgttataggattaattacaggagtttggagagaacgttgactaatcaggagacgaatgtgcttcatgagaagattagagagaaacttgttgagagctttggggtcgagcttaggtgatggatggcaaggttgcgaggtggagggagttgtatgatctaggatgtataagagctgtgagaaagtgtagaaatatacaatcataaaggtcttatcctttataccttcccattgtcgcagatttgagacttccagttggagctgatttgttcgcagctttaacatccggcaagtgtgtagtcagtgcatcagcgatatt

SEQ ID NO: 35413 - DNA, 2409 bp, Muscodor strobelii
  misc_feature: SGI cDNA ID NO. 572261
  misc_feature: Encodes the peptide sequence at SEQ ID NO 35414
atgaattctaccaaagagcccacatcaagcgactcatttccgggggaagtcgagactctgacgtcatccccgtcggaagtcgaagcttcaacatcgccatcgtccccagccgagaatccgacaccagaccctaatcatgccacagatcacaccatattgaaggctacagagaaggaactccgccttatggtattgtaccataagctacgtgaaaccaatgttgagaggcaaatacaatttccgtgggtcgtggtatgcggctgccagtcagccgggaagagctcggttctcgaagctattaccacaataccttttcctgtcggagaaaacacttgcacccgctttataatcaaaatcatcacaagcccagtcgcccacgacatgacagaggcgattctcgatgtcaagatcataccatcggatgacaacaagcccgaaaagaagcagagacttcgcagattcaagccaaacccgtacccacgtgagcttagcctacaggacaagcttcaacgcatactttcgcaagcttcagacgctatcttcgactctaagcctctcaaagactgcgcggtcaccagaaatgttgttgaagtaaagatatcggctcccggcatgacgagccttacaatggtcgacctacccggtttgatcggatcccaagagcaggatggtgaaagggagaggattgaaagtattacagctgaatacattcggccgccacagtctctcattgtcagtgtcgtccctgctactgccattgcttcccgtggcccggagaccctgatctgggatcgcatgcgagaatcaaaatcaccagaggaatccgacgaccatttccggggtcgatgtctatgtgtcctcacgaaaccggacgaagccaaaaacacaaccgctgacacgtggctcgggattatcaacggggaagcaacatctaagtttgcaggtcgctggcatgtcctacgtaattttgccgacaatgagaacatggatatacgcagaaagaaggaggctagattcttcgccacaacatcgacgccttggcataaggtcaacgaataccatcgtggagcctccaagcttgaagaatttctcactagatggcagctagagaagtggaacgaatacttgcccgtcatggaagacgcattggttcaaaatctcgttgcagctgagaccaagcttgcagcgatgggggtgaacggcactccctcaaaagacgtccaggagttcaagttaatgattgataccttagctaaagctgcggaagatcacagtatggctcactactcagctttgttcaagcattggaacagtcatctcgaagatatcgacggaacagggagcagcccaagctacttacgatcgcgtatccaggaagaggaagatttctttcgagataacctgatgcaatttggatactgcacagaaagctttatctcgattgataccttcatgccacagaacaaggcttatagaccacatgctcacaaggaggggcccccggtgcccgatgactggtcgaatatgcaagaagtttcatgggaaaatagagacgaggagattaagttcctggcggagaacatagggttcagggtctcacatcatggacaacgtatctatgaccccaactttattaacacctacacaggaaaactatcgaaacactgggaaaagatctccaggcaccatattgacagggtggtagacaagatcattcaatatttcgaatcgatgacgaccacgttgctcaaaaccccctcaagacaggtggataacttccaggggtttgttgatccgaacgccctggcaaagaggttcatcgtgcagcacatggagaaacagctccatgaacgccgaaaggtggcgatcaaggagcttgaagaactcgaatttgatcgcaaggcaattttcgtcaagaataatcccgattattacgagacacagcgtgcaactgacgcaaagatagcccacggccagtacacaagggcgagccgcgtgctagcctctcgccctgacgaccaaattcccgcggccaggaacatagtagcaaaacatctagcagaagcacagaagctatgggatcaggctgatatagagaaccaatttgctttgcaaactgcatatttggcttacaagcaatatgaggtcacaagagagatttgggctaccaatgttgttaatcaagtgcttgaaagacacctacttcgttatctcggtaagtgggtcgagagtatcacggaaacattggatatcaaggggattgacgagtttctgcatcctggagctagccagagcagaaggaaagagcggattgggctggaagatgacgtggacaccctaaggaagcaggtggatatgataaaaagggagatcgagcatagtgaaagagagggtcaagctagaagataa

SEQ ID NO: 35414 - protein, 802 aa, Muscodor strobelii
  misc_feature: SGI Peptide ID NO. 572261
  misc_feature (42)..(738): NCBI GI: 212543163 Blast Desc: conserved [Penicillium marneffei ATCC 18224] gi|210066643|gb|EEA20736.1| conserved [Penicillium marneffei ATCC 18224]
  misc_feature (56)..(780): NCBI GI: 154302316 Blast Desc: BC1G_09942 [Botryotinia fuckeliana B05.10] gi|150855430|gb|EDN30622.1| BC1G_09942 [Botryotinia fuckeliana B05.10]
  misc_feature (62)..(634): NCBI GI: 238845798 Blast Desc: dynamin family protein [Microsporum canis CBS 113480]
  misc_feature (56)..(789): NCBI GI: 116196968 Blast Desc: CHGG_05082 [Chaetomium globosum CBS 148.51] gi|88180995|gb|EAQ88463.1| CHGG_05082 [Chaetomium globosum CBS 148.51]
  misc_feature (56)..(780): NCBI GI: 156055924 Blast Desc: SS1G_05314 [Sclerotinia sclerotiorum 1980] gi|154703098|gb|EDO02837.1| SS1G_05314 [Sclerotinia sclerotiorum 1980]
  misc_feature (62)..(398): NCBI GI: 261202564 Blast Desc: dynamin family protein [Ajellomyces dermatitidis SLH14081] gi|239590593|gb|EEQ73174.1| dynamin family protein [Ajellomyces dermatitidis SLH14081] gi|239612318|gb|EEQ89305.1|
  misc_feature (43)..(567): NCBI GI: 189199272 Blast Desc: GTP-binding protein [Pyrenophora tritici-repentis Pt-1C-BFP] gi|187983072|gb|EDU48560.1| GTP-binding protein [Pyrenophora tritici-repentis Pt-1C-BFP]
  misc_feature (10)..(735): NCBI GI: 119176043 Blast Desc: CIMG_09774 [Coccidioides immitis RS]
  misc_feature (68)..(473): NCBI GI: 212536256 Blast Desc: dynamin GTPase, [Penicillium marneffei ATCC 18224] gi|210070683|gb|EEA24773.1| dynamin GTPase, [Penicillium marneffei ATCC 18224]
  misc_feature (62)..(398): NCBI GI: 240277608 Blast Desc: dynamin family protein [Ajellomyces capsulatus H143]
MNSTKEPTSSDSFPGEVETLTSSPSEVEASTSPSSPAENPTPDPNHATDHTILKATEKELRLMVLYHKLRETNVERQIQFPWVVVCGCQSAGKSSVLEAITTIPFPVGENTCTRFIIKIITSPVAHDMTEAILDVKIIPSDDNKPEKKQRLRRFKPNPYPRELSLQDKLQRILSQASDAIFDSKPLKDCAVTRNVVEVKISAPGMTSLTMVDLPGLIGSQEQDGERERIESITAEYIRPPQSLIVSVVPATAIASRGPETLIWDRMRESKSPEESDDHFRGRCLCVLTKPDEAKNTTADTWLGIINGEATSKFAGRWHVLRNFADNENMDIRRKKEARFFATTSTPWHKVNEYHRGASKLEEFLTRWQLEKWNEYLPVMEDALVQNLVAAETKLAAMGVNGTPSKDVQEFKLMIDTLAKAAEDHSMAHYSALFKHWNSHLEDIDGTGSSPSYLRSRIQEEEDFFRDNLMQFGYCTESFISIDTFMPQNKAYRPHAHKEGPPVPDDWSNMQEVSWENRDEEIKFLAENIGFRVSHHGQRIYDPNFINTYTGKLSKHWEKISRHHIDRVVDKIIQYFESMTTTLLKTPSRQVDNFQGFVDPNALAKRFIVQHMEKQLHERRKVAIKELEELEFDRKAIFVKNNPDYYETQRATDAKIAHGQYTRASRVLASRPDDQIPAARNIVAKHLAEAQKLWDQADIENQFALQTAYLAYKQYEVTREIWATNVVNQVLERHLLRYLGKWVESITETLDIKGIDEFLHPGASQSRRKERIGLEDDVDTLRKQVDMIKREIEHSEREGQARR

SEQ ID NO: 35415 - DNA, 368 bp, Muscodor strobelii
  misc_feature: SGI EST ID NO. CUFF.84344.0
  misc_feature: Variant of the nucleotide sequence at SEQ ID NO 35413
ctcagctttgttcaagcattggaacagtcatctcgaagatatcgacggaacagggagcagcccaagctacttacgatcgcgtatccaggaagaggaagatttctttcgagataacctgatgcaatttggatactgcacagaaagctttatctcgattgataccttcatgccacagaacaaggcttatagaccacatgctcacaaggaggggcccccggtgcccgatgactggtcgaatatgcaagaagtttcatgggaaaatagagacgaggagattaagttcctggcggagaacatagggttcagggtctcacatcatggacaacgtatctatgaccccaactttattaacacctacacaggaaaac

SEQ ID NO: 35416 - DNA, 1308 bp, Muscodor strobelii
  misc_feature: SGI cDNA ID NO. 572262
  misc_feature: Encodes the peptide sequence at SEQ ID NO 35417
atgtcgggactggaaattgctgtagctgtgtttggtatcgtatctggtgtcgtcgcgttagtcgacttcaccatgaaacgtatcgatcagcatcgcgaagctaaagaccctctttatccactcaaacagcacattgattacttagagaaggagcaaaaaaaacttggggtgaatattagaagaagtcgatttccggagaatatccctattgagagtagcgacgccgaaacaaaagatctccgcgcgaagatccggaagcttgaacggcagaagcgggagttcctccagcatgtacgttcggccgccaagaacaacacgctcggggacgaacatgataagctgaaacttgaaggcaacatccttcggcaaatggcagaaaagctgaggaacgaattcaaggaaatgatcataggaaaccctgaaaaatggctcattgacctggggaagctattttcaaggaagcccaagaccgaacagactccatcacagtcggtgggagacgaggaaggactcagagagttctgtagtggagcgctgatttgccaaagaaactcgaacaaactgtgggagatcagggatgaactgttccatgctgataaaggaggcttcgtttgcaagtactgctatttcgaggttgcagttcccgagaatccaggtaccctgaaggaccatcagaaaatgtggtttgaagacatgaaatacctacttccacagagtcatttggccgtgtcgcagctagatcaaaggcaggcgtggtaccgttgcactcactgctattggtacggggcctcggtagactttgaggaacccctcggactgctatgccattatatggccgtccataaggtcgcggagatcgagaaggcgattaaagagtcaatccccccagaagtgtcgaactttgatgatgagatgatcgcatttgaatcggaatcagagccccaaattagtctgggcaatattgatttgaacattgaaacccaggctaatcacgccgaggatgattcggcctccgaaattgagacgaactatgaaatcatgtcgttgctaaacagagatggacgaagtccaactcagtaccacgccgagccagtatcgacagttctaggacccaccccgctaagccggcaatccgaggtcaaccttactatcactgttgccagtggtgctaatagtctgacagaacaccctcgtatgggcgaagactcggctcgcaggtcttcagaatctattttcactgtcgatgagagaagtcacagatcagggtcgaaatcttttgcaagcagagggcagagaaacaggccctga

SEQ ID NO: 35417 - protein, 435 aa, Muscodor strobelii
  misc_feature: SGI Peptide ID NO. 572262
MSGLEIAVAVFGIVSGVVALVDFTMKRIDQHREAKDPLYPLKQHIDYLEKEQKKLGVNIRRSRFPENIPIESSDAETKDLRAKIRKLERQKREFLQHVRSAAKNNTLGDEHDKLKLEGNILRQMAEKLRNEFKEMIIGNPEKWLIDLGKLFSRKPKTEQTPSQSVGDEEGLREFCSGALICQRNSNKLWEIRDELFHADKGGFVCKYCYFEVAVPENPGTLKDHQKMWFEDMKYLLPQSHLAVSQLDQRQAWYRCTHCYWYGASVDFEEPLGLLCHYMAVHKVAEIEKAIKESIPPEVSNFDDEMIAFESESEPQISLGNIDLNIETQANHAEDDSASEIETNYEIMSLLNRDGRSPTQYHAEPVSTVLGPTPLSRQSEVNLTITVASGANSLTEHPRMGEDSARRSSESIFTVDERSHRSGSKSFASRGQRNRP

SEQ ID NO: 35418 - DNA, 1293 bp, Muscodor strobelii
  misc_feature: SGI cDNA ID NO. 572263
  misc_feature: Encodes the peptide sequence at SEQ ID NO 35419
atgaattctactttaacattacccggaacagtcttttaccagcaggctctcggtattcccgtcgctcattcaggctctaccattaccttggtaaagactaagatcactgttgaggtctcggtgataaatacaattcctgcaacaactataacctcagttgtggctttgcctggaacaaaactactccaggaaggtctgcaaattcctgtccctcagtcaaaatcgtttatcaccttggtgaacgatgtaatcaccgttgctgccctgactcgggacaccgatcaatcgacaagtacgactgccacctccaatgtcattagcaatcatacaacccccccaccagagacagagacgagccgacctgcaggttcctctatatctccatcacaggctgccggtatcggtgttggcgcagctctgggtggcatgattatagccgcccttcttgtcattattattcttcggtggaagaggcgcccggctaaaccacagagttgctcatcaacgagaacgaacataacttcgttcagtgaagttaaaccatcccgggaagagaaggctttcgggccgcacatactcccggagagacaaggtgacagtacatacaaagaatcaatgaaaagcttgaacttcagtatccagaatctcgtcgacaactacatggcccgtgactgcccccggatagatgcaagcaccgagagagagtttcagagacttgctggcccatcatttcatgacttgtcatggggatccgcgctcctcgacagggacacgaagcctccggctattcggctacttgtggcacgaatgctgctcgagcgcatcgaaatgggctgctctatccctacgacgcttcatttgccgtaccttctcgccacataccacagcctgcaggcgggaccggagaagacgcgacgaaagaacgaggttcgagaccatggagtaagtatcgaagcatggcgacaaatatctggtcattatctctctgtcgatttggtcataaagcatgcacgttcgaaagtcgacagcatcgcttctgaactggctgcattccaccccgagcccaaagatgagttctgttcgtacctcggagaagtggtggagcttgttgcgagattgggactggacttgtttaaaagtcccgaaacttgggagctcagttggaagatcttagattccgacaaggcagtcatatttcctggcctggccttcgttcgcacgcggcgtttaggcgacaacgaacatgatagtaatcgcaaggttctcttctctatttccgagcctttcacgtaa

SEQ ID NO: 35419 - protein, 430 aa, Muscodor strobelii
  misc_feature: SGI Peptide ID NO. 572263
  misc_feature (123)..(408): NCBI GI: 154318806 Blast Desc: BC1G_02792 [Botryotinia fuckeliana B05.10] gi|150857922|gb|EDN33114.1| BC1G_02792 [Botryotinia fuckeliana B05.10]
  misc_feature (130)..(403): NCBI GI: 256728527 Blast Desc: NECHADRAFT_85916 [Nectria haematococca mpVI 77-13-4]
MNSTLTLPGTVFYQQALGIPVAHSGSTITLVKTKITVEVSVINTIPATTITSVVALPGTKLLQEGLQIPVPQSKSFITLVNDVITVAALTRDTDQSTSTTATSNVISNHTTPPPETETSRPAGSSISPSQAAGIGVGAALGGMIIAALLVIIILRWKRRPAKPQSCSSTRTNITSFSEVKPSREEKAFGPHILPERQGDSTYKESMKSLNFSIQNLVDNYMARDCPRIDASTEREFQRLAGPSFHDLSWGSALLDRDTKPPAIRLLVARMLLERIEMGCSIPTTLHLPYLLATYHSLQAGPEKTRRKNEVRDHGVSIEAWRQISGHYLSVDLVIKHARSKVDSIASELAAFHPEPKDEFCSYLGEVVELVARLGLDLFKSPETWELSWKILDSDKAVIFPGLAFVRTRRLGDNEHDSNRKVLFSISEPFT

SEQ ID NO: 35420 - DNA, 1929 bp, Muscodor strobelii
  misc_feature: SGI cDNA ID NO. 572264
  misc_feature: Encodes the peptide sequence at SEQ ID NO 35421
atgagcaacggtccagatcttcttgtcggaattgacgtcggcatgacctgtaccggcgtctctttcgttaacctactgagaggcggcaaagatgcgcgtgtgcatatcctgaaagattggggcacaagcgaatacgagcacaaggtaccaactcgtctcaaattccgcaaccaatccgactacagcgaaaaacctacaagttgggggttcgcatgcgattatgacgaggacagttatgtcgaggagtggttcaagactgatatggacatcgggaagcccacttctgctgagcagagggaggaacgcatacaagcgcagagaaagtcacgcactctatacaagcactttttggagtgcctatacgaacatttgcgagacgttcttgggtgtggcatccttgagggcaagccttgggatgaggccgtggtgcattttcacttcactgtcccagccacttggcatgccgataccaaaaatgacttcttccagattgcgaggagcgcgggcttcgaacggcttcctaacaggaaggttgaagcaggccccgaggagccactagctgtcgtggccgatgtccttgcaaacgaggagtgggtgaaggtcagtattaccaaagactccggtgacctttctctctgcattgttgacaacagtaccaaggggaacatcttagtccgtgaagttcagccgattcaaggtactaacgttggatcaacattgatcgactgcgactttggcgaccttgtttttggacgcctacaaaatattgaagacaagctttcccagccctctgatgttgtgatgtacacgatgagaagcagcaatggatttcatgccaacaaaaagcaaatgggcacgagtcgtcttggggacgacattatttttcagattcctattccaggactcaaagatgattatcatcgtctcgacgatccggatcttcgtataaaaaatggacagatgcagtttacaggattcgagcttagaaagatatttgatgagcatattaacaacatgatcatggttttggacgaaatgatcaccgacatgcagaatgtccctgggtattcttgcccgaatgtggatcacattctcctctctggcggcctagggagctctccctatgtcgtcaagaggttcaaggatcatataaaagcctgccaagtccaacctttgaaaaatacgctggttcaaagatcacaaaatcctcaactcacagtctgtgttggtatacttgaagcagccaagcaatctcagacaggtccaaacatgatgatcagtagatgtcaaggatcttcgataggcatcaaagctcgtattcatcgaaagacgggcataggccgtacttggggtcgcactcgaaaggtggatcggaaagctcaacgaagtctcgatcagcttgcagagagtactaatcatatttctgatgataatgactatatcactgattacatggactggtttgtgcgacgaggtgaccatatcgaggatggtcgaattacaaaggtttatgatgccacattcggtccacatacggagaaacatgagcgaatagccagcctcacgatcatgacatccgaggatgatcctatccctaccttctttgatccaaaccaggtacaacacctcaagacgcttgatgttgatctctcgggagttacaaaagcaagcatccacgagaagaaacacatgatgagctggaaggagggaaaaattacaatttcctttcgtatcgaggccgaggttggaactgccgaaatcaaattgagatgccatgatatctacgacaataagattttaagtcgagattttaagactgaattaaaagtcgatgaaaaagctgttgaaaacccgcatgacattaacgttgatcttgaacacaagcaaccgcaacatgccgctaagcattacattagcgttaatctatag

SEQ ID NO: 35421 - protein, 642 aa, Muscodor strobelii
  misc_feature: SGI Peptide ID NO. 572264
  misc_feature (1)..(510): NCBI GI: 169615947 Blast Desc: SNOG_11140 [Phaeosphaeria nodorum SN15] gi|160703081|gb|EAT81639.2| SNOG_11140 [Phaeosphaeria nodorum SN15]
  misc_feature (5)..(409): NCBI GI: 189207072 Blast Desc: conserved [Pyrenophora tritici-repentis Pt-1C-BFP] gi|187975963|gb|EDU42589.1| conserved [Pyrenophora tritici-repentis Pt-1C-BFP]
  misc_feature (3)..(589): NCBI GI: 154318804 Blast Desc: BC1G_02791 [Botryotinia fuckeliana B05.10] gi|150857921|gb|EDN33113.1| BC1G_02791 [Botryotinia fuckeliana B05.10]
  misc_feature (2)..(496): NCBI GI: 39941700 Blast Desc: MGG_05761 [Magnaporthe grisea 70-15] gi|145022473|gb|EDK06493.1| MGG_05761 [Magnaporthe grisea 70-15]
  misc_feature (5)..(590): NCBI GI: 242796388 Blast Desc: conserved [Talaromyces stipitatus ATCC 10500] gi|218719376|gb|EED18796.1| conserved [Talaromyces stipitatus ATCC 10500]
  misc_feature (5)..(590): NCBI GI: 67526123 Blast Desc: AN3519.2 [Aspergillus nidulans FGSC A4] gi|40739890|gb|EAA59080.1| AN3519.2 [Aspergillus nidulans FGSC A4] gi|259481966|tpe|CBF75984.1| TPA: conserved [Aspergillus FGSC
  misc_feature (6)..(450): NCBI GI: 256728705 Blast Desc: [Nectria haematococca mpVI 77-13-4]
  misc_feature (4)..(590): NCBI GI: 146323245 Blast Desc: conserved [Aspergillus fumigatus Af293] gi|129556537|gb|EBA27283.1| conserved [Aspergillus fumigatus Af293]
  misc_feature (6)..(591): NCBI GI: 256733349 Blast Desc: [Nectria haematococca mpVI 77-13-4]
  misc_feature (3)..(436): NCBI GI: 164427160 Blast Desc: NCU03288 [Neurospora crassa OR74A] gi|157071632|gb|EAA34978.2| conserved [Neurospora crassa OR74A]
MSNGPDLLVGIDVGMTCTGVSFVNLLRGGKDARVHILKDWGTSEYEHKVPTRLKFRNQSDYSEKPTSWGFACDYDEDSYVEEWFKTDMDIGKPTSAEQREERIQAQRKSRTLYKHFLECLYEHLRDVLGCGILEGKPWDEAVVHFHFTVPATWHADTKNDFFQIARSAGFERLPNRKVEAGPEEPLAVVADVLANEEWVKVSITKDSGDLSLCIVDNSTKGNILVREVQPIQGTNVGSTLIDCDFGDLVFGRLQNIEDKLSQPSDVVMYTMRSSNGFHANKKQMGTSRLGDDIIFQIPIPGLKDDYHRLDDPDLRIKNGQMQFTGFELRKIFDEHINNMIMVLDEMITDMQNVPGYSCPNVDHILLSGGLGSSPYVVKRFKDHIKACQVQPLKNTLVQRSQNPQLTVCVGILEAAKQSQTGPNMMISRCQGSSIGIKARIHRKTGIGRTWGRTRKVDRKAQRSLDQLAESTNHISDDNDYITDYMDWFVRRGDHIEDGRITKVYDATFGPHTEKHERIASLTIMTSEDDPIPTFFDPNQVQHLKTLDVDLSGVTKASIHEKKHMMSWKEGKITISFRIEAEVGTAEIKLRCHDIYDNKILSRDFKTELKVDEKAVENPHDINVDLEHKQPQHAAKHYISVNL

SEQ ID NO: 35422 - DNA, 582 bp, Muscodor strobelii
  misc_feature: SGI cDNA ID NO. 572265
  misc_feature: Encodes the peptide sequence at SEQ ID NO 35423
atggttaatgttatcatcatccgtaattctttctccgtgaaggaccgcggtctctatctggtcttcacctcgctagcccatacccttggaagcgccatcgggcctctcgtgggcgctaactctagcacatctattgtcaccggactcaagaagattgattgggcgggtgagtgtcttgtggtaggctctgtcttgaaggtactccttgccctagatttcggtggcgttgtctttccatggtcatctgctaccgtcattggtctcatatttgctggcatcgttgctggcgcgttgttcatcatcaacgagtggaagtttgccgtggagcccatcattccgcttcgcctcttctccagcacgtctagcatagctgcatacggcgtatatgttttcaacttctacgtgttcatagggatgcagtactatctgccactatattcacaagccgtccttggcgttggggttcttacctcgggcatctacataatacccctaattgttgcaagctcactcgacgctgctttcgtcgggttcttcattctgaagacgggaaaataccttggtgctatgtacattagatga

SEQ ID NO: 35423 - protein, 193 aa, Muscodor strobelii
  misc_feature: SGI Peptide ID NO. 572265
  misc_feature (1)..(191): NCBI GI: 171691552 Blast Desc: protein product [Podospora anserina] gi|170945724|emb|CAP71837.1| protein product [Podospora anserina]
  misc_feature (1)..(192): NCBI GI: 119497561 Blast Desc: MFS transporter, [Neosartorya fischeri NRRL 181] gi|119413701|gb|EAW23642.1| MFS transporter, [Neosartorya fischeri NRRL 181]
  misc_feature (1)..(192): NCBI GI: 115396520 Blast Desc: [Aspergillus terreus NIH2624] gi|114193468|gb|EAU35168.1| [Aspergillus terreus NIH2624]
  misc_feature (1)..(192): NCBI GI: 159124826 Blast Desc: MFS multidrug transporter, [Aspergillus fumigatus A1163]
  misc_feature (1)..(192): NCBI GI: 121719130 Blast Desc: MFS transporter, [Aspergillus clavatus NRRL 1] gi|119404495|gb|EAW14871.1| MFS transporter, [Aspergillus clavatus NRRL 1]
  misc_feature (1)..(191): NCBI GI: 171677029 Blast Desc: protein product [Podospora anserina] gi|170936582|emb|CAP61241.1| protein product [Podospora anserina]
  misc_feature (1)..(192): NCBI GI: 145228623 Blast Desc: An01g01810 [Aspergillus niger] gi|134054711|emb|CAK43552.1| protein product [Aspergillus niger]
  misc_feature (1)..(192): NCBI GI: 255941218 Blast Desc: Pc16g10710 [Penicillium chrysogenum Wisconsin 54-1255] gi|211586001|emb|CAP93741.1| Pc16g10710 [Penicillium chrysogenum Wisconsin 54-1255]
  misc_feature (5)..(191): NCBI GI: 154300507 Blast Desc: BC1G_11077 [Botryotinia fuckeliana B05.10] gi|150856602|gb|EDN31794.1| BC1G_11077 [Botryotinia fuckeliana B05.10]
  misc_feature (1)..(191): NCBI GI: 156040225 Blast Desc: SS1G_12128 [Sclerotinia sclerotiorum 1980] gi|154696185|gb|EDN95923.1| SS1G_12128 [Sclerotinia sclerotiorum 1980]
MVNVIIIRNSFSVKDRGLYLVFTSLAHTLGSAIGPLVGANSSTSIVTGLKKIDWAGECLVVGSVLKVLLALDFGGVVFPWSSATVIGLIFAGIVAGALFIINEWKFAVEPIIPLRLFSSTSSIAAYGVYVFNFYVFIGMQYYLPLYSQAVLGVGVLTSGIYIIPLIVASSLDAAFVGFFILKTGKYLGAMYIR

SEQ ID NO: 35424 - DNA, 2349 bp, Muscodor strobelii
  misc_feature: SGI cDNA ID NO. 572266
  misc_feature: Encodes the peptide sequence at SEQ ID NO 35425
atgtccagcacagccagctcaatgtccgaggcgcagaaggccaaggcgatcgcacagatcgccaatgtaagtcggctgcttcgcgatgccatttccgccagcatacctgtggcaccagagcagtatatgacagtgactgtgccgggtacgtcgatcgatacacgcgatattactgacggtgggacgtatgtctacggcaaagaatactcggcttttgtgcctccccaagtacgccaagccgaggcaaggctcgtggaccgcatgatgcctctcgcctacgtagcagtcggaaacacgggcaagagcgttagtcgcagctactctcgcgctctcgatgttcttgtcgctcgcaaggctaccctcaagaccggcgaacaggatatccgtagtccaggcgataaagactacgacaaggccatggcgtaccttactaccgtggttgccggcaccagcctgacaccagttgacgtatacattgagaagcaagacgcctgggccgaatcgcaggcaacttgggacaaagccaagcagagggccgaagccactgcgaaggcccagttccccactgacttggttcaacagcgcaaatactacgatgattggtcccaggcaaattatcgacgtttcaagtttgctgtccagggacgatatatggactgggtcgccaacggccacaagtacgaagttgaacaaaactttggtatcgttgacatcgaatcaatcatggcgcgtatagagcagagcaaagaaagcttgcgtaactccaccatcgtcgacactgacggtgcgaacgagctggcgggtgtcatattggaaccaaaagactggcaagtatcagggcaacgaaatgccagctcaaggctagtggctgctgggacttatcccatcaccagccctgctactgctcctgtgccaacagaggctactaatgaaacatccttgcatgataagttcaaggccctttatgatgctcagggagcgctcaacaaggaagaagctgtagtggcatccaaagctacagctgcagacaaagacattgctcgggctgcacagccgtacacaaatgcactgtcagccctgaacacagcaagagcagctctctcaagtcagatcgaggctgatcagaagtctcatgttgagtgggccaaatacaacacagcaaatctgacgggccaggccaagactgacttcatcacgtacctggattcaaagatcacctatatcgacacgcagctccagaatctggccactgtgaagacagcacgagagggatccaatccgatgaagatcccagtcatcactaacgctgagagcgacgccgatggtcacggtacatcgttcgcgaatgatggagatgagaaagctctcgccatcttcaccgccacctcagatgcagatgctagggccgcccccgcgggaggcgatgatgcgtccaacccctggaccacgatctccgcatctttctcggccgaagaccagcaaagcacctcaacgacaagcagctggggcatgagtgttggcggtggcgcagggtggggactttggtccgtgggaggcagctatgcacacgacgagtctcagagtgataccgtcagcgacatggcaaaatgcgccgtccacgtcacgttcgatgcgctcgtcgtagacgtcaatcgaccttggctatatggcgagctgttcagcgactacgaacttgacacagctagtcaagatatcaaactcagcccaggagcagaagatctgaagaggatgatggaaacgcaaaaggccactggtgacgcatcttcgtccaatactgccgtcgtctcccagctagcgcaatacagccaattcccagcatatccgacgtcgttcatcgtcgctgctgataccgaaatcgagttcgaaggagatacccaacacatcgaaacccatttctccgcacacagtaattccggttctgtctccgtaggctggggtcctttcagcgtcagcagcagcttccacgaatcggcttcatcatccaagttccagatggaatccaccgcgacaggatgccggctcaagtttggcgcgccgcagattatcggcagcagcggtaacaataatggcggcgacggcaagaagcttctaggcgacagcgggctatcggccgcgcggacaaccctcatcataatgcctctgtgcctctcgacattgctctccgctcacgacatcaccattgtcatacccgtcattcccaccattgtcacatacttcggctcggttgcaggctacatctggatcggcagcgccttcgtccttgccagcacagccgctatcctctctggtgcacagtggcggacatttggggacgcaagcccgccataa

SEQ ID NO: 35425 - protein, 782 aa, Muscodor strobelii
  misc_feature: SGI Peptide ID NO. 572266
  misc_feature (8)..(276): NCBI GI: 46127357 Blast Desc: FG08056.1 [Gibberella zeae PH-1]
  misc_feature (523)..(690): NCBI GI: 46127357 Blast Desc: FG08056.1 [Gibberella zeae PH-1]
  misc_feature (709)..(765): NCBI GI: 115396520 Blast Desc: [Aspergillus terreus NIH2624] gi|114193468|gb|EAU35168.1| [Aspergillus terreus NIH2624]
  misc_feature (718)..(765): NCBI GI: 159124826 Blast Desc: MFS multidrug transporter, [Aspergillus fumigatus A1163]
  misc_feature (709)..(765): NCBI GI: 119497561 Blast Desc: MFS transporter, [Neosartorya fischeri NRRL 181] gi|119413701|gb|EAW23642.1| MFS transporter, [Neosartorya fischeri NRRL 181]
  misc_feature (709)..(766): NCBI GI: 255941218 Blast Desc: Pc16g10710 [Penicillium chrysogenum Wisconsin 54-1255] gi|211586001|emb|CAP93741.1| Pc16g10710 [Penicillium chrysogenum Wisconsin 54-1255]
  misc_feature (714)..(767): NCBI GI: 212535520 Blast Desc: conserved [Penicillium marneffei ATCC 18224] gi|210070315|gb|EEA24405.1| conserved [Penicillium marneffei ATCC 18224]
  misc_feature (709)..(765): NCBI GI: 121719130 Blast Desc: MFS transporter, [Aspergillus clavatus NRRL 1] gi|119404495|gb|EAW14871.1| MFS transporter, [Aspergillus clavatus NRRL 1]
  misc_feature (706)..(767): NCBI GI: 261361344 Blast Desc: conserved [Verticillium albo-atrum VaMs.102]
  misc_feature (707)..(767): NCBI GI: 171694802 Blast Desc: protein product [Podospora anserina] gi|170947643|emb|CAP59805.1| protein product [Podospora anserina]
MSSTASSMSEAQKAKAIAQIANVSRLLRDAISASIPVAPEQYMTVTVPGTSIDTRDITDGGTYVYGKEYSAFVPPQVRQAEARLVDRMMPLAYVAVGNTGKSVSRSYSRALDVLVARKATLKTGEQDIRSPGDKDYDKAMAYLTTVVAGTSLTPVDVYIEKQDAWAESQATWDKAKQRAEATAKAQFPTDLVQQRKYYDDWSQANYRRFKFAVQGRYMDWVANGHKYEVEQNFGIVDIESIMARIEQSKESLRNSTIVDTDGANELAGVILEPKDWQVSGQRNASSRLVAAGTYPITSPATAPVPTEATNETSLHDKFKALYDAQGALNKEEAVVASKATAADKDIARAAQPYTNALSALNTARAALSSQIEADQKSHVEWAKYNTANLTGQAKTDFITYLDSKITYIDTQLQNLATVKTAREGSNPMKIPVITNAESDADGHGTSFANDGDEKALAIFTATSDADARAAPAGGDDASNPWTTISASFSAEDQQSTSTTSSWGMSVGGGAGWGLWSVGGSYAHDESQSDTVSDMAKCAVHVTFDALVVDVNRPWLYGELFSDYELDTASQDIKLSPGAEDLKRMMETQKATGDASSSNTAVVSQLAQYSQFPAYPTSFIVAADTEIEFEGDTQHIETHFSAHSNSGSVSVGWGPFSVSSSFHESASSSKFQMESTATGCRLKFGAPQIIGSSGNNNGGDGKKLLGDSGLSAARTTLIIMPLCLSTLLSAHDITIVIPVIPTIVTYFGSVAGYIWIGSAFVLASTAAILSGAQWRTFGDASPP

SEQ ID NO: 35426 - DNA, 1387 bp, Muscodor strobelii
  misc_feature: SGI EST ID NO. CUFF.84378.0
  misc_feature: Variant of the nucleotide sequence at SEQ ID NO 35424
gaaacatccttgcatgataagttcaaggccctttatgatgctcagggagcgctcaacaaggaagaagctgtagtggcatccaaagctacagctgcagacaaagacattgctcgggctgcacagccgtacacaaatgcactgtcagccctgaacacagcaagagcagctctctcaagtcagatcgaggctgatcagaagtctcatgttgagtgggccaaatacaacacagcaaatctgacgggtaatgcccctcacagtccggtgtctcagcaatagtactgaccagatgccaggccaggccaagactgacttcatcacgtacctggattcaaagatcacctatatcgacacgcagctccagaatctggccactgtgaagacagcacgagagggatccaatccgatgaagatcccagtcatcactaacgctgagagcgacgccgatggtcacggtacatcgttcgcgaatgatggagatgagaaagctctcgccatcttcaccgccacctcagatgcagatgctagggccgcccccgcgggaggcgatgatgcgtccaacccctggaccacgatctccgcatctttctcggccgaagaccagcaaagcacctcaacgacaagcagctggggcatgagtgttggcggtggcgcagggtggggactttggtccgtgggaggcagctatgcacacgacgagtctcagagtgataccgtcagcgacatggcaaaatgcgccgtccacgtcacgttcgatgcgctcgtcgtagacgtcaatcgaccttggctatatggcgagctgttcagcgactacgaacttgacacagctagtcaagatatcaaactcagcccaggagcagaagatctgaagaggatgatggaaacgcaaaaggccactggtgacgcatcttcgtccaatactgccgtcgtctcccagctagcgcaatacagccaattcccagcatatccgacgtcgttcatcgtcgctgctgataccgaaatcgagttcgaaggagatacccaacacatcgaaacccatttctccgcacacagtaattccggttctgtctccgtaggctggggtcctttcagcgtcagcagcagcttccacgaatcggcttcatcatccaagttccagatggaatccaccgcgacaggatgccggctcaagtttggcgcgccgcagattatcggttgggttaatcagatactccctgctttaccacgtaaaccaaactttgtgcctatggtgcagaacttggtagcgtagagaatgtccgtgtacatgtgtcagatgaataaggtatccagccttaaagacgcattttgaggataagataaccaccctcctctcaggctatcccctcgcggactaccgcgtaccgcgtta

SEQ ID NO: 35427 - DNA, 1782 bp, Muscodor strobelii
  misc_feature: SGI cDNA ID NO. 572267
  misc_feature: Encodes the peptide sequence at SEQ ID NO 35428
atggctactggctcagacagaagctccgatttggagctccaaccaatcgaccttccacgcacgtgtaaactgcgtactccagggcctcgacggaagcgcttcattctctgtctggggtctttcgcgggagacttctggcattgcgctgcagcgaccgtgctatcacattaccagcgcacagatacccccgccgaacacccgttccgtaatctcgaattcatcgtctgcatcgtcatagtcgtggacaatgctaacgtacccgcacccgagtggataaagggcgcgcggaaaatgttcacctatttccgatcgatcgaggtgccgtgtatggttattacgacaccgcgagtgtcccaaaaatcagaccactccattgcgaagctttctgatttggagatcaacgcatgctggaaggatcaagacagacagccagaagcgaaatctgtcgacgaagtcttttcgcagaaccgcaagaccgcggtatctcatgaaagcgacgttgagaactccgaatgtatcttgcgccacgaagcggggacttcggttctgctgcaactcgccaaacactttggagagaataatacgtgtgcaatccttgcatatcgactaagtggagcggacgacttggcgaagcttggagaaagaagggttgatgatattgagcaccaggtacaggagaggatcaaagctttagacgaaatcatctcggagactgcttcatttgcaggaaagaagaaactgcttttcaattaccgctacactgattacaatccgcagcatgacggctctcgagggatccttgagcaggtcgaagaactggcaaagaaagagaaaactgcagtaattgtgctgcctgccatggaggagcgctttctccaacgtgagatcaaaccagacgacaaagtgttctacctctacgaaaaacctaaagacgagaagcagtatgaaacgggtggcgggttaagctatgtggcacgagcccgtttctgggtccgcgttacccagagagccaagaattggaagctcatcggaatgataggcggaaggagcggatctatggacattcccgccttcgttgggctccgttgtctgtcttgggatgagcccatcttccaggtagaagaggcacgcaaagagggaagcaaatgggtcatccccaaaccacagaccgcaaaagagagcaaggacgaagtcgaagtgcaatcgtcgaatgaaaaaacaaagccgaaagtcaaggggaaggggaagcggacgaggccagatacagctgtaaagaagcccacgaagaagaaatcgaccagcccgcctgatccatgggcgacctctcactggactgaacaaggacaccagagtctccgtctcctgaatcaaatcggtcttatgcacgtgacgttttcaaagcggagcgctgtcactcagtatcaacataaaggttcgtggcagcgcagatatactgctttggaagaacaggatccacgattgatacatttcttgagtgatccgagaaatccaccattggcgagccttggcttcgaaccggtaaagggatggagcgaatgggtcgtcaagaagtatcgagggaagctcgagtcggcgaatataggtgtaacagcaatctatctccaggattatctcgacctggcgacagcgattgggacggctcaagtcgacgaagtgcaagaggacaatagttctgacggggaggaggacaaatctagtgaagaaagtagttcgtctgatgatagcgatgacagcgcccatagctatgatagctcgccatag

SEQ ID NO: 35428 - protein, 593 aa, Muscodor strobelii
  misc_feature: SGI Peptide ID NO. 572267
MATGSDRSSDLELQPIDLPRTCKLRTPGPRRKRFILCLGSFAGDFWHCAAATVLSHYQRTDTPAEHPFRNLEFIVCIVIVVDNANVPAPEWIKGARKMFTYFRSIEVPCMVITTPRVSQKSDHSIAKLSDLEINACWKDQDRQPEAKSVDEVFSQNRKTAVSHESDVENSECILRHEAGTSVLLQLAKHFGENNTCAILAYRLSGADDLAKLGERRVDDIEHQVQERIKALDEIISETASFAGKKKLLFNYRYTDYNPQHDGSRGILEQVEELAKKEKTAVIVLPAMEERFLQREIKPDDKVFYLYEKPKDEKQYETGGGLSYVARARFWVRVTQRAKNWKLIGMIGGRSGSMDIPAFVGLRCLSWDEPIFQVEEARKEGSKWVIPKPQTAKESKDEVEVQSSNEKTKPKVKGKGKRTRPDTAVKKPTKKKSTSPPDPWATSHWTEQGHQSLRLLNQIGLMHVTFSKRSAVTQYQHKGSWQRRYTALEEQDPRLIHFLSDPRNPPLASLGFEPVKGWSEWVVKKYRGKLESANIGVTAIYLQDYLDLATAIGTAQVDEVQEDNSSDGEEDKSSEESSSSDDSDDSAHSYDSSP

SEQ ID NO: 35429 - DNA, 1323 bp, Muscodor strobelii
  misc_feature: SGI EST ID NO. CUFF.84389.0
  misc_feature: Variant of the nucleotide sequence at SEQ ID NO 35427
gcgacgttgagaactccgaatgtatcttgcgccacgaagcggggacttcggttctgctgcaactcgccaaacactttggagagaataatacgtgtgcaatccttgcatatcgactaagtggagcggacgacttggcgaagcttggagaaagaagggttgatgatattgagcaccaggtacaggagaggatcaaagctttagacgaaatcatctcggagactgcttcatttgcaggaaagaagaaactgcttttcaattaccgctacactgattacaatccgcagcatgacggctctcgagggatccttgagcaggtcgaagaactggcaaagaaagagaaaactgcagtaattgtgctgcctgccatggaggagcgctttctccaacgtgagatcaaaccagacgacaaagtgttctacctctacgaaaaacctaaagacgagaagcagtatgaaacgggtggcgggttaagctatgtggcacgagcccgtttctgggtccgcgttacccagagagccaagaattggaagctcatcggaatgataggcggaaggagcggatctatggacattcccgccttcgttgggctccgttgtctgtcttgggatgagcccatcttccaggtagaagaggcacgcaaagagggaagcaaatgggtcatccccaaaccacagaccgcaaaagagagcaaggacgaagtcgaagtgcaatcgtcgaatgaaaaaacaaagccgaaagtcaaggggaaggggaagcggacgaggccagatacagctgtaaagaagcccacgaagaagaaatcgaccagcccgcctgatccatgggcgacctctcactggactgaacaaggacaccagagtctccgtctcctgaatcaaatcggtcttatgcacgtgacgttttcaaagcggagcgctgtcactcagtatcaacataaaggttcgtggcagcgcagatatactgctttggaagaacaggatccacgattgatacatttcttgagtgatccgagaaatccaccattggcgagccttggcttcgaaccggtaaagggatggagcgaatgggtcgtcaagaagtatcgagggaagctcgagtcggcgaatataggtgtaacagcaatctatctccaggattatctcgacctggcgacagcgattgggacggctcaagtcgacgaagtgcaagaggacaatagttctgacggggaggaggacaaatctagtgaagaaagtagttcgtctgatgatagcgatgacagcgcccatagctatgatagctcgccatagtatctgctagcaaatctctaagtgcacaggggcc

SEQ ID NO: 35430 - DNA, 684 bp, Muscodor strobelii
  misc_feature: SGI cDNA ID NO. 572268
  misc_feature: Encodes the peptide sequence at SEQ ID NO 35431
atgtatgtcaataatttcatcaaagaagaaaagattaatcacctcactgaacttgtgaaggaagattggttccccagtcacgtctaccacaaagaggagaatgatgcgagtgattttgtttcagagatcaaccaagaatacagatcatcctggtccgctatcgtagatcaaaaggacgtggtttcgaagtgtatcttgagtcgagtccgttctctcatgggaaacatccagcacgaggaccttgagcctctgcaactcgtcaggtatgaggggggcgaacggttccgactccatcaagactggcacgagccatccaaggacaacgtctacgaccctcatgatccgaccacccgaccacacggtagactgatgaccagtttcttctatctagcggacaactgtaccgggggcgaaacctactttcctgatctgcctggtgttcgggccgatgccgatggaaacaagttctcgcggactgaatccgggcagggcctgctagtgaagcctaaaagaggaagcgcgatgctttggatgaacatctttatgaacggtactggggatcctaggctcttgcatgcgagcttgccggttaagtccggcacgaagattggcatgaatttatttagtctgtattatttcgagctccccattgctggatctccggggacgtcttcttttgtttga

SEQ ID NO: 35431 - protein, 227 aa, Muscodor strobelii
  misc_feature: SGI Peptide ID NO. 572268
  misc_feature (1)..(213): NCBI GI: 171689818 Blast Desc: protein product [Podospora anserina] gi|170944871|emb|CAP70983.1| protein product [Podospora anserina]
  misc_feature (48)..(208): NCBI GI: 242797049 Blast Desc: prolyl 4-hydroxylase alpha subunit, [Talaromyces stipitatus ATCC 10500] gi|218719520|gb|EED18940.1| prolyl 4-hydroxylase alpha subunit, [Talaromyces stipitatus ATCC 10500]
  misc_feature (1)..(213): NCBI GI: 116181314 Blast Desc: CHGG_01285 [Chaetomium globosum CBS 148.51] gi|88185582|gb|EAQ93050.1| CHGG_01285 [Chaetomium globosum CBS 148.51]
  misc_feature (1)..(213): NCBI GI: 171695652 Blast Desc: protein product [Podospora anserina] gi|170948068|emb|CAP60232.1| protein product [Podospora anserina]
  misc_feature (1)..(211): NCBI GI: 212527756 Blast Desc: oxidoreductase, 2OG-Fe(II) oxygenase family [Penicillium marneffei ATCC 18224] gi|210073433|gb|EEA27520.1| oxidoreductase, 2OG-Fe(II) oxygenase family [Penicillium ATCC
  misc_feature (1)..(208): NCBI GI: 240108756 Blast Desc: prolyl 4-hydroxylase alpha subunit, [Coccidioides posadasii C735 delta SOWgp]
  misc_feature (1)..(208): NCBI GI: 119176162 Blast Desc: CIMG_09826 [Coccidioides immitis RS]
  misc_feature (1)..(211): NCBI GI: 159127439 Blast Desc: oxidoreductase, 2OG-Fe(II) oxygenase family family [Aspergillus fumigatus A1163]
  misc_feature (1)..(211): NCBI GI: 146323440 Blast Desc: oxidoreductase, 2OG-Fe(II) oxygenase family family [Aspergillus fumigatus Af293] gi|129558289|gb|EAL92385.2| oxidoreductase, 2OG-Fe(II) oxygenase family family [Aspergillus
  misc_feature (1)..(211): NCBI GI: 169770869 Blast Desc: [Aspergillus oryzae RIB40] gi|83767763|dbj|BAE57902.1| protein product [Aspergillus oryzae]
  misc_feature (47)..(202): SWISSPROT Homolog: EC 1.14.11.2 Procollagen-proline dioxygenase
MYVNNFIKEEKINHLTELVKEDWFPSHVYHKEENDASDFVSEINQEYRSSWSAIVDQKDVVSKCILSRVRSLMGNIQHEDLEPLQLVRYEGGERFRLHQDWHEPSKDNVYDPHDPTTRPHGRLMTSFFYLADNCTGGETYFPDLPGVRADADGNKFSRTESGQGLLVKPKRGSAMLWMNIFMNGTGDPRLLHASLPVKSGTKIGMNLFSLYYFELPIAGSPGTSSFV

SEQ ID NO: 35432 - DNA, 873 bp, Muscodor strobelii
  misc_feature: SGI cDNA ID NO. 572269
  misc_feature: Encodes the peptide sequence at SEQ ID NO 35433
atggaagctacatctttaaagccgcagatatatcctgttcttcttattatctttgttgcggtcgtccttactacacttggatctactgccgtcgacttgcaacgccgagtttgccaaatattttctctccagctcacccccgtctcttccatagtcgaagtgcagccaccaaggggatatgaggtgtcaatattctcccgagaacccttcatgctttacgtccacaacttcgtctccagagacgaaatcgaacacctcttatcattaaccacaaacaaatataaagagtctatgatctatcccggcgaaacggcgttcgtcgatcggacgcaacgggtctcggaaacggcagagatagagcgcgacgaagtggtacgacgcatcgaaaagagggcgcggaaactccaaggatggcgaggcaagcgccagcgattgcaacccatgagggcccagaggtatcctgtgggtggtttctacacctaccactatgactgggacccgctcatcatagagggcaaccgggacactactttgatggtgtatctggttggtgactgtactggtggaggtaccaacttcccacgtgtgacaccccctgctgataaaagatggtgcaacatcattgagtgtgaaggcagcgaggacaacgattatgacggtgtgacgttcaagcctatagagggttctgctgtattctgggagaatatgcatcccaatggttcctttgatacactggtgcgtcatgctgcactgccagtaaagactgggacaaaggttggactcaatatttggacttgggatcaggactggcgagctcccgaaggagacgaagatttatcaggaggccagcgccgtatggtctatgaagattag

SEQ ID NO: 35433 - protein, 290 aa, Muscodor strobelii
  misc_feature: SGI Peptide ID NO. 572269
  misc_feature (3)..(281): NCBI GI: 212531887 Blast Desc: prolyl 4-hydroxylase alpha subunit, [Penicillium marneffei ATCC 18224] gi|210071464|gb|EEA25553.1| prolyl 4-hydroxylase alpha subunit, [Penicillium marneffei ATCC 18224]
  misc_feature (11)..(273): NCBI GI: 242774228 Blast Desc: prolyl 4-hydroxylase alpha subunit, [Talaromyces stipitatus ATCC 10500] gi|218722018|gb|EED21436.1| prolyl 4-hydroxylase alpha subunit, [Talaromyces stipitatus ATCC 10500]
  misc_feature (60)..(268): NCBI GI: 212527756 Blast Desc: oxidoreductase, 2OG-Fe(II) oxygenase family [Penicillium marneffei ATCC 18224] gi|210073433|gb|EEA27520.1| oxidoreductase, 2OG-Fe(II) oxygenase family [Penicillium ATCC
  misc_feature (60)..(268): NCBI GI: 159127439 Blast Desc: oxidoreductase, 2OG-Fe(II) oxygenase family family [Aspergillus fumigatus A1163]
  misc_feature (60)..(268): NCBI GI: 146323440 Blast Desc: oxidoreductase, 2OG-Fe(II) oxygenase family family [Aspergillus fumigatus Af293] gi|129558289|gb|EAL92385.2| oxidoreductase, 2OG-Fe(II) oxygenase family family [Aspergillus
  misc_feature (59)..(268): NCBI GI: 255942239 Blast Desc: Pc18g00410 [Penicillium chrysogenum Wisconsin 54-1255] gi|211586621|emb|CAP94265.1| Pc18g00410 [Penicillium chrysogenum Wisconsin 54-1255]
  misc_feature (57)..(268): NCBI GI: 169770869 Blast Desc: [Aspergillus oryzae RIB40] gi|83767763|dbj|BAE57902.1| protein product [Aspergillus oryzae]
  misc_feature (57)..(268): NCBI GI: 238486652 Blast Desc: oxidoreductase, 2OG-Fe(II) oxygenase family [Aspergillus flavus NRRL3357] gi|220699443|gb|EED55782.1| oxidoreductase, 2OG-Fe(II) oxygenase family [Aspergillus flavus
  misc_feature (60)..(268): NCBI GI: 242784571 Blast Desc: oxidoreductase, [Talaromyces stipitatus ATCC 10500] gi|218720561|gb|EED19980.1| oxidoreductase, [Talaromyces stipitatus ATCC 10500]
  misc_feature (9)..(268): NCBI GI: 145233095 Blast Desc: An02g07870 [Aspergillus niger] gi|134056845|emb|CAK37750.1| protein product [Aspergillus niger]
  misc_feature (25)..(273): SWISSPROT Homolog: EC 1.14.11.2 Procollagen-proline dioxygenase
MEATSLKPQIYPVLLIIFVAVVLTTLGSTAVDLQRRVCQIFSLQLTPVSSIVEVQPPRGYEVSIFSREPFMLYVHNFVSRDEIEHLLSLTTNKYKESMIYPGETAFVDRTQRVSETAEIERDEVVRRIEKRARKLQGWRGKRQRLQPMRAQRYPVGGFYTYHYDWDPLIIEGNRDTTLMVYLVGDCTGGGTNFPRVTPPADKRWCNIIECEGSEDNDYDGVTFKPIEGSAVFWENMHPNGSFDTLVRHAALPVKTGTKVGLNIWTWDQDWRAPEGDEDLSGGQRRMVYED

SEQ ID NO: 35434 - DNA, 771 bp, Muscodor strobelii
  misc_feature: SGI cDNA ID NO. 572270
  misc_feature: Encodes the peptide sequence at SEQ ID NO 35435
atgttctcgcaggttctccctttggcagttttcgtcatggcttcgaccacgtttgtgtcagcaatgcgtctccccctcgagcaaacaatgtccaagcgagacactaactgcgacctcgtcatcgacaacgtcgagcacttcgactgccaaaaccgtcctagacttctcaattctgacggcacatgcgggaccagcgacgattggtcaaacaccgagtacctgtgcgcggtctactgcgaggtcaggcgccagacgtttctcggccccatgcaagtcgcaccgggcatatttggccagattcaaggtccggacactagcgtcgacctcgcccagggtacagaggtcacgatctcggcgggcctatccatcgggggcgactcagcctgggaagacgccatcggggttggcgccagctttgatttctccatcgaaacgacaagcaccatgacgattcaacgtaacggagaagccaaaccggactttcagagccagtgggtgttgtggcccatcttgacgaccacatgcggttctgtgacgtcggaggagtttgtgtctggaaccactagcatcaaaggcgattcttacccggaccattgcacgggagatgctgaaacaacaatcaacgtgtgttctacagacacggtgaagaaccctgacggaagcccggcggcatggtggtctcagtggtattttgaccttgaaggaaacgcagctcccgatgatgtccagacggaaacttatcttaaagctcgggacctagtgcacgattga

SEQ ID NO: 35435 - protein, 256 aa, Muscodor strobelii
  misc_feature: SGI Peptide ID NO. 572270
MFSQVLPLAVFVMASTTFVSAMRLPLEQTMSKRDTNCDLVIDNVEHFDCQNRPRLLNSDGTCGTSDDWSNTEYLCAVYCEVRRQTFLGPMQVAPGIFGQIQGPDTSVDLAQGTEVTISAGLSIGGDSAWEDAIGVGASFDFSIETTSTMTIQRNGEAKPDFQSQWVLWPILTTTCGSVTSEEFVSGTTSIKGDSYPDHCTGDAETTINVCSTDTVKNPDGSPAAWWSQWYFDLEGNAAPDDVQTETYLKARDLVHD

SEQ ID NO: 35436 - DNA, 254 bp, Muscodor strobelii
  misc_feature: SGI EST ID NO. CUFF.84413.0
  misc_feature: Variant of the nucleotide sequence at SEQ ID NO 35434
gcagttttcgtcatggcttcgaccacgtttgtgtcagcaatgcgtctccccctcgagcaaacaatgtccaagcgagacactaactgcgacctcgtcatcgacaacgtcgagcacttcgactgccaaaaccgtcctagacttctcaattctgacggcacatgcgggaccagcgacgattggtcaaacaccgagtacctgtgcgcggtctactgcgaggtcaggcgccagacgtttctcggccccatgcaagtcgc

SEQ ID NO: 35437 - DNA, 186 bp, Muscodor strobelii
  misc_feature: SGI cDNA ID NO. 572271
  misc_feature: Elevated expression when VOC is produced
  misc_feature: Encodes the peptide sequence at SEQ ID NO 35438
gatgttgagcctgtgaggttcagaacaccgccgccgctcgcgacgcccgacaactcgtcgtgggatggcctcacactactcgcagaatcagcggcgagcgacgaatcacagctggctaacgagaagaagcggccagcgtggagtgacgccggcaatgaaaacaagcggccgaggcttgccgaatga

SEQ ID NO: 35438 - protein, 61 aa, Muscodor strobelii
  misc_feature: SGI Peptide ID NO. 572271
  misc_feature: Useful for introducing or modulating the production of volatile compounds
DVEPVRFRTPPPLATPDNSSWDGLTLLAESAASDESQLANEKKRPAWSDAGNENKRPRLAE

SEQ ID NO: 35439 - DNA, 401 bp, Muscodor strobelii
  misc_feature: SGI EST ID NO. CUFF.84419.0
  misc_feature: Variant of the nucleotide sequence at SEQ ID NO 35437
accgccgccgctcgcgacgcccgacaactcgtcgtgggatggcctcacactactcgcagaatcagcggcgagcgacgaatcacagctggctaacgagaagaagcggccagcgtggagtgacgccggcaatgaaaacaagcggccgaggcttgccgaatgaggaacttttatagtgtatctactctaagacgaatggcaacaactacagaatacagtgagatggcggattgactggcatggtgtttattgttaccgtatactatagtcctttcgatccgagtatatatcgcgccatattgtactacagcgaggctcgttatttattcaatcatttttttagagttttgtgttaaagcattaggggctttgcttatttgggatgactgtttggccgtgtttcg

SEQ ID NO: 35440 - DNA, 2097 bp, Muscodor strobelii
  misc_feature: SGI cDNA ID NO. 572272
  misc_feature: Encodes the peptide sequence at SEQ ID NO 35441
atgtccactaggctctatcctgcgcctaaactgagccctcgaagctttagactattacgactctcgcgttctaaggatgacgtacttctatgtcggctcaacgagtatagtatagataaccctcctaagtacgttcctgtgtcctatacatggggacctcccgagttgcccgaactagtggctcagcaatcaagcgcatgtctgactcacagccgcactattatatcgttggatgggacagaatgggaggtaacaccaagtctcttcgacctactcgatgcactaccctcgcattccgacattgaaaagcacttactttggattgattccctgtgtataaatcaggacgatatcgacgagagaacggatcaggtcaacctaatgtgccgaatctactcgcaaggcaccgctgtgttcgtatggctcggtcctggcaatgagcacactacgaaggtgcgcacgatgatcagccaattggccaagactgccaaagacgtatcagaacaggacaagtctatgaagattataaagacaatacaagatttttcagctcctggtagtctgaaattacttggagtagacgacacaaccgcatggagcgactgggtcgcccttgcctgcttttatcagcgccgttggttctttcgagcatggacaatacaggaggctgcattgagtactgccattgttgtacgatgtggatcagaaaagtttaactggaccgagctctataatgcggcacacgtgatactacatacagacgctgggcaaacgatgcttttaagagcacagcggcagttcccgcctggcaaccttaagaaccccggcatttcgatatatgccatagctcgtcatctggctgatcgccatcatgggccaatcgaagagcaaaaaaagggcatcaacgcgtggctgcgcccaggagaccaagggtccgccgctgcaactgtaaatttccttgttacaaatgcgaaaacaacaggcgccacggatcctcgcgatcgtatcttcgcattctttggagtgtgggagaagattgctaatgagaggtttgcggagacgttcgatatcaaagcagattacagaaagacaactcaagtcgtgtatacggaattcatgacgactgtcttactaagaacgggctcgctcaactttctatcgtcggtccagcctagatgtgagcagaatggaattaagagattgccatcctgggttccggattattcgacagtcgaggtcgagcctataatacagcatttgagtacacacataccgctggagaatattgatgcgtatgcgagcgtgagaccttactgtccttcggaaggggaaaatcaaatatttgacatacgaggcaatgaacttactctccctaccgtcgtgtttgggacagttactcaaatcggtagttcgttctcagagctatgcgcatctgatttcgagaagacactcgtgatgctcctccatagtcctcagaaatatccagatggtcgttcccgactacaggcctttcattcaatgctcgtgtatgatatagatttgcctcctgtttccagattccgcactctctggactatgagcttcatcgcacagattatcatcggatggaagcacttaggtctccacgccgaagagtaccttgagaaggttgcgatacatttttttctccgaacaatgctccaagacggcgatgatccgtattttccaagtttcgaagagcttaaaacgatctgtctagaattgggctattgggaaaacgctggtggcgatccaaacagtgccgagatgcgagagatgatggcagagctctccaaatttgatctcgtgttcaaatacacgtacaagagtcggcggcccttcctcttagataatggatacttcggcatgacaaatgaagacatcaaacccgctgacacgattagaataatacccggtggtcgcgcattctttgcctttcgagagatggatgagccagacaatggagagagacggcacactctagtaggagagtcatacgtgagcggtgccatggcaggagaggcgtttgattacgttcggcaaaagggtgtgggatgggagacaatttgtatcacgtag

SEQ ID NO: 35441 - protein, 698 aa, Muscodor strobelii
  misc_feature: SGI Peptide ID NO. 572272
  misc_feature (44)..(222): Pfam Id: PF06985 Pfam Desc: Heterokaryon incompatibility protein (HET)
  misc_feature (105)..(222): Pfam Id: PF06985 Pfam Desc: Heterokaryon incompatibility protein (HET)
  misc_feature (4)..(695): NCBI GI: 116205716 Blast Desc: CHGG_02151 [Chaetomium globosum CBS 148.51] gi|88182748|gb|EAQ90216.1| CHGG_02151 [Chaetomium globosum CBS 148.51]
  misc_feature (4)..(682): NCBI GI: 154313282 Blast Desc: BC1G_05338 [Botryotinia fuckeliana B05.10] gi|150849407|gb|EDN24600.1| BC1G_05338 [Botryotinia fuckeliana B05.10]
  misc_feature (42)..(698): NCBI GI: 256733829 Blast Desc: NECHADRAFT_77370 [Nectria haematococca mpVI 77-13-4]
  misc_feature (5)..(688): NCBI GI: 156043030 Blast Desc: SS1G_11315 [Sclerotinia sclerotiorum 1980] gi|154695699|gb|EDN95437.1| SS1G_11315 [Sclerotinia sclerotiorum 1980]
  misc_feature (10)..(519): NCBI GI: 256731097 Blast Desc: NECHADRAFT_84995 [Nectria haematococca mpVI 77-13-4]
  misc_feature (107)..(680): NCBI GI: 159128383 Blast Desc: Ankyrin and HET domain protein [Aspergillus fumigatus A1163]
  misc_feature (107)..(680): NCBI GI: 70985958 Blast Desc: Ankyrin and HET domain protein [Aspergillus fumigatus Af293] gi|66846112|gb|EAL86445.1| Ankyrin and HET domain protein [Aspergillus fumigatus Af293]
  misc_feature (15)..(685): NCBI GI: 256721874 Blast Desc: NECHADRAFT_88090 [Nectria haematococca mpVI 77-13-4]
  misc_feature (107)..(680): NCBI GI: 119473861 Blast Desc: Ankyrin and HET domain protein [Neosartorya fischeri NRRL 181] gi|119406959|gb|EAW16909.1| Ankyrin and HET domain protein [Neosartorya fischeri NRRL 181]
  misc_feature (15)..(409): NCBI GI: 171678233 Blast Desc: protein product [Podospora anserina] gi|170937186|emb|CAP61843.1| protein product [Podospora anserina]
MSTRLYPAPKLSPRSFRLLRLSRSKDDVLLCRLNEYSIDNPPKYVPVSYTWGPPELPELVAQQSSACLTHSRTIISLDGTEWEVTPSLFDLLDALPSHSDIEKHLLWIDSLCINQDDIDERTDQVNLMCRIYSQGTAVFVWLGPGNEHTTKVRTMISQLAKTAKDVSEQDKSMKIIKTIQDFSAPGSLKLLGVDDTTAWSDWVALACFYQRRWFFRAWTIQEAALSTAIVVRCGSEKFNWTELYNAAHVILHTDAGQTMLLRAQRQFPPGNLKNPGISIYAIARHLADRHHGPIEEQKKGINAWLRPGDQGSAAATVNFLVTNAKTTGATDPRDRIFAFFGVWEKIANERFAETFDIKADYRKTTQVVYTEFMTTVLLRTGSLNFLSSVQPRCEQNGIKRLPSWVPDYSTVEVEPIIQHLSTHIPLENIDAYASVRPYCPSEGENQIFDIRGNELTLPTVVFGTVTQIGSSFSELCASDFEKTLVMLLHSPQKYPDGRSRLQAFHSMLVYDIDLPPVSRFRTLWTMSFIAQIIIGWKHLGLHAEEYLEKVAIHFFLRTMLQDGDDPYFPSFEELKTICLELGYWENAGGDPNSAEMREMMAELSKFDLVFKYTYKSRRPFLLDNGYFGMTNEDIKPADTIRIIPGGRAFFAFREMDEPDNGERRHTLVGESYVSGAMAGEAFDYVRQKGVGWETICIT

SEQ ID NO: 35442 - DNA, 1602 bp, Muscodor strobelii
  misc_feature: SGI EST ID NO. CUFF.84455.0
  misc_feature: Variant of the nucleotide sequence at SEQ ID NO 35440
caacaagcgaaaacaataagtgcgaaaaactcatatatagttacaaatatcgtcggaaatatcatgagacataagagatgtccactaggctctatcctgcgcctaaactgagccctcgaagctttagactattacgactctcgcgttctaaggatgacgtacttctatgtcggctcaacgagtatagtatagataaccctcctaagtacgttcctgtgtcctatacatggggacctcccgagttgcccgaactagtggctcagcaatcaagcgcatgtctgactcacagccgcactattatatcgttggatgggacagaatgggaggtaacaccaagtctcttcgacctactcgatgcactaccctcgcattccgacattgaaaagcacttactttggattgattccctgtgtataaatcaggacgatatcgacgagagaacggatcaggtcaacctaatgtgccgaatctactcgcaaggcaccgctgtgttcgtatggctcggtcctggcaatgagcacactacgaaggtgcgcacgatgatcagccaattggccaagactgccaaagacgtatcagaacaggacaagtctatgaagattataaagacaatacaagatttttcagctcctggtagtctgaaattacttggagtagacgacacaaccgcatggagcgactgggtcgcccttgcctgcttttatcagcgccgttggttctttcgagcatggacaatacaggaggctgcattgagtactgccattgttgtacgatgtggatcagaaaagtttaactggaccgagctctataatgcggcacacgtgatactacatacagacgctgggcaaacgatgcttttaagagcacagcggcagttcccgcctggcaaccttaagaaccccggcatttcgatatatgccatagctcgtcatctggctgatcgccatcatgggccaatcgaagagcaaaaaaagggcatcaacgcgtggctgcgcccaggagaccaagggtccgccgctgcaactgtaaatttccttgttacaaatgcgaaaacaacaggcgccacggatcctcgcgatcgtatcttcgcattctttggagtgtgggagaagattgctaatgagaggtttgcggagacgttcgatatcaaagcagattacagaaagacaactcaagtcgtgtatacggaattcatgacgactgtcttactaagaacgggctcgctcaactttctatcgtcggtccagcctagatgtgagcagaatggaattaagagattgccatcctgggttccggattattcgacagtcgaggtcgagcctataatacagcatttgagtacacacataccgctggagaatattgatgcgtatgcgagcgtgagaccttactgtccttcggaaggggaaaatcaaatatttgacatacgaggcaatgaacttactctccctaccgtcgtgtttgggacagttactcaaatcggtagttcgttctcagagctatgcgcatctgatttcgagaagacactcgtgatgctcctccatagtcctcagaaatatccagatggtcgttcccgactacaggcctttcattcaatgctcg

SEQ ID NO: 35443 - DNA, 837 bp, Muscodor strobelii
  misc_feature: SGI cDNA ID NO. 572273
  misc_feature: Encodes the peptide sequence at SEQ ID NO 35444
atgagtgaaacggcgactatcttgggcatacctcgagagctgcggctcaaaatttatagtcatgtcatacttatggatctcaactacactataataccgagttataatgcgatgagaattcgccctgatgactttgtaagacttcgacgtcgtcgcactggtgcgaaactggtcataccatgggtcaacctcatccagacctgcaagtatatcaacgaagagctcaggcgctacatgtactgggccgtggctcacaaagacccggtttataccacatacgtccttgacctacattcaaatcacggtggatttctgtcaagtgcaacatggcgaacgatcccgtgcccacctcatagcatcaaaaacgttgccgcgtttcttgaaatggatcacctgaatgatccgaatctcgtcgatcgttctgcaaaattctggcacgccgaaacggaggcgcctatgccgatcgtccaacagctctatcagaccatgaacatattggtccacaagggaccgattctggaccggactgatccgctacatgagcccctcgtagttgaagatctaacgcttagtctacaaggagcaacataccccgaggcgcaccatcacatcatcgaagcgggcaagcatttgtgccattacatggcattggtgcaacgtactgggttgctttggccatatatcagtcgcttctatttagttgaaggggatcaccgacacggattagagatgatttcaactgtcgaaaatcctatgatacctgatgagtgggttgggttaggttatgaatggggtctcccaagttccacagacgggatggacaccgatagcgagtaa

SEQ ID NO: 35444 - protein, 278 aa, Muscodor strobelii
  misc_feature: SGI Peptide ID NO. 572273
MSETATILGIPRELRLKIYSHVILMDLNYTIIPSYNAMRIRPDDFVRLRRRRTGAKLVIPWVNLIQTCKYINEELRRYMYWAVAHKDPVYTTYVLDLHSNHGGFLSSATWRTIPCPPHSIKNVAAFLEMDHLNDPNLVDRSAKFWHAETEAPMPIVQQLYQTMNILVHKGPILDRTDPLHEPLVVEDLTLSLQGATYPEAHHHIIEAGKHLCHYMALVQRTGLLWPYISRFYLVEGDHRHGLEMISTVENPMIPDEWVGLGYEWGLPSSTDGMDTDSE

SEQ ID NO: 35445 - DNA, 1446 bp, Muscodor strobelii
  misc_feature: SGI EST ID NO. CUFF.84458.0
  misc_feature: Variant of the nucleotide sequence at SEQ ID NO 35443
gtgagtatcatgtctcaatacgtgccaatcgaggtcttgttcgtaccccaccgctcaccgcctcaaagcagataggatgatgggcaccagagcaacacgaagtccccgtgacactcgagaatagcggaagatcttgccatcactttacgctcgttcctaaggcttctcacaattgtgccgaacactagacccgcaaagactctcctatcaatcagaagataattaagtccactttcagccaccgttcaccattcattaatttcagcatgagtgaaacggcgactatcttgggcatacctcgagagctgcggctcaaaatttatagtcatgtcatacttatggatctcaactacactataataccgagttataatgcgatgagaattcgccctgatgactttgtaagacttcgacgtcgtcgcactggtgcgaaactggtcataccatgggtcaacctcatccagacctgcaagtatatcaacgaagagctcaggcgctacatgtactgggccgtggctcacaaagacccggtttataccacatacgtccttgacctacattcaaatcacggtggatttctgtcaagtgcaacatggcgaacgatcccgtgcccacctcatagcatcaaaaacgttgccgcgtttcttgaaatggatcacctgaatgatccgaatctcgtcgatcgttctgcaaaattctggcacgccgaaacggaggcgcctatgccgatcgtccaacagctctatcagaccatgaacatattggtccacaagggaccgattctggaccggactgatccgctacatgagcccctcgtagttgaagatctaacgcttagtctacaaggagcaacataccccgaggcgcaccatcacatcatcgaagcgggcaagcatttgtgccattacatggcattggtgcaacgtactgggttgctttggccatatatcagtcgcttctatttagttgaaggggatcaccgacacggattagagatgatttcaactgtcgaaaatcctatgatacctgatgagtgggttgggttaggttatgaatggggtctcccaagttccacagacgggatggacaccgatagcgagtaagtgtaagctacgagtaacaaggtgatgaaatgctatttcaaggaatgcagtggcaaattatgtagctgttcacatagttggtatatagaaaaactggtcgatacactgaggcggaaatggaatacagcgagcgaaattgatgagcataaacatcctgaagacttagtccttataggaccgtacatgggattaggagacaatgaattgggcattcgagcggagaaactaggtcgaatccatcctgtacactaattaagcgatttccagagcatctagagttgcaatgtggtatatcatagtccataagtccaatgcctagcgaccaacgtttggtgaatcatcc

SEQ ID NO: 35446 - DNA, 1116 bp, Muscodor strobelii
  misc_feature: SGI cDNA ID NO. 572274
  misc_feature: Encodes the peptide sequence at SEQ ID NO 35447
atggggctccgagacatgatcaagaagaaggaccggctaggcgagagcgactctgcctactccgacacgctcaagacgctcgagggcaacgagttcaagttcatccgcaccaccaccaacacccaagaggccatctttccagaggaccatcccgaccacctcagcgctaacgatgcgacatctccgaagccgaggcgacgagacagattatcccagatcttccacccctcacgatcgcggggtaacagcctttccgacgtccaagacagcagcccccgccccagcaccgacgaacatggccttcgccggcgaatgtccataaaggacaaattcaaaagcagaaataagacatcgtcagaatttgtgcccggggacctgcccaccatcgatgtcaccagcgatgagagcgagccgcagtgggagaagcgcgccacgattctggccagcaccaacgacgagcgtcgccggagtaaaagtgtgtccggttcgccattgccgtcctcgactgacttcaatgcgccgggctacggcaatggctatggccacggcgcgagcacgtcagaaaaggccggcgtggtatcgtcggtggaaatagatcgagatatccaggaagctatacggctgcacgaagaaggggaagaaagcagtctcgagcagtccacacgcatgttcgagcgactagctgaccgggacggtgccaataatcccctcagtcaagtgttgttcgggcttgctttaagacacggctggggatgtgatgcagatcccgcccgcgccatcacctatctctccctcgcagcggccaactcggcttcgatcgagaataaggcattggcggccggccagaagaaaggaggtgctgccaagggagaacttgttctatccatcttcgaactcgccaattgcttccgccatggctggggtatccccagagatccggttgccgcaaaacagtactacgagacggcagcgaatcttggagacaccgatgccatgaacgaggttgcatggtgttatctagagggtttcggatgcaagaaggacaagtttcaatcagcgaaatactatcgcttggcggagaagaatggcagcaagacgattggaaatacttggtaa

SEQ ID NO: 35447 - protein, 371 aa, Muscodor strobelii
  misc_feature: SGI Peptide ID NO. 572274
  misc_feature (293)..(328): Pfam Id: PF08238 Pfam Desc: Sel1 repeat
  misc_feature (329)..(364): Pfam Id: PF08238 Pfam Desc: Sel1 repeat
  misc_feature (1)..(371): NCBI GI: 256735245 Blast Desc: NECHADRAFT_98819 [Nectria haematococca mpVI 77-13-4]
  misc_feature (1)..(371): NCBI GI: 164422521 Blast Desc: NCU03054 [Neurospora crassa OR74A] gi|157069695|gb|EAA34482.2| conserved [Neurospora crassa OR74A]
  misc_feature (1)..(371): NCBI GI: 240111568 Blast Desc: CPC735_074030 [Coccidioides posadasii C735 delta SOWgp]
  misc_feature (1)..(371): NCBI GI: 119188547 Blast Desc: CIMG_04321 [Coccidioides immitis RS]
  misc_feature (1)..(371): NCBI GI: 39945554 Blast Desc: MGG_04759 [Magnaporthe grisea 70-15] gi|145021362|gb|EDK05491.1| MGG_04759 [Magnaporthe grisea 70-15]
  misc_feature (1)..(371): NCBI GI: 121719906 Blast Desc: conserved [Aspergillus clavatus NRRL 1] gi|119404863|gb|EAW15225.1| conserved [Aspergillus clavatus NRRL 1]
  misc_feature (1)..(371): NCBI GI: 119484616 Blast Desc: NFIA_098190 [Neosartorya fischeri NRRL 181] gi|119410243|gb|EAW20190.1| NFIA_098190 [Neosartorya fischeri NRRL 181]
  misc_feature (1)..(350): NCBI GI: 116192467 Blast Desc: CHGG_05951 [Chaetomium globosum CBS 148.51] gi|88181864|gb|EAQ89332.1| CHGG_05951 [Chaetomium globosum CBS 148.51]
  misc_feature (1)..(371): NCBI GI: 145253030 Blast Desc: An16g07280 [Aspergillus niger] gi|134083586|emb|CAL00501.1| protein product [Aspergillus niger]
  misc_feature (1)..(371): NCBI GI: 154308810 Blast Desc: BC1G_07933 [Botryotinia fuckeliana B05.10] gi|150852559|gb|EDN27751.1| BC1G_07933 [Botryotinia fuckeliana B05.10]
MGLRDMIKKKDRLGESDSAYSDTLKTLEGNEFKFIRTTTNTQEAIFPEDHPDHLSANDATSPKPRRRDRLSQIFHPSRSRGNSLSDVQDSSPRPSTDEHGLRRRMSIKDKFKSRNKTSSEFVPGDLPTIDVTSDESEPQWEKRATILASTNDERRRSKSVSGSPLPSSTDFNAPGYGNGYGHGASTSEKAGVVSSVEIDRDIQEAIRLHEEGEESSLEQSTRMFERLADRDGANNPLSQVLFGLALRHGWGCDADPARAITYLSLAAANSASIENKALAAGQKKGGAAKGELVLSIFELANCFRHGWGIPRDPVAAKQYYETAANLGDTDAMNEVAWCYLEGFGCKKDKFQSAKYYRLAEKNGSKTIGNTW

SEQ ID NO: 35448 - DNA, 2247 bp, Muscodor strobelii
  misc_feature: SGI EST ID NO. CUFF.84584.1
  misc_feature: Variant of the nucleotide sequence at SEQ ID NO 35446
attggatgatagtatactcataacaacgaggtatagtcttatatcatgagagggcattatgtttagcatcgaattccgttcgggcctagcaacaagatgcgacagccctacagaggcggggacatgtaggtacgcaaagcggcggcagaaccctgtcagttctataaattctaggccactgctgctgcgagtcgtgcttggtttcctcaacgtgactggtcgactggtaaactttgtgagttgtggaggggcgtcagattggcgctgggcggctgcggcgttttattggggttgcgactagcatcccccccgcgaaatagtgagagacgggggacgaatgcgtcatcccaagcttggaagacatgcgctgagccaccccaacatcagccggcgcatcggcgcattttatggatcgagctgagctggaaacccgttggatttgattcgactcgaatgaactgcggctggctcatctggacagatgtacgactactacgtcggcgccttcgtgctgcggaatgactgcgacgcgtacagagaacttgaaacacaaagcctttcatagctcttggctaagtaacaggcagcgccactcactcccaattgatcgtttagcctttgtgacgcgcgactttgaaacctaggatactctaataaagctatattctcatttgacgtgttttacagctttgcctgcagatatctgaagtcgcgacgtagtcagaaatcacgaagcgcgttcaagatggggctccgagacatgatcaagaagaaggaccggctaggcgagagcgactctgcctactccgacacgctcaagacgctcgagggcaacgagttcaagttcatccgcaccaccaccaacacccaagaggccatctttccagaggaccatcccgaccacctcagcgctaacgatgcgacatctccgaagccgaggcgacgagacagattatcccagatcttccacccctcacgatcgcggggtaacagcctttccgacgtccaagacagcagcccccgccccagcaccgacgaacatggccttcgccggcgaatgtccataaaggacaaattcaaaagcagaaataagacatcgtcagaatttgtgcccggggacctgcccaccatcgatgtcaccagcgatgagagcgagccgcagtgggagaagcgcgccacgattctggccagcaccaacgacgagcgtcgccggagtaaaagtgtgtccggttcgccattgccgtcctcgactgacttcaatgcgccgggctacggcaatggctatggccacggcgcgagcacgtcagaaaaggccggcgtggtatcgtcggtggaaatagatcgagatatccaggaagctatacggctgcacgaagaaggggaagaaagcagtctcgagcagtccacacgcatgttcgagcgactagctgaccgggacggtgccaataatcccctcagtcaagtgttgttcgggcttgctttaagacacggctggggatgtgatgcagatcccgcccgcgccatcacctatctctccctcgcagcggccaactcggcttcgatcgagaataaggcattggcggccggccagaagaaaggaggtgctgccaagggagaacttgttctatccatcttcgaactcgccaattgcttccgccatggctggggtatccccagagatccggttgccgcaaaacagtactacgagacggcagcgaatcttggagacaccgatgccatgaacgaggttgcatggtgttatctagagggtttcggatgcaagaaggacaagtttcaatcagcgaaatactatcgcttggcggagaagaatggcagcaagacgattggaaatacttggatctggaaagagaagtacgatcccaaataatagtgttcggatcgctgctgccgaggcatgttgaagatgccgatatccagagtgtcgagtatgcctaccacatctaccttgatggtttgacaactggtggtggattttcgttggaggagagtggcttcacggcactattcagagatgaggcattaagcataaacaatgattcagtacgcacgtacatacatacatatgcacaacttaagaggtcggtttgcaaggcgtaagttggcgggcgtggaaggggtacacatataatttttgagatgagtgacgatgaataccaatgaatgaagttctactctttgttacgaccctattgcttgtagatgtacagacttgtcgaaatattgggg

SEQ ID NO: 35449 - DNA, 1848 bp, Muscodor strobelii
  misc_feature: SGI cDNA ID NO. 572275
  misc_feature: Encodes the peptide sequence at SEQ ID NO 35450
atgggttccacatatcagatgcaggctgcttattaccgacctaacactctgaccgtcgacacacacgcacagaagttctttgaggaggacgacgctggcattctagacgacgctatcctggatcacagtggcctcgactcggggctggagatgtcacccgccatggcagatagccggagagactcattcgccgtcggcggctcattattctcgcccaagactgaggactggcattcagttgatatgcagtctctaccatcaaataatcccttcttagagccgcagaacaataacccttttacgaggcctgatccaccgcagcaagctacctatggctcgcagaatcatgcttggtctatgggtcacggttctggcacctgcacccctgttcagtatgacggccttgaggcaacatatgacaacaacacggcactctttcaacgtcccatgcccatgcacactcccttcagcaatcctactggtcaagttcccttgttctctgcagtcggtcccagcaactcatccatgcccacttctccccagaaggattggatgaaccaagacttcaaggcccagtccatgaagcgtcctcaaccagactccgtcatccgttcacacaacgagcttcgccgtggtgacggcatcaggaaaaagaacgcccgcttcgagatcccagccgagcggaatcttgacaacatcgatgctttgatctcacaatccaacgacgaccaggagatcaaggagctgaagcagcaaaagcgacttctgcgcaacagacaagccgctctcgactctaggcaaaggaaaaagcagcatactgagcgcctagaggaagagaagaagcagtacaccaccgtcatcacaagcttggaggatgaggtcgaccacctcaaccagaagttgcagcaactccttcgcgaaaaggaattcatgcaagaccacatcgagaatatgcgcctcgagaaggaagaaatggttcagaatcataccatcgagaccggcgagcttcgcaagaaggtcagcgtccttagcgagcatgttcagcgattcgagcatgctgccgtccccagcaacactggctatggcggtagctacggtgacatggatggcatgacgatggacggtgcttggggagattttatgggcgactacccaatggagaccgaggtcaagcatgagatgcaagtcatccccacgaaaaagacgaccgaagttatccttccttctgaagtggagaagcctgctactcaaggtggcatgctattcatgctcttccttgtcggcgctttcgtcttatccaaccgatcgaccccaacgattccccgggtttcggaagatatgcgcgaggcctcggccgccttgctaaacaacgtcttcaaggatgccggtgtggcccatgctcccaacaacgtcattgaaccggctgctccccagccttccggagctgcaagttggaccaacaccgcctctgtaccgatggccagccacgctattgatcatgtagctccatcaatgcttggcgacatggcagattccctcacgcagccaaccgagcatcaaaccaacgagcagatcttctcccttacagcggcacagtacaacggcatcacctcgcaagatttcattcgcgctcctcaacccccttcccaaggtcggcgcaatctcgcagaagcgctagccaacatgcgcagcggcactgaaaagcaatcgtccgcggcggacgtatacactagatctctcctctgggatcagatccccggtgacgttgtgcgaaactttgccaagatggtagcagagtgcaacggcgccaacggtgggcaaccacaatgcaacgacgtcaattcttaa

SEQ ID NO: 35450 - protein, 615 aa, Muscodor strobelii
  misc_feature: SGI Peptide ID NO. 572275
  misc_feature (246)..(309): Pfam Id: PF00170 Pfam Desc: bZIP transcription factor
  misc_feature (246)..(300): Pfam Id: PF07716 Pfam Desc: Basic region leucine zipper
  misc_feature (247)..(309): Pfam Id: PF00170 Pfam Desc: bZIP transcription factor
  misc_feature (1)..(600): NCBI GI: 85112227 Blast Desc: NCU00499 [Neurospora crassa OR74A] gi|28926080|gb|EAA35067.1| conserved [Neurospora crassa OR74A]
  misc_feature (10)..(611): NCBI GI: 156062590 Blast Desc: SS1G_01411 [Sclerotinia sclerotiorum 1980] gi|154696747|gb|EDN96485.1| SS1G_01411 [Sclerotinia sclerotiorum 1980]
  misc_feature (1)..(615): NCBI GI: 256734529 Blast Desc: [Nectria haematococca mpVI 77-13-4]
  misc_feature (1)..(603): NCBI GI: 46107264 Blast Desc: FG00515.1 [Gibberella zeae PH-1]
  misc_feature (1)..(606): NCBI GI: 116192461 Blast Desc: CHGG_05948 [Chaetomium globosum CBS 148.51] gi|88181861|gb|EAQ89329.1| CHGG_05948 [Chaetomium globosum CBS 148.51]
  misc_feature (1)..(603): NCBI GI: 171684541 Blast Desc: protein product [Podospora anserina] gi|170942231|emb|CAP67883.1| protein product [Podospora anserina]
  misc_feature (11)..(611): NCBI GI: 154308816 Blast Desc: BC1G_07936 [Botryotinia fuckeliana B05.10] gi|150852562|gb|EDN27754.1| BC1G_07936 [Botryotinia fuckeliana B05.10]
  misc_feature (130)..(613): NCBI GI: 261355995 Blast Desc: conserved [Verticillium albo-atrum VaMs.102]
  misc_feature (1)..(612): NCBI GI: 145614438 Blast Desc: MGG_04758 [Magnaporthe grisea 70-15] gi|145021363|gb|EDK05492.1| MGG_04758 [Magnaporthe grisea 70-15]
  misc_feature (26)..(603): NCBI GI: 239607695 Blast Desc: bZIP transcription factor [Ajellomyces dermatitidis ER-3]
MGSTYQMQAAYYRPNTLTVDTHAQKFFEEDDAGILDDAILDHSGLDSGLEMSPAMADSRRDSFAVGGSLFSPKTEDWHSVDMQSLPSNNPFLEPQNNNPFTRPDPPQQATYGSQNHAWSMGHGSGTCTPVQYDGLEATYDNNTALFQRPMPMHTPFSNPTGQVPLFSAVGPSNSSMPTSPQKDWMNQDFKAQSMKRPQPDSVIRSHNELRRGDGIRKKNARFEIPAERNLDNIDALISQSNDDQEIKELKQQKRLLRNRQAALDSRQRKKQHTERLEEEKKQYTTVITSLEDEVDHLNQKLQQLLREKEFMQDHIENMRLEKEEMVQNHTIETGELRKKVSVLSEHVQRFEHAAVPSNTGYGGSYGDMDGMTMDGAWGDFMGDYPMETEVKHEMQVIPTKKTTEVILPSEVEKPATQGGMLFMLFLVGAFVLSNRSTPTIPRVSEDMREASAALLNNVFKDAGVAHAPNNVIEPAAPQPSGAASWTNTASVPMASHAIDHVAPSMLGDMADSLTQPTEHQTNEQIFSLTAAQYNGITSQDFIRAPQPPSQGRRNLAEALANMRSGTEKQSSAADVYTRSLLWDQIPGDVVRNFAKMVAECNGANGGQPQCNDVNS

SEQ ID NO: 35451 - DNA, 3499 bp, Muscodor strobelii
  misc_feature: SGI EST ID NO. CUFF.84919.0
  misc_feature: Variant of the nucleotide sequence at SEQ ID NO 35449
caaacatctatattgttgatattgttcgagattcaacgcgaatctcgttctcatctgcagtttcctagtcatacgaagacttggaatctgtctcttttttacctgcgctctgtttctttttggataaacaggacgcttctcctcgcaaaacgtacagtaattgtgctcggcttgaagaagtagcttttacgcccacctcttcgcctattcagcccacgcaaatacaattttgattctcttttgtcttcagatttttacaaacacatattccagcaatgggttccacatatcagatgcaggctgcttattaccgacctaacactctgaccgtcgacacacacgcacagaagttctttgaggaggacgacgctggcattctagacgacgctatcctggatcacagtggcctcgactcggggctggagatgtcacccgccatggcagatagccggagagactcattcgccgtcggcggctcattattctcgcccaagactgaggactggcattcagttgatatgcagtctctaccatcaaataatcccttcttagagccgcagaacaataacccttttacgaggcctgatccaccgcagcaagctacctatggctcgcagaatcatgcttggtctatgggtcacggttctggcacctgcacccctgttcagtatgacggccttgaggcaacatatgacaacaacacggcactctttcaacgtcccatgcccatgcacactcccttcagcaatcctactggtcaagttcccttgttctctgcagtcggtcccagcaactcatccatgcccacttctccccagaaggattggatgaaccaagacttcaaggcccagtccatgaagcgtcctcaaccagactccgtcatccgttcacacaacgagcttcgccgtggtgacggcatcaggaaaaagaacgcccgcttcgagatcccagccgagcggaatcttgacaacatcgatgctttgatctcacaatccaacgacgaccaggagatcaaggagctgaagcagcaaaagcgacttctgcgcaacagacaagccgctctcgactctaggcaaaggaaaaagcagcatactgagcgcctagaggaagagaagaagcagtacaccaccgtcatcacaagcttggaggatgaggtcgaccacctcaaccagaagttgcagcaactccttcgcgaaaaggaattcatgcaagaccacatcgagaatatgcgcctcgagaaggaagaaatggttcagaatcataccatcgagaccggcgagcttcgcaagaaggtcagcgtccttagcgagcatgttcagcgattcgagcatgctgccgtccccagcaacactggctatggcggtagctacggtgacatggatggcatgacgatggacggtgcttggggagattttatgggcgactacccaatggagaccgaggtcaagcatgagatgcaagtcatccccacgaaaaagacgaccgaagttatccttccttctgaagtggagaagcctgctactcaaggtggcatgctattcatgctcttccttgtcggcgctttcgtcttatccaaccgatcgaccccaacgattccccgggtttcggaagatatgcgcgaggcctcggccgccttgctaaacaacgtcttcaaggatgccggtgtggcccatgctcccaacaacgtcattgaaccggctgctccccagccttccggagctgcaagttggaccaacaccgcctctgtaccgatggccagccacgctattgatcatgtagctccatcaatgcttggcgacatggcagattccctcacgcagccaaccgagcatcaaaccaacgagcagatcttctcccttacagcggcacagtacaacggcatcacctcgcaagatttcattcgcgctcctcaacccccttcccaaggtcggcgcaatctcgcagaagcgctagccaacatgcgcagcggcactgaaaagcaatcgtccgcggcggacgtatacactagatctctcctctgggatcagatccccggtgacgttgtgcgaaactttgccaagatggtagcagagtgcaacggcgccaacggtgggcaaccacaatgcaacgacgtcaattcttaacgacatttacgacacgacagtttacgatcataatgaatgagaacgacagcaacctgaattttgccagcgtttttcctcaaacttcctcaactcctcgtatcttacactcttaatggtttcggctcttctgtgcatacactcgacgatgcctcagggcgcaaaacatcatcatcagatcccactcctgctcacgcaaaacaaccgaaacttttgctcttcgccttctccatttggtttttcaaattgttatcgcgtcatttcctccgtgtccagattagcaagcgagccagcatctgatttctaattgatttggtcatttcccattgcaattttcacttcttctgccggcctcaatcagtgggcgcagatctttttgggggtctcaacggctattttttgggtagtagcatggcgaaaacggtggtcggtcggttggtacggcggtggcagggtgaaagctcggagtctgagctttttcttgtacaacgggtcatgggcatatcagggaaacaggacaagacatgcttgtcaacgcagtgtgcagacagcatctcacaatccagcaacagatacccacagcttcgaagtggggaggagttgtttattctttccttcttctttacggggttcatctggagtaccactctcccctagccggacttgtgggctcatcttgctatgaatagcaacatggcacggcagtctccctccagtcgtacgcgccatgcgtgcgaacaatactggagcggggttggtgtttcttcgagggtcgagcgacatgaatgagataatgtcttacggcgcaacgagttaccatccctccatgacacgaaatcaaagtgttgtggagtagcctaggagttcacgagaggaatggcggggagggtgcgagccggatgatcacctgcaacactttttcttgcggatttattttcccaatcttgctcgcttctacaaccagcgcagcgtcaactacaaccacgataccacatcgtacacgtaactcgataatgaaactcgcgggaatattacgaaaatgaagggacaggctacgactcgaagtcgccggtgaaaaataccggaagctgagaataatggtggaatacgtgtcgaattagctactcgatactctctgctatactgcgtcttgtaactagtaatttgcgacaacagtcggttgccgtctgagaaaacaatcacaaaaaaattacgtattcccgcaaacactgttccagtcctaaattctgcattgatcgtgatctaattgaagatgaaaactgacatcgcaatatctgcccaactctaacgacctaaaggattccagtccaatcgctctatgatcttacacaccctctacaaattccaacagaccagcg

SEQ ID NO: 35452 - DNA, 1653 bp, Muscodor strobelii
  misc_feature: SGI cDNA ID NO. 572276
  misc_feature: Encodes the peptide sequence at SEQ ID NO 35453
atgccgagcaaggtggaaaaggattccttaaagagaaaaagggccaatgtcccccagcaagcaagcaagcgggcgaaacctgagagcagcgacgatgaagaaatggcagaagacggcaactctttcgaagatgagatcctgcagctcgaatcacagatcctcgaatccaaaaagcactacaataacatcacgcttctcatcggccgtgtgaagagcatcgatcaagaccctgatcaagctgtctttgcctccgtgtctctatgcagagtattcttgcgactgtacgctgccggaagtctgtcgcgcaaagcaggccaatcagatagagatgccaccgtactgcagtggctgaaggccaggctgtccgagtacaggaagctccttgttgcggcgctggagcacgaagagtctgcttccactgcgctcacgctggctatgcgactgctcaaggctgattaccagaatgtcgttgacaagggtaacagtgcagcatttcccaaacccttcttgcaggatatcgtcgaagctatcattggccaggggtttgaggatgtccaggaggagttctgcgagaaatacgtggggcagtttgctgatgttcgttactatacctttcagtcgctgactgacattctgtcgggctatgagtcacagtcggttgaagacaagattttcgacaacgtgttcgacattatgtcgttcttcgaagaggttcctgatagcgtggatgatctcggcgagctctacgtccaggtccccaagaggaagggcgaccccgtgcgttccttgcaacaacaaaagaagcaagctcaggcggcttggctggctctgatgaagcttgacccaaacaagcagcagaggaagaagcttcttgagatcatggccgattccatcgcgccgtggttcacccagccggaatatctcatggacttcttgaccgattcgtacaatgccggaggctcgtctgcactcctcgccttgtctggcgtgttctatctcatacaacgacggaacctcgattatcctgctttctatcggaaactttactctctgttagatgccgacattcttcatagcaaatatagatcgaagttcctcagattactcgacacattcctcgcctcgacccatctgcccgccgcccttgttgccagcttcatcaagcgtctaaccagactatgtctcaacgcaccaccttctgccatcgtctctatagttccgtgggtgtataattcgatgaaaaaacaccccttgtgtaccttcatgatgcatcgggtaccccgtaccccagaagagaaggctatactagaagccgagggtatggaggaccctttcgatccagacgaagaggacccgatgaacacaaaggcgatagatagttgtctctgggaggttgttcaactccaaacgcactatcatccgaacgtggcgacaattgcgaagatcatctcacagcaatttacgaagcagatctataacatggaagatttcttggatcactcatacaacagcctgttggaggccgaattgtccaagtctgtgaagaaggcaccagctgtggaattcatgattcctaagcatattctactgccaaacgacccggcttcgggggtcgaagatagtctcttggtgaaactatgggacttcgagtaa

SEQ ID NO: 35453 - protein, 550 aa, Muscodor strobelii
  misc_feature: SGI Peptide ID NO. 572276
  misc_feature (322)..(481): Pfam Id: PF03914 Pfam Desc: CBF/Mak21 family
  misc_feature (1)..(549): NCBI GI: 116192457 Blast Desc: CHGG_05946 [Chaetomium globosum CBS 148.51] gi|88181859|gb|EAQ89327.1| CHGG_05946 [Chaetomium globosum CBS 148.51]
  misc_feature (1)..(549): NCBI GI: 85112235 Blast Desc: NCU00501 [Neurospora crassa OR74A] gi|28926082|gb|EAA35069.1| conserved [Neurospora crassa OR74A]
  misc_feature (1)..(549): NCBI GI: 261356172 Blast Desc: nucleolar complex protein [Verticillium albo-atrum VaMs.102]
  misc_feature (11)..(549): NCBI GI: 145614442 Blast Desc: MGG_11360 [Magnaporthe grisea 70-15] gi|145021365|gb|EDK05494.1| MGG_11360 [Magnaporthe grisea 70-15]
  misc_feature (1)..(550): NCBI GI: 256734590 Blast Desc: [Nectria haematococca mpVI 77-13-4]
  misc_feature (3)..(549): NCBI GI: 46105488 Blast Desc: FG00372.1 [Gibberella zeae PH-1]
  misc_feature (11)..(505): NCBI GI: 171684543 Blast Desc: protein product [Podospora anserina] gi|170942232|emb|CAP67884.1| protein product [Podospora anserina]
  misc_feature (132)..(549): NCBI GI: 154308808 Blast Desc: BC1G_07932 [Botryotinia fuckeliana B05.10] gi|150852558|gb|EDN27750.1| BC1G_07932 [Botryotinia fuckeliana B05.10]
  misc_feature (36)..(529): NCBI GI: 189203151 Blast Desc: nucleolar complex protein 4 [Pyrenophora tritici-repentis Pt-1C-BFP] gi|187985010|gb|EDU50498.1| nucleolar complex protein 4 [Pyrenophora tritici-repentis Pt-1C-BFP]
  misc_feature (9)..(529): NCBI GI: 169602617 Blast Desc: SNOG_04312 [Phaeosphaeria nodorum SN15] gi|111066952|gb|EAT88072.1| SNOG_04312 [Phaeosphaeria nodorum SN15]
MPSKVEKDSLKRKRANVPQQASKRAKPESSDDEEMAEDGNSFEDEILQLESQILESKKHYNNITLLIGRVKSIDQDPDQAVFASVSLCRVFLRLYAAGSLSRKAGQSDRDATVLQWLKARLSEYRKLLVAALEHEESASTALTLAMRLLKADYQNVVDKGNSAAFPKPFLQDIVEAIIGQGFEDVQEEFCEKYVGQFADVRYYTFQSLTDILSGYESQSVEDKIFDNVFDIMSFFEEVPDSVDDLGELYVQVPKRKGDPVRSLQQQKKQAQAAWLALMKLDPNKQQRKKLLEIMADSIAPWFTQPEYLMDFLTDSYNAGGSSALLALSGVFYLIQRRNLDYPAFYRKLYSLLDADILHSKYRSKFLRLLDTFLASTHLPAALVASFIKRLTRLCLNAPPSAIVSIVPWVYNSMKKHPLCTFMMHRVPRTPEEKAILEAEGMEDPFDPDEEDPMNTKAIDSCLWEVVQLQTHYHPNVATIAKIISQQFTKQIYNMEDFLDHSYNSLLEAELSKSVKKAPAVEFMIPKHILLPNDPASGVEDSLLVKLWDFE

SEQ ID NO: 35454 - DNA, 5581 bp, Muscodor strobelii
  misc_feature: SGI EST ID NO. CUFF.84581.2
  misc_feature: Variant of the nucleotide sequence at SEQ ID NO 35452
cttatcgcacctgccgtccctccgatccctcaactttttcatagttatccctcgcatcattgctcatttcaacgacaaccaccactaaattctacaggcaattgttgattgcatgtccacttaattgacaagatgccgagcaaggtggaaaaggattccttaaagagaaaaagggccaatgtcccccagcaagcaagcaagcgggcgaaacctgagagcagcgacgatgaagaaatggcagaagacggcaactctttcgaagatgagatcctgcagctcgaatcacagatcctcgaatccaaaaagcactacaataacatcacgcttctcatcggccgtgtgaagagcatcgatcaagaccctgatcaagctgtctttgcctccgtgtctctatgcagagtattcttgcgactgtacgctgccggaagtctgtcgcgcaaagcaggccaatcagatagagatgccaccgtactgcagtggctgaaggccaggctgtccgagtacaggaagctccttgttgcggcgctggagcacgaagagtctgcttccactgcgctcacgctggctatgcgactgctcaaggctgattaccagaatgtcgttgacaagggtaacagtgcagcatttcccaaacccttcttgcaggatatcgtcgaagctatcattggccaggggtttgaggatgtccaggaggagttctgcgagaaatacgtggggcagtttgctgatgttcgttactatacctttcagtcgctgactgacattctgtcgggctatgagtcacagtcggttgaagacaagattttcgacaacgtgttcgacattatgtcgttcttcgaagaggttcctgatagcgtggatgatctcggcgagctctacgtccaggtccccaagaggaagggcgaccccgtgcgttccttgcaacaacaaaagaagcaagctcaggcggcttggctggctctgatgaagcttgacccaaacaagcagcagaggaagaagcttcttgagatcatggccgattccatcgcgccgtggttcacccagccggaatatctcatggacttcttgaccgattcgtacaatgccggaggctcgtctgcactcctcgccttgtctggcgtgttctatctcatacaacgacggaacctcgattatcctgctttctatcggaaactttactctctgttagatgccgacattcttcatagcaaatatagatcgaagttcctcagattactcgacacattcctcgcctcgacccatctgcccgccgcccttgttgccagcttcatcaagcgtctaaccagactatgtctcaacgcaccaccttctgccatcgtctctatagttccgtgggtgtataattcgatgaaaaaacaccccttgtgtaccttcatgatgcatcgggtaccccgtaccccagaagagaaggctatactagaagccgagggtatggaggaccctttcgatccagacgaagaggacccgatgaacacaaaggcgatagatagttgtctctgggaggttgttcaactccaaacgcactatcatccgaacgtggcgacaattgcgaagatcatctcacagcaatttacgaagcagatctataacatggaagatttcttggatcactcatacaacagcctgttggaggccgaattgtccaagtctgtgaagaaggcaccagctgtggaattcatgattcctaagcatattctactgccaaacgacccggcttcgggggtcgaagatagtctcttggtgaaactatgggacttcgagtaactggcaaatgtacttacgtgtcattcgcgaaaatgagcaaccgacccgcccatagcagagattatcggtcaggactgccaaggttgactcgggttctgcgtgcacgagtaccgcgtcttttgccactgtcaggacaagaggacacttgacgtgccataactccatagctgtctagacattcgcgactcagcgcgttctccgcggacgctacgcgatcttgccagcacgaatcagcatttattcccgtagcaagggatcgagacgagcggatagtaatcccagcttttccggctttgccccaaccctgcgatacagccggtgctccagcctttacaccgccacgcaaacctcgagttgacaaatgctagaaagttggccaacatgtaaactgcttcgatatcactcaatagtcgcgctctctcagctccaccttgagctacgtagggcaaggtggagagcactgtattttgaacatcgagttgggcaccaggtcgtttcagatgctccagcagcctcgtgttgactggtcggaacttgacggaaggaatcaaccaagaattaaaataagggttgttatagtaagaaaccgggcgtagtccgagtagtgccagtctgtcggtgtgtcaccgccacctgggaaatactaacgctgagtcaccaaacccgtgcaaacttcaactccagcctccgatgcggaagacaggacgacgacggcatcatgacccgccaggtgaatttccattgattgaagatgttgtgcatgcgatggtttcccttatatcgtctcacatggctatggtctgacctgctgctgctgagcacgaggcggaatgtgggctcggaaagtaccatgctcagacgctaggtctgcaagattccgtgaaacaagcaggactcactgcaagatgaagaggttcaccaactactgtacctgacgaacgctagaatgagcatgagacatgcggtgagttcgggcatgagacaaggcagaatgaaattcatatcgcatacttccctatgtctgagcaaaatagacattcagactctcatccccaatctctattttccgtttcacggacaaatgccccaaataccgagttgtccgactcagcgcggtatccagacctaaggtcaagcgcattagtcaaaagaatacttcgcagtctctcaccgctcgtttcaaacacccagcttcgcgggcacacacaggcctcggctcaagtaacgcctggagatttaacccgaaatggctcaccccatccacacttgtctcccttttgaccttcagatcgtactgtaacgggatatgtgatcacttcgctcgtgggactggccgcatgatatgcggcccgcgatcacattccaattcgtgcctaatggttgagtcctattcaagccaggggctccacttcgaagcttctgctcggtacttcggaagcgttacagcgctctttctctttgtggaaggcccccattttgtttgtcaacatcgcgtcgagccgaagagaagcctccacgatcagctattgtttgaaacttcagaggccacctcgtgttgaggattcccgaaggactgcctaggtcgagcaaggagcaagtagcctggcagtagtgcgaatagtgacagtgggcgccgagcacgggctggtcgctaacggaccgccaaactagctggcttttgtgacccaatcgcttgagcagggcgagcccaagtcccgtcagctactgtcgcgctttgcgctcgcctatctatttacaatctaagccacactgcgacgatgggaaacccaagttcatgcgacaacaaaacgaagcgacttgtatttcaatattgcgcattgggagaattacatttcgcgcgttcctgacaggacggcactgatgacaactcatcccacccaatcactcattatcacaccagcctctttaatttctgatgtgttgacatgcggtcggatagtaggcctcgttacggcccaacgagatcatgagttcttgagcaccagtcgtgacttgcattcaggaccgatcgccttgacctgtcactcgactcatgacgcgcatcgagagtatgctcaacatatgctcaaatctcagactcgaatgtaacgatagctatggtcgtggccgttttcaagaagcaggtttatttgtttcgaatctcgatgaatgttgcaagtgcgtcatacatccaatatcaaaaggccaacggtaataataggaaaattttcatacgcaagcactttagcaagtcccggcttccaggtcaagggatcccgtcttccacgaggtttgcgacgactgctcaccgtctaacgtcgttccaatttgagtagtcttcattagctaggagacgatccgttgacttagccttaatgcgccgacgcaagtcttggtatcagccttcccaagtacctgtccgtaagatcaggctaccagacgagcgacttggatctcgttgcgaaatacattttttgcgactggtttccgccctagcgttatgtactctctaacaccagttgcattgcgaggtgaacaagagacccccctgctccatgtccgtgctccgagctatcgcgaggtgagggctctgtgctttaattagatacaaagcatttcttcaccgcaagaatattttttccagtaaaaagaacaaggtggatcgagggagaataacctcaaacaagctattggaactcgagtaagaaaagagacgcgtacaccggtgttcttgtcatgacctcgcgacacgagtataccagtatccgtaaccaatattggcggtctttgggcttgaatctcgactaggaaaaaaacagaaagagatggtgggttgtgccgcagagattaactcaagggctatgacactcccgtgctcccggttccgagatccaggcagcatcccgtaattgacagacgggtcttagaagcattagaccttgctcgacaagtcgggacccggccagaaggcttgcagggctttctcaatcccggttcaagacatgtttgaaggccagacaaataacagtagaagcaagcgctctccatgtttgagaggacgaggcaataccgagatagaccaatgatcgaccaaggcttcgcaaaacgcaagaagtaattgtagtcctatattgcataggtttcacaggacatctataccagagacagaatatctgcgacctggattaggaactgccaaggtcatgtgacgaggcagggagagtacggctaccagttgcttcacattggagatcgtgcccgagacatcagtccagaacgtccacagggctttcccgtaagatacgaccaagccacaaattgggcgttccagccgcggcactcgtgataatcgcatgctcttggtcggactgctcgccatcccgcggtgcttatcacatcgccgtctcaagctgagggctcgatttctccatcatcgccaatgaggacgacttcggccttgaaagcgccttgtgactcttcaggcagcgtgagactatgatttgactagcaacaccctatcatcagtgaccgatactcgaagacgagagctcatggccagtgcctggcagtggtgcgtatcgctccaccacctactgagcaatcggaagcttcaagcgtagtttcccagcgggctgctgaatgagttgctctcgtgggcgcttttgtggtgtgcatgtttaccaagaaagcggttaggttaggtagcaatttgcacccaagatgccaagaccatggccagaggtcgtcggtgcccaacctacccacttgcacgggcgctcaggtacaggtaccttgg

SEQ ID NO: 35455 - DNA, 732 bp, Muscodor strobelii
  misc_feature: SGI cDNA ID NO. 572277
  misc_feature: Encodes the peptide sequence at SEQ ID NO 35456
atggcctcccgcttggctacccgcgccttcggggccgccctccgtcccagcgtctcccagcgcgccatcgttcccgccgtctcctccctgacatcgacgcgcgccgcctccaacgtcccgacgcaagagcccaaggcgaaagcccagtcgctgatcgactcgttacccggcaactcgctcatctccaagaccgccatcctctcgtcgttcgccggcctgtccgcctacgccgtcagcaacgagttctacgtcgtcaacgaggagaccgtcgtcgccttctgcctgctgtccgtctggggcgccctcatcaaattcggcgggcccatgtactccgagtgggccgacgcccagaacgagaagatcaagggcatcctcaacgccgcccgctccgaccacacccaggccgtcaagacccgcatcgacaacgtccagcagatgggaggtgttgttgatgtgaccaaggccctgttcgaggtgtccaaggagacggcccagctcgaggccaaggcctacgagctcgagcagtccaccgctctcgccgccgaggccaaggccgtcctcgactcctgggtccgctacgagagccaggtcaagcagcgccagcagcgcgagctcgccgagaacatcatcgccaaggtccgcaaggagctcgagaaccccaaggccctccagcagatcctccagcagagcgtcgccgacgtcgagcgcatcgtcgcctccaaggcccaatag

SEQ ID NO: 35456 - protein, 243 aa, Muscodor strobelii
  misc_feature: SGI Peptide ID NO. 572277
  misc_feature (73)..(235): Pfam Id: PF05405 Pfam Desc: Mitochondrial ATP synthase B chain precursor (ATP-synt_B)
  misc_feature (1)..(243): NCBI GI: 145614444 Blast Desc: MGG_04752 [Magnaporthe grisea 70-15] gi|145021366|gb|EDK05495.1| MGG_04752 [Magnaporthe grisea 70-15]
  misc_feature (1)..(235): NCBI GI: 116192455 Blast Desc: ATP synthase subunit 4, mitochondrial precursor [Chaetomium globosum CBS 148.51] gi|88181858|gb|EAQ89326.1| ATP synthase subunit 4, mitochondrial precursor [Chaetomium globosum
  misc_feature (1)..(241): NCBI GI: 171684545 Blast Desc: protein product [Podospora anserina] gi|170942233|emb|CAP67885.1| protein product [Podospora anserina]
  misc_feature (1)..(239): NCBI GI: 85112239 Blast Desc: ATP synthase subunit 4, mitochondrial precursor [Neurospora crassa OR74A] gi|52782732|sp|Q7SE71.1|ATPF_NEUCR RecName: Full=ATP synthase subunit 4, mitochondrial; Flags: ATP
  misc_feature (1)..(243): NCBI GI: 156062582 Blast Desc: ATP synthase subunit 4, mitochondrial precursor [Sclerotinia sclerotiorum 1980] gi|154696743|gb|EDN96481.1| ATP synthase subunit 4, mitochondrial precursor [Sclerotinia 1980]
  misc_feature (1)..(242): NCBI GI: 154308806 Blast Desc: ATP synthase subunit 4, mitochondrial precursor [Botryotinia fuckeliana B05.10] gi|150852557|gb|EDN27749.1| ATP synthase subunit 4, mitochondrial precursor [Botryotinia B05.10]
  misc_feature (1)..(243): NCBI GI: 115396632 Blast Desc: ATP synthase subunit 4, mitochondrial precursor [Aspergillus terreus NIH2624] gi|114193524|gb|EAU35224.1| ATP synthase subunit 4, mitochondrial precursor [Aspergillus terreus
  misc_feature (1)..(243): NCBI GI: 121719904 Blast Desc: mitochondrial ATPase subunit ATP4, [Aspergillus clavatus NRRL 1] gi|119404862|gb|EAW15224.1| mitochondrial ATPase subunit ATP4, [Aspergillus clavatus NRRL 1]
  misc_feature (1)..(243): NCBI GI: 119484614 Blast Desc: mitochondrial ATPase subunit ATP4, [Neosartorya fischeri NRRL 181] gi|119410242|gb|EAW20189.1| mitochondrial ATPase subunit ATP4, [Neosartorya fischeri NRRL 181]
  misc_feature (1)..(243): NCBI GI: 159123649 Blast Desc: mitochondrial ATPase subunit ATP4, [Aspergillus fumigatus A1163]
MASRLATRAFGAALRPSVSQRAIVPAVSSLTSTRAASNVPTQEPKAKAQSLIDSLPGNSLISKTAILSSFAGLSAYAVSNEFYVVNEETVVAFCLLSVWGALIKFGGPMYSEWADAQNEKIKGILNAARSDHTQAVKTRIDNVQQMGGVVDVTKALFEVSKETAQLEAKAYELEQSTALAAEAKAVLDSWVRYESQVKQRQQRELAENIIAKVRKELENPKALQQILQQSVADVERIVASKAQ

SEQ ID NO: 35457 - DNA, 1947 bp, Muscodor strobelii
  misc_feature: SGI EST ID NO. CUFF.84495.0
  misc_feature: Variant of the nucleotide sequence at SEQ ID NO 35455
gagccagcatatctccactaatcacgtgcttcgagacgtcaaccgccaatagcagtgacggattgaagctagtcagaggtgccattaaaacctcatcctcaacttcccgacagctgcaccacctgttccgctgctctggcaaagcaaaagtcaccgcatatcgtcaaccccgtcgccgctctctcccatcaccgtctcaccatggcctcccgcttggctacccgcgccttcggggccgccctccgtcccagcgtctcccagcgcgccatcgttcccgccgtctcctccctgacatcgacgcgcgccgcctccaacgtcccgacgcaagagcccaaggcgaaagcccagtcgctgatcgactcgttacccggcaactcgctcatctccaagaccgccatcctctcgtcgttcgccggcctgtccgcctacgccgtcagcaacgagttctacgtcgtcaacgaggagaccgtcgtcgccttctgcctgctgtccgtctggggcgccctcatcaaattcggcgggcccatgtactccgagtgggccgacgcccagaacgagaagatcaagggcatcctcaacgccgcccgctccgaccacacccaggccgtcaagacccgcatcgacaacgtccagcagatgggaggtgttgttgatgtgaccaaggccctgttcgaggtgtccaaggagacggcccagctcgaggccaaggcctacgagctcgagcagtccaccgctctcgccgccgaggccaaggccgtcctcgactcctgggtccgctacgagagccaggtcaagcagcgccagcagcgcgagctcgccgagaacatcatcgccaaggtccgcaaggagctcgagaaccccaaggccctccagcagatcctccagcagagcgtcgccgacgtcgagcgcatcgtcgcctccaaggcccaatagatttctacctcataatgatgatacaccgataaagcaagagaaaagagattccctttgtatctaccgacaaccctgacaaccaccacctctcgtgttgtgtatacaacaccttgtgcattagtccgatgagaaattcagccagaagaataaaatactcaaaatttacatgaatactgaacctttggtataaatcgtaatgtgcgcagttatgaaacctatgatattgagcttacttcgtacccacttggggatgtatgaaagttcaagggaaaggagcaataagcattaatcttgtgcttgtggatgattgcaagcatacatgtagatacgtgtatcattaaagacgtcggtattttgattccctagatgatgagtgatgtttgttcaggtcctatccaggctccatatttctacctactcatccaccggcatcccacttctcaagcagtccgacattccattccttaaacctcctattactctccggcacgaacccagtactctcactcaacaactcctttaccctctcgatcgcatcgtgaggtagcattatatcctggacgtcggaagtcatggactccaacagcttatccgcgtcttgctgtgtgattgtacgatagaatactttgattgcgttgactcgggactgggaggcggtagaggagtaggttattgatgtgttgaagagccagatgtgtagtaggtcaggggaggttgagagtagcgaaggggatgatggtgaaggtgctttcataggtaaaatgatggatttggagcatcctgatcgtgacatggtcgctagcagcatggcgctgacgcattgtgagagattaggcgcgtaggagggttgtgtgtcctgctgggagactgagatttgccatttgaagatggatattgatgagtcttcggttcgcacgccatattgattgtggcaagaaccacagtatagtgcatttgaaggcgtgtgcgcttctgtgtggttctcactattaccattgccattcttcaggttgg

SEQ ID NO: 35458 - DNA, 1236 bp, Muscodor strobelii
  misc_feature: SGI cDNA ID NO. 572278
  misc_feature: Encodes the peptide sequence at SEQ ID NO 35459
atgtctccgtcgcgaacgatcctcatctacgcagagcttctatctaatatccggcaagtatctgtggcatgtacactaccaagcgcgtccacacagagcacaaagatatacaccaatgccgacggtagctcgctcatcatcactcacgatggagcaactcaaagcatctcactaccaggacgcgtagtctcagatgcacaacttcccattcagaagctaggagccacagatctctcttggaggctgccgcttgccaatccatctgctagccgcccggcacagttaacagaggaatctatcccctggtcagcgagtcatctcaaggtcggctcggccatcagctgtagaacatgcgactcaacattagtagaagctggaaaactcaagatatggaaagacctaccgagtgaaaactgggcagagatgatggagttctggcactgtcataagccagaaactaacaatcataatcacgatgatgaccagcgcctcacaaaccgtggctacggcgcaagctcgcgtatcgctgcccaacccggtgtaggctttgtggatctcacatctttcctcatcgataagtccgatatcgtatccccaatcaaatgtctcgccttcacctataaagcgcggttcttgacgaccaacctgaagaatggcaatggtaatagtgagaaccacacagaagcgcacacgccttcaaatgcactatactgtggttcttgccacaatcaatatggcgtgcgaaccgaagactcatcaatatccatcttcaaatggcaaatctcagtctcccagcaggacacacaaccctcctacgcgcctaatctctcacaatgcgtcagcgccatgctgctagcgaccatgtcacgatcaggatgctccaaatccatcattttacctatgaaagcaccttcaccatcatccccttcgctactctcaacctcccctgacctactacacatctggctcttcaacacatcaataacctactcctctaccgcctcccagtcccgagtcaacgcaatcaaagtattctatcgtacaatcacacagcaagacgcggataagctgttggagtccatgacttccgacgtccaggatataatgctacctcacgatgcgatcgagagggtaaaggagttgttgagtgagagtactgggttcgtgccggagagtaataggaggtttaaggaatggaatgtcggactgcttgagaagtgggatgccggtggatga

SEQ ID NO: 35459 - protein, 411 aa, Muscodor strobelii
  misc_feature: SGI Peptide ID NO. 572278
  misc_feature (6)..(406): NCBI GI: 85111667 Blast Desc: NCU03041 [Neurospora crassa OR74A] gi|28925807|gb|EAA34810.1| [Neurospora crassa OR74A]
  misc_feature (109)..(408): NCBI GI: 46108180 Blast Desc: FG00972.1 [Gibberella zeae PH-1]
  misc_feature (1)..(195): NCBI GI: 171684579 Blast Desc: protein product [Podospora anserina] gi|170942250|emb|CAP67902.1| protein product [Podospora anserina]
  misc_feature (8)..(213): NCBI GI: 156052587 Blast Desc: SS1G_06460 [Sclerotinia sclerotiorum 1980] gi|154704239|gb|EDO03978.1| SS1G_06460 [Sclerotinia sclerotiorum 1980]
  misc_feature (3)..(199): NCBI GI: 154313209 Blast Desc: BC1G_05606 [Botryotinia fuckeliana B05.10] gi|150849691|gb|EDN24884.1| BC1G_05606 [Botryotinia fuckeliana B05.10]
  misc_feature (9)..(223): NCBI GI: 39975027 Blast Desc: MGG_00340 [Magnaporthe grisea 70-15] gi|145018769|gb|EDK03048.1| MGG_00340 [Magnaporthe grisea 70-15]
  misc_feature (6)..(410): NCBI GI: 121705100 Blast Desc: conserved [Aspergillus clavatus NRRL 1] gi|119398959|gb|EAW09387.1| conserved [Aspergillus clavatus NRRL 1]
  misc_feature (45)..(198): NCBI GI: 261357412 Blast Desc: conserved [Verticillium albo-atrum VaMs.102]
  misc_feature (6)..(408): NCBI GI: 119492600 Blast Desc: NFIA_069180 [Neosartorya fischeri NRRL 181] gi|119411804|gb|EAW21747.1| conserved [Neosartorya fischeri NRRL 181]
  misc_feature (1)..(408): NCBI GI: 189203847 Blast Desc: [Pyrenophora tritici-repentis Pt-1C-BFP] gi|187985358|gb|EDU50846.1| [Pyrenophora tritici-repentis Pt-1C-BFP]
MSPSRTILIYAELLSNIRQVSVACTLPSASTQSTKIYTNADGSSLIITHDGATQSISLPGRVVSDAQLPIQKLGATDLSWRLPLANPSASRPAQLTEESIPWSASHLKVGSAISCRTCDSTLVEAGKLKIWKDLPSENWAEMMEFWHCHKPETNNHNHDDDQRLTNRGYGASSRIAAQPGVGFVDLTSFLIDKSDIVSPIKCLAFTYKARFLTTNLKNGNGNSENHTEAHTPSNALYCGSCHNQYGVRTEDSSISIFKWQISVSQQDTQPSYAPNLSQCVSAMLLATMSRSGCSKSIILPMKAPSPSSPSLLSTSPDLLHIWLFNTSITYSSTASQSRVNAIKVFYRTITQQDADKLLESMTSDVQDIMLPHDAIERVKELLSESTGFVPESNRRFKEWNVGLLEKWDAGG

SEQ ID NO: 35460 - DNA, 1254 bp, Muscodor strobelii
  misc_feature: SGI cDNA ID NO. 572279
  misc_feature: Encodes the peptide sequence at SEQ ID NO 35461
atgtttcgagtttcacggcccagtataagctcagtgatatcctatgttccaggtattaaccgactcttctcgactgggaatggcgggcagtacatcgacatcccacctgttgaggtccacaatgtggatgcaacgcaaggaaagcgtcccaggaccctgaagcacctgcttcgagcgaatcacgtcaatcactcgattttatatcacaacttgcagttcgataatcatatgccgcatattctgtgctcagcttatctactcggcgcaactcattcacaattgacgaagatttatgacgtggaatccgaagggcttgagccatggcagccgtctccgtctgagatctccgatgtgaggtggcgagagtttctgggacagaagaactaccagcgggcttacgttgactttttcgaggactcgctagcgactgatcatgattatgattggaagaaggtcgtcaaagagtacatgttcggtggagatgagccacttgcgaattgtctcatcggtggtctcggtcatcctctcattcatctaggttatgcctatgagatgaacaacaaggagattgcgatggaggcactcgctctaacggcagtgcaatacaatttcttgcacaagtataccgatgacccgtcgtacaccaagccatccgcaaattcagtatcggatccgtcgcatttgctcacaaaaatggcctctgatgaacgactcacaagcctatttaagaaacccggattcgataacttccaagcgcttttcgataagcacgaggacctcgtgatggagtactggaacgcatggactctggaagaccctaagaagcagtttcagcagtctcaagaggctgccgtatcattgctagtcgccacaatccgtccgggcactcgtgcttacaatttctttgtcgtccatcttcttaccaccagtcatgccgttagaattctgctgccagtcatacctgctgagtttcatatcccattggtacgacagtggtggctgctcacggtcgctgtgtatatgatccacctctgtcctaagatcgatcaggacgttattccgaaagccggcacgaagcagtggagttatgtagaggataaggcgctgaatggacctcatgcaacggacgcgcatttcgtgaaagctgtacgtgcaatgaaggaagccgctagtacctggggagatgtacatgagcactacctcaacgcggctgtttggtttgttgatgatttcgccgggtggacgtttgagtaa

SEQ ID NO: 35461 - protein, 417 aa, Muscodor strobelii
  misc_feature: SGI Peptide ID NO. 572279
  misc_feature (9)..(415): NCBI GI: 116192427 Blast Desc: CHGG_05931 [Chaetomium globosum CBS 148.51] gi|88181844|gb|EAQ89312.1| CHGG_05931 [Chaetomium globosum CBS 148.51]
  misc_feature (10)..(416): NCBI GI: 39945450 Blast Desc: MGG_04707 [Magnaporthe grisea 70-15] gi|108673279|gb|ABF93455.1| MGS207 protein [Magnaporthe grisea] gi|145021386|gb|EDK05515.1| MGG_04707 [Magnaporthe grisea 70-15]
  misc_feature (11)..(417): NCBI GI: 261357378 Blast Desc: MGS207 protein [Verticillium albo-atrum VaMs.102]
  misc_feature (9)..(414): NCBI GI: 171684763 Blast Desc: protein product [Podospora anserina] gi|170942342|emb|CAP67994.1| protein product [Podospora anserina]
  misc_feature (9)..(414): NCBI GI: 164428397 Blast Desc: NCU00518 [Neurospora crassa OR74A] gi|157072131|gb|EAA35086.2| conserved [Neurospora crassa OR74A]
  misc_feature (12)..(415): NCBI GI: 156052589 Blast Desc: SS1G_06461 [Sclerotinia sclerotiorum 1980] gi|154704240|gb|EDO03979.1| SS1G_06461 [Sclerotinia sclerotiorum 1980]
  misc_feature (12)..(415): NCBI GI: 154313211 Blast Desc: BC1G_05607 [Botryotinia fuckeliana B05.10] gi|150849692|gb|EDN24885.1| BC1G_05607 [Botryotinia fuckeliana B05.10]
  misc_feature (9)..(416): NCBI GI: 256734475 Blast Desc: NECHADRAFT_65600 [Nectria haematococca mpVI 77-13-4]
  misc_feature (9)..(416): NCBI GI: 46108178 Blast Desc: FG00971.1 [Gibberella zeae PH-1]
  misc_feature (1)..(414): NCBI GI: 119492555 Blast Desc: NFIA_069170 [Neosartorya fischeri NRRL 181] gi|119411803|gb|EAW21746.1| conserved [Neosartorya fischeri NRRL 181]
MFRVSRPSISSVISYVPGINRLFSTGNGGQYIDIPPVEVHNVDATQGKRPRTLKHLLRANHVNHSILYHNLQFDNHMPHILCSAYLLGATHSQLTKIYDVESEGLEPWQPSPSEISDVRWREFLGQKNYQRAYVDFFEDSLATDHDYDWKKVVKEYMFGGDEPLANCLIGGLGHPLIHLGYAYEMNNKEIAMEALALTAVQYNFLHKYTDDPSYTKPSANSVSDPSHLLTKMASDERLTSLFKKPGFDNFQALFDKHEDLVMEYWNAWTLEDPKKQFQQSQEAAVSLLVATIRPGTRAYNFFVVHLLTTSHAVRILLPVIPAEFHIPLVRQWWLLTVAVYMIHLCPKIDQDVIPKAGTKQWSYVEDKALNGPHATDAHFVKAVRAMKEAASTWGDVHEHYLNAAVWFVDDFAGWTFE

SEQ ID NO: 35462 - DNA, 2159 bp, Muscodor strobelii
  misc_feature: SGI EST ID NO. CUFF.84587.0
  misc_feature: Variant of the nucleotide sequence at SEQ ID NO 35460
cttgagccgttcaatttgtttggatcaatccgcgcggtattctcataagcgagctatgggttagttgcattttagttacccaacatttatacaccccaaccatcatacgtcacacattcaccgaggagaaattgccactctgcggaggcaactcaattcacgatgtttcgagtttcacggcccagtataagctcagtgatatcctatgttccaggtattaaccgactcttctcgactgggaatggcgggcagtacatcgacatcccacctgttgaggtccacaatgtggatgcaacgcaaggaaagcgtcccaggaccctgaagcacctgcttcgagcgaatcacgtcaatcactcgattttatatcacaacttgcagttcgataatcatatgccgcatattctgtgctcagcttatctactcggcgcaactcattcacaattgacgaagatttatgacgtggaatccgaagggcttgagccatggcagccgtctccgtctgagatctccgatgtgaggtggcgagagtttctgggacagaagaactaccagcgggcttacgttgactttttcgaggactcgctagcgactgatcatgattatgattggaagaaggtcgtcaaagagtacatgttcggtggagatgagccacttgcgaattgtctcatcggtggtctcggtcatcctctcattcatctaggttatgcctatgagatgaacaacaaggagattgcgatggaggcactcgctctaacggcagtgcaatacaatttcttgcacaagtataccgatgacccgtcgtacaccaagccatccgcaaattcagtatcggatccgtcgcatttgctcacaaaaatggcctctgatgaacgactcacaagcctatttaagaaacccggattcgataacttccaagcgcttttcgataagcacgaggacctcgtgatggagtactggaacgcatggactctggaagaccctaagaagcagtttcagcagtctcaagaggctgccgtatcattgctagtcgccacaatccgtccgggcactcgtgcttacaatttctttgtcgtccatcttcttaccaccagtcatgccgttagaattctgctgccagtcatacctgctgagtttcatatcccattggtacgacagtggtggctgctcacggtcgctgtgtatatgatccacctctgtcctaagatcgatcaggacgttattccgaaagccggcacgaagcagtggagttatgtagaggataaggcgctgaatggacctcatgcaacggacgcgcatttcgtgaaagctgtacgtgcaatgaaggaagccgctagtacctggggagatgtacatgagcactacctcaacgcggctgtttggtttgttgatgatttcgccgggtggacgtttgagtaaacataggtaagacgccaagaaaagttggattggaagacttcatggaattaagttgttcagatgagcaaaccaatgtatgctacatgcagattgatgaaatatcctcattaccctcacgatattgatgctctctggtaatgctacacgttctgggacgattagagtaccatagcaactcagttgattgtattgttaccaagctgcccatttatgaagtatctatagttgaacatatcctctcggtcttcgaccctcacggtgcacctcggagcttgtacttcaagtgccaacatgtctggctcacaaattcgaaaccgctagcattcaaaagttcatacaagagtaatcgtctccaactgtattcctcgtgcttctaaagcttcaggggatagtcttggatccgaattaattacttcgcccgtattcttgttgcggaacttctttatgtaaataggatctgccgtggtccactcaaagtcgatcggctcccactcttcaggtattggaataccacccagtctaggatcgtctgatgtaaacaagccagtttccgtgttcttgaattgacatcgcggtttcccatcttcatcaagaggcacctggacgacccagggacgatttaaatttcccagaagcgcttcgccatgcatcatgccctgtacataacaagggccaacgacttggtaatgcttttcatgaggaagtggtctaagaatcattggtaggtcgcagcctaaaacgac

SEQ ID NO: 35463 - DNA, 2292 bp, Muscodor strobelii
  misc_feature: SGI cDNA ID NO. 572280
  misc_feature: Elevated expression when VOC is produced
  misc_feature: Encodes the peptide sequence at SEQ ID NO 35464
atgccgctgttatcatcccgccgtcgcctttatcaagccccttggaaggcgaaggtctccttcaaacgaaagcaacggaaggtcaaagttttcatcgatcgacggtggactttcgcgtacaagccactagaagatcccgctacctccattcgtcttctggctctctttcctggtgaaggcgatgaacctcttcacggccggatcagacatgcaacaattgttgcgcctgtgggagacaagtcggagtataaacgcaagaagttgaaagaaatacaaaacacattaccagctggctggatagcacgcgaaactcttgatgagagagtgatatttgtaaacagacaagaaggttacgcctcgtggactcaaccggacccaaatatcagcccttcgctatatgaactagctctggatacgcaaaaagtctcgaccaatcctcgatacgaggctttatcctatgcatggggatcaactcgcaaaacaaaagcaatattcctagatgatggacgcatatctcgaaagatacctatcgcgaaaaatctcttcgttgcattgcgccacctccgtcacaggaacgaagagagaaccctctgggtggatgctgtttgcatcgaccaggagaatgggttagagcgaggtgaacaagtgaaacgtataggacaaatcttttcgctagctgaaaaagttatcatctggctagggcccactttcgacgatagcgaccttgcgctggctacggtcaaagagttcggacagcaaataatttggacccaagaccgtgggcgtctcggaaaacccggtggtgaagatcggacagtacttgagcaaataaagaaccaaaatcttgatgtcaagtcaatagttgcactgagaagtctatacgcacgtgcattcttcgctcgcctctgggttgcccaagaattgcatgcaggatgcaggaacacgattgttcaatgtggcaacaacgtagtgccttggacactatttcgacaggggagcttggagcttaactatagcttagaatcaagcacgtggagatatgtttttgggacacataaagtgagctacttatgtgaccctgtcggaaatttgacaacaatgggcgttatgagtcgttattcttcacgcgaatgtacagacgacagagatcgagtgtatggtctgatgagcttgctgccacaaactatcagtaggggaatatccgtcgactatcaagatatggtttctcaatcggtgttcacggatctgtttatattatgccttaaacaagagcagcggctctcgcaactcgcgtatgggtggcgcgatgatgccgttccatcgcaaacacgtacctcagcatggcctagttggcttccaaattggagctataagtcactatccacacgctttgtagatcttggctactgttccagcagtattactgcggcgtatgccgcatatcgcgagcctgggtatcttgatatcgccggcattaagctcggtaccgtttcaaacgttgaaaagcgactaaacccaggttccgcaattacaagtctactaaagcatttgaacggccagggcctcgatcgactaaatgaaatacgatatcctactggttcgacatttctagaagcttatcttcgctcctacatgggcgaccggttcaaagataggtttccatatgataggtcatttataccttaccaagtgttcaaaaatactattatggcctcagcgttctcaaatgaacaaagaaatcaaacttttacatctgagagctacttttcgccgaaaatgaagcgagctgctatgtctatggaggggagcatcttgttcacattgtcaaacaagtatatagggaagtcgtttactcccctttcaccgggagacgaagtattcgtcgttttaggctgcgacctaccaatgattcttagaccacttcctcatgaaaagcattaccaagtcgttggcccttgttatgtacagggcatgatgcatggcgaagcgcttctgggaaatttaaatcgtccctgggtcgtccaggtgcctcttgatgaagatgggaaaccgcgatgtcaattcaagaacacggaaactggcttgtttacatcagacgatcctagactgggtggtattccaatacctgaagagtgggagccgatcgactttgagtggaccacggcagatcctatttacataaagaagttccgcaacaagaatacgggcgaagtaattaattcggatccaagactatcccctgaagctttagaagcacgaggaatacagttggagacgattactcttgtatga

SEQ ID NO: 35464 - protein, 763 aa, Muscodor strobelii
  misc_feature: SGI Peptide ID NO. 572280
  misc_feature (148)..(307): Pfam Id: PF06985 Pfam Desc: Heterokaryon incompatibility protein (HET)
  misc_feature (148)..(241): Pfam Id: PF06985 Pfam Desc: Heterokaryon incompatibility protein (HET)
  misc_feature (38)..(746): NCBI GI: 46139411 Blast Desc: FG11220.1 [Gibberella zeae PH-1]
  misc_feature (38)..(763): NCBI GI: 256719970 Blast Desc: NECHADRAFT_98482 [Nectria haematococca mpVI 77-13-4]
  misc_feature (38)..(763): NCBI GI: 154311024 Blast Desc: BC1G_06630 [Botryotinia fuckeliana B05.10] gi|150851034|gb|EDN26227.1| BC1G_06630 [Botryotinia fuckeliana B05.10]
  misc_feature (37)..(763): NCBI GI: 169603560 Blast Desc: SNOG_04789 [Phaeosphaeria nodorum SN15] gi|111066060|gb|EAT87180.1| SNOG_04789 [Phaeosphaeria nodorum SN15]
  misc_feature (37)..(763): NCBI GI: 256727220 Blast Desc: NECHADRAFT_32743 [Nectria haematococca mpVI 77-13-4]
  misc_feature (202)..(763): NCBI GI: 145609067 Blast Desc: MGG_09107 [Magnaporthe grisea 70-15] gi|145016510|gb|EDK00940.1| MGG_09107 [Magnaporthe grisea 70-15]
  misc_feature (50)..(763): NCBI GI: 115492481 Blast Desc: [Aspergillus terreus NIH2624] gi|114197728|gb|EAU39428.1| [Aspergillus terreus NIH2624]
  misc_feature (32)..(763): NCBI GI: 39974569 Blast Desc: MGG_00569 [Magnaporthe grisea 70-15] gi|145018530|gb|EDK02809.1| MGG_00569 [Magnaporthe grisea 70-15]
  misc_feature (144)..(668): NCBI GI: 256730222 Blast Desc: NECHADRAFT_82497 [Nectria haematococca mpVI 77-13-4]
  misc_feature (37)..(604): NCBI GI: 261357884 Blast Desc: conserved [Verticillium albo-atrum VaMs.102]
  misc_feature: Useful for introducing or modulating the production of volatile compounds
MPLLSSRRRLYQAPWKAKVSFKRKQRKVKVFIDRRWTFAYKPLEDPATSIRLLALFPGEGDEPLHGRIRHATIVAPVGDKSEYKRKKLKEIQNTLPAGWIARETLDERVIFVNRQEGYASWTQPDPNISPSLYELALDTQKVSTNPRYEALSYAWGSTRKTKAIFLDDGRISRKIPIAKNLFVALRHLRHRNEERTLWVDAVCIDQENGLERGEQVKRIGQIFSLAEKVIIWLGPTFDDSDLALATVKEFGQQIIWTQDRGRLGKPGGEDRTVLEQIKNQNLDVKSIVALRSLYARAFFARLWVAQELHAGCRNTIVQCGNNVVPWTLFRQGSLELNYSLESSTWRYVFGTHKVSYLCDPVGNLTTMGVMSRYSSRECTDDRDRVYGLMSLLPQTISRGISVDYQDMVSQSVFTDLFILCLKQEQRLSQLAYGWRDDAVPSQTRTSAWPSWLPNWSYKSLSTRFVDLGYCSSSITAAYAAYREPGYLDIAGIKLGTVSNVEKRLNPGSAITSLLKHLNGQGLDRLNEIRYPTGSTFLEAYLRSYMGDRFKDRFPYDRSFIPYQVFKNTIMASAFSNEQRNQTFTSESYFSPKMKRAAMSMEGSILFTLSNKYIGKSFTPLSPGDEVFVVLGCDLPMILRPLPHEKHYQVVGPCYVQGMMHGEALLGNLNRPWVVQVPLDEDGKPRCQFKNTETGLFTSDDPRLGGIPIPEEWEPIDFEWTTADPIYIKKFRNKNTGEVINSDPRLSPEALEARGIQLETITLV

SEQ ID NO: 35465 - DNA, 2377 bp, Muscodor strobelii
  misc_feature: SGI EST ID NO. CUFF.84588.1
  misc_feature: Variant of the nucleotide sequence at SEQ ID NO 35463
ttttcgccgaaaatgaagcgagctgctatgtctatggaggggagcatcttgttcacattgtcaaacaagtatatagggaagtcgtttactcccctttcaccgggagacgaagtattcgtcgttttaggctgcgacctaccaatgattcttagaccacttcctcatgaaaagcattaccaagtcgttggcccttgttatgtacagggcatgatgcatggcgaagcgcttctgggaaatttaaatcgtccctgggtcgtccaggtgcctcttgatgaagatgggaaaccgcgatgtcaattcaagaacacggaaactggcttgtttacatcagacgatcctagactgggtggtattccaatacctgaagagtgggagccgatcgactttgagtggaccacggcagatcctatttacataaagaagttccgcaacaagaatacgggcgaagtaattaattcggatccaagactatcccctgaagctttagaagcacgaggaatacagttggagacgattactcttgtatgaacttttgaatgctagcggtttcgaatttgtgagccagacatgttggcacttgaagtacaagctccgaggtgcaccgtgagggtcgaagaccgagaggatatgttcaactatagatacttcataaatgggcagcttggtaacaatacaatcaactgagttgctatggtactctaatcgtcccagaacgtgtagcattaccagagagcatcaatatcgtgagggtaatgaggatatttcatcaatctgcatgtagcatacattggtttgctcatctgaacaacttaattccatgaagtcttccaatccaacttttcttggcgtcttacctatgtttactcaaacgtccacccggcgaaatcatcaacaaaccaaacagccgcgttgaggtagtgctcatgtacatctccccaggtactagcggcttccttcattgcacgtacagctatacaatgtcagcatatctaagaatcaatagataactcaatacactcacctttcacgaaatgcgcgtccgttgcatgaggtccattcagcgccttatcctctacataactccactgcttcgtgccggctttcggaataacgtcctgatcgatcttaggacagaggtggatcatatacacagcgaccgtgagcagccaccactgtcgtaccaatgggatatgaaactcagcaggtatgactggcagcagaattctaacggcatgactggtggtaagaagatggacgacaaagaaattgtaagcacgagtgcccggacggattgtggcgactagcaatgatacggcagcctcttgagactgctgaaactgcttcttagggtcttccagagtccatgcgttccagtactccatcacgaggtcctcgtgcttatcgaaaagcgcttggaagttatcgaatccgggtttcttaaataggcttgtgagtcgttcatcagaggccatttttgtgagcaaatgcgacggatccgatactgaatttgcggatggcttggtgtacgacgggtcatcggtatacttgtgcaagaaattgtattgcactgccgttagagcgagtgcctccatcgcaatctccttgttgttcatctcataggcataacctagatgaatgagaggatgaccgactgtagatattagcacagaaacactgctacacaatacgggagagacatacgaccaccgatgagacaattcgcaagtggctcatctccaccgaacatgtactctttgacgaccttcttccaatcataatcatgatcagtcgctagcgagtcctcgaaaaagtcaacgtaagcccgctggtagttcttctgtcccagaaactctcgccacctcacatcggagatctcagacggagacggctgccatggctcaagcccttcggattccacgtcataaatcttcgtcaattgtgaatgagttgcgccgagtagataagctgagcacagaatatgcggcatatgattatcgaactgcaagttgtgatataaaatcgagtgattgacgtgattcgctcgaagcaggtgcttcagggtcctgggacgctttccttgcgttgcatccacattgtggacctcaacaggtgggatgtcgatgtactgcccgccattcccagtcgagaagagtcggttaatacctggaacataggatatcactgagcttatactgggccgtgaaactcgaaacatcgtgaattgagttgcctccgcagagtggcaatttctcctcggtgaatgtgtgacgtatgatggttggggtgtataaatgttgggtaactaaaatgcaactaacccatagctcgcttatgagaataccgcgcggattgatccaaacaaattgaacggctcaag

SEQ ID NO: 35466 - DNA, 2298 bp, Muscodor strobelii
  misc_feature: SGI cDNA ID NO. 572281
  misc_feature: Encodes the peptide sequence at SEQ ID NO 35467
atgccgctgttatcatcccgccgtcgcctttatcaagccccttggaaggcgaaggtctccttcaaacgaaagcaacggaaggtcaaagttttcatcgatcgacggtggactttcgcgtacaagccactagaagatcccgctacctccattcgtcttctggctctctttcctggtgaaggcgatgaacctcttcacggccggatcagacatgcaacaattgttgcgcctgtgggagacaagtcggagtataaacgcaagaagttgaaagaaatacaaaacacattaccagctggctggatagcacgcgaaactcttgatgagagagtgatatttgtaaacagacaagaaggttacgcctcgtggactcaaccggacccaaatatcagcccttcgctatatgaactagctctggatacgcaaaaagtctcgaccaatcctcgatacgaggctttatcctatgcatggggatcaactcgcaaaacaaaagcaatattcctagatgatggacgcatatctcgaaagatacctatcgcgaaaaatctcttcgttgcattgcgccacctccgtcacaggaacgaagagagaaccctctgggtggatgctgtttgcatcgaccaggagaatgggttagagcgaggtgaacaagtgaaacgtataggacaaatcttttcgctagctgaaaaagttatcatctggctagggcccactttcgacgatagcgaccttgcgctggctacggtcaaagagttcggacagcaaataatttggacccaagaccgtgggcgtctcggaaaacccggtggtgaagatcggacagtacttgagcaaataaagaaccaaaatcttgatgtcaagtcaatagttgcactgagaagtctatacgcacgtgcattcttcgctcgcctctgggttgcccaagaattgcatgcaggatgcaggaacacgattgttcaatgtggcaacaacgtagtgccttggacactatttcgacaggggagcttggagcttaactatagcttagaatcaagcacgtggagatatgtttttgggacacataaagtgagctacttatgtgaccctgtcggaaatttgacaacaatgggcgttatgagtcgttattcttcacgcgaatgtacagacgacagagatcgagtgtatggtctgatgagcttgctgccacaaactatcagtaggggaatatccgtcgactatcaagatatggtttctcaatcggtgttcacggatctgtttatattatgccttaaacaagagcagcggctctcgcaactcgcgtatgggtggcgcgatgatgccgttccatcgcaaacacgtacctcagcatggcctagttggcttccaaattggagctataagtcactatccacacgctttgtagatcttggctactgttccagcagtattactgcggcgtatgccgcatatcgcgagcctgggtatcttgatatcgccggcattaagctcggtaccgtttcaaacgttgaaaagcgactaaacccaggttccgcaattacaagtctactaaagcatttgaacggccagggcctcgatcgactaaatgaaatacgatatcctactggttcgacatttctagaagcttatcttcgctcctacatgggcgaccggttcaaagataggtttccatatgataggtcatttataccttaccaagtgttcaaaaatactattatggcctcagcgttctcaaatgaacaaagaaatcaaacttttacatctgagaataagagctacttttcgccgaaaatgaagcgagctgctatgtctatggaggggagcatcttgttcacattgtcaaacaagtatatagggaagtcgtttactcccctttcaccgggagacgaagtattcgtcgttttaggctgcgacctaccaatgattcttagaccacttcctcatgaaaagcattaccaagtcgttggcccttgttatgtacagggcatgatgcatggcgaagcgcttctgggaaatttaaatcgtccctgggtcgtccaggtgcctcttgatgaagatgggaaaccgcgatgtcaattcaagaacacggaaactggcttgtttacatcagacgatcctagactgggtggtattccaatacctgaagagtgggagccgatcgactttgagtggaccacggcagatcctatttacataaagaagttccgcaacaagaatacgggcgaagtaattaattcggatccaagactatcccctgaagctttagaagcacgaggaatacagttggagacgattactcttgtatga

SEQ ID NO: 35467 - protein, 765 aa, Muscodor strobelii
  misc_feature: SGI Peptide ID NO. 572281
  misc_feature (148)..(307): Pfam Id: PF06985 Pfam Desc: Heterokaryon incompatibility protein (HET)
  misc_feature (148)..(241): Pfam Id: PF06985 Pfam Desc: Heterokaryon incompatibility protein (HET)
  misc_feature (38)..(748): NCBI GI: 46139411 Blast Desc: FG11220.1 [Gibberella zeae PH-1]
  misc_feature (38)..(765): NCBI GI: 256719970 Blast Desc: NECHADRAFT_98482 [Nectria haematococca mpVI 77-13-4]
  misc_feature (38)..(765): NCBI GI: 154311024 Blast Desc: BC1G_06630 [Botryotinia fuckeliana B05.10] gi|150851034|gb|EDN26227.1| BC1G_06630 [Botryotinia fuckeliana B05.10]
  misc_feature (37)..(765): NCBI GI: 169603560 Blast Desc: SNOG_04789 [Phaeosphaeria nodorum SN15] gi|111066060|gb|EAT87180.1| SNOG_04789 [Phaeosphaeria nodorum SN15]
  misc_feature (37)..(765): NCBI GI: 256727220 Blast Desc: NECHADRAFT_32743 [Nectria haematococca mpVI 77-13-4]
  misc_feature (202)..(765): NCBI GI: 145609067 Blast Desc: MGG_09107 [Magnaporthe grisea 70-15] gi|145016510|gb|EDK00940.1| MGG_09107 [Magnaporthe grisea 70-15]
  misc_feature (50)..(765): NCBI GI: 115492481 Blast Desc: [Aspergillus terreus NIH2624] gi|114197728|gb|EAU39428.1| [Aspergillus terreus NIH2624]
  misc_feature (32)..(765): NCBI GI: 39974569 Blast Desc: MGG_00569 [Magnaporthe grisea 70-15] gi|145018530|gb|EDK02809.1| MGG_00569 [Magnaporthe grisea 70-15]
  misc_feature (144)..(670): NCBI GI: 256730222 Blast Desc: NECHADRAFT_82497 [Nectria haematococca mpVI 77-13-4]
  misc_feature (37)..(560): NCBI GI: 261357884 Blast Desc: conserved [Verticillium albo-atrum VaMs.102]
MPLLSSRRRLYQAPWKAKVSFKRKQRKVKVFIDRRWTFAYKPLEDPATSIRLLALFPGEGDEPLHGRIRHATIVAPVGDKSEYKRKKLKEIQNTLPAGWIARETLDERVIFVNRQEGYASWTQPDPNISPSLYELALDTQKVSTNPRYEALSYAWGSTRKTKAIFLDDGRISRKIPIAKNLFVALRHLRHRNEERTLWVDAVCIDQENGLERGEQVKRIGQIFSLAEKVIIWLGPTFDDSDLALATVKEFGQQIIWTQDRGRLGKPGGEDRTVLEQIKNQNLDVKSIVALRSLYARAFFARLWVAQELHAGCRNTIVQCGNNVVPWTLFRQGSLELNYSLESSTWRYVFGTHKVSYLCDPVGNLTTMGVMSRYSSRECTDDRDRVYGLMSLLPQTISRGISVDYQDMVSQSVFTDLFILCLKQEQRLSQLAYGWRDDAVPSQTRTSAWPSWLPNWSYKSLSTRFVDLGYCSSSITAAYAAYREPGYLDIAGIKLGTVSNVEKRLNPGSAITSLLKHLNGQGLDRLNEIRYPTGSTFLEAYLRSYMGDRFKDRFPYDRSFIPYQVFKNTIMASAFSNEQRNQTFTSENKSYFSPKMKRAAMSMEGSILFTLSNKYIGKSFTPLSPGDEVFVVLGCDLPMILRPLPHEKHYQVVGPCYVQGMMHGEALLGNLNRPWVVQVPLDEDGKPRCQFKNTETGLFTSDDPRLGGIPIPEEWEPIDFEWTTADPIYIKKFRNKNTGEVINSDPRLSPEALEARGIQLETITLV

SEQ ID NO: 35468 - DNA, 2377 bp, Muscodor strobelii; identical to SEQ ID NO: 35465
  misc_feature: SGI EST ID NO. CUFF.84588.1
  misc_feature: Variant of the nucleotide sequence at SEQ ID NO 35466

SEQ ID NO: 35469 - DNA, 1596 bp, Muscodor strobelii
  misc_feature: SGI cDNA ID NO. 572282
  misc_feature: Encodes the peptide sequence at SEQ ID NO 35470
atgacgcttgtatttgcttccagtctcggcaagttggttcagtcccagttcggagtcaacgagatagcatcatgcatcgccgtcgggcgcgaaattgggtcggtgctgacgcgaaaatccgacgctggcatatttcgtcctcttacagctcagtacggcctctttgtccgtccaattcccccatacttggagacgttccaatttgaccgtgtcggtactatttatgggagtaaccagagagccatcaaagcgccgaatctcttggaagatgtgtccctagactcggtggacggaatcgcgactttgttggtgctcgtcctccgccatgtcgagtctcctatcgacatagtacagtcgattgaagacttactcaagggacaattttggattgttgggcgggccagctccgaggcttcgcccggacctggtttattaccctttgctctccgatctactctgagaaccttcgtcaatgctgtcattgatgccgacgcggactctatgcaaaataacactttccgcaacttgatggcccgtttagtggccgtagtcggaaatgccgggttcgactcgtcgccgggaagccttgcgcagagtgagcaggggagattcatttcctgtttccttggagatcctcagagccgagctgctgtgggcgcctgcacgtctgatttcgacacgttttccgccagagccctcatgattgctcttgcgtgcgctgccaacggtgctaggatcttagttcaatgcatgacaaaggccgcagccccgatcatcatcgcaaaccccacggagtcctcacagactcgcaagaacttctttgtatgtacattatggttaatgcaaccctcatcagagatcgctcgatctattcacgcctgtcggacacctaaagaaccccaggccggagccagctctgccggtccagcaagcctcactatatttggaggtgatttggaggtcgcaaggatggtatcggcacagctacatctttttgccaccgaggaagagcaacttgcgttgtggatggctggtgtacgatatggacgtggttcggggattgaagtaacacagagtctacagctctgttttagaagacagactatcggcgatgatgattctgccaaaattccttcgagtcttgtgaagagagttgataactacgtgaagagagctgatcactatatgtggaatcggcacaacgctgttgcatcgctactccacaaaaccctcgcatattctcaatacgacgacttgactttgctagaaaccaacttgcgggctatgatagatctcatctacatagccatgttgacaggctgggtcggcagtcttgccactgaatccagtcaacattgtggctatgcctggacggccaaacctggtcaaatgataagtgatgcttcgaagctggagggcttgggccttacaactgatcaaatcctgatcatcgcatcttcaatctggggcggcggcatgcatctcccgtggtttgtcttgacagaggtccagggcgtgctagaaagcctcaatgagggtgggctcttcggagttgtcagccataacgttgaggtcgtagtggataagttggaatag

SEQ ID NO: 35470 - protein, 531 aa, Muscodor strobelii
  misc_feature: SGI Peptide ID NO. 572282
  misc_feature (1)..(491): NCBI GI: 46127765 Blast Desc: FG08260.1 [Gibberella zeae PH-1]
  misc_feature (12)..(416): NCBI GI: 46127769 Blast Desc: FG08262.1 [Gibberella zeae PH-1]
  misc_feature (16)..(491): NCBI GI: 46127767 Blast Desc: FG08261.1 [Gibberella zeae PH-1]
MTLVFASSLGKLVQSQFGVNEIASCIAVGREIGSVLTRKSDAGIFRPLTAQYGLFVRPIPPYLETFQFDRVGTIYGSNQRAIKAPNLLEDVSLDSVDGIATLLVLVLRHVESPIDIVQSIEDLLKGQFWIVGRASSEASPGPGLLPFALRSTLRTFVNAVIDADADSMQNNTFRNLMARLVAVVGNAGFDSSPGSLAQSEQGRFISCFLGDPQSRAAVGACTSDFDTFSARALMIALACAANGARILVQCMTKAAAPIIIANPTESSQTRKNFFVCTLWLMQPSSEIARSIHACRTPKEPQAGASSAGPASLTIFGGDLEVARMVSAQLHLFATEEEQLALWMAGVRYGRGSGIEVTQSLQLCFRRQTIGDDDSAKIPSSLVKRVDNYVKRADHYMWNRHNAVASLLHKTLAYSQYDDLTLLETNLRAMIDLIYIAMLTGWVGSLATESSQHCGYAWTAKPGQMISDASKLEGLGLTTDQILIIASSIWGGGMHLPWFVLTEVQGVLESLNEGGLFGVVSHNVEVVVDKLE

SEQ ID NO: 35471 - DNA, 2241 bp, Muscodor strobelii
  misc_feature: SGI EST ID NO. CUFF.84510.2
  misc_feature: Variant of the nucleotide sequence at SEQ ID NO 35469
ctcgcagtcaataccaactcgaggaaatgttatctacatatgtattgttgaagaagacaactggctggatcatgcttgacacttgcatacatgtatgattgatggaagtcttctcaacaacctaatgcgggcatgatggagtgagtacctacatggacttaaacgttcgcgctcaccatttcatgttgctattaattgctgaccctcgatatctgccctacctatactttcagaaaatgcaatgtcgaggaatatgcgcgtctcataaaaccacttccagagtatggcattgaaggtttgccttccatacagtcgcgctgacgttacggtatctagctaaagccagcgcggcacaattggagaacttctatttgacgagctagcagtgtttcctcagctctcgaggcatatttcgaggcagccatgtaccaacgcatactaatccatgttgcaacatctactgatccggacgacgcacatttcactccaaattccagcagcgtgtgagacttttcaagcattcaagaatgacgcttgtatttgcttccagtctcggcaagttggttcagtcccagttcggagtcaacgagatagcatcatgcatcgccgtcgggcgcgaaattgggtcggtgctgacgcgaaaatccgacgctggcatatttcgtcctcttacagctcagtacggcctctttgtccgtccaattcccccatacttggagacgttccaatttgaccgtgtcggtactatttatgggagtaaccagagagccatcaaagcgccgaatctcttggaagatgtgtccctagactcggtggacggaatcgcgactttgttggtgctcgtcctccgccatgtcgagtctcctatcgacatagtacagtcgattgaagacttactcaagggacaattttggattgttgggcgggccagctccgaggcttcgcccggacctggtttattaccctttgctctccgatctactctgagaaccttcgtcaatgctgtcattgatgccgacgcggactctatgcaaaataacactttccgcaacttgatggcccgtttagtggccgtagtcggaaatgccgggttcgactcgtcgccgggaagccttgcgcagagtgagcaggggagattcatttcctgtttccttggagatcctcagagccgagctgctgtgggcgcctgcacgtctgatttcgacacgttttccgccagagccctcatgattgctcttgcgtgcgctgccaacggtgctaggatcttagttcaatgcatgacaaaggccgcagccccgatcatcatcgcaaaccccacggagtcctcacagactcgcaagaacttctttgtatgtacattatggttaatgcaaccctcatcagagatcgctcgatctattcacgcctgtcggacacctaaagaaccccaggccggagccagctctgccggtccagcaagcctcactatatttggaggtgatttggaggtcgcaaggatggtatcggcacagctacatctttttgccaccgaggaagagcaacttgcgttgtggatggctggtgtacgatatggacgtggttcggggattgaagtaacacagagtctacagctctgttttagaagacagactatcggcgatgatgattctgccaaaattccttcgagtcttgtgaagagagttgataactacgtgaagagagctgatcactatatgtggaatcggcacaacgctgttgcatcgctactccacaaaaccctcgcatattctcaatacgacgacttgactttgctagaaaccaacttgcgggctatgatagatctcatctacatagccatgttgacaggctgggtcggcagtcttgccactgaatccagtcaacattgtggctatgcctggacggccaaacctggtcaaatgataagtgatgcttcgaagctggagggcttgggccttacaactgatcaaatcctgatcatcgcatcttcaatctggggcggcggcatgcatctcccgtggtttgtcttgacagaggtccagggcgtgctagaaagcctcaatgagggtgggctcttcggagttgtcagccataacgttgaggtcgtagtggataagttggaataggtgaatgaaaaggaaaaaagaaaggactaaagtgggctatagctcttttatatttaatcatttttttagagttttgtgctaaagcattaaaggctttgcttttttggatgactatttg

SEQ ID NO: 35472 - DNA, 897 bp, Muscodor strobelii
  misc_feature: SGI cDNA ID NO. 572283
  misc_feature: Elevated expression when VOC is produced
  misc_feature: Encodes the peptide sequence at SEQ ID NO 35473
atgattgctcttgcgtgcgctgccaacggtgctaggatcttagttcaatgcatgacaaaggccgcagccccgatcatcatcgcaaaccccacggagtcctcacagactcgcaagaacttctttgtatgtacattatggttaatgcaaccctcatcagagatcgctcgatctattcacgcctgtcggacacctaaagaaccccaggccggagccagctctgccggtccagcaagcctcactatatttggaggtgatttggaggtcgcaaggatggtatcggcacagctacatctttttgccaccgaggaagagcaacttgcgttgtggatggctggtgtacgatatggacgtggttcggggattgaagtaacacagagtctacagctctgttttagaagacagactatcggcgatgatgattctgccaaaattccttcgagtcttgtgaagagagttgataactacgtgaagagagctgatcactatatgtggaatcggcacaacgctgttgcatcgctactccacaaaaccctcgcatattctcaatacgacgacttgactttgctagaaaccaacttgcgggctatgatagatctcatctacatagccatgttgacaggctgggtcggcagtcttgccactgaatccagtcaacattgtggctatgcctggacggccaaacctggtcaaatgataagtgatgcttcgaagctggagggcttgggccttacaactgatcaaatcctgatcatcgcatcttcaatctggggcggcggcatgcatctcccgtggtttgtcttgacagaggtccagggcgtgctagaaagcctcaatgagggtgggctcttcggagttgtcagccataacgttgaggtcgtagtggataagttggaatag

SEQ ID NO: 35473 - protein, 298 aa, Muscodor strobelii
  misc_feature: SGI Peptide ID NO. 572283
  misc_feature (9)..(183): NCBI GI: 46127769 Blast Desc: FG08262.1 [Gibberella zeae PH-1]
  misc_feature: Useful for introducing or modulating the production of volatile compounds
MIALACAANGARILVQCMTKAAAPIIIANPTESSQTRKNFFVCTLWLMQPSSEIARSIHACRTPKEPQAGASSAGPASLTIFGGDLEVARMVSAQLHLFATEEEQLALWMAGVRYGRGSGIEVTQSLQLCFRRQTIGDDDSAKIPSSLVKRVDNYVKRADHYMWNRHNAVASLLHKTLAYSQYDDLTLLETNLRAMIDLIYIAMLTGWVGSLATESSQHCGYAWTAKPGQMISDASKLEGLGLTTDQILIIASSIWGGGMHLPWFVLTEVQGVLESLNEGGLFGVVSHNVEVVVDKLE

SEQ ID NO: 35474 - DNA, 2241 bp, Muscodor strobelii; identical to SEQ ID NO: 35471
  misc_feature: SGI EST ID NO. CUFF.84510.2
  misc_feature: Variant of the nucleotide sequence at SEQ ID NO 35472

SEQ ID NO: 35475 - DNA, 2691 bp, Muscodor strobelii
  misc_feature: SGI cDNA ID NO. 572284
  misc_feature: Encodes the peptide sequence at SEQ ID NO 35476
atggcgccgccagcaaagcgccgcagacggaacgtggttcaagaatccgatgatgaagacgaccaagggaagcctgccgtcaacactttggccaactacttgttctcttcgcctgatgcaaaatccaatgatgctgcaacaaacttaccgtctccaagccctgttcggaagtccttgcgttcaaccagtactcagccctcgaagcctgccgcaaaaccgcttcgttcacatacccttaatagcaccaacacgaaaaatggagtcaagagcgccagcggaagcccggaaaaggcgaggaatcaaccacctccgaagggaaaggcggtcgagaaaggtaaaacagccgatcttgtgacattgttctccaagcaagccgaacgagccgccagcaaaccgacaacccgaatagacgatatcacaagcgaccccatatcagacgaagacgatgtcggggcgcacagagccgccactgccagccacgtaggcttagctgctcggaagcgctttggcatccagtctaccgccagcaatgctgcgaccgcaacgacaacgggccagagattcatgcgaccccctggtactgcaactgtagcgcagcccccggcgatagatgatgacgaccagcgaccatggtcagagagattcggcccaagagctttgtcagaactagcagtacacaagaaaaaggtctccgatgtgagaatgtggttggataatgttctcgcgggtcggatacggcaacgtttgcttattctgaagggtgcagcgggaaccggtaagaccaccactttgagactacttgccaaagagatgggatgcgaattgctcgagtggcggaatcccacgggctcgtacggagggctaggatatcagtctgcttctgcacaatttgacgagttcttgggcagagggggcaagttctctcagctcgacatcgggctggaggatcctgagccccgtacaattgagaacagggacgcaacccggaagataatccttatcgaggagttcccgaatacctttgctcggtcatccactgccatgacgtctttccgaaacgtcgtgttatcattcttagcgacaaatacaccatcgctgaacttattctccagagggcctcctcccgagccaataataccagtcgtcatggtaatatcagaaaccctattaacaactacttcggcatcggccgacagcttcacagcgcaccgactactcggtccggaaatcaatcgccaccccggtacatgtatcatcgaattcaatgctattgcgccgactctgctgtctgccgctctagagctcatcgtacagaaagaagcaaagaagtcgggccggcggcggatgccgggtcccctcgttctcaagagattgggcgagatcggagatatcaggagtgctatatcgtcacttcaattcctctgcttgaagggcgatgccgacgcggactggggcgcccaagtcgcccttgggaaaccgaagcgctctatcaaaacctcggtagcgcttacacaaggagaggtcgagactctacagatggtctcacagcgagaagcgagcttagggatattccatgcagtgggaaaagtcgtgtacaataaaagggtcgagacaccactcgacccagatacaccagaaggcgaagctgagatactgccagattacttgactcattgttgcaggccaagaaaatctgaaatctcggtcgacagtctgattgatgaaacgggcacagacacgcataccttcatctccgcgcttcacgagaactacatattgtcgtgtgagccatccacttcacttgatgcggactcattcctagactacatgggtgggtgtatcgactatctgtctgagagcgaccttctctgtccgtcatgggacatattcttcggcgggcggagcaccggatcatggggatcatcgagtcgagactcagctagccacgtgctacgacaagaagagatcactttccaagttgcgactcgcggtctactttattcactcccgagcccggtgaaacgtgcgtccaccggacctaggcggggcggcggagatcagttcaagatgttttatcctacaagcctcaagctatggcgggagaaagaagaactcgaggggcttgtcgatcattggtctacgatactactaaagggtgacgaagccggacagaacgtcacagaaggcgcatctgcattcagaagaccaaaatcgacaaacaccactggccagtggcttggcacacagacacagggctcccaacggagcttcacgagttcgaaatctgtcgaacaaaatcaaacgaataatgagaatcactcaacacctctactgtccctcggcagcgccgcgcggcgtgaactactgttagaacgtctgccatatatggctaatatcctacgtcggcggcggggcccaggctctaataccagactcaaagagatcgagaagatgatatcattctctgggatcggcgcaacaggcgatgaagatcctgcggacgtagatgagactcaaggggacgatatgaaagaggcgtgggctactgatagaccaacagaggaacgaagcccacggaagaagatgcctagttggaggcagaataaagaggctgctgcgtctgctgttcctgcgcctgtgactgcagtacagaaactagtgcttagcgatgatgatattgaggatgattaa

SEQ ID NO: 35476 - protein, 896 aa, Muscodor strobelii
  misc_feature: SGI Peptide ID NO. 572284
  misc_feature (203)..(677): Pfam Id: PF03215 Pfam Desc: Rad17 cell cycle checkpoint protein
  misc_feature (203)..(282): Pfam Id: PF03215 Pfam Desc: Rad17 cell cycle checkpoint protein
  misc_feature (290)..(535): Pfam Id: PF03215 Pfam Desc: Rad17 cell cycle checkpoint protein
  misc_feature (1)..(895): NCBI GI: 46108176 Blast Desc: FG00970.1 [Gibberella zeae PH-1]
  misc_feature (1)..(895): NCBI GI: 256734476 Blast Desc: NECHADRAFT_74780 [Nectria haematococca mpVI 77-13-4]
  misc_feature (1)..(895): NCBI GI: 85112300 Blast Desc: NCU00517 [Neurospora crassa OR74A] gi|28926098|gb|EAA35085.1| [Neurospora crassa OR74A]
  misc_feature (1)..(889): NCBI GI: 261357379 Blast Desc: cell cycle checkpoint protein RAD17 [Verticillium albo-atrum VaMs.102]
  misc_feature (2)..(896): NCBI GI: 171684761 Blast Desc: protein product [Podospora anserina] gi|170942341|emb|CAP67993.1| protein product [Podospora anserina]
  misc_feature (239)..(896): NCBI GI: 145614464 Blast Desc: MGG_11365 [Magnaporthe grisea 70-15] gi|145021385|gb|EDK05514.1| MGG_11365 [Magnaporthe grisea 70-15]
  misc_feature (174)..(896): NCBI GI: 116192441 Blast Desc: CHGG_05938 [Chaetomium globosum CBS 148.51] gi|88181851|gb|EAQ89319.1| CHGG_05938 [Chaetomium globosum CBS 148.51]
  misc_feature (1)..(896): NCBI GI: 156063288 Blast Desc: SS1G_01760 [Sclerotinia sclerotiorum 1980] gi|154697096|gb|EDN96834.1| SS1G_01760 [Sclerotinia sclerotiorum 1980]
  misc_feature (1)..(896): NCBI GI: 154319373 Blast Desc: BC1G_02638 [Botryotinia fuckeliana B05.10] gi|150857069|gb|EDN32261.1| BC1G_02638 [Botryotinia fuckeliana B05.10]
  misc_feature (118)..(852): NCBI GI: 169602593 Blast Desc: SNOG_04300 [Phaeosphaeria nodorum SN15] gi|111066940|gb|EAT88060.1| SNOG_04300 [Phaeosphaeria nodorum SN15]
MAPPAKRRRRNVVQESDDEDDQGKPAVNTLANYLFSSPDAKSNDAATNLPSPSPVRKSLRSTSTQPSKPAAKPLRSHTLNSTNTKNGVKSASGSPEKARNQPPPKGKAVEKGKTADLVTLFSKQAERAASKPTTRIDDITSDPISDEDDVGAHRAATASHVGLAARKRFGIQSTASNAATATTTGQRFMRPPGTATVAQPPAIDDDDQRPWSERFGPRALSELAVHKKKVSDVRMWLDNVLAGRIRQRLLILKGAAGTGKTTTLRLLAKEMGCELLEWRNPTGSYGGLGYQSASAQFDEFLGRGGKFSQLDIGLEDPEPRTIENRDATRKIILIEEFPNTFARSSTAMTSFRNVVLSFLATNTPSLNLFSRGPPPEPIIPVVMVISETLLTTTSASADSFTAHRLLGPEINRHPGTCIIEFNAIAPTLLSAALELIVQKEAKKSGRRRMPGPLVLKRLGEIGDIRSAISSLQFLCLKGDADADWGAQVALGKPKRSIKTSVALTQGEVETLQMVSQREASLGIFHAVGKVVYNKRVETPLDPDTPEGEAEILPDYLTHCCRPRKSEISVDSLIDETGTDTHTFISALHENYILSCEPSTSLDADSFLDYMGGCIDYLSESDLLCPSWDIFFGGRSTGSWGSSSRDSASHVLRQEEITFQVATRGLLYSLPSPVKRASTGPRRGGGDQFKMFYPTSLKLWREKEELEGLVDHWSTILLKGDEAGQNVTEGASAFRRPKSTNTTGQWLGTQTQGSQRSFTSSKSVEQNQTNNENHSTPLLSLGSAARRELLLERLPYMANILRRRRGPGSNTRLKEIEKMISFSGIGATGDEDPADVDETQGDDMKEAWATDRPTEERSPRKKMPSWRQNKEAAASAVPAPVTAVQKLVLSDDDIEDD

SEQ ID NO: 35477 - DNA, 3856 bp, Muscodor strobelii
  misc_feature: SGI EST ID NO. CUFF.84517.0
  misc_feature: Variant of the nucleotide sequence at SEQ ID NO 35475
ctcgtccgtgcagcaggtaccagatgcagcacaggtctgttgtcgcctgatgtcatcaaaacaacttcacctcgctctttccttgatccaatgccgctcttgtcgaattgggatggcgtactctgaggacgtgcattgaaccgaacgcctggcttcaaatgctgctcctgcatccattgcatctccggaatggcgccgccagcaaagcgccgcagacggaacgtggttcaagaatccgatgatgaagacgaccaagggaagcctgccgtcaacactttggccaactacttgttctcttcgcctgatgcaaaatccaatgatgctgcaacaaacttaccgtctccaagccctgttcggaagtccttgcgttcaaccagtactcagccctcgaagcctgccgcaaaaccgcttcgttcacatacccttaatagcaccaacacgaaaaatggagtcaagagcgccagcggaagcccggaaaaggcgaggaatcaaccacctccgaagggaaaggcggtcgagaaaggtaaaacagccgatcttgtgacattgttctccaagcaagccgaacgagccgccagcaaaccgacaacccgaatagacgatatcacaagcgaccccatatcagacgaagacgatgtcggggcgcacagagccgccactgccagccacgtaggcttagctgctcggaagcgctttggcatccagtctaccgccagcaatgctgcgaccgcaacgacaacgggccagagattcatgcgaccccctggtactgcaactgtagcgcagcccccggcgatagatgatgacgaccagcgaccatggtcagagagattcggcccaagagctttgtcagaactagcagtacacaagaaaaaggtctccgatgtgagaatgtggttggataatgttctcgcgggtcggatacggcaacgtttgcttattctgaagggtgcagcgggaaccggtaagaccaccactttgagactacttgccaaagagatgggatgcgaattgctcgagtggcggaatcccacgggctcgtacggagggctaggatatcagtctgcttctgcacaatttgacgagttcttgggcagagggggcaagttctctcagctcgacatcgggctggaggatcctgagccccgtacaattgagaacagggacgcaacccggaagataatccttatcgaggagttcccgaatacctttgctcggtcatccactgccatgacgtctttccgaaacgtcgtgttatcattcttagcgacaaatacaccatcgctgaacttattctccagagggcctcctcccgagccaataataccagtcgtcatggtaatatcagaaaccctattaacaactacttcggcatcggccgacagcttcacagcgcaccgactactcggtccggaaatcaatcgccaccccggtacatgtatcatcgaattcaatgctattgcgccgactctgctgtctgccgctctagagctcatcgtacagaaagaagcaaagaagtcgggccggcggcggatgccgggtcccctcgttctcaagagattgggcgagatcggagatatcaggagtgctatatcgtcacttcaattcctctgcttgaagggcgatgccgacgcggactggggcgcccaagtcgcccttgggaaaccgaagcgctctatcaaaacctcggtagcgcttacacaaggagaggtcgagactctacagatggtctcacagcgagaagcgagcttagggatattccatgcagtgggaaaagtcgtgtacaataaaagggtcgagacaccactcgacccagatacaccagaaggcgaagctgagatactgccagattacttgactcattgttgcaggccaagaaaatctgaaatctcggtcgacagtctgattgatgaaacgggcacagacacgcataccttcatctccgcgcttcacgagaactacatattgtcgtgtgagccatccacttcacttgatgcggactcattcctagactacatgggtgggtgtatcgactatctgtctgagagcgaccttctctgtccgtcatgggacatattcttcggcgggcggagcaccggatcatggggatcatcgagtcgagactcagctagccacgtgctacgacaagaagagatcactttccaagttgcgactcgcggtctactttattcactcccgagcccggtgaaacgtgcgtccaccggacctaggcggggcggcggagatcagttcaagatgttttatcctacaagcctcaagctatggcgggagaaagaagaactcgaggggcttgtcgatcattggtctacgatactactaaagggtgacgaagccggacagaacgtcacagaaggcgcatctgcattcagaagaccaaaatcgacaaacaccactggccagtggcttggcacacagacacagggctcccaacggagcttcacgagttcgaaatctgtcgaacaaaatcaaacgaataatgagaatcactcaacacctctactgtccctcggcagcgccgcgcggcgtgaactactgttagaacgtctgccatatatggctaatatcctacgtcggcggcggggcccaggctctaataccagactcaaagagatcgagaagatgatatcattctctgggatcggcgcaacaggcgatgaagatcctgcggacgtagatgagactcaaggggacgatatgaaagaggcgtgggctactgatagaccaacagaggaacgaagcccacggaagaagatgcctagttggaggcagaataaagaggctgctgcgtctgctgttcctgcgcctgtgactgcagtacagaaactagtgcttagcgatgatgatattgaggatgattaataagggaacatatgcattgctggaggtataggattgtgcttggtgtttggtgttcgggtttgctgggataaaggcgtggggatctgtgggaataggggtaaagcattccatcatatcttccacggtcagcaaataagtcagtaattgagacaagagaacacatgtatatgtgtccaaatgatctacaacatcagattcaacccttctattccctttgctctcgctattctccataccctgattcgatccctcgacaacctcaattgggctcatcatgaaacccctcactcaccatgtcccacgaacactccgacctagcttctgccactactggctttcgtccaacaatagtgtaatgcgaccatcctaaccaagaaccctcacacgtctgctgacaaacagccggcataagcgctctgacctccctgtccctctcctcatccccagagttacgcgcaatgatatcgtggagagacaaattacattcatagaacgctatctccaagtgcgcaggtggcttacatcgcacatccgtcttgacggagcagaatccgtggttttggagtcggcgggctagggtgcgcatccatgttgactgtaggcgattgtcgagttgcaggctagtgtgatagagattccatgatggcgcgttgtggggacgggcgatggacccttcgtaccggatgtaggaggggtctatgtctcgccattggatgtatccgcctggttctgtggggggttgattgttagagcttgggtttgaaggtgtgaggcttaaggttgggagtgtttgagggtactgtagggagataaaggagacgtacttaggagagtccagaggtttgtgataacgcgtgttacttcacaatgctcgagagactttgactggtgttcgtgcaggagtagggataagttagagacgtggattatgtcgtatactccttggagttctggtgggacagattccttgatgtcg

SEQ ID NO: 35478 - DNA, 1140 bp, Muscodor strobelii
  misc_feature: SGI cDNA ID NO. 572285
  misc_feature: Encodes the peptide sequence at SEQ ID NO 35479
atggtccaagagatcaacatccttattcataagctccttgatactaccagtagaataggttccaaacgcatcgtaaacgtcgcggagcatttcaaatatttaggatacgatgtcgtcgggcatcttgcttttggatatccactaaaacttcagacagatcagacgaatcgctttgtcgccaaggcaaatgcgctggggaattatcgcatgaatgcatacatgcagtggccgctactccgttacttgaggatagagcgactctttgatctcatgccaaattccctccgcacaaggcttcttagcctaatcgaaaagatgatcaaaacacgtctaacacaggccacggacgcgagacgggacctttactattacgtcgcagaggacttcagcacagattcggcaggtgttcggctaggcaacttgtggagcgaggcggtgttctttattcctgcaggtggcgatacaacgtcaacagctctgtcggctcttttcttctacctatctcgaaataaaaggtgctattgcagacttgcggaagaaatccgcacaaagttcaatgatggagcagaaatttgtggcggtcctgagctttcttcttgtcgatatcttcgtgcgtgcatcgatgaggctcttcgcatgtctccacctgttcccggcaccctgtggcgcgagtttgcaggagacactggcgaaacctgggtcattgatgggcattgcatcccaactggcacgaaggtcggtgtcaatacctatgccttgcatcacaatgaaaaatattttccagaaccattcacctttgtccccgaaagatggttagaagatgagacgccatattctcaattgtcaaacaaagatatacaagatgcatttgccgccttctctgcaggtcctcgagggtgtgcgggaaaagcaatggcgtatctcgaggcaagtttagttgttgctcgtatactatggaatttcgatttcgaggtagcgcctggtcaaccaggcaagttaggggctggaatgagtggcgccgcagatggtaggaggaaagagtcggaatatcagttatacgatgtgttcatttccattcatgctggaccaaacctgatattcaacctacgcgaaaaattccctgcgaacgcaaactcctga

SEQ ID NO: 35479 - protein, 379 aa, Muscodor strobelii
  misc_feature: SGI Peptide ID NO. 572285
  misc_feature (2)..(354): Pfam Id: PF00067 Pfam Desc: Cytochrome P450
  misc_feature (151)..(332): Pfam Id: PF00067 Pfam Desc: Cytochrome P450
  misc_feature (56)..(373): NCBI GI: 156056276 Blast Desc: SS1G_05490 [Sclerotinia sclerotiorum 1980] gi|154703274|gb|EDO03013.1| SS1G_05490 [Sclerotinia sclerotiorum 1980]
  misc_feature (26)..(370): NCBI GI: 145241738 Blast Desc: An09g02000 [Aspergillus niger] gi|134078055|emb|CAK40138.1| protein product [Aspergillus niger]
  misc_feature (33)..(371): NCBI GI: 238845959 Blast Desc: benzoate 4-monooxygenase cytochrome P450 [Microsporum canis CBS 113480]
  misc_feature (26)..(371): NCBI GI: 169603764 Blast Desc: SNOG_04890 [Phaeosphaeria nodorum SN15] gi|111066161|gb|EAT87281.1| SNOG_04890 [Phaeosphaeria nodorum SN15]
  misc_feature (73)..(373): NCBI GI: 156060449 Blast Desc: SS1G_02363 [Sclerotinia sclerotiorum 1980] gi|154699771|gb|EDN99509.1| SS1G_02363 [Sclerotinia sclerotiorum 1980]
  misc_feature (26)..(370): NCBI GI: 258572362 Blast Desc: conserved [Uncinocarpus reesii 1704] gi|237905213|gb|EEP79614.1| conserved [Uncinocarpus reesii 1704]
  misc_feature (26)..(371): NCBI GI: 145256217 Blast Desc: An10g00660 [Aspergillus niger CBS 513.88] gi|134078632|emb|CAK40505.1| protein product [Aspergillus niger]
  misc_feature (26)..(370): NCBI GI: 121710976 Blast Desc: benzoate 4-monooxygenase cytochrome P450 [Aspergillus clavatus NRRL 1] gi|119401254|gb|EAW11678.1| benzoate 4-monooxygenase cytochrome P450 [Aspergillus clavatus NRRL 1]
  misc_feature (26)..(371): NCBI GI: 242771379 Blast Desc: cytochrome P450, [Talaromyces stipitatus ATCC 10500] gi|218721449|gb|EED20867.1| cytochrome P450, [Talaromyces stipitatus ATCC 10500]
  misc_feature (26)..(375): NCBI GI: 85092131 Blast Desc: NCU06895 [Neurospora crassa OR74A] gi|28920645|gb|EAA30006.1| conserved [Neurospora crassa OR74A]
MVQEINILIHKLLDTTSRIGSKRIVNVAEHFKYLGYDVVGHLAFGYPLKLQTDQTNRFVAKANALGNYRMNAYMQWPLLRYLRIERLFDLMPNSLRTRLLSLIEKMIKTRLTQATDARRDLYYYVAEDFSTDSAGVRLGNLWSEAVFFIPAGGDTTSTALSALFFYLSRNKRCYCRLAEEIRTKFNDGAEICGGPELSSCRYLRACIDEALRMSPPVPGTLWREFAGDTGETWVIDGHCIPTGTKVGVNTYALHHNEKYFPEPFTFVPERWLEDETPYSQLSNKDIQDAFAAFSAGPRGCAGKAMAYLEASLVVARILWNFDFEVAPGQPGKLGAGMSGAADGRRKESEYQLYDVFISIHAGPNLIFNLREKFPANANS

SEQ ID NO: 35480 - DNA, 3333 bp, Muscodor strobelii
  misc_feature: SGI cDNA ID NO. 572286
  misc_feature: Encodes the peptide sequence at SEQ ID NO 35481
atggcggttaatagcatatttgccatccatggcctcaacccccgaagcaaaccagacgtggaccacgcctgggatacgtggcgtacgcctgccggttcaggcggacgactctggcttcgcgacgacctcccttgtcacgtgcccgcttcccgaatcttcctgtatgagtacaacgctaccgctatatacggcaaggacagaaatacattcattggtaaagctagcgaactcctcgaaaatatcagggcggaacgaaaggataatgactcccgtccgatattgtttctgtgtcacagtatgggaggtctgctggttaagcaggccctcatcaatgctcataataaccccaagtatacctctattaagaccgccacctctggactggccttcttcgcaacaccccataacggcggggactggagactggtaagcctcggtggtctcgtcgccaaggtcgcgactgctgcagggttccagaagggcgacggcgtgatggaaatcttaaaacatggcagcatgttctcggacattatgcaagagcattggcgacatcagttgttacagtacaatatcgtttctttctgggggggtttcgatgatgttgttccatgggagagcgcacgacttggtctgccaggggaccgggagagtgtagtgaagttgaatgcagaccatagcggagtatgcaagtttggatcgagccagaatgacgaagacaatttcaaactcgtgcgaatcaacattaaggatatctatgaaagcgcacttcgcaacacctttagtcgaatccagaatgaagaagttattcgaacaacgagtacagccgggtcaacttcgaggcctatagaaagccatcaaaagaaacggcgtcattatataccccttcagaggaacacagagttcaccggacgcgaaagagtcctagaagaactcgaaagaaggctattcattgagaaggagtgccatacacttgctgttatgggacttgggggtgtcggcaagactgcgctcatggtacagttcgcttaccggatcaaagagactcaccccgaatattcagtgctatgggtgccggcgatgagtcatgcaagttttgaatcaggatacgtggagattgctcatgcactcgaagtcaacacagaccccaaagggccggatctaaaagacgcgactcggcgttatctcgaatctgaggaagccggagattggctcctcatcgtagataatgcagacgacatcgaaaccgtcatcggcaataatgcgagcgcaaacagcatatataggtatttaccacggagtgaccgcgggttgaccttatatactacaaggtcaggaaaagtagccgtttcagtcaccagaagcacgccgatatacctgcaacagctgaccgtcaaagaagctgaaacccttctggaaaaaacgatacatgatacgttaatcttagccaataggcggatggtgtcgcttttcctcagcgaaatggtttgccatccattagcattgacgaatgcaatcgcttacctaaatcagaacaaatcgtccattcgaaggtatcttgacctattacacggaccggaggaggacctagtcaagatgatgactgaggagttccacgatagctctggatatccgggttcgcataaggccgttgcgaccacctggatcgtgtcattcgagcagattgcgggttatgatcgccttgccgctcaactgttatctttcgcgtcatgcatcgagcccaaggccataccacgtaccttgcttcacaaagagactgattcagaagtcgaaatggagaatgctctcggcacactctgccaatacgccttcttcgccagacgggacgagagcgacatgttcgacatgcaccccttggtgcatgtggcaacgcgtatctggattcgaaggcatggctatccagaaggagcaatcactagagccattcagcacctcacacagaccttccacatttcttcttatgatgattatgtagctcggcgtcaattgctccaggcgtctttgccgcacgccttgaatgcccttgacaggagtaaggaataccacatgcatacccgatactatcttcttctttatgttggagtgtacttacaatctgagcgaagatacaaagaggccgcgatattatttgaggaggcctacggactgtacctggtggaaaaggctaatcgacctacgaagtttcgaaggttcatcaaggctaaacagccaatgctagcggataaaactctaacattgaagaaccaattaggcatcgaatattgccttgcaagttgctatggtgtcattggacgaagcgatgaggctatcgtgatgctccagccacgcctcaaaatcgccgacgcaaatttgctctctgagcatcccgaccgattggcattgcaacatgcccttgcaaacgcttatctcagatctgggcgagtcgaagaggcgacacaactatccaaacacgtcgtcgatattcgaaaacggatgctggcgggaaacgatcctgagttgctaaactcacaatatacccttgcgggtgcttaccttaaatccgagcgggccaaagaggctatacaactattccaacacgttgtggctattcagaagcagacgctgtcggaaaaggatccagatctattagcttcagaacatgagcttgcgtgcgcttacacctattctgggcgactcgaaaaggctataccactattcgtacacggcgtcgccattcgaaagcagacattagcagaaaacggtcctgatttattaagtactgaatatgggcttgcgtttgcttactatagactcgggcaaatcgacagggctttccaaatgctcgagcacgtcgtcgctattcgagaacagacgctagcggaaaacgatcatagtctattaagttcacaatatgtccttgcccgtgcttgccacgaaaccggccgattcgaaagggctatagaaatgctcgaacacatcgtcgctgtgctgttgcagacgctagtggcaaacgaccttagcctattatgttcacaatatgcccttgcccttgcttatgacgcaaatggccagctcaggaaagcttcttcacttcttgagcacgttatatcgattgaagtaaattctcttttagagaagagtatccgccttgtctcagaaatgcttcttgtgagggtatatatgaagagtagacagtatcgagaagccgtagcgatatatggacagattacacctctaatcaatgagcgtgcagagttcattgaaaggcagaagctcctggcccagccgttgtggagatggcatgcaatgaaagtcgtcgtcaaccttcctcgctga

SEQ ID NO: 35481 - protein, 1110 aa, Muscodor strobelii
  misc_feature: SGI Peptide ID NO. 572286
  misc_feature (315)..(940): NCBI GI: 170940153 Blast Desc: protein product [Podospora anserina]
  misc_feature (278)..(870): NCBI GI: 46118594 Blast Desc: FG04718.1 [Gibberella zeae PH-1]
  misc_feature (43)..(1078): NCBI GI: 171693841 Blast Desc: protein product [Podospora anserina] gi|170946869|emb|CAP73673.1| protein product [Podospora anserina]
  misc_feature (277)..(1075): NCBI GI: 75858936 Blast Desc: AN9426.2 [Aspergillus nidulans FGSC A4] gi|40747678|gb|EAA66834.1| AN9426.2 [Aspergillus nidulans FGSC A4] gi|259486647|tpe|CBF84668.1| TPA: conserved [Aspergillus FGSC
  misc_feature (293)..(1078): NCBI GI: 145235101 Blast Desc: An03g03030 [Aspergillus niger] gi|134057878|emb|CAK44602.1| protein product [Aspergillus niger]
  misc_feature (298)..(1034): NCBI GI: 256722701 Blast Desc: NECHADRAFT_53204 [Nectria haematococca mpVI 77-13-4]
  misc_feature (291)..(1080): NCBI GI: 119472511 Blast Desc: kinesin light chain [Neosartorya fischeri NRRL 181] gi|119406506|gb|EAW16457.1| kinesin light chain [Neosartorya fischeri NRRL 181]
  misc_feature (288)..(1030): NCBI GI: 242799395 Blast Desc: kinesin, [Talaromyces stipitatus ATCC 10500] gi|218716714|gb|EED16135.1| kinesin, [Talaromyces stipitatus ATCC 10500]
  misc_feature (293)..(1075): NCBI GI: 242787670 Blast Desc: kinesin light chain 1 and, [Talaromyces stipitatus ATCC 10500] gi|218721210|gb|EED20629.1| kinesin light chain 1 and, [Talaromyces stipitatus ATCC 10500]
  misc_feature (287)..(1075): NCBI GI: 67517781 Blast Desc: AN1071.2 [Aspergillus nidulans FGSC A4] gi|40747033|gb|EAA66189.1| AN1071.2 [Aspergillus nidulans FGSC A4] gi|259488623|tpe|CBF88209.1| TPA: conserved [Aspergillus FGSC
MAVNSIFAIHGLNPRSKPDVDHAWDTWRTPAGSGGRLWLRDDLPCHVPASRIFLYEYNATAIYGKDRNTFIGKASELLENIRAERKDNDSRPILFLCHSMGGLLVKQALINAHNNPKYTSIKTATSGLAFFATPHNGGDWRLVSLGGLVAKVATAAGFQKGDGVMEILKHGSMFSDIMQEHWRHQLLQYNIVSFWGGFDDVVPWESARLGLPGDRESVVKLNADHSGVCKFGSSQNDEDNFKLVRINIKDIYESALRNTFSRIQNEEVIRTTSTAGSTSRPIESHQKKRRHYIPLQRNTEFTGRERVLEELERRLFIEKECHTLAVMGLGGVGKTALMVQFAYRIKETHPEYSVLWVPAMSHASFESGYVEIAHALEVNTDPKGPDLKDATRRYLESEEAGDWLLIVDNADDIETVIGNNASANSIYRYLPRSDRGLTLYTTRSGKVAVSVTRSTPIYLQQLTVKEAETLLEKTIHDTLILANRRMVSLFLSEMVCHPLALTNAIAYLNQNKSSIRRYLDLLHGPEEDLVKMMTEEFHDSSGYPGSHKAVATTWIVSFEQIAGYDRLAAQLLSFASCIEPKAIPRTLLHKETDSEVEMENALGTLCQYAFFARRDESDMFDMHPLVHVATRIWIRRHGYPEGAITRAIQHLTQTFHISSYDDYVARRQLLQASLPHALNALDRSKEYHMHTRYYLLLYVGVYLQSERRYKEAAILFEEAYGLYLVEKANRPTKFRRFIKAKQPMLADKTLTLKNQLGIEYCLASCYGVIGRSDEAIVMLQPRLKIADANLLSEHPDRLALQHALANAYLRSGRVEEATQLSKHVVDIRKRMLAGNDPELLNSQYTLAGAYLKSERAKEAIQLFQHVVAIQKQTLSEKDPDLLASEHELACAYTYSGRLEKAIPLFVHGVAIRKQTLAENGPDLLSTEYGLAFAYYRLGQIDRAFQMLEHVVAIREQTLAENDHSLLSSQYVLARACHETGRFERAIEMLEHIVAVLLQTLVANDLSLLCSQYALALAYDANGQLRKASSLLEHVISIEVNSLLEKSIRLVSEMLLVRVYMKSRQYREAVAIYGQITPLINERAEFIERQKLLAQPLWRWHAMKVVVNLPR

SEQ ID NO: 35482 - DNA, 1176 bp, Muscodor strobelii
  misc_feature: SGI cDNA ID NO. 572289
  misc_feature: Encodes the peptide sequence at SEQ ID NO 35483
atgcgactgctgaacacttcgacgctgcaactcgagagcttcatcggggacaacacgccgaagtacgctatactgtcccacacgtggggcgacgacgaagtcctcttcgacgacatccatggcggcgatgatcgcagctggaaatgcagggctggggcatcaaaggtgctgagatctgccaagatagcacgcaagaatgggtttgcctacatctggattgataactgctgtattgacaaaggcagcagcgctgagctttctgaggctatcaattctatgtataagtggtacgagaacgcagaagtctgctatgcgtatctctccgatgtaccgtgtcctagagcagatgtcaaggggcggcgaagaatgcagcgtcgttacagcaacagtgtttcattccggaatgaaaggcagagttggaaatatgtcgcgatgagtagaagcaagtggtttaagcgtggatggacagctaacgaagcacagcttcaagaacttatcgcacctcctaaagtcattttcttcggtatgacatggggtaagcttggtgctcgtataagcatggctgaaaggatacaatccatcacgcgcgtcgacttagacgttctctcatgtcggaagcgtcatggtgcctccaaagtactgaagctccactctgtccacagtaagatgctctgggctgctaatcgcgcaacgactcgtccggaagacagagcgtatagcttgatgggcgtgttcgatgtcaatatgccgttgctctatggggaaggggcacttaaggcatttcagcggcttcaggaagaaatcattaagagtaacagtgatcaatcgattctcctttttcagagatctaagcttggctaccttgcaacatcgccagacgacttcgaccacaagggaggtttcaggttcgacccaagcccgataacggaacgatccctgctagacaaaactgttaacgggatcagagtcagtcttgcgctacatgccccaacattcggtaattcttttgggctggtcgagtgcttcttccgcgatgacccgtccagacttgaccgcccggtgattttcctacaccatcgtgagggcgtatattctcgtatggagtatttcggagttgcacggctgaaatacactggagatgggtgtatcatcggcgaaggattttcgctttgttag

SEQ ID NO: 35483 - protein, 391 aa, Muscodor strobelii
  misc_feature: SGI Peptide ID NO. 572289
  misc_feature (22)..(164): Pfam Id: PF06985 Pfam Desc: Heterokaryon incompatibility protein (HET)
  misc_feature (1)..(364): NCBI GI: 256733325 Blast Desc: NECHADRAFT_77285 [Nectria haematococca mpVI 77-13-4]
  misc_feature (1)..(328): NCBI GI: 238493477 Blast Desc: conserved [Aspergillus flavus NRRL3357] gi|220696469|gb|EED52811.1| conserved [Aspergillus flavus NRRL3357]
  misc_feature (1)..(296): NCBI GI: 46107392 Blast Desc: FG00579.1 [Gibberella zeae PH-1]
  misc_feature (1)..(308): NCBI GI: 256722255 Blast Desc: NECHADRAFT_52327 [Nectria haematococca mpVI 77-13-4]
  misc_feature (1)..(278): NCBI GI: 256732895 Blast Desc: NECHADRAFT_18070 [Nectria haematococca mpVI 77-13-4]
  misc_feature (1)..(327): NCBI GI: 169770123 Blast Desc: [Aspergillus oryzae RIB40] gi|83767390|dbj|BAE57529.1| protein product [Aspergillus oryzae]
  misc_feature (1)..(307): NCBI GI: 171688186 Blast Desc: protein product [Podospora anserina] gi|170944055|emb|CAP70165.1| protein product [Podospora anserina]
  misc_feature (1)..(296): NCBI GI: 256733553 Blast Desc: [Nectria haematococca mpVI 77-13-4]
  misc_feature (1)..(288): NCBI GI: 256732223 Blast Desc: NECHADRAFT_93752 [Nectria haematococca mpVI 77-13-4]
  misc_feature (1)..(348): NCBI GI: 256720502 Blast Desc: NECHADRAFT_55867 [Nectria haematococca mpVI 77-13-4]
MRLLNTSTLQLESFIGDNTPKYAILSHTWGDDEVLFDDIHGGDDRSWKCRAGASKVLRSAKIARKNGFAYIWIDNCCIDKGSSAELSEAINSMYKWYENAEVCYAYLSDVPCPRADVKGRRRMQRRYSNSVSFRNERQSWKYVAMSRSKWFKRGWTANEAQLQELIAPPKVIFFGMTWGKLGARISMAERIQSITRVDLDVLSCRKRHGASKVLKLHSVHSKMLWAANRATTRPEDRAYSLMGVFDVNMPLLYGEGALKAFQRLQEEIIKSNSDQSILLFQRSKLGYLATSPDDFDHKGGFRFDPSPITERSLLDKTVNGIRVSLALHAPTFGNSFGLVECFFRDDPSRLDRPVIFLHHREGVYSRMEYFGVARLKYTGDGCIIGEGFSLC

SEQ ID NO: 35484 - DNA, 767 bp, Muscodor strobelii
  misc_feature: SGI EST ID NO. CUFF.84575.0
  misc_feature: Variant of the nucleotide sequence at SEQ ID NO 35482
cggccagctgaaagcgtggcgccgtgcgtcatgcggggtttttcatcatgtgttcttagcccaaggcgaggaaacaaaatagatggaacttgttgctgctctctttcctcacaaatgaatacaattccggcctcgtcgtacccatcatgcgactgctgaacacttcgacgctgcaactcgagagcttcatcggggacaacacgccgaagtacgctatactgtcccacacgtggggcgacgacgaagtcctcttcgacgacatccatggcggcgatgatcgcagctggaaatgcagggctggggcatcaaaggtgctgagatctgccaagatagcacgcaagaatgggtttgcctacatctggattgataactgctgtattgacaaaggcagcagcgctgagctttctgaggctatcaattctatgtataagtggtacgagaacgcagaagtctgctatgcgtatctctccgatgtaccgtgtcctagagcagatgtcaaggggcggcgaagaatgcagcgtcgttacagcaacagtgtttcattccggaatgaaaggcagagttggaaatatgtcgcgatgagtagaagcaagtggtttaagcgtggatggacaggtgagtagcgtaattgttgttgatcatcacgctcgaagtattgactcgccgatttagtatgtgttattttgttttagcagtgggcgcgtcatcggccgaggagcattgtgcatttcactctattctttatccgatccctttaggattggttg

SEQ ID NO: 35485 - DNA, 1485 bp, Muscodor strobelii
  misc_feature: SGI cDNA ID NO. 572290
  misc_feature: Reduced expression when VOC is produced
  misc_feature: Encodes the peptide sequence at SEQ ID NO 35486
atggattcatcggaagatcaggccctcagggacaagatccaggccttatccggtcgcatccagcagcacaagcgcgcccacgaccaaggcgcccgccacggtaccgcctctcgcccgtcattttacatccccctcgcaacccattactcacatctagtttccaatccatcaggttatcatgccggcagaggtgcccatcagccctatcatccctatcatcgacctgacccttactctcgccctacctaccgcggtggttacagaggcggtcgtgccggacaccctacccaccgctcactcgtcctaaatggcgcaaacacaacgcagcgaccctctgacgccagtactacgagcgattccacagacacgaactcggcttacgtcaccaacaacgtgcgcaatcggcagctagtcagaaaagagatctacgatcaggagagccaggaacgagcccagtatgccaaacagctgcgggacgagaagctgcaggtcaccaatctccgagagcaggctaagctcgccagcactgttcaacttcacagcaccagccccgccgccgccgcctctactactaccccgtcggcaaccaaagcgtccaaaccatacgaggtagagatcgatagcgtgcgcttccatatcaccaagaaaggaagtaaactcgtcaaagcacccggtgcgcctgaccttctcgccccccatcccaacctgacaatactgaacctcagcgccatagatgattacaatcctcccagtgccacccccaaggttgctttcttgggtggcgtcaaattctgccgcactaagaacggcaatctggtgcggaacggtgtcgtcaaagcacaccggtacgtatcttggatgcaatacgtttgcatactgacgcatggcagcaacgcccacggtttcaagcgggtcaacgaactctgcaaggacttctcatggaccggtcaatgcgccaaaggctcctattgccactatatccacgatagcactaagacggccatctgccggaagtatcttctcaagggcgagtgtccccgaggtgacaaatgcgatctctcacacgaacctaccgagcagcgcacccctctgtgcattcactacgagaatggcaactgcaacaaccccaactgtgcgtatctccacgctcaacatcctgcggatgctcccatctgccgcgcgtttggcaacactgggtactgcgagaagggcgctgcctgcgacggccgccacgtcttcgagtgtcccgacttcggcaacacaggcaaatgtaaagtcaagggctgcaaacggcctcacattgaacgggcaagtatcatgcgactcgctgctgccaagcaggacgagaacaacgacgtatctagcgatgatgaaagcgtcgataccgacgatgtggactccgacgatgtcgaagagtttattggccaggacgacgacgacttcctcgatttcgctcagcagaaagatttcatcgcttttacatag

SEQ ID NO: 35486 - protein, 494 aa, Muscodor strobelii
  misc_feature: SGI Peptide ID NO. 572290
  misc_feature (331)..(357): Pfam Id: PF00642 Pfam Desc: Zinc finger C-x8-C-x5-C-x3-H type (and similar)
  misc_feature (307)..(330): Pfam Id: PF00642 Pfam Desc: Zinc finger C-x8-C-x5-C-x3-H type (and similar)
  misc_feature (3)..(493): NCBI GI: 171684565 Blast Desc: protein product [Podospora anserina] gi|170942243|emb|CAP67895.1| protein product [Podospora anserina]
  misc_feature (73)..(493): NCBI GI: 145614436 Blast Desc: MGG_04760 [Magnaporthe grisea 70-15] gi|145021361|gb|EDK05490.1| MGG_04760 [Magnaporthe grisea 70-15]
  misc_feature (3)..(494): NCBI GI: 154308824 Blast Desc: BC1G_07940 [Botryotinia fuckeliana B05.10] gi|150852566|gb|EDN27758.1| BC1G_07940 [Botryotinia fuckeliana B05.10]
  misc_feature (3)..(493): NCBI GI: 256735246 Blast Desc: NECHADRAFT_98820 [Nectria haematococca mpVI 77-13-4]
  misc_feature (3)..(493): NCBI GI: 85111349 Blast Desc: NCU03048 [Neurospora crassa OR74A] gi|28925641|gb|EAA34658.1| conserved [Neurospora crassa OR74A]
  misc_feature (4)..(493): NCBI GI: 115401542 Blast Desc: conserved [Aspergillus terreus NIH2624] gi|114190300|gb|EAU32000.1| conserved [Aspergillus terreus NIH2624]
  misc_feature (4)..(493): NCBI GI: 259486862 Blast Desc: TPA: CCCH zinc finger protein (AFU_orthologue; AFUA_8G05480) [Aspergillus nidulans FGSC A4]
  misc_feature (4)..(491): NCBI GI: 121719912 Blast Desc: CCCH zinc finger protein [Aspergillus clavatus NRRL 1] gi|119404866|gb|EAW15228.1| CCCH zinc finger protein [Aspergillus clavatus NRRL 1]
  misc_feature (4)..(469): NCBI GI: 119180084 Blast Desc: CIMG_08712 [Coccidioides immitis RS]
  misc_feature (3)..(493): NCBI GI: 46107258 Blast Desc: FG00512.1 [Gibberella zeae PH-1]
  misc_feature: Useful for introducing or modulating the production of volatile compounds
MDSSEDQALRDKIQALSGRIQQHKRAHDQGARHGTASRPSFYIPLATHYSHLVSNPSGYHAGRGAHQPYHPYHRPDPYSRPTYRGGYRGGRAGHPTHRSLVLNGANTTQRPSDASTTSDSTDTNSAYVTNNVRNRQLVRKEIYDQESQERAQYAKQLRDEKLQVTNLREQAKLASTVQLHSTSPAAAASTTTPSATKASKPYEVEIDSVRFHITKKGSKLVKAPGAPDLLAPHPNLTILNLSAIDDYNPPSATPKVAFLGGVKFCRTKNGNLVRNGVVKAHRYVSWMQYVCILTHGSNAHGFKRVNELCKDFSWTGQCAKGSYCHYIHDSTKTAICRKYLLKGECPRGDKCDLSHEPTEQRTPLCIHYENGNCNNPNCAYLHAQHPADAPICRAFGNTGYCEKGAACDGRHVFECPDFGNTGKCKVKGCKRPHIERASIMRLAAAKQDENNDVSSDDESVDTDDVDSDDVEEFIGQDDDDFLDFAQQKDFIAFT

SEQ ID NO: 35487 - DNA, 1816 bp, Muscodor strobelii
  misc_feature: SGI EST ID NO. CUFF.84652.2
  misc_feature: Variant of the nucleotide sequence at SEQ ID NO 35485
attttcattcctacaacacaaaccccagattttgatctcccattactcaccaagttcattcattcaagtattgcgcatcagacacctgccactctgaatcacctatcacaatcactcacacacatagtccaacgtcatggattcatcggaagatcaggccctcagggacaagatccaggccttatccggtcgcatccagcagcacaagcgcgcccacgaccaaggcgcccgccacggttatcatgccggcagaggtgcccatcagccctatcatccctatcatcgacctgacccttactctcgccctacctaccgcggtggttacagaggcggtcgtgccggacaccctacccaccgctcactcgtcctaaatggcgcaaacacaacgcagcgaccctctgacgccagtactacgagcgattccacagacacgaactcggcttacgtcaccaacaacgtgcgcaatcggcagctagtcagaaaagagatctacgatcaggagagccaggaacgagcccagtatgccaaacagctgcgggacgagaagctgcaggtcaccaatctccgagagcaggctaagctcgccagcactgttcaacttcacagcaccagccccgccgccgccgcctctactactaccccgtcggcaaccaaagcgtccaaaccatacgaggtagagatcgatagcgtgcgcttccatatcaccaagaaaggaagtaaactcgtcaaagcacccgatgattacaatcctcccagtgccacccccaaggttgctttcttgggtggcgtcaaattctgccgcactaagaacggcaatctggtgcggaacggtgtcgtcaaagcacaccgcaacgcccacggtttcaagcgggtcaacgaactctgcaaggacttctcatggaccggtcaatgcgccaaaggctcctattgccactatatccacgatagcactaagacggccatctgccggaagtatcttctcaagggcgagtgtccccgaggtgacaaatgcgatctctcacacgaacctaccgagcagcgcacccctctgtgcattcactacgagaatggcaactgcaacaaccccaactgtgcgtatctccacgctcaacatcctgcggatgctcccatctgccgcgcgtttggcaacactgggtactgcgagaagggcgctgcctgcgacggccgccacgtcttcgagtgtcccgacttcggcaacacaggcaaatgtaaagtcaagggctgcaaacggcctcacattgaacgggcaagtatcatgcgactcgctgctgccaagcaggacgagaacaacgacgtatctagcgatgatgaaagcgtcgataccgacgatgtggactccgacgatgtcgaagagtttattggccaggacgacgacgacttcctcgatttcgctcagcagaaagatttcatcgcttttacataggctgatttccagttgcgccccttactaacgtgataggtacatattgactgtgaaccatagccatcgagcataatctgcataggcgggccgttgcttccacaagcatgatcttaatgaataccccttcgcgacttctctctattctctagacaggatagatggtagcgataactgcatagacggcgttaggagcaggattgatttcgtagccatgatacccaatacaaatcccaccgtgatttgtctcgcttaagggttacctttgcctgaaaagattcagtgcgacgacgaaaaagaggatcggcaaagaaaaacaattgtaatagaataggaacaggcaatgaagataagaataaaaatgatgagttgcat

SEQ ID NO: 35488 - DNA, 1353 bp, Muscodor strobelii
  misc_feature: SGI cDNA ID NO. 572291
  misc_feature: Encodes the peptide sequence at SEQ ID NO 35489
atggattcatcggaagatcaggccctcagggacaagatccaggccttatccggtcgcatccagcagcacaagcgcgcccacgaccaaggcgcccgccacggttatcatgccggcagaggtgcccatcagccctatcatccctatcatcgacctgacccttactctcgccctacctaccgcggtggttacagaggcggtcgtgccggacaccctacccaccgctcactcgtcctaaatggcgcaaacacaacgcagcgaccctctgacgccagtactacgagcgattccacagacacgaactcggcttacgtcaccaacaacgtgcgcaatcggcagctagtcagaaaagagatctacgatcaggagagccaggaacgagcccagtatgccaaacagctgcgggacgagaagctgcaggtcaccaatctccgagagcaggctaagctcgccagcactgttcaacttcacagcaccagccccgccgccgccgcctctactactaccccgtcggcaaccaaagcgtccaaaccatacgaggtagagatcgatagcgtgcgcttccatatcaccaagaaaggaagtaaactcgtcaaagcacccgatgattacaatcctcccagtgccacccccaaggttgctttcttgggtggcgtcaaattctgccgcactaagaacggcaatctggtgcggaacggtgtcgtcaaagcacaccggtacgtatcttggatgcaatacgtttgcatactgacgcatggcagcaacgcccacggtttcaagcgggtcaacgaactctgcaaggacttctcatggaccggtcaatgcgccaaaggctcctattgccactatatccacgatagcactaagacggccatctgccggaagtatcttctcaagggcgagtgtccccgaggtgacaaatgcgatctctcacacgaacctaccgagcagcgcacccctctgtgcattcactacgagaatggcaactgcaacaaccccaactgtgcgtatctccacgctcaacatcctgcggatgctcccatctgccgcgcgtttggcaacactgggtactgcgagaagggcgctgcctgcgacggccgccacgtcttcgagtgtcccgacttcggcaacacaggcaaatgtaaagtcaagggctgcaaacggcctcacattgaacgggcaagtatcatgcgactcgctgctgccaagcaggacgagaacaacgacgtatctagcgatgatgaaagcgtcgataccgacgatgtggactccgacgatgtcgaagagtttattggccaggacgacgacgacttcctcgatttcgctcagcagaaagatttcatcgcttttacatag

SEQ ID NO: 35489 - protein, 450 aa, Muscodor strobelii
  misc_feature: SGI Peptide ID NO. 572291
  misc_feature (287)..(313): Pfam Id: PF00642 Pfam Desc: Zinc finger C-x8-C-x5-C-x3-H type (and similar)
  misc_feature (263)..(286): Pfam Id: PF00642 Pfam Desc: Zinc finger C-x8-C-x5-C-x3-H type (and similar)
  misc_feature (3)..(449): NCBI GI: 171684565 Blast Desc: protein product [Podospora anserina] gi|170942243|emb|CAP67895.1| protein product [Podospora anserina]
  misc_feature (1)..(449): NCBI GI: 145614436 Blast Desc: MGG_04760 [Magnaporthe grisea 70-15] gi|145021361|gb|EDK05490.1| MGG_04760 [Magnaporthe grisea 70-15]
  misc_feature (3)..(450): NCBI GI: 154308824 Blast Desc: BC1G_07940 [Botryotinia fuckeliana B05.10] gi|150852566|gb|EDN27758.1| BC1G_07940 [Botryotinia fuckeliana B05.10]
  misc_feature (3)..(449): NCBI GI: 85111349 Blast Desc: NCU03048 [Neurospora crassa OR74A] gi|28925641|gb|EAA34658.1| conserved [Neurospora crassa OR74A]
  misc_feature (3)..(449): NCBI GI: 256735246 Blast Desc: NECHADRAFT_98820 [Nectria haematococca mpVI 77-13-4]
  misc_feature (4)..(425): NCBI GI: 119180084 Blast Desc: CIMG_08712 [Coccidioides immitis RS]
  misc_feature (4)..(447): NCBI GI: 121719912 Blast Desc: CCCH zinc finger protein [Aspergillus clavatus NRRL 1] gi|119404866|gb|EAW15228.1| CCCH zinc finger protein [Aspergillus clavatus NRRL 1]
  misc_feature (4)..(449): NCBI GI: 115401542 Blast Desc: conserved [Aspergillus terreus NIH2624] gi|114190300|gb|EAU32000.1| conserved [Aspergillus terreus NIH2624]
  misc_feature (4)..(449): NCBI GI: 242820392 Blast Desc: CCCH zinc finger protein [Talaromyces stipitatus ATCC 10500] gi|218713966|gb|EED13390.1| CCCH zinc finger protein [Talaromyces stipitatus ATCC 10500]
  misc_feature (4)..(449): NCBI GI: 119484620 Blast Desc: CCCH zinc finger protein [Neosartorya fischeri NRRL 181] gi|119410245|gb|EAW20192.1| CCCH zinc finger protein [Neosartorya fischeri NRRL 181]
MDSSEDQALRDKIQALSGRIQQHKRAHDQGARHGYHAGRGAHQPYHPYHRPDPYSRPTYRGGYRGGRAGHPTHRSLVLNGANTTQRPSDASTTSDSTDTNSAYVTNNVRNRQLVRKEIYDQESQERAQYAKQLRDEKLQVTNLREQAKLASTVQLHSTSPAAAASTTTPSATKASKPYEVEIDSVRFHITKKGSKLVKAPDDYNPPSATPKVAFLGGVKFCRTKNGNLVRNGVVKAHRYVSWMQYVCILTHGSNAHGFKRVNELCKDFSWTGQCAKGSYCHYIHDSTKTAICRKYLLKGECPRGDKCDLSHEPTEQRTPLCIHYENGNCNNPNCAYLHAQHPADAPICRAFGNTGYCEKGAACDGRHVFECPDFGNTGKCKVKGCKRPHIERASIMRLAAAKQDENNDVSSDDESVDTDDVDSDDVEEFIGQDDDDFLDFAQQKDFIAFT

SEQ ID NO: 35490 - DNA, 2527 bp, Muscodor strobelii
  misc_feature: SGI EST ID NO. CUFF.84652.3
  misc_feature: Variant of the nucleotide sequence at SEQ ID NO 35488
attttcattcctacaacacaaaccccagattttgatctcccattactcaccaagttcattcattcaagtattgcgcatcagacacctgccactctgtaagaactctaccctatctttccctccccagatcaggcgcgagcttgtgcttgcattagttgcgttgccaagtgacgacatattggaagccgcgcgccactcaaacactccacaaaatcgaaggctttgtcgcattgcgaacaacctcactttcgtgtcacccaactgctctacctcgcccattcaacccacccttcaaggcgctcctgccctttttcgatttattgcagctctgtactttccattagaagtcagacttattcccagtactgcctgttcgtagtcctcaaggtctccacttcgttcccaactaccgcgctcctacgtgcatcttccatttccgtatttgcgaactacatcagctctgttgcctctagtccccgttgtgcatctcgtctcccgcacctatttcaagcccctcgtggactcttgcctcacctagcccttttctctttacaccgcgacaccttatcccagtagatttgtgatctagatactcaccttcccagcttctaaccttgataattctcgcggacaggaatcacctatcacaatcactcacacacatagtccaacgtcatggattcatcggaagatcaggccctcagggacaagatccaggccttatccggtcgcatccagcagcacaagcgcgcccacgaccaaggcgcccgccacggtaccgcctctcgcccgtcattttacatccccctcgcaacccattactcacatctagtttccaatccatcaggttatcatgccggcagaggtgcccatcagccctatcatccctatcatcgacctgacccttactctcgccctacctaccgcggtggttacagaggcggtcgtgccggacaccctacccaccgctcactcgtcctaaatggcgcaaacacaacgcagcgaccctctgacgccagtactacgagcgattccacagacacgaactcggcttacgtcaccaacaacgtgcgcaatcggcagctagtcagaaaagagatctacgatcaggagagccaggaacgagcccagtatgccaaacagctgcgggacgagaagctgcaggtcaccaatctccgagagcaggctaagctcgccagcactgttcaacttcacagcaccagccccgccgccgccgcctctactactaccccgtcggcaaccaaagcgtccaaaccatacgaggtagagatcgatagcgtgcgcttccatatcaccaagaaaggaagtaaactcgtcaaagcacccgatgattacaatcctcccagtgccacccccaaggttgctttcttgggtggcgtcaaattctgccgcactaagaacggcaatctggtgcggaacggtgtcgtcaaagcacaccgcaacgcccacggtttcaagcgggtcaacgaactctgcaaggacttctcatggaccggtatcgtcttcctccacctacgaaccacgccgggctcgctacatctgcactgacaagcggagcggtaagacccctgagatgacacactgacacattctaggtcaatgcgccaaaggctcctattgccactatatccacgatagcactaagacggccatctgccggaagtatcttctcaagggcgagtgtccccgaggtgacaaatgcgatctctcacacgaacctaccgagcagcgcacccctctgtgcattcactacgagaatggcaactgcaacaaccccaactgtgcgtatctccacgctcaacatcctgcggatgctcccatctgccgcgcgtttggcaacactgggtactgcgagaagggcgctgcctgcgacggccgccacgtcttcgagtgtcccgacttcggcaacacaggcaaatgtaaagtcaagggctgcaaacggcctcacattgaacgggcaagtatcatgcgactcgctgctgccaagcaggacgagaacaacgacgtatctagcgatgatgaaagcgtcgataccgacgatgtggactccgacgatgtcgaagagtttattggccaggacgacgacgacttcctcgatttcgctcagcagaaagatttcatcgcttttacataggctgatttccagttgcgccccttactaacgtgataggtacatattgactgtgaaccatagccatcgagcataatctgcataggcgggccgttgcttccacaagcatgatcttaatgaataccccttcgcgacttctctctattctctagacaggatagatggtagcgataactgcatagacggcgttaggagcaggattgatttcgtagccatgatacccaatacaaatcccaccgtgatttgtctcgcttaagggttacctttgcctgaaaagattcagtgcgacgacgaaaaagaggatcggcaaagaaaaacaattgtaatagaataggaacaggcaatgaagataagaataaaaatgatgagttgcat

SEQ ID NO: 35491 - DNA, 1425 bp, Muscodor strobelii
  misc_feature: SGI cDNA ID NO. 572292
  misc_feature: Reduced expression when VOC is produced
  misc_feature: Encodes the peptide sequence at SEQ ID NO 35492
atggattcatcggaagatcaggccctcagggacaagatccaggccttatccggtcgcatccagcagcacaagcgcgcccacgaccaaggcgcccgccacggtaccgcctctcgcccgtcattttacatccccctcgcaacccattactcacatctagtttccaatccatcaggttatcatgccggcagaggtgcccatcagccctatcatccctatcatcgacctgacccttactctcgccctacctaccgcggtggttacagaggcggtcgtgccggacaccctacccaccgctcactcgtcctaaatggcgcaaacacaacgcagcgaccctctgacgccagtactacgagcgattccacagacacgaactcggcttacgtcaccaacaacgtgcgcaatcggcagctagtcagaaaagagatctacgatcaggagagccaggaacgagcccagtatgccaaacagctgcgggacgagaagctgcaggtcaccaatctccgagagcaggctaagctcgccagcactgttcaacttcacagcaccagccccgccgccgccgcctctactactaccccgtcggcaaccaaagcgtccaaaccatacgaggtagagatcgatagcgtgcgcttccatatcaccaagaaaggaagtaaactcgtcaaagcacccgatgattacaatcctcccagtgccacccccaaggttgctttcttgggtggcgtcaaattctgccgcactaagaacggcaatctggtgcggaacggtgtcgtcaaagcacaccggtacgtatcttggatgcaatacgtttgcatactgacgcatggcagcaacgcccacggtttcaagcgggtcaacgaactctgcaaggacttctcatggaccggtcaatgcgccaaaggctcctattgccactatatccacgatagcactaagacggccatctgccggaagtatcttctcaagggcgagtgtccccgaggtgacaaatgcgatctctcacacgaacctaccgagcagcgcacccctctgtgcattcactacgagaatggcaactgcaacaaccccaactgtgcgtatctccacgctcaacatcctgcggatgctcccatctgccgcgcgtttggcaacactgggtactgcgagaagggcgctgcctgcgacggccgccacgtcttcgagtgtcccgacttcggcaacacaggcaaatgtaaagtcaagggctgcaaacggcctcacattgaacgggcaagtatcatgcgactcgctgctgccaagcaggacgagaacaacgacgtatctagcgatgatgaaagcgtcgataccgacgatgtggactccgacgatgtcgaagagtttattggccaggacgacgacgacttcctcgatttcgctcagcagaaagatttcatcgcttttacatag

SEQ ID NO: 35492 - protein, 474 aa, Muscodor strobelii
  misc_feature: SGI Peptide ID NO. 572292
  misc_feature (311)..(337): Pfam Id: PF00642 Pfam Desc: Zinc finger C-x8-C-x5-C-x3-H type (and similar)
  misc_feature (287)..(310): Pfam Id: PF00642 Pfam Desc: Zinc finger C-x8-C-x5-C-x3-H type (and similar)
  misc_feature (3)..(473): NCBI GI: 171684565 Blast Desc: protein product [Podospora anserina] gi|170942243|emb|CAP67895.1| protein product [Podospora anserina]
  misc_feature (73)..(473): NCBI GI: 145614436 Blast Desc: MGG_04760 [Magnaporthe grisea 70-15] gi|145021361|gb|EDK05490.1| MGG_04760 [Magnaporthe grisea 70-15]
  misc_feature (3)..(474): NCBI GI: 154308824 Blast Desc: BC1G_07940 [Botryotinia fuckeliana B05.10] gi|150852566|gb|EDN27758.1| BC1G_07940 [Botryotinia fuckeliana B05.10]
  misc_feature (3)..(473): NCBI GI: 85111349 Blast Desc: NCU03048 [Neurospora crassa OR74A] gi|28925641|gb|EAA34658.1| conserved [Neurospora crassa OR74A]
  misc_feature (3)..(473): NCBI GI: 256735246 Blast Desc: NECHADRAFT_98820 [Nectria haematococca mpVI 77-13-4]
  misc_feature (4)..(471): NCBI GI: 121719912 Blast Desc: CCCH zinc finger protein [Aspergillus clavatus NRRL 1] gi|119404866|gb|EAW15228.1| CCCH zinc finger protein [Aspergillus clavatus NRRL 1]
  misc_feature (4)..(449): NCBI GI: 119180084 Blast Desc: CIMG_08712 [Coccidioides immitis RS]
  misc_feature (4)..(473): NCBI GI: 146324757 Blast Desc: CCCH zinc finger protein [Aspergillus fumigatus Af293] gi|129556139|gb|EAL85312.2| CCCH zinc finger protein [Aspergillus fumigatus Af293] gi|159123645|gb|EDP48764.1| CCCH zinc finger
  misc_feature (4)..(473): NCBI GI: 242820392 Blast Desc: CCCH zinc finger protein [Talaromyces stipitatus ATCC 10500] gi|218713966|gb|EED13390.1| CCCH zinc finger protein [Talaromyces stipitatus ATCC 10500]
  misc_feature (4)..(473): NCBI GI: 119484620 Blast Desc: CCCH zinc finger protein [Neosartorya fischeri NRRL 181] gi|119410245|gb|EAW20192.1| CCCH zinc finger protein [Neosartorya fischeri NRRL 181]
  misc_feature: Useful for introducing or modulating the production of volatile compounds
MDSSEDQALRDKIQALSGRIQQHKRAHDQGARHGTASRPSFYIPLATHYSHLVSNPSGYHAGRGAHQPYHPYHRPDPYSRPTYRGGYRGGRAGHPTHRSLVLNGANTTQRPSDASTTSDSTDTNSAYVTNNVRNRQLVRKEIYDQESQERAQYAKQLRDEKLQVTNLREQAKLASTVQLHSTSPAAAASTTTPSATKASKPYEVEIDSVRFHITKKGSKLVKAPDDYNPPSATPKVAFLGGVKFCRTKNGNLVRNGVVKAHRYVSWMQYVCILTHGSNAHGFKRVNELCKDFSWTGQCAKGSYCHYIHDSTKTAICRKYLLKGECPRGDKCDLSHEPTEQRTPLCIHYENGNCNNPNCAYLHAQHPADAPICRAFGNTGYCEKGAACDGRHVFECPDFGNTGKCKVKGCKRPHIERASIMRLAAAKQDENNDVSSDDESVDTDDVDSDDVEEFIGQDDDDFLDFAQQKDFIAFT

SEQ ID NO: 35493 - DNA, 2527 bp, Muscodor strobelii; identical to SEQ ID NO: 35490
  misc_feature: SGI EST ID NO. CUFF.84652.3
  misc_feature: Variant of the nucleotide sequence at SEQ ID NO 35491

SEQ ID NO: 35494 - DNA, 1194 bp, Muscodor strobelii
  misc_feature: SGI cDNA ID NO. 572293
  misc_feature: Encodes the peptide sequence at SEQ ID NO 35495
atggctaccgtcaagtctgaacccaccgtcaagcccgatcctgacggggtcggtgcctcgcccgccgtcatgtcggacgacgacatgtacgaggacgccggcgatctcgagttcgtcgacttcgacccccagaccaacccggccgccgccgacgtcttcctgacccacgtccccaagtacctgtacgacgcgtgggactcgttcgacgacgacgagatgatccagatcggcaagatccgcaagtggaccgagatggtcgacggcaagccccgcgagcgcatggccctgctgctcgatcacaccaagccccgccaccaggccatccccaaggagtaccgtctcgagtccaaggacccctcggccgccctcgccaacacctacctcttcaccgagcaggacctgcccggcttcaagtccgaggcccgcggcgccaacaacgacctgcccccgcacctgcgccgccagcacgagcagcgccagcagcagggcgacaaggccggaccccagcagaacaacgaccagaacaacggcggcgtcaggaagaacaagtaccaaccccgctacaggaaggccatacccaagaagaccatcctgtccaaccggttccgccacgagatcaactgcacccccgagcagaccgaggagaccaagtacatcctgcgaaacatgtccaccgactccatgaagcccaaggttggcaccagcctcgtcaaaaccttcgatcccagcggcgtcatccaggctggcgcccacatcgagaacgccaagttcagcaatcttgttgtaagttttcgcatctacatactattcatgtcaagctccagggagaggctaaccagacctccacagcgcacggcaccgcaaccgcccaaaggcgtcaagaagcagccgcaggaaaaggccgcccgtctcgctctcccagagctgcgcgaccaaatcttcaaatgtttcgatattcactcctattggcctctcaaagccttcaagcaacggcttaaccaacccgaggcctggctccgcgagaatctcgagcaggtcgccgtcctgcacaagaccggccgctttgccaaccactgggagctcagacccgagtacaagcgcgccactgcagcgccagatgacggcgctcccccgaccccggagggtatcgactcggacggcgatgaagacatggaagacgttctacccggctag

SEQ ID NO: 35495 - protein, 397 aa, Muscodor strobelii
  misc_feature: SGI Peptide ID NO. 572293
  misc_feature (300)..(374): Pfam Id: PF02270 Pfam Desc: Transcription initiation factor IIF, beta subunit
  misc_feature (6)..(377): NCBI GI: 154308826 Blast Desc: BC1G_07941 [Botryotinia fuckeliana B05.10] gi|150852567|gb|EDN27759.1| BC1G_07941 [Botryotinia fuckeliana B05.10]
  misc_feature (6)..(366): NCBI GI: 156062600 Blast Desc: SS1G_01416 [Sclerotinia sclerotiorum 1980] gi|154696752|gb|EDN96490.1| SS1G_01416 [Sclerotinia sclerotiorum 1980]
  misc_feature (4)..(366): NCBI GI: 261357315 Blast Desc: transcription initiation factor iif [Verticillium albo-atrum VaMs.102]
  misc_feature (4)..(380): NCBI GI: 256734412 Blast Desc: NECHADRAFT_74647 [Nectria haematococca mpVI 77-13-4]
  misc_feature (2)..(390): NCBI GI: 240110264 Blast Desc: Transcription initiation factor IIF, beta subunit family protein [Coccidioides posadasii C735 delta SOWgp]
  misc_feature (10)..(395): NCBI GI: 171684567 Blast Desc: protein product [Podospora anserina] gi|170942244|emb|CAP67896.1| protein product [Podospora anserina]
  misc_feature (8)..(390): NCBI GI: 119180086 Blast Desc: CIMG_08713 [Coccidioides immitis RS]
  misc_feature (8)..(394): NCBI GI: 225561990 Blast Desc: transcription initiation factor iif [Ajellomyces capsulatus G186AR]
  misc_feature (8)..(393): NCBI GI: 115401544 Blast Desc: conserved [Aspergillus terreus NIH2624] gi|114190301|gb|EAU32001.1| conserved [Aspergillus terreus NIH2624]
  misc_feature (8)..(390): NCBI GI: 240275599 Blast Desc: transcription initiation factor iif [Ajellomyces capsulatus H143]
MATVKSEPTVKPDPDGVGASPAVMSDDDMYEDAGDLEFVDFDPQTNPAAADVFLTHVPKYLYDAWDSFDDDEMIQIGKIRKWTEMVDGKPRERMALLLDHTKPRHQAIPKEYRLESKDPSAALANTYLFTEQDLPGFKSEARGANNDLPPHLRRQHEQRQQQGDKAGPQQNNDQNNGGVRKNKYQPRYRKAIPKKTILSNRFRHEINCTPEQTEETKYILRNMSTDSMKPKVGTSLVKTFDPSGVIQAGAHIENAKFSNLVVSFRIYILFMSSSRERLTRPPQRTAPQPPKGVKKQPQEKAARLALPELRDQIFKCFDIHSYWPLKAFKQRLNQPEAWLRENLEQVAVLHKTGRFANHWELRPEYKRATAAPDDGAPPTPEGIDSDGDEDMEDVLPG

SEQ ID NO: 35496 - DNA, 1995 bp, Muscodor strobelii
  misc_feature: SGI EST ID NO. CUFF.84747.1
  misc_feature: Variant of the nucleotide sequence at SEQ ID NO 35494
tttacatcatacttcgtctgcagatgtaccgatctctcgacatcctcgctacatctcttactgccgtcgccgtgtgctcccttgcttgctgcgactgaagcatgggacagtcgcgatctccaatctgatcttgacgaccgctagcgccgacatttgcgacttcgattggccacttagcggcgttgtctttgtcctccgcgttcacgccgaagcctttgaaggcgggtgcatcgcatcgcgtcaacatcatcccttgcgaatccctccaccttctcgcccagcatggctaccgtcaagtctgaacccaccgtcaagcccgatcctgacggggtcggtgcctcgcccgccgtcatgtcggacgacgacatgtacgaggacgccggcgatctcgagttcgtcgacttcgacccccagaccaacccggccgccgccgacgtcttcctgacccacgtccccaagtacctgtacgacgcgtgggactcgttcgacgacgacgagatgatccagatcggcaagatccgcaagtggaccgagatggtcgacggcaagccccgcgagcgcatggccctgctgctcgatcacaccaagccccgccaccaggccatccccaaggagtaccgtctcgagtccaaggacccctcggccgccctcgccaacacctacctcttcaccgagcaggacctgcccggcttcaagtccgaggcccgcggcgccaacaacgacctgcccccgcacctgcgccgccagcacgagcagcgccagcagcagggcgacaaggccggaccccagcagaacaacgaccagaacaacggcggcgtcaggaagaacaagtaccaaccccgctacaggaaggccatacccaagaagaccatcctgtccaaccggttccgccacgagatcaactgcacccccgagcagaccgaggagaccaagtacatcctgcgaaacatgtccaccgactccatgaagcccaaggttggcaccagcctcgtcaaaaccttcgatcccagcggcgtcatccaggctggcgcccacatcgagaacgccaagttcagcaatcttgttcgcacggcaccgcaaccgcccaaaggcgtcaagaagcagccgcaggaaaaggccgcccgtctcgctctcccagagctgcgcgaccaaatcttcaaatgtttcgatattcactcctattggcctctcaaagccttcaagcaacggcttaaccaacccgaggcctggctccgcgagaatctcgagcaggtcgccgtcctgcacaagaccggccgctttgccaaccactgggagctcagacccgagtacaagcgcgccactgcagcgccagatgacggcgctcccccgaccccggagggtatcgactcggacggcgatgaagacatggaagacgttctacccggctagtggctggatgaaccttccaatgcatgagcacatggcctcggctgtgagtgtaaggtagaacggttttgaccgtcggtttgttataccaaggtctttggtcgatatatgatggcaggaccaattccacggtttacctcgagtttccccttacgaagcttgatggacaattgttttagcagatattgagatgctgcagacctctaatcgcatgcatcggtcacacgcgaaacaggggtccacgtatgaggagaggcttcggttcctgcttcttgaccgttgttgtcctgagactgaacagacaaacgagatccgttgtctatattgtataaacatgatacccctacgaataaaatccaattgatgaacctgagagcagaattcgatcttctcagagtacgagcgaatgagcgtagctggttgtcggtgagaggatgtgacactattctcatggccaagatagccttacgtgacgtttttagcgaatcttagatagtaagtcgtgtatcaagcagtaagatatctacacatacgcattttattccaatctatagtcaaagtgacatgtggtggtcgcctctatctgcg

SEQ ID NO: 35497 - DNA, 1128 bp, Muscodor strobelii
  misc_feature: SGI cDNA ID NO. 572294
  misc_feature: Reduced expression when VOC is produced
  misc_feature: Encodes the peptide sequence at SEQ ID NO 35498
atggctaccgtcaagtctgaacccaccgtcaagcccgatcctgacggggtcggtgcctcgcccgccgtcatgtcggacgacgacatgtacgaggacgccggcgatctcgagttcgtcgacttcgacccccagaccaacccggccgccgccgacgtcttcctgacccacgtccccaagtacctgtacgacgcgtgggactcgttcgacgacgacgagatgatccagatcggcaagatccgcaagtggaccgagatggtcgacggcaagccccgcgagcgcatggccctgctgctcgatcacaccaagccccgccaccaggccatccccaaggagtaccgtctcgagtccaaggacccctcggccgccctcgccaacacctacctcttcaccgagcaggacctgcccggcttcaagtccgaggcccgcggcgccaacaacgacctgcccccgcacctgcgccgccagcacgagcagcgccagcagcagggcgacaaggccggaccccagcagaacaacgaccagaacaacggcggcgtcaggaagaacaagtaccaaccccgctacaggaaggccatacccaagaagaccatcctgtccaaccggttccgccacgagatcaactgcacccccgagcagaccgaggagaccaagtacatcctgcgaaacatgtccaccgactccatgaagcccaaggttggcaccagcctcgtcaaaaccttcgatcccagcggcgtcatccaggctggcgcccacatcgagaacgccaagttcagcaatcttgttcgcacggcaccgcaaccgcccaaaggcgtcaagaagcagccgcaggaaaaggccgcccgtctcgctctcccagagctgcgcgaccaaatcttcaaatgtttcgatattcactcctattggcctctcaaagccttcaagcaacggcttaaccaacccgaggcctggctccgcgagaatctcgagcaggtcgccgtcctgcacaagaccggccgctttgccaaccactgggagctcagacccgagtacaagcgcgccactgcagcgccagatgacggcgctcccccgaccccggagggtatcgactcggacggcgatgaagacatggaagacgttctacccggctag

SEQ ID NO: 35498 - protein, 375 aa, Muscodor strobelii
  misc_feature: SGI Peptide ID NO. 572294
  misc_feature (278)..(352): Pfam Id: PF02270 Pfam Desc: Transcription initiation factor IIF, beta subunit
  misc_feature (6)..(355): NCBI GI: 154308826 Blast Desc: BC1G_07941 [Botryotinia fuckeliana B05.10] gi|150852567|gb|EDN27759.1| BC1G_07941 [Botryotinia fuckeliana B05.10]
  misc_feature (6)..(344): NCBI GI: 156062600 Blast Desc: SS1G_01416 [Sclerotinia sclerotiorum 1980] gi|154696752|gb|EDN96490.1| SS1G_01416 [Sclerotinia sclerotiorum 1980]
  misc_feature (4)..(344): NCBI GI: 261357315 Blast Desc: transcription initiation factor iif [Verticillium albo-atrum VaMs.102]
  misc_feature (4)..(358): NCBI GI: 256734412 Blast Desc: NECHADRAFT_74647 [Nectria haematococca mpVI 77-13-4]
  misc_feature (10)..(373): NCBI GI: 171684567 Blast Desc: protein product [Podospora anserina] gi|170942244|emb|CAP67896.1| protein product [Podospora anserina]
  misc_feature (2)..(368): NCBI GI: 240110264 Blast Desc: Transcription initiation factor IIF, beta subunit family protein [Coccidioides posadasii C735 delta SOWgp]
  misc_feature (8)..(368): NCBI GI: 119180086 Blast Desc: CIMG_08713 [Coccidioides immitis RS]
  misc_feature (8)..(372): NCBI GI: 225561990 Blast Desc: transcription initiation factor iif [Ajellomyces capsulatus G186AR]
  misc_feature (8)..(368): NCBI GI: 240275599 Blast Desc: transcription initiation factor iif [Ajellomyces capsulatus H143]
  misc_feature (8)..(368): NCBI GI: 261197806 Blast Desc: transcription initiation factor iif [Ajellomyces dermatitidis SLH14081] gi|239595268|gb|EEQ77849.1| transcription initiation factor iif [Ajellomyces dermatitidis SLH14081] factor
  misc_feature: Useful for introducing or modulating the production of volatile compounds
MATVKSEPTVKPDPDGVGASPAVMSDDDMYEDAGDLEFVDFDPQTNPAAADVFLTHVPKYLYDAWDSFDDDEMIQIGKIRKWTEMVDGKPRERMALLLDHTKPRHQAIPKEYRLESKDPSAALANTYLFTEQDLPGFKSEARGANNDLPPHLRRQHEQRQQQGDKAGPQQNNDQNNGGVRKNKYQPRYRKAIPKKTILSNRFRHEINCTPEQTEETKYILRNMSTDSMKPKVGTSLVKTFDPSGVIQAGAHIENAKFSNLVRTAPQPPKGVKKQPQEKAARLALPELRDQIFKCFDIHSYWPLKAFKQRLNQPEAWLRENLEQVAVLHKTGRFANHWELRPEYKRATAAPDDGAPPTPEGIDSDGDEDMEDVLPG

SEQ ID NO: 35499 - DNA, 2056 bp, Muscodor strobelii
  misc_feature: SGI EST ID NO. CUFF.84747.0
  misc_feature: Variant of the nucleotide sequence at SEQ ID NO 35497
tttacatcatacttcgtctgcagatgtaccgatctctcgacatcctcgctacatctcttactgccgtcgccgtgtgctcccttgcttgctgcgactgaagcatgggacagtcgcgatctccaatctgatcttgacgaccgctagcgccgacatttgcgacttcgattggccacttagcggcgttgtctttgtcctccgcgttcacgccgaagcctttgaaggcgggtgcatcgcatcgcgtcaacatcatcccttgcgaatccctccaccttctcgcccagcatggctaccgtcaagtctgaacccaccgtcaagcccgatcctgacggggtcggtgcctcgcccgccgtcatgtcggacgacgacatgtacgaggacgccggcgatctcgagttcgtcgacttcgacccccagaccaacccggccgccgccgacgtcttcctgacccacgtccccaagtacctgtacgacgcgtgggactcgttcgacgacgacgagatgatccagatcggcaagatccgcaagtggaccgagatggtcgacggcaagccccgcgagcgcatggccctgctgctcgatcacaccaagccccgccaccaggccatccccaaggagtaccgtctcgagtccaaggacccctcggccgccctcgccaacacctacctcttcaccgagcaggacctgcccggcttcaagtccgaggcccgcggcgccaacaacgacctgcccccgcacctgcgccgccagcacgagcagcgccagcagcagggcgacaaggccggaccccagcagaacaacgaccagaacaacggcggcgtcaggaagaacaagtaccaaccccgctacaggaaggccatacccagtgcgtatcagacataatactgctatctgggcataggctgacagtatgttaccgcttgcagagaagaccatcctgtccaaccggttccgccacgagatcaactgcacccccgagcagaccgaggagaccaagtacatcctgcgaaacatgtccaccgactccatgaagcccaaggttggcaccagcctcgtcaaaaccttcgatcccagcggcgtcatccaggctggcgcccacatcgagaacgccaagttcagcaatcttgttcgcacggcaccgcaaccgcccaaaggcgtcaagaagcagccgcaggaaaaggccgcccgtctcgctctcccagagctgcgcgaccaaatcttcaaatgtttcgatattcactcctattggcctctcaaagccttcaagcaacggcttaaccaacccgaggcctggctccgcgagaatctcgagcaggtcgccgtcctgcacaagaccggccgctttgccaaccactgggagctcagacccgagtacaagcgcgccactgcagcgccagatgacggcgctcccccgaccccggagggtatcgactcggacggcgatgaagacatggaagacgttctacccggctagtggctggatgaaccttccaatgcatgagcacatggcctcggctgtgagtgtaaggtagaacggttttgaccgtcggtttgttataccaaggtctttggtcgatatatgatggcaggaccaattccacggtttacctcgagtttccccttacgaagcttgatggacaattgttttagcagatattgagatgctgcagacctctaatcgcatgcatcggtcacacgcgaaacaggggtccacgtatgaggagaggcttcggttcctgcttcttgaccgttgttgtcctgagactgaacagacaaacgagatccgttgtctatattgtataaacatgatacccctacgaataaaatccaattgatgaacctgagagcagaattcgatcttctcagagtacgagcgaatgagcgtagctggttgtcggtgagaggatgtgacactattctcatggccaagatagccttacgtgacgtttttagcgaatcttagatagtaagtcgtgtatcaagcagtaagatatctacacatacgcattttattccaatctatagtcaaagtgacatgtggtggtcgcctctatctgcg

SEQ ID NO: 35500 - DNA, 1107 bp, Muscodor strobelii
  misc_feature: SGI cDNA ID NO. 572295
  misc_feature: Reduced expression when VOC is produced
  misc_feature: Encodes the peptide sequence at SEQ ID NO 35501
atgagtatatttctagacttcgacggcacgataacgaccgaagatacggttcggcaccttgcggatttcgcgcttggggtgcaggctgagcggaacggttcttctgctgcctcttcttcagtttcgaagccaatctcgagtcatacaccagcggacctaagactagaaacgcaaaatcacgccgatggagatgctggcaacacagagcacgatgatgcagataccctccccgagagatggaaaggagtggtgaaagcctacctctcagagtactcctcacactgcgatacataccataccccttcgcatcagcgcacgacgacggagtcggagatcagctttcagcggtcgcagaaagatgttgagttacgctcgttatcacgcatcaactcttgcaagatctttcataatataagtccttatgagttcaggaaaggtgggcgggacttggtggacaggggtattgttaaggttagaagggggttcagggagtgggttgaggggaggatggaggagggttggtcggtgggcgttgtgagtgtgaattggagtaaggactttatcgaaggtgttctagaaggcgttggggttaggacgggtgagggcggtgtggtggtttatgctaatgttgttgatgagcatgggagagttttggggccagacatcctcaatagttgtcacgatgaaggtaatgacggagacgaagacattgacggaaacgagagtggacacagtgatgacggcgagaatgcggcgaagggaaggcggaatctgacgaactcaaaggacaagttagatgtcttcaggagagcgacgaaattgaatgggggcgggaagacggtgtatttcggagactcggtaacggatatggagtgtttgctggaggcggactggggtgttgttatggcggatgatgaggactccaagttgattgagacgctgcgacggattggggaggatgtaccgcgagcgagggagtcggaagatgctggcgggaatgcggataagagcagggcggatagtgaaaagaatgatcgggtgtgggcggaaagctttgacgaggttggcgagtttgttaggtttgagagtggcgaaaggcagagatga

SEQ ID NO: 35501 - protein, 368 aa, Muscodor strobelii
  misc_feature: SGI Peptide ID NO. 572295
  misc_feature (3)..(355): NCBI GI: 171684569 Blast Desc: protein product [Podospora anserina] gi|170942245|emb|CAP67897.1| protein product [Podospora anserina]
  misc_feature (1)..(355): NCBI GI: 46108466 Blast Desc: FG01115.1 [Gibberella zeae PH-1]
  misc_feature (1)..(357): NCBI GI: 39945560 Blast Desc: MGG_04762 [Magnaporthe grisea 70-15] gi|145021359|gb|EDK05488.1| MGG_04762 [Magnaporthe grisea 70-15]
  misc_feature (3)..(368): NCBI GI: 116192481 Blast Desc: CHGG_05958 [Chaetomium globosum CBS 148.51] gi|88181871|gb|EAQ89339.1| CHGG_05958 [Chaetomium globosum CBS 148.51]
  misc_feature (3)..(326): NCBI GI: 164427515 Blast Desc: NCU11240 [Neurospora crassa OR74A] gi|157071775|gb|EDO65299.1| [Neurospora crassa OR74A]
  misc_feature (2)..(316): NCBI GI: 261357314 Blast Desc: conserved [Verticillium albo-atrum VaMs.102]
  misc_feature (4)..(310): NCBI GI: 156036418 Blast Desc: SS1G_12898 [Sclerotinia sclerotiorum 1980] gi|154698303|gb|EDN98041.1| SS1G_12898 [Sclerotinia sclerotiorum 1980]
  misc_feature (4)..(363): NCBI GI: 189193983 Blast Desc: conserved [Pyrenophora tritici-repentis Pt-1C-BFP] gi|187978894|gb|EDU45520.1| conserved [Pyrenophora tritici-repentis Pt-1C-BFP]
  misc_feature (72)..(295): NCBI GI: 154308530 Blast Desc: BC1G_08325 [Botryotinia fuckeliana B05.10] gi|150852866|gb|EDN28058.1| BC1G_08325 [Botryotinia fuckeliana B05.10]
  misc_feature (3)..(363): NCBI GI: 169600992 Blast Desc: SNOG_03350 [Phaeosphaeria nodorum SN15] gi|160705851|gb|EAT88555.2| SNOG_03350 [Phaeosphaeria nodorum SN15]
  misc_feature: Useful for introducing or modulating the production of volatile compounds
MSIFLDFDGTITTEDTVRHLADFALGVQAERNGSSAASSSVSKPISSHTPADLRLETQNHADGDAGNTEHDDADTLPERWKGVVKAYLSEYSSHCDTYHTPSHQRTTTESEISFQRSQKDVELRSLSRINSCKIFHNISPYEFRKGGRDLVDRGIVKVRRGFREWVEGRMEEGWSVGVVSVNWSKDFIEGVLEGVGVRTGEGGVVVYANVVDEHGRVLGPDILNSCHDEGNDGDEDIDGNESGHSDDGENAAKGRRNLTNSKDKLDVFRRATKLNGGGKTVYFGDSVTDMECLLEADWGVVMADDEDSKLIETLRRIGEDVPRARESEDAGGNADKSRADSEKNDRVWAESFDEVGEFVRFESGERQR

SEQ ID NO: 35502 - DNA, 1502 bp, Muscodor strobelii
  misc_feature: SGI EST ID NO. CUFF.84645.0
  misc_feature: Variant of the nucleotide sequence at SEQ ID NO 35500
cggaatagtaccaactattcatctcgtcttactactcatctcagctacgattgactatcgtacgatcgaatttgtctccctattcacttcgctcttagtcctgtcttgctcgagtgctctccagtgtactctagttcacagaacatattccgacggactcgctacgtccgtcctcgtaagcggtatttatataccggcgaaggaagggacgcgagagcgcacattcgttgaagtgagagctggacataagagtgaagaatcttcggtgtgggggttgaaatagtcaaaatgagtatatttctagacttcgacggcacgataacgaccgaagatacggttcggcaccttgcggatttcgcgcttggggtgcaggctgagcggaacggttcttctgctgcctcttcttcagtttcgaagccaatctcgagtcatacaccagcggacctaagactagaaacgcaaaatcacgccgatggagatgctggcaacacagagcacgatgatgcagataccctccccgagagatggaaaggagtggtgaaagcctacctctcagagtactcctcacactgcgatacataccataccccttcgcatcagcgcacgacgacggagtcggagatcagctttcagcggtcgcagaaagatgttgagttacgctcgttatcacgcatcaactcttgcaagatctttcataatataagtccttatgagttcaggaaaggtgggcgggacttggtggacaggggtattgttaaggttagaagggggttcagggagtgggttgaggggaggatggaggagggttggtcggtgggcgttgtgagtgtgaattggagtaaggactttatcgaaggtgttctagaaggcgttggggttaggacgggtgagggcggtgtggtggtttatgctaatgttgttgatgagcatgggagagttttggggccagacatcctcaatagttgtcacgatgaaggtaatgacggagacgaagacattgacggaaacgagagtggacacagtgatgacggcgagaatgcggcgaagggaaggcggaatctgacgaactcaaaggacaagttagatgtcttcaggagagcgacgaaattgaatgggggcgggaagacggtgtatttcggagactcggtaacggatatggagtgtttgctggaggcggactggggtgttgttatggcggatgatgaggactccaagttgattgagacgctgcgacggattggggaggatgtaccgcgagcgagggagtcggaagatgctggcgggaatgcggataagagcagggcggatagtgaaaagaatgatcgggtgtgggcggaaagctttgacgaggttggcgagtttgttaggtttgagagtggcgaaaggcagagatgatccgatagtgtaggaatgtaggtcgctgtatgaagtaaatgaagagtctattctaagactcacagagtccacttgaaataattctccctcttcaatcgctggtggcg

SEQ ID NO: 35503 - DNA, 1113 bp, Muscodor strobelii
  misc_feature: SGI cDNA ID NO. 572296
  misc_feature: Elevated expression when VOC is produced
  misc_feature: Encodes the peptide sequence at SEQ ID NO 35504
atgtcttcatcggcgggagtatccattcctctcactgagcccgtatatgaagacgatttcgtcgtggatggcatcaagcgtatactccctttcaagtctgtcatcgaaaattcttgcaatcctgagaaagaacgtcgatttcagttctctgtatcatatgagatcaaggacgtgacactcggtcatcgatcggtacagggggagttttgtactgccgcggagttcctctcaataggtcaagcacatttcctgccgggcgagcaaatgatcccatcagacgtggattctgacgacttctacaatgttccgacgattgtagttaccagccgcgttccacttaatccgcaaggggcatattcttgggaatacattcacgagctgttagatcaggtatcccagtcctattggaacgatgatgatggcggaaataggaagctctaccttcgactagcatacttatttatgtcgcgcgatcaaggtccacatccccacccatatcgattttttacccctaaacaagctctgaagaacaaacgccaatcagcgccgggccagccgattgtgtacgtaccatctccagagggctgctacgatataactcctgcgaccagatatttcgcgaacaaagaggaactgagagattgtctaaatactcgcttcaatgtcatgaaagccgatttgcaagcagatttctttaagttcagccgtgaaaagctcaaccccgggatatcgtttagctacacattcgatacactcaaatttgaatttctaaatgaaatgaaacacgaggacggtctctatattgcaggaaggcacacgggggtggcttatgccggaaatattctatgcaaaatcaacgtcactggtggggacaaaacatttactgacgaaaacagagaagaagtccaaaggttcctagacaatgatttctctcttcggaaacagcgctggggcaggatgctagaggtgtcaatgaacctcatcgatgttcaaaatgacgcacatatagcacgtccagtggtatctccgcagacatacctatatgttcatactgaggccgataaaattgaaatctacaacaaagacaccatgaagttcggccgcgaggaatga

SEQ ID NO: 35504 - protein, 370 aa, Muscodor strobelii
  misc_feature: SGI Peptide ID NO. 572296
  misc_feature: Useful for introducing or modulating the production of volatile compounds
MSSSAGVSIPLTEPVYEDDFVVDGIKRILPFKSVIENSCNPEKERRFQFSVSYEIKDVTLGHRSVQGEFCTAAEFLSIGQAHFLPGEQMIPSDVDSDDFYNVPTIVVTSRVPLNPQGAYSWEYIHELLDQVSQSYWNDDDGGNRKLYLRLAYLFMSRDQGPHPHPYRFFTPKQALKNKRQSAPGQPIVYVPSPEGCYDITPATRYFANKEELRDCLNTRFNVMKADLQADFFKFSREKLNPGISFSYTFDTLKFEFLNEMKHEDGLYIAGRHTGVAYAGNILCKINVTGGDKTFTDENREEVQRFLDNDFSLRKQRWGRMLEVSMNLIDVQNDAHIARPVVSPQTYLYVHTEADKIEIYNKDTMKFGREE

SEQ ID NO: 35505 - DNA, 1492 bp, Muscodor strobelii
  misc_feature: SGI EST ID NO. CUFF.84597.0
  misc_feature: Variant of the nucleotide sequence at SEQ ID NO 35503
cgaaaatcattactctcatgtccactacccgtggccttacaatccatactgttctgtatttcttcttaatccttcacttctgcgtcaatatacagcctacgatcatgtcttcatcggcgggagtatccattcctctcactgagcccgtatatgaagacgatttcgtcgtggatggcatcaagcgtatactccctttcaagtctgtcatcgaaaattcttgcaatcctgagaaagaacgtcgatttcagttctctgtatcatatgagatcaaggacgtgacactcggtcatcgatcggtacagggggagttttgtactgccgcggagttcctctcaataggtcaagcacatttcctgccgggcgagcaaatgatcccatcagacgtggattctgacgacttctacaatgttccgacgattgtagttaccagccgcgttccacttaatccgcaaggggcatattcttgggaatacattcacgagctgttagatcaggtatcccagtcctattggaacgatgatgatggcggaaataggaagctctaccttcgactagcatacttatttatgtcgcgcgatcaaggtccacatccccacccatatcgattttttacccctaaacaagctctgaagaacaaacgccaatcagcgccgggccagccgattgtgtacgtaccatctccagagggctgctacgatataactcctgcgaccagatatttcgcgaacaaagaggaactgagagattgtctaaatactcgcttcaatgtcatgaaagccgatttgcaagcagatttctttaagttcagccgtgaaaagctcaaccccgggatatcgtttagctacacattcgatacactcaaatttgaatttctaaatgaaatgaaacacgaggacggtctctatattgcaggaaggcacacgggggtggcttatgccggaaatattctatgcaaaatcaacgtcactggtggggacaaaacatttactgacgaaaacagagaagaagtccaaaggttcctagacaatgatttctctcttcggaaacagcgctggggcaggatgctagaggtgtcaatgaacctcatcgatgttcaaaatgacgcacatatagcacgtccagtggtatctccgcagacatacctatatgttcatactgaggccgataaaattgaaatctacaacaaagacaccatgaagttcggccgcgaggaatgaagaagaattaagattgattgggagttgacttccaaatttcgtggacttcggtttattgattggtttgaagggctatctgaggccctctggaggatgtgcactgttaagacatttgatttagaagcagggtcattcaactggccagtagttttgttttctgtttattttgttctgtgtacttggctggcgttatttgcgtttcttcactgaccgcatccattcattctataaaaagctcgtcgatctttttagttatacatgatgctttaacttgg

SEQ ID NO: 35506 - DNA, 1731 bp, Muscodor strobelii
  misc_feature: SGI cDNA ID NO. 572297
  misc_feature: Encodes the peptide sequence at SEQ ID NO 35507
atggtgaatttcattacaactggcctcgtggcccttatttctagcacgtttgctgttgcattgccaactgatcacgacttttcgcctcgggctgcttgtacaaactccgccacctctaggacatgctggacagatggctttgacatcgacaccgactactatgttgacggacctgacactggtgtgattcgagaatattggctcgcggtcgaaggtatcacatgtgcacctgatggtgtagacagatactgtctgaccttcaatggaactgtgcctggtccccttatcacagcggattggggcgacaccttgagagttcacgtcatcaacaacctcgccgataatggcactaccgtacattggcacggcatccgtcaattgaactcgactgatatggatggcgttcctggcgttacccaatgtcccatcgcacccggtgacactatgacatacgagtttcgtgttgctcaatacggctcaacgtggtatcacagtcacttcacctttcagtacgctgaaggtctgttcggccccttgatcatcaatggtccggcatcagcaaattacgatgaagatctgggaactctctttttacaagactggtcccacactacaataatgcagctttggggtgaaaagccaggcacaacctacgtaatggacaatattctgctcaacggcacgaacatattcaccaacgatgacggcagcgtcactggatcgaagtttgagatggtgtttgagcaggggaagacataccgacttcggcttatcaatgttgctgtcgatggactttttgacttccatattgatggccacgaattcactatcattgccaccgatcttgtgcccgtcaaacctttcactgttgaccatattcaggttggcattggacagcggtacgatatcatcattgaagcaaatgccagccccggtgactactggattcgaagcggatggaatacagcttgtagggttattggcaatgacggcgatatctccccagagggtaccggtattctccgatacgactcgaccagcactgccgatccagaaactacagatgctggcgtcgtgagtaactgctgggatcaagatagagaaacactcgtcccagtcgtaccagtcgacgttacagacttagaggaggtggttttcgagaagctgggctcgggcgtcacccagttgagttattttacttggaccctgaactcgtctactctataccttgactgggccgaacctactgttaagcaagttgaagaaggaaactcggcgtatactggcttcgaaaatgttgttgaagtcggcgagggattcgaagctagcaaatgggtcgttcttgttatcaacagtactctcaactcctggcaccctatccatctgcacggtcacgatttcttcatccttgcacaggaacctaatagtgcatacgttgatactgacagcttcaatcttattaaccccgagcgacgtgatgtcgctgtcttgccgcaacttggttacctagctatcgcctttcaactcgataatccaggcgcatggctcgtccattgccacatcgcatggcatgcaagtgctggcttaggcatgcaattcgtcgagtccaaggaggcaatgctcaccagtggagccgtggctaattgggacagcataggcagcgatacctgcgctaaatgggacgcctacgcggctgttgagagatatgagcaagatgactccggcatttaa

SEQ ID NO: 35507 - protein, 576 aa, Muscodor strobelii
  misc_feature: SGI Peptide ID NO. 572297
  misc_feature (192)..(346): Pfam Id: PF00394 Pfam Desc: Multicopper oxidase
  misc_feature (409)..(539): Pfam Id: PF07731 Pfam Desc: Multicopper oxidase
  misc_feature (69)..(186): Pfam Id: PF07732 Pfam Desc: Multicopper oxidase
  misc_feature (33)..(576): NCBI GI: 120431232 Blast Desc: laccase 2 [Monilinia fructigena]
  misc_feature (5)..(576): NCBI GI: 154305568 Blast Desc: BC1G_08553 [Botryotinia fuckeliana B05.10] gi|74697989|sp|Q96WM9.1|LAC2_BOTFU RecName: Full=Laccase-2; AltName: Full=Benzenediol:oxygen oxidoreductase 2; AltName: 2; 2;
  misc_feature (7)..(576): NCBI GI: 120431228 Blast Desc: laccase 2 [Sclerotinia minor]
  misc_feature (7)..(576): NCBI GI: 156065927 Blast Desc: SS1G_00974 [Sclerotinia sclerotiorum 1980] gi|120431230|gb|ABM21604.1| laccase 2 [Sclerotinia sclerotiorum] gi|154691833|gb|EDN91571.1| SS1G_00974 [Sclerotinia sclerotiorum
  misc_feature (28)..(576): NCBI GI: 160332827 Blast Desc: laccase precursor [Helotiaceae sp. UHH 1-13-18-4]
  misc_feature (9)..(576): NCBI GI: 238846090 Blast Desc: laccase-1 [Microsporum canis CBS 113480]
  misc_feature (24)..(576): NCBI GI: 164426955 Blast Desc: NCU02201 [Neurospora crassa OR74A] gi|157071546|gb|EAA30359.2| NCU02201 [Neurospora crassa OR74A]
  misc_feature (9)..(576): NCBI GI: 116214483 Blast Desc: CHGG_11082 [Chaetomium globosum CBS 148.51] gi|88175437|gb|EAQ82906.1| CHGG_11082 [Chaetomium globosum CBS 148.51]
  misc_feature (2)..(576): NCBI GI: 19171194 Blast Desc: laccase [Gaeumannomyces graminis var. tritici]
  misc_feature (2)..(576): NCBI GI: 19309738 Blast Desc: laccase [Gaeumannomyces graminis var. graminis]
  misc_feature (5)..(576): SWISSPROT Homolog: EC 1.10.3.2 Laccase
MVNFITTGLVALISSTFAVALPTDHDFSPRAACTNSATSRTCWTDGFDIDTDYYVDGPDTGVIREYWLAVEGITCAPDGVDRYCLTFNGTVPGPLITADWGDTLRVHVINNLADNGTTVHWHGIRQLNSTDMDGVPGVTQCPIAPGDTMTYEFRVAQYGSTWYHSHFTFQYAEGLFGPLIINGPASANYDEDLGTLFLQDWSHTTIMQLWGEKPGTTYVMDNILLNGTNIFTNDDGSVTGSKFEMVFEQGKTYRLRLINVAVDGLFDFHIDGHEFTIIATDLVPVKPFTVDHIQVGIGQRYDIIIEANASPGDYWIRSGWNTACRVIGNDGDISPEGTGILRYDSTSTADPETTDAGVVSNCWDQDRETLVPVVPVDVTDLEEVVFEKLGSGVTQLSYFTWTLNSSTLYLDWAEPTVKQVEEGNSAYTGFENVVEVGEGFEASKWVVLVINSTLNSWHPIHLHGHDFFILAQEPNSAYVDTDSFNLINPERRDVAVLPQLGYLAIAFQLDNPGAWLVHCHIAWHASAGLGMQFVESKEAMLTSGAVANWDSIGSDTCAKWDAYAAVERYEQDDSGI

SEQ ID NO: 35508 - DNA, 1652 bp, Muscodor strobelii
  misc_feature: SGI EST ID NO. CUFF.84618.0
  misc_feature: Variant of the nucleotide sequence at SEQ ID NO 35506
atcacagcggattggggcgacaccttgagagttcacgtcatcaacaacctcgccgataatggcactaccgtacattggcacggcatccgtcaattgaactcgactgatatggatggcgttcctggcgttacccaatgtcccatcgcacccggtgacactatgacatacgagtttcgtgttgctcaatacggctcaacgtggtatcacagtcacttcacctttcagtacgctgaaggtctgttcggccccttgatcatcaatggtccggcatcagcaaattacgatgaagatctgggaactctctttttacaagactggtcccacactacaataatgcagctttggggtgaaaagccaggcacaacctacgtaatggacaatattctgctcaacggcacgaacatattcaccaacgatgacggcagcgtcactggatcgaagtttgagatggtgtttgagcaggggaagacataccgacttcggcttatcaatgttgctgtcgatggactttttgacttccatattgatggccacgaattcactatcattgccaccgatcttgtgcccgtcaaacctttcactgttgaccatattcaggttggcattggacagcggtacgatatcatcattgaagcaaatgccagccccggtgactactggattcgaagcggatggaatacagcttgtagggttattggcaatgacggcgatatctccccagagggtaccggtattctccgatacgactcgaccagcactgccgatccagaaactacagatgctggcgtcgtgagtaactgctgggatcaagatagagaaacactcgtcccagtcgtaccagtcgacgttacagacttagaggaggtggttttcgagaagctgggctcgggcgtcacccagttgagttattttacttggaccctgaactcgtctactctataccttgactgggccgaacctactgttaagcaagttgaagaaggaaactcggcgtatactggcttcgaaaatgttgttgaagtcggcgagggattcgaagctagcaaatgggtcgttcttgttatcaacagtactctcaactcctggcaccctatccatctgcacggtcacgatttcttcatccttgcacaggaacctaatagtgcatacgttgatactgacagcttcaatcttattaaccccgagcgacgtgatgtcgctgtcttgccgcaacttggttacctagctatcgcctttcaactcgataatccaggcgcatggctcgtccattgccacatcgcatggcatgcaagtgctggcttaggcatgcaattcgtcgagtccaaggaggcaatgctcaccagtggagccgtggctaattgggacagcataggcagcgatacctgcgctaaatgggacgcctacgcggctgttgagagatatgagcaagatgactccggcatttaattctcatgctgccgatggatatgagaatccatttccttacacactctgtccgcctcgtggagattttcactttactgtatatgatacagacactctatgaaacaactctttctacactgtatatactaagtaattcttaagtcctaattcataaaacgcagttagactagaccttcgggactgagcatatcaatcatgtactgatg

SEQ ID NO: 35509 - DNA, 1029 bp, Muscodor strobelii
  misc_feature: SGI cDNA ID NO. 572298
  misc_feature: Encodes the peptide sequence at SEQ ID NO 35510
atgcccccaccttcagtagccgatgtgaaacaagtcacgtacttgaatccgctgcatcccgacacgtctcgcatagatgcactgaaagatgaggtgaccgccgaagtggaggcaatgtctgagcctcccaccaacagcagtatcagattctcacgtttcttcctatccgagatgcctgagaatctagatgccgagaatgaggaggacatgggtggaagtgcgatgataagtgctctgacattattcaacaatattctgttaccgatgtacttgattccagacggactgtacaagaataagagtatccacgaagggctgctccatgttggcaaatgcacgtggaaagacaacgtgatcagaactatcaaatacaagaaagttggtggtggcacgatcatgaatcctgccaatatcaaggagccactggtgtttgacaagaaggagcaactagatgaatgggtgaaagcgcaatttggtacattgcgcaatacggaattcatccggccaacaatcgatgacggcattgaacggaccatgccaagttcgcggccgaacagtcctggcttgctggacgttggtgagcctgagtctttgagcgagcaaggagaacaagacggcaaaattgtcatagagcccgcgcagatcaatcgcgttactggcctctatcaaatcgattctcacggtcatataaagcgcaagagctggacatgctgggcagaggaagcttccgtcgctcgctcactccttcatccacttagaaagacctggaaggtcacgattgacggtaaacgatcttggaaggtctcgccgaagaaaggggaagaagatgtgcttgtttggcaagatatcgaatggggcgtatttgcggaagagatcaaaatgagcaggcattggggatatgtaggctgtgtcgagttaaggttgacgcaattcaactttaagcaaaaagcgcaagattttttgattgcggcctggatagcgaggctcgcgaacgaggcgaaaacatttaagcctagtaagcaaaattag

SEQ ID NO: 35510 - protein, 342 aa, Muscodor strobelii
  misc_feature: SGI Peptide ID NO. 572298
MPPPSVADVKQVTYLNPLHPDTSRIDALKDEVTAEVEAMSEPPTNSSIRFSRFFLSEMPENLDAENEEDMGGSAMISALTLFNNILLPMYLIPDGLYKNKSIHEGLLHVGKCTWKDNVIRTIKYKKVGGGTIMNPANIKEPLVFDKKEQLDEWVKAQFGTLRNTEFIRPTIDDGIERTMPSSRPNSPGLLDVGEPESLSEQGEQDGKIVIEPAQINRVTGLYQIDSHGHIKRKSWTCWAEEASVARSLLHPLRKTWKVTIDGKRSWKVSPKKGEEDVLVWQDIEWGVFAEEIKMSRHWGYVGCVELRLTQFNFKQKAQDFLIAAWIARLANEAKTFKPSKQN

SEQ ID NO: 35511 - DNA, 1104 bp, Muscodor strobelii
  misc_feature: SGI cDNA ID NO. 572299
  misc_feature: Encodes the peptide sequence at SEQ ID NO 35512
atgtatcctattctatttgccttggatcttcattttttgataagtacaaagagcgttggtgatgctctaagtgctggctggcgcagatgccaccaatctcagttcatcagcttgtccatcgcctcgtgggcgttatcgccgattggaagtcaggcatctttacggatgctgtacacaactgaacaactccaggtttcaaatgcaactgttcgatatctagatactggcccgctccgacactcactagtacattggtctctagatgaagagtcttcttatattcgacgcgccgtaaatatcaacttcaagcaagactttcacactgtgatggcacagccctggaatgtgtttgagagtcaaagtgatatctggggtaacgccaagatcccacgcttagaaagctggaatgttcccagcgattttcccgaatggtggaataccgcagatatagatggtgcggactcgttctcttctctgcttggcgtcactatttacgacctcccgtctgcatccactaaggatctgattgtcgagacgtcgtacatcagtgcttcatgtgctactttgaaacaagccgtattcagccctagtagtccggatcgcctatgcatgggcttccgactatcatgtcctccctgtccgggctggaatgtttccgaactagaccgacgttgcagcaacttcggacatgaggatccctggcgcagtagagtcgctgcgtttctggggcttggaggactaagctcagggttttcccatcccgtgaacatgcttgttgacatgtgggtctccgatgagacaacggcctacgacaagacgactcatcaagttgatcaacatcgagtccatacgtcctggaacactacctgtacagtcaccgagaaacatgtggaagtcaaaatcagatgcgaaagtgaaacgtgctataccatagcaattagaaactcgcagcatgacaagcgcctcgagactgtcacgccgatggatttctgggctcccaaatacttcactgatgaacgcactgccaagattcttgccaatcccatttatggatatctaagcagtcctgtgccgaatcccttaaagtcggccaatgtgtggtaa

SEQ ID NO: 35512 - protein, 367 aa, Muscodor strobelii
  misc_feature: SGI Peptide ID NO. 572299
  misc_feature (43)..(194): NCBI GI: 189202062 Blast Desc: conserved [Pyrenophora tritici-repentis Pt-1C-BFP] gi|187984466|gb|EDU49954.1| conserved [Pyrenophora tritici-repentis Pt-1C-BFP]
  misc_feature (43)..(202): NCBI GI: 67902374 Blast Desc: AN8174.2 [Aspergillus nidulans FGSC A4] gi|40740006|gb|EAA59196.1| AN8174.2 [Aspergillus nidulans FGSC A4] gi|259480945|tpe|CBF74035.1| TPA: [Aspergillus nidulans FGSC
  misc_feature (43)..(220): NCBI GI: 169775899 Blast Desc: [Aspergillus oryzae RIB40] gi|83771151|dbj|BAE61283.1| protein product [Aspergillus oryzae]
  misc_feature (13)..(200): NCBI GI: 256732304 Blast Desc: NECHADRAFT_80764 [Nectria haematococca mpVI 77-13-4]
  misc_feature (10)..(186): NCBI GI: 46114246 Blast Desc: FG02965.1 [Gibberella zeae PH-1]
  misc_feature (43)..(201): NCBI GI: 240106396 Blast Desc: CPC735_059590 [Coccidioides posadasii C735 delta SOWgp]
  misc_feature (43)..(201): NCBI GI: 119191646 Blast Desc: CIMG_00200 [Coccidioides immitis RS]
  misc_feature (8)..(314): NCBI GI: 256728541 Blast Desc: NECHADRAFT_101913 [Nectria haematococca mpVI 77-13-4]
  misc_feature (43)..(207): NCBI GI: 238502549 Blast Desc: conserved [Aspergillus flavus NRRL3357] gi|220691318|gb|EED47666.1| conserved [Aspergillus flavus NRRL3357]
  misc_feature (35)..(336): NCBI GI: 226294834 Blast Desc: conserved [Paracoccidioides brasiliensis Pb18]
MYPILFALDLHFLISTKSVGDALSAGWRRCHQSQFISLSIASWALSPIGSQASLRMLYTTEQLQVSNATVRYLDTGPLRHSLVHWSLDEESSYIRRAVNINFKQDFHTVMAQPWNVFESQSDIWGNAKIPRLESWNVPSDFPEWWNTADIDGADSFSSLLGVTIYDLPSASTKDLIVETSYISASCATLKQAVFSPSSPDRLCMGFRLSCPPCPGWNVSELDRRCSNFGHEDPWRSRVAAFLGLGGLSSGFSHPVNMLVDMWVSDETTAYDKTTHQVDQHRVHTSWNTTCTVTEKHVEVKIRCESETCYTIAIRNSQHDKRLETVTPMDFWAPKYFTDERTAKILANPIYGYLSSPVPNPLKSANVW

SEQ ID NO: 35513 - DNA, 687 bp, Muscodor strobelii
  misc_feature: SGI cDNA ID NO. 572300
  misc_feature: Encodes the peptide sequence at SEQ ID NO 35514
atggccgcctggtcttataataagcccgatattctgatctttagcaccaagggccttcaatcgcttccaacccttctagtgcagcaagccaactgccacgaggcccgctttaataagagtggtgcgcccgaggcactattgaaccagtttcccaccgcccgagctgccctaatcgccactgcggacatcctaagacctcagctggagaatttctctcgtcagcttgttcactgggtgcgtgaaggaggcggccgtgtcattcttggtgcttggttcatggcaagcattctgaacacaactgtggccggagagccgggcgatatcaacgcttggttccgccaaatgtggggtctaccctgggaagctgtggcggttggcaaattagatatcttgcgaaaagacactcatgtaggaccgatggacctcgctatggacaagctttccaggtcatactcaaccgaggccgtccttctcgagaacgtcgaaattccaaacgtgctatatgctgctgatcccctcaagcagatggtaaactccatcttgggtacccgagaagatgtcacagaccggcttaccgccatcgcgcttggccaatgcggttacggctggcttggttatatcggcgacacggccggtgcatgggagacgaccgaagtcatgttggcattgctgggcgtgacatcatag

SEQ ID NO: 35514 - protein, 228 aa, Muscodor strobelii
  misc_feature: SGI Peptide ID NO. 572300
  misc_feature (46)..(226): NCBI GI: 238488175 Blast Desc: conserved [Aspergillus flavus NRRL3357] gi|220697713|gb|EED54053.1| conserved [Aspergillus flavus NRRL3357]
  misc_feature (34)..(226): NCBI GI: 256725157 Blast Desc: NECHADRAFT_55208 [Nectria haematococca mpVI 77-13-4]
  misc_feature (46)..(209): NCBI GI: 169762402 Blast Desc: [Aspergillus oryzae RIB40] gi|83770129|dbj|BAE60262.1| protein product [Aspergillus oryzae]
  misc_feature (36)..(226): NCBI GI: 116179140 Blast Desc: CHGG_00198 [Chaetomium globosum CBS 148.51] gi|88184495|gb|EAQ91963.1| CHGG_00198 [Chaetomium globosum CBS 148.51]
MAAWSYNKPDILIFSTKGLQSLPTLLVQQANCHEARFNKSGAPEALLNQFPTARAALIATADILRPQLENFSRQLVHWVREGGGRVILGAWFMASILNTTVAGEPGDINAWFRQMWGLPWEAVAVGKLDILRKDTHVGPMDLAMDKLSRSYSTEAVLLENVEIPNVLYAADPLKQMVNSILGTREDVTDRLTAIALGQCGYGWLGYIGDTAGAWETTEVMLALLGVTS

SEQ ID NO: 35515 - DNA, 3480 bp, Muscodor strobelii
  misc_feature: SGI EST ID NO. CUFF.84640.0
  misc_feature: Variant of the nucleotide sequence at SEQ ID NO 35513
gcggtaacctgtggtaatgtcgccggtcacatgcagggcgcgatgctgggattgcaatcctgagacctgtacttagtaagtgcattgtgtccaaaagaccatgctgcctactgtagctcataatgccatgtgctaccctcgccaccggagatttcgggtgaaggcagagtagatgggctcggggggcgcagcaaaggtcaaagaatgagattctttcaggtcacaatgaatcattcttgatcactgccgacgacaggcactgattcgttggcagtttcgactctggggcggaatagcgggggattgcgacaatggcgcggttttctatatccacagggttgcaattgtccaatagcgaccgacaattcccctccaacacgaacgccatcactaatagtgctggttacggccattccacatcacgatagtactcagttcactcgcgttatatcttcatagagatttttgatgtgacccctaacatttatatataagatacattccaattgaagtcaattctgaacgtctagtctgtctcaacaacacctacatactagcaacagtcagtgttcaagtcaggtcagtcactgcaggctcaccgcaggctcactacatttgccagcgaccacaacaggaacttttgtcctcgtacacatggtagacgccacaactggaacaggagcaaccacaacaacatcgatgagccttcacgaagtccccggaaccgttctcgcaacgacagcaattaccacacgacccatggactccacacaattgccacaactgggtactatgcagtcgttcacaccggggcagtgtctcttctgccccgccctttcgcctagcttcaacgatagtgtagtgcacatgcagaaatctcacaatttattcgtgccacatcagcgacatctgcttgtcgagctggagacccttttcagatacctgcatctcgtcatcttcgaataccgagaatgcatccactgcgggacggagagagctaccgtgcaggctgttcagcagcacatgaccggcaagggtcactgtaagttcgacatcgtgcaggaggattcggaatatgccgaattctacaatttttccgaaccggggtccgacgtagaaaataactccgacgacgacgaagatggcgaggggaagaaccaagaatgcacggcggaagatcctacgcgtaagccccagctgacagatggcgattcaattcgattgccatctggtagaataatatcgagacattcatctgcactatcgccgtcatttactcatccacgccgacgacagcgtacaatagcatcgcaattggactatgcacctgcagagccccacgaagaaggttggagcaaagaagatgttgcatcgagtgtgcgcgacacgaaactaatgtcaaagagggagaaacgagagaaggctacagtggcctatcaattagctaacttgcgcgccaacgatcgtactagtctcgtgcacatgtcggcggccgagcaacacgcactactggcgacgcaacaccggcacgaagagaaggttcagaagcaagagagccgcagacgaggaaggatcgatcggaagggtaacaaaaacttgtatgcatattggcataccgagacgcccgtgtatcaatgcggatagaggagataggccatcgtctttgacccctcaacacccagcagggacgaataagattaccttttgaggcaatcttacctaggcattctgcacaatacctatatgcgtccaagcttacgtatacaaatttgcctcgcaggcaatggaattgatcatgattgtgataacgcgacgaataattagtccactgtcttttaggcgtcttccaattgtgcttgctacgcagtttgtatcggtgctttcgaaaggcactctccggtccgcttagtgctacgatttcctcatacatctaacactaatgttatgggaagggaccttgagtgaacggatagtcaaagccatgtgatccccttcccaaagatcatgctcacatcggctgctcagcctcagtctcactcggtcttgagtttcttcttcatatcacatccaccatcaacagcagactcattcgaaacagttcgcagaacatagaatctccgattttggatccctgcatttccagtctttcatcggtagccgattaattgtacagccatggccgcctggtcttataataagcccgatattctgatctttagcaccaagggccttcaatcgcttccaacccttctagtgcagcaagccaactgccacgaggcccgctttaataagagtggtgcgcccgaggcactattgaaccagtttcccaccgcccgagctgccctaatcgccactgcggacatcctaagacctcagctggagaatttctctcgtcagcttgttcactgggtgcgtgaaggaggcggccgtgtcattcttggtgcttggttcatggcaagcattctgaacacaactgtggccggagagccgggcgatatcaacgcttggttccgccaaatgtggggtctaccctgggaagctgtggcggttggcaaattagatatcttgcgaaaagacactcatgtaggaccgatggacctcgctatggacaagctttccaggtcatactcaaccgaggccgtccttctcgagaacgtcgaaattccaaacgtgctatatgctgctgatcccctcaagcagatggtaaactccatcttgggtacccgagaagatgtcacagaccggcttaccgccatcgcgcttggccaatgcggttacggctggcttggttatatcggcgacacggccggtgcatgggagacgaccgaagtcatgttggcattgctgggcgtgacatcatagagcgagagcatgcaaggggaagctgagagcgatgaattcgacctcagtaacctcgtctatgatgtgtatcataagatagagaccgatttgtctggtttcgacggtaggaaccaatataggatgggatttggcttaccttcctacatcagtcacgacgtacccgaagacgaaagatattacatacccaacgccggcgatgcaggttaagtcacacactttttaagtcccactcaaatcagacctcatgttcgtgacaacagggggcttgatttgtttagcaaagcaagctttgaccccacacaatgggttgtccttcctaggtctggtaatcgtgttcgcgataacgtgggatttagctcatcagcctgtaacgatgtattcatgggcgcccccaaacctgacattagcgagattgacaatccgtgatacgatgcaaggaataccggtgatgcgcatctcaacccacaatttttcagtttccccaatttcggcaatagcgcctcgagagtcggtctagataaggctggcgacatgttcggcaacgtgcatttcggtttcgacgattacctgagcccgaggaatagaacgaatgagaggtagctgaggcttattagcaac

SEQ ID NO: 35516 - DNA, 990 bp, Muscodor strobelii
  misc_feature: SGI cDNA ID NO. 572301
  misc_feature: Encodes the peptide sequence at SEQ ID NO 35517
atggtagacgccacaactggaacaggagcaaccacaacaacatcgatgagccttcacgaagtccccggaaccgttctcgcaacgacagcaattaccacacgacccatggactccacacaattgccacaactgggtactatgcagtcgttcacaccggggcagtgtctcttctgccccgccctttcgcctagcttcaacgatagtgtagtgcacatgcagaaatctcacaatttattcgtgccacatcagcgacatctgcttgtcgagctggagacccttttcagatacctgcatctcgtcatcttcgaataccgagaatgcatccactgcgggacggagagagctaccgtgcaggctgttcagcagcacatgaccggcaagggtcactgtaagttcgacatcgtgcaggaggattcggaatatgccgaattctacaatttttccgaaccggggtccgacgtagaaaataactccgacgacgacgaagatggcgaggggaagaaccaagaatgcacggcggaagatcctacgcgtaagccccagctgacagatggcgattcaattcgattgccatctggtagaataatatcgagacattcatctgcactatcgccgtcatttactcatccacgccgacgacagcgtacaatagcatcgcaattggactatgcacctgcagagccccacgaagaaggttggagcaaagaagatgttgcatcgagtgtgcgcgacacgaaactaatgtcaaagagggagaaacgagagaaggctacagtggcctatcaattagctaacttgcgcgccaacgatcgtactagtctcgtgcacatgtcggcggccgagcaacacgcactactggcgacgcaacaccggcacgaagagaaggttcagaagcaagagagccgcagacgaggaaggatcgatcggaagggtaacaaaaacttgtatgcatattggcataccgagacgcccgtgtatcaatgcggatag

SEQ ID NO: 35517 - protein, 329 aa, Muscodor strobelii
  misc_feature: SGI Peptide ID NO. 572301
  misc_feature (18)..(329): NCBI GI: 12044392 Blast Desc: AF327521_1 TRI15 [Fusarium sporotrichioides]
  misc_feature (21)..(329): NCBI GI: 46139021 Blast Desc: FG11025.1 [Gibberella zeae PH-1] gi|33943129|gb|AAQ55290.1| transcription factor TRI15 [Gibberella zeae]
  misc_feature (46)..(329): NCBI GI: 212539275 Blast Desc: pre-60S factor REI1, [Penicillium marneffei ATCC 18224] gi|210069535|gb|EEA23626.1| pre-60S factor REI1, [Penicillium marneffei ATCC 18224]
  misc_feature (16)..(328): NCBI GI: 242765209 Blast Desc: prohibitin, [Talaromyces stipitatus ATCC 10500] gi|218724124|gb|EED23541.1| prohibitin, [Talaromyces stipitatus ATCC 10500]
  misc_feature (46)..(329): NCBI GI: 171682532 Blast Desc: protein product [Podospora anserina] gi|170941225|emb|CAP66875.1| protein product [Podospora anserina]
  misc_feature (55)..(319): NCBI GI: 261361300 Blast Desc: TRI15 [Verticillium albo-atrum VaMs.102]
  misc_feature (50)..(329): NCBI GI: 116208214 Blast Desc: CHGG_03400 [Chaetomium globosum CBS 148.51] gi|88183997|gb|EAQ91465.1| CHGG_03400 [Chaetomium globosum CBS 148.51]
  misc_feature (50)..(323): NCBI GI: 39964117 Blast Desc: MGG_09816 [Magnaporthe grisea 70-15] gi|145011119|gb|EDJ95775.1| MGG_09816 [Magnaporthe grisea 70-15]
  misc_feature (50)..(329): NCBI GI: 261359139 Blast Desc: TRI15 [Verticillium albo-atrum VaMs.102]
  misc_feature (50)..(324): NCBI GI: 46116078 Blast Desc: FG03881.1 [Gibberella zeae PH-1]
MVDATTGTGATTTTSMSLHEVPGTVLATTAITTRPMDSTQLPQLGTMQSFTPGQCLFCPALSPSFNDSVVHMQKSHNLFVPHQRHLLVELETLFRYLHLVIFEYRECIHCGTERATVQAVQQHMTGKGHCKFDIVQEDSEYAEFYNFSEPGSDVENNSDDDEDGEGKNQECTAEDPTRKPQLTDGDSIRLPSGRIISRHSSALSPSFTHPRRRQRTIASQLDYAPAEPHEEGWSKEDVASSVRDTKLMSKREKREKATVAYQLANLRANDRTSLVHMSAAEQHALLATQHRHEEKVQKQESRRRGRIDRKGNKNLYAYWHTETPVYQCG

SEQ ID NO: 35518 - DNA, 3480 bp, Muscodor strobelii; identical to SEQ ID NO: 35515
  misc_feature: SGI EST ID NO. CUFF.84640.0
  misc_feature: Variant of the nucleotide sequence at SEQ ID NO 35516

SEQ ID NO: 35519 - DNA, 369 bp, Muscodor strobelii
  misc_feature: SGI cDNA ID NO. 572302
  misc_feature: Elevated expression when VOC is produced
  misc_feature: Encodes the peptide sequence at SEQ ID NO 35520
atggacctcaagagccggtggatagtcgagggtccaacaggccgtgatctgtgctccctcattcacgagaagcgggtcacagccaaccccttcggcattgatgctaccgtgcacaccaagactggcgaagatgccgttatcgagatcgtgccccaagatagcggtgtcactacggcagctgtcaatgttggaggtattaccgttgctctgattcgcaagagcttcgcctgcaaaaaagcgtgggatgaggtcgatgggggcccggatcagagcacgctggacataagtttcatcgccggcaacgatctcaatgtgatcatggtctcaggaatgaatcgcgcagaaatggcacacgttagtatgctttaa

SEQ ID NO: 35520 - protein, 122 aa, Muscodor strobelii
  misc_feature: SGI Peptide ID NO. 572302
  misc_feature (6)..(118): NCBI GI: 212540390 Blast Desc: conserved [Penicillium marneffei ATCC 18224] gi|210067649|gb|EEA21741.1| conserved [Penicillium marneffei ATCC 18224]
  misc_feature: Useful for introducing or modulating the production of volatile compounds
MDLKSRWIVEGPTGRDLCSLIHEKRVTANPFGIDATVHTKTGEDAVIEIVPQDSGVTTAAVNVGGITVALIRKSFACKKAWDEVDGGPDQSTLDISFIAGNDLNVIMVSGMNRAEMAHVSML

SEQ ID NO: 35521 - DNA, 1137 bp, Muscodor strobelii
  misc_feature: SGI EST ID NO. CUFF.84655.0
  misc_feature: Variant of the nucleotide sequence at SEQ ID NO 35519
cctggccctgtcgtgcatcgacgttgaagtcaactggtaagtccgacagcgtcttacccgctgccattcttctgcttgaagggtcttataaacacgcacgaaccccatttatcagattgcagatctcatgcaacagacaagtcaacgatcgcaactccttacatctacttcaattcatatcacacaaatcaaatcgctgtgcctttagaccttctcaattcacataaaagtcttcgcaataagtagtgctcggataccaagccttagagtagcattgaaaatgcttggcggatatacaagacagaaagacactaccatcacaatccactgccacgatgcaacattcaaacaaatcacaggcgtggacgagatagggaacatcatatttcaagtagaaggcagcaaatacggcacatcatggagttggcggaggaaagtgtacgatgagacagatccccgccattcttcgactttcaacacaaaagcatggacctcaagagccggtggatagtcgagggtccaacaggccgtgatctgtgctccctcattcacgagaagcgggtcacagccaaccccttcggcattgatgctaccgtgcacaccaagactggcgaagatgccgttatcgagatcgtgccccaagatagcggtgtcactacggcagctgtcaatgttggaggtattaccgttgctctgattcgcaagagcttcgcctgcaaaaaagcgtgggatgaggtcgatgggggcccggatcagagcacgctggacataagtttcatcgccggcaacgatctcaatgtgatcatggtctcaggaatgaatcgcgcagaaatggcacacgttagtatgctttaacaagtcgtgcttagtcacgcaacttgacagcgtgctcagaagaaaaatgtgcactcataattcgcactgcgcttctgggtcgaaagtgctgtcttcgaaaattcatctttggtggcgttaaggcggctttttgaatttagcgtttattttgagcgtaacgattgaatttgggttattgccatgtaaaacatgttacattgcgatacctcttgtagttctacctacatatcttaacatcactagagctgttcaataacacggctgctaaacatactatgaata

SEQ ID NO: 35522 - DNA, 2043 bp, Muscodor strobelii
  misc_feature: SGI cDNA ID NO. 572303
  misc_feature: Encodes the peptide sequence at SEQ ID NO 35523
atgctctgtactatctgcaaacaaggacttgaggggatgggggatccttccaagacccctcctctaggattacggtcggtcatcttcggcgatgaccacgatgctccgaccaagcaaagtacagagatgtcgaaaactcaagtgccagatcatttcatcttcggacaccacaagactctctcgtccttccaagaatcaatggcgcgaggctgcgtcatgtgcaatagatttcgtcccaaagacgccgacgtcggccgtaatgaagcaatcgaaagcttcggatacttctccgtctttgaagtcattttcgaggcagatctcagtacagctctaatgtttgttcattacggcaactcgcaaggtgatgatgatgacagtatcatccggaacttaccatcatcaacaagacacgatgaaacatggtcaatcatacattcgtggctgaagcaatgtgacgagcatcatgccttatgtcgacctagtcgcgataaatcactaccaacatggcttattgaattgcgcgcagcggagaaagaagaagtgtcaattcggcttgttcaaggccgttcactgagccaagatatcatctatctgacactcagtcactgcggcgaagtcgatcattcttcgttgtcggctctgtttggacacggcctacaagagtggctttctcaggaccaattgcccccattattccgcgaagcgtgcgaagcagctctccgcgtgggtgcacagtacctctggattgacgatctttgtaactttacctctgacttcagcgcattatctgagcatggcgcatcctctcaacgtagcgcagcctttcgtcgcgcgaccctcaacctcgctgctcttgatcggaacgcactgttcatatcgcgggcgtctacggatgtggttcccacgattgtaaatctgcccatcgacggtaccgaccgtacgagactctatatgtctagattcgagcgtacctggtcctggaggctaactttaaacaacgaacctttgatcatggaaccgcagtttctcgtcgataggcttatggcaccgcgcacactcctgttcggacgcaagcaggtgttctgggaatgtggcgtagcatgcgcctgcgaactacatcccgagccctcatctccggccatgccgcaaggcggagtcacctatcaaaacgaaaatgagacgcgattgttcaagccgacgcttgacatgtcattttatcgaaggtcaggcgatactcgcaaccaaataattcttgactggtatcgagttgtggaggtgtacagtgaaaagaatttcaaggaaaataatgccgtggacatggaggcatacaaactcaatggtctcgccgagatcgcagcccaagtcgagtctggaatcatcagcaagggcttctcacttggacgctacgtcgcaggacattgggagagcacgttgcttgatagtctgatctggggcgccaagcgtcctggggttcggtcgatatcgatgccgtcctggtcctgggcatcaatcggcgcgccaattacattctatcagacaggtggagattctcaacaagcgtcctggctggcacgactaattgaaatgggtattgaccctgataatggcagcagtaatagttgtaacgattccatccatatccaaggccgccttgccatcggtacattattcccaggcagcgggcaaagcgtggagatgccagaagggtggaatttattaaagtcaattgaaagcagagaacaagtaaatggagaaaaggtgacgtcgctgcacaacaagacttgcagcgcaaactggtcgatgcacttcgattcacaggaagatgtctgcgacaaatttctaattatgccaatgcaggcccaatcgagctttaatcaacactcgctgtcatgtcttgcaataacgcccacctcagcaaatagcactgatgagaacttttatcgcaggattggagtggcgttgcttgctgggagcacagacgagcatcggattctcgttgatatgctgcagaatctggacgacggaaagctataccttcgataa

SEQ ID NO: 35523 - protein, 680 aa, Muscodor strobelii
  misc_feature: SGI Peptide ID NO. 572303
  misc_feature (124)..(651): NCBI GI: 145251023 Blast Desc: An15g04930 [Aspergillus niger] gi|134082553|emb|CAK42468.1| protein product [Aspergillus niger]
  misc_feature (2)..(504): NCBI GI: 189206854 Blast Desc: conserved [Pyrenophora tritici-repentis Pt-1C-BFP] gi|187975854|gb|EDU42480.1| conserved [Pyrenophora tritici-repentis Pt-1C-BFP]
  misc_feature (122)..(507): NCBI GI: 28881154 Blast Desc: related to tol protein [Neurospora crassa]
  misc_feature (147)..(667): NCBI GI: 256724649 Blast Desc: NECHADRAFT_84415 [Nectria haematococca mpVI 77-13-4]
  misc_feature (144)..(516): NCBI GI: 256720830 Blast Desc: NECHADRAFT_85535 [Nectria haematococca mpVI 77-13-4]
  misc_feature (144)..(543): NCBI GI: 46138287 Blast Desc: FG10658.1 [Gibberella zeae PH-1]
  misc_feature (133)..(531): NCBI GI: 16945382 Blast Desc: related to tol protein [Neurospora crassa]
  misc_feature (119)..(511): NCBI GI: 46136391 Blast Desc: FG09711.1 [Gibberella zeae PH-1]
  misc_feature (32)..(509): NCBI GI: 256728738 Blast Desc: NECHADRAFT_85988 [Nectria haematococca mpVI 77-13-4]
  misc_feature (42)..(538): NCBI GI: 171677566 Blast Desc: protein product [Podospora anserina] gi|170936851|emb|CAP61509.1| protein product [Podospora anserina]
MLCTICKQGLEGMGDPSKTPPLGLRSVIFGDDHDAPTKQSTEMSKTQVPDHFIFGHHKTLSSFQESMARGCVMCNRFRPKDADVGRNEAIESFGYFSVFEVIFEADLSTALMFVHYGNSQGDDDDSIIRNLPSSTRHDETWSIIHSWLKQCDEHHALCRPSRDKSLPTWLIELRAAEKEEVSIRLVQGRSLSQDIIYLTLSHCGEVDHSSLSALFGHGLQEWLSQDQLPPLFREACEAALRVGAQYLWIDDLCNFTSDFSALSEHGASSQRSAAFRRATLNLAALDRNALFISRASTDVVPTIVNLPIDGTDRTRLYMSRFERTWSWRLTLNNEPLIMEPQFLVDRLMAPRTLLFGRKQVFWECGVACACELHPEPSSPAMPQGGVTYQNENETRLFKPTLDMSFYRRSGDTRNQIILDWYRVVEVYSEKNFKENNAVDMEAYKLNGLAEIAAQVESGIISKGFSLGRYVAGHWESTLLDSLIWGAKRPGVRSISMPSWSWASIGAPITFYQTGGDSQQASWLARLIEMGIDPDNGSSNSCNDSIHIQGRLAIGTLFPGSGQSVEMPEGWNLLKSIESREQVNGEKVTSLHNKTCSANWSMHFDSQEDVCDKFLIMPMQAQSSFNQHSLSCLAITPTSANSTDENFYRRIGVALLAGSTDEHRILVDMLQNLDDGKLYLR

SEQ ID NO: 35524 - DNA, 2488 bp, Muscodor strobelii
  misc_feature: SGI EST ID NO. CUFF.84675.0
  misc_feature: Variant of the nucleotide sequence at SEQ ID NO 35522
gaaatttgatatttcaccgcgatgctctgtactatctgcaaacaaggacttgaggggatgggggatccttccaagacccctcctctaggattacggtcggtcatcttcggcgatgaccacgatgctccgaccaagcaaagtacagagatgtcgaaaactcaagtgccagatcatttcatcttcggacaccacaagactctctcgtccttccaagaatcaatggcgcgaggctgcgtcatgtgcaatagatttcgtcccaaagacgccgacgtcggccgtaatgaagcaatcgaaagcttcggatacttctccgtctttgaagtcattttcgaggcagatctcagtacagctctaatgtttgttcattacggcaactcgcaagatgatgatgacagtatcatccggaacttaccatcatcaacaagacacgatgaaacatggtcaatcatacattcgtggctgaagcaatgtgacgagcatcatgccttatgtcgacctagtcgcgataaatcactaccaacatggcttattgaattgcgcgcagcggagaaagaagaagtgtcaattcggcttgttcaaggccgttcactgagccaagatatcatctatctgacactcagtcactgcggcgaagtcgatcattcttcgttgtcggctctgtttggacacggcctacaagagtggctttctcaggaccaattgcccccattattccgcgaagcgtgcgaagcagctctccgcgtgggtgcacagtacctctggattgacgatctttgtaactttacctctgacttcagcgcattatctgagcatggcgcatcctctcaacgtagcgcagcctttcgtcgcgcgaccctcaacctcgctgctcttgatcggaacgcactgttcatatcgcgggcgtctacggatgtggttcccacgattgtaaatctgcccatcgacggtaccgaccgtacgagactctatatgtctagattcgagcgtacctggtcctggaggctaactttaaacaacgaacctttgatcatggaaccgcagtttctcgtcgataggcttatggcaccgcgcacactcctgttcggacgcaagcaggtgttctgggaatgtggcgtagcatgcgcctgcgaactacatcccgagccctcatctccggccatgccgcaaggcggagtcacctatcaaaacgaaaatgagacgcgattgttcaagccgacgcttgacatgtcattttatcgaaggtcaggcgatactcgcaaccaaataattcttgactggtatcgagttgtggaggtgtacagtgaaaagaatttcaaggaaaataatgccgtggacatggaggcatacaaactcaatggtctcgccgagatcgcagcccaagtcgagtctggaatcatcagcaagggcttctcacttggacgctacgtcgcaggacattgggagagcacgttgcttgatagtctgatctggggcgccaagcgtcctggggttcggtcgatatcgatgccgtcctggtcctgggcatcaatcggcgcgccaattacattctatcagacaggtggagattctcaacaagcgtcctggctggcacgactaattgaaatgggtattgaccctgataatggcagcagtaatagttgtaacgattccatccatatccaaggccgccttgccatcggtacattattcccaggcagcgggcaaagcgtggagatgccagaagggtggaatttattaaagtcaattgaaagcagagaacaagtaaatggagaaaaggtgacgtcgctgcacaacaagacttgcagcgcaaactggtcgatgcacttcgattcacaggaagatgtctgcgacaaatttctaattatgccaatgcaggcccaatcgagctttaatcaacactcgctgtcatgtcttgcaataacgcccacctcagcaaatagcactgatgagaacttttatcgcaggattggagtggcgttgcttgctgggagcacagacgagcatcggattctcgttgatatgctgcagaatctggacgacggaaagctataccttcgataagcgtttgctttttcctatcttcccctggctatgactctgggacatgtttgcatataatcattcgtttgacgtcggattctgcgcacagtgtcaactccttccgctgaaaccagagcaggtccaatatgggatatacttccatgtatttaacgcaacgccaatatggcgcagtactgttaatagtataccacagaatacctaggccgtgttctgtgccgtggggtggtgctgtctgaatggcattcgtcacttcaacgcgggcgggcacttcactcgctcaaagattatgatttattcaaatgattttcgcacagatcatgacaatttctactttatggcatgcaattccaatctcttcgtgtgcagataatctgaaaatgaaaattcagcgtgcatgtagatctgggttagcgggattgagccaccc

SEQ ID NO: 35525 - DNA, 1149 bp, Muscodor strobelii
  misc_feature: SGI cDNA ID NO. 572304
  misc_feature: Encodes the peptide sequence at SEQ ID NO 35526
atgtctctctccatggatataccagcgtatcctaccatcaatgaattaacccatgcctctattcgcgaatacattgccgtccccgatgatcccacatcgtacgcaaaggtcagccaagcttatcaacctgcattagatatgatcaaaggatttattgccggaagtacgtgtcttccgagcgattcaattgatatcagacttgaagtctgtgacctcatcccgtgcctgatggactttgatggacgacgtgttctcactcatgaaggcataccgatagaggtagacgatacactaggaatagagcctatctatctatctcatcccctagcccgcggatggcggttgactcggaccgcagaatctgccaaagcatggggtttcaaagctgtagttgtcataatcacgcttcccgagctttcaaaccttacacggtatcccgacctattgcacgagcgtctgcatttcgatgtgctttgcaataatagcagtatagagagcagtcagttacccgctctggcgtacttgctcgtctccagaaacaaagcagacgaagaggaagatgtctggctcccaccaacaagtgtcatcaaccatagggaccaaggcgacatcgtggtctccggagatcgatgcttccattttttacctctagagaagcgccgttggagcaacttatcacaactttggtcctatttaacggacatgtttgcggcgcggtcgtccgaagaggtgaaagagttcctgcaatctgagatcaaaatggtcgcctcagttagatttcaaatcagtctcgtgcagccaaccaagaatggtacgccccaactgaacgatacttacaatgaaaggaacgtggccctgatttgctgcgccactttttggaagcgtagttctattgaagagtggcgaccagctgataagcaattgcgcgaattccgcgtcgagcaaggcaagatcgagggactggtcgactatgtggagaggaacgatttgttgcacttgggaagacacaattcgcaatggtatcgcgcaatccagtggagattcgttgtgaatgaggacgccggaattaggcccgagtgtgtcaacaacagatacatcttccagcgtgatcgtcatggaggatacacttgtctgcgttggcttaattaa

SEQ ID NO: 35526 - protein, 382 aa, Muscodor strobelii
  misc_feature: SGI Peptide ID NO. 572304
MSLSMDIPAYPTINELTHASIREYIAVPDDPTSYAKVSQAYQPALDMIKGFIAGSTCLPSDSIDIRLEVCDLIPCLMDFDGRRVLTHEGIPIEVDDTLGIEPIYLSHPLARGWRLTRTAESAKAWGFKAVVVIITLPELSNLTRYPDLLHERLHFDVLCNNSSIESSQLPALAYLLVSRNKADEEEDVWLPPTSVINHRDQGDIVVSGDRCFHFLPLEKRRWSNLSQLWSYLTDMFAARSSEEVKEFLQSEIKMVASVRFQISLVQPTKNGTPQLNDTYNERNVALICCATFWKRSSIEEWRPADKQLREFRVEQGKIEGLVDYVERNDLLHLGRHNSQWYRAIQWRFVVNEDAGIRPECVNNRYIFQRDRHGGYTCLRWLN

SEQ ID NO: 35527 - DNA, 1379 bp, Muscodor strobelii
  misc_feature: SGI EST ID NO. CUFF.84672.0
  misc_feature: Variant of the nucleotide sequence at SEQ ID NO 35525
cgtgcctgatggactttgatggacgacgtgttctcactcatgaaggcataccgatagaggtagacgatacactaggaatagagcctatctatctatctcatcccctagcccgcggatggcggttgactcggaccgcagaatctgccaaagcatggggtttcaaagctgtagttgtcataatcacgcttcccgagctttcaaaccttacacggtatcccgacctattgcacgagcgtctgcatttcgatgtgctttgcaataatagcagtatagagagcagtcagttacccgctctggcgtacttgctcgtctccagaaacaaagcagacgaagaggaagatgtctggctcccaccaacaagtgtcatcaaccatagggaccaaggcgacatcgtggtctccggagatcgatgcttccattttttacctctagagaagcgccgttggagcaacttatcacaactttggtcctatttaacggacatgtttgcggcgcggtcgtccgaagaggtgaaagagttcctgcaatctgagatcaaaatggtcgcctcagttagatttcaaatcagtctcgtgcagccaaccaagaatggtacgccccaactgaacgatacttacaatgaaaggaacgtggccctgatttgctgcgccactttttggaagcgtagttctattgaagagtggcgaccagctgataagcaattgcgcgaattccgcgtcgagcaaggcaagatcgagggactggtcgactatgtggagaggaacgatttgttgcacttgggaagacacaattcgcaatggtatcgcgcaatccagtggagattcgttgtgaatgaggacgccggaattaggcccgagtgtgtcaacaacagatacatcttccagcgtgatcgtcatggaggatacacttgtctgcgttggcttaattaaggagagaaaccgtatgttgtgatcgcgattggatcttataaccgacctactgaggccgaggatctctattaaatggtcgcagacatgctgcaggatgtagacatgaaaagctatactttcaataaattatcccctcacctgacttgtttgcgaccattcgcctgctaccgcatgctctccgtgaggtgaatggaacatgtaaaagccaagaatatggtttcatacactctgcatcgcggacacaaaacacattatcggtaacattgtatcagcgaacagacaaggtcacgttattgttcggtcgtgtttaaatcgcattcatgtcagcaacacgcgccactcgtcttatctattgaactcgtagcaaccaatctaagtagaaagtttagtaatatacatgaatttcaatcaaacagagttctcaggcggtctcaatttataaaacacgaa

SEQ ID NO: 35528 - DNA, 1362 bp, Muscodor strobelii
  misc_feature: SGI cDNA ID NO. 572305
  misc_feature: Encodes the peptide sequence at SEQ ID NO 35529
atggaaactgtgaaagtgaagctagtgccattcgacctcgttccttgttatatgtatttcgacgggagttccattctgttagctgagaactacaaaccacttgtccgtgaggatgaatacgtagatgccggcacagtcccgacaaaaattgacgaatacagaagtcggaaagacatgaaaggtcattccagtgatgggaagaaagccgaagcggcattcgtcaaagccgaaaactggggtaacatccggtactcaaagcacaacattatccctggatggcggcgcgctaggggcgaggaggtcaacaccagccgtattcacgcaatgggaatcgttatgacgcttgatagaattccgaagagagacctcatacaccacttaagagactatatccatgacatgctctgctttaatttgttcgagcatggcaacccgttcaagacgtttagaattcccagtggggacgaatctcccatccaacctgttcccagcacggaaagtaaaattctggtcgaatatccccctgacacagagtgtaaacctctaagcgaatatcccagctggatcataggaaatccttacttcagatacctcgagcacaatgatatgaaacttattgagtggactcctcccgccggagacacatctactgctttgcaatcatacaatggtgacatctttgacctcctcaaagacttctcttcctccgaagaggagcccgaagagatgcctagacgggacccatctcctgagcatggatctcctcctttgcctggtacagatgccatggacagcgttgagacgtgtcccatatcggctgcccagcattttagagagctggcttgtgaaatcaacataacaaacgatcggaacggcatctggctgcctccaatcgccgcatatgaacgccgagggattgaccagagtatcacaaggatcgaacgacactgtttcaagttcgccagggctattgataggtcctacgagagctacgacaggttatgcaacgatctgaaatatagatttcgatgcctaaatgattcaaaggtgcttgaactgtgggaaaaatacgctaagcgcaagatattgaagatcgaagtcacccctacgccagttcaaactcaagagagcagagcggaacgttccttgaggcacgcgaaagagggcgacgatagatgggtcacagtcttatgtggtatcattgttgatactgatccagtggacgaagactggcggaggttcattcgctggaaggtatcgttgaagaaacatgctattttgagggttgatcctaaatacgttttcagaaagctggactcgggtgcttactcagttattgcctggcgtgaggagaggaaatga

SEQ ID NO: 35529 - protein, 453 aa, Muscodor strobelii
  misc_feature: SGI Peptide ID NO. 572305
METVKVKLVPFDLVPCYMYFDGSSILLAENYKPLVREDEYVDAGTVPTKIDEYRSRKDMKGHSSDGKKAEAAFVKAENWGNIRYSKHNIIPGWRRARGEEVNTSRIHAMGIVMTLDRIPKRDLIHHLRDYIHDMLCFNLFEHGNPFKTFRIPSGDESPIQPVPSTESKILVEYPPDTECKPLSEYPSWIIGNPYFRYLEHNDMKLIEWTPPAGDTSTALQSYNGDIFDLLKDFSSSEEEPEEMPRRDPSPEHGSPPLPGTDAMDSVETCPISAAQHFRELACEINITNDRNGIWLPPIAAYERRGIDQSITRIERHCFKFARAIDRSYESYDRLCNDLKYRFRCLNDSKVLELWEKYAKRKILKIEVTPTPVQTQESRAERSLRHAKEGDDRWVTVLCGIIVDTDPVDEDWRRFIRWKVSLKKHAILRVDPKYVFRKLDSGAYSVIAWREERK

SEQ ID NO: 35530 - DNA, 777 bp, Muscodor strobelii
  misc_feature: SGI cDNA ID NO. 572306
  misc_feature: Encodes the peptide sequence at SEQ ID NO 35531
atgtgctcgtttgctggatccctacaagagactcgtttttcatctgcagaccagctcttcgcgccaatcgccgacggatccaagtcatacgatgcctcgttattcaccgttgtgcatggcacagccacgttctgggacgtcgggcgctgcaccgtcaccatcaacttggccgacgacgaacacacccagacgctaccctactatgctaatcctcgagacccgctgccgcaccccgttccccgtctccttcctctaggacagccacacgatcactgcaaccgccattgcggacctgaacatgaagcttgcttcgggcacgtctgtcatcatctctggcggtggaacggccggcgtggccaacttctcaacggctctgcgtactggataagctctcgtccttccaaccccaaggctggccagctcttgcctatacacagcaaatttcgtgcgcttacggggaaaatattctcagcaaagctcggcgtccatgtcgtatacggcatcagcgttgattctgccgccaccgataccgacggcaagaccaccgccaatcgggctggcggcgagcaacagattgctgacgtgtacgttcatgcatgggataccacgcccaataccgagtatttctccgcggatttcaagaacggcaagggctacattgggtatttcaaaaatgatgcctcaccggttgtccggcctgttaccaatgcaagcaaatatagaggcataattacccgtgccaccctccgtcataaaacagcttatcatcacttctag

SEQ ID NO: 35531 - protein, 258 aa, Muscodor strobelii
  misc_feature: SGI Peptide ID NO. 572306
  misc_feature (1)..(220): NCBI GI: 67904656 Blast Desc: AN9315.2 [Aspergillus nidulans FGSC A4] gi|40747226|gb|EAA66382.1| AN9315.2 [Aspergillus nidulans FGSC A4] gi|259488150|tpe|CBF87387.1| TPA: AMID-like mitochondrial A4]
  misc_feature (16)..(213): NCBI GI: 169608694 Blast Desc: SNOG_07433 [Phaeosphaeria nodorum SN15] gi|111063779|gb|EAT84899.1| SNOG_07433 [Phaeosphaeria nodorum SN15]
  misc_feature (16)..(220): NCBI GI: 189198754 Blast Desc: conserved [Pyrenophora tritici-repentis Pt-1C-BFP] gi|187982813|gb|EDU48301.1| conserved [Pyrenophora tritici-repentis Pt-1C-BFP]
MCSFAGSLQETRFSSADQLFAPIADGSKSYDASLFTVVHGTATFWDVGRCTVTINLADDEHTQTLPYYANPRDPLPHPVPRLLPLGQPHDHCNRHCGPEHEACFGHVCHHLWRWNGRRGQLLNGSAYWISSRPSNPKAGQLLPIHSKFRALTGKIFSAKLGVHVVYGISVDSAATDTDGKTTANRAGGEQQIADVYVHAWDTTPNTEYFSADFKNGKGYIGYFKNDASPVVRPVTNASKYRGIITRATLRHKTAYHHF

SEQ ID NO: 35532 - DNA, 1080 bp, Muscodor strobelii
  misc_feature: SGI cDNA ID NO. 572307
  misc_feature: Encodes the peptide sequence at SEQ ID NO 35533
atgaaagctatattaagacaggttgtaccgaaggagtacggtacggtcaaggctaaggtcgaagtcacgagaatgctatgggtagatggaaaatgggtactcgatgatcttaactccattgcagggcctcaacacacgaaaatcccagaggcttatgtacccacggtgactctcgaatatagtggcatgcctaaagagactagcggccaacacgtctctcacagcccatcatcgtctgacaagcgcaatttgatatcgagtttccaggtacagcgagtgtttgtcgctcttcgtctacacttggaccacagcggcactcctctatcgaaaggtttactcattgtagaatgcccccttcccttggagaattctcagcgtgaccccgcacaatattattcctcggggccttatgaagtttatcaaacagtacgggactctaacgacttgaagtgtactccgctgggaacccaatacaatgaatattctctagatagccgcttagacgtcaagagtttctcctcgatcaggaagataaagcagaggttgaggaaactcgctgatcaagatgaacttgaccaatttcaagatgcagtacaatcagcaaccccctctgcagagacaaccaagtgcaagctccttattcgagaactcgtactcaagaacaaaaagttcaaaagtctaagcggcgaaatgggcagaccggaagaaaatgaagttaatgaacaagagctgggtgaccgcgttcggtcaggaaaggacgtaggagggatctacatggcaattttcttcttcgttgaggtacttccttacggagctgaatggaattatgaacttctcaagaaagaactactgaagcctgtccaagagctccaacgcaggaaaaagttcttccaatttggtgtgagattccatttcaaaacaaacgttcagcaatgtacgggcggagagaagggagttagctcatggccaattatgatgttcaaaatcgaacacaataagggccgatatttcgtacggttcatttcgacagatttggaaacgctttatggccactgggaaaagcgcaatgcaccaagctga

SEQ ID NO: 35533 - protein, 359 aa, Muscodor strobelii
  misc_feature: SGI Peptide ID NO. 572307
MKAILRQVVPKEYGTVKAKVEVTRMLWVDGKWVLDDLNSIAGPQHTKIPEAYVPTVTLEYSGMPKETSGQHVSHSPSSSDKRNLISSFQVQRVFVALRLHLDHSGTPLSKGLLIVECPLPLENSQRDPAQYYSSGPYEVYQTVRDSNDLKCTPLGTQYNEYSLDSRLDVKSFSSIRKIKQRLRKLADQDELDQFQDAVQSATPSAETTKCKLLIRELVLKNKKFKSLSGEMGRPEENEVNEQELGDRVRSGKDVGGIYMAIFFFVEVLPYGAEWNYELLKKELLKPVQELQRRKKFFQFGVRFHFKTNVQQCTGGEKGVSSWPIMMFKIEHNKGRYFVRFISTDLETLYGHWEKRNAPS

SEQ ID NO: 35534 - DNA, 564 bp, Muscodor strobelii
  misc_feature: SGI cDNA ID NO. 572308
  misc_feature: Reduced expression when VOC is produced
  misc_feature: Encodes the peptide sequence at SEQ ID NO 35535
atgcagtctttagttgttttaatctcaggtctcgcatttgtatctttcgcaggcgcaaatgtcgacgagatccaggttgctcgcgaattttcaatcacgtccttgactggcaagtttcaggccagaggtcccgatgcaggcagtccaattgacgcctcactcaagatcaatcttgacctccccgtgaactcgactgcggtgaatggagaaacactgaaaacagtttgtaatctcgcttggccaaaaaccgatggacctggtccaaccggctggaccctgtgcgatacgccggctgtccaatggcgcattccccctaatggatggtcgagtacccataacttccacatcgatatcttccagacagtcaagtatagcggcgccggcctatatggcacccatggactaattgttaaccccggcaatacgagtaatccagatgcatacttgagttgtattcagatgggcaagtttcagccagatacttgcacaattaacgggcccctgagtgcacacatgggatctgttatctttccagccaacccgagagccaaaaaacccaattag

SEQ ID NO: 35535 - protein, 187 aa, Muscodor strobelii
  misc_feature: SGI Peptide ID NO. 572308
  misc_feature: Useful for introducing or modulating the production of volatile compounds
MQSLVVLISGLAFVSFAGANVDEIQVAREFSITSLTGKFQARGPDAGSPIDASLKINLDLPVNSTAVNGETLKTVCNLAWPKTDGPGPTGWTLCDTPAVQWRIPPNGWSSTHNFHIDIFQTVKYSGAGLYGTHGLIVNPGNTSNPDAYLSCIQMGKFQPDTCTINGPLSAHMGSVIFPANPRAKKPN

SEQ ID NO: 35536 - DNA, 3898 bp, Muscodor strobelii
  misc_feature: SGI EST ID NO. CUFF.84832.1
  misc_feature: Variant of the nucleotide sequence at SEQ ID NO 35534
tctgaacagtatcagaggagtatccaaacccaaatacggaggatcatggaacaagtcccaggtgggtcgtgaattatcgtttatctacactttgcgctgctatgacaagacggctgggaaacaatatgattctgcgattcagccttcacaaagctctgaatacaactaaaaggacatgatattatccaaggctcaaaaatcgttgtagctattggtgtgtttctacttggtcagactaacttacgtgcgaacctggtaggcggaaatgtctatggtggcaattgtatcgtgccgtcacgcgaccgagtacaacggccgtgtgtcaccgttactcatacaagaacacgagtcactgcatacaggctgcctcatcgccctcttacatcatagaacaagtactgaataggacataaagccgcgaccctctggcatcttttcccttactctgcctcccggttcatccttcaaagcagcaaggtcaactaggtcagtgttgccagatttctcatcgcaatgcagtctttagttgttttaatctcaggtctcgcatttgtatctttcgcaggcgcaaatgtcgacgagatccaggttgctcgcgaattttcaatcacgtccttgactggcaagtttcaggccagaggtcccgatgcaggcagtccaattgacgcctcactcaagatcaatcttgacctccccgtgaactcgactgcggtgaatggagaaacactgaaaacagtttgtaatctcgcttggccaaaaaccgatggacctggtccaaccggctggaccctgtgcgatacgccggctgtccaatggcgcattccccctaatggatggtcgagtacccataacttccacatcgatatcttccagacagtcaagtatagcggcgccggcctatatggcacccatggactaattgttaaccccggcaatacgagtaatccagatgcatacttgagttgtattcagatgggcaagtttcagccagatacttgcacaattaacgggcccctgagtgcacacatgggatctgttatctttccagccaacccgagagccaaaaaacccaattagcgcgagcgtgcggaaggcaaggaataggcttggttgtcgggagcgagagatgagaatgattttgggcgcgttgattgcttgtatcttggtagttcgaatgaggattgaatcattcccctactgttcgtcgctgctcatattcgtgtgctagagacaacgtagatcgcgaaaccctgtaaaattagtccgaagctgagtaaatgagcgcgtgcatggggcaatcgtcattctctcgcttgacgactaatttcgtatgggacctgacgttgacatcgagattgatgcgcagaaggtagatactatgttgtcggaggcgtcgagaccttgcgctcgttgaactaggggcgtcgcgtgtcgtgcggtggccgccaagggatacgcgatggcgaggtcaatcacttcagtatttgtataacagaaagctcattattggctgggcgaaatgcgttttctgtcgtttgttcgctaaccaagagtagggagataattggcgagttcatcatcatgattgattgaagtttcctcatgcgatagcttgtatagacacctcgtgactgctgccagctgtttaacagctaccctaagtggcgggtggtaaagctgaaggatccatagcgcccttgtcccctacaagccgcctatacaaatgtggctcgttgagcccccaagcctaatagcagccttcttttgttcgggcactcattcaaaattccgagctcacaatcataacttcacatcatacatcaaagccactgaacaagcttgtcgatacgtgcatgcctcgtcccggggtggaaagttgtgtcttgagtcattcaacaacgcgctttcctctcacagattcagtggagcccgaggtgggttgcaacttcgacgagtgagcgacaacataattccagggtcttgtcatattatacaatgccgcacatacgaattgaggacggcgatagaataaccgaccggcgaacaatttggctttcgcgcccgagaatgattctcgatatcggcctccaataaacgagacttcgtgaacgggacaattcgggtcgcaaactggcgaaataggcaagacatgaaatcaagacgcgcaaaaggactgcttagtcttcggagtatagatattagatgactcttttgagcatatataagatgtcatttcaacgacaagctcaacaatcggtatcatgatacatcgcattacgtctgaagcagcaccacaacacattgactaccggaattaacagtattaaaactatgcctccgatgaaacagagctccgcgatggtcgcatttgcccttgcgactttctccacgactgttcttgcgactcttccattcgggcactatggaccagaaggcactgttttgttcctgaacggatttcatttcgtgtccggtcacaccgactgggaaatctctgccaaccattattgcacgatcatccgggacgatctgctacaatgcgctgtatataacactgcgacggaaccagctcacctagcaggggttgagtacattgtcacagaggatgccttcaatactttcgaatgcgaagaacgacagctttggcatagccatgcctacgagatcacgagcggctttctgattgagcctgggctcccggcatctgtcgaccatacaattatgaaagatgttcttgcgaacacttacgggaagactttccacacatggcgatatgatcaacagaactcgacctatcccttcggaatcccggagctcgtagttggcttcacgcaagataatcagatcacacctgacttcgtgcttcagcgcgacgagcttttcggcataaacactactgaggtcagagaatcgcgagctgatatcgtacccgacaaggttctgccaggagcagacagttggaaatatggatatgtacttaccttgggcttgttgaatcagaccgcgaacatgagtttcgctcaagatcgctcgcaggctgtacttgattcctgattcatatcaaagctgttgcgcgcgttgctatgtcatattggaactgcatagaaacagaagatgatgttgggatgctatcaaggatagggcagtctgtacgataaatcaaacaatactccactcccactgtactgcagtgttttctcaacatgtgtagatatgccaaaattagaaggtaaccgcgacggcttgaagttagacctcgacctctgatcggaattcagttgataagtacgtaggtaagaaataattaagattaatctccacaagattgggcatggcaatgctgcagtagaaaattttttcggtttagataagcctcaatccctttgctgcggccacgttcctcatccgggaaaaggtatgatgtcgagaaaacataggtgagaagcgagagtgcggtccgaatgatcgaaggcttcccataaataagcattttgattgctgacagagcgagttgttatcgcaaggccaatcaagaccctgacttatagactcggccggagaagtggagtctatcggccgagtggctcgccggagccgaattgaactataagcttacccctgatgataccctcgttcacagactcgtcaccaaatcaccactgttgttgaaatacataaatataccacgctcgtcgagcgatgtatgtgtcttcttttccacatcatcacgaatacttcgctagaacgtagtatatgctcgacgaaacaacaaatattaacgaacgtcttcgtgcgaacactcaaccatcccgaaaaccttatccttctattcaaaaagatcatgtcttcgtctcaattgaaagtggctattgttggaggtgggcttgccgggatggca

SEQ ID NO: 35537 - DNA, 696 bp, Muscodor strobelii
  misc_feature: SGI cDNA ID NO. 572309
  misc_feature: Encodes the peptide sequence at SEQ ID NO 35538
atggtcgcatttgcccttgcgactttctccacgactgttcttgcgactcttccattcgggcactatggaccagaaggcactgttttgttcctgaacggatttcatttcgtgtccggtcacaccgactgggaaatctctgccaaccattattgcacgatcatccgggacgatctgctacaatgcgctgtatataacactgcgacggaaccagctcacctagcaggggttgagtacattgtcacagaggatgccttcaatactttcgaatgcgaagaacgacagctttggcatagccatgcctacgagatcacgagcggctttctgattgagcctgggctcccggcatctgtcgaccatacaattatgaaagatgttcttgcgaacacttacgggaagactttccacacatggcgatatgatcaacagaactcgacctatcccttcggaatcccggagctcgtagttggcttcacgcaagataatcagatcacacctgacttcgtgcttcagcgcgacgagcttttcggcataaacactactgaggtcagagaatcgcgagctgatatcgtacccgacaaggttctgccaggagcagacagttggaaatatggatatgtacttaccttgggcttgttgaatcagaccgcgaacatgagtttcgctcaagatcgctcgcaggctgtacttgattcctga

SEQ ID NO: 35538 - protein, 231 aa, Muscodor strobelii
  misc_feature: SGI Peptide ID NO. 572309
  misc_feature (5)..(191): Pfam Id: PF06884 Pfam Desc: Domain of function (DUF1264)
  misc_feature (29)..(191): Pfam Id: PF06884 Pfam Desc: Domain of function (DUF1264)
  misc_feature (29)..(216): NCBI GI: 284039957 Blast Desc: protein of function DUF1264 [Spirosoma linguale DSM 74] gi|283819250|gb|ADB41088.1| protein of function DUF1264 [Spirosoma linguale DSM 74]
  misc_feature (30)..(209): NCBI GI: 261340047 Blast Desc: EcanA3_06260 [Enterobacter cancerogenus ATCC 35316]
  misc_feature (30)..(224): NCBI GI: 68637880 Blast Desc: lipoprotein [Pseudomonas syringae pv. phaseolicola]
  misc_feature (30)..(209): NCBI GI: 283785259 Blast Desc: ROD_15411 [Citrobacter rodentium ICC168] gi|282948713|emb|CBG88305.1| exported protein [Citrobacter rodentium ICC168]
  misc_feature (25)..(209): NCBI GI: 148547095 Blast Desc: Pput_1863 [Pseudomonas putida F1] gi|148511153|gb|ABQ78013.1| protein of function DUF1264 [Pseudomonas putida F1]
  misc_feature (30)..(204): NCBI GI: 237802011 Blast Desc: lipoprotein [Pseudomonas syringae pv. oryzae str. 1_6]
  misc_feature (25)..(209): NCBI GI: 26990667 Blast Desc: lipoprotein [Pseudomonas putida KT2440] gi|24985656|gb|AAN69556.1|AE016589_5 lipoprotein, [Pseudomonas putida KT2440]
  misc_feature (30)..(209): NCBI GI: 168241095 Blast Desc: conserved [Salmonella enterica subsp. enterica serovar Heidelberg str. SL486] gi|194446283|ref|YP_002040809.1| SNSL254_A1675 [Salmonella enterica subsp. enterica serovar str.
  misc_feature (30)..(209): NCBI GI: 204927434 Blast Desc: conserved [Salmonella enterica subsp. enterica serovar Javiana str. GA_MM04042433] gi|204322776|gb|EDZ07972.1| conserved [Salmonella enterica subsp. enterica serovar Javiana str.
  misc_feature (30)..(209): NCBI GI: 16760314 Blast Desc: secreted protein [Salmonella enterica subsp. enterica serovar Typhi str. CT18] gi|29141921|ref|NP_805263.1| secreted protein [Salmonella enterica subsp. enterica serovar Typhi str. -
MVAFALATFSTTVLATLPFGHYGPEGTVLFLNGFHFVSGHTDWEISANHYCTIIRDDLLQCAVYNTATEPAHLAGVEYIVTEDAFNTFECEERQLWHSHAYEITSGFLIEPGLPASVDHTIMKDVLANTYGKTFHTWRYDQQNSTYPFGIPELVVGFTQDNQITPDFVLQRDELFGINTTEVRESRADIVPDKVLPGADSWKYGYVLTLGLLNQTANMSFAQDRSQAVLDS

SEQ ID NO: 35539 - DNA, 3898 bp, Muscodor strobelii; identical to SEQ ID NO: 35536
  misc_feature: SGI EST ID NO. CUFF.84832.1
  misc_feature: Variant of the nucleotide sequence at SEQ ID NO 35537

SEQ ID NO: 35540 - DNA, 1266 bp, Muscodor strobelii
  misc_feature: SGI cDNA ID NO. 572310
  misc_feature: Encodes the peptide sequence at SEQ ID NO 35541
atgtcttcgtctcaattgaaagtggctattgttggaggtgggcttgccgggatggcaacagcgctcgccctcaaagagctctcgattccatgcagcgtcttcgaaatgcgagacactaatgctgccccaccgttgtctagcggcgccctgatgttgtctcctaattcgctcaggattctggaacgcttcgggatatctcagaagcttcgagagaagagttatgcatttgagtatgtctactacaaaaatgccgaggagaagactatcgaccgctatcccctaggtcacgaagagcttttcggctacaaagccctccgtgtatatcgccaagagctgctcgatcttctctatgaggcctgctttgcgcgtaacataccagtccatttcagcaagaagtttaaagaggttgtcgaagaaacgcctacaagcgtgaccctcaggttcacagacggaaccaccgagacagcttctttgctgattggcgcagatggcattcatagcaaaataaggggttacgtcacacccggtgtcgagaagaagtttctcggtctgacagctttgacgtgggaggttccgacaagcgagctgcgcatcccgaatgacaaagactacgtgttcccaacaagcgttcaaacgacgaatggaacctttgtgcttgcaccgcagaagcccgacggagctgccatgcttgccggtacacaatttccagtcgaagagctcgatcgcgaatcttgggacaagttatttgcagacaaagagggtctgattaagcgagctagaaagaatatggacgtctggccagacatcattcagtccagcatggaaaacatcaatcccgatacgatcaatctctgggccttctatgcgattccgcggcttccaaattggacttcgggcattcaccgtcgtgttgtaatcttaggagatgctgctcatgctatcccaccaacaactggccagggcgcatcgcaagcgtttgaagatgctttcacccttgctttgatggtctcaggagtttcagaaaacaataatgtgaaatgggaagaggcgctcaagtattggcagcagcttcgccaggaccgtattgacgatcttcttgttcttacgaaacaactcaacaataagcggcttccgcctagcgcacagacaaacctgtcgagagaggagctatggaccgatgagtcagctcagaatcctacgcagatggcatggctatacgacccaaaaatcgaggaaaaagtgaaggaatgggtcagggaacattaa

SEQ ID NO: 35541 - protein, 421 aa, Muscodor strobelii
  misc_feature: SGI Peptide ID NO. 572310
  misc_feature (7)..(371): Pfam Id: PF01266 Pfam Desc: FAD dependent oxidoreductase
  misc_feature (5)..(369): Pfam Id: PF01494 Pfam Desc: FAD binding domain
  misc_feature (7)..(38): Pfam Id: PF01266 Pfam Desc: FAD dependent oxidoreductase
  misc_feature (3)..(421): NCBI GI: 49409612 Blast Desc: monooxygenase [Aspergillus flavus]
  misc_feature (3)..(421): NCBI GI: 238500445 Blast Desc: FAD dependent oxidoreductase, [Aspergillus flavus NRRL3357] gi|220693210|gb|EED49556.1| FAD dependent oxidoreductase, [Aspergillus flavus NRRL3357]
  misc_feature (4)..(421): NCBI GI: 154309121 Blast Desc: BC1G_07455 [Botryotinia fuckeliana B05.10] gi|150852498|gb|EDN27690.1| BC1G_07455 [Botryotinia fuckeliana B05.10]
  misc_feature (8)..(418): NCBI GI: 240281408 Blast Desc: kynurenine 3-monooxygenase [Ajellomyces capsulatus H143]
  misc_feature (4)..(421): NCBI GI: 156049701 Blast Desc: SS1G_08557 [Sclerotinia sclerotiorum 1980] gi|154692956|gb|EDN92694.1| SS1G_08557 [Sclerotinia sclerotiorum 1980]
  misc_feature (8)..(418): NCBI GI: 225555187 Blast Desc: kynurenine 3-monooxygenase [Ajellomyces capsulatus G186AR]
  misc_feature (8)..(418): NCBI GI: 145241474 Blast Desc: An09g00590 [Aspergillus niger] gi|134077921|emb|CAL00319.1| protein product [Aspergillus niger]
  misc_feature (8)..(418): NCBI GI: 154272800 Blast Desc: [Ajellomyces capsulatus NAm1] gi|150415764|gb|EDN11108.1| [Ajellomyces capsulatus NAm1]
  misc_feature (1)..(417): NCBI GI: 162134401 Blast Desc: monooxygenase [Trichoderma hamatum]
  misc_feature (1)..(421): NCBI GI: 261356538 Blast Desc: kynurenine 3-monooxygenase [Verticillium albo-atrum VaMs.102]
  misc_feature (41)..(361): SWISSPROT Homolog: EC 1.14.13.1 Salicylate 1-monooxygenase
MSSSQLKVAIVGGGLAGMATALALKELSIPCSVFEMRDTNAAPPLSSGALMLSPNSLRILERFGISQKLREKSYAFEYVYYKNAEEKTIDRYPLGHEELFGYKALRVYRQELLDLLYEACFARNIPVHFSKKFKEVVEETPTSVTLRFTDGTTETASLLIGADGIHSKIRGYVTPGVEKKFLGLTALTWEVPTSELRIPNDKDYVFPTSVQTTNGTFVLAPQKPDGAAMLAGTQFPVEELDRESWDKLFADKEGLIKRARKNMDVWPDIIQSSMENINPDTINLWAFYAIPRLPNWTSGIHRRVVILGDAAHAIPPTTGQGASQAFEDAFTLALMVSGVSENNNVKWEEALKYWQQLRQDRIDDLLVLTKQLNNKRLPPSAQTNLSREELWTDESAQNPTQMAWLYDPKIEEKVKEWVREH

SEQ ID NO: 35542 - DNA, 697 bp, Muscodor strobelii
  misc_feature: SGI EST ID NO. CUFF.84702.0
  misc_feature: Variant of the nucleotide sequence at SEQ ID NO 35540
ctcggtctgacagctttgacgtgggaggttccgacaagcgagctgcgcatcccgaatgacaaagactacgtgttcccaacaagcgttcaaacgacgaatggaacctttgtgcttgcaccgcagaagcccgacggagctgccatgcttgccggtacacaatttccagtcgaagagctcgatcgcgaatcttgggacaagttatttgcagacaaagagggtctgattaagcgagctagaaagaatatggacgtctggccagacatcattcagtccagcatggaaaacatcaatcccgatacgatcaatctctgggccttctatgcgattccgcggcttccaaattggacttcgggcattcaccgtcgtgttgtaatcttaggagatgctgctcatgctatcccaccaacaactggccagggcgcatcgcaagcgtttgaagatgctttcacccttgctttgatggtctcaggagtttcagaaaacaataatgtgaaatgggaagaggcgctcaagtattggcagcagcttcgccaggaccgtattgacgatcttcttgttcttacgaaacaactcaacaataagcggcttccgcctagcgcacagacaaacctgtcgagagaggagctatggaccgatgagtcagctcagaatcctacgcagatggcatggctatacgacccaaaaatcgaggaaaaag

SEQ ID NO: 35543 - DNA, 462 bp, Muscodor strobelii
  misc_feature: SGI cDNA ID NO. 572311
  misc_feature: Encodes the peptide sequence at SEQ ID NO 35544
atgtgtcgctatcgtaagtctcttttcctctgcaaccacgcccaggttgcacccgagcgtttgattttttgtgcagcgcagaaggatttccaagctggcacggcaagcgagagctgtgacactatcgagactcacccacgtaacacgatccgcgtgtctaaactgtgcggaatctgcggtgagaagaaggacatgaccgacgcgcgattcaaggaaatcaaagagaaaatggcgatcatgcgaaaacatcttgacgagagctacgacggctgtatgaagacgctggacgaagtcggcctggtgccggagagtaagccggagatcattgttacgggtgttgacggagagggacatgcggtagataagcagaagagttctacagacattgatcctgttaaggagttcttgaggaagaagatgacagaagaacactcacatctgatgatgttgggcagtctctga

SEQ ID NO: 35544 - protein, 153 aa, Muscodor strobelii
  misc_feature: SGI Peptide ID NO. 572311
MCRYRKSLFLCNHAQVAPERLIFCAAQKDFQAGTASESCDTIETHPRNTIRVSKLCGICGEKKDMTDARFKEIKEKMAIMRKHLDESYDGCMKTLDEVGLVPESKPEIIVTGVDGEGHAVDKQKSSTDIDPVKEFLRKKMTEEHSHLMMLGSL

SEQ ID NO: 35545 - DNA, 162 bp, Muscodor strobelii
  misc_feature: SGI EST ID NO. CUFF.84705.0
  misc_feature: Variant of the nucleotide sequence at SEQ ID NO 35543
caataaagtcatattctggtcatcccttggatactaacctacagcacaccaagttcagtccctcccaaacccaattctcagcaagtcagtgttccatctccagcattcagctttatatttacaatgtgtcgctatcgtaagtctcttttcctctgcaaccac

SEQ ID NO: 35546 - DNA, 594 bp, Muscodor strobelii
  misc_feature: SGI cDNA ID NO. 572312
  misc_feature: Encodes the peptide sequence at SEQ ID NO 35547
atgccctcaacgacatgggatgacgataaacgtcgccagattgtccgcgccattattcagcatgctacgctgaagaaaactacccaggacaggccgttcggaagggtctgcaactggccagatgtccatcgggcactggtaaacgaagggttcacatgcacatcagatgccgtccagtcccaatgggtgaagatttggcccggtctcaggcaaatacttctcacaactgccgtgcccgacaatgcctcgtaccagctgaagctctccatcgtctctggtattccaatcgacaacaacaatgacaacgaaaacgacaacagcaacacgccgcatgagcctcaatggactctgagcgttccccaaccaggcgaagctttcgatcctccccgcctcactggtgacgatggatttgcaacgatgtccttgtatcagggcacgttctcggaggaggaccaagaggagatcaacaatttacgacaaagaatcgttcatatgaatgattcacagcttgctgtagcccacaaagatctcacaggcgccgtaattgctttgagggacgccatgcacgagagagacatcaacatgagtgagtaa

SEQ ID NO: 35547 - protein, 197 aa, Muscodor strobelii
  misc_feature: SGI Peptide ID NO. 572312
MPSTTWDDDKRRQIVRAIIQHATLKKTTQDRPFGRVCNWPDVHRALVNEGFTCTSDAVQSQWVKIWPGLRQILLTTAVPDNASYQLKLSIVSGIPIDNNNDNENDNSNTPHEPQWTLSVPQPGEAFDPPRLTGDDGFATMSLYQGTFSEEDQEEINNLRQRIVHMNDSQLAVAHKDLTGAVIALRDAMHERDINMSE

SEQ ID NO: 35548 - DNA, 729 bp, Muscodor strobelii
  misc_feature: SGI cDNA ID NO. 572313
  misc_feature: Elevated expression when VOC is produced
  misc_feature: Encodes the peptide sequence at SEQ ID NO 35549
atgggtttcgaactccaggagatcgatccgggaacagattttcccgccatcgccagatgtatgttcgactcgtatcaaaacccgccacagtccttcttctacacgtggtttcccattcacggttctacaaacgacgcgcgtgagaaggccattgcggattgtgctgttcgtctgcacgcctggctcacggaggatccaacctcgtactgtcagaaaattgtggacactgagaccggtcgcattgctggcggtgcgctttggaatatccatacaaaaaatccatttggcgataagcccaaagtttcggaggttacatggtatcctaatgatggttcacgtcgatttgccgaacaggtccttgagatccaccttggaccaaggtttcgcgcaggacagcgaccacatgtctatctgttcatcattttcacacatcctgactatcgtcgcaaaggggttggccagacgttcatgaactggggtatgaataaagcggacgaactaggggtagacttcttcctagatgcaaccccaataggcaagcccctatatcttgctaataatctcgtcgaagtagagaagaatgtcattgtacctcgtgcggatcaccctgacgatggttggaaggcggcagagaaaaatattggacacacaacctggttcctcatgtggagaccggtaggcggcaatttcgaagaatggaaaactatcaaaccatgggagaaggactag

SEQ ID NO: 35549 - protein, 242 aa, Muscodor strobelii
  misc_feature: SGI Peptide ID NO. 572313
  misc_feature (73)..(170): Pfam Id: PF00583 Pfam Desc: Acetyltransferase (GNAT) family
  misc_feature (1)..(237): NCBI GI: 156055888 Blast Desc: SS1G_05296 [Sclerotinia sclerotiorum 1980] gi|154703080|gb|EDO02819.1| SS1G_05296 [Sclerotinia sclerotiorum 1980]
  misc_feature (1)..(237): NCBI GI: 154302378 Blast Desc: BC1G_09973 [Botryotinia fuckeliana B05.10] gi|150855461|gb|EDN30653.1| BC1G_09973 [Botryotinia fuckeliana B05.10]
  misc_feature (1)..(240): NCBI GI: 256720567 Blast Desc: NECHADRAFT_55801 [Nectria haematococca mpVI 77-13-4]
  misc_feature (1)..(242): NCBI GI: 256728132 Blast Desc: NECHADRAFT_102153 [Nectria haematococca mpVI 77-13-4]
  misc_feature (1)..(226): NCBI GI: 154298180 Blast Desc: BC1G_12055 [Botryotinia fuckeliana B05.10] gi|150858241|gb|EDN33433.1| BC1G_12055 [Botryotinia fuckeliana B05.10]
  misc_feature (1)..(242): NCBI GI: 145237354 Blast Desc: An07g02400 [Aspergillus niger] gi|134075793|emb|CAK39329.1| protein product [Aspergillus niger]
  misc_feature (1)..(242): NCBI GI: 242796234 Blast Desc: conserved [Talaromyces stipitatus ATCC 10500] gi|218719344|gb|EED18764.1| conserved [Talaromyces stipitatus ATCC 10500]
  misc_feature (1)..(239): NCBI GI: 119490735 Blast Desc: NFIA_063540 [Neosartorya fischeri NRRL 181] gi|119411250|gb|EAW21193.1| conserved [Neosartorya fischeri NRRL 181]
  misc_feature (7)..(235): NCBI GI: 119499411 Blast Desc: GNAT family acetyltransferase, [Neosartorya fischeri NRRL 181] gi|119414627|gb|EAW24566.1| GNAT family acetyltransferase, [Neosartorya fischeri NRRL 181]
  misc_feature (13)..(240): NCBI GI: 67525773 Blast Desc: AN3344.2 [Aspergillus nidulans FGSC A4] gi|40744132|gb|EAA63312.1| AN3344.2 [Aspergillus nidulans FGSC A4] gi|259485678|tpe|CBF82903.1| TPA: acetyltransferase nidulans
  misc_feature: Useful for introducing or modulating the production of volatile compounds
MGFELQEIDPGTDFPAIARCMFDSYQNPPQSFFYTWFPIHGSTNDAREKAIADCAVRLHAWLTEDPTSYCQKIVDTETGRIAGGALWNIHTKNPFGDKPKVSEVTWYPNDGSRRFAEQVLEIHLGPRFRAGQRPHVYLFIIFTHPDYRRKGVGQTFMNWGMNKADELGVDFFLDATPIGKPLYLANNLVEVEKNVIVPRADHPDDGWKAAEKNIGHTTWFLMWRPVGGNFEEWKTIKPWEKD

SEQ ID NO: 35550 - DNA, 1289 bp, Muscodor strobelii
  misc_feature: SGI EST ID NO. CUFF.84733.0
  misc_feature: Variant of the nucleotide sequence at SEQ ID NO 35548
caaagttctgttctgattctatatatagatgctacgacttccgtagttgatccaagtccgttgaagttctgtgcacccgcctgctcagtactctttcgatacgatttggcgcacgatttcgcacctttatcatcaacaggcagcatcatcactcatattagcttgaggataaaggtacgacactttgtccggttcataggtgtaacaatgggtttcgaactccaggagatcgatccgggaacagattttcccgccatcgccagatgtatgttcgactcgtatcaaaacccgccacagtccttcttctacacgtggtttcccattcacggttctacaaacgacgcgcgtgagaaggccattgcggattgtgctgttcgtctgcacgcctggctcacggaggatccaacctcgtactgtcagaaaattgtggacactgagaccggtcgcattgctggcggtgcgctttggaatatccatacaaaaaatccatttggcgataagcccaaagtttcggaggttacatggtatcctaatgatggttcacgtcgatttgccgaacaggtccttgagatccaccttggaccaaggtttcgcgcaggacagcgaccacatgtctatctgttcatcattttcacacatcctgactatcgtcgcaaaggggttggccagacgttcatgaactggggtatgaataaagcggacgaactaggggtagacttcttcctagatgcaaccccaataggcaagcccctatatcttgctaataatctcgtcgaagtagagaagaatgtcattgtacctcgtgcggatcaccctgacgatggttggaaggcggcagagaaaaatattggacacacaacctggttcctcatgtggagaccggtaggcggcaatttcgaagaatggaaaactatcaaaccatgggagaaggactagagccataactcacgagctcggcaggtcgcattattcctttccaagtcctgccagaagcagaaagtgattatcaggtctttagtggctgagcggcacttggcagttctgcagctctcctcgcaaaatactctattagagacaccttgcaggtgaacccaaatggtcatcaaacattgcattttgtgtaccgtcggtacgaattgtacggtacatcgattggtacttactgtaacaatatgcttccaggtagcctaagtagagtcaacttccaactatccttgagtacggtcgccgtacactctttcggtgtgcagcgacacagcaagcaaataatccctcgtatactataaaat

SEQ ID NO: 35551 - DNA, 954 bp, Muscodor strobelii
  misc_feature: SGI cDNA ID NO. 572314
  misc_feature: Elevated expression when VOC is produced
  misc_feature: Encodes the peptide sequence at SEQ ID NO 35552
atggacgaaagtccaaggcagaccgatccacgagatgagattcagctaattacctggttcctcttcgtggtcgccgtgctcagcgtttctacgcggcttgctactcaatatgcgatgacttcaaagctgccaacggaagattttcttatgctagcatcattggcttcgtacttaacacaatgcatcttaacatcgaaagccgcggccaccggtcttggtctgtcctcgaccagtttaacaggacaaatgatcgataatgttatcaagatagattatgccagtatccctttctttatcttgaccttgggactcatcaagctatctatatgtttcgccatcatgcatctaagcccgatccgacttcaccggcgactgaatgtggttcttggagcgataactgcgctttggtatgtgccagctacgttcgtctcgatattccaatgcgcactcccgacaccatggaacttcatcgatagcacgcattgtgtagataggcatgcatggtgggctttcgtcatgacattgaacgccattacggacgtcggtcttgtagctctttatgttttgatactgtggcatcttcatatctcgccagcgcggaaagctactttgataacggtgttctcaacccgaatccttgtcgtggcagctgcaatcgtccagctcgtcacattttacaattcgctttcagatgatgatgtcacatccgcgctatatctacccattgcgctgaagcaagccgtgctcgctgctagcattgttacggcttgcattccctacctcaaaccttttatgaatagtctagaggcaggtgtagtcagaatagagaacgtccctggatctgaagaagaactttcgcgggacagaacaaacggttcggcgtattatctgaatagctacggaggtgctggctcttccgcgtggtgttcatgcgataatgatccaagagcatga

SEQ ID NO: 35552 - protein, 317 aa, Muscodor strobelii
  misc_feature: SGI Peptide ID NO. 572314
  misc_feature (14)..(289): NCBI GI: 242796225 Blast Desc: conserved [Talaromyces stipitatus ATCC 10500] gi|218719342|gb|EED18762.1| conserved [Talaromyces stipitatus ATCC 10500]
  misc_feature (14)..(278): NCBI GI: 115492219 Blast Desc: [Aspergillus terreus NIH2624] gi|114197597|gb|EAU39297.1| [Aspergillus terreus NIH2624]
  misc_feature (3)..(295): NCBI GI: 256719806 Blast Desc: NECHADRAFT_89559 [Nectria haematococca mpVI 77-13-4] gi|256730184|gb|EEU43536.1| NECHADRAFT_82920 [Nectria haematococca mpVI 77-13-4]
  misc_feature (8)..(296): NCBI GI: 119188277 Blast Desc: CIMG_04186 [Coccidioides immitis RS]
  misc_feature (8)..(296): NCBI GI: 240107899 Blast Desc: CPC735_002400 [Coccidioides posadasii C735 delta SOWgp]
  misc_feature (14)..(315): NCBI GI: 242800720 Blast Desc: conserved [Talaromyces stipitatus ATCC 10500] gi|218716990|gb|EED16411.1| conserved [Talaromyces stipitatus ATCC 10500]
  misc_feature (14)..(281): NCBI GI: 212531441 Blast Desc: conserved [Penicillium marneffei ATCC 18224] gi|210071241|gb|EEA25330.1| conserved [Penicillium marneffei ATCC 18224]
  misc_feature (14)..(301): NCBI GI: 212540778 Blast Desc: PMAA_057240 [Penicillium marneffei ATCC 18224] gi|210067843|gb|EEA21935.1| PMAA_057240 [Penicillium marneffei ATCC 18224]
  misc_feature (14)..(292): NCBI GI: 256720571 Blast Desc: NECHADRAFT_55806 [Nectria haematococca mpVI 77-13-4]
  misc_feature (14)..(304): NCBI GI: 256728318 Blast Desc: NECHADRAFT_97744 [Nectria haematococca mpVI 77-13-4]
  misc_feature: Useful for introducing or modulating the production of volatile compounds
MDESPRQTDPRDEIQLITWFLFVVAVLSVSTRLATQYAMTSKLPTEDFLMLASLASYLTQCILTSKAAATGLGLSSTSLTGQMIDNVIKIDYASIPFFILTLGLIKLSICFAIMHLSPIRLHRRLNVVLGAITALWYVPATFVSIFQCALPTPWNFIDSTHCVDRHAWWAFVMTLNAITDVGLVALYVLILWHLHISPARKATLITVFSTRILVVAAAIVQLVTFYNSLSDDDVTSALYLPIALKQAVLAASIVTACIPYLKPFMNSLEAGVVRIENVPGSEEELSRDRTNGSAYYLNSYGGAGSSAWCSCDNDPRA

SEQ ID NO: 35553 - DNA, 1309 bp, Muscodor strobelii
  misc_feature: SGI EST ID NO. CUFF.84729.0
  misc_feature: Variant of the nucleotide sequence at SEQ ID NO 35551
gtcaggatagaccaggtaggagtgtggcgtatgatatctgtgcccacatgcgtgccccgatgaaggtaaatactcaatagaacagcaagtatatagtcaatatgcgtgtatccaggggaaatggggcagtggctgttctatcatacatatagacgcctgcacctatcaagtggttagcccatagggcagtctcctggcattctccctgttctgagaccgtgctgacatcttcgcacgcgattgcgctatggacgaaagtccaaggcagaccgatccacgagatgagattcagctaattacctggttcctcttcgtggtcgccgtgctcagcgtttctacgcggcttgctactcaatatgcgatgacttcaaagctgccaacggaagattttcttatgctagcatcattggcttcgtacttaacacaatgcatcttaacatcgaaagccgcggccaccggtcttggtctgtcctcgaccagtttaacaggacaaatgatcgataatgttatcaagatagattatgccagtatccctttctttatcttgaccttgggactcatcaagctatctatatgtttcgccatcatgcatctaagcccgatccgacttcaccggcgactgaatgtggttcttggagcgataactgcgctttggtatgtgccagctacgttcgtctcgatattccaatgcgcactcccgacaccatggaacttcatcgatagcacgcattgtgtagataggcatgcatggtgggctttcgtcatgacattgaacgccattacggacgtcggtcttgtagctctttatgttttgatactgtggcatcttcatatctcgccagcgcggaaagctactttgataacggtgttctcaacccgaatccttgtcgtggcagctgcaatcgtccagctcgtcacattttacaattcgctttcagatgatgatgtcacatccgcgctatatctacccattgcgctgaagcaagccgtgctcgctgctagcattgttacggcttgcattccctacctcaaaccttttatgaatagtctagaggcaggtgtagtcagaatagagaacgtccctggatctgaagaagaactttcgcgggacagaacaaacggttcggcgtattatctgaatagctacggaggtgctggctcttccgcgtggtgttcatgcgataatgatccaagagcatgaaatgaggctaggataagaaatgtagcatttttttttaatttgtaatgatatctgtcggtcgatttatcaatcacgaatgatagcaccattgttgcgtagatctgcggt

SEQ ID NO: 35554 - DNA, 1629 bp, Muscodor strobelii
  misc_feature: SGI cDNA ID NO. 572315
  misc_feature: Encodes the peptide sequence at SEQ ID NO 35555
atggatgtccatgacaaggagaacgatggaggtcagctatacctaccagagaccgaaatccctaagtctgccaccggtgatgacgcagcgcttgcgcaactgggaaagaaacctgtgttgaaacgcaactttgggtttttaacaattctgggctttagctgtacggtccttatcacttgggaaggcgcattgatggtctttctctcagggcttcagaacggaggtccatcaggccttatatacggattcattgttgtctggattggcactctttctgtctctgcgactctctctgagatggtttcgatagcgcccacatctggtggacaatatcattgggtttcgatgttggcgcctccagaatactccaagtttctaagctatatcactggctggttaacactcactggctggcaagcactagttgcgtccgctgcctacttgaccggaacggcgatccagggactggtactcctgacccacccgagttacatgaaaaatatacagaattggcacggcactttacttctctgggctgtagttctactcagctacgcagtcaacacggccttcactcgatcattgtcccgatttgaaggccttgtgtttgttttccatatcgttgggttcttcgccgttctctttccgttggtgtttcttagcgaacacgcgcctgccgaagctgtttggaacacgttcttcaatcttggcgactggcagactcagggtctctccttctcgattggcatactggggaatgtgtttgcatttgttggcggcgatggtgccattcatatggccgaagaagtccgtaatcccgccgtcgttgttccgtggtcaatcgttgcgggttgtatgatcaacgggacattggggttcgccataataattgcgactctgtattgcgtaggcgacatcaacatgcgactcgaagagaaccctatctttcccttcattgctatattccataacgcagtcgggtccattcccggcgcggctgtaatgtcttcgctcgtcatcttcttgggcttcagtgccacgaccgggcaggtctcgtcgacctcgagaatatactgggcatttgcccgagatcatggtcttccagggtggcagattctcagaaaggtcagccgccgtacaagcatcccggtctactcggtcgcagcaaccatcctcgttgcggtagtcttatcatttgttaatatcggcagctcaactgcgtttaatggtgtgatttctatatcggtcgcgggtctatttgggtcttatatggtcgtggcctctttgctgctttggcgccggacaactggaggtatccgaccgcggaaccacgataattcagccaacaacttttccagtacgaccctgacctggggcccgtggcatattcctggcgccctgggagtcgcaaacaatattttcacacttgcctatcttctcttcattttcttcttcagcttctggcccgcataccgtcatgtgacgcctcagaacatgaattgggctttcttggtgttcacggtggtctccttgtttagcgttctctattattttgtgtgggccaggaaactgtacaaggggcctgtgatagagactgcgcgagatcgccaagatatacccttgacctga

SEQ ID NO: 35555 - protein, 542 aa, Muscodor strobelii
  misc_feature: SGI Peptide ID NO. 572315
  misc_feature (62)..(534): Pfam Id: PF00324 Pfam Desc: Amino acid permease
  misc_feature (69)..(115): Pfam Id: PF00324 Pfam Desc: Amino acid permease
  misc_feature (21)..(531): NCBI GI: 115492221 Blast Desc: conserved [Aspergillus terreus NIH2624] gi|114197598|gb|EAU39298.1| conserved [Aspergillus terreus NIH2624]
  misc_feature (27)..(531): NCBI GI: 255953911 Blast Desc: Pc21g06640 [Penicillium chrysogenum Wisconsin 54-1255] gi|211589419|emb|CAP95561.1| Pc21g06640 [Penicillium chrysogenum Wisconsin 54-1255]
  misc_feature (23)..(531): NCBI GI: 119188281 Blast Desc: CIMG_04188 [Coccidioides immitis RS]
  misc_feature (22)..(531): NCBI GI: 256720570 Blast Desc: [Nectria haematococca mpVI 77-13-4]
  misc_feature (23)..(531): NCBI GI: 240107898 Blast Desc: choline transport protein, [Coccidioides posadasii C735 delta SOWgp]
  misc_feature (2)..(531): NCBI GI: 256730185 Blast Desc: NECHADRAFT_70714 [Nectria haematococca mpVI 77-13-4]
  misc_feature (23)..(532): NCBI GI: 256728317 Blast Desc: NECHADRAFT_73000 [Nectria haematococca mpVI 77-13-4]
  misc_feature (15)..(531): NCBI GI: 238497279 Blast Desc: choline transport protein, [Aspergillus flavus NRRL3357] gi|220694755|gb|EED51099.1| choline transport protein, [Aspergillus flavus NRRL3357]
  misc_feature (22)..(531): NCBI GI: 238484007 Blast Desc: GABA permease, [Aspergillus flavus NRRL3357] gi|220701292|gb|EED57630.1| GABA permease, [Aspergillus flavus NRRL3357]
  misc_feature (27)..(531): NCBI GI: 46127687 Blast Desc: FG08221.1 [Gibberella zeae PH-1]
MDVHDKENDGGQLYLPETEIPKSATGDDAALAQLGKKPVLKRNFGFLTILGFSCTVLITWEGALMVFLSGLQNGGPSGLIYGFIVVWIGTLSVSATLSEMVSIAPTSGGQYHWVSMLAPPEYSKFLSYITGWLTLTGWQALVASAAYLTGTAIQGLVLLTHPSYMKNIQNWHGTLLLWAVVLLSYAVNTAFTRSLSRFEGLVFVFHIVGFFAVLFPLVFLSEHAPAEAVWNTFFNLGDWQTQGLSFSIGILGNVFAFVGGDGAIHMAEEVRNPAVVVPWSIVAGCMINGTLGFAIIIATLYCVGDINMRLEENPIFPFIAIFHNAVGSIPGAAVMSSLVIFLGFSATTGQVSSTSRIYWAFARDHGLPGWQILRKVSRRTSIPVYSVAATILVAVVLSFVNIGSSTAFNGVISISVAGLFGSYMVVASLLLWRRTTGGIRPRNHDNSANNFSSTTLTWGPWHIPGALGVANNIFTLAYLLFIFFFSFWPAYRHVTPQNMNWAFLVFTVVSLFSVLYYFVWARKLYKGPVIETARDRQDIPLT

SEQ ID NO: 35556 - DNA, 1835 bp, Muscodor strobelii
  misc_feature: SGI EST ID NO. CUFF.84738.0
  misc_feature: Variant of the nucleotide sequence at SEQ ID NO 35554
ggacaatatcattgggtttcgatgttggcgcctccagaatactccaagtttctaagctatatcactggctggttaacactcactggctggcaagcactagttgcgtccgctgcctacttgaccggaacggcgatccagggactggtactcctgacccacccgagttacatgaaaaatatacagaattggcacggcactttacttctctgggctgtagttctactcagctacgcagtcaacacggccttcactcgatcattgtcccgatttgaaggccttgtgtttgttttccatatcgttgggttcttcgccgttctctttccgttggtgtttcttagcgaacacgcgcctgccgaagctgtttggaacacgttcttcaatcttggcgactggcagactcagggtctctccttctcgattggcatactggggaatgtgtttgcatttgttggcggcgatggtgccattcatatggccgaagaagtccgtaatcccgccgtcgttgttccgtggtcaatcgttgcgggttgtatgatcaacgggacattggggttcgccataataattgcgactctgtattgcgtaggcgacatcaacatgcgactcgaagagaaccctatctttcccttcattgctatattccataacgcagtcgggtccattcccggcgcggctgtaatgtcttcgctcgtcatcttcttgggcttcagtgccacgaccgggcaggtctcgtcgacctcgagaatatactgggcatttgcccgagatcatggtcttccagggtggcagattctcagaaaggtcagccgccgtacaagcatcccggtctactcggtcgcagcaaccatcctcgttgcggtagtcttatcatttgttaatatcggcagctcaactgcgtttaatggtgtgatttctatatcggtcgcgggtctatttgggtcttatatggtcgtggcctctttgctgctttggcgccggacaactggaggtatccgaccgcggaaccacgataattcagccaacaacttttccagtacgaccctgacctggggcccgtggcatattcctggcgccctgggagtcgcaaacaatattttcacacttgcctatcttctcttcattttcttcttcagcttctggcccgcataccgtcatgtgacgcctcagaacatgaattgggctttcttggtgttcacggtggtctccttgtttagcgttctctattattttgtgtgggccaggaaactgtacaaggggcctgtgatagagactgcgcgagatcgccaagatatacccttgacctgacgctagatttcgcgggttgaggacgtcatagtcctggagaggcgatctcagtatagggatatggatgagtagatacttatcgactagctatgtggtatgctcacccagatcaagactgaggagctagtcatggggtggatcgctcggcccctcagctagtgatgatatagagtgatctgacgttagactaaggtggaatctgggcatatataattttcaataagcatgcctctatatctaatcaatcgtttgtatcttttcaagttcaagctcattcgttcggtcagatcattccccttggttgtgaagtgccccttagtaagacgataccggctactatattattgagacatttgctgccgggtctgatttgaattcagtttcaaggtgtcgacttttctcatcatagttcatcagcattggcgaaaaaattcccaccagttctcgccagagtgtttggcttttgagcaacgtgtttgaaaagcattaagataatgacggatattttacggccaagattcgaagcttca

SEQ ID NO: 35557 - DNA, 1347 bp, Muscodor strobelii
  misc_feature: SGI cDNA ID NO. 572316
  misc_feature: Encodes the peptide sequence at SEQ ID NO 35558
atgtctagcaaagcagaaatacaaaatggcacccttgcctcggaagcgacagaagagttctcaagcgaagagagtggtacttcgagcatacatgataacgctgaagccacaacaccgcagaacgatgtatcgaaagatgccccacgagcctggctttacgtcctggcctcatttttcatcttcattaacgcctggggtattacgcagacgttcggagcctttgaagagttgtacgtacgtactctgcttacgagcacgtcgcccagcgccatctcgtggatcgggagcgtccaggtgttcttcgtcatcttcctaggcgcatttacgggtccgctgttcgacgccggctatctgcggccgctgttagggcttggatgtctgctgatggtggtgggcatggctacattatcgctagcaacggaatactggcacgtatttctgtctcaagcgcttgcagtcggcatcggttctggtctcgtgtatgtgccgtcgctggcgttggtgtcgacactgttcccagactcgacacgtccctgggctatcggctgcgtcaattctggcgggagtgtcggcgggatcatctatacgttcacactgcgcggacttgtgccgtctatcggctttccttgggctgttcgggctatggccctcatcaatctcgtcgttgccgctctggccctcggtatcctcctaccatatcgtccaccgcaggccgctcatcgccgcgccgtcttcgactaccgtgctctgcgcgagccgagcttcctcctattctccctcgccctcctactcaattatgtatctttctacatacctcccttctacattcccacgtatgctaccgccgcacttgggcaaagccgtgatttcgctttcgaggcgcttgtatatgtgagcgtaggttcattcaccggacgactactgccaatgtgggcagctacacatttcggctctgtacaagtgtatcttgccgcaacggtggccacgatggttgttgtgttcacgtggatggcagtcagcaacgtcggtggcttcattgccttctgcctattctacgggtttacgtccggggtcctcgtcgccgcgccgagcgccgcgatatcgcatcccatcctgtcgccgaatatgaacgtcattggtactcgattgggaatgctctggatgttcggagccattggggtcctcattggggccccaattgcgggggccctggtgaacgtcacccctggccatgtggatttcaggccggctcaggcctttgcaggggctatagtcggtggagcatcattattcttgatcgctccgttgctcgctgtcgtaaaacatgacaagaagaaaatcggctga

SEQ ID NO: 35558 - protein, 448 aa, Muscodor strobelii
  misc_feature: SGI Peptide ID NO. 572316
  misc_feature (53)..(398): Pfam Id: PF07690 Pfam Desc: Major Facilitator Superfamily
  misc_feature (10)..(447): NCBI GI: 119488522 Blast Desc: MFS monocarboxylate transporter, [Neosartorya fischeri NRRL 181] gi|119410869|gb|EAW20814.1| MFS monocarboxylate transporter, [Neosartorya fischeri NRRL 181]
  misc_feature (21)..(446): NCBI GI: 121709674 Blast Desc: MFS monocarboxylate transporter, [Aspergillus clavatus NRRL 1] gi|119400635|gb|EAW11060.1| MFS monocarboxylate transporter, [Aspergillus clavatus NRRL 1]
  misc_feature (8)..(446): NCBI GI: 169775613 Blast Desc: [Aspergillus oryzae RIB40] gi|83771008|dbj|BAE61140.1| protein product [Aspergillus oryzae]
  misc_feature (8)..(446): NCBI GI: 238502241 Blast Desc: MFS monocarboxylate transporter, [Aspergillus flavus NRRL3357] gi|220691164|gb|EED47512.1| MFS monocarboxylate transporter, [Aspergillus flavus NRRL3357]
  misc_feature (32)..(446): NCBI GI: 255932217 Blast Desc: Pc12g08340 [Penicillium chrysogenum Wisconsin 54-1255] gi|211582284|emb|CAP80461.1| Pc12g08340 [Penicillium chrysogenum Wisconsin 54-1255]
  misc_feature (20)..(448): NCBI GI: 67903226 Blast Desc: AN8600.2 [Aspergillus nidulans FGSC A4] gi|40741444|gb|EAA60634.1| AN8600.2 [Aspergillus nidulans FGSC A4]
  misc_feature (18)..(448): NCBI GI: 259483186 Blast Desc: TPA: MFS monocarboxylate transporter, (AFU_orthologue; AFUA_7G00780) [Aspergillus nidulans FGSC A4]
  misc_feature (15)..(447): NCBI GI: 115402443 Blast Desc: [Aspergillus terreus NIH2624] gi|114189144|gb|EAU30844.1| [Aspergillus terreus NIH2624]
  misc_feature (7)..(428): NCBI GI: 145256263 Blast Desc: An10g00880 [Aspergillus niger CBS 513.88] gi|134078651|emb|CAK40524.1| protein product [Aspergillus niger]
  misc_feature (50)..(444): NCBI GI: 169775397 Blast Desc: [Aspergillus oryzae RIB40] gi|83770029|dbj|BAE60164.1| protein product [Aspergillus oryzae]
MSSKAEIQNGTLASEATEEFSSEESGTSSIHDNAEATTPQNDVSKDAPRAWLYVLASFFIFINAWGITQTFGAFEELYVRTLLTSTSPSAISWIGSVQVFFVIFLGAFTGPLFDAGYLRPLLGLGCLLMVVGMATLSLATEYWHVFLSQALAVGIGSGLVYVPSLALVSTLFPDSTRPWAIGCVNSGGSVGGIIYTFTLRGLVPSIGFPWAVRAMALINLVVAALALGILLPYRPPQAAHRRAVFDYRALREPSFLLFSLALLLNYVSFYIPPFYIPTYATAALGQSRDFAFEALVYVSVGSFTGRLLPMWAATHFGSVQVYLAATVATMVVVFTWMAVSNVGGFIAFCLFYGFTSGVLVAAPSAAISHPILSPNMNVIGTRLGMLWMFGAIGVLIGAPIAGALVNVTPGHVDFRPAQAFAGAIVGGASLFLIAPLLAVVKHDKKKIG

SEQ ID NO: 35559 - DNA, 3284 bp, Muscodor strobelii
  misc_feature: SGI EST ID NO. CUFF.84756.0
  misc_feature: Variant of the nucleotide sequence at SEQ ID NO 35557
caaggggctaccgacgcgacatttgcggattgccattatcatcgctgattggcttacctgccggcagatccgatattttaggactccctgaaccacaacaacatgtctctcgatactaccaattgacactctcactgcagcgtttacgatagtccttaagacccaccggctgccgcacctgccgagtacgggcgttcaagagagtggccgagaagcgagctgtgcgcaataatgcaatccatccgatgacactacaaccctatatgatagttgacctgctaaatttgtaacaatgtgttctgatggaactctagttctaaaatgggtatggccctacagcaagccaggatgcacgttaggctactattttgaacttgggtcggggatggccgtgatgtgtctaagcagttatcttataatgctatcataagttcagcccattcgatttgatttaattatcttttagctctatgcacgaaacggagaaaacatagatatataccaatttaatatcacaatgtctagcaaagcagaaatacaaaatggcacccttgcctcggaagcgacagaagagttctcaagcgaagagagtggtacttcgagcatacatgataacgctgaagccacaacaccgcagaacgatgtatcgaaagatgccccacgagcctggctttacgtcctggcctcatttttcatcttcattaacgcctggggtattacgcagacgttcggagcctttgaagagttgtacgtacgtactctgcttacgagcacgtcgcccagcgccatctcgtggatcgggagcgtccaggtgttcttcgtcatcttcctaggcgcatttacgggtccgctgttcgacgccggctatctgcggccgctgttagggcttggatgtctgctgatggtggtgggcatggctacattatcgctagcaacggaatactggcacgtatttctgtctcaagcgcttgcagtcggcatcggttctggtctcgtgtatgtgccgtcgctggcgttggtgtcgacactgttcccagactcgacacgtccctgggctatcggctgcgtcaattctggcgggagtgtcggcgggatcatctatacgttcacactgcgcggacttgtgccgtctatcggctttccttgggctgttcgggctatggccctcatcaatctcgtcgttgccgctctggccctcggtatcctcctaccatatcgtccaccgcaggccgctcatcgccgcgccgtcttcgactaccgtgctctgcgcgagccgagcttcctcctattctccctcgccctcctactcaattatgtatctttctacatacctcccttctacattcccacgtatgctaccgccgcacttgggcaaagccgtgatttcgctttcgaggcgcttgtatatgtgagcgtaggttcattcaccggacgactactgccaatgtgggcagctacacatttcggctctgtacaagtgtatcttgccgcaacggtggccacgatggttgttgtgttcacgtggatggcagtcagcaacgtcggtggcttcattgccttctgcctattctacgggtttacgtccggggtcctcgtcgccgcgccgagcgccgcgatatcgcatcccatcctgtcgccgaatatgaacgtcattggtactcgattgggaatgctctggatgttcggagccattggggtcctcattggggccccaattgcgggggccctggtgaacgtcacccctggccatgtggatttcaggccggctcaggcctttgcaggggctatagtcggtggagcatcattattcttgatcgctccgttgctcgctgtcgtaaaacatgacaagaagaaaatcggctgaagactttacttgcaatatatctgctatctttgtaagaaacctttgctcgactcgagcaatttgctacttgagaatgtacaaattgcagcttcgcctgtaaacggcgtaggaccgaattgaattcgagtatatccaaatttgagtgtacagtagaaagggaggtgaatgcggggtcgtgtatacctactaatacataacggcccacgaccgaggtcttacaaagcgcccacgcacgggtcggctgctagaagagcattactttagatacgcatatagactagctgaacatgctctaaaggggaagttacacaactgattcatcagaaccagatccgtctgtggattcttgttactaggtccaagtagtctggctcattttgagcattgatataaccatgtcggataaagaaatcaatccaagcggttgcactattcagcttaaaatggccttctcgcaaggctttcattgtctcctccggagtccataacaggaactcggctacctcaccatccaggggttgcgggatcatgtctgccggcatttcaaggtcataaagaatttgtgtcgccggctggagcaaaccgacttcctcagggccgccagctctttcgtcgcggattgaaaagtacgatattgtgctaactggtttcgcatgcgcccgaacccacgcctccggcagcgacgcttcttcttgcgcttcgcgcgccagacagcccagaggatcctcatcagccgtaagcccgcctccgactgtgttgtccagcatcgagggaaaggtctgtttggtcggcgagcgccgtggaatccagagtttcataccgtgatcttggtcgcggcagaaccccaacacgtgcactcctaccgtctcaacaccgaacacggcactgccggcacgggctatgcgtacttcgcgccgatcggcaagtccgcgaatgcggtagtgctcggcgcgccatttgcgcaaaattgggacactgtctctgtcgcgtgcgtgctggagcacctctgctatggcctgcgtctcataatcgccgtatgtgtctctcattattgttgtgtctggccacggaatgctgatgcatcgggtaccgtgatcaatacggaacttgtcagtccatctacgcattgggagttagtattaactcccttcaaccatttttttgctcgccaggggtgtcttgggagcttgcacgagtacattcgcgacctaaataagggtgaaatgacttcaatgtgtacttacggcatggccgccaccactgacgggagaatgtacccaacagtgcaatatgttgagggcacatcgctatcacccgatgcccaggccttcttgagacaaaaacgataatactcggacgttagacgagcaaattcatcttcgtctggataagggaggctagataccagttagcttctttt

SEQ ID NO: 35560 - DNA, 1002 bp, Muscodor strobelii
  misc_feature: SGI cDNA ID NO. 572317
  misc_feature: Encodes the peptide sequence at SEQ ID NO 35561
atgtccagcaaacccaagacctacttagagcttgtgaaagaatgtgataccctcccttatccagacgaagatgaatttgctcgtctaacgtccgagtattatcgtttttgtctcaagaaggcctgggcatcgggtgatagcgatgtgccctcaacatattgcactgttgggtacattctcccgtcagtggtggcggccatgccatggactgacaagttccgtattgatcacggtacccgatgcatcagcattccgtggccagacacaacaataatgagagacacatacggcgattatgagacgcaggccatagcagaggtgctccagcacgcacgcgacagagacagtgtcccaattttgcgcaaatggcgcgccgagcactaccgcattcgcggacttgccgatcggcgcgaagtacgcatagcccgtgccggcagtgccgtgttcggtgttgagacggtaggagtgcacgtgttggggttctgccgcgaccaagatcacggtatgaaactctggattccacggcgctcgccgaccaaacagacctttccctcgatgctggacaacacagtcggaggcgggcttacggctgatgaggatcctctgggctgtctggcgcgcgaagcgcaagaagaagcgtcgctgccggaggcgtgggttcgggcgcatgcgaaaccagttagcacaatatcgtacttttcaatccgcgacgaaagagctggcggccctgaggaagtcggtttgctccagccggcgacacaaattctttatgaccttgaaatgccggcagacatgatcccgcaacccctggatggtgaggtagccgagttcctgttatggactccggaggagacaatgaaagccttgcgagaaggccattttaagctgaatagtgcaaccgcttggattgatttctttatccgacatggttatatcaatgctcaaaatgagccagactacttggacctagtaacaagaatccacagacggatctggttctga

SEQ ID NO: 35561 - protein, 333 aa, Muscodor strobelii
  misc_feature: SGI Peptide ID NO. 572317
  misc_feature (154)..(301): Pfam Id: PF00293 Pfam Desc: NUDIX domain
  misc_feature (6)..(333): NCBI GI: 159126731 Blast Desc: thiamin pyrophosphokinase-related protein [Aspergillus fumigatus A1163]
  misc_feature (6)..(333): NCBI GI: 70997589 Blast Desc: thiamin pyrophosphokinase-related protein [Aspergillus fumigatus Af293] gi|66851173|gb|EAL91499.1| thiamin pyrophosphokinase-related protein [Aspergillus fumigatus Af293]
  misc_feature (6)..(333): NCBI GI: 121713588 Blast Desc: thiamin pyrophosphokinase-related protein [Aspergillus clavatus NRRL 1] gi|119402558|gb|EAW12979.1| thiamin pyrophosphokinase-related protein [Aspergillus clavatus NRRL 1]
  misc_feature (6)..(333): NCBI GI: 238496013 Blast Desc: thiamin pyrophosphokinase-related protein [Aspergillus flavus NRRL3357] gi|220694122|gb|EED50466.1| thiamin pyrophosphokinase-related protein [Aspergillus flavus NRRL3357]
  misc_feature (6)..(333): NCBI GI: 67515823 Blast Desc: AN0193.2 [Aspergillus nidulans FGSC A4] gi|40746910|gb|EAA66066.1| AN0193.2 [Aspergillus nidulans FGSC A4] gi|259489598|tpe|CBF90002.1| TPA: thiamin protein nidulans
  misc_feature (6)..(333): NCBI GI: 115401438 Blast Desc: conserved [Aspergillus terreus NIH2624] gi|114190248|gb|EAU31948.1| conserved [Aspergillus terreus NIH2624]
  misc_feature (6)..(333): NCBI GI: 119479107 Blast Desc: thiamin pyrophosphokinase-related protein [Neosartorya fischeri NRRL 181] gi|119407736|gb|EAW17685.1| thiamin pyrophosphokinase-related protein [Neosartorya fischeri NRRL 181]
  misc_feature (6)..(330): NCBI GI: 240106039 Blast Desc: hydrolase, NUDIX family protein [Coccidioides posadasii C735 delta SOWgp]
  misc_feature (9)..(333): NCBI GI: 169611052 Blast Desc: SNOG_08635 [Phaeosphaeria nodorum SN15] gi|160702211|gb|EAT83803.2| SNOG_08635 [Phaeosphaeria nodorum SN15]
  misc_feature (6)..(330): NCBI GI: 119192580 Blast Desc: CIMG_00667 [Coccidioides immitis RS]
  misc_feature (56)..(329): SWISSPROT Homolog: EC 2.7.6.2 Thiamine diphosphokinase
MSSKPKTYLELVKECDTLPYPDEDEFARLTSEYYRFCLKKAWASGDSDVPSTYCTVGYILPSVVAAMPWTDKFRIDHGTRCISIPWPDTTIMRDTYGDYETQAIAEVLQHARDRDSVPILRKWRAEHYRIRGLADRREVRIARAGSAVFGVETVGVHVLGFCRDQDHGMKLWIPRRSPTKQTFPSMLDNTVGGGLTADEDPLGCLAREAQEEASLPEAWVRAHAKPVSTISYFSIRDERAGGPEEVGLLQPATQILYDLEMPADMIPQPLDGEVAEFLLWTPEETMKALREGHFKLNSATAWIDFFIRHGYINAQNEPDYLDLVTRIHRRIWF

SEQ ID NO: 35562 - DNA, 1080 bp, Muscodor strobelii
  misc_feature: SGI cDNA ID NO. 572318
  misc_feature: Encodes the peptide sequence at SEQ ID NO 35563
atgtttccccctccacccatggatactatcgactgggaaaagcttgagttcgatgtgacggaagtcaatggtcatgttgagtctcacttcacgaaccaaactggcgagtggagtgagcctctatttgtaaccgatcccttactgcgactgcatgggcttaccccggctttgaactatgcccagcaagcatttgagggtttcaaggcgtatcgtacgccgtccggtgagattcaaatatttcgccctcaaaagaatgcgcagcggatgatgaggtcagtttcatacatgttgattcctccagtacctgaagagacgttcttgagttccgtgaagttggctgtggcgcggaacgcggcgtacgttccaccacacggcgccgcagctgcactttacattcggcccatcatatttggcagttcaaaaactctttctatggcctcccctgataactataccttttgtgtgtatgtaaccccggttggcatggcctacggcgtcaagcctatacgagctctggtgctggaagactacgatcgtgtcgcacccgaagggtctgggagggccaagattggaggaaattactcaccactcgcgaggcatatcaagcaagctagtgcctcagggtacaatatcttgcttcaccttgatagcaagaagcgcgaggaagtcgacgaattctctatgtctggattcgtagggatcaagggaagttgtggcgagggcggcggaacgactgcttcctatacagtagtagtgcctacgcctacgcgtgcagtggaaagtgtaacggccgactcggtctgcgaaatcgcgcgagacctgggttgggcaacagagcatcgtacggtcagatacgatgaactgccgacctttagcgaagtgcttgccgtgggtacagcgagcgccctagtccctatcaagagtattacgcgcaagtctactggagacgtgttcacatacaataaagagtcggaagagcttggcccatgctgtgccaagttgctggctatcttgaaggggattcagcaggggactatggaagatcgcttcgaatggtgtacaaaggtctctgcagcttag

SEQ ID NO: 35563 - protein, 359 aa, Muscodor strobelii
  misc_feature: SGI Peptide ID NO. 572318
  misc_feature (39)..(339): Pfam Id: PF01063 Pfam Desc: Aminotransferase class IV
  misc_feature (39)..(194): Pfam Id: PF01063 Pfam Desc: Aminotransferase class IV
  misc_feature (2)..(356): NCBI GI: 189193681 Blast Desc: branched-chain-amino-acid aminotransferase [Pyrenophora tritici-repentis Pt-1C-BFP] gi|187978743|gb|EDU45369.1| branched-chain-amino-acid Pt-1C-BFP]
  misc_feature (2)..(352): NCBI GI: 154308438 Blast Desc: branched-chain-amino-acid aminotransferase [Botryotinia fuckeliana B05.10] gi|150852820|gb|EDN28012.1| branched-chain-amino-acid aminotransferase [Botryotinia B05.10]
  misc_feature (2)..(356): NCBI GI: 156036256 Blast Desc: SS1G_12816 [Sclerotinia sclerotiorum 1980] gi|154698222|gb|EDN97960.1| SS1G_12816 [Sclerotinia sclerotiorum 1980]
  misc_feature (2)..(359): NCBI GI: 119497445 Blast Desc: branched-chain amino acid aminotransferase [Neosartorya fischeri NRRL 181] gi|119413643|gb|EAW23584.1| branched-chain amino acid aminotransferase [Neosartorya fischeri
  misc_feature (2)..(359): NCBI GI: 70990138 Blast Desc: branched-chain amino acid aminotransferase [Aspergillus fumigatus Af293] gi|66847550|gb|EAL87880.1| branched-chain amino acid aminotransferase [Aspergillus fumigatus
  misc_feature (2)..(359): NCBI GI: 159130400 Blast Desc: branched-chain amino acid aminotransferase [Aspergillus fumigatus A1163]
  misc_feature (2)..(357): NCBI GI: 171695708 Blast Desc: protein product [Podospora anserina] gi|170948096|emb|CAP60260.1| protein product [Podospora anserina]
  misc_feature (2)..(359): NCBI GI: 121703417 Blast Desc: branched-chain amino acid aminotransferase [Aspergillus clavatus NRRL 1] gi|119398116|gb|EAW08547.1| branched-chain amino acid aminotransferase [Aspergillus clavatus
  misc_feature (2)..(356): NCBI GI: 261199023 Blast Desc: branched-chain amino acid aminotransferase [Ajellomyces dermatitidis SLH14081] gi|239595065|gb|EEQ77646.1| branched-chain amino acid aminotransferase [Ajellomyces SLH14081]
  misc_feature (2)..(352): NCBI GI: 242805580 Blast Desc: branched-chain amino acid aminotransferase [Talaromyces stipitatus ATCC 10500] gi|218715186|gb|EED14608.1| branched-chain amino acid aminotransferase [Talaromyces ATCC
  misc_feature (12)..(359): SWISSPROT Homolog: EC 2.6.1.42 Branched-chain-amino-acid transaminase
  misc_feature: Useful for introducing or modulating the production of volatile compounds
  misc_feature: Useful for fungicidal and/or biocontrol applications
  misc_feature: Useful for production of fusel alcohols
MFPPPPMDTIDWEKLEFDVTEVNGHVESHFTNQTGEWSEPLFVTDPLLRLHGLTPALNYAQQAFEGFKAYRTPSGEIQIFRPQKNAQRMMRSVSYMLIPPVPEETFLSSVKLAVARNAAYVPPHGAAAALYIRPIIFGSSKTLSMASPDNYTFCVYVTPVGMAYGVKPIRALVLEDYDRVAPEGSGRAKIGGNYSPLARHIKQASASGYNILLHLDSKKREEVDEFSMSGFVGIKGSCGEGGGTTASYTVVVPTPTRAVESVTADSVCEIARDLGWATEHRTVRYDELPTFSEVLAVGTASALVPIKSITRKSTGDVFTYNKESEELGPCCAKLLAILKGIQQGTMEDRFEWCTKVSAA

SEQ ID NO: 35564 - DNA, 1232 bp, Muscodor strobelii
  misc_feature: SGI EST ID NO. CUFF.84745.0
  misc_feature: Variant of the nucleotide sequence at SEQ ID NO 35562
cgctttactgcgttgctatatcgagcaattatcacgatgtttccccctccacccatggatactatcgactgggaaaagcttgagttcgatgtgacggaagtcaatggtcatgttgagtctcacttcacgaaccaaactggcgagtggagtgagcctctatttgtaaccgatcccttactgcgactgcatgggcttaccccggctttgaactatgcccagcaagcatttgagggtttcaaggcgtatcgtacgccgtccggtgagattcaaatatttcgccctcaaaagaatgcgcagcggatgatgaggtcagtttcatacatgttgattcctccagtacctgaagagacgttcttgagttccgtgaagttggctgtggcgcggaacgcggcgtacgttccaccacacggcgccgcagctgcactttacattcggcccatcatatttggcagttcaaaaactctttctatggcctcccctgataactataccttttgtgtgtatgtaaccccggttggcatggcctacggcgtcaagcctatacgagctctggtgctggaagactacgatcgtgtcgcacccgaagggtctgggagggccaagattggaggaaattactcaccactcgcgaggcatatcaagcaagctagtgcctcagggtacaatatcttgcttcaccttgatagcaagaagcgcgaggaagtcgacgaattctctatgtctggattcgtagggatcaagggaagttgtggcgagggcggcggaacgactgcttcctatacagtagtagtgcctacgcctacgcgtgcagtggaaagtgtaacggccgactcggtctgcgaaatcgcgcgagacctgggttgggcaacagagcatcgtacggtcagatacgatgaactgccgacctttagcgaagtgcttgccgtgggtacagcgagcgccctagtccctatcaagagtattacgcgcaagtctactggagacgtgttcacatacaataaagagtcggaagagcttggcccatgctgtgccaagttgctggctatcttgaaggggattcagcaggggactatggaagatcgcttcgaatggtgtacaaaggtctctgcagcttagcgagtagtgagagcatatgatttgcatcaccatgcatgcatatatttgttgcttacccacggcgatcctaccgttgatactgtagcatgccagcccgcgctagtagcatagcgggg

SEQ ID NO: 35565 - DNA, 1098 bp, Muscodor strobelii
  misc_feature: SGI cDNA ID NO. 572319
  misc_feature: Encodes the peptide sequence at SEQ ID NO 35566
atgaatgataacaaacgactctatgacatcgctcagcgacaggctacattggctttggcgtgcttcaaggtgaagaatggctcaggtgcgacgatcaatattcgtgagcttttgaacagttggactcgggagtgcagcggagaatttatctggggcaagaataatatcaatcggcgcattgaagtgatcgacacggacggcaaacttaaatttttgccatatatgacggctctaaacagaaccttcaccgacctacgcttttacgcgagccgcttctggaatcgagtatgcttcccccttgccgccttacctctcactaaagaagcacgtcgcctggactacaatatcaagattatccgcaaagtgacagaagatattttaacgactccagagtctcaaacagtagcttcacaggtgcaaaaggcaaacgatgatcttggcatcgcaattggcatgacgctcgatgatcttgttactgcgacaattgccggcctagatactatcaagtccacggtgatggggacgctgttccaccttctcgagccacaaaacgtggtatggaagaagcggattttggatgaaatcaccgaacttgaagccgcgcctggagacatgtatactaaactatcgcatgcacctgtattaaacgcttttattctcgagtccctgcgttatgagccacccggatcgctcattaacaatgcagcaattcaagacttcgagctctcccaccggggacgacaatataaggtcaagtccggcactcgaattgtcacctgtatccatgctcttcaccaaaacgaggacagttggagagcaagggtcaatccagacatgacaccccttgtcgagtttgatccggagcgcttcttgaaccagacggagaccattgcaaactcatattgcttcatgccatttggcaagggccctaggcgttgtccgggccagggcgcggggatcatgatggtcaaagtattcattgctactttcctagccagtaactacaactgcaggatggtcgtgcccgataaccagactaaggatttaacgtggttcaacatttacagtaaggcaacttttgatattgtatgcgattaa

SEQ ID NO: 35566 - protein, 365 aa, Muscodor strobelii
  misc_feature: SGI Peptide ID NO. 572319
  misc_feature (213)..(331): Pfam Id: PF00067 Pfam Desc: Cytochrome P450
  misc_feature (163)..(335): NCBI GI: 156544856 Blast Desc: : similar to cytochrome P450 [Nasonia vitripennis]
  misc_feature (137)..(353): NCBI GI: 19879424 Blast Desc: cytochrome P450 monooxygenase CYP6X1v1 [Lygus lineolaris]
  misc_feature (137)..(353): NCBI GI: 19879426 Blast Desc: cytochrome P450 monooxygenase CYP6X1v2 [Lygus lineolaris]
  misc_feature (115)..(331): NCBI GI: 168009730 Blast Desc: [Physcomitrella patens subsp. patens] gi|162691252|gb|EDQ77615.1| [Physcomitrella patens subsp. patens]
  misc_feature (151)..(356): NCBI GI: 61652899 Blast Desc: cytochrome P450 [Ochlerotatus sollicitans]
  misc_feature (137)..(353): NCBI GI: 28144335 Blast Desc: cytochrome P450 monooxygenase CYP6X1v3 [Lygus lineolaris]
  misc_feature (151)..(356): NCBI GI: 61652895 Blast Desc: cytochrome P450 [Ochlerotatus sollicitans]
  misc_feature (32)..(339): NCBI GI: 189241880 Blast Desc: : similar to cytochrome P450 CYP6BK17 [Tribolium castaneum]
  misc_feature (150)..(331): NCBI GI: 40646525 Blast Desc: cytochrome P450 CYP6P7 [Anopheles minimus]
  misc_feature (32)..(339): NCBI GI: 270016081 Blast Desc: cytochrome P450 6BK12 [Tribolium castaneum]
  misc_feature (108)..(331): SWISSPROT Homolog: EC 1.14.99.9 Steroid 17-alpha-monooxygenase
MNDNKRLYDIAQRQATLALACFKVKNGSGATINIRELLNSWTRECSGEFIWGKNNINRRIEVIDTDGKLKFLPYMTALNRTFTDLRFYASRFWNRVCFPLAALPLTKEARRLDYNIKIIRKVTEDILTTPESQTVASQVQKANDDLGIAIGMTLDDLVTATIAGLDTIKSTVMGTLFHLLEPQNVVWKKRILDEITELEAAPGDMYTKLSHAPVLNAFILESLRYEPPGSLINNAAIQDFELSHRGRQYKVKSGTRIVTCIHALHQNEDSWRARVNPDMTPLVEFDPERFLNQTETIANSYCFMPFGKGPRRCPGQGAGIMMVKVFIATFLASNYNCRMVVPDNQTKDLTWFNIYSKATFDIVCD

SEQ ID NO: 35567 - DNA, 1853 bp, Muscodor strobelii
  misc_feature: SGI EST ID NO. CUFF.84749.0
  misc_feature: Variant of the nucleotide sequence at SEQ ID NO 35565
gttatagtgatggatcagatacggtcgttttcgaacctgtccggttctgtgagtcaaacaggtactggttttggcttcactttatcttcctctgttatctcagcgacaggatcgaggtccacactgttagtctgtcttttgattgggtcaacaggtagtggcttgctgtggttattgtggtctttcgtcgtgagactttatcttctccgccgattctatgagaagcaaggcatccgtttcgtcagacaatgttatgcagttgttggcgctgagagacgtgtgacaatactacaggagagaaataagagccatgactggctctacacggagcgtcccaccgatttgtacggcacagttcgtggtttctctgtgcagctgtacagcactgatgcaaaattatgcgaggatctaatcgccaaaaccggtcatcatgttgatcgagacacgcccgctctattctcatttggccgattgagtccttacgcactgaccttcctcccgatagaaaaatttcgttttagggagaggaaagtcacactcactcgagctatgaatgataacaaacgactctatgacatcgctcagcgacaggctacattggctttggcgtgcttcaaggtgaagaatggctcaggtgcgacgatcaatattcgtgagcttttgaacagttggactcgggagtgcagcggagaatttatctggggcaagaataatatcaatcggcgcattgaagtgatcgacacggacggcaaacttaaatttttgccatatatgacggctctaaacagaaccttcaccgacctacgcttttacgcgagccgcttctggaatcgagtatgcttcccccttgccgccttacctctcactaaagaagcacgtcgcctggactacaatatcaagattatccgcaaagtgacagaagatattttaacgactccagagtctcaaacagtagcttcacaggtgcaaaaggcaaacgatgatcttggcatcgcaattggcatgacgctcgatgatcttgttactgcgacaattgccggcctagatactatcaagtccacggtgatggggacgctgttccaccttctcgagccacaaaacgtggtatggaagaagcggattttggatgaaatcaccgaacttgaagccgcgcctggagacatgtatactaaactatcgcatgcacctgtattaaacgcttttattctcgagtccctgcgttatgagccacccggatcgctcattaacaatgcagcaattcaagacttcgagctctcccaccggggacgacaatataaggtcaagtccggcactcgaattgtcacctgtatccatgctcttcaccaaaacgaggacagttggagagcaagggtcaatccagacatgacaccccttgtcgagtttgatccggagcgcttcttgaaccagacggagaccattgcaaactcatattgcttcatgccatttggcaagggccctaggcgttgtccgggccagggcgcggggatcatgatggtcaaagtattcattgctactttcctagccagtaactacaactgcaggatggtcgtgcccgataaccagactaaggatttaacgtggttcaacatttacagtaaggcaacttttgatattgtatgcgattaaggttgtcattgagacagcaccacgtttcagccccacatcattcatattctacgaggacaccgtcaaaagtcgtctcagggacaagtcatcagttgtgtgagaatgactttgcatgctaaattgcaggaaggcatctatgttttaatggcatattgtgtacagagttgtatagaaatcatacctttcttatgtcagttcactcaaaa

SEQ ID NO: 35568 - DNA, 777 bp, Muscodor strobelii
  misc_feature: SGI cDNA ID NO. 572320
  misc_feature: Elevated expression when VOC is produced
  misc_feature: Encodes the peptide sequence at SEQ ID NO 35569
atgaagtttgatctttcccttttggccctctgcggcgcagcagtagctgctaagtacccaacgacgactgtctctggtattgaggttatcgatactcagctcgttcgggatgctcgtgcagccatcgaggttttcaacgagttgcagccctatctgtacaagcatttgcacagaacgtggttatttggtgtcgccgctatcaatgccaatgagacgttgaagaactccctcgatcttgagcttcatgctgtcggcaccctgatgcacgatctgggttgggacatgcgagagaactctccttgggtctcacagacacagcgatttgaggtcgacagcggtattggtgctgtggatttcatcaagagccggaagtgcaaatcgaagggctgggatgccgctcgtttggaaaagctctacgatggcatttcattgcaaaccgagatcagcattgtctctcagaagaacatcgacacatactggatctttcagagcgtattcttcgagttccctggccctcgcaaccctttgatccccgagaaggactacaatcagatcatggccgactatcccaacagctacctttaccgtggaagcaatgaaacttttacttggatggctgctcataaacctgagggctcgtataataacttcattcaagactttggtactgcctatgtcgagggctacaatgccactggaaagcgtctgttcgacatgattggcgaagctgtcgcgctcgaggttgaggcgcaccctaatgctaccaaatacgattaa

SEQ ID NO: 35569 - protein, 258 aa, Muscodor strobelii
  misc_feature: SGI Peptide ID NO. 572320
  misc_feature (12)..(238): NCBI GI: 116200323 Blast Desc: CHGG_08317 [Chaetomium globosum CBS 148.51] gi|88179596|gb|EAQ87064.1| CHGG_08317 [Chaetomium globosum CBS 148.51]
  misc_feature (14)..(238): NCBI GI: 256721693 Blast Desc: NECHADRAFT_44823 [Nectria haematococca mpVI 77-13-4]
  misc_feature (12)..(240): NCBI GI: 171681192 Blast Desc: protein product [Podospora anserina] gi|170940554|emb|CAP65782.1| protein product [Podospora anserina]
  misc_feature (19)..(250): NCBI GI: 171693093 Blast Desc: protein product [Podospora anserina] gi|170946495|emb|CAP73296.1| protein product [Podospora anserina]
  misc_feature (24)..(240): NCBI GI: 116202473 Blast Desc: CHGG_09121 [Chaetomium globosum CBS 148.51] gi|88177639|gb|EAQ85107.1| CHGG_09121 [Chaetomium globosum CBS 148.51]
  misc_feature (23)..(215): NCBI GI: 116204295 Blast Desc: CHGG_10031 [Chaetomium globosum CBS 148.51] gi|88176159|gb|EAQ83627.1| CHGG_10031 [Chaetomium globosum CBS 148.51]
  misc_feature (16)..(221): NCBI GI: 242795716 Blast Desc: conserved [Talaromyces stipitatus ATCC 10500] gi|218719237|gb|EED18657.1| conserved [Talaromyces stipitatus ATCC 10500]
  misc_feature (21)..(231): NCBI GI: 13471098 Blast Desc: mlr0982 [Mesorhizobium loti MAFF303099] gi|14021842|dbj|BAB48453.1| mlr0982 [Mesorhizobium loti MAFF303099]
  misc_feature (23)..(239): NCBI GI: 260460254 Blast Desc: conserved [Mesorhizobium opportunistum WSM2075] gi|259033899|gb|EEW35158.1| conserved [Mesorhizobium opportunistum WSM2075]
  misc_feature (21)..(229): NCBI GI: 261409068 Blast Desc: metal dependent phosphohydrolase [Geobacillus sp. Y412MC10] gi|261285531|gb|ACX67502.1| metal dependent phosphohydrolase [Geobacillus sp. Y412MC10]
  misc_feature: Useful for introducing or modulating the production of volatile compounds
MKFDLSLLALCGAAVAAKYPTTTVSGIEVIDTQLVRDARAAIEVFNELQPYLYKHLHRTWLFGVAAINANETLKNSLDLELHAVGTLMHDLGWDMRENSPWVSQTQRFEVDSGIGAVDFIKSRKCKSKGWDAARLEKLYDGISLQTEISIVSQKNIDTYWIFQSVFFEFPGPRNPLIPEKDYNQIMADYPNSYLYRGSNETFTWMAAHKPEGSYNNFIQDFGTAYVEGYNATGKRLFDMIGEAVALEVEAHPNATKYD

SEQ ID NO: 35570 - DNA, 1116 bp, Muscodor strobelii
  misc_feature: SGI EST ID NO. CUFF.84769.0
  misc_feature: Variant of the nucleotide sequence at SEQ ID NO 35568
cactgatagagatgctgggtccgcgaagaggatgctaataaataagcaactcctcttcaagtgatcatcattgaacttcatcgacgctatctccgcgtgcctcattgttccttatcaagcatcaacatgaagtttgatctttcccttttggccctctgcggcgcagcagtagctgctaagtacccaacgacgactgtctctggtattgaggttatcgatactcagctcgttcgggatgctcgtgcagccatcgaggttttcaacgagttgcagccctatctgtacaagcatttgcacagaacgtggttatttggtgtcgccgctatcaatgccaatgagacgttgaagaactccctcgatcttgagcttcatgctgtcggcaccctgatgcacgatctgggttgggacatgcgagagaactctccttgggtctcacagacacagcgatttgaggtcgacagcggtattggtgctgtggatttcatcaagagccggaagtgcaaatcgaagggctgggatgccgctcgtttggaaaagctctacgatggcatttcattgcaaaccgagatcagcattgtctctcagaagaacatcgacacatactggatctttcagagcgtattcttcgagttccctggccctcgcaaccctttgatccccgagaaggactacaatcagatcatggccgactatcccaacagctacctttaccgtggaagcaatgaaacttttacttggatggctgctcataaacctgagggctcgtataataacttcattcaagactttggtactgcctatgtcgagggctacaatgccactggaaagcgtctgttcgacatgattggcgaagctgtcgcgctcgaggttgaggcgcaccctaatgctaccaaatacgattaagtgcaggcattgatttaagccacagatggattgctcccagttatgctattgctgtaaaggcgaagttggctgttcctctgttttggggttagaaattgggatcagcttatataatgtccagtacccctctagaatggacacatgcttaatatgtattcatgtatatatcttaatgaatgaatttgacaaagatctacgatattttgatcgcta

SEQ ID NO: 35571 - DNA, 768 bp, Muscodor strobelii
  misc_feature: SGI cDNA ID NO. 572321
  misc_feature: Encodes the peptide sequence at SEQ ID NO 35572
atggcacctcgggtaatcccagctccaggcgtcctcccggactacaaacgagatgctcgtgaagcatttgaatgcatgaaagctggaggcgtgatcataattcccacggatcttgggtacggcctaatgtcagcgagcaatgaaggcatcgagcgatcattcaatgcaaaacaacgaaagccaggtcacacattaggcgtcattggcaccttccgcgcattccaagagctgaacgacgtgacgctggagcaaaccgagatgatccgtgttcttacacaagacatgtcacaaacattaaatactgtagcgccaatgaagaaaaatcctccacgattggcacatttgacgccggagaattttgcgcgcatcaccaaagatcataccctcggcatgaatatcggcgaaagcaaattcttgcgggaacttggccgtctcaatgacgaggacggacagttgatggtcggaagcagcgcaaacattaccggcacaggacagaagctgcgtgttgaagacattgagcccacagtcatggctgctgctgatttagtagtggactatgggctgcagcgataccatagataccagagatctggcacaattctcgatgttgagaacatgcgtgttctacgaattggtgcggggtatgaaatcttaagagagcgtatcaagaaatggtttggagttgaattaatggaggatccagtgaacaagaccgataaagttggcttagctgaatcagtcaagacagaacatgcacagaagtactag

SEQ ID NO: 35572 - protein, 255 aa, Muscodor strobelii
  misc_feature: SGI Peptide ID NO. 572321
  misc_feature (1)..(241): NCBI GI: 116198445 Blast Desc: CHGG_07378 [Chaetomium globosum CBS 148.51] gi|88178657|gb|EAQ86125.1| CHGG_07378 [Chaetomium globosum CBS 148.51]
  misc_feature (1)..(234): NCBI GI: 238500582 Blast Desc: conserved [Aspergillus flavus NRRL3357] gi|220691762|gb|EED48109.1| conserved [Aspergillus flavus NRRL3357]
  misc_feature (1)..(240): NCBI GI: 239614287 Blast Desc: conserved [Ajellomyces dermatitidis ER-3]
  misc_feature (1)..(243): NCBI GI: 169782145 Blast Desc: [Aspergillus oryzae RIB40] gi|83774278|dbj|BAE64402.1| protein product [Aspergillus oryzae]
  misc_feature (1)..(240): NCBI GI: 261204349 Blast Desc: conserved [Ajellomyces dermatitidis SLH14081] gi|239587173|gb|EEQ69816.1| conserved [Ajellomyces dermatitidis SLH14081]
  misc_feature (1)..(244): NCBI GI: 255943590 Blast Desc: Pc19g00760 [Penicillium chrysogenum Wisconsin 54-1255] gi|211587297|emb|CAP79492.1| Pc19g00760 [Penicillium chrysogenum Wisconsin 54-1255]
  misc_feature (1)..(242): NCBI GI: 119472196 Blast Desc: NFIA_057440 [Neosartorya fischeri NRRL 181] gi|119406444|gb|EAW16395.1| conserved [Neosartorya fischeri NRRL 181]
  misc_feature (4)..(238): NCBI GI: 145234176 Blast Desc: An02g13280 [Aspergillus niger] gi|134057403|emb|CAK47741.1| protein product [Aspergillus niger]
  misc_feature (1)..(234): NCBI GI: 58268134 Blast Desc: [Cryptococcus neoformans var. neoformans JEC21] gi|134111867|ref|XP_775469.1| CNBE1840 [Cryptococcus neoformans var. neoformans B-3501A] gi|50258128|gb|EAL20822.1| CNBE1840 var.
  misc_feature (1)..(240): NCBI GI: 145246840 Blast Desc: An12g06060 [Aspergillus niger] gi|134080391|emb|CAK46312.1| protein product [Aspergillus niger]
MAPRVIPAPGVLPDYKRDAREAFECMKAGGVIIIPTDLGYGLMSASNEGIERSFNAKQRKPGHTLGVIGTFRAFQELNDVTLEQTEMIRVLTQDMSQTLNTVAPMKKNPPRLAHLTPENFARITKDHTLGMNIGESKFLRELGRLNDEDGQLMVGSSANITGTGQKLRVEDIEPTVMAAADLVVDYGLQRYHRYQRSGTILDVENMRVLRIGAGYEILRERIKKWFGVELMEDPVNKTDKVGLAESVKTEHAQKY

SEQ ID NO: 35573 - DNA, 1485 bp, Muscodor strobelii
  misc_feature: SGI EST ID NO. CUFF.84765.0
  misc_feature: Variant of the nucleotide sequence at SEQ ID NO 35571
tccagatatacttttctttaatgacttgcttgcttaagtgcatttgtaagaactaagtgtattaccagtttgtcgtcttttttgccattatgtgtcttgcacttgcgaacagctttttcagacaaatattccgaggacaagcctagtgggatgggatggttcaaaacgctttggatattggtagccctggcctacagtataagagctcgggttatagagaatgacagagacagtgatttaaaattcagtttcgacaaatatgttcccaacagtagatacagtaattagcccttgcattttcgggttcaataacatgtcaaatatttcggcgttcgcgcgagtcttccgcactccggagggtctcgcactacatggccggcggactcgttagcaggatcggcccgggcgaagaatgacaagtcgcgattcgaatatcttaagtcattggctcttgctcgcactcacgctttgaggacgaacatttactctaacatcaacagacaacacactttacatccatcctttgtatcaaaaatattctcatcgtaatggcacctcgggtaatcccagctccaggcgtcctcccggactacaaacgagatgctcgtgaagcatttgaatgcatgaaagctggaggcgtgatcataattcccacggatcttgggtacggcctaatgtcagcgagcaatgaaggcatcgagcgatcattcaatgcaaaacaacgaaagccaggtcacacattaggcgtcattggcaccttccgcgcattccaagagctgaacgacgtgacgctggagcaaaccgagatgatccgtgttcttacacaagacatgtcacaaacattaaatactgtagcgccaatgaagaaaaatcctccacgattggcacatttgacgccggagaattttgcgcgcatcaccaaagatcataccctcggcatgaatatcggcgaaagcaaattcttgcgggaacttggccgtctcaatgacgaggacggacagttgatggtcggaagcagcgcaaacattaccggcacaggacagaagctgcgtgttgaagacattgagcccacagtcatggctgctgctgatttagtagtggactatgggctgcagcgataccatagataccagagatctggcacaattctcgatgttgagaacatgcgtgttctacgaattggtgcggggtatgaaatcttaagagagcgtatcaagaaatggtttggagttgaattaatggaggatccagtgaacaagaccgataaagttggcttagctgaatcagtcaagacagaacatgcacagaagtactaggcttcttgacggatgtacaactttgaagtgcgtattttgtggttaatacggttcggtacatattagatttagtgcggacaatctatagagttgtggaatattccctcagaacttgaaatacagaaagatagttaaaatacaccttgtgctacgcctactaagaagctac

SEQ ID NO: 35574 - DNA, 1554 bp, Muscodor strobelii
  misc_feature: SGI cDNA ID NO. 572322
  misc_feature: Encodes the peptide sequence at SEQ ID NO 35575
atggggaccgaatgcactacatcttccacgacatcggtcacggatgtcgatgtcgtggaagagtcttcgaaagtgactgcaattaaagacgaagggaatgtcgaggaggccaagacagccgaggaagccaaggaagccaaggaggcagccaaccttataacgtgggacgggccggatgaccctgaaaacccgcagaactattccgtaccttacaaggtattcatcactagcatttggatctacggcaacttgtgttccactctcgctagcagcatctggagcagtggtgcaggccaagtcaaaatcgagtttcatacgagcacaatagtcgtgactttgggaataagtcttttccttctgggattctctattggcccaccgttatggggccccatgtcagagcggttcgggcgaaaatggcccatgacagtaggcatgtttctcttcaccgttttcacgattgcagtcgccgtcggtaagaatctcgagacattgctggtagcccgcttctttcagggtgcatttggcgctgctccgctgtccttagctgccggtggagtcgtcgatatatggagcccagctgtgcggggcattgctgttgctgcctgtatcggtacaatctttggctcgccagtccttgcccccattattggcaattttgtcgctgcatcgtatcttggctggcgatggctacattggctcagtgccatcatgggcggaagtgctgttctactagttgtcgtcgctttacccgagacactcgctccgaaaatacttcaagcccgggcagcgaagcttcggaagaccggcgaaaagccagaagccagcactgtctatgatagtaaaaagcacatgggtgccatggacgtcgcacgcgtttacttcatgcgaccattccagcttctcgccaccgaaccaatcctcatcttcgttactatatatcaagccttcatctatggtatactatacctggtgtttgtgtcgtatccaattgaatatgtcgagatccgacactggtcgcaaggacttagtgcactgccgtttcttggcctttctgtgggggtccttctgggggctgcgggggttatttggcataccaagacgaaattcgccgcgatggtcgaagcgaacggcggcaaggtcatccccgagcaacgcttgcccacaatgatagtgggagggttaattgttcccgtaggtttattcatctctgcttggacttcacgacccgacatcccctggccaggtcaagtcataggaagtattcccacgggcgctggcatgtacatgatcttcgtacagtgcttcaactacatcatcgacgtgtatgcgcctatcgcgaatagtgcgcttggaggaaacatgtttatacgaagttcctttgccgccgcatttccattatttgggccatacctgtatcacaacctcggagtgtcctgggcaacgagcactttgggcttcattagcattgcattgatacccatccctgttgcgttttacatttttggccgtcgtattcgatcatggtctaagaatacggtctctacaacatag

SEQ ID NO: 35575 - protein, 517 aa, Muscodor strobelii
  misc_feature: SGI Peptide ID NO. 572322
  misc_feature (79)..(466): Pfam Id: PF07690 Pfam Desc: Major Facilitator Superfamily
  misc_feature (105)..(173): Pfam Id: PF00083 Pfam Desc: Sugar (and other) transporter
  misc_feature (3)..(512): NCBI GI: 212533371 Blast Desc: conserved [Penicillium marneffei ATCC 18224] gi|210072206|gb|EEA26295.1| conserved [Penicillium marneffei ATCC 18224]
  misc_feature (29)..(513): NCBI GI: 242777940 Blast Desc: bicyclomycin resistance protein, [Talaromyces stipitatus ATCC 10500] gi|218722754|gb|EED22172.1| bicyclomycin resistance protein, [Talaromyces stipitatus ATCC 10500]
  misc_feature (19)..(511): NCBI GI: 255956329 Blast Desc: Pc21g19260 [Penicillium chrysogenum Wisconsin 54-1255] gi|211590628|emb|CAP96823.1| Pc21g19260 [Penicillium chrysogenum Wisconsin 54-1255]
  misc_feature (29)..(513): NCBI GI: 121716969 Blast Desc: MFS multidrug transporter, [Aspergillus clavatus NRRL 1] gi|119404123|gb|EAW14540.1| MFS multidrug transporter, [Aspergillus clavatus NRRL 1]
  misc_feature (6)..(511): NCBI GI: 156044352 Blast Desc: SS1G_10279 [Sclerotinia sclerotiorum 1980] gi|154694668|gb|EDN94406.1| SS1G_10279 [Sclerotinia sclerotiorum 1980]
  misc_feature (8)..(516): NCBI GI: 242826055 Blast Desc: conserved [Talaromyces stipitatus ATCC 10500] gi|218712382|gb|EED11808.1| conserved [Talaromyces stipitatus ATCC 10500]
  misc_feature (17)..(511): NCBI GI: 67900616 Blast Desc: AN7295.2 [Aspergillus nidulans FGSC A4] gi|40742156|gb|EAA61346.1| AN7295.2 [Aspergillus nidulans FGSC A4] gi|259483355|tpe|CBF78676.1| TPA: MFS multidrug transporter,
  misc_feature (15)..(511): NCBI GI: 154304791 Blast Desc: BC1G_08981 [Botryotinia fuckeliana B05.10] gi|150853843|gb|EDN29035.1| BC1G_08981 [Botryotinia fuckeliana B05.10]
  misc_feature (11)..(511): NCBI GI: 169775805 Blast Desc: [Aspergillus oryzae RIB40] gi|238502453|ref|XP_002382460.1| MFS multidrug transporter, [Aspergillus flavus NRRL3357] gi|83771104|dbj|BAE61236.1| protein
  misc_feature (44)..(511): NCBI GI: 238841409 Blast Desc: polyamine transporter 1 [Microsporum canis CBS 113480]
MGTECTTSSTTSVTDVDVVEESSKVTAIKDEGNVEEAKTAEEAKEAKEAANLITWDGPDDPENPQNYSVPYKVFITSIWIYGNLCSTLASSIWSSGAGQVKIEFHTSTIVVTLGISLFLLGFSIGPPLWGPMSERFGRKWPMTVGMFLFTVFTIAVAVGKNLETLLVARFFQGAFGAAPLSLAAGGVVDIWSPAVRGIAVAACIGTIFGSPVLAPIIGNFVAASYLGWRWLHWLSAIMGGSAVLLVVVALPETLAPKILQARAAKLRKTGEKPEASTVYDSKKHMGAMDVARVYFMRPFQLLATEPILIFVTIYQAFIYGILYLVFVSYPIEYVEIRHWSQGLSALPFLGLSVGVLLGAAGVIWHTKTKFAAMVEANGGKVIPEQRLPTMIVGGLIVPVGLFISAWTSRPDIPWPGQVIGSIPTGAGMYMIFVQCFNYIIDVYAPIANSALGGNMFIRSSFAAAFPLFGPYLYHNLGVSWATSTLGFISIALIPIPVAFYIFGRRIRSWSKNTVSTT

SEQ ID NO: 35576 - DNA, 2565 bp, Muscodor strobelii
  misc_feature: SGI EST ID NO. CUFF.84777.0
  misc_feature: Variant of the nucleotide sequence at SEQ ID NO 35574
cgatcgcatcacgtattcttggcgctcgcgtgccgacccccgaaacctttcacggatttcgcatgtacaactgacagcgctgccattgtgttctttcatggatgtgacaaattgctggtgaggagaatgctaaacgcctaatgtttcctgcatgcacacgaaccgtacatacagctatcgtgtctattgttgtcgattgacgaatgtagatcttgcgttgttgggtacacattgcaacgtgagacgacgtgggattacggataatcggagcagagaaacagaagtcatcacatatcacatcagcagcgaattctccgaattctcctttcgagtcaaatttcatgttcattttgccatacaacctcattagtttgaaccctggcatcctgctatttcgctgctccgcatcagcatcgtcacccattctcgtcgaaatacgcgccacaaccacaacgtattgcagaaactagagcaaggccatggggaccgaatgcactacatcttccacgacatcggtcacggatgtcgatgtcgtggaagagtcttcgaaagtgactgcaattaaagacgaagggaatgtcgaggaggccaagacagccgaggaagccaaggaagccaaggaggcagccaaccttataacgtgggacgggccggatgaccctgaaaacccgcagaactattccgtaccttacaaggtattcatcactagcatttggatctacggcaacttgtgttccactctcgctagcagcatctggagcagtggtgcaggccaagtcaaaatcgagtttcatacgagcacaatagtcgtgactttgggaataagtcttttccttctgggattctctattggcccaccgttatggggccccatgtcagagcggttcgggcgaaaatggcccatgacagtaggcatgtttctcttcaccgttttcacgattgcagtcgccgtcggtaagaatctcgagacattgctggtagcccgcttctttcagggtgcatttggcgctgctccgctgtccttagctgccggtggagtcgtcgatatatggagcccagctgtgcggggcattgctgttgctgcctgtatcggtacaatctttggctcgccagtccttgcccccattattggcaattttgtcgctgcatcgtatcttggctggcgatggctacattggctcagtgccatcatgggcggaagtgctgttctactagttgtcgtcgctttacccgagacactcgctccgaaaatacttcaagcccgggcagcgaagcttcggaagaccggcgaaaagccagaagccagcactgtctatgatagtaaaaagcacatgggtgccatggacgtcgcacgcgtttacttcatgcgaccattccagcttctcgccaccgaaccaatcctcatcttcgttactatatatcaagccttcatctatggtatactatacctggtgtttgtgtcgtatccaattgaatatgtcgagatccgacactggtcgcaaggacttagtgcactgccgtttcttggcctttctgtgggggtccttctgggggctgcgggggttatttggcataccaagacgaaattcgccgcgatggtcgaagcgaacggcggcaaggtcatccccgagcaacgcttgcccacaatgatagtgggagggttaattgttcccgtaggtttattcatctctgcttggacttcacgacccgacatcccctggccaggtcaagtcataggaagtattcccacgggcgctggcatgtacatgatcttcgtacagtgcttcaactacatcatcgacgtgtatgcgcctatcgcgaatagtgcgcttggaggaaacatgtttatacgaagttcctttgccgccgcatttccattatttgggccatacctgtatcacaacctcggagtgtcctgggcaacgagcactttgggcttcattagcattgcattgatacccatccctgttgcgttttacatttttggccgtcgtattcgatcatggtctaagaatacggtctctacaacataggttgggaaggcgtttttctagggcagactactagcgagcattgagcagtgtgattaacaattactagcattttgaggcgttagacttaggtttggaagacgatagcgaaaattgtaatacatagcaccggaaatcgtcatttgttcaaaagtggtttcagtaaacttgaaaggatattgaggtttgtcaacagcaacaagacttcggcgaatattcttcttacatttcaagcctatgacggacagaccatcgtccaatatgacttggttgcacattgggataatgcacatggacccttaacgccaaaaaaaattcaagcgaggaagggatctgcacagatcaaatagaatagacgttacagcgacattgtcagaccagatcaaaatagatgatacttagatacatgtaccaacatctagttatatcagcaatacaccctccagatattaattacctgaaggaaagtgactgtgcaaatatatgataaagaacttccgaaattaattacgtcaagatgtaagattgctatcag

SEQ ID NO: 35577 - DNA, 2178 bp, Muscodor strobelii
  misc_feature: SGI cDNA ID NO. 572323
  misc_feature: Encodes the peptide sequence at SEQ ID NO 35578
atgaaacagctacgggatgatttctcagatgtgcggaagcaactcagcgatgttgatcaaactctcgctgttctcacagacctcacgcgacaattaaccgcacgatcgtattcacatgcaactcctccatactcaccacgtcatcaacataccattagtcacgattcaacactgaaagcgaatgatcccattgaactcgctcagcacagcagccaacatatacactctccatcagagtccacaggagggaatagaccgttatatgagactttagaactagaacaaggtggtgtacgactttacagctatccggcgccactggtcctgataaagtcagttcttcaccgggcgaatgacttgctccatggatccgatgataccagcgaggatgtcaactcaaacagcgatggtaacctccaacacctcgctgcaagagacacgcttcaacggaaaatcgacgaattcccctttaactctcggtatagagaagtcacaacagagaatgatttaagtcccgttaccacgccacctcggctgatggttaatctcttcgtggacggatatcttcagaatatcaatttgaggacaccaatcttcgaggacgatgagttgcatcgagcgattaatgcccattatagcgataggcaatcacaggatagtagagcatgggcactcatcatgaacaatattgttcttttagagctaagtttggagatgcaagccgctcgtgcctcacattcgaccagtcgcgtgacgaacgacgacatactaccatcgtttctccgtaattgcgaccgggcgatcgggagtcttgatgtattcatggcacccaatttagtcaatctccaagccctcttgacactgactctcgccgcacaagaattctacagcaatgctaccgcggaaagagtatgtcacgcagcgtgccatgttgggcgtgcgatgggcttacatcggttgagggaccctcttatggcagagaagagtggccctaaggaatcctcagaaaaggaacgaagacgtctatttcgaattctatacaccttagacaaacagcgtgtcttcatgacaggacacccatgtgatctgtacagcttcgactccgaccaccacattggcccgaacattcatgacaaagaagacaacgatccagtcaataatgctttcggtcacctgatgaccatctgggaagagatttatttcaacctctttacctccagagccaccagcgtgagtgccgagacacgggctcaaaaggtgcgggccgtgaccagctcactcgacagattcgctcacatgcatgtcagagtcttggcagcatcctcctcaacagcggaagacacggccgacgccaagctactagaaatagagcttatgtatgcgtaccaagtatcgcagatattggttcttcggtgtgatgataccaatgatcaaagcatagagtacatgcgagatcttgctcgtacgagtctcaaattgctgcttgaagtatgcgagccgcctcttacaactgcccgatttgctctattggccagaatgtttcgacgttatccaatggttgcattcgttgaaattgtcacgctacacctggtaaacatgtctactaaatctcacgacgatgaaatggcggccgacatttccctgctgcgggctgtctgtgaccggcttgcgactttgcagtatcacaacctagctcatatcttttacgcacgactcaatgtcgggcttgtttgggcgctagacactctagagagcttagcgagtgcgctggtcgagccgtcttctcagccccaggaacggaccatgccccagtcagcaagcgctcccactgatcagccattgcacacaacccagcacgtaatgggtaccattacaccagagtcctccgacatatacatctcgcacacaggatcggatagtgcagggtactcacgcctaaagtcatttcgccatgatgaggatttcgtgcagatgaacaggcgatctgacctgacaaattttggcttcttcacccctgacacagatcttatgtccgcacccctgtctcccacatgccaacctagcactagccaaacgttttccaccggaccccaccagctagacacaggtaattggggtgattttcaattggactttttacaaggcgcctttgtccaggaagagagtcgatgggattag

SEQ ID NO: 35578 - protein, 725 aa, Muscodor strobelii
  misc_feature: SGI Peptide ID NO. 572323
  misc_feature (278)..(352): Pfam Id: PF04082 Pfam Desc: Fungal specific transcription factor domain
  misc_feature (2)..(590): NCBI GI: 238506475 Blast Desc: C6 transcription factor, [Aspergillus flavus NRRL3357] gi|220689152|gb|EED45503.1| C6 transcription factor, [Aspergillus flavus NRRL3357]
  misc_feature (2)..(590): NCBI GI: 169785467 Blast Desc: [Aspergillus oryzae RIB40] gi|83775942|dbj|BAE66061.1| protein product [Aspergillus oryzae]
  misc_feature (2)..(589): NCBI GI: 212533369 Blast Desc: chitosanase, [Penicillium marneffei ATCC 18224] gi|210072205|gb|EEA26294.1| chitosanase, [Penicillium marneffei ATCC 18224]
  misc_feature (2)..(512): NCBI GI: 115391681 Blast Desc: [Aspergillus terreus NIH2624] gi|114194269|gb|EAU35969.1| [Aspergillus terreus NIH2624]
  misc_feature (141)..(595): NCBI GI: 212537049 Blast Desc: C6 transcription factor, [Penicillium marneffei ATCC 18224] gi|210068422|gb|EEA22513.1| C6 transcription factor, [Penicillium marneffei ATCC 18224]
  misc_feature (302)..(589): NCBI GI: 242777935 Blast Desc: TSTA_094170 [Talaromyces stipitatus ATCC 10500] gi|218722753|gb|EED22171.1| TSTA_094170 [Talaromyces stipitatus ATCC 10500]
  misc_feature (168)..(676): NCBI GI: 145241089 Blast Desc: An08g10880 [Aspergillus niger] gi|134077720|emb|CAK45760.1| protein product [Aspergillus niger]
  misc_feature (176)..(557): NCBI GI: 119477081 Blast Desc: C6 transcription factor, [Neosartorya fischeri NRRL 181] gi|119407397|gb|EAW17346.1| C6 transcription factor, [Neosartorya fischeri NRRL 181]
  misc_feature (172)..(543): NCBI GI: 145242720 Blast Desc: An09g06210 [Aspergillus niger] gi|134078488|emb|CAL00351.1| protein product [Aspergillus niger]
  misc_feature (176)..(549): NCBI GI: 159127046 Blast Desc: C6 transcription factor, [Aspergillus fumigatus A1163]
MKQLRDDFSDVRKQLSDVDQTLAVLTDLTRQLTARSYSHATPPYSPRHQHTISHDSTLKANDPIELAQHSSQHIHSPSESTGGNRPLYETLELEQGGVRLYSYPAPLVLIKSVLHRANDLLHGSDDTSEDVNSNSDGNLQHLAARDTLQRKIDEFPFNSRYREVTTENDLSPVTTPPRLMVNLFVDGYLQNINLRTPIFEDDELHRAINAHYSDRQSQDSRAWALIMNNIVLLELSLEMQAARASHSTSRVTNDDILPSFLRNCDRAIGSLDVFMAPNLVNLQALLTLTLAAQEFYSNATAERVCHAACHVGRAMGLHRLRDPLMAEKSGPKESSEKERRRLFRILYTLDKQRVFMTGHPCDLYSFDSDHHIGPNIHDKEDNDPVNNAFGHLMTIWEEIYFNLFTSRATSVSAETRAQKVRAVTSSLDRFAHMHVRVLAASSSTAEDTADAKLLEIELMYAYQVSQILVLRCDDTNDQSIEYMRDLARTSLKLLLEVCEPPLTTARFALLARMFRRYPMVAFVEIVTLHLVNMSTKSHDDEMAADISLLRAVCDRLATLQYHNLAHIFYARLNVGLVWALDTLESLASALVEPSSQPQERTMPQSASAPTDQPLHTTQHVMGTITPESSDIYISHTGSDSAGYSRLKSFRHDEDFVQMNRRSDLTNFGFFTPDTDLMSAPLSPTCQPSTSQTFSTGPHQLDTGNWGDFQLDFLQGAFVQEESRWD

SEQ ID NO: 35579 - DNA, 2830 bp, Muscodor strobelii
  misc_feature: SGI EST ID NO. CUFF.84824.0
  misc_feature: Variant of the nucleotide sequence at SEQ ID NO 35577
cttggatccttctaatagatttctacattcatcgggctaaaggcctaacacccggttgcaccacatgtactccgatacttcccaacgaggaaagcctcaaccaacgcaagaggtagaaaataggcgaaaacgtccccgtacaggtaacgatcgagaagatcgcgatgagccgcctactgctgcctgtgaccagtgccggctccgaaaggttcggtgtgacagattgcaacctgagtgttctaattgcagaaaaggcggcatcgaatgcaactcttcaaacacactcaagcgtgtcaatcacatgaaacagctgtgagtataataatccgcttgacatcaacaacgaagttaaccggccagacgggatgatttctcagatgtgcggaagcaactcagcgatgttgatcaaactctcgctgttctcacagacctcacgcgacaattaaccgcacgatcgtattcacatgcaactcctccatactcaccacgtcatcaacataccattagtcacgattcaacactgaaagcgaatgatcccattgaactcgctcagcacagcagccaacatatacactctccatcagagtccacaggagggaatagaccgttatatgagactttagaactagaacaaggtggtgtacgactttacagctatccggcgccactggtcctgataaagtcagttcttcaccgggcgaatgacttgctccatggatccgatgataccagcgaggatgtcaactcaaacagcgatggtaacctccaacacctcgctgcaagagacacgcttcaacggaaaatcgacgaattcccctttaactctcggtatagagaagtcacaacagagaatgatttaagtcccgttaccacgccacctcggctgatggttaatctcttcgtggacggatatcttcagaatatcaatttgaggacaccaatcttcgaggacgatgagttgcatcgagcgattaatgcccattatagcgataggcaatcacaggatagtagagcatgggcactcatcatgaacaatattgttcttttagagctaagtttggagatgcaagccgctcgtgcctcacattcgaccagtcgcgtgacgaacgacgacatactaccatcgtttctccgtaattgcgaccgggcgatcgggagtcttgatgtattcatggcacccaatttagtcaatctccaagccctcttgacactgactctcgccgcacaagaattctacagcaatgctaccgcggaaagagtatgtcacgcagcgtgccatgttgggcgtgcgatgggcttacatcggttgagggaccctcttatggcagagaagagtggccctaaggaatcctcagaaaaggaacgaagacgtctatttcgaattctatacaccttagacaaacagcgtgtcttcatgacaggacacccatgtgatctgtacagcttcgactccgaccaccacattggcccgaacattcatgacaaagaagacaacgatccagtcaataatgctttcggtcacctgatgaccatctgggaagagatttatttcaacctctttacctccagagccaccagcgtgagtgccgagacacgggctcaaaaggtgcgggccgtgaccagctcactcgacagattcgctcacatgcatgtcagagtcttggcagcatcctcctcaacagcggaagacacggccgacgccaagctactagaaatagagcttatgtatgcgtaccaagtatcgcagatattggttcttcggtgtgatgataccaatgatcaaagcatagagtacatgcgagatcttgctcgtacgagtctcaaattgctgcttgaagtatgcgagccgcctcttacaactgcccgatttgctctattggccagaatgtttcgacgttatccaatggttgcattcgttgaaattgtcacgctacacctggtaaacatgtctactaaatctcacgacgatgaaatggcggccgacatttccctgctgcgggctgtctgtgaccggcttgcgactttgcagtatcacaacctagctcatatcttttacgcacgactcaatgtcgggcttgtttgggcgctagacactctagagagcttagcgagtgcgctggtcgagccgtcttctcagccccaggaacggaccatgccccagtcagcaagcgctcccactgatcagccattgcacacaacccagcacgtaatgggtaccattacaccagagtcctccgacatatacatctcgcacacaggatcggatagtgcagggtactcacgcctaaagtcatttcgccatgatgaggatttcgtgcagatgaacaggcgatctgacctgacaaattttggcttcttcacccctgacacagatcttatgtccgcacccctgtctcccacatgccaacctagcactagccaaacgttttccaccggaccccaccagctagacacaggtaattggggtgattttcaattggactttttacaaggcgcctttgtccaggaagagagtcgatgggattagacaatggtctttgtttttttctattatcatcgacatcagctaggcactcgggaactcattcataattactagaggtagtatagcaatactcggcgtactccaatcttaggtcacctcggcgagatctgacccttttatgtcagaccgtgatggtagcatgtctttttactggaagtcttcaagacagtatgcacaacaaggtgcagggtatcaatgaaaatgcaatcctgatgctaggatatagcgggatcttgatcccggcgtttccatgcatgtgcttcctatgtagtatacggagagaac

SEQ ID NO: 35580 - DNA, 1092 bp, Muscodor strobelii
  misc_feature: SGI cDNA ID NO. 572324
  misc_feature: Encodes the peptide sequence at SEQ ID NO 35581
atggttgcagagcaggaaattgcaaaaggatttcttccttcacagatgtcgcggccgacggcctcttcgcgcgcaggattcgtcgaatctgcaggctgcggagtccagatcgtcatgagtgccgagctggccctggaaatgggccttcccatctacgctatcgtggcctatacccagatggctggcgacggcgtcggacggtctgtcccagccccaggcaagggcgtcttgacagcagcgagagaaagtcaattgtcttcatcgtcgccaatactggatctccactatcgacggtcgcgattggatcaagaactagcagcaatcgagggttggagattatcacagctcgcccatccggtaactggcgcacatgagaaagcgcatcgtcagacgattgattctgcagtcgcctgccggatctcagatgcccgatggatgtggaatggtgacatccggcaactcgactcgtccatttctcccatgcgtgcagcgctcgctgtctggggccttgacgtcgacgacattggtgttgcatcctttcacggcacgtccactaaggcgaatgacaagaacgagagctctgtcatcaatcagcaattggcacaccttggacgcagcgagggcaatcccgtgctcgtcgtttgccagaagtacctgacgggccatccaaagggtggagctggggcctggatgcttaacgggtgcatccagatactcagagatcaagtggtgccagggaatagaaatgctgatgacgtcgacggcgtcctgcgatccttcccgcacctcctctacccatctgaagcgatagttgtgcctagaattaaggcgttcatgctaacgtcgttcggatttggacaaaagggtggaatcgtcgttggcgtaactccacgcgtcgtatatgctgcaatgacaagcgtcgactatgaggactaccggagccgcgtccagcggaggcgaagacgggccgaccgtgcgttccaaaatgcgatgatgagtaattcggtcttcaaggccaaagaccaatcggcttggaaagacgcgggaaaacaggaagagcttgttttccttgacccacaggttcgaatttga

SEQ ID NO: 35581 - protein, 363 aa, Muscodor strobelii
  misc_feature: SGI Peptide ID NO. 572324
  misc_feature (105)..(251): Pfam Id: PF02801 Pfam Desc: Beta-ketoacyl synthase, C-terminal domain
  misc_feature (161)..(251): Pfam Id: PF02801 Pfam Desc: Beta-ketoacyl synthase, C-terminal domain
  misc_feature (3)..(363): NCBI GI: 238506495 Blast Desc: fatty acid synthase alpha subunit FasA, [Aspergillus flavus NRRL3357] gi|220689162|gb|EED45513.1| fatty acid synthase alpha subunit FasA, [Aspergillus flavus NRRL3357]
  misc_feature (3)..(363): NCBI GI: 169785491 Blast Desc: [Aspergillus oryzae RIB40] gi|83775954|dbj|BAE66073.1| protein product [Aspergillus oryzae]
  misc_feature (5)..(363): NCBI GI: 145241099 Blast Desc: An08g10930 [Aspergillus niger] gi|134077725|emb|CAK45765.1| protein product [Aspergillus niger]
  misc_feature (3)..(362): NCBI GI: 212537043 Blast Desc: 3-oxoacyl-[acyl-carrier-protein] synthase, [Penicillium marneffei ATCC 18224] gi|210068419|gb|EEA22510.1| 3-oxoacyl-[acyl-carrier-protein] synthase, [Penicillium marneffei
  misc_feature (5)..(363): NCBI GI: 67525845 Blast Desc: AN3380.2 [Aspergillus nidulans FGSC A4] gi|40744168|gb|EAA63348.1| AN3380.2 [Aspergillus nidulans FGSC A4] gi|259485634|tpe|CBF82822.1| TPA: fatty acid synthase FasA,
  misc_feature (3)..(359): NCBI GI: 212539221 Blast Desc: 3-oxoacyl-[acyl-carrier-protein] synthase, [Penicillium marneffei ATCC 18224] gi|210069508|gb|EEA23599.1| 3-oxoacyl-[acyl-carrier-protein] synthase, [Penicillium marneffei
  misc_feature (3)..(363): NCBI GI: 115402355 Blast Desc: conserved [Aspergillus terreus NIH2624] gi|114189100|gb|EAU30800.1| conserved [Aspergillus terreus NIH2624]
  misc_feature (3)..(359): NCBI GI: 242760695 Blast Desc: 3-oxoacyl-[acyl-carrier-protein] synthase, [Talaromyces stipitatus ATCC 10500] gi|218723238|gb|EED22655.1| 3-oxoacyl-[acyl-carrier-protein] synthase, [Talaromyces ATCC
  misc_feature (5)..(359): NCBI GI: 169785381 Blast Desc: [Aspergillus oryzae RIB40] gi|83775899|dbj|BAE66018.1| protein product [Aspergillus oryzae]
  misc_feature (5)..(363): NCBI GI: 145246070 Blast Desc: An12g01980 [Aspergillus niger] gi|134079996|emb|CAK48480.1| protein product [Aspergillus niger]
  misc_feature (3)..(363): SWISSPROT Homolog: EC 1.1.1.100 3-oxoacyl-[acyl-carrier-protein] reductase
  misc_feature (3)..(363): SWISSPROT Homolog: EC 2.3.1.86 Fatty-acyl-CoA synthase
  misc_feature (3)..(363): SWISSPROT Homolog: EC 2.3.1.41 Beta-ketoacyl-acyl-carrier-protein synthase I
  misc_feature: Useful for fungicidal and/or biocontrol applications
MVAEQEIAKGFLPSQMSRPTASSRAGFVESAGCGVQIVMSAELALEMGLPIYAIVAYTQMAGDGVGRSVPAPGKGVLTAARESQLSSSSPILDLHYRRSRLDQELAAIEGWRLSQLAHPVTGAHEKAHRQTIDSAVACRISDARWMWNGDIRQLDSSISPMRAALAVWGLDVDDIGVASFHGTSTKANDKNESSVINQQLAHLGRSEGNPVLVVCQKYLTGHPKGGAGAWMLNGCIQILRDQVVPGNRNADDVDGVLRSFPHLLYPSEAIVVPRIKAFMLTSFGFGQKGGIVVGVTPRVVYAAMTSVDYEDYRSRVQRRRRRADRAFQNAMMSNSVFKAKDQSAWKDAGKQEELVFLDPQVRI

SEQ ID NO: 35582 - DNA, 1365 bp, Muscodor strobelii
  misc_feature: SGI cDNA ID NO. 572325
  misc_feature: Encodes the peptide sequence at SEQ ID NO 35583
atggcaaacgacacagctccccaagtaaacggcgttaatggtgtgaaaaagccgcaaggggacgttttgcatataattgacagccgtacaaggcagcattatacggttgacatcaacgagaatgctatcagtgccactgatctcaaggcgataaaggcgccaaaagacaccgagcatcctgagtatcagaacgaacagggtctccgcgtttttgaccctggttattctaatacgctagttagcgaaagcaaaatcacatacattgacgggcttgagggcaccatccaatacagaggatattctatacacgacataataggaaagaagaagttcgcggacctctcctatctccttatctggggaagctggccttcggcagcggaggcgcagaagtatcaagagcgtctgaacaatgttcctttgattgatgagtcggtgtttaatgtcattagagccttccccaagaatggatcgattttgggcatgatcgttgcaggcttgagcgcccttcagtcgtctgacatggatgccatcccagctcatgcggccaagaatctctatcttggccaacccgataatgtcgacacacaaatcattcgggtcttgtcaagcttgtccatgattactgctgcagcatattgccactataccggccgcgtattcacgccccctagcaaggagtgctcctacgttgagaatttcctgctcatgactggccatgttgatgagagcactggaaagcctgacccacgctacgttgatatcatcgagcgcctgtggacaactgttgcagaccacgagatgacatgttctactgccgcattgcttcagacagcgtccgcactgccagatgtgatctcaagtcttatctcggctatctctgcaacatatggccctctgcacggcggagccattgaggtcgcatacaagagcattgaggaaatcggcagcgtagatgatgtggctgcaaaaattgagcgcgtcaaatcgggcaaggagcggctgtacggttatggccaccgcgtctaccgcgtaaccgatcctcgcttcacctacattagcgacatcctaaacgaactcactgatgaggcttctaaggacccgctgttgcaagtagcttttgcattagataaagctgccgcaaccgatgaatatttcacaaccagaaaactgcggccaaatgccgacctcttcgccgcatttgcctacaaagcgcttggcttcccagcgccattcatcttgccaatctccgttgtatcgaggactcaaggtttcatggcacactggaaggaggcaatggagggcaagccccgtatctggcgacctggacaaaagtatacaggaaacctcaacttgaaggaatag

SEQ ID NO: 35583 - protein, 454 aa, Muscodor strobelii
  misc_feature: SGI Peptide ID NO. 572325
  misc_feature (74)..(442): Pfam Id: PF00285 Pfam Desc: Citrate synthase
  misc_feature (13)..(451): NCBI GI: 145241097 Blast Desc: An08g10920 [Aspergillus niger] gi|134077724|emb|CAK45764.1| protein product [Aspergillus niger]
  misc_feature (4)..(451): NCBI GI: 226510201 Blast Desc: LOC100274406 [Zea mays] gi|194707756|gb|ACF87962.1| [Zea mays]
  misc_feature (18)..(451): NCBI GI: 169785489 Blast Desc: [Aspergillus oryzae RIB40] gi|83775953|dbj|BAE66072.1| protein product [Aspergillus oryzae]
  misc_feature (18)..(451): NCBI GI: 238506493 Blast Desc: citrate synthase, [Aspergillus flavus NRRL3357] gi|220689161|gb|EED45512.1| citrate synthase, [Aspergillus flavus NRRL3357]
  misc_feature (2)..(453): NCBI GI: 212537045 Blast Desc: citrate synthase, [Penicillium marneffei ATCC 18224] gi|210068420|gb|EEA22511.1| citrate synthase, [Penicillium marneffei ATCC 18224]
  misc_feature (23)..(449): NCBI GI: 145230211 Blast Desc: An01g09940 [Aspergillus niger] gi|134055531|emb|CAK37177.1| protein product [Aspergillus niger]
  misc_feature (1)..(448): NCBI GI: 168020320 Blast Desc: [Physcomitrella patens subsp. patens] gi|162686099|gb|EDQ72490.1| [Physcomitrella patens subsp. patens]
  misc_feature (4)..(448): NCBI GI: 168002102 Blast Desc: [Physcomitrella patens subsp. patens] gi|162695160|gb|EDQ81505.1| [Physcomitrella patens subsp. patens]
  misc_feature (6)..(448): NCBI GI: 15231130 Blast Desc: CSY2 (citrate synthase 2); citrate (SI)-synthase [Arabidopsis thaliana] gi|73917789|sp|Q9LXS6.1|CISY2_ARATH RecName: Full=Citrate synthase 2, peroxisomal; Flags: Precursor
  misc_feature (15)..(448): NCBI GI: 281204740 Blast Desc: citrate synthase [Polysphondylium pallidum PN500]
  misc_feature (6)..(448): SWISSPROT Homolog: EC 2.3.3.1 Citrate (Si)-synthase
MANDTAPQVNGVNGVKKPQGDVLHIIDSRTRQHYTVDINENAISATDLKAIKAPKDTEHPEYQNEQGLRVFDPGYSNTLVSESKITYIDGLEGTIQYRGYSIHDIIGKKKFADLSYLLIWGSWPSAAEAQKYQERLNNVPLIDESVFNVIRAFPKNGSILGMIVAGLSALQSSDMDAIPAHAAKNLYLGQPDNVDTQIIRVLSSLSMITAAAYCHYTGRVFTPPSKECSYVENFLLMTGHVDESTGKPDPRYVDIIERLWTTVADHEMTCSTAALLQTASALPDVISSLISAISATYGPLHGGAIEVAYKSIEEIGSVDDVAAKIERVKSGKERLYGYGHRVYRVTDPRFTYISDILNELTDEASKDPLLQVAFALDKAAATDEYFTTRKLRPNADLFAAFAYKALGFPAPFILPISVVSRTQGFMAHWKEAMEGKPRIWRPGQKYTGNLNLKE

SEQ ID NO: 35584 - DNA, 1484 bp, Muscodor strobelii
  misc_feature: SGI EST ID NO. CUFF.84783.0
  misc_feature: Variant of the nucleotide sequence at SEQ ID NO 35582
catcaaaatggcaaacgacacagctccccaagtaaacggcgttaatggtgtgaaaaagccgcaaggggacgttttgcatataattgacagccgtacaaggcagcattatacggttgacatcaacgagaatgctatcagtgccactgatctcaaggcgataaaggcgccaaaagacaccgagcatcctgagtatcagaacgaacagggtctccgcgtttttgaccctggttattctaatacgctagttagcgaaagcaaaatcacatacattgacgggcttgagggcaccatccaatacagaggatattctatacacgacataataggaaagaagaagttcgcggacctctcctatctccttatctggggaagctggccttcggcagcggaggcgcagaagtatcaagagcgtctgaacaatgttcctttgattgatgagtcggtgtttaatgtcattagagccttccccaagaatggatcgattttgggcatgatcgttgcaggcttgagcgcccttcagtcgtctgacatggatgccatcccagctcatgcggccaagaatctctatcttggccaacccgataatgtcgacacacaaatcattcgggtcttgtcaagcttgtccatgattactgctgcagcatattgccactataccggccgcgtattcacgccccctagcaaggagtgctcctacgttgagaatttcctgctcatgactggccatgttgatgagagcactggaaagcctgacccacgctacgttgatatcatcgagcgcctgtggacaactgttgcagaccacgagatgacatgttctactgccgcattgcttcagacagcgtccgcactgccagatgtgatctcaagtcttatctcggctatctctgcaacatatggccctctgcacggcggagccattgaggtcgcatacaagagcattgaggaaatcggcagcgtagatgatgtggctgcaaaaattgagcgcgtcaaatcgggcaaggagcggctgtacggttatggccaccgcgtctaccgcgtaaccgatcctcgcttcacctacattagcgacatcctaaacgaactcactgatgaggcttctaaggacccgctgttgcaagtagcttttgcattagataaagctgccgcaaccgatgaatatttcacaaccagaaaactgcggccaaatgccgacctcttcgccgcatttgcctacaaagcgcttggcttcccagcgccattcatcttgccaatctccgttgtatcgaggactcaaggtttcatggcacactggaaggaggcaatggagggcaagccccgtatctggcgacctggacaaaagtatacaggaaacctcaacttgaaggaatagagtagtctcttttgactaaatatgtatatggaaattacgagtattgtgttatagcttttctcttataaaggcgcaatcaatagaagtttcgttgcattcccttcgataatca

SEQ ID NO: 35585 - DNA, 1527 bp, Muscodor strobelii
  misc_feature: SGI cDNA ID NO. 572326
  misc_feature: Encodes the peptide sequence at SEQ ID NO 35586
atgactaaacgtagcgccgaggaggccttcgacgagacaaatgatgagaacagcggcgtaacagaaaccctatgcaagtggatcgttggactcgaggagaaggacatcccagcctcagttttagaacgtgccaagcatcttattttggatgggattgcatgtggcctagtcggagcccatgtcccatggtccgagcaagccgtcgatgccgttctaagctacgagcccgaaggcaattgcagtctcataggatatgaagagaaactcggtcctcttgctgctgctgtgctcaatggtggctttatccaagcaacagagctagatgactaccacagtgttgcgccattgcactctgcttccgtagtccttggttctctattcgctgccgcgcaggtgaagaatgtcaagatccgcggacgcaagggcaatgagaacggtgtcgaggcgcaggattcggcgcgcacagtatccggcaaagattttcttttggcagcaatcgccggcttcgagactggcccacgtgcaggaatggcgatccatgggacagatctcttggtgagaggatggcattcaggagttgtttttggttgtcctgctgccgcagctgcgtcttcgcggttgttgggactatcggcggttgacacagagtctgcgattggcattgcttgcacccaagcctgcggtctgatggccgcgcaattcgaaggcatggtcaagagaatgcagcatggatttgctgcacgcaacggtttgttcggtgccctccttgcccgcaacggatacgttggtatcaaaaaggtattcgagaggaggtatggtggttttctcaatatgttcagtcagggaaatagcatcacaccccgatatgatgtccgcgagatcgtcgctggactcgatgacgtttggcatacttcacggattcgagtcaagatgcatgcttgcgttggcggatgccatggccaggtcgaggcgattgagaagctccaagagcttcacccagagcgattctctgctgaagctcttagccatgtcaagagcatcaaagtcggtttgtcagagaccatcttccatcacgacggctgggcaccccatgagaggcccctgagtagcactggatcacagatgtgtgcggcctatatcggcgccacacagctgattgacaaccaagtcctaattgctggctttgccgacagtaaacgaaaccgtgacgaggtttgggatctcgtgaacaaaacgacctgccatcacgatccgcagttcgataaaccaaatcataaatgcggtgcccatgttgttgtcgagtttgacgatggcacggctgtggaagaaacggtccaaatgccaagaggatttgacccgccaattactgataccgagattctcgccaagtatagaaagctcgtttcgtcagtcgttgataaggaacgcatggagaagattgagaaactagttctgagcatagacagactcgaagatatttcggaactcctggaagtgctggccaagcccacactgtcagcagtctag

SEQ ID NO: 35586 - protein, 508 aa, Muscodor strobelii
  misc_feature: SGI Peptide ID NO. 572326
  misc_feature (18)..(496): Pfam Id: PF03972 Pfam Desc: MmgE/PrpD family
  misc_feature (18)..(273): Pfam Id: PF03972 Pfam Desc: MmgE/PrpD family
  misc_feature (15)..(501): NCBI GI: 145242722 Blast Desc: An09g06220 [Aspergillus niger] gi|134078489|emb|CAL00352.1| protein product [Aspergillus niger]
  misc_feature (1)..(508): NCBI GI: 115385453 Blast Desc: [Aspergillus terreus NIH2624] gi|114187720|gb|EAU29420.1| [Aspergillus terreus NIH2624]
  misc_feature (1)..(508): NCBI GI: 4959956 Blast Desc: [Aspergillus terreus]
  misc_feature (1)..(508): NCBI GI: 190569783 Blast Desc: cis-aconitic acid decarboxylase [Aspergillus terreus]
  misc_feature (13)..(508): NCBI GI: 115402837 Blast Desc: conserved [Aspergillus terreus NIH2624] gi|114189341|gb|EAU31041.1| conserved [Aspergillus terreus NIH2624]
  misc_feature (21)..(502): NCBI GI: 46139251 Blast Desc: FG11140.1 [Gibberella zeae PH-1]
  misc_feature (12)..(508): NCBI GI: 242766989 Blast Desc: immune-responsive protein, [Talaromyces stipitatus ATCC 10500] gi|218724476|gb|EED23893.1| immune-responsive protein, [Talaromyces stipitatus ATCC 10500]
  misc_feature (14)..(508): NCBI GI: 145230213 Blast Desc: An01g09950 [Aspergillus niger] gi|134055532|emb|CAK37178.1| protein product [Aspergillus niger]
  misc_feature (20)..(500): NCBI GI: 126133853 Blast Desc: PICST_43263 [Pichia stipitis CBS 6054] gi|126095600|gb|ABN65422.1| PICST_43263 [Pichia stipitis CBS 6054]
  misc_feature (19)..(503): NCBI GI: 118473159 Blast Desc: MmgE/PrpD family protein [Mycobacterium smegmatis str. MC2 155] gi|16508063|gb|AAL17929.1| [Mycobacterium smegmatis str. MC2 155] gi|118174446|gb|ABK75342.1| MmgE/PrpD family protein MC2
MTKRSAEEAFDETNDENSGVTETLCKWIVGLEEKDIPASVLERAKHLILDGIACGLVGAHVPWSEQAVDAVLSYEPEGNCSLIGYEEKLGPLAAAVLNGGFIQATELDDYHSVAPLHSASVVLGSLFAAAQVKNVKIRGRKGNENGVEAQDSARTVSGKDFLLAAIAGFETGPRAGMAIHGTDLLVRGWHSGVVFGCPAAAAASSRLLGLSAVDTESAIGIACTQACGLMAAQFEGMVKRMQHGFAARNGLFGALLARNGYVGIKKVFERRYGGFLNMFSQGNSITPRYDVREIVAGLDDVWHTSRIRVKMHACVGGCHGQVEAIEKLQELHPERFSAEALSHVKSIKVGLSETIFHHDGWAPHERPLSSTGSQMCAAYIGATQLIDNQVLIAGFADSKRNRDEVWDLVNKTTCHHDPQFDKPNHKCGAHVVVEFDDGTAVEETVQMPRGFDPPITDTEILAKYRKLVSSVVDKERMEKIEKLVLSIDRLEDISELLEVLAKPTLSAV

SEQ ID NO: 35587 - DNA, 1476 bp, Muscodor strobelii
  misc_feature: SGI cDNA ID NO. 572327
  misc_feature: Encodes the peptide sequence at SEQ ID NO 35588
atgccactcccgcagccagacgataactcagctcgtgcatacgatgacgtcatagtccatattgttgattatgcctatgactatgaagttgtttcagaacccgccttgggtcgagctaagatggcactcattgactcgcttggtgttgccatcgaaagccttgcattgagcaaagaatgtgaagctctagttaagccgctgctcccgggcagtggtgctgttgccggtggcttcaaactacctggtacgccgtatcagatggatatactacaagctgccttcaacatgggcgcgatgatccgctatctcgaccataacgatgcgttcgccggagcggagtggggtcatccttctgataaccttggtgctatcttggtcgcggcagacgtgttgacaagggacgcacttgctaggggtaaggaggaggaagtcatcacgatgaagcaggtgttggcaggcctgatcaagtcctacgagatccagggttgctttcaaattaagaacgccttcaaccgtgtcggacttgaccacgtcattctggtcaagatagcatctacggcggtggtgtcttggatgatgggtctttcgcgcgaggaagcactatcagccgtctcacatgcctgggttgacggccatccactgcgtacattcagacaagctcctaacgccgggccgcgcaagggatggtcggctggagatgcctgtatgcgtgccatacatctagcttgcgtagcacgtgcgggtcagccgggtatcaagactcctctgacagcagctagatggggattctatgaagtactgaacaaggggaacgctttcgagctgcctcgaccattcggcacttgggtagttgagaatgctatcttcaaggtattgactgcagagggacacggcctgaccgcagtggaggccacaatggatgcaagcaagcaattgcaagcccgaggccttgatccccttcaggatatcaagagcatccacgtacgcgtccaggagccagcaatgatcatcatcaacaagaaagggccactacacaacccggcagatcgtgaccattgtctgagatatatgatggcggttgtccttttgaagaacggtgctgagatcgacacatcagattatcaagatgatagtcctttcgccacagatgctcgcgttgaagctctacggtcagtaatcagcatggaggaggatccacagatgacactggactatcacaatcctgatattcgaagcgtcggaagctcaatggtgttcacacttaaagacgggagtgaaatcagcacgcggctcgatttcccgctcggccatccggcacgtaatgaagagacgatgcctgctgttcgcacgaaggcaattcgcaatctcaagctcaggttgtcagaagctggagtcactcaaatcatggagacatttgacagcgcggatttcaacacattaccagcgagcaagttcatagatctgttccaagagtga

SEQ ID NO: 35588 - protein, 491 aa, Muscodor strobelii
  misc_feature: SGI Peptide ID NO. 572327
  misc_feature (15)..(483): Pfam Id: PF03972 Pfam Desc: MmgE/PrpD family
  misc_feature (1)..(489): NCBI GI: 238506467 Blast Desc: 2-methylcitrate dehydratase (PrpD), [Aspergillus flavus NRRL3357] gi|220689148|gb|EED45499.1| 2-methylcitrate dehydratase (PrpD), [Aspergillus flavus NRRL3357]
  misc_feature (3)..(489): NCBI GI: 145241087 Blast Desc: An08g10870 [Aspergillus niger] gi|134077719|emb|CAK45759.1| protein product [Aspergillus niger]
  misc_feature (7)..(489): NCBI GI: 154318578 Blast Desc: BC1G_02678 [Botryotinia fuckeliana B05.10] gi|150857808|gb|EDN33000.1| BC1G_02678 [Botryotinia fuckeliana B05.10]
  misc_feature (9)..(489): NCBI GI: 145230209 Blast Desc: An01g09930 [Aspergillus niger] gi|134055530|emb|CAK37176.1| protein product [Aspergillus niger]
  misc_feature (6)..(489): NCBI GI: 159129752 Blast Desc: conserved [Aspergillus fumigatus A1163]
  misc_feature (14)..(489): NCBI GI: 119481585 Blast Desc: MmgE/PrpD family protein [Neosartorya fischeri NRRL 181] gi|119408975|gb|EAW18924.1| MmgE/PrpD family protein [Neosartorya fischeri NRRL 181]
  misc_feature (6)..(489): NCBI GI: 146322978 Blast Desc: 2-methylcitrate dehydratase (PrpD) [Aspergillus fumigatus Af293] gi|129558555|gb|EBA27499.1| 2-methylcitrate dehydratase (PrpD), [Aspergillus fumigatus Af293]
  misc_feature (11)..(489): NCBI GI: 121716028 Blast Desc: MmgE/PrpD family protein [Aspergillus clavatus NRRL 1] gi|119403780|gb|EAW14197.1| MmgE/PrpD family protein [Aspergillus clavatus NRRL 1]
  misc_feature (15)..(489): NCBI GI: 91777235 Blast Desc: 2-methylcitrate dehydratase [Burkholderia xenovorans LB400] gi|91689895|gb|ABE33093.1| 2-methylcitrate dehydratase [Burkholderia xenovorans LB400]
  misc_feature (10)..(489): NCBI GI: 242796598 Blast Desc: 2-methylcitrate dehydratase (PrpD), [Talaromyces stipitatus ATCC 10500] gi|218719420|gb|EED18840.1| 2-methylcitrate dehydratase (PrpD), [Talaromyces stipitatus ATCC
  misc_feature (14)..(489): SWISSPROT Homolog: EC 4.2.1.79 2-methylcitrate dehydratase
MPLPQPDDNSARAYDDVIVHIVDYAYDYEVVSEPALGRAKMALIDSLGVAIESLALSKECEALVKPLLPGSGAVAGGFKLPGTPYQMDILQAAFNMGAMIRYLDHNDAFAGAEWGHPSDNLGAILVAADVLTRDALARGKEEEVITMKQVLAGLIKSYEIQGCFQIKNAFNRVGLDHVILVKIASTAVVSWMMGLSREEALSAVSHAWVDGHPLRTFRQAPNAGPRKGWSAGDACMRAIHLACVARAGQPGIKTPLTAARWGFYEVLNKGNAFELPRPFGTWVVENAIFKVLTAEGHGLTAVEATMDASKQLQARGLDPLQDIKSIHVRVQEPAMIIINKKGPLHNPADRDHCLRYMMAVVLLKNGAEIDTSDYQDDSPFATDARVEALRSVISMEEDPQMTLDYHNPDIRSVGSSMVFTLKDGSEISTRLDFPLGHPARNEETMPAVRTKAIRNLKLRLSEAGVTQIMETFDSADFNTLPASKFIDLFQE

SEQ ID NO: 35589 - DNA, 6168 bp, Muscodor strobelii
  misc_feature: SGI cDNA ID NO. 572328
  misc_feature: Encodes the peptide sequence at SEQ ID NO 35590
atgagttcggacggaacaccctcatcgtttgatgagatcaacccaaccccaggtgcatatgagacccctggtgtacctgtaaaattctcaatcagctttcaagacatagaacaagagttatgtctttctgtatcaaatgcataccaccttaatgagcatagggctgcgtttctcgcatctctatcgcgtttggaaagtgcaggagaagggaagaagtttgcgtctggtgccgccctagtctttgcctttctcgagtttctgctgagtcgaaacatctcacctggtgctcttatacatctcttcaatactgtttatgcagatgtcatgcaaagaaaagaaattcacgacttcatacgcaccttacccgatggatcaacaacacagaaatcaatactgcgcacattctttttgctgcagtcaaaactaccattcccattgcgttcaggcccaagtgcgcttaccacgatagccaaagatccgagatcttcgatcattgtcgcatttggtggacaaggcgcaagcaatggcgcttgtgttgatgagttagctgagctatactcgctctatcaaccactcctacgatcgttgacggtatctctttcagctgctctcttctcgctttctcgtcatgcggacacacaatcattctatctcggacgcgaaatcgacgtgctaggatggctggcggaccctaccagacgaccagaagggtcgttccttgcaggagctgcagtcagctttccaatcattggaatgacaggcttgttgcattatgctgtcgtctgcaagctattaggaaaaacgccaggggagcttgggcaaatgttgtctggaataactggccactcacagggcatagtcgttgctgccgcaatctcaaaatcacaatcctgggagtctttcttcgaagaatccagattagcagttgaagctcttttctggatgggatatgaatgtcaaatagcggcacctagatcggccgttgctccagctgtcatcaaagagaatgtggaaagcggttatggagccccgtcacatatgctattagtgcgtgggctccgacgagaccgcttggaagcttctatagctactaacaacaagtatctccgaaagcatgaacatatatacttgtccttgataaacaattccaaagaccatgtagtcgctggaccgccaaagagtcttcaaggcttgcttacaactctacgagccaaaagcgccacagatggtgcagatcagagccgcataccctacagcaaaagaaaaccagcgatcctctttcagtatcttcctatcagcgccccttttcactcgccatatctccgagctgcagcagatcgggttaagagccggttgataaattcgtccccgcgaaactcggcaataagcgatctgcgcattcctgtattccatactcataacggagcagacttgcgaaaatattatgaccccaaggcagacctcttaggagtgatcatcgacgcagttgcaactcagaccgttgactggcccaaaacattacgagcagatggtgaaaccccaccttcccatgtcatagcactgggatctggcagattcagcgacatggttctcaaaaatgttgacggttacggtgtccgagtgattgacggcgtaagactagattctacagactcttctaccgtcggcagtaaggcagagatcttcatggagaacctatctaccccgtgtgtgccatgtacatcatggcgccagcagttcaaaccgcgtctcaccataacctccgatggtaatttccatcttgagactcgattgaacagtgttctcagatctcctcctatcataattgcaggcatgacaccaactacagtcccatgggatttcgtctcatccgtcatcagctctggataccacatcgagctcgcaggcgggggctatcacaaccctgctacattcgaggcagctcttgacaaggtgacagccaacataccagcaggccgtagcatcacgtgcaacttaatttacgtcgatccaaaagccattggataccagattcccctgatccgccagctgattcgtcgtggcgttcccatcgaaggccttaccattggcgctggaattccgtcccccgagattgccgctgagtacatagagactctgggaattagacacatttccttcaaaccgggctcaacacgagcagttcgcgaagttattgagatcgccaagaggcacccaacttttccagtcattttgcagtggactggtggacgtggtggtgggcaccattcttgtgaggactttgaagaacccttgcttgagatgtacagcgagattcgtcgtcaagaaaatctctaccttgttgttggcagtggcttcggtgacggctcgggcattttcccttatcttacaggttggtggtctctgcgacatggaagaccagctatgccatgtgatggagtcttgcttggcagccgaatgatggttgccacagatgcgcacacatcagctggagttaaaaagcttctaataaacacacctggtgttgaggcttctgaatgggagaagagttatctccgtgcagatgcgtcagggggcgtcctcacggtagaatccgagatgggtcagccgatacacaacgtagcaacacgaggtgttcgcctctggaaagacatggatgacacaatctttaatcttccaaagcctgagagaaaatctgccctcttgaagcgcaaagacgagattatacgccgtctaaatgccgattttgcgaagccctggtttggtcaagatgccactgcccagcctgcagatttggaggacatgacttacgctgagatcatatctcgcttagtccaactcatgtacgtgaaccatcaacagcgatgggtcaatgcatcttataaagatcttgtcgaagaatttacagctcgttctcttgagcgacttggttctgtaggttttaatgcagcatggttgagtgaaccccaagacctaactgccaaactcgcgaagatctgtcctgatcttgccgagcaacttgtacatcctgaagacctccgcttctttattcgatcttgtaagaagcgcggtcgcaagccggtcaactttgtcgttgctctcgatgacgattttgagcattggtttaagaaagactcactctggcaatccgaggacttggacgcagtgttggatcaagacccagagcgtgtttgcatactgcagagcccggtatccgtcaagtactgcacccgcgacgatcaatccgcgaagcaaatactcgatgaaattcacggagatatcgtagcaatgatgcgcggcataccagagttcagcatcgtcactacgtccaatgcgattgtgtccactgaaccgtctcttacttcaagcaacatcctcatggacaacatggagggcatcatcatctgcagacctcttccaggtaaagaccttcctagcttggagtcatggattaaatgcgtcgagccttatgccagccccccgattatcgcactcattcgtgaagagactctgttcgagtctgagtcgaagcgctgccggccaaacccatttcgccgcatttttgcgccccaacacgggttcacgctcgttattgacagtgtttcgcaagaagcgcacctacgatgcgaatccactggacaggctaaagctctcgtccaaacagtatctccaaatgatcttcgcgtagaacttgttcacaaagatccttcagtccctacgggatgtgcctcgctagttcttgcgtggcaatataacgagaagtctggacaacttattgacacgactaagaatcgcgacggaaagattcaggacttttatgctcgcctttggcttcccaagagtggcgcaaacagggatggtcgactaaccgacaagttcgcaggtggtaaggtagacctcactcagaagctgcaagactcgctgcactctgttgtctctcatgcctttatcggtggctctcttggaagctccacggatgtgttgcctctagagtcggcagtaatcgcatcatgggaggcaatcatgaagccgttattgattcatgagctccaaggcgatattatgcgcctcgtccatcaatcaatcggtgtagaatatgtcgcgggggcctctcctatgtatgttggagactccttgacatccgagtccgccatccagtccatcacgattgagccttcaggaaagtcaatttctgtcgcggcgaagctcgtgcgcgcaggtgctcacatcgctaccgttacctccagattcttcatcaagggcaaattttccgactatcacaacacgttccaaaacagagatgagccccgatatgaggtcgaggttcctacgaagatcgatgaggcagtactccgagatcgcagctggcttcatcttggtgacccctccactcctttgagcggaaagacattggtgtttaagctgcagacaagcagtaagtggactagcaaaggctctgcgacacatattgccgttcatggcttggtcgaggagaaggcgtggaacggtacttgtcgcccactaggttcagtgcatttcgatgccccagagagccaaggcaacccagtcttggatttcctgcagcgcaagggacggacagtgaacgaaagggtccttctgaaaaatcccggctggaatggtgattcagaggttaccgttgttgcaccgccgcacactcatatttacgccaaggtctcaggggactgtaacccaattcacggatcaaacaccttcgcggcggtggcagagcttcccagtcccatcgtgcacggtatgtataccatggccgtctcacgaagagtagtagaagacatggttgttccggatgaaccggaacgcttgcgccggttcgatgcgtccttcatggacatggtaatgcccagtgacaggcttgtcgtgaagattgcgcatgtagccatgaaggatggtcgcatgatattcgaggttactgtgcgcaaagaagagactgaggaggaggtgcttcgaggagaagctgagatcgagcaaccttccactgcatacctgttcactggacagggaagtcaatctgtcggaatgggaatgacgctctacgatacatgcccggttgcaaagggcgtctatgatgatatggataagcatctgaaagatctatatggcttctctatcctgcgaatcatccgagagaatccaaaggagatcacaatccacttccgcggccgtgctgggcaaaaaattctttcaaattacttggctttggaaacagagctactcacaaaagacggagtacgcactacagcgccaattataccaggactcagccccagtacaacatcatataccttctctgaagctaagggtctcctattcgctactcatttcgctcagcctgccatcatactactagagaaagccaccttcgagcacatcaggtcaagaggactaattcaagagaatgcgaccttcgccggacattcccttggcgagtatggagctctctcgtcaatggctccattcgttgacttcaaggatatgctgagcaccgcgttctatcgcggattgatgatgcagttcgccatcccacgcgacaagaatggacaaacaggattcagtatgatggcaaccaatccaggcagagttggaaaacacttcgacgacaacgccctcaaaacactagtccaccacatcgcccaggaaagcggcgaactcctagaaatcgtaaacctcaacatcgcaggcgatcaattcgtatgcgcaggtcacgtacagaatctcagcgctctcacagaaacactcaacgccgtggcggagcgcaagatccaaccccagttaatcgaggatttcctcacggcctccgtgccgcaagcaacggcattcggcacattcgtctcgacccgcatcgcgcggtctaagcaactacccctcgacgtcgagattcctagaggaaaagcgacgatcatgctaaatggcatagacgtgcctttccattcttctcgcatgcgcttctggatacctactttcaggaacttcttccttgcgcatgtcaagccggaagatatccgtgctgatcagctcattgggaaatttgcacccaatgtcgttgggaagaagttctcgcttgataaagatttcatacaagaagctgctagtataacaggaagtgctattttagagggtcttgtgcattga

SEQ ID NO: 35590 - protein, 2055 aa, Muscodor strobelii
  misc_feature: SGI Peptide ID NO. 572328
  misc_feature (1673)..(2049): Pfam Id: PF00698 Pfam Desc: Acyl transferase domain
  misc_feature (1026)..(1087): Pfam Id: PF08354 Pfam Desc: Domain of function (DUF1729)
  misc_feature (1517)..(1659): Pfam Id: PF01575 Pfam Desc: MaoC like domain
  misc_feature (1673)..(1856): Pfam Id: PF00698 Pfam Desc: Acyl transferase domain
  misc_feature (12)..(2051): NCBI GI: 145241085 Blast Desc: An08g10860 [Aspergillus niger] gi|134077718|emb|CAK45758.1| protein product [Aspergillus niger]
  misc_feature (16)..(2055): NCBI GI: 242760689 Blast Desc: fatty acid synthase subunit beta, [Talaromyces stipitatus ATCC 10500] gi|218723237|gb|EED22654.1| fatty acid synthase subunit beta, [Talaromyces stipitatus ATCC 10500]
  misc_feature (2)..(2055): NCBI GI: 212537047 Blast Desc: fatty acid synthase subunit beta, [Penicillium marneffei ATCC 18224] gi|210068421|gb|EEA22512.1| fatty acid synthase subunit beta, [Penicillium marneffei ATCC 18224]
  misc_feature (6)..(2055): NCBI GI: 212539223 Blast Desc: fatty acid synthase subunit beta, [Penicillium marneffei ATCC 18224] gi|210069509|gb|EEA23600.1| fatty acid synthase subunit beta, [Penicillium marneffei ATCC 18224]
  misc_feature (7)..(2050): NCBI GI: 115402353 Blast Desc: ATEG_08667 [Aspergillus terreus NIH2624] gi|114189099|gb|EAU30799.1| ATEG_08667 [Aspergillus terreus NIH2624]
  misc_feature (31)..(2047): NCBI GI: 239609120 Blast Desc: fatty acid synthase beta subunit dehydratase [Ajellomyces dermatitidis ER-3]
  misc_feature (31)..(2047): NCBI GI: 261188173 Blast Desc: fatty acid synthase beta subunit dehydratase [Ajellomyces dermatitidis SLH14081] gi|239593378|gb|EEQ75959.1| fatty acid synthase beta subunit dehydratase [Ajellomyces
  misc_feature (29)..(2047): NCBI GI: 116194708 Blast Desc: conserved [Chaetomium globosum CBS 148.51] gi|88179865|gb|EAQ87333.1| conserved [Chaetomium globosum CBS 148.51]
  misc_feature (15)..(2050): NCBI GI: 169785383 Blast Desc: [Aspergillus oryzae RIB40] gi|83775900|dbj|BAE66019.1| protein product [Aspergillus oryzae]
  misc_feature (31)..(2047): NCBI GI: 225555129 Blast Desc: fatty acid synthase beta subunit dehydratase [Ajellomyces capsulatus G186AR]
  misc_feature (129)..(2055): SWISSPROT Homolog: EC 2.3.1.86 Fatty-acyl-CoA synthase
  misc_feature (129)..(2055): SWISSPROT Homolog: EC 2.3.1.39 [Acyl-carrier-protein] S-malonyltransferase
  misc_feature (129)..(2055): SWISSPROT Homolog: EC 2.3.1.38 [Acyl-carrier-protein] S-acetyltransferase
  misc_feature (129)..(2055): SWISSPROT Homolog: EC 3.1.2.14 Oleoyl-[acyl-carrier-protein] hydrolase
  misc_feature (129)..(2055): SWISSPROT Homolog: EC 4.2.1.61 3-hydroxypalmitoyl-[acyl-carrier-protein] dehydratase
  misc_feature (129)..(2055): SWISSPROT Homolog: EC 1.3.1.9 Enoyl-[acyl-carrier-protein] reductase (NADH)
  misc_feature: Useful for fungicidal and/or biocontrol applications
MSSDGTPSSFDEINPTPGAYETPGVPVKFSISFQDIEQELCLSVSNAYHLNEHRAAFLASLSRLESAGEGKKFASGAALVFAFLEFLLSRNISPGALIHLFNTVYADVMQRKEIHDFIRTLPDGSTTQKSILRTFFLLQSKLPFPLRSGPSALTTIAKDPRSSIIVAFGGQGASNGACVDELAELYSLYQPLLRSLTVSLSAALFSLSRHADTQSFYLGREIDVLGWLADPTRRPEGSFLAGAAVSFPIIGMTGLLHYAVVCKLLGKTPGELGQMLSGITGHSQGIVVAAAISKSQSWESFFEESRLAVEALFWMGYECQIAAPRSAVAPAVIKENVESGYGAPSHMLLVRGLRRDRLEASIATNNKYLRKHEHIYLSLINNSKDHVVAGPPKSLQGLLTTLRAKSATDGADQSRIPYSKRKPAILFQYLPISAPFHSPYLRAAADRVKSRLINSSPRNSAISDLRIPVFHTHNGADLRKYYDPKADLLGVIIDAVATQTVDWPKTLRADGETPPSHVIALGSGRFSDMVLKNVDGYGVRVIDGVRLDSTDSSTVGSKAEIFMENLSTPCVPCTSWRQQFKPRLTITSDGNFHLETRLNSVLRSPPIIIAGMTPTTVPWDFVSSVISSGYHIELAGGGYHNPATFEAALDKVTANIPAGRSITCNLIYVDPKAIGYQIPLIRQLIRRGVPIEGLTIGAGIPSPEIAAEYIETLGIRHISFKPGSTRAVREVIEIAKRHPTFPVILQWTGGRGGGHHSCEDFEEPLLEMYSEIRRQENLYLVVGSGFGDGSGIFPYLTGWWSLRHGRPAMPCDGVLLGSRMMVATDAHTSAGVKKLLINTPGVEASEWEKSYLRADASGGVLTVESEMGQPIHNVATRGVRLWKDMDDTIFNLPKPERKSALLKRKDEIIRRLNADFAKPWFGQDATAQPADLEDMTYAEIISRLVQLMYVNHQQRWVNASYKDLVEEFTARSLERLGSVGFNAAWLSEPQDLTAKLAKICPDLAEQLVHPEDLRFFIRSCKKRGRKPVNFVVALDDDFEHWFKKDSLWQSEDLDAVLDQDPERVCILQSPVSVKYCTRDDQSAKQILDEIHGDIVAMMRGIPEFSIVTTSNAIVSTEPSLTSSNILMDNMEGIIICRPLPGKDLPSLESWIKCVEPYASPPIIALIREETLFESESKRCRPNPFRRIFAPQHGFTLVIDSVSQEAHLRCESTGQAKALVQTVSPNDLRVELVHKDPSVPTGCASLVLAWQYNEKSGQLIDTTKNRDGKIQDFYARLWLPKSGANRDGRLTDKFAGGKVDLTQKLQDSLHSVVSHAFIGGSLGSSTDVLPLESAVIASWEAIMKPLLIHELQGDIMRLVHQSIGVEYVAGASPMYVGDSLTSESAIQSITIEPSGKSISVAAKLVRAGAHIATVTSRFFIKGKFSDYHNTFQNRDEPRYEVEVPTKIDEAVLRDRSWLHLGDPSTPLSGKTLVFKLQTSSKWTSKGSATHIAVHGLVEEKAWNGTCRPLGSVHFDAPESQGNPVLDFLQRKGRTVNERVLLKNPGWNGDSEVTVVAPPHTHIYAKVSGDCNPIHGSNTFAAVAELPSPIVHGMYTMAVSRRVVEDMVVPDEPERLRRFDASFMDMVMPSDRLVVKIAHVAMKDGRMIFEVTVRKEETEEEVLRGEAEIEQPSTAYLFTGQGSQSVGMGMTLYDTCPVAKGVYDDMDKHLKDLYGFSILRIIRENPKEITIHFRGRAGQKILSNYLALETELLTKDGVRTTAPIIPGLSPSTTSYTFSEAKGLLFATHFAQPAIILLEKATFEHIRSRGLIQENATFAGHSLGEYGALSSMAPFVDFKDMLSTAFYRGLMMQFAIPRDKNGQTGFSMMATNPGRVGKHFDDNALKTLVHHIAQESGELLEIVNLNIAGDQFVCAGHVQNLSALTETLNAVAERKIQPQLIEDFLTASVPQATAFGTFVSTRIARSKQLPLDVEIPRGKATIMLNGIDVPFHSSRMRFWIPTFRNFFLAHVKPEDIRADQLIGKFAPNVVGKKFSLDKDFIQEAASITGSAILEGLVH

SEQ ID NO: 35591 - DNA, 1442 bp, Muscodor strobelii
  misc_feature: SGI EST ID NO. CUFF.84810.0
  misc_feature: Variant of the nucleotide sequence at SEQ ID NO 35589
aaacagagctactcacaaaagacggagtacgcactacagcgccaattataccaggactcagccccagtacaacatcatataccttctctgaagctaagggtctcctattcgctactcatttcgctcagcctgccatcatactactagagaaagccaccttcgagcacatcaggtcaagaggactaattcaagagaatgcgaccttcgccggacattcccttggcgagtatggagctctctcgtcaatggctccattcgttgacttcaaggatatgctgagcaccgcgttctatcgcggattgatgatgcagttcgccatcccacgcgacaagaatggacaaacaggattcagtatgatggcaaccaatccaggcagagttggaaaacacttcgacgacaacgccctcaaaacactagtccaccacatcgcccaggaaagcggcgaactcctagaaatcgtaaacctcaacatcgcaggcgatcaattcgtatgcgcaggtcacgtacagaatctcagcgctctcacagaaacactcaacgccgtggcggagcgcaagatccaaccccagttaatcgaggatttcctcacggcctccgtgccgcaagcaacggcattcggcacattcgtctcgacccgcatcgcgcggtctaagcaactacccctcgacgtcgagattcctagaggaaaagcgacgatcatgctaaatggcatagacgtgcctttccattcttctcgcatgcgcttctggatacctactttcaggaacttcttccttgcgcatgtcaagccggaagatatccgtgctgatcagctcattgggaaatttgcacccaatgtcgttgggaagaagttctcgcttgataaagatttcatacaagaagctgctagtataacaggaagtgctattttagagggtcttgtgcattgatttggtgtttaaggtattgcatcctgtcttcctttggcgcaggcgttacaggcatcttcattagcattgcagtagatcaaatagatcatagagccaagctagacgctccatttaaaacatgaaatgagtaaataatcaatcttttgtcgtttatgggtcgagatcataatcttaatgtctgttacacgtcattagactcggcaatctgcacacgtagcatacacctatccccattaatcttgtcttgctcaataatgcccctccaaactcagacacccagtcttagtaatcaaatattcattgatcgcaacgtctttcccggactcctttccgtaacctgagtctttgataccaccaaatgggctttccgcgctcgacatgtttcctttgcgttgtcagctaatatcctcaccaagataaatctgttgacatacccgtgttcaacccaatcattcccgcttcgaggttttcaaacagtctgaagatgcgatcgacattcttcgtaaagcaata

SEQ ID NO: 35592 - DNA, 1506 bp, Muscodor strobelii
  misc_feature: SGI cDNA ID NO. 572329
  misc_feature: Encodes the peptide sequence at SEQ ID NO 35593
atgggttcacagcagatctcaattgatctgaagttgagcaatccggagctcttcaagaatcagggatatgttgatgggcaatggattgagtcgaaatcgggcgagagattcgatatcattgacccgggaacaaacgaacccttcacaacctgtccctcattctcccacgccgacgtcgactccgccgttcaagccgctcaaacagcattcacatcctaccggaccctcacacctctccagcgatctatcttgatcgcaaaatgggacacactaattcgggagaacaaagaagatctcgcgaggatcctcgtatatgagacgggcaagccgcttgctgaggcaagaggtgagattgactatgcgacgggctttacgaggtggtttgcgggcgaggcggagcgcattcaggggagtttgtatagtgctgcgttgccgggcaggagggtgttgacgctgaaacaaccgattggtgttgttgctgcgcttgttccttggaattttcctgttgcaatgattcttcgaaaagcgagcacagcattcgcagcaggatgtacgatggtcgcgaagccatcacccgagacgcctctttcggctcttacgctggcgtacttggctgagaaggcagggtttccgaagggtgttttcaatgtgcttcctacgacgttggagaatacgccggcgttgagtgaggcgctttgtaaacacccgcttataaagaaagtctcgtttactgggtctacaagagtcgggaagatcctgtcggcacactgcgcaagcggcttgaagaagctgacactggagcttggcggcaattgtccctttatcgtctttgatgacgcgagtctggagcaagcctgtgctgcattgatgccacttaaattccgccacgcaggtcaagcatgcatcaccgcaaaccgagtgtacgtccagaaaggtatttacaacgagttcgcagagcttctcgcatccaagacacgtgagttacgagtagggcacggcatggacgaaggcacgacgatgggacctcttaccgtcccacaaggtgttgagaagactgcagcgcaggttgaagatgccaaacaacaaggcgggacgattctgacgggtgggaataaagtgggtgaaggaaaaggggggtatttcttcgaaccgactctcattacgaacgcgactcctcagatgaagatcgcaagcgaggagacatttggcccgattttggcactgtttccgtttgagacggaggaagaggctgttaagatggctaatgatactagcatgggtctagcgtcctattgctttacgaagaatgtcgatcgcatcttcagactgtttgaaaacctcgaagcgggaatgattgggttgaacacgggaaacatgtcgagcgcggaaagcccatttggtggtatcaaagactcaggttacggaaaggagtccgggaaagacgttgcgatcaatgaatatttgattactaagactgggtgtctgagtttggaggggcattattga

SEQ ID NO: 35593 - protein, 501 aa, Muscodor strobelii
  misc_feature: SGI Peptide ID NO. 572329
  misc_feature (28)..(493): Pfam Id: PF00171 Pfam Desc: Aldehyde dehydrogenase family
  misc_feature (5)..(501): NCBI GI: 238505709 Blast Desc: succinate-semialdehyde dehydrogenase, [Aspergillus flavus NRRL3357] gi|220690179|gb|EED46529.1| succinate-semialdehyde dehydrogenase, [Aspergillus flavus
  misc_feature (3)..(501): NCBI GI: 119492965 Blast Desc: succinate-semialdehyde dehydrogenase, [Neosartorya fischeri NRRL 181] gi|119411898|gb|EAW21841.1| succinate-semialdehyde dehydrogenase, [Neosartorya fischeri NRRL
  misc_feature (3)..(501): NCBI GI: 159127904 Blast Desc: succinate-semialdehyde dehydrogenase, [Aspergillus fumigatus A1163]
  misc_feature (3)..(501): NCBI GI: 119191954 Blast Desc: succinate-semialdehyde dehydrogenase [Coccidioides immitis RS]
  misc_feature (3)..(501): NCBI GI: 240106283 Blast Desc: aldehyde dehydrogenase family protein [Coccidioides posadasii C735 delta SOWgp]
  misc_feature (3)..(501): NCBI GI: 71000393 Blast Desc: succinate-semialdehyde dehydrogenase [Aspergillus fumigatus Af293] gi|66852528|gb|EAL92853.1| succinate-semialdehyde dehydrogenase, [Aspergillus fumigatus
  misc_feature (3)..(501): NCBI GI: 115385158 Blast Desc: conserved [Aspergillus terreus NIH2624] gi|114196818|gb|EAU38518.1| conserved [Aspergillus terreus NIH2624]
  misc_feature (3)..(501): NCBI GI: 258573445 Blast Desc: NAD-dependent aldehyde dehydrogenase [Uncinocarpus reesii 1704] gi|237901170|gb|EEP75571.1| NAD-dependent aldehyde dehydrogenase [Uncinocarpus reesii 1704]
  misc_feature (3)..(501): NCBI GI: 67537300 Blast Desc: AN4820.2 [Aspergillus nidulans FGSC A4] gi|40741200|gb|EAA60390.1| AN4820.2 [Aspergillus nidulans FGSC A4] gi|259482331|tpe|CBF76711.1| TPA: succinate semialdehyde FGSC
  misc_feature (10)..(498): NCBI GI: 189196374 Blast Desc: succinate-semialdehyde dehydrogenase [Pyrenophora tritici-repentis Pt-1C-BFP] gi|187980404|gb|EDU47030.1| succinate-semialdehyde dehydrogenase [Pyrenophora Pt-1C-BFP]
  misc_feature (9)..(496): SWISSPROT Homolog: EC 1.2.1.16 Succinate-semialdehyde dehydrogenase (NAD(P)(+))
  misc_feature: Useful for introducing or modulating the production of volatile compounds
  misc_feature: Useful for fungicidal and/or biocontrol applications
MGSQQISIDLKLSNPELFKNQGYVDGQWIESKSGERFDIIDPGTNEPFTTCPSFSHADVDSAVQAAQTAFTSYRTLTPLQRSILIAKWDTLIRENKEDLARILVYETGKPLAEARGEIDYATGFTRWFAGEAERIQGSLYSAALPGRRVLTLKQPIGVVAALVPWNFPVAMILRKASTAFAAGCTMVAKPSPETPLSALTLAYLAEKAGFPKGVFNVLPTTLENTPALSEALCKHPLIKKVSFTGSTRVGKILSAHCASGLKKLTLELGGNCPFIVFDDASLEQACAALMPLKFRHAGQACITANRVYVQKGIYNEFAELLASKTRELRVGHGMDEGTTMGPLTVPQGVEKTAAQVEDAKQQGGTILTGGNKVGEGKGGYFFEPTLITNATPQMKIASEETFGPILALFPFETEEEAVKMANDTSMGLASYCFTKNVDRIFRLFENLEAGMIGLNTGNMSSAESPFGGIKDSGYGKESGKDVAINEYLITKTGCLSLEGHY

SEQ ID NO: 35594 - DNA, 2944 bp, Muscodor strobelii
  misc_feature: SGI EST ID NO. CUFF.84811.1
  misc_feature: Variant of the nucleotide sequence at SEQ ID NO 35592
gtgaaaccttcctcggaggtgatgcggggtgtgtgctgtgacgccactgatttggggttcatcgtcggccgtctcgtcatttgctgaattgtcaaatctcacgaatctagacttgagttctaagattgattgattgaaacgcttgttagttggtttagacacctattcattgatatttctgactttgcgacgacgcgtaatcatgggttcacagcagatctcaattgatctgaagttgagcaatccggagctcttcaagaatcagggatatgttgatgggcaatggattgagtcgaaatcgggcgagagattcgatatcattgacccgggaacaaacgaacccttcacaacctgtccctcattctcccacgccgacgtcgactccgccgttcaagccgctcaaacagcattcacatcctaccggaccctcacacctctccagcgatctatcttgatcgcaaaatgggacacactaattcgggagaacaaagaagatctcgcgaggatcctcgtatatgagacgggcaagccgcttgctgaggcaagaggtgagattgactatgcgacgggctttacgaggtggtttgcgggcgaggcggagcgcattcaggggagtttgtatagtgctgcgttgccgggcaggagggtgttgacgctgaaacaaccgattggtgttgttgctgcgcttgttccttggaattttcctgttgcaatgattcttcgaaaagcgagcacagcattcgcagcaggatgtacgatggtcgcgaagccatcacccgagacgcctctttcggctcttacgctggcgtacttggctgagaaggcagggtttccgaagggtgttttcaatgtgcttcctacgacgttggagaatacgccggcgttgagtgaggcgctttgtaaacacccgcttataaagaaagtctcgtttactgggtctacaagagtcgggaagatcctgtcggcacactgcgcaagcggcttgaagaagctgacactggagcttggcggcaattgtccctttatcgtctttgatgacgcgagtctggagcaagcctgtgctgcattgatgccacttaaattccgccacgcaggtcaagcatgcatcaccgcaaaccgagtgtacgtccagaaaggtatttacaacgagttcgcagagcttctcgcatccaagacacgtgagttacgagtagggcacggcatggacgaaggcacgacgatgggacctcttaccgtcccacaaggtgttgagaagactgcagcgcaggttgaagatgccaaacaacaaggcgggacgattctgacgggtgggaataaagtgggtgaaggaaaaggggggtatttcttcgaaccgactctcattacgaacgcgactcctcagatgaagatcgcaagcgaggagacatttggcccgattttggcactgtttccgtttgagacggaggaagaggctgttaagatggctaatgatactagcatgggtctagcgtcctattgctttacgaagaatgtcgatcgcatcttcagactgtttgaaaacctcgaagcgggaatgattgggttgaacacgggaaacatgtcgagcgcggaaagcccatttggtggtatcaaagactcaggttacggaaaggagtccgggaaagacgttgcgatcaatgaatatttgattactaagactgggtgtctgagtttggaggggcattattgagcaagacaagattaatggggataggtgtatgctacgtgtgcagattgccgagtctaatgacgtgtaacagacattaagattatgatctcgacccataaacgacaaaagattgattatttactcatttcatgttttaaatggagcgtctagcttggctctatgatctatttgatctactgcaatgctaatgaagatgcctgtaacgcctgcgccaaaggaagacaggatgcaataccttaaacaccaaatcaatgcacaagaccctctaaaatagcacttcctgttatactagcagcttcttgtatgaaatctttatcaagcgagaacttcttcccaacgacattgggtgcaaatttcccaatgagctgatcagcacggatatcttccggcttgacatgcgcaaggaagaagttcctgaaagtaggtatccagaagcgcatgcgagaagaatggaaaggcacgtctatgccatttagcatgatcgtcgcttttcctctaggaatctcgacgtcgaggggtagttgcttagaccgcgcgatgcgggtcgagacgaatgtgccgaatgccgttgcttgcggcacggaggccgtgaggaaatcctcgattaactggggttggatcttgcgctccgccacggcgttgagtgtttctgtgagagcgctgagattctgtacgtgacctgcgcatacgaattgatcgcctgcgatgttgaggtttacgatttctaggagttcgccgctttcctgggcgatgtggtggactagtgttttgagggcgttgtcgtcgaagtctggttggggattagtcaattggaacttagttggagattggtaagaggagtttgcttacgttttccaactctgcctggattggttgccatcatactgaatcctgtttgtccattcttgtcgcgtgggatggcgaactgcatcatcaatccgcgatagaacgcggtgctcagcatatccttgaagtcaacgaatggagccattgacgagagagctccatactcgccaagggaatgtccggcgaaggtcgcattctcttgaattagtcctcttgacctgatgtgctcgaaggtggctttctctagtagtatgatggcaggctgagcgaaatgagtagcgaataggagacccttagcttcagagaaggtatatgatgttgtactggggctgagtcctggtataattggcgctgtagtgcgtactccgtcttttgtgagtagctctgttt

SEQ ID NO: 35595 - DNA, 1881 bp, Muscodor strobelii
  misc_feature: SGI cDNA ID NO. 572330
  misc_feature: Encodes the peptide sequence at SEQ ID NO 35596
atgccggacaaaccgctcacggttgctacgtacgccgctggcgcctcactcgcggccatcaccctcgtctacgtctttgcgcccacctacctcatcgacagcgactccaactcagcacggaagaagggcgtagttggtctggtcaacccggccaacgactgctttatcaactctgttctccaggctctcgcgggcctgacagacctccgcatatacctcatccgcgagatccaccgccgcaacgtcgatgagccctgggtctacgaagagatagtcccgaacccgcggcggaagaacgacccggagtggaagaaccagagcttgcaagcggggtctgtcaccaagggtcttaaggacatccttgatgcactcaacgagcggcccatctacaagaagaccatctctgcttccagctttgtcaaggtcttggaggcagccttccgccagagaattagtagacagcagcaggatgcacaggaattcctgcaggtggtggccgagagattatgcgacgagtaccacgctggaaagagagcacgagagtcagctagaaggaagagcggatctagaacggtgtcctcggatggtgcgcccgtagatgggaatgccgttgaagaacgtctggccggattggctatcaacggcgacggcgtaaacgatgacagccagcttggaaagcccactctaagaatagaagcagacgatgcagagcaggacaaggaggagggattcccgatggagggtgcatatgagagccagatcgagtgtcaagtctgtggtttcaagacgaaggccatccacagcacattctgcactctcaccctgatggtgcctcaatcgagcagctcgactacactcaacacttgcctggacggcttcttcaagaccgaatacgtggacgactacaagtgcgagagatgcagattagtccatgcccagcagatgctcgagagccaagtgaagcgatctcgttcgaatacatttagggagagatcgagacagtctatcgatgtgattagacaccagattgtcacggatcccgaacaagctccgcctggcgttgacctacccgagctaaaatacgcaccgacgtgtaggatagccaagcacacacgcctcaccaccttccccaaggttctcgctgtccatctgtcgagatccatgttcgatagtcatgtatcatcaaagaattgtgccaaggtctcgtttccagagtcattaaccatcggtggaatactgtcgcaaagaaagtacaagctgctaggtgtcgtcacgcacaaaggtagccatcatagcgggcactacgaatcattccgaagacagaacgtcaacctcccgttctcgaccccgaatgccttccaacagtctgacatctatacgccctccggaaatccaaccccggcggcgaccccgagccccggcactacaccactccacaagtcgagagtacccagtcctgtcgcatcaacacccgagttagtctccggctcgtcagcagagagctcctcagatcagtcaatccactcagcgcgccacccttccgtctcctccctcaaacaacgcgacagcgactccgtctccctcaagtccgtcgccgcatccgcccgatcgaccgtctcccgcttatcagcaaccgctaagaacacccgcgccagcagtcccttcggaaagagcagtaaggcgcctacatcagtcaatggctcaacatcgaccccgcgaacgagtttatcaagacatcgcaagaagaaaccgaatgacaaatggtggcgtataagcgacgaaaaggttaaagaagcaaagacgagcgaggtgctcggtatgcagagagaggtgtacatgttgttttacgagctggagcgagaagacacgccggaatcgtag

SEQ ID NO: 35596 - protein, 626 aa, Muscodor strobelii
  misc_feature: SGI Peptide ID NO. 572330
  misc_feature (42)..(616): Pfam Id: PF00443 Pfam Desc: Ubiquitin carboxyl-terminal hydrolase
  misc_feature (1)..(620): NCBI GI: 171680375 Blast Desc: protein product [Podospora anserina] gi|170939814|emb|CAP65040.1| protein product [Podospora anserina]
  misc_feature (1)..(623): NCBI GI: 164423269 Blast Desc: NCU08579 [Neurospora crassa OR74A] gi|157070019|gb|EAA28640.2| [Neurospora crassa OR74A]
  misc_feature (1)..(622): NCBI GI: 39945024 Blast Desc: MGG_04494 [Magnaporthe grisea 70-15] gi|145011398|gb|EDJ96054.1| MGG_04494 [Magnaporthe grisea 70-15]
  misc_feature (36)..(620): NCBI GI: 154314993 Blast Desc: BC1G_04838 [Botryotinia fuckeliana B05.10] gi|150848376|gb|EDN23569.1| BC1G_04838 [Botryotinia fuckeliana B05.10]
  misc_feature (1)..(622): NCBI GI: 46105562 Blast Desc: FG00380.1 [Gibberella zeae PH-1]
  misc_feature (1)..(620): NCBI GI: 189204618 Blast Desc: conserved [Pyrenophora tritici-repentis Pt-1C-BFP] gi|187985743|gb|EDU51231.1| conserved [Pyrenophora tritici-repentis Pt-1C-BFP]
  misc_feature (36)..(620): NCBI GI: 156052781 Blast Desc: SS1G_06558 [Sclerotinia sclerotiorum 1980] gi|154704336|gb|EDO04075.1| SS1G_06558 [Sclerotinia sclerotiorum 1980]
  misc_feature (1)..(620): NCBI GI: 119491550 Blast Desc: ubiquitin C-terminal hydrolase, [Neosartorya fischeri NRRL 181] gi|119411456|gb|EAW21399.1| ubiquitin C-terminal hydrolase, [Neosartorya fischeri NRRL 181]
  misc_feature (1)..(622): NCBI GI: 255942399 Blast Desc: Pc18g01230 [Penicillium chrysogenum Wisconsin 54-1255] gi|211586701|emb|CAP94347.1| Pc18g01230 [Penicillium chrysogenum Wisconsin 54-1255]
  misc_feature (1)..(620): NCBI GI: 225681720 Blast Desc: conserved [Paracoccidioides brasiliensis Pb03]
  misc_feature (1)..(620): SWISSPROT Homolog: EC 3.1.2.15 Ubiquitin thiolesterase
MPDKPLTVATYAAGASLAAITLVYVFAPTYLIDSDSNSARKKGVVGLVNPANDCFINSVLQALAGLTDLRIYLIREIHRRNVDEPWVYEEIVPNPRRKNDPEWKNQSLQAGSVTKGLKDILDALNERPIYKKTISASSFVKVLEAAFRQRISRQQQDAQEFLQVVAERLCDEYHAGKRARESARRKSGSRTVSSDGAPVDGNAVEERLAGLAINGDGVNDDSQLGKPTLRIEADDAEQDKEEGFPMEGAYESQIECQVCGFKTKAIHSTFCTLTLMVPQSSSSTTLNTCLDGFFKTEYVDDYKCERCRLVHAQQMLESQVKRSRSNTFRERSRQSIDVIRHQIVTDPEQAPPGVDLPELKYAPTCRIAKHTRLTTFPKVLAVHLSRSMFDSHVSSKNCAKVSFPESLTIGGILSQRKYKLLGVVTHKGSHHSGHYESFRRQNVNLPFSTPNAFQQSDIYTPSGNPTPAATPSPGTTPLHKSRVPSPVASTPELVSGSSAESSSDQSIHSARHPSVSSLKQRDSDSVSLKSVAASARSTVSRLSATAKNTRASSPFGKSSKAPTSVNGSTSTPRTSLSRHRKKKPNDKWWRISDEKVKEAKTSEVLGMQREVYMLFYELEREDTPES

SEQ ID NO: 35597 - DNA, 1083 bp, Muscodor strobelii
  misc_feature: SGI cDNA ID NO. 572331
  misc_feature: Elevated expression when VOC is produced
  misc_feature: Encodes the peptide sequence at SEQ ID NO 35598
atggcacctatcgaagagattcgaggagacttcgccctagatcaggccatagttgatgttctgccaaaaggagccatagttcgttctgcggagagctgggggcagtcagcatggtcgcgcaccgctaaaatcgagacaatacttgcagacggcacacacaaaagatatttcgtaaaatgtgcgactggcaaagtagcaaagaacgatatgtggggagagcacttctcagcaagcctggtggctgactgcgcaccagaatttgggccaaatccaatcggcaaaggagtgtatgagaatgaatttggtgaagcaacatacttctacgttcaaaatttccatgacctggatcaagactccccgccagatcctgcgggcctggcctccaccatgacttctcttcacagggagtcagagtctcctaatggaatgtttggctttcctatagtgacaggtcggggtacctcagggcgagttgagcattggagcgagagctgggcagatcagtttgcatatctccttaccgacctcctcaagctcgacatggacctgaacggcccatggccggaatttgaagcagcgtgccaacagctcctcgcgggcgtcatacctaggctgttaggcgctctacaatccgagggccgtaccctgaaaccctccctagtccacggaaacgtatgggagggaaatgttgctaccgatatggagactggcaatgtgattatattcgattttgatgagagtatgtatgcacataacgaaatcgaaatgggcacctggcgttgcagatgggcatcgcacttcaactcacctatgtacaagcaagcttatcagcaggaaatggagccctccgagccggtggaggagtttgacgaccggaataggttatactcaatcaaatcggcgatatgtgactctgctggccatcgcggaagtgtttccaggcagctagcctacaatgacatgctgtttctctgtgagaaatatgctcctctcgaaagccttgagaagtatgatccttcgaaggacataagtgtaacgggcatccaggaattctacgatcgatcaaccagaggtgttatgtag

SEQ ID NO: 35598 - protein, 360 aa, Muscodor strobelii
  misc_feature: SGI Peptide ID NO. 572331
  misc_feature (2)..(349): NCBI GI: 116214451 Blast Desc: CHGG_11066 [Chaetomium globosum CBS 148.51] gi|88175421|gb|EAQ82890.1| CHGG_11066 [Chaetomium globosum CBS 148.51]
  misc_feature (13)..(328): NCBI GI: 116206070 Blast Desc: CHGG_02328 [Chaetomium globosum CBS 148.51] gi|88182925|gb|EAQ90393.1| CHGG_02328 [Chaetomium globosum CBS 148.51]
  misc_feature (24)..(347): NCBI GI: 171678070 Blast Desc: protein product [Podospora anserina] gi|170937104|emb|CAP61762.1| protein product [Podospora anserina]
  misc_feature (9)..(330): NCBI GI: 261356147 Blast Desc: conserved [Verticillium albo-atrum VaMs.102]
  misc_feature (4)..(332): NCBI GI: 145228563 Blast Desc: An01g01490 [Aspergillus niger] gi|134054681|emb|CAK43522.1| protein product [Aspergillus niger]
  misc_feature (2)..(332): NCBI GI: 240110347 Blast Desc: CPC735_063790 [Coccidioides posadasii C735 delta SOWgp]
  misc_feature (2)..(332): NCBI GI: 119180471 Blast Desc: CIMG_08864 [Coccidioides immitis RS]
  misc_feature (9)..(299): NCBI GI: 258563734 Blast Desc: [Uncinocarpus reesii 1704] gi|237908119|gb|EEP82520.1| [Uncinocarpus reesii 1704]
  misc_feature (3)..(330): NCBI GI: 145603980 Blast Desc: MGG_10482 [Magnaporthe grisea 70-15] gi|145012092|gb|EDJ96748.1| MGG_10482 [Magnaporthe grisea 70-15]
  misc_feature (4)..(299): NCBI GI: 169765035 Blast Desc: [Aspergillus oryzae RIB40] gi|83764843|dbj|BAE54987.1| protein product [Aspergillus oryzae]
  misc_feature: Useful for introducing or modulating the production of volatile compounds
MAPIEEIRGDFALDQAIVDVLPKGAIVRSAESWGQSAWSRTAKIETILADGTHKRYFVKCATGKVAKNDMWGEHFSASLVADCAPEFGPNPIGKGVYENEFGEATYFYVQNFHDLDQDSPPDPAGLASTMTSLHRESESPNGMFGFPIVTGRGTSGRVEHWSESWADQFAYLLTDLLKLDMDLNGPWPEFEAACQQLLAGVIPRLLGALQSEGRTLKPSLVHGNVWEGNVATDMETGNVIIFDFDESMYAHNEIEMGTWRCRWASHFNSPMYKQAYQQEMEPSEPVEEFDDRNRLYSIKSAICDSAGHRGSVSRQLAYNDMLFLCEKYAPLESLEKYDPSKDISVTGIQEFYDRSTRGVM

SEQ ID NO: 35599 - DNA, 2908 bp, Muscodor strobelii
  misc_feature: SGI EST ID NO. CUFF.84818.0
  misc_feature: Variant of the nucleotide sequence at SEQ ID NO 35597
ctttggaacatatcctcagcaatcagctcgcaaagatgtgcgccgtaaacttgtacttatatagcactattttcgaaaggatactagcacacgagtccgctattcttatcattacgagagcctaatgacttgactgcggccttgctgaaattgtgtgatcgttacaacagtgtttaccacctcggtcagtcaaatatcacgatggcacctatcgaagagattcgaggagacttcgccctagatcaggccatagttgatgttctgccaaaaggagccatagttcgttctgcggagagctgggggcagtcagcatggtcgcgcaccgctaaaatcgagacaatacttgcagacggcacacacaaaagatatttcgtaaaatgtgcgactggcaaagtagcaaagaacgatatgtggggagagcacttctcagcaagcctggtggctgactgcgcaccagaatttgggccaaatccaatcggcaaaggagtgtatgagaatgaatttggtgaagcaacatacttctacgttcaaaatttccatgacctggatcaagactccccgccagatcctgcgggcctggcctccaccatgacttctcttcacagggagtcagagtctcctaatggaatgtttggctttcctatagtgacaggtcggggtacctcagggcgagttgagcattggagcgagagctgggcagatcagtttgcatatctccttaccgacctcctcaagctcgacatggacctgaacggcccatggccggaatttgaagcagcgtgccaacagctcctcgcgggcgtcatacctaggctgttaggcgctctacaatccgagggccgtaccctgaaaccctccctagtccacggaaacgtatgggagggaaatgttgctaccgatatggagactggcaatgtgattatattcgattttgatgagagtatgtatgcacataacgaaatcgaaatgggcacctggcgttgcagatgggcatcgcacttcaactcacctatgtacaagcaagcttatcagcaggaaatggagccctccgagccggtggaggagtttgacgaccggaataggttatactcaatcaaatcggcgatatgtgactctgctggccatcgcggaagtgtttccaggcagctagcctacaatgacatgctgtttctctgtgagaaatatgctcctctcgaaagccttgagaagtatgatccttcgaaggacataagtgtaacgggcatccaggaattctacgatcgatcaaccagaggtgttatgtagtaatgagccttcaagtttctattggatacctgaatcaatcgcgcgattggcgaggaaaacgagccgatgttcaattaaagccgatgatggtgcgattgccaagctatcaaagtgcaccgcagactgagaggaaatgagtatgggtatcggcaactcagtgctttagaatacagggaataatgagctttgttgtacatgtatcagataattcaaaatgtttccagtttgcgatgctgcgtacgccgaaatagtttgttaaatcaagaattgcctgaagccatgcaagatctctgagcgcagctacaggggctgcctagctcatcgtagtaccttacgaagtctctctaaaagttgacaactaaagagtcttaggttaatctttcaattctttgacaagcacttcgtcaccttgcacacaagcgcgtcattcaaacgctccaatgagacgatctaaccgattgtgttagagttgcgaagcaccacaaatctacctatcgccaccatcagtatcggcggctagtgtactcgcgctttatctcaacaatgactaccccaccatgcacaccacacgcgatgagagccgcggcttcactcccctttgaattgatactggaaataatgacctgtcttctgcctctcaatccaggagagatcgtcggcccttcgcacgacgcgacccgaatgttgctcgcattcagtctagtatgccgcgaaacacatcgtatcgcggtatccaagcttcagcaacgatgtatctacattacatcacttgcaggactaatccggttcaacgacggctttgacacatttcgaaactcggcagttaacctacccagcgtattcgctaatatccacacactatgtttcaatctcgacaggtataacaccaacacgaacttacagtctgtattgttgtccctctatgatctatatccactccaaagactcatgatatacggcacacccccgttgccccaagaacttcaaggaaacacctacaaccctcgattgtctaggctcgacaaaatgcaagtgctcatagttccggctcggtcggtcgcccatcccgtaaccaacgctcaactcatcgagttacaaagagccgccaggtggctgtggaacaacaacatggatctcgggtcattgctattaccgttacgtcgccactatatatggagaacaatcgatatttcgcgaccccatgatactgtaacgtttatatcaaaacccctgacccgtaccgtgaggacgaagttcaggactttcctccagactgcgattatagcttttgacacggccacttttgtttccccagttctcatttggcgcgaagacgggacccttcgcgaccccggaatgccgaagccatatggcctccgtgatgaggatggtagagaaacgactcttgatatcttgggccatgatatggttaggtactgtcttgttgtgccttttcataacgtttttaagaaccagaggatgatcgcagatattgcgaatgtcaattatgtctagcatgtttcggacgactaggctatgaggaacctaccaaggcaggcaagctatcatgactactcataccatgaaatatggccgtgtcagcaaaccaaaaagagttctgaat

SEQ ID NO: 35600 - DNA, 4818 bp, Muscodor strobelii
  misc_feature: SGI cDNA ID NO. 572332
  misc_feature: Encodes the peptide sequence at SEQ ID NO 35601
atgtttaagaaagtcgcggaatggcgaacaaagaaagaaaagacgaaattggagttgcgtcctccttctgatcgctcaaccccaccatccactgcttcaagttcactgccatcaagactaacagccacagacgcgggtggtagtgtctaccgtgaaaacgccgtcgcagaatccgggccgctcggcctcaatgttgtatatacgccagacaacgggtgcaaggcagatattgtctttattcatggccttggcggaacttcaagatggacttggacaaaaaatcgagacccggacctgttttggccactcacattccttcctctagagcctgatctttgtttgtcgcgtatattcacctttggctatgacgctgcttttcagaagaatagtggcgcaagtacatcgatactcgactttgcaaaagacttgttatatgatctcaaatatgctaaagacgaaaacaccaacgacctgcgtatcggcagcgtgccactcattttcgttgttcatagtatggggggcttgatcgctaaagaggcatacatacaaggtcaacatgatcctcaatacgaggcgataataagggctgtttgcgcaattacgttcatatctacacctcaccgcggcacgaacctcgcgcaaaccttgaaccgtatcctagacacgacgatgattagtagttcgaaacagtacatcgcagatctgatcaagaattctctcacacttcagaaactcaacgagcaatttaggcatgttgcccccaaactggacattgtctccttctacgagaccttacctacgcctgttggactgaaaacgaaagtgatggtgttagaaaaggattcttctatacttggttatcctggagaaatatcaagagcgctcaatgcagatcatcataccgtttgcaaatacgctggacctcaagacccgaactacgtcatcgtacgcaatattcttaaatcaattgtaagcaagattgtatcgaaagacaacggtacgaatgtcaagccgcctgacagaagcactgtgcttcacttaaagaagctgcttgctctgcccgagctaccaaataccgattacatattcttccgagacctttggactcaaggcacatgtgattggattaatagcgacccgacctaccttggatggcgcgactctactgatcaggcaacctcaatactatgggtatccggagaagcgggaactggcaaatcagtcctgtcttcatatgttgttaacagtctaattgaggacaactatgactgtcaatacttcttcatccggttcggggatcgtatgaaaaggacgattagcttccttctgcgatctcttgccttccaattagctcaatcatttccggatattatggaaaagatgacgaatgttgtcaacgaggccctggatcttgagaatgctgactcaaggataatatgggataggatattcaaatctttgatatttcaactgcgacaagatacccgtatttattgggttattgatggtcttgatgaaagtgaagacccgcgtgggttggcaaagctgctcctgacgataacatccactgtgcctattaggatttttaccacttctcgtcgcacctcggaaatcatttcggctttcgagcgaccaccgccaaacctgacattcgcatcttttaagattgaaggacatctccaagatctgcacacatacgtcggtactgagctgagtgttcctggaactgtggaatttcgacaagacgttgcgagacgaattgtcgaagcatcgcacaataacttcttgtgggttcgatttgccgttgaaaatgtcaacagatgtcatgttgccacggacgtcgacgaggtattacgtgactttcctagtggcatggaaagcctttacgatagaatggcatcttcggttatcgagatttcgcaaacacgcgatagagatttggcgttacagatcgtccaatttgtgagctgttcatttcgtgctttgaacatagaggatctggcacatgcgctaggagatacttctcgaaacatacttgacctgccgcgcaccatcattgacctctgcggagggtttgtcgttgtagacaatgatgggaacgtgactatgacccatcagactgctcgcgactatcttctggatagttcgaacacgaagcgccctatcaacctcgatcgaaaagcagcacacagagaattgtttcttagcacgatgcgctgtttgatgatgagtaatttgaggatcggactcttgcgtgctggaaagccaccttttgtggggtatgcggcagaattctggtcaacacacctaattcacgcgtcagatgacgacaatgaatgtcttgccatgctgagaaagtttctgaaagggaagtctgcgctgacctggattcacgctttagcatcgggtggtcagatgcgagctatgacccaatcgtcaagggatctatctcgcttctccgctagaatatccagacaggatgtcagtgaagctgggatcatattggatcgagaattcttcgaaaattgggcaatcgacatgttacgaatacctggcaagttcggtcaggtcgttcgtcgtaagcctgaggccatatatgacctgatccctccattctgtccccgaagttccccagtctaccagcagttcggcaaaaaggcagaacttgtggtgagtgggctatcaacagagaagtgggatgactcggtcgcaaggatacacgcagggaacacgatcgcatctgcaattgaagcctctggctcagtagtcgccctgttgaactcgacagggagcgtttcattctacgatccagcagactttcgccaactgccaatgagccccgttcaacacggcgagcgtgttaccaagatgcaactcaatggcgccgcaactcttctggtgacatatggttaccgcactttgagaatatggaagatcgcgacgggggagtgcgtaaatagtatcgacactattgagtcgaaaacgagacccttgacgatgctattcagccaggatagccacactttgcttgtcggtacggatgataggcgcattcgatcactggagctgacgcaatccccaatgacctggaaggttgtcgcagaactcgaagaagaggagattgaaaaccagttcaataatgcagctagccatattgccttgagtcgtgatgggtcattagccgctgtagcgtatcgtcgctacccggtctctgcatgggagcttgacggaccaatgcacataggtctttgccggcgaacgagcgaagaatcagcaattcgtgaggtgagagagatcgcttggcaccctcattcctgtgaattattcggcttgaattttgaaggaaagatatttaaatgggcaccttacgatgatgaggtagacgagatttcaacaggagtgacgcgaatgtgtctgagcaaagacggtcagctgctcgctactggagacggccatggaagaattaaaatattaacgactaacgggttccatctcctctatcagcttgcagctgaagactctgtctttggcctgacatttagtcctgactcgagaagactttatgatattagggggtactatgctaatgcctgggagcctggtacattagcaagagtcaaggcaatatcggacacaggtatagacacacctagtgattataacatatcactgcagaccgatgtatcttttgccaattccggggcggttgatccaatcacagcgttagcagtgtgtcgcagcaataacctattctgcagtggtacagctggtggcgttgcaagtctccatgatacgcgtcgcggtcgtctcagtactatattcacatcacgagcgaaatttaccgtcgacaagatagtttggaatgatgatggcgatctcctctgtatcctggatgcgagcaagcaaatgactctgatgtcagtctcatcagctaccaataatgaaaatccggtcgttgagcagattgatacagtatcgctgaggaagtatacgaagatcccaatttctcaacttattttcgaaccaagctcagaacgactactagtctgcacgagtgctcagctgctaacaatcgcattgggcacgcgttctgtcgaattcaaaatagacatcaatcagaaagagacgctgagatgggctgtacatcctcaggatccgtcactgattgtaggacttggatcccatgctctccagatcttgaactggaatctgatagaacggtggaggtgttcgtttgctccacgaactttcgctagcaagcaagacatggccgatacatatggagtcgaaagagtaatcgcaactgatgataaaaaacatattgtcatgcagatagccggatcacagtatgacccgcggccaaagtttgcgtatctgaggactaacacgataccgacttcagacaggcttgatgcgaaagctgaaatcgaagagaagagtattcagtttggacagcttggcgttgacgaatcattaggaataatcactgctctttctattctgcagggtgatcgcttgatttttatatcctcattccactccatctgttctgtgcggctatcatggacaaccatagagaagcacgaaaatctgtcatctagactcgacagtacgggcaaaagcttggtacctccttcgtacaaacgtcgaccacgctccagaggtggcaaggaagacgtccaagagctcttcgcgctgccgggagattggatcagtcaagactcattggcgatttgcaaagctatgcctcaagtgcgatcgttcatatgcccgcgtaacggagatgtagcaatagtccagtgtatgggattggagtag

SEQ ID NO: 35601 - protein, 1605 aa, Muscodor strobelii
  misc_feature: SGI Peptide ID NO. 572332
  misc_feature (61)..(1600): NCBI GI: 259483375 Blast Desc: TPA: NACHT and WD domain protein (AFU_orthologue; AFUA_3G07460) [Aspergillus nidulans FGSC A4]
  misc_feature (61)..(1528): NCBI GI: 67900580 Blast Desc: AN7277.2 [Aspergillus nidulans FGSC A4] gi|40741958|gb|EAA61148.1| AN7277.2 [Aspergillus nidulans FGSC A4]
  misc_feature (60)..(1600): NCBI GI: 258565149 Blast Desc: [Uncinocarpus reesii 1704] gi|237907020|gb|EEP81421.1| [Uncinocarpus reesii 1704]
  misc_feature (60)..(1520): NCBI GI: 116206072 Blast Desc: CHGG_02329 [Chaetomium globosum CBS 148.51] gi|88182926|gb|EAQ90394.1| CHGG_02329 [Chaetomium globosum CBS 148.51]
  misc_feature (24)..(1599): NCBI GI: 119180469 Blast Desc: CIMG_08863 [Coccidioides immitis RS]
  misc_feature (60)..(1602): NCBI GI: 171679052 Blast Desc: protein product [Podospora anserina] gi|170937597|emb|CAP62256.1| protein product [Podospora anserina]
  misc_feature (11)..(1600): NCBI GI: 46135873 Blast Desc: FG09452.1 [Gibberella zeae PH-1]
  misc_feature (12)..(1600): NCBI GI: 145603982 Blast Desc: MGG_10481 [Magnaporthe grisea 70-15] gi|145012093|gb|EDJ96749.1| MGG_10481 [Magnaporthe grisea 70-15]
  misc_feature (157)..(1599): NCBI GI: 240110346 Blast Desc: WD domain, G-beta repeat containing protein [Coccidioides posadasii C735 delta SOWgp]
  misc_feature (28)..(1600): NCBI GI: 256733681 Blast Desc: NECHADRAFT_36093 [Nectria haematococca mpVI 77-13-4]
MFKKVAEWRTKKEKTKLELRPPSDRSTPPSTASSSLPSRLTATDAGGSVYRENAVAESGPLGLNVVYTPDNGCKADIVFIHGLGGTSRWTWTKNRDPDLFWPLTFLPLEPDLCLSRIFTFGYDAAFQKNSGASTSILDFAKDLLYDLKYAKDENTNDLRIGSVPLIFVVHSMGGLIAKEAYIQGQHDPQYEAIIRAVCAITFISTPHRGTNLAQTLNRILDTTMISSSKQYIADLIKNSLTLQKLNEQFRHVAPKLDIVSFYETLPTPVGLKTKVMVLEKDSSILGYPGEISRALNADHHTVCKYAGPQDPNYVIVRNILKSIVSKIVSKDNGTNVKPPDRSTVLHLKKLLALPELPNTDYIFFRDLWTQGTCDWINSDPTYLGWRDSTDQATSILWVSGEAGTGKSVLSSYVVNSLIEDNYDCQYFFIRFGDRMKRTISFLLRSLAFQLAQSFPDIMEKMTNVVNEALDLENADSRIIWDRIFKSLIFQLRQDTRIYWVIDGLDESEDPRGLAKLLLTITSTVPIRIFTTSRRTSEIISAFERPPPNLTFASFKIEGHLQDLHTYVGTELSVPGTVEFRQDVARRIVEASHNNFLWVRFAVENVNRCHVATDVDEVLRDFPSGMESLYDRMASSVIEISQTRDRDLALQIVQFVSCSFRALNIEDLAHALGDTSRNILDLPRTIIDLCGGFVVVDNDGNVTMTHQTARDYLLDSSNTKRPINLDRKAAHRELFLSTMRCLMMSNLRIGLLRAGKPPFVGYAAEFWSTHLIHASDDDNECLAMLRKFLKGKSALTWIHALASGGQMRAMTQSSRDLSRFSARISRQDVSEAGIILDREFFENWAIDMLRIPGKFGQVVRRKPEAIYDLIPPFCPRSSPVYQQFGKKAELVVSGLSTEKWDDSVARIHAGNTIASAIEASGSVVALLNSTGSVSFYDPADFRQLPMSPVQHGERVTKMQLNGAATLLVTYGYRTLRIWKIATGECVNSIDTIESKTRPLTMLFSQDSHTLLVGTDDRRIRSLELTQSPMTWKVVAELEEEEIENQFNNAASHIALSRDGSLAAVAYRRYPVSAWELDGPMHIGLCRRTSEESAIREVREIAWHPHSCELFGLNFEGKIFKWAPYDDEVDEISTGVTRMCLSKDGQLLATGDGHGRIKILTTNGFHLLYQLAAEDSVFGLTFSPDSRRLYDIRGYYANAWEPGTLARVKAISDTGIDTPSDYNISLQTDVSFANSGAVDPITALAVCRSNNLFCSGTAGGVASLHDTRRGRLSTIFTSRAKFTVDKIVWNDDGDLLCILDASKQMTLMSVSSATNNENPVVEQIDTVSLRKYTKIPISQLIFEPSSERLLVCTSAQLLTIALGTRSVEFKIDINQKETLRWAVHPQDPSLIVGLGSHALQILNWNLIERWRCSFAPRTFASKQDMADTYGVERVIATDDKKHIVMQIAGSQYDPRPKFAYLRTNTIPTSDRLDAKAEIEEKSIQFGQLGVDESLGIITALSILQGDRLIFISSFHSICSVRLSWTTIEKHENLSSRLDSTGKSLVPPSYKRRPRSRGGKEDVQELFALPGDWISQDSLAICKAMPQVRSFICPRNGDVAIVQCMGLE

SEQ ID NO: 35602 - DNA, 7707 bp, Muscodor strobelii
  misc_feature: SGI EST ID NO. CUFF.84895.0
  misc_feature: Variant of the nucleotide sequence at SEQ ID NO 35600
ccgccaaatgagggccacccccgctgtagaatcgatctctgtctggctcagtgatattttgccttgtggatcataaggttattcttagcaacgtatgtaatttggacagcaaagaccaagcttgaagccttgaaagtcatactatccttagttcccgcgtgcggcgtaataacaaaagcgttgttcagacaagatcattcgactgagggtttcaaagtgttggtctgatgagcactgcttggggttagcggcgaagctgacccgccactcgttaaatcatgtttaagaaagtcgcggaatggcgaacaaagaaagaaaagacgaaattggagttgcgtcctccttctgatcgctcaaccccaccatccactgcttcaagttcactgccatcaagactaacagccacagacgcgggtggtagtgtctaccgtgaaaacgccgtcgcagaatccgggccgctcggcctcaatgttgtatatacgccagacaacgggtgcaaggcagatattgtctttattcatggccttggcggaacttcaagatggacttggacaaaaaatcgagacccggacctgttttggccactcacattccttcctctagagcctgatctttgtttgtcgcgtatattcacctttggctatgacgctgcttttcagaagaatagtggcgcaagtacatcgatactcgactttgcaaaagacttgttatatgatctcaaatatgctaaagacgaaaacaccaacgacctgcgtatcggcagcgtgccactcattttcgttgttcatagtatggggggcttgatcgctaaagaggcatacatacaaggtcaacatgatcctcaatacgaggcgataataagggctgtttgcgcaattacgttcatatctacacctcaccgcggcacgaacctcgcgcaaaccttgaaccgtatcctagacacgacgatgattagtagttcgaaacagtacatcgcagatctgatcaagaattctctcacacttcagaaactcaacgagcaatttaggcatgttgcccccaaactggacattgtctccttctacgagaccttacctacgcctgttggactgaaaacgaaagtgaaaaggattcttctatacttggttatcctggagaaatatcaagagcgctcaatgcagatcatcataccgtttgcaaatacgctggacctcaagacccgaactacgtcatcgtacgcaatattcttaaatcaattgtaagcaagattgtatcgaaagacaacggtacgaatgtcaagccgcctgacagaagcactgtgcttcacttaaagaagctgcttgctctgcccgagctaccaaataccgattacatattcttccgagacctttggactcaaggcacatgtgattggattaatagcgacccgacctaccttggatggcgcgactctactgatcaggcaacctcaatactatgggtatccggagaagcgggaactggcaaatcagtcctgtcttcatatgttgttaacagtctaattgaggacaactatgactgtcaatacttcttcatccggttcggggatcgtatgaaaaggacgattagcttccttctgcgatctcttgccttccaattagctcaatcatttccggatattatggaaaagatgacgaatgttgtcaacgaggccctggatcttgagaatgctgactcaaggataatatgggataggatattcaaatctttgatatttcaactgcgacaagatacccgtatttattgggttattgatggtcttgatgaaagtgaagacccgcgtgggttggcaaagctgctcctgacgataacatccactgtgcctattaggatttttaccacttctcgtcgcacctcggaaatcatttcggctttcgagcgaccaccgccaaacctgacattcgcatcttttaagattgaaggacatctccaagatctgcacacatacgtcggtactgagctgagtgttcctggaactgtggaatttcgacaagacgttgcgagacgaattgtcgaagcatcgcacaataacttcttgtgggttcgatttgccgttgaaaatgtcaacagatgtcatgttgccacggacgtcgacgaggtattacgtgactttcctagtggcatggaaagcctttacgatagaatggcatcttcggttatcgagatttcgcaaacacgcgatagagatttggcgttacagatcgtccaatttgtgagctgttcatttcgtgctttgaacatagaggatctggcacatgcgctaggagatacttctcgaaacatacttgacctgccgcgcaccatcattgacctctgcggagggtttgtcgttgtagacaatgatgggaacgtgactatgacccatcagactgctcgcgactatcttctggatagttcgaacacgaagcgccctatcaacctcgatcgaaaagcagcacacagagaattgtttcttagcacgatgcgctgtttgatgatgagtaatttgaggatcggactcttgcgtgctggaaagccaccttttgtggggtatgcggcagaattctggtcaacacacctaattcacgcgtcagatgacgacaatgaatgtcttgccatgctgagaaagtttctgaaagggaagtctgcgctgacctggattcacgctttagcatcgggtggtcagatgcgagctatgacccaatcgtcaagggatctatctcgcttctccgctagaatatccagacaggatgtcagtgaagctgggatcatattggatcgagaattcttcgaaaattgggcaatcgacatgttacgaatacctggcaagttcggtcaggtcgttcgtcgtaagcctgaggccatatatgacctgatccctccattctgtccccgaagttccccagtctaccagcagttcggcaaaaaggcagaacttgtggtgagtgggctatcaacagagaagtgggatgactcggtcgcaaggatacacgcagggaacacgatcgcatctgcaattgaagcctctggctcagtagtcgccctgttgaactcgacagggagcgtttcattctacgatccagcagactttcgccaactgccaatgagccccgttcaacacggcgagcgtgttaccaagatgcaactcaatggcgccgcaactcttctggtgacatatggttaccgcactttgagaatatggaagatcgcgacgggggagtgcgtaaatagtatcgacactattgagtcgaaaacgagacccttgacgatgctattcagccaggatagccacactttgcttgtcggtacggatgataggcgcattcgatcactggagctgacgcaatccccaatgacctggaaggttgtcgcagaactcgaagaagaggagattgaaaaccagttcaataatgcagctagccatattgccttgagtcgtgatgggtcattagccgctgtagcgtatcgtcgctacccggtctctgcatgggagcttgacggaccaatgcacataggtctttgccggcgaacgagcgaagaatcagcaattcgtgaggtgagagagatcgcttggcaccctcattcctgtgaattattcggcttgaattttgaaggaaagatatttaaatgggcaccttacgatgatgaggtagacgagatttcaacaggagtgacgcgaatgtgtctgagcaaagacggtcagctgctcgctactggagacggccatggaagaattaaaatattaacgactaacgggttccatctcctctatcagcttgcagctgaagactctgtctttggcctgacatttagtcctgactcgagaagactttatgatattagggggtactatgctaatgcctgggagcctggtacattagcaagagtcaaggcaatatcggacacaggtatagacacacctagtgattataacatatcactgcagaccgatgtatcttttgccaattccggggcggttgatccaatcacagcgttagcagtgtgtcgcagcaataacctattctgcagtggtacagctggtggcgttgcaagtctccatgatacgcgtcgcggtcgtctcagtactatattcacatcacgagcgaaatttaccgtcgacaagatagtttggaatgatgatggcgatctcctctgtatcctggatgcgagcaagcaaatgactctgatgtcagtctcatcagctaccaataatgaaaatccggtcgttgagcagattgatacagtatcgctgaggaagtatacgaagatcccaatttctcaacttattttcgaaccaagctcagaacgactactagtctgcacgagtgctcagctgctaacaatcgcattgggcacgcgttctgtcgaattcaaaatagacatcaatcagaaagagacgctgagatgggctgtacatcctcaggatccgtcactgattgtaggacttggatcccatgctctccagatcttgaactggaatctgatagaacggtggaggtgttcgtttgctccacgaactttcgctagcaagcaagacatggccgatacatatggagtcgaaagagtaatcgcaactgatgataaaaaacatattgtcatgcagatagccggatcacagtatgacccgcggccaaagtttgcgtatctgaggactaacacgataccgacttcagacaggcttgatgcgaaagctgaaatcgaagagaagagtattcagtttggacagcttggcgttgacgaatcattaggaataatcactgctctttctattctgcagggtgatcgcttgatttttatatcctcattccactccatctgttctgtgcggctatcatggacaaccatagagaagcacgaaaatctgtcatctagactcgacagtacgggcaaaagcttggtacctccttcgtacaaacgtcgaccacgctccagaggtggcaaggaagacgtccaagagctcttcgcgctgccgggagattggatcagtcaagactcattggcgatttgcaaagctatgcctcaagtgcgatcgttcatatgcccgcgtaacggagatgtagcaatagtccagtgtatgggattggagtaggatgttttcaatctactgcactattccctgtctcccttgtcattaagtgcgccgttctccaggagaaccctctgcagtactccacccaaagcagagcaagactgatgatgcagaagcccccaacgatagtgaaggcccagcctactcccacagtttcaaaaaggtcctcgatataagcaactacaagagctgaaagagcgtatctaactggatttgtagcagcttgtgctgccgacgggttgtggcggttaatgtctgtgaggatggtgttgaggctctatagtcatgtcagttgcttgaatacggcagtattgaaatcatgggagatcatttctcacactaaaattaatctgtagcgacaagccgacaatgaattgtagtataagaccgactgagatatgcttcaagacgtgttagactagttgaacatgctagcgcattttgattgacaaaagattgtgcacttactgtacgagcctgtaatgcccaaccgtatgaaacagtcgtggcaacaacaatgagcataggtatacacatgacaagaactctactcttctcaactggaaatgtgtcgagatcatcgccacggatcttatctgttggcagaccaagctttgcacgctggctacgatacactctatcgaggattatacccgagaaaaaggtggatgctgtgccacccagcgcgattggcagatagataattccggattgccattcattgagatgatagatctcgatatgcaacgtggacaatgttgcgatcagacttggtaccagtcaacaggcgagctgagaggctctagaaaaatggagatcaccaaccaagagtacacagtatacatcagaccccaggccaggacaaccacaacgttgtcttttcgtagtaaaagtcgaagtggtcgtagaggatttggcatttggaaagccttagcaggtctctcgactgagtcttgactccaatgacgacaataggatttgaaccgaataggtaggcggaagacaggagaaggggggattgagccattgccgacaatactcctactggtttccggaaatagcaataccatggcaacaatgcagatacctgcgttgatggcgagaaaccagaatatccatctccacccagcagtgtagcagataacacctccgagaattgggccaacaccgggtccgacagtcaccctgcattcttattagcgactttgatatcctcagaagactgaagcgctcacgcaaatgatgcgatgctcatgaagtgacccctctcggccggcgaggcaatatcactcacgacaccgtatccgacaagaatgattgctgtgagtgtcaggttttgctgtactacagtcaaagatcatcttgcttacctgactgtccaagagcttgaagagctcgaagtccgagcagttctccataagtgctcgacagtgcgacagagatacaagcaatcaaatatactccaagagtcacaatgtaaaccgggcgttttccaacgacgtctgctgcatctccgattatgataggggcgacccctgcgaccgccatgtaaactgtcagagtcaggttgatctgaccgattgtcacagagaatgcattagagagcggctctagtgccgggagatagatgaagtgactaagatttgatgtccatgacgcccaggaagccattgccacaatgcaccatctttccctcttggtgaagactgaatatctctcgtgatcatggatctcatcttcgtgcggttgcgtaagactgtccgacttctcaagaatgccgctgtctcgtacggaagccatcgtgaacaatgcgcgagttcttcctcgcagcacgttgtcatagcaagcaaaaaattggtgatgatcagatccttggctcgacaaaccgtcagtgctcacgcatcggtcgcaacaaagattgttacgagcaaactaggcatcatccgcattttatcgtgatgggacatgatataggtcagtttaagagaagatcgtttccgcaatgtcgcttgggtgacgactccgcgttccgtgcatcacgaacaagtatgcctcatgcgtgttggtgcaccatcgcctgaagattggctacaacagggcacaagacaagcatcagtacccacctgcgcatgccaccaaagacactgaatttaatggctggccagcagagcttccagaaacgcttcaagtcccactacaaagtacaagtgaccagattctaaacggaaaaactctaagacctcatcacaacttttcaaataagacctgggctcttcttacggctcatcccgctgagtcgcgtccgtatgagggattcagattagaaccgccccatgctcagcatcacggcatgggagtgtgtggcgtcaatgttacgggccggggtcccacctgatggggacttgtggctcaataaatgtaggacaatgtttgacgcaaccgtcgtcaggtgactcttaggttttttctacctcccttttgctacatgtatgtaatgaacagaggagtccatatggtaaacttacccaccatgacttgcacgcactcaattggttttcgaattcggcaagctaagcgagtcattgtgagctaagctgacgtaagttttgatagccgttatc

SEQ ID NO: 35603 - DNA, 1509 bp, Muscodor strobelii
  misc_feature: SGI cDNA ID NO. 572333
  misc_feature: Elevated expression when VOC is produced
  misc_feature: Encodes the peptide sequence at SEQ ID NO 35604
atggcttccgtacgagacagcggcattcttgagaagtcggacagtcttacgcaaccgcacgaagatgagatccatgatcacgagagatattcagtcttcaccaagagggaaagatggtgcattgtggcaatggcttcctgggcgtcatggacatcaaatcttagtcacttcatctatctcccggcactagagccgctctctaatgcattctctgtgacaatcggtcagatcaacctgactctgacagtttacatggcggtcgcaggggtcgcccctatcataatcggagatgcagcagacgtcgttggaaaacgcccggtttacattgtgactcttggagtatatttgattgcttgtatctctgtcgcactgtcgagcacttatggagaactgctcggacttcgagctcttcaagctcttggacagtcagcaatcattcttgtcggatacggtgtcgtgagtgatattgcctcgccggccgagaggggtcacttcatgagcatcgcatcatttgcggtgactgtcggacccggtgttggcccaattctcggaggtgttatctgctacactgctgggtggagatggatattctggtttctcgccatcaacgcaggtatctgcattgttgccatggtattgctatttccggaaaccagtaggagtattgtcggcaatggctcaatccccccttctcctgtcttccgcctacctattcggttcaaatcctattgtcgtcattggagtcaagactcagtcgagagacctgctaaggctttccaaatgccaaatcctctacgaccacttcgacttttactacgaaaagacaacgttgtggttgtcctggcctggggtctgatgtatactgtgtactcttgtctgatcgcaacattgtccacgttgcatatcgagatctatcatctcaatgaatggcaatccggaattatctatctgccaatcgcgctgggtggcacagcatccacctttttctcgggtataatcctcgatagagtgtatcgtagccagcgtgcaaagcttggtctgccaacagataagatccgtggcgatgatctcgacacatttccagttgagaagagtagagttcttgtcatgtgtatacctatgctcattgttgttgccacgactgtttcatacggttgggcattacaggctcgtacacatatctcagtcggtcttatactacaattcattgtcggcttgtcgctacagattaattttagtagcctcaacaccatcctcacagacattaaccgccacaacccgtcggcagcacaagctgctacaaatccagttagatacgctctttcagctcttgtagttgcttatatcgaggacctttttgaaactgtgggagtaggctgggccttcactatcgttgggggcttctgcatcatcagtcttgctctgctttgggtggagtactgcagagggttctcctggagaacggcgcacttaatgacaagggagacagggaatagtgcagtagattga

SEQ ID NO: 35604 - protein, 502 aa, Muscodor strobelii
  misc_feature: SGI Peptide ID NO. 572333
  misc_feature (45)..(446): Pfam Id: PF07690 Pfam Desc: Major Facilitator Superfamily
  misc_feature (12)..(495): NCBI GI: 39944284 Blast Desc: MGG_04153 [Magnaporthe grisea 70-15] gi|145014887|gb|EDJ99455.1| MGG_04153 [Magnaporthe grisea 70-15]
  misc_feature (1)..(491): NCBI GI: 119500304 Blast Desc: MFS transporter, [Neosartorya fischeri NRRL 181] gi|119415074|gb|EAW25012.1| MFS transporter, [Neosartorya fischeri NRRL 181]
  misc_feature (2)..(491): NCBI GI: 121707893 Blast Desc: MFS transporter, [Aspergillus clavatus NRRL 1] gi|119400118|gb|EAW10544.1| MFS transporter, [Aspergillus clavatus NRRL 1]
  misc_feature (2)..(491): NCBI GI: 70993750 Blast Desc: MFS transporter [Aspergillus fumigatus Af293] gi|66849356|gb|EAL89684.1| MFS transporter, [Aspergillus fumigatus Af293] gi|159125356|gb|EDP50473.1| MFS transporter,
  misc_feature (6)..(501): NCBI GI: 242769557 Blast Desc: MFS transporter, [Talaromyces stipitatus ATCC 10500] gi|218724985|gb|EED24402.1| MFS transporter, [Talaromyces stipitatus ATCC 10500]
  misc_feature (9)..(492): NCBI GI: 156031347 Blast Desc: SS1G_14095 [Sclerotinia sclerotiorum 1980] gi|154699497|gb|EDN99235.1| SS1G_14095 [Sclerotinia sclerotiorum 1980]
  misc_feature (13)..(487): NCBI GI: 256726048 Blast Desc: NECHADRAFT_43520 [Nectria haematococca mpVI 77-13-4]
  misc_feature (11)..(491): NCBI GI: 238489581 Blast Desc: MFS transporter, [Aspergillus flavus NRRL3357] gi|220698416|gb|EED54756.1| MFS transporter, [Aspergillus flavus NRRL3357]
  misc_feature (6)..(500): NCBI GI: 256727508 Blast Desc: NECHADRAFT_76423 [Nectria haematococca mpVI 77-13-4]
  misc_feature (6)..(498): NCBI GI: 259480685 Blast Desc: TPA: MFS transporter, (AFU_orthologue; AFUA_5G01520) [Aspergillus nidulans FGSC A4]
  misc_feature: Useful for introducing or modulating the production of volatile compounds
MASVRDSGILEKSDSLTQPHEDEIHDHERYSVFTKRERWCIVAMASWASWTSNLSHFIYLPALEPLSNAFSVTIGQINLTLTVYMAVAGVAPIIIGDAADVVGKRPVYIVTLGVYLIACISVALSSTYGELLGLRALQALGQSAIILVGYGVVSDIASPAERGHFMSIASFAVTVGPGVGPILGGVICYTAGWRWIFWFLAINAGICIVAMVLLFPETSRSIVGNGSIPPSPVFRLPIRFKSYCRHWSQDSVERPAKAFQMPNPLRPLRLLLRKDNVVVVLAWGLMYTVYSCLIATLSTLHIEIYHLNEWQSGIIYLPIALGGTASTFFSGIILDRVYRSQRAKLGLPTDKIRGDDLDTFPVEKSRVLVMCIPMLIVVATTVSYGWALQARTHISVGLILQFIVGLSLQINFSSLNTILTDINRHNPSAAQAATNPVRYALSALVVAYIEDLFETVGVGWAFTIVGGFCIISLALLWVEYCRGFSWRTAHLMTRETGNSAVD

SEQ ID NO: 35605 - DNA, 5327 bp, Muscodor strobelii
  misc_feature: SGI EST ID NO. CUFF.84896.4
  misc_feature: Variant of the nucleotide sequence at SEQ ID NO 35603
gtttaccatatggactcctctgttcattacatacatgtagcaaaagggaggtagaaaaaacctaagagtcacctgacgacggttgcgtcaaacattgtcctacatttattgagccacaagtccccatcaggtgggaccccggcccgtaacattgacgccacacactcccatgccgtgatgctgagcatggggcggttctaatctgaatccctcatacggacgcgactcagcgggatgagccgtaagaagagcccaggtcttatttgaaaagttgtgatgaggtcttagagtttttccgtttagaatctggtcacttgtactttgtagtgggacttgaagcgtttctggaagctctgctggccagccattaaattcagtgtctttggtggcatgcgcaggtgggtactgatgcttgtcttgtgccctgttgtagccaatcttcaggcgatggtgcaccaacacgcatgaggcatacttgttcgtgatgcacggaacgcggagtcgtcacccaagcgacattgcggaaacgatcttctcttaaactgacctatatcatgtcccatcacgataaaatgcggatgatgcctagtttgctcgtaacaatctttgttgcgaccgatgcgtgagcactgacggtttgtcgagccaaggatctgatcatcaccaattttttgcttgctatgacaacgtgctgcgaggaagaactcgcgcattgttcacgatggcttccgtacgagacagcggcattcttgagaagtcggacagtcttacgcaaccgcacgaagatgagatccatgatcacgagagatattcagtcttcaccaagagggaaagatggtgcattgtggcaatggcttcctgggcgtcatggacatcaaatcttagtcacttcatctatctcccggcactagagccgctctctaatgcattctctgtgacaatcggtcagatcaacctgactctgacagtttacatggcggtcgcaggggtcgcccctatcataatcggagatgcagcagacgtcgttggaaaacgcccggtttacattgtgactcttggagtatatttgattgcttgtatctctgtcgcactgtcgagcacttatggagaactgctcggacttcgagctcttcaagctcttggacagtcagcaatcattcttgtcggatacggtgtcgtgagtgatattgcctcgccggccgagaggggtcacttcatgagcatcgcatcatttgcggtgactgtcggacccggtgttggcccaattctcggaggtgttatctgctacactgctgggtggagatggatattctggtttctcgccatcaacgcaggtatctgcattgttgccatggtattgctatttccggaaaccagtaggagtattgtcggcaatggctcaatccccccttctcctgtcttccgcctacctattcggttcaaatcctattgtcgtcattggagtcaagactcagtcgagagacctgctaaggctttccaaatgccaaatcctctacgaccacttcgacttttactacgaaaagacaacgttgtggttgtcctggcctggggtctgatgtatactgtgtactcttgtctgatcgcaacattgtccacgttgcatatcgagatctatcatctcaatgaatggcaatccggaattatctatctgccaatcgcgctgggtggcacagcatccacctttttctcgggtataatcctcgatagagtgtatcgtagccagcgtgcaaagcttggtctgccaacagataagatccgtggcgatgatctcgacacatttccagttgagaagagtagagttcttgtcatgtgtatacctatgctcattgttgttgccacgactgtttcatacggttgggcattacaggctcgtacacatatctcagtcggtcttatactacaattcattgtcggcttgtcgctacagattaattttagtgtgagaaatgatctcccatgatttcaatactgccgtattcaagcaactgacatgactatagagcctcaacaccatcctcacagacattaaccgccacaacccgtcggcagcacaagctgctacaaatccagttagatacgctctttcagctcttgtagttgcttatatcgaggacctttttgaaactgtgggagtaggctgggccttcactatcgttgggggcttctgcatcatcagtcttgctctgctttgggtggagtactgcagagggttctcctggagaacggcgcacttaatgacaagggagacagggaatagtgcagtagattgaaaacatcctactccaatcccatacactggactattgctacatctccgttacgcgggcatatgaacgatcgcacttgaggcatagctttgcaaatcgccaatgagtcttgactgatccaatctcccggcagcgcgaagagctcttggacgtcttccttgccacctctggagcgtggtcgacgtttgtacgaaggaggtaccaagcttttgcccgtactgtcgagtctagatgacagattttcgtgcttctctatggttgtccatgatagccgcacagaacagatggagtggaatgaggatataaaaatcaagcgatcaccctgcagaatagaaagagcagtgattattcctaatgattcgtcaacgccaagctgtccaaactgaatactcttctcttcgatttcagctttcgcatcaagcctgtctgaagtcggtatcgtgttagtcctcagatacgcaaactttggccgcgggtcatactgtgatccggctatctgcatgacaatatgttttttatcatcagttgcgattactctttcgactccatatgtatcggccatgtcttgcttgctagcgaaagttcgtggagcaaacgaacacctccaccgttctatcagattccagttcaagatctggagagcatgggatccaagtcctacaatcagtgacggatcctgaggatgtacagcccatctcagcgtctctttctgattgatgtctattttgaattcgacagaacgcgtgcccaatgcgattgttagcagctgagcactcgtgcagactagtagtcgttctgagcttggttcgaaaataagttgagaaattgggatcttcgtatacttcctcagcgatactgtatcaatctgctcaacgaccggattttcattattggtagctgatgagactgacatcagagtcatttgcttgctcgcatccaggatacagaggagatcgccatcatcattccaaactatcttgtcgacggtaaatttcgctcgtgatgtgaatatagtactgagacgaccgcgacgcgtatcatggagacttgcaacgccaccagctgtaccactgcagaataggttattgctgcgacacactgctaacgctgtgattggatcaaccgccccggaattggcaaaagatacatcggtctgcagtgatatgttataatcactaggtgtgtctatacctgtgtccgatattgccttgactcttgctaatgtaccaggctcccaggcattagcatagtaccccctaatatcataaagtcttctcgagtcaggactaaatgtcaggccaaagacagagtcttcagctgcaagctgatagaggagatggaacccgttagtcgttaatattttaattcttccatggccgtctccagtagcgagcagctgaccgtctttgctcagacacattcgcgtcactcctgttgaaatctcgtctacctcatcatcgtaaggtgcccatttaaatatctttccttcaaaattcaagccgaataattcacaggaatgagggtgccaagcgatctctctcacctcacgaattgctgattcttcgctcgttcgccggcaaagacctatgtgcattggtccgtcaagctcccatgcagagaccgggtagcgacgatacgctacagcggctaatgacccatcacgactcaaggcaatatggctagctgcattattgaactggttttcaatctcctcttcttcgagttctgcgacaaccttccaggtcattggggattgcgtcagctccagtgatcgaatgcgcctatcatccgtaccgacaagcaaagtgtggctatcctggctgaatagcatcgtcaagggtctcgttttcgactcaatagtgtcgatactatttacgcactcccccgtcgcgatcttccatattctcaaagtgcggtaaccatatgtcaccagaagagttgcggcgccattgagttgcatcttggtaacacgctcgccgtgttgaacggggctcattggcagttggcgaaagtctgctggatcgtagaatgaaacgctccctgtcgagttcaacagggcgactactgagccagaggcttcaattgcagatgcgatcgtgttccctgcgtgtatccttgcgaccgagtcatcccacttctctgttgatagcccactcaccacaagttctgcctttttgccgaactgctggtagactggggaacttcggggacagaatggagggatcaggtcatatatggcctcaggcttacgacgaacgacctgaccgaacttgccaggtattcgtaacatgtcgattgcccaattttcgaagaattctcgatccaatatgatcccagcttcactgacatcctgtctggatattctagcggagaagcgagatagatcccttgacgattgggtcatagctcgcatctgaccacccgatgctaaagcgtgaatccaggtcagcgcagacttccctttcagaaactttctcagcatggcaagacattcattgtcgtcatctgacgcgtgaattaggtgtgttgaccagaattctgccgcataccccacaaaaggtggctttccagcacgcaagagtccgatcctcaaattactcatcatcaaacagcgcatcgtgctaagaaacaattctctgtgtgctgcttttcgatcgaggttgatagggcgcttcgtgttcgaactatccagaagatagtcgcgagcagtctgatgggtcatagtcacgttcccatcattgtctacaacgacaaaccctccgcagaggtcaatgatggtgcgcggcaggtcaagtatgtttcgagaagtatctcctagcgcatgtgccagatcctctatgttcaaagcacgaaatgaacagctcacaaattggacgatctgtaacgccaaatctctatcgcgtgtttgcgaaatctcgataaccgaagatgccattctatcgtaaaggctttccatgccactaggaaagtcacgtaatacctcgtcgacgtccgtggcaacatgacatctgttgacattttcaacggcaaatcgaaccc

SEQ ID NO: 35606 - DNA, 777 bp, Muscodor strobelii
  misc_feature: SGI cDNA ID NO. 572334
  misc_feature: Encodes the peptide sequence at SEQ ID NO 35607
atggccgcccctgaatctacatctacggccttgctgcccgctttgcgcacccaaccgaaagctatctttttcaccgacttcgacggcacaatcacgctgcatgatagtaatgattggatgacggacaacctgggatacggcaccgaaaaccgcaagaaaggaaaccaagatgtgctgtttgagcgacgatcattccgtgacgccttccaagagatgcttgacagtgtcacgacgcctttcgatcgctgcatcgaattattgcttgagaacatcaagttagatcctgcttttaaggagttcgctgcatggtgtcgcgagaacaatgtgcctatcgttgtgctgagtggcggtatggagccggtgatccgtgctctacttgctcacctagtgggtaaggaggaggccgcagtgatgcagattgtgagcaacaatgtcaaggcccgtccgggtaagagcatcaacgatgagaacggatgggatatcgagttccatgatgatagttctttcggtcatgacaagagtctcgagattagaccgtacgcggcactcgctgatagacccgtcatgttttatgcaggcgatggtgtatctgatctctctgcggctaaggagactgacttactattcgccaaggaggggcgcgatctcgttacatactgtgagaaagagaaagtaccgttcactgtcttccatgacttttccgacatccacaagattgtcgcaagcgttgttgatggcaagacgacaatacagcaggccgccactggaacgaactaa

SEQ ID NO: 35607 - protein, 258 aa, Muscodor strobelii
  misc_feature: SGI Peptide ID NO. 572334
  misc_feature (6)..(256): NCBI GI: 170940113 Blast Desc: protein product [Podospora anserina]
  misc_feature (6)..(256): NCBI GI: 116195072 Blast Desc: CHGG_04134 [Chaetomium globosum CBS 148.51] gi|88180047|gb|EAQ87515.1| CHGG_04134 [Chaetomium globosum CBS 148.51]
  misc_feature (6)..(256): NCBI GI: 85106847 Blast Desc: NCU06554 [Neurospora crassa OR74A] gi|12802363|gb|AAK07846.1|AF309689_8 G6G8.8 [Neurospora crassa] gi|28923862|gb|EAA33025.1| NCU06554 [Neurospora crassa OR74A]
  misc_feature (9)..(253): NCBI GI: 154317334 Blast Desc: BC1G_03569 [Botryotinia fuckeliana B05.10] gi|150844986|gb|EDN20179.1| BC1G_03569 [Botryotinia fuckeliana B05.10]
  misc_feature (9)..(253): NCBI GI: 156059266 Blast Desc: SS1G_03645 [Sclerotinia sclerotiorum 1980] gi|154701432|gb|EDO01171.1| SS1G_03645 [Sclerotinia sclerotiorum 1980]
  misc_feature (7)..(254): NCBI GI: 39949363 Blast Desc: MGG_08771 [Magnaporthe grisea 70-15] gi|145009320|gb|EDJ94031.1| MGG_08771 [Magnaporthe grisea 70-15]
  misc_feature (13)..(256): NCBI GI: 256726813 Blast Desc: [Nectria haematococca mpVI 77-13-4]
  misc_feature (13)..(256): NCBI GI: 46136281 Blast Desc: FG09656.1 [Gibberella zeae PH-1] gi|46136285|ref|XP_389834.1| FG09658.1 [Gibberella zeae PH-1]
  misc_feature (1)..(254): NCBI GI: 169610758 Blast Desc: SNOG_08486 [Phaeosphaeria nodorum SN15] gi|111062534|gb|EAT83654.1| SNOG_08486 [Phaeosphaeria nodorum SN15]
  misc_feature (12)..(254): NCBI GI: 261205296 Blast Desc: phosphoserine phosphatase [Ajellomyces dermatitidis SLH14081] gi|239592444|gb|EEQ75025.1| phosphoserine phosphatase [Ajellomyces dermatitidis SLH14081] gi|239611398|gb|EEQ88385.1|
  misc_feature (20)..(252): SWISSPROT Homolog: EC 4.2.1.109 Methylthioribulose 1-phosphate dehydratase
MAAPESTSTALLPALRTQPKAIFFTDFDGTITLHDSNDWMTDNLGYGTENRKKGNQDVLFERRSFRDAFQEMLDSVTTPFDRCIELLLENIKLDPAFKEFAAWCRENNVPIVVLSGGMEPVIRALLAHLVGKEEAAVMQIVSNNVKARPGKSINDENGWDIEFHDDSSFGHDKSLEIRPYAALADRPVMFYAGDGVSDLSAAKETDLLFAKEGRDLVTYCEKEKVPFTVFHDFSDIHKIVASVVDGKTTIQQAATGTN

SEQ ID NO: 35608 - DNA, 2492 bp, Muscodor strobelii
  misc_feature: SGI EST ID NO. CUFF.84908.0
  misc_feature: Variant of the nucleotide sequence at SEQ ID NO 35606
gttggaaaaccccgcgaccgcgtgtagaattctttggactggagcagccgtcgggttttagattactctgttttcttgtaacgatagacctggaatattttaatctctagtctatgctatcttgtcactgagaatttcaaattaagtctacccgtgtacacgtctgttgaggtgatcagtgccttgtgacgtcactctccttattttccccctctagacggatcaaatcggttaggcacgaacggaagggtcttctatagaattggcgcttttacaaactcaatctttcgtgaacagaatattaatacaacctactatggccgcccctgaatctacatctacggccttgctgcccgctttgcgcacccaaccgaaagctatctttttcaccgacttcgacggcacaatcacgctgcatgatagtaatgattggatgacggacaacctgggatacggcaccgaaaaccgcaagaaaggaaaccaagatgtgctgtttgagcgacgatcattccgtgacgccttccaagagatgcttgacagtgtcacgacgcctttcgatcgctgcatcgaattattgcttgagaacatcaagttagatcctgcttttaaggagttcgctgcatggtgtcgcgagaacaatgtgcctatcgttgtgctgagtggcggtatggagccggtgatccgtgctctacttgctcacctagtgggtaaggaggaggccgcagtgatgcagattgtgagcaacaatgtcaaggcccgtccgggtaagagcatcaacgatgagaacggatgggatatcgagttccatgatgatagttctttcggtcatgacaagagtctcgagattagaccgtacgcggcactcgctgatagacccgtcatgttttatgcaggcgatggtgtatctgatctctctgcggctaaggagactgacttactattcgccaaggaggggcgcgatctcgttacatactgtgagaaagagaaagtaccgttcactgtcttccatgacttttccgacatccacaagattgtcgcaagcgttgttgatggcaagacgacaatacagcaggccgccactggaacgaactaagtctagatgcttaaaatatttgagccggattgcatagagactttggatagacagacataagagacaacatgaagactagatgcatatagacctagatggatagaataaattcggtgaattgattcgtttcattagcttcatattctaaactgtctgttaagtcttttggcacacgattgcgctgctctattcaaaaatcaggagaaaactcaaacccaatgatccagtcttcctataattacgccaatacgagataaatggctttcccttgtatcgcatcccctaaatccattgttcgttacctgtgatctaatcttgttaagctattttactcgtctcttttgcgaggactgggcataatgaaccagcaaacaagcatagcgacgaacagtccaatggcaattggatgcaaaacgaatgtgccggcagcttgtgcgagaataccagtagtgaacggggcaacggcaccgccggagctaccaaaggcactgatgacgccgaatccggcaccttgttggcgacgcgacatgttgcgggtaaagatggtagcagcgcaaggatacacaggacccaagagcaatccgacgatggccagtgaaacagcttctccgatgatattgggcaccagccaaacgagaagctggaatactccagcgccgacaacgacgtagtagacgaatcgcttctccccgactcgtgccccgatcggtgccaaaataaagcgaccgagcgtgataccgccccagaaacccgccgtgacatttccgactgctgaggggttgccattgcgagtagcgatcagaaacgatatgacccatcccgagattgagacctcggctccttgatacgcgaagatgaagatggcgcctaatataacaacacgcgacttgaaggcatgcagcatggcagatatctcggcccgaggcgcagtagccgctgtgctcgctgtccgagtcaccgtgatgagcgacgatgtctcggtggcgagagcttccttctcgtagttccagaaggaccaagcaaagaaagcggacagggcgacgcctagcgaaacattgatgaaaaagaattgattccaggcattctcgcctatggtcgccacgattctagtggcaatcagaggaccgatgacaccgccaacgccgtaggaaccgtgcatgataccgaggagagtagtaccattttgcagattggctgtgaaaacattgcatatggcgaggatgttggagaatccaaaaccgataaaaaagtagccgactacgagtgcaggaaagggcgctgcgaccgcgagtggaagatatccgaggaccatcagcaaagtgcagatacccaatgtcttgcctcgtcctagaccctcgcgaatggcatctacgaagggagccgccaggatgaagccgaa

SEQ ID NO: 35609 - DNA, 1485 bp, Muscodor strobelii
  misc_feature: SGI cDNA ID NO. 572335
  misc_feature: Encodes the peptide sequence at SEQ ID NO 35610
atggccactgcactatttcaatcgctcgtagaaatcgagtctgcgcccgactcattccctaaagcgcctcaacgagctgtttccaggaaatatcccgctattcctcaagatgatgatccgttagaactgagaagcctagggaaaactcccatcagcactgcaccaactacgcctgctgaggagagggatctcgagatgagcatgcctggtacgccagctgagccggccgcagcgtttgaagtgttgccgagtctcacaagcccgccgatgaacaaattcagactcatggccgtctgtctcttcacatttttgggtggtctcaccgactctgcgcccggcgcgttgatcccatatatggaaaagtactaccacattggctatgccattgtctcattgatcttcgtcggtaacgcattcggcttcatcctggcggctcccttcgtagatgccattcgcgagggtctaggacgaggcaagacattgggtatctgcactttgctgatggtcctcggatatcttccactcgcggtcgcagcgccctttcctgcactcgtagtcggctacttttttatcggttttggattctccaacatcctcgccatatgcaatgttttcacagccaatctgcaaaatggtactactctcctcggtatcatgcacggttcctacggcgttggcggtgtcatcggtcctctgattgccactagaatcgtggcgaccataggcgagaatgcctggaatcaattctttttcatcaatgtttcgctaggcgtcgccctgtccgctttctttgcttggtccttctggaactacgagaaggaagctctcgccaccgagacatcgtcgctcatcacggtgactcggacagcgagcacagcggctactgcgcctcgggccgagatatctgccatgctgcatgccttcaagtcgcgtgttgttatattaggcgccatcttcatcttcgcgtatcaaggagccgaggtctcaatctcgggatgggtcatatcgtttctgatcgctactcgcaatggcaacccctcagcagtcggaaatgtcacggcgggtttctggggcggtatcacgctcggtcgctttattttggcaccgatcggggcacgagtcggggagaagcgattcgtctactacgtcgttgtcggcgctggagtattccagcttctcgtttggctggtgcccaatatcatcggagaagctgtttcactggccatcgtcggattgctcttgggtcctgtgtatccttgcgctgctaccatctttacccgcaacatgtcgcgtcgccaacaaggtgccggattcggcgtcatcagtgcctttggtagctccggcggtgccgttgccccgttcactactggtattctcgcacaagctgccggcacattcgttttgcatccaattgccattggactgttcgtcgctatgcttgtttgctggttcattatgcccagtcctcgcaaaagagacgagtaa

SEQ ID NO: 35610 - protein, 494 aa, Muscodor strobelii
  misc_feature: SGI Peptide ID NO. 572335
  misc_feature (98)..(453): Pfam Id: PF07690 Pfam Desc: Major Facilitator Superfamily
  misc_feature (1)..(494): NCBI GI: 85079479 Blast Desc: NCU03468 [Neurospora crassa OR74A] gi|18376091|emb|CAD21118.1| conserved [Neurospora crassa] gi|28917418|gb|EAA27121.1| NCU03468 [Neurospora crassa OR74A]
  misc_feature (66)..(494): NCBI GI: 256727374 Blast Desc: [Nectria haematococca mpVI 77-13-4]
  misc_feature (4)..(494): NCBI GI: 156031213 Blast Desc: SS1G_14028 [Sclerotinia sclerotiorum 1980] gi|154699430|gb|EDN99168.1| SS1G_14028 [Sclerotinia sclerotiorum 1980]
  misc_feature (1)..(494): NCBI GI: 119478940 Blast Desc: MFS efflux transporter, [Neosartorya fischeri NRRL 181] gi|119407653|gb|EAW17602.1| MFS efflux transporter, [Neosartorya fischeri NRRL 181]
  misc_feature (1)..(494): NCBI GI: 70997411 Blast Desc: MFS efflux transporter [Aspergillus fumigatus Af293] gi|66851089|gb|EAL91415.1| MFS efflux transporter, [Aspergillus fumigatus Af293] gi|159126818|gb|EDP51934.1| MFS efflux fumigatus
  misc_feature (7)..(494): NCBI GI: 154309161 Blast Desc: BC1G_07475 [Botryotinia fuckeliana B05.10] gi|150852518|gb|EDN27710.1| BC1G_07475 [Botryotinia fuckeliana B05.10]
  misc_feature (1)..(494): NCBI GI: 46136279 Blast Desc: FG09655.1 [Gibberella zeae PH-1] gi|46136283|ref|XP_389833.1| FG09657.1 [Gibberella zeae PH-1]
  misc_feature (1)..(494): NCBI GI: 121713754 Blast Desc: MFS efflux transporter, [Aspergillus clavatus NRRL 1] gi|119402641|gb|EAW13062.1| MFS efflux transporter, [Aspergillus clavatus NRRL 1]
  misc_feature (1)..(494): NCBI GI: 145254665 Blast Desc: An18g02380 [Aspergillus niger] gi|134084281|emb|CAK43168.1| protein product [Aspergillus niger]
  misc_feature (6)..(494): NCBI GI: 212529322 Blast Desc: MFS efflux transporter, [Penicillium marneffei ATCC 18224] gi|210074216|gb|EEA28303.1| MFS efflux transporter, [Penicillium marneffei ATCC 18224]
MATALFQSLVEIESAPDSFPKAPQRAVSRKYPAIPQDDDPLELRSLGKTPISTAPTTPAEERDLEMSMPGTPAEPAAAFEVLPSLTSPPMNKFRLMAVCLFTFLGGLTDSAPGALIPYMEKYYHIGYAIVSLIFVGNAFGFILAAPFVDAIREGLGRGKTLGICTLLMVLGYLPLAVAAPFPALVVGYFFIGFGFSNILAICNVFTANLQNGTTLLGIMHGSYGVGGVIGPLIATRIVATIGENAWNQFFFINVSLGVALSAFFAWSFWNYEKEALATETSSLITVTRTASTAATAPRAEISAMLHAFKSRVVILGAIFIFAYQGAEVSISGWVISFLIATRNGNPSAVGNVTAGFWGGITLGRFILAPIGARVGEKRFVYYVVVGAGVFQLLVWLVPNIIGEAVSLAIVGLLLGPVYPCAATIFTRNMSRRQQGAGFGVISAFGSSGGAVAPFTTGILAQAAGTFVLHPIAIGLFVAMLVCWFIMPSPRKRDE

SEQ ID NO: 35611 - DNA, 2907 bp, Muscodor strobelii
  misc_feature: SGI EST ID NO. CUFF.84909.2
  misc_feature: Variant of the nucleotide sequence at SEQ ID NO 35609
cccggttgcagctccgtgttgacggtgaaaagttttgtctgatcgtgcattagttgctcaatcacatgaaaagcaattatacaccctagccgagcggactggtgtggtggtgcaatttatgcttaccaatattcccttattacctgccgcctgtttccagtgttcctttgtgcggacataaccagaaccaaagatcgtgagctgagttatcgtgagcgtcaccaacagcgtcacattatccacaggccagccctagccaccacccatcggacaggagagccccgaccagcactcgggttttcaaaaagcatctgtgttcgcacattttgattttctcgtcgattttctatctaccgttcgcaatccggtcgcacgtgtgaatcgttcaaaattgtataacaaattaatttctatagctaacataacctagtcaatacacttttccgtcctttttgtcttgcagctccaaagctgttgagcaactgacgtctaactgattgatatttctcatttccaaaatggccactgcactatttcaatcgctcgtagaaatcgagtctgcgcccgactcattccctaaagcgcctcaacgagctgtttccaggaaatatcccgctattcctcaagatgatgatccgttagaactgagaagcctagggaaaactcccatcagcactgcaccaactacgcctgctgaggagagggatctcgagatgagcatgcctggtacgccagctgagccggccgcagcgtttgaagtgttgccgagtctcacaagcccgccgatgaacaaattcagactcatggccgtctgtctcttcacatttttgggtggtctcaccgactctgcgcccggcgcgttgatcccatatatggaaaagtactaccacattggctatgccattgtctcattgatcttcgtcggtaacgcattcggcttcatcctggcggctcccttcgtagatgccattcgcgagggtctaggacgaggcaagacattgggtatctgcactttgctgatggtcctcggatatcttccactcgcggtcgcagcgccctttcctgcactcgtagtcggctacttttttatcggttttggattctccaacatcctcgccatatgcaatgttttcacagccaatctgcaaaatggtactactctcctcggtatcatgcacggttcctacggcgttggcggtgtcatcggtcctctgattgccactagaatcgtggcgaccataggcgagaatgcctggaatcaattctttttcatcaatgtttcgctaggcgtcgccctgtccgctttctttgcttggtccttctggaactacgagaaggaagctctcgccaccgagacatcgtcgctcatcacggtgactcggacagcgagcacagcggctactgcgcctcgggccgagatatctgccatgctgcatgccttcaagtcgcgtgttgttatattaggcgccatcttcatcttcgcgtatcaaggagccgaggtctcaatctcgggatgggtcatatcgtttctgatcgctactcgcaatggcaacccctcagcagtcggaaatgtcacggcgggtttctggggcggtatcacgctcggtcgctttattttggcaccgatcggggcacgagtcggggagaagcgattcgtctactacgtcgttgtcggcgctggagtattccagcttctcgtttggctggtgcccaatatcatcggagaagctgtttcactggccatcgtcggattgctcttgggtcctgtgtatccttgcgctgctaccatctttacccgcaacatgtcgcgtcgccaacaaggtgccggattcggcgtcatcagtgcctttggtagctccggcggtgccgttgccccgttcactactggtattctcgcacaagctgccggcacattcgttttgcatccaattgccattggactgttcgtcgctatgcttgtttgctggttcattatgcccagtcctcgcaaaagagacgagtaaaatagcttaacaagattagatcacaggtaacgaacaatggatttaggggatgcgatacaagggaaagccatttatctcgtattggcgtaattataggaagactggatcattgggtttgagttttctcctgatttttgaatagagcagcgcaatcgtgtgccaaaagacttaacagacagtttagaatatgaagctaatgaaacgaatcaattcaccgaatttattctatccatctaggtctatatgcatctagtcttcatgttgtctcttatgtctgtctatccaaagtctctatgcaatccggctcaaatattttaagcatctagacttagttcgttccagtggcggcctgctgtattgtcgtcttgccatcaacaacgcttgcgacaatcttgtggatgtcggaaaagtcatggaagacagtgaacggtactttctctttctcacagtatgtaacgagatctgcttctatcagcctcatggtgatctagcttgtaaggtgcataaaacttaccgcgcccctccttggcgaatagtaagtcagtctccttagccgcagagagatcagatacaccatcgcctgcataaaacatgacgggtctatcagcgagtgccgcgtacggtctaatctcgagactcttgtcatgaccgaaagaactagacttccaattagcccccatgcgccgcggtgtctgctttgccccgtgaaatctgcgcattgaaccgcggcgagctcacctatcatcatggaactcgatatcccatccgttctcatcgttgatgctcttacccggacgggccttgacattgttgctcacaatctgcatcactgcggcctcctccttacccactaggtgagcaagtagagcacggatcaccggctccataccgccactcagcacaa

SEQ ID NO: 35612 - DNA, 1791 bp, Muscodor strobelii
  misc_feature: SGI cDNA ID NO. 572336
  misc_feature: Elevated expression when VOC is produced
  misc_feature: Encodes the peptide sequence at SEQ ID NO 35613
atgccttgcgcagtgtctgggctagtttatgggttctttctcattttgttcagcctgactcctgtcctgacgctctccccgagactccgacacgacatccgtgtcgattcaaagccagtgtcactgtgtgaggatacgtcgggtgtagaaagccattctggatacattcgactgccgcccagagtcttgcaagaagatggcattgattccgctcaggactaccccatcaacatcttcttctggtacttccagaaccggaagaagaggaccgatttaccactgactgtatatttcatgggcgggcccggtgcttccagtttaatgtcattgttccgtgaaaacggaccgtgcagagtcaattcagacagcaacagcacctccgacaatgaattctcttggaatgaacattcagacatcctttatattgaccagcccgtacaaacaggtttcagctacgatttcgctgagcccggcgtccttgatgccgatgacaatcttgtgttggatagggatctaggacagccccaagcagaaaccgcgtttgggtcgcgacggggattcttttcaagccatgatccgcgcaataccgccaacagtacgcaagtggtggctcgcagcacatggttcttcctccaagtgtggatgcagaagtttggcaaaagaaaatcttcgaatgacaagatcaatttctggacgtcttcatacggcggccatttcgtccccaagctcattcaatacgcattggctcgaaatgcacgtctgagtcaagataggttagaccaagaggactttatcccactgaccattggagttttgggcatgaccaatgcatgtgttgatggcccaacccaacttccttactatcccgaaatggcactcaaaaacaactacagcgtccccctcaccaatcaagcgggatacctgacagccatacatcgcttggaaaaaagtgacggctgcctcgcaaagatccaagcctgtcgacattcttctgcagctgctggcggcagttcaggtgccgcaaacaacgtcgacgacatttgccgtgacgccaaccactactgcggcaagcatgtcgccagcgtcgccaccggtagaagctatttcgatatcgcgtaccccgacaatttccttgccaatcccctctctgagacataccttgggtacctgaaccagaaacacgtccaagacgcccttggtgtgcccgtcaacttttctgccaacgcacctgtggttgcccaggcattcgcttcgacgggtgacaacgttaaaggggggtctctcgaggctcttgcaaggatactagacgctggagtgtccgtaactatgatgtacggggatcgagactttgcctgcaactggctcggtggggaagccatctctcacgctatccccttcaatcattctcatgtcttctcttccgccggtattgaagacatctcagtcccagggtatcccgtaggtgcacaagttcggcaggcaggcaacctgtctttcatccgagtgtactcggccagccacaacgtagggctacaacaaccacagctgtcacaaaccatcttccagcgtgccatagccgggctcgacatggcttccggaaccgttccagcctcctccaagtatagcaccaagcacgtgtacaaagattgggatcactcaggcgaggccctgccgttttcgccagagggcgcgtgctacacgtggaacttagggctctgtaatctgtacttttatatgcaagccactctccaccccactacttcgatccttatggtggtcgcctctatctgc

SEQ ID NO: 35613 - protein, 597 aa, Muscodor strobelii
  misc_feature: SGI Peptide ID NO. 572336
  misc_feature (39)..(527): Pfam Id: PF00450 Pfam Desc: Serine carboxypeptidase
  misc_feature (79)..(527): Pfam Id: PF00450 Pfam Desc: Serine carboxypeptidase
  misc_feature (17)..(573): NCBI GI: 240109125 Blast Desc: serine carboxypeptidase, [Coccidioides posadasii C735 delta SOWgp]
  misc_feature (4)..(573): NCBI GI: 240274092 Blast Desc: carboxypeptidase [Ajellomyces capsulatus H143]
  misc_feature (42)..(573): NCBI GI: 119182012 Blast Desc: CIMG_06060 [Coccidioides immitis RS]
  misc_feature (28)..(570): NCBI GI: 119479841 Blast Desc: carboxypeptidase S1, [Neosartorya fischeri NRRL 181] gi|119408103|gb|EAW18052.1| carboxypeptidase S1, [Neosartorya fischeri NRRL 181]
  misc_feature (28)..(570): NCBI GI: 159126364 Blast Desc: carboxypeptidase S1, [Aspergillus fumigatus A1163]
  misc_feature (17)..(566): NCBI GI: 225557794 Blast Desc: carboxypeptidase [Ajellomyces capsulatus G186AR]
  misc_feature (6)..(571): NCBI GI: 169777249 Blast Desc: [Aspergillus oryzae RIB40] gi|238494378|ref|XP_002378425.1| carboxypeptidase S1, [Aspergillus flavus NRRL3357] gi|83771827|dbj|BAE61957.1| protein
  misc_feature (22)..(571): NCBI GI: 242793682 Blast Desc: carboxypeptidase S1, [Talaromyces stipitatus ATCC 10500] gi|218718802|gb|EED18222.1| carboxypeptidase S1, [Talaromyces stipitatus ATCC 10500]
  misc_feature (28)..(570): NCBI GI: 70998358 Blast Desc: carboxypeptidase S1 [Aspergillus fumigatus Af293] gi|40804402|gb|AAR91697.1| carboxypeptidase 1 [Aspergillus fumigatus] gi|66851537|gb|EAL91863.1| carboxypeptidase S1, Af293]
  misc_feature (1)..(570): NCBI GI: 259487624 Blast Desc: TPA: carboxypeptidase S1, (AFU_orthologue; AFUA_5G07330) [Aspergillus nidulans FGSC A4]
  misc_feature (22)..(547): SWISSPROT Homolog: EC 3.4.16.6 Carboxypeptidase D
  misc_feature: Useful for introducing or modulating the production of volatile compounds
MPCAVSGLVYGFFLILFSLTPVLTLSPRLRHDIRVDSKPVSLCEDTSGVESHSGYIRLPPRVLQEDGIDSAQDYPINIFFWYFQNRKKRTDLPLTVYFMGGPGASSLMSLFRENGPCRVNSDSNSTSDNEFSWNEHSDILYIDQPVQTGFSYDFAEPGVLDADDNLVLDRDLGQPQAETAFGSRRGFFSSHDPRNTANSTQVVARSTWFFLQVWMQKFGKRKSSNDKINFWTSSYGGHFVPKLIQYALARNARLSQDRLDQEDFIPLTIGVLGMTNACVDGPTQLPYYPEMALKNNYSVPLTNQAGYLTAIHRLEKSDGCLAKIQACRHSSAAAGGSSGAANNVDDICRDANHYCGKHVASVATGRSYFDIAYPDNFLANPLSETYLGYLNQKHVQDALGVPVNFSANAPVVAQAFASTGDNVKGGSLEALARILDAGVSVTMMYGDRDFACNWLGGEAISHAIPFNHSHVFSSAGIEDISVPGYPVGAQVRQAGNLSFIRVYSASHNVGLQQPQLSQTIFQRAIAGLDMASGTVPASSKYSTKHVYKDWDHSGEALPFSPEGACYTWNLGLCNLYFYMQATLHPTTSILMVVASIC

SEQ ID NO: 35614 - DNA, 2328 bp, Muscodor strobelii
  misc_feature: SGI EST ID NO. CUFF.84830.0
  misc_feature: Variant of the nucleotide sequence at SEQ ID NO 35612
gccgtatcaagcagcggaacgtcactgattgaacaaggtctgtgctgtgctgacatgaccacttcatatttctatatgaccctatcgcttaccaagggtttttgttctggatagctggacatcgtattttgggtgtatattattcatctctcaacgacgaagcaataacatctcatggcagtcatgccttgcgcagtgtctgggctagtttatgggttctttctcattttgttcagcctgactcctgtcctgacgctctccccgagactccgacacgacatccgtgtcgattcaaagccagtgtcactgtgtgaggatacgtcgggtgtagaaagccattctggatacattcgactgccgcccagagtcttgcaagaagatggcattgattccgctcaggactaccccatcaacatcttcttctggtacttccagaaccggaagaagaggaccgatttaccactgactgtatatttcatgggcgggcccggtgcttccagtttaatgtcattgttccgtgaaaacggaccgtgcagagtcaattcagacagcaacagcacctccgacaatgaattctcttggaatgaacattcagacatcctttatattgaccagcccgtacaaacaggtttcagctacgatttcgctgagcccggcgtccttgatgccgatgacaatcttgtgttggatagggatctaggacagccccaagcagaaaccgcgtttgggtcgcgacggggattcttttcaagccatgatccgcgcaataccgccaacagtacgcaagtggtggctcgcagcacatggttcttcctccaagtgtggatgcagaagtttggcaaaagaaaatcttcgaatgacaagatcaatttctggacgtcttcatacggcggccatttcgtccccaagctcattcaatacgcattggctcgaaatgcacgtctgagtcaagataggttagaccaagaggactttatcccactgaccattggagttttgggcatgaccaatgcatgtgttgatggcccaacccaacttccttactatcccgaaatggcactcaaaaacaactacagcgtccccctcaccaatcaagcgggatacctgacagccatacatcgcttggaaaaaagtgacggctgcctcgcaaagatccaagcctgtcgacattcttctgcagctgctggcggcagttcaggtgccgcaaacaacgtcgacgacatttgccgtgacgccaaccactactgcggcaagcatgtcgccagcgtcgccaccggtagaagctatttcgatatcgcgtaccccgacaatttccttgccaatcccctctctgagacataccttgggtacctgaaccagaaacacgtccaagacgcccttggtgtgcccgtcaacttttctgccaacgcacctgtggttgcccaggcattcgcttcgacgggtgacaacgttaaaggggggtctctcgaggctcttgcaaggatactagacgctggagtgtccgtaactatgatgtacggggatcgagactttgcctgcaactggctcggtggggaagccatctctcacgctatccccttcaatcattctcatgtcttctcttccgccggtattgaagacatctcagtcccagggtatcccgtaggtgcacaagttcggcaggcaggcaacctgtctttcatccgagtgtactcggccagccacaacgtagggctacaacaaccacagctgtcacaaaccatcttccagcgtgccatagccgggctcgacatggcttccggaaccgttccagcctcctccaagtatagcaccaagcacgtgtacaaagattgggatcactcaggcgaggccctgccgttttcgccagagggcgcgtgctacacgtggaacttagggctctgtagtgagaggctacgaaggctatatctagaggggaaaacattggtacagaactactttgttgtcgaggatgataaggggaaatgcgtcttgaacttggtgaggccgtgtccgaggggggtcggatggagggggaaagagctgagtaagacggcagttgatgtcatggttgagggacacaggatggttacgggtgatttaaggagtgttatgatattgttgacgctgttttcggctttagtgggatgcgttgcttgcctgtgtacatttttgtttgggtgaattgattaaccttttaagtgttaaactttttgccgcccgcgctgttagagcatatccgacatgaaaagcaacatactccggaatgacgcaatactactgcctaacccgtattctagatctgtacttttatatgcaagccactctcca

SEQ ID NO: 35615 - DNA, 825 bp, Muscodor strobelii
  misc_feature: SGI cDNA ID NO. 572337
  misc_feature: Elevated expression when VOC is produced
  misc_feature: Encodes the peptide sequence at SEQ ID NO 35616
atgcatcccacacccacctaccaacataagccgcccagtatggacagttatcgcccactggagtctgaatcgcaacgagaagcatccgagaaactgttgtccggcttcagctcacagacggatttcagcgaacatgtcgaatggagacgtgcaccaagaaggcagtggtgctcgcgacgcattattgcacttcccgggttccttgccttcttagtcatctattctctagcattggtatctcttgtgaagcactcggtcggtctgaccgactccaatgcagctgagcagctcatctacacacctatcagagatgccattgtcaaagaaaagaaaaccatcgatgtctccgttcttcacggaaatcctttcaaaggaccaccgagcccggaactcgacgaggcatggagtcgactcctgatgaacgccaacgtacgcgtatccgcagatgatcttgagaaggcaggagtcgagtccattccgctaaatgatggttctggcatgtattatgcgatcttggatgtgtaccatcaattgcactgtctcaagtacatccgccactatatgtacaaggatatttacagcgatgctcagccatggaccccaactcacgtggatcactgcattgacagtattcggcagaatctgatgtgcaatgcggatatagctatgatgggattcaggtgggtgaatgatagtctcgagcccaagccaaactttcgaggccagcatgagtgtgtaaactgggagagaatcgaagaatgggcctctgagcggtcattcaacccagatgaccaggcgaacttgcgccacccgagcgctccatag

SEQ ID NO: 35616 - protein, 274 aa, Muscodor strobelii
  misc_feature: SGI Peptide ID NO. 572337
  misc_feature (52)..(272): NCBI GI: 145235509 Blast Desc: An03g05220 [Aspergillus niger] gi|134058088|emb|CAK49174.1| protein product [Aspergillus niger]
  misc_feature (97)..(255): NCBI GI: 242804865 Blast Desc: conserved [Talaromyces stipitatus ATCC 10500] gi|218717807|gb|EED17228.1| conserved [Talaromyces stipitatus ATCC 10500]
  misc_feature (86)..(271): NCBI GI: 212534390 Blast Desc: conserved [Penicillium marneffei ATCC 18224] gi|210069750|gb|EEA23840.1| conserved [Penicillium marneffei ATCC 18224]
  misc_feature (105)..(261): NCBI GI: 212534486 Blast Desc: conserved [Penicillium marneffei ATCC 18224] gi|210069798|gb|EEA23888.1| conserved [Penicillium marneffei ATCC 18224]
  misc_feature (105)..(261): NCBI GI: 242800331 Blast Desc: conserved [Talaromyces stipitatus ATCC 10500] gi|218716910|gb|EED16331.1| conserved [Talaromyces stipitatus ATCC 10500]
  misc_feature (105)..(261): NCBI GI: 242800321 Blast Desc: conserved [Talaromyces stipitatus ATCC 10500] gi|218716908|gb|EED16329.1| conserved [Talaromyces stipitatus ATCC 10500]
  misc_feature (105)..(261): NCBI GI: 242800326 Blast Desc: conserved [Talaromyces stipitatus ATCC 10500] gi|218716909|gb|EED16330.1| conserved [Talaromyces stipitatus ATCC 10500]
  misc_feature (53)..(271): NCBI GI: 28881151 Blast Desc: [Neurospora crassa]
  misc_feature (96)..(269): NCBI GI: 67900556 Blast Desc: AN7265.2 [Aspergillus nidulans FGSC A4] gi|40741946|gb|EAA61136.1| AN7265.2 [Aspergillus nidulans FGSC A4] gi|259483389|tpe|CBF78739.1| TPA: conserved [Aspergillus FGSC
  misc_feature (100)..(271): NCBI GI: 85079216 Blast Desc: NCU03374 [Neurospora crassa OR74A] gi|28917367|gb|EAA27073.1| [Neurospora crassa OR74A]
  misc_feature: Useful for introducing or modulating the production of volatile compounds
MHPTPTYQHKPPSMDSYRPLESESQREASEKLLSGFSSQTDFSEHVEWRRAPRRQWCSRRIIALPGFLAFLVIYSLALVSLVKHSVGLTDSNAAEQLIYTPIRDAIVKEKKTIDVSVLHGNPFKGPPSPELDEAWSRLLMNANVRVSADDLEKAGVESIPLNDGSGMYYAILDVYHQLHCLKYIRHYMYKDIYSDAQPWTPTHVDHCIDSIRQNLMCNADIAMMGFRWVNDSLEPKPNFRGQHECVNWERIEEWASERSFNPDDQANLRHPSAP

SEQ ID NO: 35617 - DNA, 2230 bp, Muscodor strobelii
  misc_feature: SGI EST ID NO. CUFF.84838.0
  misc_feature: Variant of the nucleotide sequence at SEQ ID NO 35615
tttgctttcttcacaattcttcccacactgcaacttgtacgcccactattgcaggatccggataattcccgcatgttctctatgccataagccttttgttgctttgtatgtaatgcatcaatgcactccacacctttataagagttgtaggcagacgtatatatgcatgcctttgtaggaccttatggctctaagtatttagttagatgagataatccccaagagttcatgccacacctatctcatccatctcatccatctcatcccatgcatcccacacccacctaccaacataagccgcccagtatggacagttatcgcccactggagtctgaatcgcaacgagaagcatccgagaaactgttgtccggcttcagctcacagacggatttcagcgaacatgtcgaatggagacgtgcaccaagaaggcagtggtgctcgcgacgcattattgcacttcccgggttccttgccttcttagtcatctattctctagcattggtatctcttgtgaagcactcggtcggtctgaccgactccaatgcagctgagcagctcatctacacacctatcagagatgccattgtcaaagaaaagaaaaccatcgatgtctccgttcttcacggaaatcctttcaaaggaccaccgagcccggaactcgacgaggcatggagtcgactcctgatgaacgccaacgtacgcgtatccgcagatgatcttgagaaggcaggagtcgagtccattccgctaaatgatggttctggcatgtattatgcgatcttggatgtgtaccatcaattgcactgtctcaagtacatccgccactatatgtacaaggatatttacagcgatgctcagccatggaccccaactcacgtggatcactgcattgacagtattcggcagaatctgatgtgcaatgcggatatagctatgatgggattcaggtgggtgaatgatagtctcgagcccaagccaaactttcgaggccagcatgagtgtgtaaactgggagagaatcgaagaatgggcctctgagcggtcattcaacccagatgaccaggcgaacttgcgccacccgagcgctccatagcaatgaatacttaggcacctgagttggacaacggtgaacagatgatgcattatattgcggcatgtgtttatctactgaagtggggcacaaaagcttatagtacctatacacaaaactacactgatcagataggcaggcgtagctagcattcccgatgataacgtaggaggtagcttggagatgtctgcacaagtgcggacagcccaacgcatgtcaattccacgtcactcaactcacccagaacctgttgttgatcaattcagccagggagatgctgagttcatttcaatttgacggtgtcgttgatttggggtggttgagttgagtgccccattgctctgcacatcggaagtccgaagatgtcagcaaaactaatagcctgtttgattgaacatgattgttgttgttttgcctgcaggcgttgatgtatgcgtcggcaacgaggtatgcagtcatcatttggccaaaagtgcttgcgtggactcggcagaccggcttttcatcggctatgatattggtgtcaagttaggtacttacaagttacggcgcaggatcgagaatgtacatatagataacctgggatcagctacggcggcacaggaccaacatcctgcggtgtcagggtgtgtcaataaggactgttggtattacgcatttgctaaaggggtgggtcctgtggggatgggtcgggctggccggggtaagagatgcggcacataccacgtgttgagcgcttggaagatgtcccaaatgcacgaatccttcggccccgtcccggcgctatttgggacggtgacaacagattgggatcccagcccagcgctgattcggtcgcggacacggctttcagcgtccgatcctggcatgcccagaggacgcatattggtgacaggggaggaccgccaccttgggaccaatcatttccgcgcgcctatggcgttcaaaggcccgggcagaactacaacctaacgcgagatatgaatgcaatgtgcggacgtacggagtactgcgtgcatgttccgccggatatttcagacttgtgtatcggtaattgctgggtacttacttaggtagttgttactgaaagagatccgaagccaagatcgctataggcgtgtgctggcatccttacacccac

SEQ ID NO: 35618 - DNA, 855 bp, Muscodor strobelii
  misc_feature: SGI cDNA ID NO. 572338
  misc_feature: Elevated expression when VOC is produced
  misc_feature: Encodes the peptide sequence at SEQ ID NO 35619
atgttttctactttccgcagctacaacaagctcaacatcgatgatgaggaggagcacctctccatgcagagcgcaacacaaagcccttcaatctgcgtgcattgcgcaagtcgtgctcggattcgacctcggactttgttcgtgggatatctcgggtggcttttgttacttgcactgtctatttttgtagtcttttcaaacatgaacctgagatctgtcgatatcaagcgtctgataaagcagacgagttcattttctcccattctagaagatttggatccggggcttcaagaattccgcttcaacggttccattcgctggccgtcgccatatcgaggacctccaagcagcgaagtcgatgctgcctggaatcgtatttcaattgtgcggccgctggacctcgatattccgaaggaggacttccatacaattggcgtcaactcagacacggcggcagaaaatgcccccgaacacggtggcgggtacttcatggtgccagagttcacacatcagcttcactgtgtgaacctccttcgcaaagcgtcatatttcaagtatgactattacaaaattcatgaccctgacttccgcgacaaggacgaaacatttaaggttcacatcgaccactgtgtcgaaatgctacgccagtttgtgatgtgccatgcagatgtcaccatcgtgaccgctcattggattgaacagcgcgataggccgtggcctgatttcaataccaagcatgtgtgcagggacttcgaaaaggttcttggttggacaaacagacattcaaagcccgtaggcactcctctgatcccactaaagccaaagggagccatggtaatgaattcgccgccgtga

SEQ ID NO: 35619 - protein, 284 aa, Muscodor strobelii
  misc_feature: SGI Peptide ID NO. 572338
  misc_feature (53)..(264): NCBI GI: 242783731 Blast Desc: conserved [Talaromyces stipitatus ATCC 10500] gi|218720392|gb|EED19811.1| conserved [Talaromyces stipitatus ATCC 10500]
  misc_feature (53)..(264): NCBI GI: 212527436 Blast Desc: conserved [Penicillium marneffei ATCC 18224] gi|210073273|gb|EEA27360.1| conserved [Penicillium marneffei ATCC 18224]
  misc_feature (100)..(262): NCBI GI: 242222427 Blast Desc: [Postia placenta Mad-698-R] gi|220723760|gb|EED77873.1| [Postia placenta Mad-698-R]
  misc_feature (53)..(264): NCBI GI: 242783736 Blast Desc: conserved [Talaromyces stipitatus ATCC 10500] gi|218720393|gb|EED19812.1| conserved [Talaromyces stipitatus ATCC 10500]
  misc_feature (15)..(262): NCBI GI: 240277353 Blast Desc: conserved [Ajellomyces capsulatus H143]
  misc_feature (99)..(269): NCBI GI: 242211044 Blast Desc: [Postia placenta Mad-698-R] gi|220729527|gb|EED83399.1| [Postia placenta Mad-698-R]
  misc_feature (55)..(257): NCBI GI: 242211074 Blast Desc: [Postia placenta Mad-698-R] gi|220729542|gb|EED83414.1| [Postia placenta Mad-698-R]
  misc_feature (55)..(257): NCBI GI: 242207340 Blast Desc: [Postia placenta Mad-698-R] gi|220731553|gb|EED85397.1| [Postia placenta Mad-698-R]
  misc_feature (73)..(284): NCBI GI: 212534390 Blast Desc: conserved [Penicillium marneffei ATCC 18224] gi|210069750|gb|EEA23840.1| conserved [Penicillium marneffei ATCC 18224]
  misc_feature (101)..(262): NCBI GI: 242214710 Blast Desc: [Postia placenta Mad-698-R] gi|220727755|gb|EED81665.1| [Postia placenta Mad-698-R]
  misc_feature: Useful for introducing or modulating the production of volatile compounds
MFSTFRSYNKLNIDDEEEHLSMQSATQSPSICVHCASRARIRPRTLFVGYLGWLLLLALSIFVVFSNMNLRSVDIKRLIKQTSSFSPILEDLDPGLQEFRFNGSIRWPSPYRGPPSSEVDAAWNRISIVRPLDLDIPKEDFHTIGVNSDTAAENAPEHGGGYFMVPEFTHQLHCVNLLRKASYFKYDYYKIHDPDFRDKDETFKVHIDHCVEMLRQFVMCHADVTIVTAHWIEQRDRPWPDFNTKHVCRDFEKVLGWTNRHSKPVGTPLIPLKPKGAMVMNSPP

SEQ ID NO: 35620 - DNA, 1717 bp, Muscodor strobelii
  misc_feature: SGI EST ID NO. CUFF.85016.2
  misc_feature: Variant of the nucleotide sequence at SEQ ID NO 35618
tgtgacttctcgatggattgtgctgagctttgtgactacatgatgctgtgccagaattctgcgcccctctccttagcgccaacggtcgtatgtaccgactttcttttcagttccttccctgttcgaaaacaaagtgtggctacctgaagcgttccagattgctgttgaaagctggcgtgaggcgggcactttgtatctctgccaatgacgcccctatcaacccgctcctttcagctcgataatcctacctcaaacaagtgttcatgcagatctaccatgtgcttgttgctgctgctcgtacactcaggcctacatctttcggattatgcttcagcacatcacagagcgtcaaaagtttctaccaacaggccccgggacttcgaactgacgggatacgtcgaccctccaattggaattcccagaaagcctctgtatcggtggctattcacccctgggggttgtcgttcagtatcaagtcctagtaacagttgttcttggaagagatctgattggaatcaacatctatcaaccttctcatttcattccgtttaccgccactgcttatacatctctgcttgtccttcactggcatgatgttttctactttccgcagctacaacaagctcaacatcgatgatgaggaggagcacctctccatgcagagcgcaacacaaagcccttcaatctgcgtgcattgcgcaagtcgtgctcggattcgacctcggactttgttcgtgggatatctcgggtggcttttgttacttgcactgtctatttttgtagtcttttcaaacatgaacctgagatctgtcgatatcaagcgtctgataaagcagacgagttcattttctcccattctagaagatttggatccggggcttcaagaattccgcttcaacggttccattcgctggccgtcgccatatcgaggacctccaagcagcgaagtcgatgctgcctggaatcgtatttcaattgtgcggccgctggacctcgatattccgaaggaggacttccatacaattggcgtcaactcagacacggcggcagaaaatgcccccgaacacggtggcgggtacttcatggtgccagagttcacacatcagcttcactgtgtgaacctccttcgcaaagcgtcatatttcaagtatgactattacaaaattcatgaccctgacttccgcgacaaggacgaaacatttaaggttcacatcggtaagatttggtcgtattcgcgcacggttgcacggtatagaattgctgacagcttcgaaagaccactgtgtcgaaatgctacgccagtttgtgatgtgccatgcagatgtcaccatcgtgaccgctcatgtaagttttttgagagcagcagtcaaaagtgggactggatgctgacggcttcacagtggattgaacagcgcgataggccgtggcctgatttcaataccaagcatgtgtgcagggacttcgaaaaggttcttggttggacaaacagacattcaaagcccgtaggcactcctctgatcccactaaagccaaagggagccatggtaatgaattcgccgccgtgaagaatattggtcgagcagaaatgtggttggaactgtcagaaataaggttttgtgtctgtcctctcttgaggcaagtgtctgtgtcgggattatatatgtacacgagggtggcaaaacggattactaatctatcttttaaagccttttatata

SEQ ID NO: 35621 - DNA, 1188 bp, Muscodor strobelii
  misc_feature: SGI cDNA ID NO. 572339
  misc_feature: Encodes the peptide sequence at SEQ ID NO 35622
atgcttcctcttagctcagatgaatcattccacttcgagatccttcgcatactcgctcattccgcctatgatggagctgacgtaggcgaggttctacaaacggcggaggaaattgaagccggcgacttcgagtcatactatcgggctttcaacaaacgagctgaacgcgtactgtccataagctccaagttcacacatccggtagcaattcgagatgccaatttccgcgcagccacatattaccgtgcagcagacttcttcctgcacgggaattgggaagatccccgagtttctgatctttggaagaagcaggcagattgcttcgacaaggcaatggcgttgcttgagataccggggtatcggaagatgctccctgctgacgggttcgaggttcccataatcttcttttctgccagcatggatgacagcatcaagcgtcccacagttatcttgggaaatggcttcgatgggtcaatggaggaactgtatcacttacatggaggggcagcactcgaatggggctacaacgtcgtgatttacgacggtccaggacagcccaaagtgtgccgtgaacagggtcttggcttcactcacgagtggcagaaagtagtatctcccgtccttgactatcttgagacactccctagcgtcgatatgcgatgcgtcgccctaatgggatatagtatgtccggtctcttagccgctcgggcgactgctttcgaccatcgtgtcaaggcgttatttgtgatagatgggctttacgactttaccgattccaatgtttacaaaaatgcgttgagcgcgaattttgacagcggagacgccgaggctactcaagcgaagattcatgatccaagtacgccgacgggtatacgctgggtgctgtcgcatgggctgtgggctttcaaggcaaagtcccgaaatgagtttcgtgacaaatcaaagcactttaccttgcgcggactcgaggataagatccagtgtccagtgtttgtcggcgatccagaacatgacatgtttttccaaggtcagcctcagagggtaaaggatgcgctgggtgatagggccacgcttgtcaaattcgcatttgaggatggcgccggctatcattgtcactgcggcgcacaaagatatgtaaatgctgttatgtgggaatggtttgaggagaaggttgtcagccaggtttga

SEQ ID NO: 35622 - protein, 395 aa, Muscodor strobelii
  misc_feature: SGI Peptide ID NO. 572339
  misc_feature (2)..(389): NCBI GI: 238839584 Blast Desc: 2,6-dihydropseudooxynicotine hydrolase [Microsporum canis CBS 113480]
  misc_feature (1)..(389): NCBI GI: 46117322 Blast Desc: FG04503.1 [Gibberella zeae PH-1]
  misc_feature (1)..(391): NCBI GI: 256729494 Blast Desc: NECHADRAFT_47388 [Nectria haematococca mpVI 77-13-4]
  misc_feature (1)..(391): NCBI GI: 116206186 Blast Desc: CHGG_02386 [Chaetomium globosum CBS 148.51] gi|88182983|gb|EAQ90451.1| CHGG_02386 [Chaetomium globosum CBS 148.51]
  misc_feature (1)..(389): NCBI GI: 256728701 Blast Desc: [Nectria haematococca mpVI 77-13-4]
  misc_feature (2)..(391): NCBI GI: 39934012 Blast Desc: RPA0935 [Rhodopseudomonas palustris CGA009] gi|39647859|emb|CAE26379.1| conserved [Rhodopseudomonas palustris CGA009]
  misc_feature (2)..(391): NCBI GI: 192289432 Blast Desc: dipeptidyl aminopeptidase/acylaminoacyl-peptidase related protein [Rhodopseudomonas palustris TIE-1] gi|192283181|gb|ACE99561.1| dipeptidyl related protein palustris
  misc_feature (1)..(393): NCBI GI: 238504436 Blast Desc: conserved [Aspergillus flavus NRRL3357] gi|220690920|gb|EED47269.1| conserved [Aspergillus flavus NRRL3357]
  misc_feature (1)..(389): NCBI GI: 256671745 Blast Desc: StAA4_31566 [Streptomyces sp. AA4]
  misc_feature (1)..(391): NCBI GI: 169764337 Blast Desc: [Aspergillus oryzae RIB40] gi|83764494|dbj|BAE54638.1| protein product [Aspergillus oryzae]
MLPLSSDESFHFEILRILAHSAYDGADVGEVLQTAEEIEAGDFESYYRAFNKRAERVLSISSKFTHPVAIRDANFRAATYYRAADFFLHGNWEDPRVSDLWKKQADCFDKAMALLEIPGYRKMLPADGFEVPIIFFSASMDDSIKRPTVILGNGFDGSMEELYHLHGGAALEWGYNVVIYDGPGQPKVCREQGLGFTHEWQKVVSPVLDYLETLPSVDMRCVALMGYSMSGLLAARATAFDHRVKALFVIDGLYDFTDSNVYKNALSANFDSGDAEATQAKIHDPSTPTGIRWVLSHGLWAFKAKSRNEFRDKSKHFTLRGLEDKIQCPVFVGDPEHDMFFQGQPQRVKDALGDRATLVKFAFEDGAGYHCHCGAQRYVNAVMWEWFEEKVVSQV

SEQ ID NO: 35623 - DNA, 1816 bp, Muscodor strobelii
  misc_feature: SGI EST ID NO. CUFF.84841.0
  misc_feature: Variant of the nucleotide sequence at SEQ ID NO 35621
cgggaactgttgaggggaaggaactctgaataagcatcgcatcgaatcttttcaccactttgtcagccgaagctggaatgcgcttgatcctcgatgattcttcaacttctcatcactttgcttgatccaacacacactcgaacatctactgccggcgttatttcatcatgcttcctcttagctcagatgaatcattccacttcgagatccttcgcatactcgctcattccgcctatgatggagctgacgtaggcgaggttctacaaacggcggaggaaattgaagccggcgacttcgagtcatactatcgggctttcaacaaacgagctgaacgcgtactgtccataagctccaagttcacacatccggtagcaattcgagatgccaatttccgcgcagccacatattaccgtgcagcagacttcttcctgcacgggaattgggaagatccccgagtttctgatctttggaagaagcaggcagattgcttcgacaaggcaatggcgttgcttgagataccggggtatcggaagatgctccctgctgacgggttcgaggttcccataatcttcttttctgccagcatggatgacagcatcaagcgtcccacagttatcttgggaaatggcttcgatgggtcaatggaggaactgtatcacttacatggaggggcagcactcgaatggggctacaacgtcgtgatttacgacggtccaggacagcccaaagtgtgccgtgaacagggtcttggcttcactcacgagtggcagaaagtagtatctcccgtccttgactatcttgagacactccctagcgtcgatatgcgatgcgtcgccctaatgggatatagtatgtccggtctcttagccgctcgggcgactgctttcgaccatcgtgtcaaggcgttatttgtgatagatgggctttacgactttaccgattccaatgtttacaaaaatgcgttgagcgcgaattttgacagcggagacgccgaggctactcaagcgaagattcatgatccaagtacgccgacgggtatacgctgggtgctgtcgcatgggctgtgggctttcaaggcaaagtcccgaaatgagtttcgtgacaaatcaaagcactttaccttgcgcggactcgaggataagatccagtgtccagtgtttgtcggcgatccagaacatgacatgtttttccaaggtcagcctcagagggtaaaggatgcgctgggtgatagggccacgcttgtcaaattcgcatttgaggatggcgccggctatcattgtcactgcggcgcacaaagatatgtaaatgctgttatgtgggaatggtttgaggagaaggttgtcagccaggtttgatatcaccagactcgatccaatgcataaggattcgttatgatactccgatactgccttcaattcgagccatcgaataattccgtacgtacaattgtatgtacaatgagtgaccgtgaggttttcaaaatcttccgacaatgatacgtctatgactctagtgctcgcttccgttttatgcctccatttccgttatcgcgtcgatggaaccaggcgtgagtttgacatgttccaagtgcctcgacactgccaccacatcagcgatagtaagatcatttccatgaatagccagtttcgatccatccgatgatagagggtcttgccgttgtgccgggactagatctgtgaatatccgaggcgccgacgccatggtataccaaaagagagcgtatgattaaaatggtgtttaaaaactgcgcccggtgagtatataatgacgctgcaagaaaacgaaaacatgtgaa

SEQ ID NO: 35624 - DNA, 591 bp, Muscodor strobelii
  misc_feature: SGI cDNA ID NO. 572340
  misc_feature: Encodes the peptide sequence at SEQ ID NO 35625
atggaaggaaacaccaactccaccatcccgggagacatgaggtcccttgagcaagctgactatatctacttggatggcttaatcgatagtccaactgggccgaacctcttcccaagattactcacagcggtatccattatagtgagagcatctaacaccgactttgactgttcctatcttgctcgacagagagaccagggcgcgatagcagaactccaatgcagcaatgggaataacaagacaggaataaacaacgccacaaactcgggcggcatgatatcagatacggattctcactccacgtcactttccaccggagcaaagtcgggaattggcgtggctgctggagtgttggggtttgccctgataggtgccgtgatctggctctggcgtcggaaagccagcggtacattcaccgctcaagcacctgttatagtacatagtgacagcactccgacaacacaggagattcgaaccacagagccaagcgagatgttcgctgatcggtctaccaacgagatgcttacagagcaatacaacagacatgaggtgggcgcagcggctttaccggccgagatgatggctggctaa

SEQ ID NO: 35625 - protein, 196 aa, Muscodor strobelii
  misc_feature: SGI Peptide ID NO. 572340
MEGNTNSTIPGDMRSLEQADYIYLDGLIDSPTGPNLFPRLLTAVSIIVRASNTDFDCSYLARQRDQGAIAELQCSNGNNKTGINNATNSGGMISDTDSHSTSLSTGAKSGIGVAAGVLGFALIGAVIWLWRRKASGTFTAQAPVIVHSDSTPTTQEIRTTEPSEMFADRSTNEMLTEQYNRHEVGAAALPAEMMAG

SEQ ID NO: 35626 - DNA, 915 bp, Muscodor strobelii
  misc_feature: SGI cDNA ID NO. 572341
  misc_feature: Encodes the peptide sequence at SEQ ID NO 35627
atggctgctgactttgagtcctcctcgggtttcgtgccagtcccggaaaagcacgccttcctgctcgaagcggctgcgtcagccaccagagtcgaccccgtcattgtcggcatctacgggattcccggctctggcaagacattcgtactgcgtcaactggagcaagaactcggtctggagcatttcgcgttctacgaagggtcccaagtaattgcctccctggcccctggcggactggacgggttccagaagctggcagagcgagacaagatgttgtggcgccaacgcgctatcgacgcaattcgagaggattgtctcgacaccggaaagctaggcgttgtcactgggcatttcatgttctgggagcaaggggaaccaacgggacagcctgtctacactccgcaggatttgagcacgtacacacatattctttacttgcatcctgcggcggagaccatttcgcaacagcgttataatgacgtccagagagctcgtccattcgcatcctccagtcatctacgcgagtggcaggttgccgaagagacccagctgcgtggtttgtgcctcaatcatggcattctgtttcattgcctgtccagtcaggctacattggtgaccagggcatcggcattgctgcgtgattggcggcatcacacggaggcctacaatctatcccgcgcggaacacaggttggacgaggttctacctgcccatgggaccctgcggacgatattggtcctcgacgccgataagacgctggcggccgaagatacgggtgagctgttttgggactccgttacctacggcaagagcagcgcatctcatctgcgaactcttttcggtagcccgcttggatactcgtacacggccttccgccaatctgttcggcattgcctggctctagtactttgttga

SEQ ID NO: 35627 - protein, 304 aa, Muscodor strobelii
  misc_feature: SGI Peptide ID NO. 572341
  misc_feature (33)..(294): NCBI GI: 256721416 Blast Desc: NECHADRAFT_98111 [Nectria haematococca mpVI 77-13-4]
  misc_feature (29)..(295): NCBI GI: 116200355 Blast Desc: CHGG_08333 [Chaetomium globosum CBS 148.51] gi|88179612|gb|EAQ87080.1| CHGG_08333 [Chaetomium globosum CBS 148.51]
  misc_feature (33)..(294): NCBI GI: 46115638 Blast Desc: FG03661.1 [Gibberella zeae PH-1]
  misc_feature (21)..(295): NCBI GI: 242795774 Blast Desc: conserved [Talaromyces stipitatus ATCC 10500] gi|218719249|gb|EED18669.1| conserved [Talaromyces stipitatus ATCC 10500]
  misc_feature (33)..(295): NCBI GI: 67900602 Blast Desc: AN7288.2 [Aspergillus nidulans FGSC A4] gi|40742149|gb|EAA61339.1| AN7288.2 [Aspergillus nidulans FGSC A4] gi|259483362|tpe|CBF78690.1| TPA: conserved [Aspergillus FGSC
  misc_feature (33)..(294): NCBI GI: 256720873 Blast Desc: NECHADRAFT_96668 [Nectria haematococca mpVI 77-13-4]
  misc_feature (33)..(294): NCBI GI: 255930883 Blast Desc: Pc12g00980 [Penicillium chrysogenum Wisconsin 54-1255] gi|211581617|emb|CAP79725.1| Pc12g00980 [Penicillium chrysogenum Wisconsin 54-1255]
  misc_feature (33)..(294): NCBI GI: 171681210 Blast Desc: protein product [Podospora anserina] gi|170940563|emb|CAP65791.1| protein product [Podospora anserina]
  misc_feature (33)..(294): NCBI GI: 189201707 Blast Desc: conserved [Pyrenophora tritici-repentis Pt-1C-BFP] gi|187984289|gb|EDU49777.1| conserved [Pyrenophora tritici-repentis Pt-1C-BFP]
  misc_feature (33)..(294): NCBI GI: 189211462 Blast Desc: conserved [Pyrenophora tritici-repentis Pt-1C-BFP] gi|187978154|gb|EDU44780.1| conserved [Pyrenophora tritici-repentis Pt-1C-BFP]
MAADFESSSGFVPVPEKHAFLLEAAASATRVDPVIVGIYGIPGSGKTFVLRQLEQELGLEHFAFYEGSQVIASLAPGGLDGFQKLAERDKMLWRQRAIDAIREDCLDTGKLGVVTGHFMFWEQGEPTGQPVYTPQDLSTYTHILYLHPAAETISQQRYNDVQRARPFASSSHLREWQVAEETQLRGLCLNHGILFHCLSSQATLVTRASALLRDWRHHTEAYNLSRAEHRLDEVLPAHGTLRTILVLDADKTLAAEDTGELFWDSVTYGKSSASHLRTLFGSPLGYSYTAFRQSVRHCLALVLC

SEQ ID NO: 35628 - DNA, 1624 bp, Muscodor strobelii
  misc_feature: SGI EST ID NO. CUFF.84862.0
  misc_feature: Variant of the nucleotide sequence at SEQ ID NO 35626
ccacaatgggcaatctgggccatgtcatcatctcaaagcgagttggtttgtatcatgtcctgggtgtgatcgtgttgagatagggaacgcctctgccaaagaccaccgctatggtcaaaacctggttaggccccctgtcatcccatgaattaagtcgaagcgttcgagcctcgacttcattgacaaacacccaaggtcgacgagatcgatcgtcgacagcgtcgcctgtttgctcgtctttgcccgttgtcgacatcgctccccctgatctcatatattaccacgaatcagcatgcatattgttgttggcagaccgctactgtggctttccgcgctctttctctgtgagctgccgtgtgatgacgtttcaaagcaatcggcccaacacattttgcagcccactgcacgtctacgagactgacaaaacagccgatacgggaccaaaggctccaacgcagctaaatactataaggatcatataatcctcagagctgactttgatactacgtcactacagtcacactgactatctattcattacgccatacgcttccttgcaacgcaatatggctgctgactttgagtcctcctcgggtttcgtgccagtcccggaaaagcacgccttcctgctcgaagcggctgcgtcagccaccagagtcgaccccgtcattgtcggcatctacgggattcccggctctggcaagacattcgtactgcgtcaactggagcaagaactcggtctggagcatttcgcgttctacgaagggtcccaagtaattgcctccctggcccctggcggactggacgggttccagaagctggcagagcgagacaagatgttgtggcgccaacgcgctatcgacgcaattcgagaggattgtctcgacaccggaaagctaggcgttgtcactgggcatttcatgttctgggagcaaggggaaccaacgggacagcctgtctacactccgcaggatttgagcacgtacacacatattctttacttgcatcctgcggcggagaccatttcgcaacagcgttataatgacgtccagagagctcgtccattcgcatcctccagtcatctacgcgagtggcaggttgccgaagagacccagctgcgtggtttgtgcctcaatcatggcattctgtttcattgcctgtccagtcaggctacattggtgaccagggcatcggcattgctgcgtgattggcggcatcacacggaggcctacaatctatcccgcgcggaacacaggttggacgaggttctacctgcccatgggaccctgcggacgatattggtcctcgacgccgataagacgctggcggccgaagatacgggtgagctgttttgggactccgttacctacggcaagagcagcgcatctcatctgcgaactcttttcggtagcccgcttggatactcgtacacggccttccgccaatctgttcggcattgcctggctctagtactttgttgagccctaatcacgcagcatcgacatctttagacatgctgtaagatgaaaaagaggtttgcgttgttgccaatactagtctcgagcaacgagtttccaaagaattcggcgtggcaacttcttgccaagtcaaagacagaagcctg

SEQ ID NO: 35629 - DNA, 1140 bp, Muscodor strobelii
  misc_feature: SGI cDNA ID NO. 572342
  misc_feature: Encodes the peptide sequence at SEQ ID NO 35630
atgacatccacggcgttcaaggacctcgaaagggttgacaagctcgacacctcagaccagtggataggatggcgaagagaaatgaaacacagactgggaactcaagggtttggtcgatttctccccggtggggcacaagccacgaccccaaccgaaagagaaggcgaggccgctgacgtatttgcggcccgcttggacaaatggcaagaaaaggctgacatggcctattctgctatcaaggacaccatctctcacaatgctcaacagcgcgtcgaagggcaacgtccagagcctgctactcccgccgaactctgggactggctcgaggaaacatacaaacccaagggcaaggctcagtttgcccaatactttcgacagtgggaagaagccactctggaatcctctggcggggtgacgcagtttgccgctacactacgacaaattcaggccgacatgactgccctacacgcaggatcagcctggccacaatctcacctcgttcgaaagtttctcaccggattaggacctgaatttgacttgtttatcacaacctgggaaatagggattaccgagattcctaccttgagagcagatggcacggtcgaggtcgaggccgttaccccggaacaagcaactgatgcggcggttcagttccaaagtagtcaaaaagaacggacacatcaggctgctctctttgccggacgagcccctggcggccaatctaactcgagggcctccggaaccaataggataaatctcaagcgcaagacgtgccccgggtgcggactacttcatccgccgccctgctataaaactcaccctgaacttaaacctgaagggtgggacgaggagcagcgacgcaagagagctcattatcatggggatcgtctcaggtctttacagggaaggtcgggtgcaaggggggactcggcaaacttcgctgccaatgcaaccaaaccatcggctaatgatcctagtgaggacaacaacagccacaaccacgtactaattgcctacagcatgatagcatccaatcaagggcaagctgtcagtcacagaccagacctcttgtcgtcaatgttcaacggatttaagaagtctcagcctagtatcccacaacaacaaaacaaccacctttaa

SEQ ID NO: 35630 - protein, 379 aa, Muscodor strobelii
  misc_feature: SGI Peptide ID NO. 572342
  misc_feature (8)..(217): NCBI GI: 256723741 Blast Desc: NECHADRAFT_86718 [Nectria haematococca mpVI 77-13-4]
  misc_feature (12)..(289): NCBI GI: 154272882 Blast Desc: HCAG_07602 [Ajellomyces capsulatus NAm1] gi|150415805|gb|EDN11149.1| HCAG_07602 [Ajellomyces capsulatus NAm1]
  misc_feature (86)..(281): NCBI GI: 85095697 Blast Desc: NCU04689 [Neurospora crassa OR74A] gi|28921600|gb|EAA30891.1| [Neurospora crassa OR74A]
  misc_feature (12)..(301): NCBI GI: 154287586 Blast Desc: HCAG_01635 [Ajellomyces capsulatus NAm1] gi|150408229|gb|EDN03770.1| HCAG_01635 [Ajellomyces capsulatus NAm1]
  misc_feature (12)..(289): NCBI GI: 255952148 Blast Desc: Pc24g01940 [Penicillium chrysogenum Wisconsin 54-1255] gi|211904462|emb|CAP87102.1| Pc24g01940 [Penicillium chrysogenum Wisconsin 54-1255]
  misc_feature (67)..(329): NCBI GI: 242825335 Blast Desc: conserved [Talaromyces stipitatus ATCC 10500] gi|218712237|gb|EED11663.1| conserved [Talaromyces stipitatus ATCC 10500]
  misc_feature (12)..(182): NCBI GI: 255951416 Blast Desc: Pc22g26000 [Penicillium chrysogenum Wisconsin 54-1255] gi|211593492|emb|CAP99888.1| Pc22g26000 [Penicillium chrysogenum Wisconsin 54-1255]
  misc_feature (64)..(182): NCBI GI: 255952146 Blast Desc: Pc24g01930 [Penicillium chrysogenum Wisconsin 54-1255] gi|211904461|emb|CAP87101.1| Pc24g01930 [Penicillium chrysogenum Wisconsin 54-1255]
  misc_feature (52)..(182): NCBI GI: 255952448 Blast Desc: Pc17g00110 [Penicillium chrysogenum Wisconsin 54-1255] gi|211586480|emb|CAP79298.1| Pc17g00110 [Penicillium chrysogenum Wisconsin 54-1255]
  misc_feature (64)..(182): NCBI GI: 255943478 Blast Desc: Pc19g00090 [Penicillium chrysogenum Wisconsin 54-1255] gi|211587241|emb|CAP79425.1| Pc19g00090 [Penicillium chrysogenum Wisconsin 54-1255]
MTSTAFKDLERVDKLDTSDQWIGWRREMKHRLGTQGFGRFLPGGAQATTPTEREGEAADVFAARLDKWQEKADMAYSAIKDTISHNAQQRVEGQRPEPATPAELWDWLEETYKPKGKAQFAQYFRQWEEATLESSGGVTQFAATLRQIQADMTALHAGSAWPQSHLVRKFLTGLGPEFDLFITTWEIGITEIPTLRADGTVEVEAVTPEQATDAAVQFQSSQKERTHQAALFAGRAPGGQSNSRASGTNRINLKRKTCPGCGLLHPPPCYKTHPELKPEGWDEEQRRKRAHYHGDRLRSLQGRSGARGDSANFAANATKPSANDPSEDNNSHNHVLIAYSMIASNQGQAVSHRPDLLSSMFNGFKKSQPSIPQQQNNHL

SEQ ID NO: 35631 - DNA, 706 bp, Muscodor strobelii
  misc_feature: SGI EST ID NO. CUFF.84868.0
  misc_feature: Variant of the nucleotide sequence at SEQ ID NO 35629
ccggattcgaatggaaacgttgctgattgaaatagttaaatacttgctactcctctcagtcgagaggcagaaccaaattgcctatcaaaagcttcatcttaccttagtgttcagacttcctccctgaacaaacatcagcaacctctccaacagctgcacaatctgcttctttcttgctagacccatctccctaatacttgaattcattcgccctgagccagacacaatgacatccacggcgttcaaggacctcgaaagggttgacaagctcgacacctcagaccagtggataggatggcgaagagaaatgaaacacagactgggaactcaagggtttggtcgatttctccccggtggggcacaagccacgaccccaaccgaaagagaaggcgaggccgctgacgtatttgcggcccgcttggacaaatggcaagaaaaggctgacatggcctattctgctatcaaggacaccatctctcacaatgctcaacagcgcgtcgaagggcaacgtccagagcctgctactcccgccgaactctgggactggctcgaggaaacatacaaacccaagggcaaggctcagtttgcccaatactttcgacagtgggaagaagccactctggaatcctctggcggggtgacgcagtttgccgctacactacgacaaattcaggccgacatgactgccctacacgcaggatcagcc

SEQ ID NO: 35632 - DNA, 564 bp, Muscodor strobelii
  misc_feature: SGI cDNA ID NO. 572344
  misc_feature: Encodes the peptide sequence at SEQ ID NO 35633
atgtctgtcgtatctcttttgggggtcaacatcctcaacaaccccgccaagttcaccgacaactatgagcttgagatcacctttgagtgtctggagcagctggagaaagatctcgagtggaagttgacctacgtcggctcggccacctccgaccagtacgaccaggagctcgactcgctcctcgtaggccccatccccgtcggcgtcaacaagttcgtgttcgaagccgacgcccccaagacgagccgcattcccgacgcagacattctgggtgttactgtcatcctgttgaactgctcctacgacggccgcgagtttgtccgcgttggctactatgtcaacaacgagtacgactccgacgagctgaacgcagacccccccgccaagcccatcatcgagaacatccgccgcaatgtcctcgccgagaagccccgagttacgcgctttgctatcaagtggtacgtacacctcccatctcccacctcacacatcacatatcacgaagccatgatcacgcgcgctcgtatgcatgcactagtcaagcaagcactaacacgtttctga

SEQ ID NO: 35633 - protein, 187 aa, Muscodor strobelii
  misc_feature: SGI Peptide ID NO. 572344
  misc_feature (1)..(155): Pfam Id: PF04729 Pfam Desc: Anti-silencing protein, ASF1-like
  misc_feature (1)..(163): NCBI GI: 46105444 Blast Desc: FG00350.1 [Gibberella zeae PH-1] gi|121818659|sp|Q4IR08.1|ASF1_GIBZE RecName: Full=Histone chaperone ASF1; AltName: Full=Anti-silencing function protein 1
  misc_feature (1)..(161): NCBI GI: 261355004 Blast Desc: histone chaperone ASF1 [Verticillium albo-atrum VaMs.102]
  misc_feature (1)..(160): NCBI GI: 256735329 Blast Desc: histone chaperone [Nectria haematococca mpVI 77-13-4]
  misc_feature (1)..(161): NCBI GI: 156037929 Blast Desc: SS1G_11720 [Sclerotinia sclerotiorum 1980] gi|154697457|gb|EDN97195.1| SS1G_11720 [Sclerotinia sclerotiorum 1980]
  misc_feature (1)..(163): NCBI GI: 212527606 Blast Desc: histone chaperone ASF1, [Penicillium marneffei ATCC 18224] gi|210073358|gb|EEA27445.1| histone chaperone ASF1, [Penicillium marneffei ATCC 18224]
  misc_feature (1)..(163): NCBI GI: 242784214 Blast Desc: histone chaperone ASF1, [Talaromyces stipitatus ATCC 10500] gi|218720489|gb|EED19908.1| histone chaperone ASF1, [Talaromyces stipitatus ATCC 10500]
  misc_feature (1)..(163): NCBI GI: 145558853 Blast Desc: ASF1_EMENI RecName: Full=Histone chaperone asf1; AltName: Full=Anti-silencing function protein 1 gi|259482243|tpe|CBF76538.1| TPA: Histone chaperone asf1 function
  misc_feature (1)..(163): NCBI GI: 116203597 Blast Desc: CHGG_09682 [Chaetomium globosum CBS 148.51] gi|121777705|sp|Q2GQS2.1|ASF1_CHAGB RecName: Full=Histone chaperone ASF1; AltName: Full=Anti-silencing function protein 1
  misc_feature (1)..(163): NCBI GI: 225681762 Blast Desc: histone chaperone asf1 [Paracoccidioides brasiliensis Pb03] gi|226288917|gb|EEH44429.1| histone chaperone asf1 [Paracoccidioides brasiliensis Pb18]
  misc_feature (1)..(153): NCBI GI: 255936647 Blast Desc: Pc13g09260 [Penicillium chrysogenum Wisconsin 54-1255] gi|211583970|emb|CAP91995.1| Pc13g09260 [Penicillium chrysogenum Wisconsin 54-1255]
MSVVSLLGVNILNNPAKFTDNYELEITFECLEQLEKDLEWKLTYVGSATSDQYDQELDSLLVGPIPVGVNKFVFEADAPKTSRIPDADILGVTVILLNCSYDGREFVRVGYYVNNEYDSDELNADPPAKPIIENIRRNVLAEKPRVTRFAIKWYVHLPSPTSHITYHEAMITRARMHALVKQALTRF

SEQ ID NO: 35634 - DNA, 826 bp, Muscodor strobelii
  misc_feature: SGI EST ID NO. CUFF.84883.0
  misc_feature: Variant of the nucleotide sequence at SEQ ID NO 35632
cgcgttgggcgcgtcccgctggccaacccgccaagcactttcaaacatcggcgcgggcagtcgcaacagaatcgcaacaaacaaacaacaacaaacttcttcaaccgcaacgctttcagagtacatctggggctcgccgttgaactctgctctgccaatctttgtcgccgcaaccatcctattttctcttgcgacgaccatcttttctgctgtgtcatacaattccccgcgctcgcgatctgctgtccccgtctctctgtccacgatgtctgtcgtatctcttttgggggtcaacatcctcaacaaccccgccaagttcaccgacaactatgagcttgagatcacctttgagtgtctggagcagctggagaaagatctcgagtggaagttgacctacgtcggctcggccacctccgaccagtacgaccaggagctcgactcgctcctcgtaggccccatccccgtcggcgtcaacaagttcgtgttcgaagccgacgcccccaagacgagccgcattcccgacgcagacattctgggtgttactgtcatcctgttgaactgctcctacgacggccgcgagtttgtccgcgttggctactatgtcaacaacgagtacgactccgacgagctgaacgcagacccccccgccaagcccatcatcgagaacatccgccgcaatgtcctcgccgagaagccccgagttacgcgctttgctatcaagtggtacgtacacctcccatctcccacctcacacatcacatatcacgaagccatgatcacgcgcgctcgtatgcatgcactagtcaagcaagcactaacacgtttc

SEQ ID NO: 35635 - DNA, 720 bp, Muscodor strobelii
  misc_feature: SGI cDNA ID NO. 572345
  misc_feature: Encodes the peptide sequence at SEQ ID NO 35636
atgtcattgaccactgcctcgaagctcacaaaaactatccacaaggacacctacccagcaatatcccctctgcggcctgaactatcgcaggctggaaaaacagttttcattaccgggggagccacaggaataggcttcgcaactgcgagagcttttgcccaagctggcgcagcaaccattatcattgcatctcgccgcgaatcggttgttcaagagtctgccgccaagctacgcgccgagttcgagggtacgaacctgaaagtcgtggggttgatttgtgacgtcacgagcattgatgacaccgaaaagctttgggctgggttggaaagagacggaattgtggtcgatgtgcttattctctgtgctggacaaccgagccaggatggatcgatattgaagatcggcatcaatgaggtgtgggacaactttctgattaatgtgcgaggtcatgtacataatacacagaaattttacttgcaagctggccgcaacgcttcacagcatttgacagtcgtcaatgtatcgactatttcggcccatgaatggggatttacttacgatctctatggcatgaccaagaactcaggtgtcctagcgatgcaacaagttgcgaagtccgtcagcccagaggacatgcaggttatcagctatcaccccgggctcgtccgcacagctgtgatggaatctgtgggtgatcttgcttgggataaaggtacgtaa

SEQ ID NO: 35636 - protein, 239 aa, Muscodor strobelii
  misc_feature: SGI Peptide ID NO. 572345
  misc_feature (33)..(208): Pfam Id: PF00106 Pfam Desc: short chain dehydrogenase
  misc_feature (33)..(152): Pfam Id: PF00106 Pfam Desc: short chain dehydrogenase
  misc_feature (34)..(112): Pfam Id: PF08659 Pfam Desc: KR domain
  misc_feature (1)..(236): NCBI GI: 238495098 Blast Desc: short-chain dehydrogenase, [Aspergillus flavus NRRL3357] gi|220695435|gb|EED51778.1| short-chain dehydrogenase, [Aspergillus flavus NRRL3357]
  misc_feature (1)..(236): NCBI GI: 119473989 Blast Desc: NADP(+)-dependent dehydrogenase, [Neosartorya fischeri NRRL 181] gi|119407023|gb|EAW16973.1| NADP(+)-dependent dehydrogenase, [Neosartorya fischeri NRRL 181]
  misc_feature (2)..(238): NCBI GI: 116191465 Blast Desc: CHGG_05450 [Chaetomium globosum CBS 148.51] gi|88181363|gb|EAQ88831.1| CHGG_05450 [Chaetomium globosum CBS 148.51]
  misc_feature (1)..(236): NCBI GI: 46139675 Blast Desc: FG11352.1 [Gibberella zeae PH-1]
  misc_feature (6)..(236): NCBI GI: 256726987 Blast Desc: NECHADRAFT_91096 [Nectria haematococca mpVI 77-13-4]
  misc_feature (6)..(236): NCBI GI: 156056454 Blast Desc: SS1G_05581 [Sclerotinia sclerotiorum 1980] gi|154703363|gb|EDO03102.1| SS1G_05581 [Sclerotinia sclerotiorum 1980]
  misc_feature (14)..(231): NCBI GI: 256732342 Blast Desc: NECHADRAFT_41583 [Nectria haematococca mpVI 77-13-4]
  misc_feature (1)..(231): NCBI GI: 256723821 Blast Desc: NECHADRAFT_92278 [Nectria haematococca mpVI 77-13-4]
  misc_feature (1)..(222): NCBI GI: 171680962 Blast Desc: protein product [Podospora anserina] gi|170940439|emb|CAP65666.1| protein product [Podospora anserina]
  misc_feature (11)..(236): NCBI GI: 145607964 Blast Desc: MGG_09785 [Magnaporthe grisea 70-15] gi|145015432|gb|EDJ99968.1| MGG_09785 [Magnaporthe grisea 70-15]
  misc_feature (64)..(225): SWISSPROT Homolog: EC 1.1.1.184 Carbonyl reductase (NADPH)
MSLTTASKLTKTIHKDTYPAISPLRPELSQAGKTVFITGGATGIGFATARAFAQAGAATIIIASRRESVVQESAAKLRAEFEGTNLKVVGLICDVTSIDDTEKLWAGLERDGIVVDVLILCAGQPSQDGSILKIGINEVWDNFLINVRGHVHNTQKFYLQAGRNASQHLTVVNVSTISAHEWGFTYDLYGMTKNSGVLAMQQVAKSVSPEDMQVISYHPGLVRTAVMESVGDLAWDKGT

SEQ ID NO: 35637 - DNA, 1242 bp, Muscodor strobelii
  misc_feature: SGI cDNA ID NO. 572346
  misc_feature: Encodes the peptide sequence at SEQ ID NO 35638
atgtccgcaaacgcccgcacacgtcgcccaagggcttgtctcgcttgcgcggagatgaagcggtcttgtgaccgacaacttccggagtgccaacgatgtgtagaccgcgacgctgactgcgtctatccagcatcaagaagacagcggcgtgcctatgcgagcaccccccaaagcttaaattttcttggccatactttgaacaatgaatttaccatgggagattggagcgctatagatcttcagagcataaaccttccgatcccagagttgacccttccgatcccgtccacgcccatggttgaacaacatggggtgagtatgatgttcaatgaggaacccagcccactggatacgccttgtctgtggtttctagatggtaaagcgtggcaaatcgaacatgctcttgaacagagcagcggtgaagctatgagacgtgatgaatacattgagaaggtccaagacatgctgagaacttgggtggacaagggtcacaatagtttcattcatcgatatctataccgcaatggactccctcgctgtctccaggaagcctacactactctagcaacgtatcttaacaggactgtggccatggagtcaacaatactagaaattgcccacgaacgagctgctgaacttgtccatgaggccaagttgccgactgatgatcgggccaagggaatcctcgctcaactcgctcgtatccaagccctattcatttatcaatgcatccagctgtttgacggatccgtccggcatcgagccctggctgaacgacatatacgaacaatacaatcatgggcaatgcagatgtgggaattcatggcaaagtctagtgatgagcagaacccatacaaatgtttgctactaccacgaccgggagccgacgtagacgtctcgcataatctcgtcgtagagatgtggcgagagtggattttaaacgaaagcgctcggcgtaccttcacgctcgtctctttcacaacttcggtatacttgataatgagagatggaatttctgactgcttgggaggtgtcaaattgacggctaaccatgacttatgggagataccaacggctgccaagtggtttcaaaggtgctgtgagaagactccggtgcttgtgtcatcgctacagccagagcgaaatctacccgactgtccgcctactgagatcgacgagttcataaagattatttggactctgctcataagctcagaagaagtgagggattggttcgggtga

SEQ ID NO: 35638 - protein, 413 aa, Muscodor strobelii
  misc_feature: SGI Peptide ID NO. 572346
  misc_feature (11)..(49): Pfam Id: PF00172 Pfam Desc: Fungal Zn(2)-Cys(6) binuclear cluster domain
  misc_feature (11)..(411): NCBI GI: 256720318 Blast Desc: NECHADRAFT_56119 [Nectria haematococca mpVI 77-13-4]
  misc_feature (155)..(411): NCBI GI: 212535290 Blast Desc: aldo/keto reductase, [Penicillium marneffei ATCC 18224] gi|210070200|gb|EEA24290.1| aldo/keto reductase, [Penicillium marneffei ATCC 18224]
  misc_feature (8)..(411): NCBI GI: 256721824 Blast Desc: NECHADRAFT_53241 [Nectria haematococca mpVI 77-13-4]
  misc_feature (3)..(413): NCBI GI: 145607962 Blast Desc: MGG_09786 [Magnaporthe grisea 70-15] gi|145015431|gb|EDJ99967.1| MGG_09786 [Magnaporthe grisea 70-15]
  misc_feature (11)..(411): NCBI GI: 256721547 Blast Desc: NECHADRAFT_78504 [Nectria haematococca mpVI 77-13-4]
  misc_feature (71)..(412): NCBI GI: 116195774 Blast Desc: CHGG_04485 [Chaetomium globosum CBS 148.51] gi|88180398|gb|EAQ87866.1| CHGG_04485 [Chaetomium globosum CBS 148.51]
  misc_feature (5)..(411): NCBI GI: 256732314 Blast Desc: NECHADRAFT_80777 [Nectria haematococca mpVI 77-13-4]
  misc_feature (6)..(412): NCBI GI: 242813475 Blast Desc: TSTA_101720 [Talaromyces stipitatus ATCC 10500] gi|218714513|gb|EED13936.1| TSTA_101720 [Talaromyces stipitatus ATCC 10500]
  misc_feature (12)..(411): NCBI GI: 242795089 Blast Desc: conserved [Talaromyces stipitatus ATCC 10500] gi|218719096|gb|EED18516.1| conserved [Talaromyces stipitatus ATCC 10500]
  misc_feature (13)..(412): NCBI GI: 171680960 Blast Desc: protein product [Podospora anserina] gi|170940438|emb|CAP65665.1| protein product [Podospora anserina]
MSANARTRRPRACLACAEMKRSCDRQLPECQRCVDRDADCVYPASRRQRRAYASTPQSLNFLGHTLNNEFTMGDWSAIDLQSINLPIPELTLPIPSTPMVEQHGVSMMFNEEPSPLDTPCLWFLDGKAWQIEHALEQSSGEAMRRDEYIEKVQDMLRTWVDKGHNSFIHRYLYRNGLPRCLQEAYTTLATYLNRTVAMESTILEIAHERAAELVHEAKLPTDDRAKGILAQLARIQALFIYQCIQLFDGSVRHRALAERHIRTIQSWAMQMWEFMAKSSDEQNPYKCLLLPRPGADVDVSHNLVVEMWREWILNESARRTFTLVSFTTSVYLIMRDGISDCLGGVKLTANHDLWEIPTAAKWFQRCCEKTPVLVSSLQPERNLPDCPPTEIDEFIKIIWTLLISSEEVRDWFG

SEQ ID NO: 35639 - DNA, 6241 bp, Muscodor strobelii
  misc_feature: SGI EST ID NO. CUFF.85003.0
  misc_feature: Variant of the nucleotide sequence at SEQ ID NO 35637
tccaggaagcctacactactctagcaacgtatcttaacaggactgtggccatggagtcaacaatactagaaattgcccacgaacgagctgctgaacttgtccatgaggccaagttgccgactgatgatcgggccaagggaatcctcgctcaactcgctcgtatccaagccctattcatttatcaatgcatccagctgtttgacggatccgtccggcatcgagccctggctgaacgacatatacgaacaatacaatcatgggcaatgcagatgtgggaattcatggcaaagtctagtgatgagcagaacccatacaaatgtttgctactaccacgaccgggagccgacgtagacgtctcgcataatctcgtcgtagagatgtggcgagagtggattttaaacgaaagcgctcggcgtaccttcacgctcgtctctttcacaacttcggtatacttgataatgagagatggaatttctgactgcttgggaggtgtcaaattgacggctaaccatgacttatgggagataccaacggctgccaagtggtttcaaaggtgctgtgagaagactccggtgcttgtgtcatcgctacagccagagcgaaatctacccgactgtccgcctactgagatcgacgagttcataaagattatttggactctgctcataagctcagaagaagtgagggattggttcgggtgaaagacgcctggtagcttgagcagccggaaatctctttgattctgtccaagtgcatgcattctctctcacatataattagcgatgaacatcggatgtaaaaatacaaaacaaaatagagactgaaattataggcaattaaattccttgagagggtgcttcaaagggggttgagtgaacgtgggcgcagcccactacatgtcacccacctaacaacgctttcgggttcaaacctccttccatgacacacgcaaccccgggtggcaaagagaaaaaaaggaaacacaaagcgtacggggttcctcaagtctgcgtgatgtcgttagtcgtcaccggcccggctaccttcgctgagaagaggtagagacatcaggtggcttttcatacccacagtaggatagagcccgatcaggctctcgccccgcactggtgaaggccacactcattggagtatatagactacagttcaggccccaattcattcaactcagcaatggtgctccagcaatgcatacgtcaatccggaccgaatcgtcgctgaggtctagttcagatgcactgacatgggacgtaggtagatgagaatgaactgaatttgtgatgcctctattttaatgtaatcattcttcctacccatatcgtctaaaattcctgctgatcgcttgaaacccatcaagtacaaaatgctcctaatatgacgctagacactctctaggtgggggtatctgaaagaaaagatggaggcttgctcctgtgtatgaaaacttcaacgtctcgttcgttagtttttattgtgtaatcgagtcccacgatgtcgtggcgatggcgtgatcgactcgcaattgcggatctccaattgactccaatcaatcattgatataaatgtgttaggcggccactcgagaggacgggcgagttcctcagtcacgaacctgcgccatgccagccgtgggataatatttatcataatcctcgtcgtcgctactatcaattgggcttcctggactctgggccgcactgatgtcggcgctctcaatgccgctgaaagtctcggccgggaatggagtcataccgatggaaagcagactttgtcttctacccacctcgaagtcaaccgcactgcccgttcggctaagctctggcttctcaggcagctgtttgagcagaccagtggatatatcgagcatacccatggcgaattctgtcaaccggcggctttcgccaggtttagtgctgacgctcagtgtccatcggtattctcctaatcgtcgtcgataccagtctgcttcttcacggcccggcgaagtcgcccacagtagagaaccaaaggtgccgatgagagcaaaattagttttcgaagcaaaataccaaaatgcgcggagatgctgctgtgtgaggcggttgacaaagtccatagctgagatgagacgggcttttgccgcactgcgacatatatgctcaagataagggtcgacagcctgggaatcagaggccaaggcccgaatgatacggcggtggagggtgatctctgtcgcaaagtatgccaaatgtaggtacccgatgctggatagtcgattggatacagggacagcgctttgaagagaagagtccatgcgaatcgcggcgggaagtgccgaataccattctttcagtttgagctggatgggtttggccagcgagagaacaagatgagtaccttgaggtccggcagccgtcacgttttgcatggcttgcagggtatagaaagtatctagaatttccgccagtacctgggttagatatatcatttgcacgaacagtgtccgcccatgttcgatttcttgttgccgttcagtgtcgccctcgtcccagtcggcttctgaaaagtcagacggagtcaagggcttgacaatccagttggagctgaagatatgtgatggacgtccatgtaccaatgcaccccatttatcttgcatatagagagcccacgctaatcgcttccgaagacctttctcccataatggtatcttccagtgggtgcaatccagatgaaggccgagctcttgcgagatagccacaagttgagccgttggcgcccactgatcaccttctggtcgttgcgaaagaaggagacctgcttgtacagtggacaatttcggtcgccacatagcatcagccagcgacgatctcatgagtctttccaatgcgtggacatctggacgctgagatgtcgagagttcatcagactggtcccaccagttgatggccagcagatatatggaagcaaggagtgcgggacaaaattcatgaacattcctctcatatttctcatagaagacgttcttctgaatgatggggaagccggggtggacaacctcaaaatagaggtcgacgagtttccgcccatgtggagcgactaaccgctcgatctcggtcaagtcctcaatttcgtgctcatgtccgggcgtcgagtggtctggtagcatcagaaatgtgtcattgtcgctgactttcctaagtgttcctcgggcaagtaaactttcatcctggggatcaaagggggaaagattgattagggaaggctcgaaatcagtcgtcggaccaatgtactggctataccgatcattctgaagaccaagtgaacgtttgagcatagttgatccgccgaagttagccatctcctcgatcaaagaactagaggcggcagtgctagatagactgggcgcgtgttgccgcaatcttctgttatctgaccgacctggcgaactggatgaaccaatggcgtgtaagcaaacgatctttcccaatatcggcgagggtgcataaaagaacaatgcaagtaggcatgggggtcaattgagagaacttagaaaagcttaccctctatggccgttggtatcttctattagatcacgcgccagttttctttttcggggttggggactctgacataaagagcactcgacatctcgactttgacatgacatacacctctcctcatcatcaccgacgacacattttgatccccgaaggacgcaggcttcacaaggtgaactacttccactgatggccgagtcggaatcggccgagtcgtttgtagtcatgttatttgtgtctctaccattcaaataactctgacgaaagggaagactggggttatcatgggcggctttgggggtgatcgcgattggagccgtccgagggacggtacttggattcgacatcctcgtggcgagaaatgcccagccaatggctcacaattaccaagacaacctggtcctgcggccgccgatagagattcctaagagaaatggcccccgtgggatacgcttgcgccgatacgcctcgtcggagcgttcgcaatgtaccgataacgatagagacgattaaaacacttgcctgccttatgagccgatttgatgtagtagcaacgtgggactgcagaacgggtatccactgccagatctatagattgtcaagatagagactaatttaggcagcccgatatagctctctattatgaattgataagagagacgaggcgagcgaagagctgaatggtcagcaggatgagatagcgagaagtgtgctggctctcttgccgcccagtgcaagacctctagcttgggcaggcttgtaaggttaaagttgcttatggagtttgagacggcgccactgtcgagggattttgatactgtgctctcgaaacgtccaggtggccaaggcaatgtaaggcaatgtcaggcaatgccgagttgaggtttttgcagataccctggattatctggcaagtccgcaggccacttacagctgcaggttaggcttagtaccagtttagaagttgacctggatgatggcgtatcgttctcgtatgatagtctggtcacgaggctaggctggcagcggatgtttaggtaattagagaggttagaattatataagctaggcttatcttcgtcattgaggctacgggttatgtgttccgaagagaagatgaggtgatgacgaaagagagagacgggagagaggcggctagtaggcaggaagaaaaagaacctttgcgtcgtgcaggggtgctgagaatactagcaagaaactcaagcttgtgtatcaggtggaagctgacggtgtctggcggtaataggaatttcctgttctaaaagacgtatgtcaggtttgacaagacactacaattctaatgcggcagactcgtggttgatcgaccatgtagggatggtccagggagttccggagcggcccttggggctcggcggcgtgattcggcggggaagtcgacctggctgtgagtataagtgggagacgacgaatgtcttgattggattccgaggcccggtaagtagcagatcgaacaagacgacaacgtgccttttgcaccaaacccggcaaaacgcacgaatggagaccaagcaattgataacaacgatgatcttatctctggggcatgacaagatgtgaattgtaatgatacacgccgtttgatggggacaaggcggcggctttgactaaaaatgtgacgccgtttacactagctccgatttatagtggtatgcctctactctcttgtctccatcatgatatcccatcctaatctcacaactctatgcgcatctcaaagacgtctctccatattcatagatataagatgaagatggtcgatcaaatgagtggctttcggcccgtgcaaagttgcgccgaggaccgaacgccctccgacagggcgcatcctcgctaacctaggtccccaagtgttcgcggcgaacatcgatatctcgtacatctaatttgctgtcacctcacgcgatcactgagacacgcgagatagggaatccaacttcctcagcggccaggaatgaagcgacggggcgacggggctgacggtcaaactgccgagtttcgctcatgtcattgtatacttggtgtactaccgtttacgacagcgtgctaaatagaacgtcgtgcgccagccagtcgatcatgacactttgcgctgctattaccaaatggaaaagaaaatgcggcagacttgtgtgggaattggctggggctgggaatacctttaacgtaatgagccaacccttaccgagtcatgcaggggtcctgtccgcaagttcttctgagatgtaagcgtcgaacagactgaagttgcacatgcacatgaggaacgacaagatgccaattacctcatagtgcaattttactttttctgccatgcccaactcacacgacgaacaagcttggccgatggaacgctgcttgataaatgcgcttggcgcggaaaagaaccgaaggctagtgcaagcttaaaatcgtgtctgggctcgttgttcttacttttcgaaatgacgagagacttatttaatcaaaatctagtgcttctgtgctaccgtcggactttcacggcgataggctgataacatctacgatagacgaaatagtcacttttggtatgtgatcgcgaggtcgtcccggcttggtattccaggcgagtacagttcgaattatatctgttatatttctaatgtgagcctggtactcggcccgtg

SEQ ID NO: 35640 - DNA, 2169 bp, Muscodor strobelii
  misc_feature: SGI cDNA ID NO. 572347
  misc_feature: Encodes the peptide sequence at SEQ ID NO 35641
atgtcgaatccaagtaccgtccctcggacggctccaatcgcgatcacccccaaagccgcccatgataaccccagtcttccctttcgtcagagttatttgaatggtagagacacaaataacatgactacaaacgactcggccgattccgactcggccatcagtggaagtagttcaccttgtgaagcctgcgtccttcggggatcaaaatgtgtcgtcggtgatgatgaggagaggtgtatgtcatgtcaaagtcgagatgtcgagtgctctttatgtcagagtccccaaccccgaaaaagaaaactggcgcgtgatctaatagaagataccaacggccatagaggttcgccaggtcggtcagataacagaagattgcggcaacacgcgcccagtctatctagcactgccgcctctagttctttgatcgaggagatggctaacttcggcggatcaactatgctcaaacgttcacttggtcttcagaatgatcggtatagccagtacattggtccgacgactgatttcgagccttccctaatcaatctttccccctttgatccccaggatgaaagtttacttgcccgaggaacacttaggaaagtcagcgacaatgacacatttctgatgctaccagaccactcgacgcccggacatgagcacgaaattgaggacttgaccgagatcgagcggttagtcgctccacatgggcggaaactcgtcgacctctattttgaggttgtccaccccggcttccccatcattcagaagaacgtcttctatgagaaatatgagaggaatgttcatgaattttgtcccgcactccttgcttccatatatctgctggccatcaactggtgggaccagtctgatgaactctcgacatctcagcgtccagatgtccacgcattggaaagactcatgagatcgtcgctggctgatgctatgtggcgaccgaaattgtccactgtacaagcaggtctccttctttcgcaacgaccagaaggtgatcagtgggcgccaacggctcaacttgtggctatctcgcaagagctcggccttcatctggattgcacccactggaagataccattatgggagaaaggtcttcggaagcgattagcgtgggctctctatatgcaagataaatggggtgcattggtacatggacgtccatcacatatcttcagctccaactggattgtcaagcccttgactccgtctgacttttcagaagccgactgggacgagggcgacactgaacggcaacaagaaatcgaacatgggcggacactgttcgtgcaaatgatatatctaacccaggtactggcggaaattctagatactttctataccctgcaagccatgcaaaacgtgacggctgccggacctcaaggtactcatcttgttctctcgctggccaaacccatccagctcaaactgaaagaatggtattcggcacttcccgccgcgattcgcatggactcttctcttcaaagcgctgtccctgtatccaatcgactatccagcatcgggtacctacatttggcatactttgcgacagagatcaccctccaccgccgtatcattcgggccttggcctctgattcccaggctgtcgacccttatcttgagcatatatgtcgcagtgcggcaaaagcccgtctcatctcagctatggactttgtcaaccgcctcacacagcagcatctccgcgcattttggtattttgcttcgaaaactaattttgctctcatcggcacctttggttctctactgtgggcgacttcgccgggccgtgaagaagcagactggtatcgacgacgattaggagaataccgatggacactgagcgtcagcactaaacctggcgaaagccgccggttgacagaattcgccatgggtatgctcgatatatccactggtctgctcaaacagctgcctgagaagccagagcttagccgaacgggcagtgcggttgacttcgaggtgggtagaagacaaagtctgctttccatcggtatgactccattcccggccgagactttcagcggcattgagagcgccgacatcagtgcggcccagagtccaggaagcccaattgatagtagcgacgacgaggattatgataaatattatcccacggctggcatggcgcaggttcgtgactga

SEQ ID NO: 35641 - protein, 722 aa, Muscodor strobelii
  misc_feature: SGI Peptide ID NO. 572347
  misc_feature (319)..(412): Pfam Id: PF04082 Pfam Desc: Fungal specific transcription factor domain
  misc_feature (1)..(722): NCBI GI: 116202425 Blast Desc: CHGG_09097 [Chaetomium globosum CBS 148.51] gi|88177615|gb|EAQ85083.1| CHGG_09097 [Chaetomium globosum CBS 148.51]
  misc_feature (1)..(697): NCBI GI: 256727124 Blast Desc: [Nectria haematococca mpVI 77-13-4]
  misc_feature (1)..(663): NCBI GI: 156713647 Blast Desc: transcription factor TamA [Gibberella fujikuroi]
  misc_feature (1)..(663): NCBI GI: 46136017 Blast Desc: FG09524.1 [Gibberella zeae PH-1]
  misc_feature (1)..(673): NCBI GI: 85091234 Blast Desc: NCU05994 [Neurospora crassa OR74A] gi|28920188|gb|EAA29566.1| conserved [Neurospora crassa OR74A]
  misc_feature (38)..(675): NCBI GI: 145608634 Blast Desc: MGG_06492 [Magnaporthe grisea 70-15] gi|145016081|gb|EDK00571.1| MGG_06492 [Magnaporthe grisea 70-15]
  misc_feature (2)..(696): NCBI GI: 261359613 Blast Desc: transcriptional activator protein DAL81 [Verticillium albo-atrum VaMs.102]
  misc_feature (1)..(653): NCBI GI: 189203745 Blast Desc: nitrogen regulatory protein OTam [Pyrenophora tritici-repentis Pt-1C-BFP] gi|187985307|gb|EDU50795.1| nitrogen regulatory protein OTam [Pyrenophora tritici-repentis Pt-1C-BFP]
  misc_feature (40)..(653): NCBI GI: 169603463 Blast Desc: SNOG_04741 [Phaeosphaeria nodorum SN15] gi|160706401|gb|EAT88501.2| SNOG_04741 [Phaeosphaeria nodorum SN15]
  misc_feature (54)..(669): NCBI GI: 189211273 Blast Desc: nitrogen regulatory protein OTam [Pyrenophora tritici-repentis Pt-1C-BFP] gi|187978060|gb|EDU44686.1| nitrogen regulatory protein OTam [Pyrenophora tritici-repentis Pt-1C-BFP]
MSNPSTVPRTAPIAITPKAAHDNPSLPFRQSYLNGRDTNNMTTNDSADSDSAISGSSSPCEACVLRGSKCVVGDDEERCMSCQSRDVECSLCQSPQPRKRKLARDLIEDTNGHRGSPGRSDNRRLRQHAPSLSSTAASSSLIEEMANFGGSTMLKRSLGLQNDRYSQYIGPTTDFEPSLINLSPFDPQDESLLARGTLRKVSDNDTFLMLPDHSTPGHEHEIEDLTEIERLVAPHGRKLVDLYFEVVHPGFPIIQKNVFYEKYERNVHEFCPALLASIYLLAINWWDQSDELSTSQRPDVHALERLMRSSLADAMWRPKLSTVQAGLLLSQRPEGDQWAPTAQLVAISQELGLHLDCTHWKIPLWEKGLRKRLAWALYMQDKWGALVHGRPSHIFSSNWIVKPLTPSDFSEADWDEGDTERQQEIEHGRTLFVQMIYLTQVLAEILDTFYTLQAMQNVTAAGPQGTHLVLSLAKPIQLKLKEWYSALPAAIRMDSSLQSAVPVSNRLSSIGYLHLAYFATEITLHRRIIRALASDSQAVDPYLEHICRSAAKARLISAMDFVNRLTQQHLRAFWYFASKTNFALIGTFGSLLWATSPGREEADWYRRRLGEYRWTLSVSTKPGESRRLTEFAMGMLDISTGLLKQLPEKPELSRTGSAVDFEVGRRQSLLSIGMTPFPAETFSGIESADISAAQSPGSPIDSSDDEDYDKYYPTAGMAQVRD

SEQ ID NO: 35642 - DNA, 6190 bp, Muscodor strobelii
  misc_feature: SGI EST ID NO. CUFF.85004.1
  misc_feature: Variant of the nucleotide sequence at SEQ ID NO 35640
cacgggccgagtaccaggctcacattagaaatataacagatataattcgaactgtactcgcctggaataccaagccgggacgacctcgcgatcacataccaaaagtgactatttcgtctatcgtagatgttatcagcctatcgccgtgaaagtccgacggtagcacagaagcactagattttgattaaataagtctctcgtcatttcgaaaagtaagaacaacgagcccagacacgattttaagcttgcactagccttcggttcttttccgcgccaagcgcatttatcaagcagcgttccatcggccaagcttgttcgtcgtgtgagttgggcatggcagaaaaagtaaaattgcactatgaggtaattggcatcttgtcgttcctcatgtgcatgtgcaacttcagtctgttcgacgcttacatctcagaagaacttgcggacaggacccctgcatgactcggtaagggttggctcattacgttaaaggtattcccagccccagccaattcccacacaagtctgccgcattttcttttccatttggtaatagcagcgcaaagtgtcatgatcgactggctggcgcacgacgttctatttagcacgctgtcgtaaacggtagtacaccaagtatacaatgacatgagcgaaactcggcagtttgaccgtcagccccgtcgccccgtcgcttcattcctggccgctgaggaagttggattccctatctcgcgtgtctcagtgatcgcgtgaggtgacagcaaattagatgtacgagatatcgatgttcgccgcgaacacttggggacctaggttagcgaggatgcgccctgtcggagggcgttcggtcctcggcgcaactctgtttgctattagtctgatatttctaatctctcgttcctcctttgggggtctggatgctgacttgcacgggccgaaagccactcatttgatcgaccatcttcatcttatatctatgaatatggagagacgtctttgagatgcgcatagagttgtgagattaggatgggatatcatgatggagacaagagagtagaggcataccactataaatcggagctagtgtaaacggcgtcacatttttagtcaaagccgccgccttgtccccatcaaacggcgtgtatcattacaattcacatcttgtcatgccccagagataagatcatcgttgttatcaattgcttggtctccattcgtgcgttttgccgggtttggtgcaaaaggcacgttgtcgtcttgttcgatctgctacttaccgggcctcggaatccaatcaagacattcgtcgtctcccacttatactcacagccaggtcgacttccccgccgaatcacgccgccgagccccaagggccgctccggaactccctggaccatccctacatggtcgatcaaccacgagtctgccgcattagaattgtagtgtcttgtcaaacctgacatacgtcttttagaacaggaaattcctattaccgccagacaccgtcagcttccacctgatacacaagcttgagtttcttgctagtattctcagcacccctgcacgacgcaaaggttctttttcttcctgcctactagccgcctctctcccgtctctctctttcgtcatcacctcatcttctcttcggaacacataacccgtagcctcaatgacgaagataagcctagcttatataattctaacctctctaattacctaaacatccgctgccagcctagcctcgtgaccagactatcatacgagaacgatacgccatcatccaggtcaacttctaaactggtactaagcctaacctgcagctgtaagtggcctgcggacttgccagataatccagggtatctgcaaaaacctcaactcggcattgcctgacattgccttacattgccttggccacctggacgtttcgagagcacagtatcaaaatccctcgacagtggcgccgtctcaaactccataagcaactttaaccttacaagcctgcccaagctagaggtcttgcactgggcggcaagagagccagcacacttctcgctatctcatcctgctgaccattcagctcttcgctcgcctcgtctctcttatcaattcataatagagagctatatcgggctgcctaaattagtctctatcttgacaatctatagatctggcagtggatacccgttctgcagtcccacgttgctactacatcaaatcggctcataaggcaggcaagtgttttaatcgtctctatcgttatcggtacattgcgaacgctccgacgaggcgtatcggcgcaagcgtatcccacgggggccatttctcttaggaatctctatcggcggccgcaggaccaggttgtcttggtaattgtgagccattggctgggcatttctcgccacgaggatgtcgaatccaagtaccgtccctcggacggctccaatcgcgatcacccccaaagccgcccatgataaccccagtcttccctttcgtcagagttatttgaatggtagagacacaaataacatgactacaaacgactcggccgattccgactcggccatcagtggaagtagttcaccttgtgaagcctgcgtccttcggggatcaaaatgtgtcgtcggtgatgatgaggagaggtgtatgtcatgtcaaagtcgagatgtcgagtgctctttatgtcagagtccccaaccccgaaaaagaaaactggcgcgtgatctaatagaagataccaacggccatagaggttcgccaggtcggtcagataacagaagattgcggcaacacgcgcccagtctatctagcactgccgcctctagttctttgatcgaggagatggctaacttcggcggatcaactatgctcaaacgttcacttggtcttcagaatgatcggtatagccagtacattggtccgacgactgatttcgagccttccctaatcaatctttccccctttgatccccaggatgaaagtttacttgcccgaggaacacttaggaaagtcagcgacaatgacacatttctgatgctaccagaccactcgacgcccggacatgagcacgaaattgaggacttgaccgagatcgagcggttagtcgctccacatgggcggaaactcgtcgacctctattttgaggttgtccaccccggcttccccatcattcagaagaacgtcttctatgagaaatatgagaggaatgttcatgaattttgtcccgcactccttgcttccatatatctgctggccatcaactggtgggaccagtctgatgaactctcgacatctcagcgtccagatgtccacgcattggaaagactcatgagatcgtcgctggctgatgctatgtggcgaccgaaattgtccactgtacaagcaggtctccttctttcgcaacgaccagaaggtgatcagtgggcgccaacggctcaacttgtggctatctcgcaagagctcggccttcatctggattgcacccactggaagataccattatgggagaaaggtcttcggaagcgattagcgtgggctctctatatgcaagataaatggggtgcattggtacatggacgtccatcacatatcttcagctccaactggattgtcaagcccttgactccgtctgacttttcagaagccgactgggacgagggcgacactgaacggcaacaagaaatcgaacatgggcggacactgttcgtgcaaatgatatatctaacccaggtactggcggaaattctagatactttctataccctgcaagccatgcaaaacgtgacggctgccggacctcaaggtactcatcttgttctctcgctggccaaacccatccagctcaaactgaaagaatggtattcggcacttcccgccgcgattcgcatggactcttctcttcaaagcgctgtccctgtatccaatcgactatccagcatcgggtacctacatttggcatactttgcgacagagatcaccctccaccgccgtatcattcgggccttggcctctgattcccaggctgtcgacccttatcttgagcatatatgtcgcagtgcggcaaaagcccgtctcatctcagctatggactttgtcaaccgcctcacacagcagcatctccgcgcattttggtattttgcttcgaaaactaattttgctctcatcggcacctttggttctctactgtgggcgacttcgccgggccgtgaagaagcagactggtatcgacgacgattaggagaataccgatggacactgagcgtcagcactaaacctggcgaaagccgccggttgacagaattcgccatgggtatgctcgatatatccactggtctgctcaaacagctgcctgagaagccagagcttagccgaacgggcagtgcggttgacttcgaggtgggtagaagacaaagtctgctttccatcggtatgactccattcccggccgagactttcagcggcattgagagcgccgacatcagtgcggcccagagtccaggaagcccaattgatagtagcgacgacgaggattatgataaatattatcccacggctggcatggcgcaggttcgtgactgaggaactcgcccgtcctctcgagtggccgcctaacacatttatatcaatgattgattggagtcaattggagatccgcaattgcgagtcgatcacgccatcgccacgacatcgtgggactcgattacacaataaaaactaacgaacgagacgttgaagttttcatacacaggagcaagcctccatcttttctttcagatacccccacctagagagtgtctagcgtcatattaggagcattttgtacttgatgggtttcaagcgatcagcaggaattttagacgatatgggtaggaagaatgattacattaaaatagaggcatcacaaattcagttcattctcatctacctacgtcccatgtcagtgcatctgaactagacctcagcgacgattcggtccggattgacgtatgcattgctggagcaccattgctgagttgaatgaattggggcctgaactgtagtctatatactccaatgagtgtggccttcaccagtgcggggcgagagcctgatcgggctctatcctactgtgggtatgaaaagccacctgatgtctctacctcttctcagcgaaggtagccgggccggtgacgactaacgacatcacgcagacttgaggaaccccgtacgctttgtgtttcctttttttctctttgccacccggggttgcgtgtgtcatggaaggaggtttgaacccgaaagcgttgttaggtgggtgacatgtagtgggctgcgcccacgttcactcaaccccctttgaagcaccctctcaaggaatttaattgcctataatttcagtctctattttgttttgtatttttacatccgatgttcatcgctaattatatgtgagagagaatgcatgcacttggacagaatcaaagagatttccggctgctcaagctaccaggcgtctttcacccgaaccaatccctcacttcttctgagcttatgagcagagtccaaataatctttatgaactcgtcgatctcagtaggcggacagtcgggtagatttcgctctggctgtagcgatgacacaagcaccggagtcttctcacagcacctttgaaaccacttggcagccgttggtatctcccataagtcatggttagccgtcaatttgacacctcccaagcagtcagaaattccatctctcattatcaagtataccgaagttgtgaaagagacgagcgtgaaggtacgccgagcgctttcgtttaaaatccactctcgccacatctctacgacgagattatgcgagacgtctacgtcggctcccggtcgtggtagtagcaaacatttgtatgggttctgctcatcactagactttgccatgaattcccacatctgcattgcccatgattgtattgttcgtatatgtcgttcagccagggctcgatgccggacggatccgtcaaacagctggatgcattgataaatgaatagggcttggatacgagcgagttgagcgaggattcccttggcccgatcatcagtcggcaacttggcctcatggacaagttcagcagctcgttcgtgggcaatttctagtattgttgactccatggccacagtcctgttaagatacgttgctagagtagtgtaggcttcctgga

SEQ ID NO: 35643 - DNA, 1248 bp, Muscodor strobelii
  misc_feature: SGI cDNA ID NO. 572348
  misc_feature: Encodes the peptide sequence at SEQ ID NO 35644
atgtcagaaccacaatccaagaccatcctcatactcggaggctcctacgccggcatctccatcgcccactccctcctcaaacacacctttccctctctgctagaccccgaatcctacaaaatcgttctcgttagcacatcctcaaaagccatgtgcagacaagcaactcccagggcaatgatagcagattcctacttcccgcaagaaaagctgatcgtcgggatcgaggaccagttcaagagttatcccaaaggaagattcgagtttataaaaggcacagccgcaaaactggacattgagaataggactgtctctgtccttctgtctgatgtggaggcaaaagagatcaacctcccgtattacgcattagtaatagcaacaggcgcatcaacacactctcccgtactaggcttcactagcgacgaagacacactccggggctcatggtctgcgttacgtaagaagctaccaaccgcaaaacatatcgtcgttgcgggcggcggaccatcaggagtcgaagtcgctggggagcttggcgagcatttaaatggaagggcaggatggttcaaagacacgctccccaacccaaaagtcaaaattacgcttcttagcggtggtgatagaatgctaccatatctacgaccagctatcgcgcagacagcagagggatatctctcaaaagtcggggtgaccattcagcataacgtaagggtagtcggtgtatcgcccgccggagcaggaacgacagatctcaccaatcccgcgacactcaccttgtcgaatggggaggaagtaaaggcagatatatacataccctgcacaggcttcatcccaaatacatcatttgctcctcaaagcctcctcgcaaaagacggtcgtataaccacactacccaccggccgagtacctaacaccaacctcgtctacgccattggcgacgcgtcctcggctgctcgcccagcagtccataatatcctggccatggtcccgatactatcttccaacatcaagcgagatctgctgttagcagctggtcagacgccagtgggtgtcagtgcagaggataggaaattcgcagaagatacgagagagacacaacttgttccgataggcaggagtaaaggagtgggatccgcgatgggtttcagactcccgagtttcttggtgtggttgattaaggggagggattactggctttggactacggggaatgtttggagtgggaagcagtgggacaaggaggcttag

SEQ ID NO: 35644 - protein, 415 aa, Muscodor strobelii
  misc_feature: SGI Peptide ID NO. 572348
  misc_feature (161)..(275): Pfam Id: PF00070 Pfam Desc: Pyridine nucleotide-disulphide oxidoreductase
  misc_feature (8)..(319): Pfam Id: PF07992 Pfam Desc: Pyridine nucleotide-disulphide oxidoreductase
  misc_feature (76)..(319): Pfam Id: PF07992 Pfam Desc: Pyridine nucleotide-disulphide oxidoreductase
  misc_feature (1)..(414): NCBI GI: 238499321 Blast Desc: AMID-like mitochondrial oxidoreductase, [Aspergillus flavus NRRL3357] gi|220692648|gb|EED48994.1| AMID-like mitochondrial oxidoreductase, [Aspergillus flavus NRRL3357]
  misc_feature (5)..(414): NCBI GI: 67904656 Blast Desc: AN9315.2 [Aspergillus nidulans FGSC A4] gi|40747226|gb|EAA66382.1| AN9315.2 [Aspergillus nidulans FGSC A4] gi|259488150|tpe|CBF87387.1| TPA: AMID-like mitochondrial A4]
  misc_feature (3)..(413): NCBI GI: 242772760 Blast Desc: disulfide oxidoreductase, [Talaromyces stipitatus ATCC 10500] gi|218721721|gb|EED21139.1| disulfide oxidoreductase, [Talaromyces stipitatus ATCC 10500]
  misc_feature (5)..(403): NCBI GI: 189206562 Blast Desc: conserved [Pyrenophora tritici-repentis Pt-1C-BFP] gi|187975708|gb|EDU42334.1| conserved [Pyrenophora tritici-repentis Pt-1C-BFP]
  misc_feature (5)..(397): NCBI GI: 169621229 Blast Desc: SNOG_13823 [Phaeosphaeria nodorum SN15] gi|111057727|gb|EAT78847.1| SNOG_13823 [Phaeosphaeria nodorum SN15]
  misc_feature (6)..(399): NCBI GI: 169608694 Blast Desc: SNOG_07433 [Phaeosphaeria nodorum SN15] gi|111063779|gb|EAT84899.1| SNOG_07433 [Phaeosphaeria nodorum SN15]
  misc_feature (6)..(414): NCBI GI: 189198754 Blast Desc: conserved [Pyrenophora tritici-repentis Pt-1C-BFP] gi|187982813|gb|EDU48301.1| conserved [Pyrenophora tritici-repentis Pt-1C-BFP]
  misc_feature (2)..(413): NCBI GI: 156063362 Blast Desc: SS1G_01797 [Sclerotinia sclerotiorum 1980] gi|154697133|gb|EDN96871.1| SS1G_01797 [Sclerotinia sclerotiorum 1980]
  misc_feature (5)..(413): NCBI GI: 212531363 Blast Desc: apoptosis-inducing factor, [Penicillium marneffei ATCC 18224] gi|210071202|gb|EEA25291.1| apoptosis-inducing factor, [Penicillium marneffei ATCC 18224]
  misc_feature (8)..(408): NCBI GI: 145236387 Blast Desc: An06g00130 [Aspergillus niger] gi|134075295|emb|CAK44929.1| protein product [Aspergillus niger]
  misc_feature (87)..(320): SWISSPROT Homolog: EC 1.6.99.3 NADH dehydrogenase
MSEPQSKTILILGGSYAGISIAHSLLKHTFPSLLDPESYKIVLVSTSSKAMCRQATPRAMIADSYFPQEKLIVGIEDQFKSYPKGRFEFIKGTAAKLDIENRTVSVLLSDVEAKEINLPYYALVIATGASTHSPVLGFTSDEDTLRGSWSALRKKLPTAKHIVVAGGGPSGVEVAGELGEHLNGRAGWFKDTLPNPKVKITLLSGGDRMLPYLRPAIAQTAEGYLSKVGVTIQHNVRVVGVSPAGAGTTDLTNPATLTLSNGEEVKADIYIPCTGFIPNTSFAPQSLLAKDGRITTLPTGRVPNTNLVYAIGDASSAARPAVHNILAMVPILSSNIKRDLLLAAGQTPVGVSAEDRKFAEDTRETQLVPIGRSKGVGSAMGFRLPSFLVWLIKGRDYWLWTTGNVWSGKQWDKEA

SEQ ID NO: 35645 - DNA, 154 bp, Muscodor strobelii
  misc_feature: SGI EST ID NO. CUFF.84902.0
  misc_feature: Variant of the nucleotide sequence at SEQ ID NO 35643
caaagacacgctccccaacccaaaagtcaaaattacgcttcttagcggtggtgatagaatgctaccatatctacgaccagctatcgcgcagacagcagagggatatctctcaaaagtcggggtgaccattcagcataacgtaagggtagtcggt

SEQ ID NO: 35646 - DNA, 1260 bp, Muscodor strobelii
  misc_feature: SGI cDNA ID NO. 572349
  misc_feature: Encodes the peptide sequence at SEQ ID NO 35647
atggcctcgttcaacgattcccccgcctccgacgacgcatatgccggcgagcactcgccgcacgcgccctggccctatatctcccccgacatccaggccaagttcgagcgcaagcatctggctccgggcgtcaccatccacttcgccaacctgcccagcgccccgtggtgggtgccagacaaccaacgcgccaacctcgtgctctggaacgtcgccctgttcgcgaccaacgcccaccgccccctcgagcagcacgaggccgatgccatcgcccagaacagcgtccgcagccaccagtggcggtcctggatcctgcccacctcgctcgccgtggccaccgccgccaccatcgccggcaggaagaccttccgcttccccttctacactcccaagcccaagtggttcagcccccgcgcctttccctccaggcaagtgaagctcgtccaaggccacgctgctacctcgatgtggaacgccgcgcgcttggcggcctacttcacctgcagctctatcggcttgaacatcctcttcagttccatacaaggcagcaccttcggcgccaattgcttgcgcgacgaccgcctcaaggctgtcacccgtaccatcgcagaaaacagaggacagcgcggcacacagcgcggcactcaacgacccaactcacgacaagctcacggccccatttccgcggatgcctttgagcagcccgaccaggacgccgcgcctccagcctactcagactcttcagatacatactctgcccctccacaacaacagacttccactcctccaccagcaccgacgaagcgcccatcgccagcatggagaccagcactgtcaaccaccagctctcgggcccaagacgatgacctcgacctcttcgacgacgacgacgcctcacccgtagccccttccgcaaggtcatcggagtcgaggcagaaagcatcaagctcacccaataccactaagtcctgggagcaaatacgccaagaagcccggtcaggcagcgcacaatgggcaaggggagactcatctggtcaagaaaggggctggtaccaagtacggcaagatacggctcgcacaactaaagacgccacgccgcaatccgaggggttttcatattcacaagcagacgaggacaaagaaaggagacagtacgagaaggataaagcacaaaaggaattcgatgctttagtcgatgccgaaagggaagggaagaacgggagcagtgcgagtggtagcagtggtggttggaggaggtga

SEQ ID NO: 35647 - protein, 419 aa, Muscodor strobelii
  misc_feature: SGI Peptide ID NO. 572349
  misc_feature (79)..(410): NCBI GI: 154314742 Blast Desc: BC1G_04080 [Botryotinia fuckeliana B05.10] gi|150848702|gb|EDN23895.1| BC1G_04080 [Botryotinia fuckeliana B05.10]
  misc_feature (72)..(410): NCBI GI: 156053387 Blast Desc: SS1G_06861 [Sclerotinia sclerotiorum 1980] gi|154704639|gb|EDO04378.1| SS1G_06861 [Sclerotinia sclerotiorum 1980]
  misc_feature (77)..(384): NCBI GI: 116202419 Blast Desc: CHGG_09094 [Chaetomium globosum CBS 148.51] gi|88177612|gb|EAQ85080.1| CHGG_09094 [Chaetomium globosum CBS 148.51]
  misc_feature (71)..(404): NCBI GI: 46135985 Blast Desc: FG09508.1 [Gibberella zeae PH-1]
  misc_feature (57)..(417): NCBI GI: 169779651 Blast Desc: [Aspergillus oryzae RIB40] gi|238500327|ref|XP_002381398.1| endo-1,3(4)-beta-glucanase, [Aspergillus flavus NRRL3357] gi|83773029|dbj|BAE63157.1| protein
  misc_feature (36)..(191): NCBI GI: 171682164 Blast Desc: protein product [Podospora anserina] gi|170941041|emb|CAP66691.1| protein product [Podospora anserina]
  misc_feature (1)..(409): NCBI GI: 255953243 Blast Desc: Pc21g03100 [Penicillium chrysogenum Wisconsin 54-1255] gi|211589085|emb|CAP95207.1| Pc21g03100 [Penicillium chrysogenum Wisconsin 54-1255]
  misc_feature (80)..(405): NCBI GI: 39968799 Blast Desc: [Magnaporthe grisea 70-15] gi|145013895|gb|EDJ98536.1| [Magnaporthe grisea 70-15]
  misc_feature (277)..(419): NCBI GI: 159127014 Blast Desc: conserved [Aspergillus fumigatus A1163]
  misc_feature (277)..(419): NCBI GI: 146324215 Blast Desc: endo-1,3(4)-beta-glucanase [Aspergillus fumigatus Af293] gi|129558011|gb|EBA27427.1| endo-1,3(4)-beta-glucanase, [Aspergillus fumigatus Af293]
MASFNDSPASDDAYAGEHSPHAPWPYISPDIQAKFERKHLAPGVTIHFANLPSAPWWVPDNQRANLVLWNVALFATNAHRPLEQHEADAIAQNSVRSHQWRSWILPTSLAVATAATIAGRKTFRFPFYTPKPKWFSPRAFPSRQVKLVQGHAATSMWNAARLAAYFTCSSIGLNILFSSIQGSTFGANCLRDDRLKAVTRTIAENRGQRGTQRGTQRPNSRQAHGPISADAFEQPDQDAAPPAYSDSSDTYSAPPQQQTSTPPPAPTKRPSPAWRPALSTTSSRAQDDDLDLFDDDDASPVAPSARSSESRQKASSSPNTTKSWEQIRQEARSGSAQWARGDSSGQERGWYQVRQDTARTTKDATPQSEGFSYSQADEDKERRQYEKDKAQKEFDALVDAEREGKNGSSASGSSGGWRR

SEQ ID NO: 35648 - DNA, 1585 bp, Muscodor strobelii
  misc_feature: SGI EST ID NO. CUFF.84905.0
  misc_feature: Variant of the nucleotide sequence at SEQ ID NO 35646
tttcgagcttatcgccatccaacactcccaacacatcgatcagacaagtcagctacctacctcgttcttgtctcgtgtgcttgcaagcaagggaattgagtgatgcatcacaactagcacatttatgtcggacgatttccaattctccaagtccttgtatatcagaccacctaagggactagtgaatatggcctcgttcaacgattcccccgcctccgacgacgcatatgccggcgagcactcgccgcacgcgccctggccctatatctcccccgacatccaggccaagttcgagcgcaagcatctggctccgggcgtcaccatccacttcgccaacctgcccagcgccccgtggtgggtgccagacaaccaacgcgccaacctcgtgctctggaacgtcgccctgttcgcgaccaacgcccaccgccccctcgagcagcacgaggccgatgccatcgcccagaacagcgtccgcagccaccagtggcggtcctggatcctgcccacctcgctcgccgtggccaccgccgccaccatcgccggcaggaagaccttccgcttccccttctacactcccaagcccaagtggttcagcccccgcgcctttccctccaggcaagtgaagctcgtccaaggccacgctgctacctcgatgtggaacgccgcgcgcttggcggcctacttcacctgcagctctatcggcttgaacatcctcttcagttccatacaaggcagcaccttcggcgccaattgcttgcgcgacgaccgcctcaaggctgtcacccgtaccatcgcagaaaacagaggacagcgcggcacacagcgcggcactcaacgacccaactcacgacaagctcacggccccatttccgcggatgcctttgagcagcccgaccaggacgccgcgcctccagcctactcagactcttcagatacatactctgcccctccacaacaacagacttccactcctccaccagcaccgacgaagcgcccatcgccagcatggagaccagcactgtcaaccaccagctctcgggcccaagacgatgacctcgacctcttcgacgacgacgacgcctcacccgtagccccttccgcaaggtcatcggagtcgaggcagaaagcatcaagctcacccaataccactaagtcctgggagcaaatacgccaagaagcccggtcaggcagcgcacaatgggcaaggggagactcatctggtcaagaaaggggctggtaccaagtacggcaagatacggctcgcacaactaaagacgccacgccgcaatccgaggggttttcatattcacaagcagacgaggacaaagaaaggagacagtacgagaaggataaagcacaaaaggaattcgatgctttagtcgatgccgaaagggaagggaagaacgggagcagtgcgagtggtagcagtggtggttggaggaggtgaagagatcaagtctgatgttgtatgacgtgacatatgtatagtatctgtatatacagtgagttcattgtttacaagccaatatgactattaacttcatgtgggttctcagaagccctttacgaaggacacagacccgac

SEQ ID NO: 35649 - DNA, 4992 bp, Muscodor strobelii
  misc_feature: SGI cDNA ID NO. 572350
  misc_feature: Encodes the peptide sequence at SEQ ID NO 35650
atgcccctccaaaagtcattctctgaacagaatggctctgtaaggaatcgaccgcgttggcacaagtccaagagccattctgcggccacacaccaccatgcccaggccgctccctctcgtcccctcgagcccgtttctgaagcgaccaagaacaaactcaatgcattcaacttccgacccaataccgagccccagaaatcaagtgatcccttcaaaccaaattctaaagactctaaggatgtcaaggacattgtccagaaagacgataagcttcaagagtctaaacaagagtctaaacaggagcctcgagactctcttgcactgccattacccagcaccgatgtctcgacgcccgcaagccgcctggtatggcaagatttgatcggaggctcggagacaaaggtcgaggacgacgatacgagcccctatgacaagatccagtgggacaccaagcagcagcccaagtatggcatgtcccccatgccgcgcaagagggggaacaagcgggcaagaagctcctctcccgcgtcctcgcccgccgcgagcttcaaggccacgacaccggccgtcaacgtcaagagccagtcgcaggcactcaagtcgccccgcgcagacccggccatcgagctgtgggatcgcttctccctgagcggctccgccgccgccgccacgcctctcggcatcaccaacccggcgctcgcccagatcatgatgtcctcctcgccccagccctcccacatccagaacgcggcgtacggcgacctgaagctaaggcgggccataagctgcggcacccactggccgaagcgccggcgagtcgatagtggcgatgtggccatgccgcctcgccgccacgccaccatcgacgagagccccagtggcaattcgaaatcctccatggtcaatgcgctgctaaagatgaagagcatcgccgacgacaccagccgctccaaggccgcccagacacagcgcgatgccctcaagtccccttcgccgagaaagaagcaacaggaccgcgccgctcgttatctgggctctccggaaccacgaacctcacacttgggctccgcgacggtagcattgccagggacaacagcgatgggccaaggaacggccgcgggcaacttggtggaaacttcatccgactacggggatgatgactttgacgatgatactctcatgaacttagacgtcggtatcaacccagctccgacgaagccagctgcggtgccccaaccaccagaaccagacagagttctcaccgaagctcacgccccgccgccccaagacccaagcgattcggatgatgagtttggcgacggagtcgatgatgacctcttagcagtggccgaagggttagtgtcgcagatcgattctgctggtgacaggagggaagacacagctctgaacatggtctccactccaacgaaacctagggtgccaagaattcagctggaagaacatgagcaagatttattgggagatgatttcggcgatgacttcggagatttcgatttcgaggcagctgagatagctgcgacacaatccgttcggcagactaacggaacagtaccgcttccatctcagaagcctaaggctattcagcggtatctcgtgactaaggttctgcaagctcagtacaccaaccctcacggaagcctgtcaaaagaaaaggttctattcgtgcaagtcgatcgcacaaatatcatgaaaactgtccatcttcgcggaggatggctcgacactccggctacatccaagtcctacgtccacatcatcggtgacttccagccgtctggcgaatgcattatagacgactcgcagaatctactcatcttacacccagaccagttgttgtcagctaccgttgttgcagatagtttcacatgcatgcggagggctgttctccaagatcgcgtcaaggcgacctcggacaaagcacccccgctcgtttatggcactcttctacatgaaatattccaagaagcgttgatgctgaacaagtggacctccgagtttctggatggcgttatctgccggatcaccgagaagcacgtagaagacctttacactatcaaagtctccctcagtgatgcccgtgagcatcttcgctccaagatgccagagatgagatcatgggcagaaacattcgttgcgcctttccccagaccggacgcaatcgttcagggccgaaatggagacaaggcaaacatgagcgtcaccaagctactagatgtagaagagcatgtatggtctcccatgtatggcttgaaaggaaacatcgatgccactgtgcaagtcaccatgaagggggaccatcaacgacggacactcaccgtgcccttcgaagtgaaaacaggcaaaaatcttactcccaatcatagtgctcaaacggcactttacaatctccttttatcggaccgatacgatattgaaatcgcctatggtgtcctgtactacatgggaagctcacagacatatcgaatcccaaccatacgtcatgaactgcgacatatgattatgcagcgaaatcaactggcttgctatatccgcgaacgcaatgtccagcttccgccaatgaagcgagatacgcatgcttgtagcaaatgttacgcccagaccccatgtttcatttaccataagctcgccgatggtggtgacgaggaatcgagtggcgtcaaaggaaaattcgatcaagtagttcagcatttgagcccaacacatcgggaatttttcctcaggtgggaagatttgctgaccaaagaagaaaaggagagccagaaattgcgacgagaactctggaccatggtcagcaccgaacgcgagaaacttgggcggtgcttttccaacgtcatcatcgaggagggatctgcatttgaagaaagtgaaagcccaaaaatcaatcgctacagatacagttttatcaaagagaacgctggttcagctttctccttccttgaatctcagttgacaataggcgagcccatcgttgtatccgacgaaacagggcattttgctcttgctcttggttttgtcacctctgtccggaagcaaaggatttccgttgcggtcgaccgtcgccttcacaacgctcgtatccggcgaccgggattcgatgagctgaataatcaagtttttgccagcatcatggaagttgttccagagggtgcaacacctgcgcagtcccaggggaaaaccaaagagccgcctgtgcgatatcgtcttgacaaggatgagttcagtaatggcatggcgacggtccgcaataatcttgttcaagtcatggctaatggcgtcttcggctcgacagagatccgtcgtcttgtggtcgacctcgcccccccacgtttcaagaccaaggcaacgcagtactccattgctgaccaggcaggtcttaacgtggaccaaagacaagccatccagaaagtgatgagcgccaatgactatgcacttgttctgggtatgccaggaacaggaaagacaacaacaatcgctcacattatccgcgccctcgcgagccagggcaagagtgtacttctaacatcgtacacgcactcggctgttgacaatatccttttgaaattcaagaacgataaagatcgcttcccgattttgcgacttggagcgccggctaaagtgcaccccgaagtccaagagtttgccatcttagcaggacagcccatgaaaactttcgaagaaatacgccatgcctggcacgacacgccagtggtcgccactacttgtttgggcgtcagtcatccaatctttagcgaacgtaccttcgactattgtatcgttgatgaagcgtctcagattaccttacccatctgccttggaccaatacgcctggcgcggacttttgttcttgtcggagatcacaatcaactccctcccctcgtacagaatgaggaggcgcgcgtgggaggactggacattagtctcttcaagctgctctccgatacacaccccgactctgtcgtcaacctggagcatcagtaccgcatgtgtgaagatatcatgacgctgagcaacactttgatatacgaaggtcacctgaagtgtggcacggaagagttgcgacatcaaaaactagcgatccctcacatggatcagttaagactgaagcattacgacgctcggacaatcatgcgaccaggtacccccaggtcgttttgtacgaactggagcggtcagaattgttggctacacaatctccttgatcccgaggcgcgggtgcggttcgtcaatacagataaactgccctcaccacgggaggaagcgaaaggcaaccgcatcgtgaatcccaccgaggccaagatcgttgtgcagctcgttgatgcgttactcgctgtcggtgtgcctgcgagcgagattggcgtcatgacgcactaccggtcccagctttcgttgctcaaacatgggctgagaagcttcggaaacaatatcgagttgcataccgcggatcgcttccagggaagagataaagaggttgttgtgctgagtctcgtgaggagtaatgaggcttgcagcattggtgatctccttaaagactggcgaaggatcaacgttgcttttaccagggcgaagaccaaactcctggtcgtgggcagtcgagacaccttgaaagggagtggagagatggagatgctgagtaaattcgtgaagctcatggaggagaaagattgggtctatgatttgccggctgatgcgttggaaagtcatttctttgaggatgctgcgacgcagttttctggtggcagccaactttcaccgatgaagagaagccccaccaagagccccaggaaaagtcagttgatgaatccattgaaaggcaatggcttaggggtcgtgaggagaattggtggacccttggctggcaaggagaatatgaaacctgggctgaagagagggaacatcactggaaaggcgcttttgaaaaagaatcctgtttcgagggatattctgaatgagatgatggatggcatttactaa

SEQ ID NO: 35650 - protein, 1663 aa, Muscodor strobelii
  misc_feature: SGI Peptide ID NO. 572350
  misc_feature (554)..(768): Pfam Id: PF08696 Pfam Desc: DNA replication factor Dna2
  misc_feature (572)..(1578): NCBI GI: 6321958 Blast Desc: Dna2p [Saccharomyces cerevisiae] gi|731738|sp|P38859.1|DNA2_YEAST RecName: Full=DNA replication ATP-dependent helicase DNA2 gi|458906|gb|AAB68010.1| Dna2p: DNA
  misc_feature (572)..(1578): NCBI GI: 151944110 Blast Desc: DNA helicase [Saccharomyces cerevisiae YJM789]
  misc_feature (572)..(1578): NCBI GI: 190405942 Blast Desc: DNA replication helicase [Saccharomyces cerevisiae RM11-1a]
  misc_feature (1)..(1663): NCBI GI: 39968797 Blast Desc: MGG_02491 [Magnaporthe grisea 70-15] gi|145013896|gb|EDJ98537.1| MGG_02491 [Magnaporthe grisea 70-15]
  misc_feature (1)..(1663): NCBI GI: 46135987 Blast Desc: FG09509.1 [Gibberella zeae PH-1]
  misc_feature (1)..(1663): NCBI GI: 40882306 Blast Desc: related to DNA helicase [Neurospora crassa]
  misc_feature (1)..(1663): NCBI GI: 164426014 Blast Desc: NCU04749 [Neurospora crassa OR74A] gi|157071165|gb|EAA31046.2| conserved [Neurospora crassa OR74A]
  misc_feature (557)..(1663): NCBI GI: 261359599 Blast Desc: DNA replication ATP-dependent helicase dna2 [Verticillium albo-atrum VaMs.102]
  misc_feature (168)..(1659): NCBI GI: 171682064 Blast Desc: protein product [Podospora anserina] gi|170940991|emb|CAP66641.1| protein product [Podospora anserina]
  misc_feature (1)..(1546): NCBI GI: 156053429 Blast Desc: SS1G_06882 [Sclerotinia sclerotiorum 1980] gi|154704660|gb|EDO04399.1| SS1G_06882 [Sclerotinia sclerotiorum 1980]
MPLQKSFSEQNGSVRNRPRWHKSKSHSAATHHHAQAAPSRPLEPVSEATKNKLNAFNFRPNTEPQKSSDPFKPNSKDSKDVKDIVQKDDKLQESKQESKQEPRDSLALPLPSTDVSTPASRLVWQDLIGGSETKVEDDDTSPYDKIQWDTKQQPKYGMSPMPRKRGNKRARSSSPASSPAASFKATTPAVNVKSQSQALKSPRADPAIELWDRFSLSGSAAAATPLGITNPALAQIMMSSSPQPSHIQNAAYGDLKLRRAISCGTHWPKRRRVDSGDVAMPPRRHATIDESPSGNSKSSMVNALLKMKSIADDTSRSKAAQTQRDALKSPSPRKKQQDRAARYLGSPEPRTSHLGSATVALPGTTAMGQGTAAGNLVETSSDYGDDDFDDDTLMNLDVGINPAPTKPAAVPQPPEPDRVLTEAHAPPPQDPSDSDDEFGDGVDDDLLAVAEGLVSQIDSAGDRREDTALNMVSTPTKPRVPRIQLEEHEQDLLGDDFGDDFGDFDFEAAEIAATQSVRQTNGTVPLPSQKPKAIQRYLVTKVLQAQYTNPHGSLSKEKVLFVQVDRTNIMKTVHLRGGWLDTPATSKSYVHIIGDFQPSGECIIDDSQNLLILHPDQLLSATVVADSFTCMRRAVLQDRVKATSDKAPPLVYGTLLHEIFQEALMLNKWTSEFLDGVICRITEKHVEDLYTIKVSLSDAREHLRSKMPEMRSWAETFVAPFPRPDAIVQGRNGDKANMSVTKLLDVEEHVWSPMYGLKGNIDATVQVTMKGDHQRRTLTVPFEVKTGKNLTPNHSAQTALYNLLLSDRYDIEIAYGVLYYMGSSQTYRIPTIRHELRHMIMQRNQLACYIRERNVQLPPMKRDTHACSKCYAQTPCFIYHKLADGGDEESSGVKGKFDQVVQHLSPTHREFFLRWEDLLTKEEKESQKLRRELWTMVSTEREKLGRCFSNVIIEEGSAFEESESPKINRYRYSFIKENAGSAFSFLESQLTIGEPIVVSDETGHFALALGFVTSVRKQRISVAVDRRLHNARIRRPGFDELNNQVFASIMEVVPEGATPAQSQGKTKEPPVRYRLDKDEFSNGMATVRNNLVQVMANGVFGSTEIRRLVVDLAPPRFKTKATQYSIADQAGLNVDQRQAIQKVMSANDYALVLGMPGTGKTTTIAHIIRALASQGKSVLLTSYTHSAVDNILLKFKNDKDRFPILRLGAPAKVHPEVQEFAILAGQPMKTFEEIRHAWHDTPVVATTCLGVSHPIFSERTFDYCIVDEASQITLPICLGPIRLARTFVLVGDHNQLPPLVQNEEARVGGLDISLFKLLSDTHPDSVVNLEHQYRMCEDIMTLSNTLIYEGHLKCGTEELRHQKLAIPHMDQLRLKHYDARTIMRPGTPRSFCTNWSGQNCWLHNLLDPEARVRFVNTDKLPSPREEAKGNRIVNPTEAKIVVQLVDALLAVGVPASEIGVMTHYRSQLSLLKHGLRSFGNNIELHTADRFQGRDKEVVVLSLVRSNEACSIGDLLKDWRRINVAFTRAKTKLLVVGSRDTLKGSGEMEMLSKFVKLMEEKDWVYDLPADALESHFFEDAATQFSGGSQLSPMKRSPTKSPRKSQLMNPLKGNGLGVVRRIGGPLAGKENMKPGLKRGNITGKALLKKNPVSRDILNEMMDGIY

SEQ ID NO: 35651 - DNA, 5512 bp, Muscodor strobelii
  misc_feature: SGI EST ID NO. CUFF.84925.0
  misc_feature: Variant of the nucleotide sequence at SEQ ID NO 35649
cccctctacacgccttgtattgcatccgcatccatattggcaattgcattgggaagtggcagccaaaccacgacgactcccacctaccttccattgtatcgcattcgcattgtctttttgtccactgccccaactccatcattccaagcaatctccaattccagttttgcacttctcaattcccctctccccgtcactgtttgtttgtttgtttgtggagctttggagcgtttttggccgtttttgaccctcgtatataccattgtaaatattgtcgttgtcgctctccgttgcttccaactcgatacgtacaaccgagcatggtctctcttcctatctccaactcaccatgcccctccaaaagtcattctctgaacagaatggctctgtaaggaatcgaccgcgttggcacaagtccaagagccattctgcggccacacaccaccatgcccaggccgctccctctcgtcccctcgagcccgtttctgaagcgaccaagaacaaactcaatgcattcaacttccgacccaataccgagccccagaaatcaagtgatcccttcaaaccaaattctaaagactctaaggatgtcaaggacattgtccagaaagacgataagcttcaagagtctaaacaagagtctaaacaggagcctcgagactctcttgcactgccattacccagcaccgatgtctcgacgcccgcaagccgcctggtatggcaagatttgatcggaggctcggagacaaaggtcgaggacgacgatacgagcccctatgacaagatccagtgggacaccaagcagcagcccaagtatggcatgtcccccatgccgcgcaagagggggaacaagcgggcaagaagctcctctcccgcgtcctcgcccgccgcgagcttcaaggccacgacaccggccgtcaacgtcaagagccagtcgcaggcactcaagtcgccccgcgcagacccggccatcgagctgtgggatcgcttctccctgagcggctccgccgccgccgccacgcctctcggcatcaccaacccggcgctcgcccagatcatgatgtcctcctcgccccagccctcccacatccagaacgcggcgtacggcgacctgaagctaaggcgggccataagctgcggcacccactggccgaagcgccggcgagtcgatagtggcgatgtggccatgccgcctcgccgccacgccaccatcgacgagagccccagtggcaattcgaaatcctccatggtcaatgcgctgctaaagatgaagagcatcgccgacgacaccagccgctccaaggccgcccagacacagcgcgatgccctcaagtccccttcgccgagaaagaagcaacaggaccgcgccgctcgttatctgggctctccggaaccacgaacctcacacttgggctccgcgacggtagcattgccagggacaacagcgatgggccaaggaacggccgcgggcaacttggtggaaacttcatccgactacggggatgatgactttgacgatgatactctcatgaacttagacgtcggtatcaacccagctccgacgaagccagctgcggtgccccaaccaccagaaccagacagagttctcaccgaagctcacgccccgccgccccaagacccaagcgattcggatgatgagtttggcgacggagtcgatgatgacctcttagcagtggccgaagggttagtgtcgcagatcgattctgctggtgacaggagggaagacacagctctgaacatggtctccactccaacgaaacctagggtgccaagaattcagctggaagaacatgagcaagatttattgggagatgatttcggcgatgacttcggagatttcgatttcgaggcagctgagatagctgcgacacaatccgttcggcagactaacggaacagtaccgcttgtgcgtaggttatgagagaaaaccccatagtatacttgctaagacggtgcgtagccatctcagaagcctaaggctattcagcggtatctcgtgactaaggttctgcaagctcagtacaccaaccctcacggaagcctgtcaaaagaaaaggttctattcgtgcaagtcgatcgcacaaatatcatgaaaactgtccatcttcgcggaggatggctcgacactccggctacatccaagtcctacgtccacatcatcggtgacttccagccgtctggcgaatgcattatagacgactcgcagaatctactcatcttacacccagaccagttgttgtcagctaccgttgttgcagatagtttcacatgcatgcggagggctgttctccaagatcgcgtcaaggcgacctcggacaaagcacccccgctcgtttatggcactcttctacatgaaatattccaagaagcgttgatgctgaacaagtggacctccgagtttctggatggcgttatctgccggatcaccgagaagcacgtagaagacctttacactatcaaagtctccctcagtgatgcccgtgagcatcttcgctccaagatgccagagatgagatcatgggcagaaacattcgttgcgcctttccccagaccggacgcaatcgttcagggccgaaatggagacaaggcaaacatgagcgtcaccaagctactagatgtagaagagcatgtatggtctcccatgtatggcttgaaaggaaacatcgatgccactgtgcaagtcaccatgaagggggaccatcaacgacggacactcaccgtgcccttcgaagtgaaaacaggcaaaaatcttactcccaatcatagtgctcaaacggcactttacaatctccttttatcggaccgatacgatattgaaatcgcctatggtgtcctgtactacatgggaagctcacagacatatcgaatcccaaccatacgtcatgaactgcgacatatgattatgcagcgaaatcaactggcttgctatatccgcgaacgcaatgtccagcttccgccaatgaagcgagatacgcatgcttgtagcaaatgttacgcccagaccccatgtttcatttaccataagctcgccgatggtggtgacgaggaatcgagtggcgtcaaaggaaaattcgatcaagtagttcagcatttgagcccaacacatcgggaatttttcctcaggtgggaagatttgctgaccaaagaagaaaaggagagccagaaattgcgacgagaactctggaccatggtcagcaccgaacgcgagaaacttgggcggtgcttttccaacgtcatcatcgaggagggatctgcatttgaagaaagtgaaagcccaaaaatcaatcgctacagatacagttttatcaaagagaacgctggttcagctttctccttccttgaatctcagttgacaataggcgagcccatcgttgtatccgacgaaacagggcattttgctcttgctcttggttttgtcacctctgtccggaagcaaaggatttccgttgcggtcgaccgtcgccttcacaacgctcgtatccggcgaccgggattcgatgagctgaataatcaagtttttgccagcatcatggaagttgttccagagggtgcaacacctgcgcagtcccaggggaaaaccaaagagccgcctgtgcgatatcgtcttgacaaggatgagttcagtaatggcatggcgacggtccgcaataatcttgttcaagtcatggctaatggcgtcttcggctcgacagagatccgtcgtcttgtggtcgacctcgcccccccacgtttcaagaccaaggcaacgcagtactccattgctgaccaggcaggtcttaacgtggaccaaagacaagccatccagaaagtgatgagcgccaatgactatgcacttgttctgggtatgccaggaacaggaaagacaacaacaatcgctcacattatccgcgccctcgcgagccagggcaagagtgtacttctaacatcgtacacgcactcggctgttgacaatatccttttgaaattcaagaacgataaagatcgcttcccgattttgcgacttggagcgccggctaaagtgcaccccgaagtccaagagtttgccatcttagcaggacagcccatgaaaactttcgaagaaatacgccatgcctggcacgacacgccagtggtcgccactacttgtttgggcgtcagtcatccaatctttagcgaacgtaccttcgactattgtatcgttgatgaagcgtctcagattaccttacccatctgccttggaccaatacgcctggcgcggacttttgttcttgtcggagatcacaatcaactccctcccctcgtacagaatgaggaggcgcgcgtgggaggactggacattagtctcttcaagctgctctccgatacacaccccgactctgtcgtcaacctggagcatcagtaccgcatgtgtgaagatatcatgacgctgagcaacactttgatatacgaaggtcacctgaagtgtggcacggaagagttgcgacatcaaaaactagcgatccctcacatggatcagttaagactgaagcattacgacgctcggacaatcatgcgaccaggtacccccaggtcgttttgtacgaactggagcggtcagaattgttggctacacaatctccttgatcccgaggcgcgggtgcggttcgtcaatacagataaactgccctcaccacgggaggaagcgaaaggcaaccgcatcgtgaatcccaccgaggccaagatcgttgtgcagctcgttgatgcgttactcgctgtcggtgtgcctgcgagcgagattggcgtcatgacgcactaccggtcccagctttcgttgctcaaacatgggctgagaagcttcggaaacaatatcgagttgcataccgcggatcgcttccagggaagagataaagaggttgttgtgctgagtctcgtgaggagtaatgaggcttgcagcattggtgatctccttaaagactggcgaaggatcaacgttgcttttaccagggcgaagaccaaactcctggtcgtgggcagtcgagacaccttgaaagggagtggagagatggagatgctgagtaaattcgtgaagctcatggaggagaaagattgggtctatgatttgccggctgatgcgttggaaagtcatttctttgaggatgctgcgacgcagttttctggtggcagccaactttcaccgatgaagagaagccccaccaagagccccaggaaaagtcagttgatgaatccattgaaaggcaatggcttaggggtcgtgaggagaattggtggacccttggctggcaaggagaatatgaaacctgggctgaagagagggaacatcactggaaaggcgcttttgaaaaagaatcctgtttcgagggatattctgaatgagatgatggatggcatttactaagctggcgttcaggagcatgggttggcgtgggatggatatattgcatgtgtaggagttggaatgtagcgcgtgggatatatgattatggatattgcatgaatatagcattgttcttca

SEQ ID NO: 35652 - DNA, 1566 bp, Muscodor strobelii
  misc_feature: SGI cDNA ID NO. 572351
  misc_feature: Encodes the peptide sequence at SEQ ID NO 35653
atgagcaacacaagtggacaggtcggcgtggtaccgcctccttctggcgtcacgccagatttcgatcaccccgattcgagttactaccgaggtcatatcgccggcatcgctatctgcgtttttgtcgttaccatactgttctttgtcagggtttatgctagaatcactatgggactgaagtttgtatgtgaggattggatgtgtgttgttgcatgggtaaatttgagaccacagggttatgctcctgttcgatatgctaacttagtgaccaagtatggggagggcttacatgcatgggacgtgacacaacaaaactatcaacaagttctcaagtggctatatgcaagcacagtaatctactgccctgctgcatttttcacgaaagtgaccctcctgcttctcatagctcgcgtgttcgccgtagtgcacaaagtcgtcgttggcctcaaggtcttcatcatactcctcctactctgctatatacccatccaaggcgtcaaaatcttcatatgtacaccgataggcttttactgggatccaaccataacccacggctggtgtttcccccaacgcaaagtatttgtctccgatctaaccctcgcgatcattacggactttgtcatactcctcgttcccctccctctgacctggtccctcaacatgcgcatcacaaaaaagataaaaatcagcctgctcctctgtgctggcggctgtgcaacagcagttacaatactccgcatggtaaaaatagtagaatacatcaagtccgacgatgtaacccacgacttcgcaaccctcgacctcctaaccacgatcgaactcacaatcggactagtatgcgcttgtgtcccctccgccactctcctcgtcgaaagccgtctcgctaatcgaccccaacgcgatccaaacacaccacgcaccttatcttctttctccgatcacaagtatagacgtaacaaaaagcctctctcgaacaggctcgcatccaaaatctccacaaacgccacgggcacaacgtcaaccacgattgcaaaccatcgagaaaaacaccgtcgtaactcccacgattcaacactatcccacgccgcaccagcatctctgagctccgaccatgactccctagatttcgatgtagaggcacaaatgcaatccggtctcgcgatccccatgcccatcccaacccctaatcactcctcggccagaagctcccaaccctcacatatcaacacatgtaccctagaacaaggccaaagagaacgctggctcgtgccctattcttccgttgtccaatcagagtctctttcacatcgtcctccctctccacccattatttcaacgactcttgactctttaccaatcccaaatagaatatcaacttccatccactcagatgaacgtccttcagacgagacagaaaatagcagtggatcgggagagtcaggaataagaaagacagtagatatttacgtccaatctagttccgttgtaggcgaggtgcggtggcatcctgatagaccgtgggacggaagcttaactgatgctttgacgtcgggtatagagcggtag

SEQ ID NO: 35653 - protein, 521 aa, Muscodor strobelii
  misc_feature: SGI Peptide ID NO. 572351
  misc_feature (14)..(315): NCBI GI: 256727848 Blast Desc: NECHADRAFT_6871 [Nectria haematococca mpVI 77-13-4]
  misc_feature (11)..(374): NCBI GI: 261202708 Blast Desc: integral membrane protein [Ajellomyces dermatitidis SLH14081] gi|239590665|gb|EEQ73246.1| integral membrane protein [Ajellomyces dermatitidis SLH14081]
  misc_feature (16)..(383): NCBI GI: 154284936 Blast Desc: [Ajellomyces capsulatus NAm1] gi|150406904|gb|EDN02445.1| [Ajellomyces capsulatus NAm1]
  misc_feature (10)..(338): NCBI GI: 169777825 Blast Desc: [Aspergillus oryzae RIB40] gi|83772115|dbj|BAE62245.1| protein product [Aspergillus oryzae]
  misc_feature (23)..(353): NCBI GI: 67537798 Blast Desc: AN5069.2 [Aspergillus nidulans FGSC A4] gi|40740974|gb|EAA60164.1| AN5069.2 [Aspergillus nidulans FGSC A4] gi|259482049|tpe|CBF76155.1| TPA: integral membrane protein,
  misc_feature (11)..(360): NCBI GI: 115385465 Blast Desc: conserved [Aspergillus terreus NIH2624] gi|114187726|gb|EAU29426.1| conserved [Aspergillus terreus NIH2624]
  misc_feature (16)..(363): NCBI GI: 225556900 Blast Desc: integral membrane protein [Ajellomyces capsulatus G186AR]
  misc_feature (2)..(204): NCBI GI: 261354655 Blast Desc: integral membrane protein [Verticillium albo-atrum VaMs.102]
  misc_feature (16)..(363): NCBI GI: 240277436 Blast Desc: integral membrane protein [Ajellomyces capsulatus H143]
  misc_feature (13)..(348): NCBI GI: 240277548 Blast Desc: integral membrane protein [Ajellomyces capsulatus H143]
MSNTSGQVGVVPPPSGVTPDFDHPDSSYYRGHIAGIAICVFVVTILFFVRVYARITMGLKFVCEDWMCVVAWVNLRPQGYAPVRYANLVTKYGEGLHAWDVTQQNYQQVLKWLYASTVIYCPAAFFTKVTLLLLIARVFAVVHKVVVGLKVFIILLLLCYIPIQGVKIFICTPIGFYWDPTITHGWCFPQRKVFVSDLTLAIITDFVILLVPLPLTWSLNMRITKKIKISLLLCAGGCATAVTILRMVKIVEYIKSDDVTHDFATLDLLTTIELTIGLVCACVPSATLLVESRLANRPQRDPNTPRTLSSFSDHKYRRNKKPLSNRLASKISTNATGTTSTTIANHREKHRRNSHDSTLSHAAPASLSSDHDSLDFDVEAQMQSGLAIPMPIPTPNHSSARSSQPSHINTCTLEQGQRERWLVPYSSVVQSESLSHRPPSPPIISTTLDSLPIPNRISTSIHSDERPSDETENSSGSGESGIRKTVDIYVQSSSVVGEVRWHPDRPWDGSLTDALTSGIER

SEQ ID NO: 35654 - DNA, 1020 bp, Muscodor strobelii
  misc_feature: SGI cDNA ID NO. 572352
  misc_feature: Encodes the peptide sequence at SEQ ID NO 35655
atgtctactcctattcgcaaagttgtcatttcggagttcggtgatgtctctaaagtcaatgttgtgcaatcaagcatcgaggcccccaagccgggcgaagtccaagtcgctccgatctattcaggcttcgccggtagcgacatccagatgcgacgtggccaatacccgctgcagaagaaagccccactgacacccggttattgtctcgccggcacggcaaccacctccggaacacacatcatggctggcgacttagtatgctgcatgaccaagtatgacgcacaagcggaacttgtcaacgtaccagaaaagtacttaatcaggatccccgccggtgtaagcccggaggctgcaacagctatcgtcttagactgggcgacagcatacggtatggttgataggtcggccaaagttacaaaagggcagcgcgtctttattcacgggataagtggcgctgtcggctatgctacgatgaagctgtgccagttgcgcggtgcagaggtatatggcaccgcatcagagcgcaaccatcaggacatcagagatcagggggctacgcctttctcttacaggaataaggactggatcaagactatgcaagaccttggaggtgttcatgccgtgtttgatgctttgggcccggagagctgggaggagtcctactcgatacttcccccatgtagtggtggtaaagagaaaggcattctagtaggattcggggccaatcagcaagccctaaatggtgaggaaccatctgggggccctataattcccgtcatcaagctcttcctgaagaatgcgaaagtgttctcgaaccgaagcacaacattctacggcattacaagagaccaaccgaccttcgtcccagatgtcaatagactctttggcatggtcacggatggtactattgatgttaagattcgcaatacgtgggatatggacgacatcaaggaagcacacgagcattggggaaaaagttccggagctggatccaatctcattcgtatttctaaggcatag

SEQ ID NO: 35655 - protein, 339 aa, Muscodor strobelii
  misc_feature: SGI Peptide ID NO. 572352
  misc_feature (31)..(109): Pfam Id: PF08240 Pfam Desc: Alcohol dehydrogenase GroES-like domain
  misc_feature (140)..(293): Pfam Id: PF00107 Pfam Desc: Zinc-binding dehydrogenase
  misc_feature (140)..(224): Pfam Id: PF00107 Pfam Desc: Zinc-binding dehydrogenase
  misc_feature (1)..(336): NCBI GI: 256722684 Blast Desc: NECHADRAFT_53044 [Nectria haematococca mpVI 77-13-4]
  misc_feature (1)..(338): NCBI GI: 462379 Blast Desc: INC11_TRIAT RecName: Full=Protein indc11 gi|288988|emb|CAA80224.1| INDC11 [Hypocrea lixii]
  misc_feature (5)..(336): NCBI GI: 256721777 Blast Desc: NECHADRAFT_53308 [Nectria haematococca mpVI 77-13-4]
  misc_feature (1)..(325): NCBI GI: 169611510 Blast Desc: SNOG_08869 [Phaeosphaeria nodorum SN15] gi|111062917|gb|EAT84037.1| SNOG_08869 [Phaeosphaeria nodorum SN15]
  misc_feature (5)..(336): NCBI GI: 46115430 Blast Desc: FG03557.1 [Gibberella zeae PH-1]
  misc_feature (2)..(338): NCBI GI: 39947010 Blast Desc: MGG_08461 [Magnaporthe grisea 70-15] gi|145012289|gb|EDJ96945.1| MGG_08461 [Magnaporthe grisea 70-15]
  misc_feature (3)..(338): NCBI GI: 261356923 Blast Desc: indc11 [Verticillium albo-atrum VaMs.102]
  misc_feature (7)..(334): NCBI GI: 186477110 Blast Desc: alcohol dehydrogenase [Burkholderia phymatum STM815] gi|184193569|gb|ACC71534.1| Alcohol dehydrogenase GroES domain protein [Burkholderia phymatum STM815]
  misc_feature (6)..(322): NCBI GI: 27381651 Blast Desc: oxidoreductase [Bradyrhizobium japonicum USDA 110] gi|27354819|dbj|BAC51805.1| bll6540 [Bradyrhizobium japonicum USDA 110]
  misc_feature (6)..(335): NCBI GI: 220907278 Blast Desc: Alcohol dehydrogenase zinc-binding domain protein [Cyanothece sp. PCC 7425] gi|219863889|gb|ACL44228.1| Alcohol dehydrogenase zinc-binding domain protein [Cyanothece sp. PCC
  misc_feature (8)..(334): SWISSPROT Homolog: EC 1.6.5.5 NADPH:quinone reductase
MSTPIRKVVISEFGDVSKVNVVQSSIEAPKPGEVQVAPIYSGFAGSDIQMRRGQYPLQKKAPLTPGYCLAGTATTSGTHIMAGDLVCCMTKYDAQAELVNVPEKYLIRIPAGVSPEAATAIVLDWATAYGMVDRSAKVTKGQRVFIHGISGAVGYATMKLCQLRGAEVYGTASERNHQDIRDQGATPFSYRNKDWIKTMQDLGGVHAVFDALGPESWEESYSILPPCSGGKEKGILVGFGANQQALNGEEPSGGPIIPVIKLFLKNAKVFSNRSTTFYGITRDQPTFVPDVNRLFGMVTDGTIDVKIRNTWDMDDIKEAHEHWGKSSGAGSNLIRISKA

SEQ ID NO: 35656 - DNA, 1575 bp, Muscodor strobelii
  misc_feature: SGI EST ID NO. CUFF.84915.0
  misc_feature: Variant of the nucleotide sequence at SEQ ID NO 35654
gtccaattctgtccgccggtttagtagaggatccggactaagccaggcacgccggcatacgtatcaccagctcaaactacctgatgccacgttcacgccgccgaatgcgagtgagtgctcgggtgttttcgaactatatgccgacacggcttcatgaacatgacatctcgcaaggctatgaggttctggtggacgaacaaggcccggtatgcgggttccgtcaatggccatcgtatgtataagaatgcgtgatgaacgcaagatgtaggttgaatactgcttcagagcatcacacgacatcgcttcctatatactcataccttagtgcatacaatatcaacatccaatatcaacatcaacgaaagcacttcgcgtcttgttcgtctctgactatcccctcattaaacaatatcctttaaccctatcacaatgtctactcctattcgcaaagttgtcatttcggagttcggtgatgtctctaaagtcaatgttgtgcaatcaagcatcgaggcccccaagccgggcgaagtccaagtcgctccgatctattcaggcttcgccggtagcgacatccagatgcgacgtggccaatacccgctgcagaagaaagccccactgacacccggttattgtctcgccggcacggcaaccacctccggaacacacatcatggctggcgacttagtatgctgcatgaccaagtatgacgcacaagcggaacttgtcaacgtaccagaaaagtacttaatcaggatccccgccggtgtaagcccggaggctgcaacagctatcgtcttagactgggcgacagcatacggtatggttgataggtcggccaaagttacaaaagggcagcgcgtctttattcacgggataagtggcgctgtcggctatgctacgatgaagctgtgccagttgcgcggtgcagaggtatatggcaccgcatcagagcgcaaccatcaggacatcagagatcagggggctacgcctttctcttacaggaataaggactggatcaagactatgcaagaccttggaggtgttcatgccgtgtttgatgctttgggcccggagagctgggaggagtcctactcgatacttcccccatgtagtggtggtaaagagaaaggcattctagtaggattcggggccaatcagcaagccctaaatggtgaggaaccatctgggggccctataattcccgtcatcaagctcttcctgaagaatgcgaaagtgttctcgaaccgaagcacaacattctacggcattacaagagaccaaccgaccttcgtcccagatgtcaatagactctttggcatggtcacggatggtactattgatgttaagattcgcaatacgtgggatatggacgacatcaaggaagcacacgagcattggggaaaaagttccggagctggatccaatctcattcgtatttctaaggcatagaaatatatgtatatactttcttctcctatgtcatgatgcaacatatagcgatggatttcttattagattatgcactggaagatcttgtatttcatttctcatatcaatagaacgaaccaaatctcc

SEQ ID NO: 35657 - DNA, 1116 bp, Muscodor strobelii
  misc_feature: SGI cDNA ID NO. 572353
  misc_feature: Elevated expression when VOC is produced
  misc_feature: Encodes the peptide sequence at SEQ ID NO 35658
atgcggcagcgaagctctcacttcaatccatccaaggcctacgccatattgaaaagacttcgtacagaggagatacaagccctccgagacgtctacttgatttacaaatctgtccagcaggaagagcactgcgatgagcctgacgacagtaccccggatgacaggatacctagaagctttactggacatgttacagcatatgccactcagtacaaagagcttttctctcgaaggcgcctgagaaatgcattgattagtagttcaatagttgcactcgctcagcagctctgtgggataaacatacttgcattctactctggaccactcttcaaagatatactacataatcctcctccccgcgatcccatgctctacagtcttggctatggggcaacgaactttgtatttggattacctgcaatcagaacaatagacacgttaggccgtcgaaaatggctcgtcataacactacctattatgtgtatcttcatgaccgccgcagcactctcgaccctgatcaccacttccgttcgggtgttcgcggctgcatactctccagggatgggcccaattccattcaccttagcatctgagagtttcccgttatcccaccgtgaagctggatgcgcatttacaattgcaatcaatcttctcttcgctggacttttatcgatattgttccctagtatcgacgcaggccttaaaagcggtggcacattaggactatttgcgggcttgaatctcgtcgcatttatcctagtattcctgctagtcgaagagacaaagcggcgctcgctcgaggatttggattcgatatttgccgtgaagaaatgggaattcacccgtcatcaggttacgcagtatattccgtggttctgtcgttactacttcctccgtcgggcaataccaagacccgagctttacgtggatctcatctggggcgagcctagaactacagaaagtgacaacgaagaaggtgatgcgcatcaagggaaaagttggccaaatgacaacaaccgttcggagggagtgctcttcaatcctgcgccattcgctacagagttggaaaacatcagacgaccctctaatgtgtcgagagatgacgatcattggtaa

SEQ ID NO: 35658 - protein, 371 aa, Muscodor strobelii
  misc_feature: SGI Peptide ID NO. 572353
  misc_feature (71)..(273): Pfam Id: PF00083 Pfam Desc: Sugar (and other) transporter
  misc_feature (1)..(307): NCBI GI: 261355108 Blast Desc: sugar transporter [Verticillium albo-atrum VaMs.102]
  misc_feature (1)..(317): NCBI GI: 145615069 Blast Desc: MGG_05363 [Magnaporthe grisea 70-15] gi|145021991|gb|EDK06011.1| MGG_05363 [Magnaporthe grisea 70-15]
  misc_feature (10)..(291): NCBI GI: 46117246 Blast Desc: FG04465.1 [Gibberella zeae PH-1]
  misc_feature (17)..(323): NCBI GI: 46107894 Blast Desc: FG00830.1 [Gibberella zeae PH-1]
  misc_feature (11)..(330): NCBI GI: 238844604 Blast Desc: hexose transporter HXT11 [Microsporum canis CBS 113480]
  misc_feature (9)..(308): NCBI GI: 255956055 Blast Desc: Pc21g17850 [Penicillium chrysogenum Wisconsin 54-1255] gi|211590491|emb|CAP96682.1| Pc21g17850 [Penicillium chrysogenum Wisconsin 54-1255]
  misc_feature (12)..(308): NCBI GI: 145233043 Blast Desc: An02g07610 [Aspergillus niger] gi|134056818|emb|CAK37724.1| protein product [Aspergillus niger]
  misc_feature (11)..(300): NCBI GI: 238838249 Blast Desc: sugar transporter [Microsporum canis CBS 113480]
  misc_feature (12)..(347): NCBI GI: 156030754 Blast Desc: SS1G_14316 [Sclerotinia sclerotiorum 1980] gi|154700707|gb|EDO00446.1| SS1G_14316 [Sclerotinia sclerotiorum 1980]
  misc_feature (11)..(308): NCBI GI: 156044044 Blast Desc: SS1G_10125 [Sclerotinia sclerotiorum 1980] gi|154694514|gb|EDN94252.1| SS1G_10125 [Sclerotinia sclerotiorum 1980]
  misc_feature: Useful for introducing or modulating the production of volatile compounds
MRQRSSHFNPSKAYAILKRLRTEEIQALRDVYLIYKSVQQEEHCDEPDDSTPDDRIPRSFTGHVTAYATQYKELFSRRRLRNALISSSIVALAQQLCGINILAFYSGPLFKDILHNPPPRDPMLYSLGYGATNFVFGLPAIRTIDTLGRRKWLVITLPIMCIFMTAAALSTLITTSVRVFAAAYSPGMGPIPFTLASESFPLSHREAGCAFTIAINLLFAGLLSILFPSIDAGLKSGGTLGLFAGLNLVAFILVFLLVEETKRRSLEDLDSIFAVKKWEFTRHQVTQYIPWFCRYYFLRRAIPRPELYVDLIWGEPRTTESDNEEGDAHQGKSWPNDNNRSEGVLFNPAPFATELENIRRPSNVSRDDDHW

SEQ ID NO: 35659 - DNA, 1635 bp, Muscodor strobelii
  misc_feature: SGI EST ID NO. CUFF.85033.4
  misc_feature: Variant of the nucleotide sequence at SEQ ID NO 35657
caatacctctctggtttccagatcctgggagctccattggtgccctctctctttcttctggctagtctctacttttgccccgaaagcccaagattttacatgcggcagcgaagctctcacttcaatccatccaaggcctacgccatattgaaaagacttcgtacagaggagatacaagccctccgagacgtctacttgatttacaaatctgtccagcaggaagagcactgcgatgagcctgacgacagtaccccggatgacaggatacctagaagctttactggacatgttacagcatatgccactcagtacaaagagcttttctctcgaaggcgcctgagaaatgcattgattagtagttcaatagttgcactcgctcagcagctctgtgggataaacatacttgcattctactctggaccactcttcaaagatatactacataatcctcctccccgcgatcccatgctctacagtcttggctatggggcaacgaactttgtatttggattacctgcaatcagaacaatagacacgttaggccgtcgaaaatggctcgtcataacactacctattatgtgtatcttcatgaccgccgcagcactctcgaccctgatcaccacttccgttcggggtccagtcgttgcagttttcgtttttgtaagctctgaaccaaggctgccaggcatcttcacactaatattagtcagtgttcgcggctgcatactctccagggatgggtaagtcggcagaaaacaaccatcgatatggcatactcaaacaagataggcccaattccattcaccttagcatctgagagtttcccgttatcccaccgtgaagctgtaagttgccattctgaacgcagtatttgcagactctaccaactaaatactgtgcttcagggatgcgcatttacaattgcaatcaatcttctcttcgctggacttttatcgatattgttccctagtatcgacgcaggccttaaaagcggtggcacattaggactatttgcgggcttgaatctcgtcgcatttatcctagtattcctgctagtcgaagagacaaagcggcgctcgctcgaggatttggattcgatatttgccgtgaagaaatgggaattcacccgtcatcaggttacgcagtatattccgtggttctgtcgttactacttcctccgtcgggcaataccaagacccgagctttacgtggatctcatctggggcgagcctagaactacagaaagtgacaacgaagaaggtgatgcgcatcaagggaaaagttggccaaatgacaacaaccgttcggagggagtgctcttcaatcctgcgccattcgctacagagttggaaaacatcagacgaccctctaatgtgtcgagagatgacgatcattggtaaatattgagatttcattggcaggcagattcaatctcactagttaaaccgttgtattcttcaaattgtccatcattattgcgcataatccttacgcttcatccttatgaatgaacacttcccaacacgctagactactgtggcagcggtaggttgcagccttgtcaagttattacctatgtcatgacatcttcgactgcactagagttaaggtaggcccaatgagcttcagttgcta

SEQ ID NO: 35660 - DNA, 987 bp, Muscodor strobelii
  misc_feature: SGI cDNA ID NO. 572354
  misc_feature: Elevated expression when VOC is produced
  misc_feature: Encodes the peptide sequence at SEQ ID NO 35661
atggaccggcacggatctttaagttaccctccgaatgtgcgtaggccgacagtcgatcctcgcagacctagtaacgtcgatccgggtgctcgaactcctagtgtttcgacagtaccaaatccatacgagtcgcaaatacgccgaagacgaaataatttccaggctgtcattgagaacccgttatcccatcttaccgatgaagagctcaagaaagatgtcgaagaattccacagagattatctaaaatctgcagactttacccagctgtacagagcagcacaacttgcaaaagatattcgaacctatgatgcggttgcacgatccgaagacccaaacacgggtgcccatttgccagtgcaacttaatgccagagagaaaactgccttgaaaatagaacgagacaaactaccctctgagcccacgatgctcgtagtaattctgacagtgtcgctcgcagcatttctgcaaggattcgtacaatcctctatcaatggagcctcgcttttcccgactttctttcacctctctaaagatggtcgactctctactgaagataactggaagattggagctgctaatgcctcgccgtttctctttgctgcgcttctggggtgtcccctggccctgcctgtaaactaccatttcgggagacgaggagctatgacaattgcagcctgcctcatatttgtgagctcgctaggtgctgtatggtgtgatgaatggtgtgaactctttgggatccgagtgatcaatggcctcggtatggggattaaagccgtcagtaccccaattttggcttcagaaacagccgttggttactggcgaggcacgtcgatcttggcgtggcagctttgggtcgcatttggtatttttgttggcttcgcatttaatttaatcttcaacaccgctggtgccaacaacccattaacgcctcggctcgtaagtgatctaacttgccaaatattagaaactagtcctttgtcttaa

SEQ ID NO: 35661 - protein, 328 aa, Muscodor strobelii
  misc_feature: SGI Peptide ID NO. 572354
  misc_feature (145)..(305): Pfam Id: PF00083 Pfam Desc: Sugar (and other) transporter
  misc_feature (58)..(307): NCBI GI: 145615069 Blast Desc: MGG_05363 [Magnaporthe grisea 70-15] gi|145021991|gb|EDK06011.1| MGG_05363 [Magnaporthe grisea 70-15]
  misc_feature (62)..(307): NCBI GI: 256721862 Blast Desc: NECHADRAFT_54538 [Nectria haematococca mpVI 77-13-4]
  misc_feature (64)..(314): NCBI GI: 46117246 Blast Desc: FG04465.1 [Gibberella zeae PH-1]
  misc_feature (50)..(304): NCBI GI: 255942425 Blast Desc: Pc18g01360 [Penicillium chrysogenum Wisconsin 54-1255] gi|211586714|emb|CAP94360.1| Pc18g01360 [Penicillium chrysogenum Wisconsin 54-1255]
  misc_feature (31)..(304): NCBI GI: 154299617 Blast Desc: BC1G_10771 [Botryotinia fuckeliana B05.10] gi|150857263|gb|EDN32455.1| BC1G_10771 [Botryotinia fuckeliana B05.10]
  misc_feature (52)..(306): NCBI GI: 116200746 Blast Desc: CHGG_10918 [Chaetomium globosum CBS 148.51] gi|88175632|gb|EAQ83100.1| CHGG_10918 [Chaetomium globosum CBS 148.51]
  misc_feature (51)..(304): NCBI GI: 121705830 Blast Desc: sugar transporter [Aspergillus clavatus NRRL 1] gi|119399324|gb|EAW09752.1| sugar transporter [Aspergillus clavatus NRRL 1]
  misc_feature (48)..(304): NCBI GI: 157674377 Blast Desc: sugar transporter [Gibberella moniliformis]
  misc_feature (51)..(304): NCBI GI: 67524823 Blast Desc: AN2869.2 [Aspergillus nidulans FGSC A4] gi|40744264|gb|EAA63440.1| AN2869.2 [Aspergillus nidulans FGSC A4] gi|259486194|tpe|CBF83840.1| TPA: galactose-proton symport,
  misc_feature (50)..(319): NCBI GI: 242809497 Blast Desc: sugar transporter, [Talaromyces stipitatus ATCC 10500] gi|218716006|gb|EED15428.1| sugar transporter, [Talaromyces stipitatus ATCC 10500]
  misc_feature: Useful for introducing or modulating the production of volatile compounds
MDRHGSLSYPPNVRRPTVDPRRPSNVDPGARTPSVSTVPNPYESQIRRRRNNFQAVIENPLSHLTDEELKKDVEEFHRDYLKSADFTQLYRAAQLAKDIRTYDAVARSEDPNTGAHLPVQLNAREKTALKIERDKLPSEPTMLVVILTVSLAAFLQGFVQSSINGASLFPTFFHLSKDGRLSTEDNWKIGAANASPFLFAALLGCPLALPVNYHFGRRGAMTIAACLIFVSSLGAVWCDEWCELFGIRVINGLGMGIKAVSTPILASETAVGYWRGTSILAWQLWVAFGIFVGFAFNLIFNTAGANNPLTPRLVSDLTCQILETSPLS

SEQ ID NO: 35662 - DNA, 1783 bp, Muscodor strobelii
  misc_feature: SGI EST ID NO. CUFF.85051.0
  misc_feature: Variant of the nucleotide sequence at SEQ ID NO 35660
attccgccttgcgcgctaatactcccctctcacacaatcatgtttgacttaaaaattggaagcattgtatgatatacttacataactcggcttctgaaagatcgatacattttccactgttgctgctcatcagaatcgaagtcaatgaagcgcaatttcatgactttagacatctcagtgccctcctcgccggcactggcaagggatctgtacacagatcttgtgatttaaagcaaccatgcacgtgaagtccacacacagcctcattgacttccacctggttcaatgacctcatggtcgtatgcaaggtgacgacgcaacaaggcatcaggttgttgccagtctagggattgatcgctatgcgcccgcggcccatccactccaccgacgccacacatgaagatgtgtctcattacatctcgatggcgcagaaacttgcaatggctatgcaaaaatctgtttgaatccgggcgtagaacggaagttgttaagatatctagctgtgggcattagcaggcagttctttgggtgattccttcaccgatgggatttccttacattgctaaacgctaggatatgtcaccatgcacttacctttggatatctgacatgtaaatggtggcaatcacggtaggcttccgcttagagccttgttctctaccccactcaagtacagacaatttgtttgataaccacattatacgccgctatgattgttattcgaaacacatgctttattctttgactcctatacaggattgttgagtatcttaaggatatgatcccgaactctcaaaaactctcccagcataatggaccggcacggatctttaagttaccctccgaatgtgcgtaggccgacagtcgatcctcgcagacctagtaacgtcgatccgggtgctcgaactcctagtgtttcgacagtaccaaatccatacgagtcgcaaatacgccgaagacgaaataatttccaggctgtcattgagaacccgttatcccatcttaccgatgaagagctcaagaaagatgtcgaagaattccacagagattatctaaaatctgcagactttacccagctgtacagagcagcacaacttgcaaaagatattcgaacctatgatgcggttgcacgatccgaagacccaaacacgggtgcccatttgccagtgcaacttaatgccagagagaaaactgccttgaaaatagaacgagacaaactaccctctgagcccacgatgctcgtagtaattctgacagtgtcgctcgcagcatttctgcaaggattcgtacaatcctctatcaatggagcctcgcttttcccgactttctttcacctctctaaagatggtcgactctctactgaagataactggaagattggagctgctaatgcctcgccgtttctctttgctgcgcttctggggtgtcccctggccctgcctgtaaactaccatttcgggagacgaggagctatgacaattgcagcctgcctcatatttgtgagctcgctaggtgctgtatggtgtgatgaatggtgtgaactctttgggatccgagtgatcaatggcctcggtatggggattaaagccgtcagtaccccaattttggcttcagaaacagccgttggttactggcgaggcacgtcgatcttggcgtggcagctttgggtcgcatttggtatttttgttggcttcgcatttaatttaatcttcaacaccgctggtgccaacaacccattaacgcctcggctcgtaagtgatctaacttgccaaatattagaaac

SEQ ID NO: 35663 - DNA, 2004 bp, Muscodor strobelii
  misc_feature: SGI cDNA ID NO. 572355
  misc_feature: Elevated expression when VOC is produced
  misc_feature: Encodes the peptide sequence at SEQ ID NO 35664
atggaagctttcggcctagccgccagtgttgtccaggttgctgctgctgctgctggtcttattcaatctatcggcaaattcgttgagcaaaccagatctgttccagactccattcgcgaagtgcatgatgaattgcaaaatctagaggcagctttgcaagggatcaatgagacattcgagaagcgccccaagcaattggcattcgaatacaatcatcacgataggataaagcgaattctagagtcatgccaggtgtcacttagagagttagaccaagcgctcccggagcttaaagacgatgtcaaagctattgagaagctcaaattgagtatacaaaagtcgctaaaagaagacagagtacaacacattttacgacacatacattcttacacaactactctccaattgagcttacagacattatctcttggagagtcttggcttaatcgtcaatcgcaggaggaaatcttgagcgaggtacgcagaatacaccaagagattcgctcgacaggtctattttctggtcgcaccgacaggagagccaaagctatcacagataacacagcacaaaacgagcgccctgacacacctccctctatacctgatcaagacagcagcattctggacaaagagttgagagactggagagagacggtcgacgaagtcacggccgctgtttctttatataataccgaccataacccaggcgacggaccattggagagtagcacaaccttgccaaccctagaagatgacatgtccgactcagaagatgaagaactagacgaaatcagtcgtcaaatacttcggttgacgatcaagaataatcagtctattgtcagccagctcatgcaaagcgaaatatatttccaagctgcagagtatcaaagacgtggaatcaggaaatgtactcgattaattcagagcggtaatgaagagtgcgaacgtggcaatgataccgaaaatgcccctaacatgctggagatgcaagaaacgctcgtcgacatcctaatcgggtgcgaaacaccacagacggacgaggaagccgaagagctcttgatacagctgctagacgaagagatttcgctggaggaaaccgatgatactgatcgtgagtgccggctgaatcataagcttggaggtttctacgcaagccaaggaaactttcgcaagtctaaaagacatctgaatcgtgccttcaagggccgttcaaaggcgagtcacgaaggtacaagggagtctgcagaacaactcatcaaaacgctgcaagttcttcagctcattgatgaggcacgcggcattcaagagtatctcgaagagcaattcccgcagcgagattcttcaacgcaagcaacatcgtcatcatgtggtgcatcgacgagaacgccgaggacgagcataagcactgggaccgatctgaccagtctatttcagtggtgtagggagaggggcttcaatgtcaactgcccaggctttgcatttgacttttatgatgaagggttagggaagacgcctatacaccaagcaattgaagatgaggaagtcggaatacttcgagagatgatacagaatgtgccacacatcgagcagcccgatgctacaggttcaatgcctttgcacgtggctgctgacacttgtagtaaagcgatattctccacactattggagaaagaacccgatctcgatgttcaggatcaaaagaacatgactcctctgcatagatgtcaaagcaaatctggaggagttcaggttgcagaaatgatattgacccggtgccctcagctactcgaccgcgttgattgcttcgaaaaaacggcactttacatggcgtgcgagaagggaaatgaaaatatggtgaaatatctgctatcgagaggtgcaaaacccaatagaccagggccttgtattccgctgtgcgtcgatgcgacgaacgagtctcgcgaactcatcagttacaacaaggacttcttctgggggaagtatatcgttgcgaaccaaaggtaa

SEQ ID NO: 35664 - protein, 667 aa, Muscodor strobelii
  misc_feature: SGI Peptide ID NO. 572355
  misc_feature (602)..(634): Pfam Id: PF00023 Pfam Desc: Ankyrin repeat
  misc_feature (114)..(630): NCBI GI: 261355109 Blast Desc: conserved [Verticillium albo-atrum VaMs.102]
  misc_feature (1)..(630): NCBI GI: 145615067 Blast Desc: MGG_13021 [Magnaporthe grisea 70-15] gi|145021990|gb|EDK06010.1| MGG_13021 [Magnaporthe grisea 70-15]
  misc_feature (463)..(623): NCBI GI: 46117248 Blast Desc: FG04466.1 [Gibberella zeae PH-1]
  misc_feature (502)..(630): NCBI GI: 229582572 Blast Desc: Ankyrin [Sulfolobus islandicus Y.N.15.51] gi|228013288|gb|ACP49049.1| Ankyrin [Sulfolobus islandicus Y.N.15.51]
  misc_feature (502)..(652): NCBI GI: 115660682 Blast Desc: : similar to ankyrin 2,3/unc44 [Strongylocentrotus purpuratus] gi|115926636|ref|XP_001187127.1| : similar to ankyrin 2,3/unc44 [Strongylocentrotus purpuratus]
  misc_feature (448)..(604): NCBI GI: 229826919 Blast Desc: GCWU000182_02303 [Abiotrophia defectiva ATCC 49176] gi|229788537|gb|EEP24651.1| GCWU000182_02303 [Abiotrophia defectiva ATCC 49176]
  misc_feature (451)..(630): NCBI GI: 229582572 Blast Desc: Ankyrin [Sulfolobus islandicus Y.N.15.51] gi|228013288|gb|ACP49049.1| Ankyrin [Sulfolobus islandicus Y.N.15.51]
  misc_feature (502)..(631): NCBI GI: 72071215 Blast Desc: : similar to ankyrin 2,3/unc44, partial [Strongylocentrotus purpuratus] gi|115747745|ref|XP_001192558.1| : similar to ankyrin 2,3/unc44, partial [Strongylocentrotus
  misc_feature (501)..(627): NCBI GI: 123509976 Blast Desc: ankyrin repeat protein [Trichomonas vaginalis G3] gi|121913042|gb|EAY17856.1| ankyrin repeat protein, [Trichomonas vaginalis G3]
  misc_feature (484)..(627): NCBI GI: 189501781 Blast Desc: Aasi_0340 [Candidatus Amoebophilus asiaticus 5a2] gi|189497222|gb|ACE05769.1| Aasi_0340 [Candidatus Amoebophilus asiaticus 5a2]
  misc_feature: Useful for introducing or modulating the production of volatile compounds
MEAFGLAASVVQVAAAAAGLIQSIGKFVEQTRSVPDSIREVHDELQNLEAALQGINETFEKRPKQLAFEYNHHDRIKRILESCQVSLRELDQALPELKDDVKAIEKLKLSIQKSLKEDRVQHILRHIHSYTTTLQLSLQTLSLGESWLNRQSQEEILSEVRRIHQEIRSTGLFSGRTDRRAKAITDNTAQNERPDTPPSIPDQDSSILDKELRDWRETVDEVTAAVSLYNTDHNPGDGPLESSTTLPTLEDDMSDSEDEELDEISRQILRLTIKNNQSIVSQLMQSEIYFQAAEYQRRGIRKCTRLIQSGNEECERGNDTENAPNMLEMQETLVDILIGCETPQTDEEAEELLIQLLDEEISLEETDDTDRECRLNHKLGGFYASQGNFRKSKRHLNRAFKGRSKASHEGTRESAEQLIKTLQVLQLIDEARGIQEYLEEQFPQRDSSTQATSSSCGASTRTPRTSISTGTDLTSLFQWCRERGFNVNCPGFAFDFYDEGLGKTPIHQAIEDEEVGILREMIQNVPHIEQPDATGSMPLHVAADTCSKAIFSTLLEKEPDLDVQDQKNMTPLHRCQSKSGGVQVAEMILTRCPQLLDRVDCFEKTALYMACEKGNENMVKYLLSRGAKPNRPGPCIPLCVDATNESRELISYNKDFFWGKYIVANQR

SEQ ID NO: 35665 - DNA, 3533 bp, Muscodor strobelii
  misc_feature: SGI EST ID NO. CUFF.85062.0
  misc_feature: Variant of the nucleotide sequence at SEQ ID NO 35663
tagaactccacattcgtattgagtaatgattgcctccgtgggcgcggactgtaatgcttgtccggctctggtcggggatgccaagatcgctcagccactcgttcgccgtgttttagctgtgaagcacctttagcaatcatctttctacagtatatcctcgagagcaatacccagtggtctcattgtcgttgtgataccggctaagcggccgacggaggtatgatatatattcaccacccccgggagcggagttatgtcccacttcaccggaaagaacccacccactgccgtacacgacgacgcagccgacccttagggtcgaggcatcttatttaggaacggttaagtatggaagctttcggcctagccgccagtgttgtccaggttgctgctgctgctgctggtcttattcaatctatcggcaaattcgttgagcaaaccagatctgttccagactccattcgcgaagtgcatgatgaattgcaaaatctagaggcagctttgcaagggatcaatgagacattcgagaagcgccccaagcaattggcattcgaatacaatcatcacgataggataaagcgaattctagagtcatgccaggtgtcacttagagagttagaccaagcgctcccggagcttaaagacgatgtcaaagctattgagaagctcaaattgagtatacaaaagtcgctaaaagaagacagagtacaacacattttacgacacatacattcttacacaactactctccaattgagcttacagacattatctcttggagagtcttggcttaatcgtcaatcgcaggaggaaatcttgagcgaggtacgcagaatacaccaagagattcgctcgacaggtctattttctggtcgcaccgacaggagagccaaagctatcacagataacacagcacaaaacgagcgccctgacacacctccctctatacctgatcaagacagcagcattctggacaaagagttgagagactggagagagacggtcgacgaagtcacggccgctgtttctttatataataccgaccataacccaggcgacggaccattggagagtagcacaaccttgccaaccctagaagatgacatgtccgactcagaagatgaagaactagacgaaatcagtcgtcaaatacttcggttgacgatcaagaataatcagtctattgtcagccagctcatgcaaagcgaaatatatttccaagctgcagagtatcaaagacgtggaatcaggaaatgtactcgattaattcagagcggtaatgaagagtgcgaacgtggcaatgataccgaaaatgcccctaacatgctggagatgcaagaaacgctcgtcgacatcctaatcgggtgcgaaacaccacagacggacgaggaagccgaagagctcttgatacagctgctagacgaagagatttcgctggaggaaaccgatgatactgatcgtgagtgccggctgaatcataagcttggaggtttctacgcaagccaaggaaactttcgcaagtctaaaagacatctgaatcgtgccttcaagggccgttcaaaggcgagtcacgaaggtacaagggagtctgcagaacaactcatcaaaacgctgcaagttcttcagctcattgatgaggcacgcggcattcaagagtatctcgaagagcaattcccgcagcgagattcttcaacgcaagcaacatcgtcatcatgtggtgcatcgacgagaacgccgaggacgagcataagcactgggaccgatctgaccagtctatttcagtggtgtagggagaggggcttcaatgtcaactgcccaggctttgcatttgacttttatgatgaagggttagggaagacgcctatacaccaagcaattgaagatgaggaagtcggaatacttcgagagatgatacagaatgtgccacacatcgagcagcccgatgctacaggttcaatgcctttgcacgtggctgctgacacttgtagtaaagcgatattctccacactattggagaaagaacccgatctcgatgttcaggatcaaaagaacatgactcctctgcatagatgtcaaagcaaatctggaggagttcaggttgcagaaatgatattgacccggtgccctcagctactcgaccgcgttgattgcttcgaaaaaacggcactttacatggcgtgcgagaagggaaatgaaaatatggtgaaatatctgctatcgagaggtgcaaaacccaatagaccagggccttgtattccgctggtcagtgcaattgacgctgcagctcgatcgcgttccaagattcgaattgtcaagctcctaataaattacggggcagatccaagaatccatgatgtcagtggtagaaacgcgtttgaagccgcgaataatgctggacttgcaggaggcgaaatcaggcaactattagatagtgcgtcgatgcgacgaacgagtctcgcgaactcatcagttacaacaaggacttcttctgggggaagtatatcgttgcgaaccaaaggtaattagaggttattgggaaaatgttgtaaacacaagtgtcatgaacctttacatgcctgtcaattttacaacggcgttttactatctatttgaatcgcagtctcagctgttgcaaaatgcttccagaggaagcacgtaactcgcgaatcaaggaaatgccgccaattgtatttgtacaaatagttgctgtccatgttgtactgaaactctccgtctgggccaacttgatgagcctgccgatagcacatcgtcgatctaaagaagaggtcgagtcgttgaatttcattccccttttcttcttagcgagagaatgtcagagagcttcagatcgcctttagcaccccagccagaaaggccactttcaacttcggggcgaacggacgtataccaattccatgctcgcctatctagttcggtggtggtcagatggcccttccagctctcaatcaccagccttatggcacctagcaagcgggatacattctcttccttctcagcctcaagtatcttgccactttttctcttcggtgtgtgttttgcgtccttccgttcaacgtcctgtaaagaatcgactcgagtggcgaagctacgaaagagataagcccgtgccgcttctggccggtgcaccggcatcccaatcacaccggtctggtaggatctcccagacaccgaccctgcagcgccgctcgccttattcttcatctcttcgagatctaaaccccacagggcttcgccttcgacctttgcatggtcacccgtaaggcgtagacgttcggcgagagcgcccttcagacagtcgcgcatgatgcgccagcggtcgggacccaacatgacacccccgtaccaacgtgtcatcacgactagcgtatcaatggtgttactttcttgcatgtttttcaatagaaatgcaccgcaaccactttctccgtcatcaaatgactcttctttaactgtagttgcattaaataaatgcgtttttactctagctctatacgcccctagtagccggaaaa

SEQ ID NO: 35666 - DNA, 1500 bp, Muscodor strobelii
  misc_feature: SGI cDNA ID NO. 572356
  misc_feature: Reduced expression when VOC is produced
  misc_feature: Encodes the peptide sequence at SEQ ID NO 35667
atgccaatcacaccagccaccactctgcacatagttgggagagccatattccgcaatgggagggcacaatgtctcgatatcacgacaaaacggcttgcctcatcgaggagcgcacagacgggcactaccaagattgcgttttccaagcctggcaaaccctcattctctaagccatcgcagtccaagccaaaacctcagagcaaaccagtgatatcaaactcagaagatatcagagaagtcggcgcaaaacaagacgagagtaaaaagtctctcccgtatcaatctaagccaaaggtagaggaggaggagaccaagaccgaagagaaagcttctatggcggaactcgtccgccaacgttggtttccactgctgggtttcggcggcgcgatcctttgtgttgggtactggaccgctagcatggcaatgtactggaagaaagagccagcaaaacactacgctttgggttgcgagcctgaggcacctactggtcggccctcgattcagagtccgtatgagttcgacttacatctagacaagtcagaatggcggtttggcattacaaaactgcggaacgagttagcgtccttagctcgtggccacgtgctggaggttgcgataggaacgggccggaatctcgagttttatgactggagcgctattgtcaagtcagtgaagacgcctgaggaacttgaaaatgaaaatgcgccatcatcaagttggctgcccttttcgggcggaaaccagaagcaagaggataagaaaagtccgggcaaaagtaatgacgaggcagttcagagcttcacgggcttcgacatctctcccggcatgttggatattgccttacagcgaacacgaacgatggtcccgctcatgacgaaacaaattcctaagaaaccgtccttcgcaatgatggccgctggtgcagctaatagcgaggattcgcccaaacaagggcagcacactgtctccttagcgtctggcaaaattcgtttgatgcagtcggatgtacaatcctgtctcccgtcgcctccaccaacagtccagaaatatgacacaatctttcaatcttttggtctttgtagtgttcgcgatccagtagaacttatttcccaaatggctgccgcagtacagccagacacaggtcgcatattgctccttgagcacggacggagcgtttgggacatcgtaaacggatttctcgatcgcggtgctggcgaacatcacgaccggttcggatgctggtggaaccgcgacatcgagtatatcgtcgccgcggccgcgcaacgcgttccaggactcgagatcatacgtctggagcgcccgggctgggcgacgatgggtacacacgtcgtggttgagctgcgtgtccgcaatgatgggaaggcagtgagtagaaaagcagaatcggagcaggagcaggagccgaagatgactggctggtggggggtgctgtcgtcggggctttcgacaaagccatcaggcgacggtaagcaagactga

SEQ ID NO: 35667 - protein, 499 aa, Muscodor strobelii
  misc_feature: SGI Peptide ID NO. 572356
  misc_feature (115)..(456): NCBI GI: 261360783 Blast Desc: methyltransferase OMS1 [Verticillium albo-atrum VaMs.102]
  misc_feature (156)..(456): NCBI GI: 256733956 Blast Desc: [Nectria haematococca mpVI 77-13-4]
  misc_feature (17)..(458): NCBI GI: 46128185 Blast Desc: FG08470.1 [Gibberella zeae PH-1]
  misc_feature (21)..(461): NCBI GI: 85067745 Blast Desc: NCU04764 [Neurospora crassa OR74A] gi|28921783|gb|EAA31061.1| [Neurospora crassa OR74A] gi|40882292|emb|CAF06115.1| conserved [Neurospora crassa]
  misc_feature (95)..(459): NCBI GI: 39961238 Blast Desc: MGG_09514 [Magnaporthe grisea 70-15] gi|145011014|gb|EDJ95670.1| MGG_09514 [Magnaporthe grisea 70-15]
  misc_feature (117)..(462): NCBI GI: 171682086 Blast Desc: protein product [Podospora anserina] gi|170941002|emb|CAP66652.1| protein product [Podospora anserina]
  misc_feature (192)..(456): NCBI GI: 116202177 Blast Desc: CHGG_08973 [Chaetomium globosum CBS 148.51] gi|88177491|gb|EAQ84959.1| CHGG_08973 [Chaetomium globosum CBS 148.51]
  misc_feature (117)..(440): NCBI GI: 156030619 Blast Desc: SS1G_14405 [Sclerotinia sclerotiorum 1980] gi|154700796|gb|EDO00535.1| SS1G_14405 [Sclerotinia sclerotiorum 1980]
  misc_feature (146)..(481): NCBI GI: 154304049 Blast Desc: BC1G_09660 [Botryotinia fuckeliana B05.10] gi|150854295|gb|EDN29487.1| BC1G_09660 [Botryotinia fuckeliana B05.10]
  misc_feature (173)..(482): NCBI GI: 261194204 Blast Desc: oxa1 multicopy suppressor [Ajellomyces dermatitidis SLH14081] gi|239588521|gb|EEQ71164.1| oxa1 multicopy suppressor [Ajellomyces dermatitidis SLH14081]
  misc_feature: Useful for introducing or modulating the production of volatile compounds
MPITPATTLHIVGRAIFRNGRAQCLDITTKRLASSRSAQTGTTKIAFSKPGKPSFSKPSQSKPKPQSKPVISNSEDIREVGAKQDESKKSLPYQSKPKVEEEETKTEEKASMAELVRQRWFPLLGFGGAILCVGYWTASMAMYWKKEPAKHYALGCEPEAPTGRPSIQSPYEFDLHLDKSEWRFGITKLRNELASLARGHVLEVAIGTGRNLEFYDWSAIVKSVKTPEELENENAPSSSWLPFSGGNQKQEDKKSPGKSNDEAVQSFTGFDISPGMLDIALQRTRTMVPLMTKQIPKKPSFAMMAAGAANSEDSPKQGQHTVSLASGKIRLMQSDVQSCLPSPPPTVQKYDTIFQSFGLCSVRDPVELISQMAAAVQPDTGRILLLEHGRSVWDIVNGFLDRGAGEHHDRFGCWWNRDIEYIVAAAAQRVPGLEIIRLERPGWATMGTHVVVELRVRNDGKAVSRKAESEQEQEPKMTGWWGVLSSGLSTKPSGDGKQD

SEQ ID NO: 35668 - DNA, 2066 bp, Muscodor strobelii
  misc_feature: SGI EST ID NO. CUFF.84967.0
  misc_feature: Variant of the nucleotide sequence at SEQ ID NO 35666
ttgaagcaggaatgaagatcaaaaccggtatattatcttaccaatttgcatcgcgagacgcatattgagcgcctgcattgagattcactacggtctcacagtttcctctcgtcggtcacgccacaccttgcgttgtacgaactaaggggatagacgcgcttgacgcagctgcctttcgacgatggacttgaccatcggcggaacagtacgggataactaacacaaagcaacgcctagcactctcggactccccactgccagtggtcctctcgtatctagatgcacgacggtgtattaaagtctcatttggttgacctaagtggacgagcgatcttgagtagattaagctggcgacaagccggcgaaacggtgaaatatacacaacccagcttcttagctgttgagcatcaagatgccaatcacaccagccaccactctgcacatagttgggagagccatattccgcaatgggagggcacaatgtctcgatatcacgacaaaacggcttgcctcatcgaggagcgcacagacgggcactaccaagattgcgttttccaagcctggcaaaccctcattctctaagccatcgcagtccaagccaaaacctcagagcaaaccagtgatatcaaactcagaagatatcagagaagtcggcgcaaaacaagacgagagtaaaaagtctctcccgtatcaatctaagccaaaggtagaggaggaggagaccaagaccgaagagaaagcttctatggcggaactcgtccgccaacgttggtttccactgctgggtttcggcggcgcgatcctttgtgttgggtactggaccgctagcatggcaatgtactggaagaaagagccagcaaaacactacgctttgggttgcgagcctgaggcacctactggtcggccctcgattcagagtccgtatgagttcgacttacatctagacaagtcagaatggcggtttggcattacaaaactgcggaacgagttagcgtccttagctcgtggccacgtgctggaggttgcgataggaacgggccggaatctcgagttttatgactggagcgctattgtcaagtcagtgaagacgcctgaggaacttgaaaatgaaaatgcgccatcatcaagttggctgcccttttcgggcggaaaccagaagcaagaggataagaaaagtccgggcaaaagtaatgacgaggcagttcagagcttcacgggcttcgacatctctcccggcatgttggatattgccttacagcgaacacgaacgatggtcccgctcatgacgaaacaaattcctaagaaaccgtccttcgcaatgatggccgctggtgcagctaatagcgaggattcgcccaaacaagggcagcacactgtctccttagcgtctggcaaaattcgtttgatgcagtcggatgtacaatcctgtctcccgtcgcctccaccaacagtccagaaatatgacacaatctttcaatcttttggtctttgtagtgttcgcgatccagtagaacttatttcccaaatggctgccgcagtacagccagacacaggtcgcatattgctccttgagcacggacggagcgtttgggacatcgtaaacggatttctcgatcgcggtgctggcgaacatcacgaccggttcggatgctggtggaaccgcgacatcgagtatatcgtcgccgcggccgcgcaacgcgttccaggactcgagatcatacgtctggagcgcccgggctgggcgacgatgggtacacacgtcgtggttgagctgcgtgtccgcaatgatgggaaggcagtgagtagaaaagcagaatcggagcaggagcaggagccgaagatgactggctggtggggggtgctgtcgtcggggctttcgacaaagccatcaggcgacggtaagcaagactgaactgaacgcgtctgcggtcaaaacccattatatcgctaccacgcacaatgccatccgagagatggtgtaatttggatacagcggaggtagaaatccaggtgtacttctagcttaatttgtagataatttgtatcaacacgccaaccaacctcga

SEQ ID NO: 35669 - DNA, 1215 bp, Muscodor strobelii
  misc_feature: SGI cDNA ID NO. 572357
  misc_feature: Reduced expression when VOC is produced
  misc_feature: Encodes the peptide sequence at SEQ ID NO 35670
atgccttacaacacccgtcgcaagtcgctgtctctaccttctctcgggatacatgtccctgttcaacgctcatcgacaacaagcaataccaacagcagtcataatagcaacacaaacgcatcggcagcgaccatgacaacacctaagagggcatccgaggatggctcgccccgtcccagcaagaagacaaagcgaacccataccgattctatctcatcaacgacttcactcatgtctgcaccaacgttcgccctacacgcttccatagaatcagacgatctagaccttgctttcttgcgcgagccttcgaccatagatctggaagtcgttaatgatgaagtcatcgaggcgtgcatcgtgcatctacaacagacacggaatcgccctcatcttgccaaggaccttgccgctgcgctcgcgaccaaagtctccgtcatacaaaaatccgcaaacccatgtggcatcatcgcatcgcgacttgcttctttcttcaaaaggagtacttggacagcttcttccccttgccccatggcaaaagagctcgaggccgtgcatccgagacgaacatattacttcctgagctcatgtccacccctacctatccccgacatggtctgtcatcaacccagtgcgctcgtcacgccatcgctgtccagttcgggctccacaatcgaagacaccgaaggcgaccgagagagagagctcagtatgtctccagaggtggacctatcttctcctgagtttgactccgtgggcgacgactgcccggtgcctggttcaatgccggggtctcgcatggggtctgtctcgaagaggcagcgccctgtccattcgctcacaagaaatcatcgagcggaagaaccacctttagagaaggacgaaaaagagttcacacagactgccgacggcctgcagaaacgcaaggctcgcggcgagttgatctcggctacccccgtcgatcaatcgggcatcgacgacggcatgcagaacgagcagttattcggcgaacctcacaggcacttagcgccgacctacttccctcgcatgtcatttatgactagcccggctatgcgtcctagcctagtcattccgcctccgatgaagcgggatggcgaggctgaggcatggtctaaattggattcactcctagactgggacaaaagtcctgagactattgagctcgatgagcttgatgggctcctagatgactactaa

SEQ ID NO: 35670 - protein, 404 aa, Muscodor strobelii
  misc_feature: SGI Peptide ID NO. 572357
  misc_feature (2)..(404): NCBI GI: 171682088 Blast Desc: protein product [Podospora anserina] gi|170941003|emb|CAP66653.1| protein product [Podospora anserina]
  misc_feature (3)..(402): NCBI GI: 39961250 Blast Desc: MGG_09515 [Magnaporthe grisea 70-15] gi|145011015|gb|EDJ95671.1| MGG_09515 [Magnaporthe grisea 70-15]
  misc_feature (1)..(392): NCBI GI: 85067747 Blast Desc: NCU04765 [Neurospora crassa OR74A] gi|28921784|gb|EAA31062.1| [Neurospora crassa OR74A] gi|40882291|emb|CAF06114.1| [Neurospora crassa]
  misc_feature (1)..(403): NCBI GI: 46128187 Blast Desc: FG08471.1 [Gibberella zeae PH-1]
  misc_feature (2)..(392): NCBI GI: 116202175 Blast Desc: CHGG_08972 [Chaetomium globosum CBS 148.51] gi|88177490|gb|EAQ84958.1| CHGG_08972 [Chaetomium globosum CBS 148.51]
  misc_feature (1)..(404): NCBI GI: 156053351 Blast Desc: SS1G_06843 [Sclerotinia sclerotiorum 1980] gi|154704621|gb|EDO04360.1| SS1G_06843 [Sclerotinia sclerotiorum 1980]
  misc_feature (107)..(404): NCBI GI: 154315067 Blast Desc: BC1G_04875 [Botryotinia fuckeliana B05.10] gi|150848413|gb|EDN23606.1| BC1G_04875 [Botryotinia fuckeliana B05.10]
  misc_feature (1)..(307): NCBI GI: 242782203 Blast Desc: conserved [Talaromyces stipitatus ATCC 10500] gi|218720100|gb|EED19519.1| conserved [Talaromyces stipitatus ATCC 10500]
  misc_feature (1)..(337): NCBI GI: 212526954 Blast Desc: conserved [Penicillium marneffei ATCC 18224] gi|210073032|gb|EEA27119.1| conserved [Penicillium marneffei ATCC 18224]
  misc_feature (1)..(404): NCBI GI: 169610177 Blast Desc: SNOG_08185 [Phaeosphaeria nodorum SN15] gi|160702001|gb|EAT84461.2| SNOG_08185 [Phaeosphaeria nodorum SN15]
  misc_feature: Useful for introducing or modulating the production of volatile compounds
MPYNTRRKSLSLPSLGIHVPVQRSSTTSNTNSSHNSNTNASAATMTTPKRASEDGSPRPSKKTKRTHTDSISSTTSLMSAPTFALHASIESDDLDLAFLREPSTIDLEVVNDEVIEACIVHLQQTRNRPHLAKDLAAALATKVSVIQKSANPCGIIASRLASFFKRSTWTASSPCPMAKELEAVHPRRTYYFLSSCPPLPIPDMVCHQPSALVTPSLSSSGSTIEDTEGDRERELSMSPEVDLSSPEFDSVGDDCPVPGSMPGSRMGSVSKRQRPVHSLTRNHRAEEPPLEKDEKEFTQTADGLQKRKARGELISATPVDQSGIDDGMQNEQLFGEPHRHLAPTYFPRMSFMTSPAMRPSLVIPPPMKRDGEAEAWSKLDSLLDWDKSPETIELDELDGLLDDY

SEQ ID NO: 35671 - DNA, 2503 bp, Muscodor strobelii
  misc_feature: SGI EST ID NO. CUFF.84971.0
  misc_feature: Variant of the nucleotide sequence at SEQ ID NO 35669
caagcaggtccccggcgaaggggaaagagcaagtggatgcatcgcaaaccatgtgtaaaagtagcgcaaggatggacacgggtacaaccgatatggtggtgtagtcggtgtgcttgcatgtaccttgatagcgcccccaagtcgcatctctcgcctttgcacgacgtatattgctgggacaggcagagaagaagggtgtggtgagggagcagcacgagtcctcgtagcagttagttgccggatgctttcgcctcatactcgtgatcctcctatcccatcccatcccatcccatttctctcgccatacgctgtgtgtcgagtgtctccccttcaccgtcgtcttcatcgttgtcgccctggctagacattcccttccaccgcctttccttctccatctctgatccaacctcgcctgtatcctgtatcaacccccgataatagtcgttgtctgtgcttggagatcgagtctcccttacccatacccatttgcatcaccgctccagcctctccccatcccgtgtgtctgtctctctttacatcatagccttcgcctctccaatccgatccttcggaactggatccatgtcgctagcttgattcatgcgaccatcgaccatagatctaccaagtaccacatactctacccatagtccctcttgcataaactcccctaaatttcccgcccgtcccattgctctaataaaccgaacgcttgcccattatgccttacaacacccgtcgcaagtcgctgtctctaccttctctcgggatacatgtccctgttcaacgctcatcgacaacaagcaataccaacagcagtcataatagcaacacaaacgcatcggcagcgaccatgacaacacctaagagggcatccgaggatggctcgccccgtcccagcaagaagacaaagcgaacccataccgattctatctcatcaacgacttcactcatgtctgcaccaacgttcgccctacacgcttccatagaatcagacgatctagaccttgctttcttgcgcgagccttcgaccatagatctggaagtcgttaatgatgaagtcatcgaggcgtgcatcgtgcatctacaacagacacggaatcgccctcatcttgccaaggaccttgccgctgcgctcgcgaccaaagtctccgtcatacaaaaatccgcaaacccatgtggcatcatcgcatcgcgacttgcttctttcttcaaaaggagtacttggacagcttcttccccttgccccatggcaaaagagctcgaggccgtgcatccgagacgaacatattacttcctgagctcatgtccacccctacctatccccgacatggtctgtcatcaacccagtgcgctcgtcacgccatcgctgtccagttcgggctccacaatcgaagacaccgaaggcgaccgagagagagagctcagtatgtctccagaggtggacctatcttctcctgagtttgactccgtgggcgacgactgcccggtgcctggttcaatgccggggtctcgcatggggtctgtctcgaagaggcagcgccctgtccattcgctcacaagaaatcatcgagcggaagaaccacctttagagaaggacgaaaaagagttcacacagactgccgacggcctgcagaaacgcaaggctcgcggcgagttgatctcggctacccccgtcgatcaatcgggcatcgacgacggcatgcagaacgagcagttattcggcgaacctcacaggcacttagcgccgacctacttccctcgcatgtcatttatgactagcccggctatgcgtcctagcctagtcattccgcctccgatgaagcgggatggcgaggctgaggcatggtctaaattggattcactcctagactgggacaaaagtcctgagactattgagctcgatgagcttgatgggctcctagatgactactaatggacgagacttgaaaagtccgtcaccagctatctagattgcgctttacatgcgcatcgataccagaatgattgttttgcatttgaggagtttatgtacgatggggatacttgcgttggatcgaattatatggtgttcgcggcgcgatctggactcatctcatttgcaaaagggtggccagcgtttgatatccttgattgcgtatctctcattgagttattttcgaaggttcactggggtggcgacgcatgtgctggcatggtatggaaaggggcgttgtgtatgactatcccggaaggcagcgttgtgattgacgctttggtggcgaaacccacattttacgttactgagcgcacaggagcgctttcactgcaggaagtcatgttcaagaaggaattagacgaaagagaaaatcatcgtccaagtagagtctagagaggccagagcgaagaaaaaagactttagctcgcgagggtgaaatctgagagcttcccggttctggcaagacaaaaaggaaaagtgtttcatggatactcactcgacttaaaaattcaaaagaaatctcct

SEQ ID NO: 35672 - DNA, 1650 bp, Muscodor strobelii
  misc_feature: SGI cDNA ID NO. 572358
  misc_feature: Encodes the peptide sequence at SEQ ID NO 35673
atggcgcccgatttccatgccttcgcccacctcatctctaatctccgtctcatcatcacatatggtttccttctacaagctcagattatccgcaatcacattaccaacatggcttccaaactgaagggtgtccttgaggcacactctaaagccaacactcaaccccacagcaatcaggaaatcgatcttggcacgtacgaagttgaagttagcagcaacgacgaagatgcatcgaagctggctagggatggtcacaccagactgattccacagccaagcgacgatccaggtgaccctctaaactggcctcagctccgaaagaacatcatcctctttgttgttgctttcgctgcgttcctacccgactatggctctgcaactggtgccgttactctgatcccccaggctctgcaatggaacatgtcacaggaagaggtcaaccattcacaggctggcaatgtcttcatgcttggagcaggcgggattccagttgtcattttcagtgcttacttcggacgtcttcctgttctgttctggttcctcctcgttgcccttgccaccgctgcatggtgcgctggagcacagactttcgagtcgtttgaggcagctcgtattctcaacggattcttctcgacagtagctcaggttaatggcttgatattcatccaagacatgttcttctttcatgaacgtgctcgcaagattaacatatgggtgtcgttcttcgtcctcagcccataccttggcccgcttctggcggccttccagatcgcaaccaagccctggccaacaccgttttgggtttacactgccgagactgctctggccctcatcttgactatattctttgtcaaggagacttactacgatcgcagactttctatggaacagcaacctcctcgtggaacccaagctcagagtcttttgggtatcccacagtggcgatcaagaaagcaaaggaatacgttctggcaagctttcatgcggcctgtccttgcgatctctaagccgactgtcctgatctcgtgcatttactatttcttaacatttgcatgggtggttggcattaacacgacgctctcaatattcttgcagcctgtctacgggtttagcgtgaagtcaatcgggtttttctacttcacacctgttatcgccgtcattcttggcgagatcagtggccactggctccacgatatccttgcgaagcagtacattcgagcacaccatggtcgatttgagcccgaagtgagacttcgcgccatagccattgcgcttccttttatgcttattggtctggttttgcttggtcaaagtcttgagcgtcaatggcactacttgatcactgccttgacctggggactttacgtctatggcatcatgatcaccactgtcgccgtatcctcgtataaccttgactgctatccagaggcatccggcgaagtctctgcttgggtcaacttttcacggactatcggcggatttgtcatcagttacttccaagttgcttgggccaatgcgcaaggcaccaagaccagctttggcattcaggcagctgtctgtgctgcagcttttcttcttatcatcttcttgatgctaaaaggcaaagccctcagagcctggtccggccctctccattttgccaccacctaa

SEQ ID NO: 35673 - protein, 549 aa, Muscodor strobelii
  misc_feature: SGI Peptide ID NO. 572358
  misc_feature (115)..(497): Pfam Id: PF07690 Pfam Desc: Major Facilitator Superfamily
  misc_feature (42)..(549): NCBI GI: 171677213 Blast Desc: protein product [Podospora anserina] gi|170936674|emb|CAP61333.1| protein product [Podospora anserina]
  misc_feature (81)..(548): NCBI GI: 240110853 Blast Desc: Major Facilitator Superfamily protein [Coccidioides posadasii C735 delta SOWgp]
  misc_feature (54)..(548): NCBI GI: 240277789 Blast Desc: MFS transporter [Ajellomyces capsulatus H143]
  misc_feature (60)..(548): NCBI GI: 238842888 Blast Desc: conserved [Microsporum canis CBS 113480]
  misc_feature (66)..(548): NCBI GI: 169775667 Blast Desc: [Aspergillus oryzae RIB40] gi|83771035|dbj|BAE61167.1| protein product [Aspergillus oryzae]
  misc_feature (66)..(548): NCBI GI: 238502309 Blast Desc: MFS transporter, [Aspergillus flavus NRRL3357] gi|220691198|gb|EED47546.1| MFS transporter, [Aspergillus flavus NRRL3357]
  misc_feature (66)..(548): NCBI GI: 261202188 Blast Desc: MFS transporter [Ajellomyces dermatitidis SLH14081] gi|239590405|gb|EEQ72986.1| MFS transporter [Ajellomyces dermatitidis SLH14081] gi|239612116|gb|EEQ89103.1| MFS ER-3]
  misc_feature (54)..(548): NCBI GI: 225557234 Blast Desc: conserved [Ajellomyces capsulatus G186AR]
  misc_feature (79)..(522): NCBI GI: 67540496 Blast Desc: AN6418.2 [Aspergillus nidulans FGSC A4] gi|40739250|gb|EAA58440.1| AN6418.2 [Aspergillus nidulans FGSC A4] gi|259479358|tpe|CBF69511.1| TPA: MFS transporter, nidulans
  misc_feature (81)..(496): NCBI GI: 119196537 Blast Desc: CIMG_02643 [Coccidioides immitis RS]
MAPDFHAFAHLISNLRLIITYGFLLQAQIIRNHITNMASKLKGVLEAHSKANTQPHSNQEIDLGTYEVEVSSNDEDASKLARDGHTRLIPQPSDDPGDPLNWPQLRKNIILFVVAFAAFLPDYGSATGAVTLIPQALQWNMSQEEVNHSQAGNVFMLGAGGIPVVIFSAYFGRLPVLFWFLLVALATAAWCAGAQTFESFEAARILNGFFSTVAQVNGLIFIQDMFFFHERARKINIWVSFFVLSPYLGPLLAAFQIATKPWPTPFWVYTAETALALILTIFFVKETYYDRRLSMEQQPPRGTQAQSLLGIPQWRSRKQRNTFWQAFMRPVLAISKPTVLISCIYYFLTFAWVVGINTTLSIFLQPVYGFSVKSIGFFYFTPVIAVILGEISGHWLHDILAKQYIRAHHGRFEPEVRLRAIAIALPFMLIGLVLLGQSLERQWHYLITALTWGLYVYGIMITTVAVSSYNLDCYPEASGEVSAWVNFSRTIGGFVISYFQVAWANAQGTKTSFGIQAAVCAAAFLLIIFLMLKGKALRAWSGPLHFATT

SEQ ID NO: 35674 - DNA, 445 bp, Muscodor strobelii
  misc_feature: SGI EST ID NO. CUFF.84953.0
  misc_feature: Variant of the nucleotide sequence at SEQ ID NO 35672
caggtgaccctctaaactggcctcagctccgaaagaacatcatcctctttgttgttgctttcgctgcgttcctacccgactatggctctgcaactggtgccgttactctgatcccccaggctctgcaatggaacatgtcacaggaagaggtcaaccattcacaggctggcaatgtcttcatgcttggagcaggcgggattccagttgtcattttcagtgcttacttcggacgtcttcctgttctgttctggttcctcctcgttgcccttgccaccgctgcatggtgcgctggagcacagactttcgagtcgtttgaggcagctcgtattctcaacggattcttctcgacagtagctcaggttaatggcttgatattcatccaagacatgttcttctttcatgaacgtgctcgcaagattaacatatgggtgtcgttcttcgtcct

SEQ ID NO: 35675 - DNA, 1782 bp, Muscodor strobelii
  misc_feature: SGI cDNA ID NO. 572359
  misc_feature: Encodes the peptide sequence at SEQ ID NO 35676
atggagacctcaacatccctcccgtaccacgaacccactctcatctcactcctcattttatcctcattcctccttatcctcaatgttctcgggtccgccttcgaccacttattatcctgcggactcataattcaagtcctaatcggcatcacatacgggcagcctggagcgcagtggctcccgctagagtcgcagcgcgtattcgttgagttagggtacatcgggctaatcctcatcgtattttccggcggcgtatcaacagatatcaaatccctgaggcaaaatgccggactctctatcgcagtggcggcgacaggtgtactcgctccaattgcgctgagcttcgcgctgtttcttggggaaggagggatattgggcaatggaacggcgttgcaggcctttgcagccggtgcggcgttgtgtagtacgagtctggggactacatttgaggttctgaagacgagcggatttgacaggacgaggctaggtgctatcgttgcgagcgcggcgctgttggacgatgttgtggggttggttatggttcgcatcattacgagtcttggatcacatggaggtgatatcgaacctgctgttatcgtaaggccggtacttgtctcggctggtttcattattgctgcaccactcttctgtcggttcgttgttgctcctggacggaagttggtggtgaggtatatggagagaagtgggaataaggaggagaatactgcagaggagcagccgatagtcaggcgttggattggctcgagacaggctgggttcattgctcagacgttgctcctaatcgctctaatcactgctgctgattatgctggagcgtcaattttactcgcagcctatatcgccggagcggtggtgagctattggaatggactgcgcgatgagaattcggcacaaagccatccggctcatggagaggaacggggtgagcagcacacccaagaggtcagggtggctatagatgcccatcctgcttgcgacgataacattgctccatcttctctatcgaaaaagagcaaaactacttctcaggattctgctactattatttatgacacatattacacgcaggtcgtggactatatactcaagcctctcttcttcgcttcgattggattctccattcccattactcagttattcgcaggtggcattgtctggcgaggtatattgtataccgttctcatgatcatcggcaaacttatctgcggtctctggctcgtccgattcccattctctgctagcaatgctctaagaagcctaatttcgtctccggtcttgaggtttcactgggttttgaataagctcaggcgtcgaggttctaagccagagaagaattcggagtcagcgaatacagttgcgagagcggctcaggtgactgcactaagcgacgaccgatcttcgtctgaacaagtcaacacacaggcacatgcacctggagaagagagaactatctcagcacaagatagcccagcaaagcctctctcgctctatccagcagcagtaatgggcagtgcaatggtagccagaggcgagatcgggtttctcatctcatcaatggctgaaagccaaggtgtattccgccgtctgaatgaagatccgtcagaggcttcggagctcttcctcgttgttacttgggccatattcatctgcaccatcgtcggtcccttggctgcgggtgtcattgttaagaggatcaaaaatctggagagtgctagcggtgggagtaggggaaatgttcttggtgtttggggagtaagctga

SEQ ID NO: 35676 - protein, 593 aa, Muscodor strobelii
  misc_feature: SGI Peptide ID NO. 572359
  misc_feature (15)..(571): Pfam Id: PF00999 Pfam Desc: Sodium/hydrogen exchanger family
  misc_feature (74)..(293): Pfam Id: PF00999 Pfam Desc: Sodium/hydrogen exchanger family
  misc_feature (506)..(571): Pfam Id: PF00999 Pfam Desc: Sodium/hydrogen exchanger family
  misc_feature (2)..(592): NCBI GI: 255936021 Blast Desc: Pc13g06030 [Penicillium chrysogenum Wisconsin 54-1255] gi|211583657|emb|CAP91672.1| Pc13g06030 [Penicillium chrysogenum Wisconsin 54-1255]
  misc_feature (1)..(592): NCBI GI: 156053846 Blast Desc: SS1G_05771 [Sclerotinia sclerotiorum 1980] gi|154703551|gb|EDO03290.1| SS1G_05771 [Sclerotinia sclerotiorum 1980]
  misc_feature (2)..(592): NCBI GI: 189198596 Blast Desc: conserved [Pyrenophora tritici-repentis Pt-1C-BFP] gi|187982734|gb|EDU48222.1| conserved [Pyrenophora tritici-repentis Pt-1C-BFP]
  misc_feature (3)..(592): NCBI GI: 238506571 Blast Desc: Na+/H+ antiporter, [Aspergillus flavus NRRL3357] gi|220689200|gb|EED45551.1| Na+/H+ antiporter, [Aspergillus flavus NRRL3357]
  misc_feature (3)..(592): NCBI GI: 169785553 Blast Desc: [Aspergillus oryzae RIB40] gi|83775985|dbj|BAE66104.1| protein product [Aspergillus oryzae]
  misc_feature (9)..(592): NCBI GI: 145248918 Blast Desc: An14g01710 [Aspergillus niger] gi|134081471|emb|CAK46484.1| protein product [Aspergillus niger]
  misc_feature (9)..(592): NCBI GI: 115401614 Blast Desc: conserved [Aspergillus terreus NIH2624] gi|114190336|gb|EAU32036.1| conserved [Aspergillus terreus NIH2624]
  misc_feature (5)..(593): NCBI GI: 256728533 Blast Desc: NECHADRAFT_96896 [Nectria haematococca mpVI 77-13-4]
  misc_feature (6)..(593): NCBI GI: 46110226 Blast Desc: FG01995.1 [Gibberella zeae PH-1]
  misc_feature (9)..(592): NCBI GI: 67902226 Blast Desc: AN8100.2 [Aspergillus nidulans FGSC A4] gi|40740532|gb|EAA59722.1| AN8100.2 [Aspergillus nidulans FGSC A4] gi|259480863|tpe|CBF73888.1| TPA: sodium ion/proton exchanger
METSTSLPYHEPTLISLLILSSFLLILNVLGSAFDHLLSCGLIIQVLIGITYGQPGAQWLPLESQRVFVELGYIGLILIVFSGGVSTDIKSLRQNAGLSIAVAATGVLAPIALSFALFLGEGGILGNGTALQAFAAGAALCSTSLGTTFEVLKTSGFDRTRLGAIVASAALLDDVVGLVMVRIITSLGSHGGDIEPAVIVRPVLVSAGFIIAAPLFCRFVVAPGRKLVVRYMERSGNKEENTAEEQPIVRRWIGSRQAGFIAQTLLLIALITAADYAGASILLAAYIAGAVVSYWNGLRDENSAQSHPAHGEERGEQHTQEVRVAIDAHPACDDNIAPSSLSKKSKTTSQDSATIIYDTYYTQVVDYILKPLFFASIGFSIPITQLFAGGIVWRGILYTVLMIIGKLICGLWLVRFPFSASNALRSLISSPVLRFHWVLNKLRRRGSKPEKNSESANTVARAAQVTALSDDRSSSEQVNTQAHAPGEERTISAQDSPAKPLSLYPAAVMGSAMVARGEIGFLISSMAESQGVFRRLNEDPSEASELFLVVTWAIFICTIVGPLAAGVIVKRIKNLESASGGSRGNVLGVWGVS

SEQ ID NO: 35677 - DNA, 1987 bp, Muscodor strobelii
  misc_feature: SGI EST ID NO. CUFF.84962.0
  misc_feature: Variant of the nucleotide sequence at SEQ ID NO 35675
caaatccctgaggcaaaatgccggactctctatcgcagtggcggcgacaggtgtactcgctccaattgcgctgagcttcgcgctgtttcttggggaaggagggatattgggcaatggaacggcgttgcaggcctttgcagccggtgcggcgttgtgtagtacgagtctggggactacatttgaggttctgaagacgagcggatttgacaggacgaggctaggtgctatcgttgcgagcgcggcgctgttggacgatgttgtggggttggttatggttcgcatcattacgagtcttggatcacatggaggtgatatcgaacctgctgttatcgtaaggccggtacttgtctcggctggtttcattattgctgcaccactcttctgtcggttcgttgttgctcctggacggaagttggtggtgaggtatatggagagaagtgggaataaggaggagaatactgcagaggagcagccgatagtcaggcgttggattggctcgagacaggctgggttcattgctcagacgttgctcctaatcgctctaatcactgctgctgattatgctggagcgtcaattttactcgcagcctatatcgccggagcggtggtgagctattggaatggactgcgcgatgagaattcggcacaaagccatccggctcatggagaggaacggggtgagcagcacacccaagaggtcagggtggctatagatgcccatcctgcttgcgacgataacattgctccatcttctctatcgaaaaagagcaaaactacttctcaggattctgctactattatttatgacacatattacacgcaggtcgtggactatatactcaagcctctcttcttcgcttcgattggattctccattcccattactcagttattcgcaggtggcattgtctggcgaggtatattgtataccgttctcatgatcatcggcaaacttatctgcggtctctggctcgtccgattcccattctctgctagcaatgctctaagaagcctaatttcgtctccggtcttgaggtttcactgggttttgaataagctcaggcgtcgaggttctaagccagagaagaattcggagtcagcgaatacagttgcgagagcggctcaggtgactgcactaagcgacgaccgatcttcgtctgaacaagtcaacacacaggcacatgcacctggagaagagagaactatctcagcacaagatagcccagcaaagcctctctcgctctatccagcagcagtaatgggcagtgcaatggtagccagaggcgagatcgggtttctcatctcatcaatggctgaaagccaaggtgtattccgccgtctgaatgaagatccgtcagaggcttcggagctcttcctcgttgttacttgggccatattcatctgcaccatcgtcggtcccttggctgcgggtgtcattgttaagaggatcaaaaatctggagagtgctagcggtgggagtaggggaaatgttcttggtgtttggggagtaagctgacatgtatttttctgtgtgcttgcttaatggtgtttggttgcagcttcgtcaacctttagctatttctgtgttattcaagaatgtctaagaatacccttaggtatcattctcggacccgggaagtcatgaagtgtattcacatttgtcattgttcgatatatctgtgtacctaccggcacgaactaatgtgtgtcagatttgagtgagttacacgactgtcccctgcagtactccaagtaaatttgacaaggacggcttcccgctttcaccctgcctgacaatgcctaaggagtacggccgagcacttatgctgaagaaatgaggtttactatgataacggtagtacatgtatcacattgactcaacagatctatggtacagatcttgctcgtggtcgttgcgtgtagttcaagtaacaacgtcaatttatcacgcatgccatatagaaatcatttagtcgatctctcgaat

SEQ ID NO: 35678 - DNA, 6549 bp, Muscodor strobelii
  misc_feature: SGI cDNA ID NO. 572360
  misc_feature: Encodes the peptide sequence at SEQ ID NO 35679
atggtccctccaccgccctcctcccacctcagatccggaaccttctcgcccctgcctgctcaggccctgcagaccggcctagcccacacgcccgcgcaagcccaagcccaaggccccctgagcgctggcgcgacgccctccacaagcagcccgaccgcgccagccaccaactcgctcaccaagatcgtcgtcgcccaggtctacctcctgctgagcaccatcaacaaggacaaggaccgcgccaagtttgagctgcaggtggaccagctgaacaagctcctcgatgaccacggcatggaggtcttctctcgctacttcacccgcctggtggctggcaatgcctcccagatcttccccggcctcaaccggtcggccaccaacccgggcaactacacgctgctgaagtccgagatggccaagatctcccacgagctcgaccaggcctccaagatcgccgagtccattgagaccgccaacgaggacatcttcagagacttcgacctgtccaccttcatggagcacttcaagctcgacgctctcgagaagaccatcctcgccctggccttcaagttcggctcgcgctccgatctcaagactaaggccgacgccatcctctccaccaacttcccgaccttcgtgaacatcatgtcgcggcccacctacggcgaccactccgacctgaccccgtctttcatcgccgccatcgtcgatcggtacatccagggccacccgcccaacttcaaccccgcctccaagcacgaactgagccacaaggtccaactgcgctggtcacagaacgaccaagctccgcctctcgaagtcctggctgccctcgacctgatccgcgtgctgggcgacaagccacccaacggcctggccctgtacatccagaagaccgggcccgacttcaccagagacgaggacacatgtctgagctacctgcagaacagacccgccaatgtgcagctgagcgaggagtcggtctcggccgccctgacctacacgaccgtcagcgtgacgtatcgacacaagccctccgtcctcgtggctgctctgcggcgcgtcctgcccatcaccttcaactggcacggtgccgtttcctacttcgaccagcgcgatgtgcgcgtctcctccgaacagtttctgcgtctctacaacgcccttcttcccatcgcgcaatcccaagacgaccaggcgccgcccttcgacatccagaccctgtggggcgggagccactgggagaatcccgagacacaactttccttcatctgcgcatttgcctccttgtctccggatgagctcgacgcgagcaccatacctggtcttcagcccacgttcaccctggatgaatatgcccattcctctccagaagtccgcgaacgcgctgccattgccgtcaaacatcccctcgtctccagacccgccctgtccgccatattccaggtcgctctccattcccagtatgctagtcagagctcggaagcgaagcgcttgttccaggcagtagtggttcccaacctcgacatcttcatcgtctcggcgttcggcgttcccaagccctggccacagatggccgtcgacaccttgggctccctgttcgatacgtttctcaagaaaactgaccactaccgatttgtcctcgacagcctgtggaggaaagacagggaattggtgacgtccagactcattgatgttcatgcgatgaagccgggcgagctgcccctcatttttgatcatgtcatgacgcagggctggttggatgatctcgtctaccttcccaatggctttagtctggatctcgtgtctctggcccatgctcaaggccaaatagatctgacgcaatgggcccgcaacatctcggacaaaggtcagacccagcctgtctcgatggctttggcacaatttctcgtcatcaaggcggagctggagatacaatcacagaaagctctcagcaatggccaaacaccattgactacaagcacctcgctccatctcaagacactcttgacgctgctacagatactggaagacttcttacctagagggcccattccggaactgattcgcgtgcaacgcacctgtattactgcctatcctagacttgtcaactatggtgagggctacgacgaggtgatcgatgccaacggcttgaggggccacagacttcccccggctgcggtagagaaaatggaggagcagtataagaagatgtacagcgaggagagcgaagtgaaggctgtcgtccagaggctcgattcgtacaagcactcccgagaccccttggaacaggacatctttgcctgtatgattcacgggctgttcgacgagtactcacacttctctagctatccactcgaagcgctggctactactgccgttctgttcggtggcatcatctcgcacaagttaatttcagaactaccgctgaagattgggctgggcatgatattagaggcggttagagaccacacgccagatgagaatatgtacaaatttggcctccaagctctgatgcagctattctcccggttcagagagtggcctggtttttgcaaacaactgttacagataccaggtcttcacggtaccgaggcttggaagaaggccgaagagattgtgcgtgaggacgaggaagaacgggcccgtacccagaatggtaacggggcaggtaatcatctgggagagcctctcgcaaatggggctaccgaggcgtcagatgctcacacggctcccttctctgccattcacatcgatcctccacgaccaggctctatattcgaggatcctgtcatggagatccaggaccgaattcaattcggcctgaacaacttgaccaccaactcgctccaagctactttccaggagctcgaaactgtgctcgaagagccccatcagcaatggtttgcaagccatcttgtcgaggaaagagctaaaatgcagccgaactaccaccacgtctacctggatctggttaaactcttccaggattcggaactgtggtcggaagttctcagacaaacttacataagcgtggctcgaatgctaaacgcagagagtacattgcagaactctaccgataggactcagctaaagtatctaggagcctggctggggctcttgacgcttgcgagggatcaacctatcaggcacaagaatatcgcgttcaagaaattactgatagaggcgcatgacacgaaacgattggtcgttgtagtgccatttgtctgcaaggttctcatacaggcttccaagtccacgatcttccgtccaccaaatccgtggctgatggacatcatcgcctttctcatcgaactgtaccacaatgccgagctcaagctcaaccaaaaattcgagatcgaggtgttgtgcaaagatctaaacctcgaccacaagagcatagaaccctccaacgagcttcaagatcgcgagcctatgggcgatgttggcgagctctctattccggaattggaacagtttgacagtctctccctgaacggcctagtcgcacagaacgggttggtaggtcatgtcgctcctggcctatcgccacaatcgttaccggttgcgattccagatatcagcagtcttatctcgctgccgcccaccagtgacatggttgcaaatactggccgtctccacgaacttgtacgcaccgccctgggcaaggctttggccgaaatcatccagcctgtggtcgatcgctctattacgattgcagctattagcacacgggagatgattcacaaggattttgctactgaaccagacgagaacaaactccaaacagctgctcttaatatggtgaaggctactgcaggtagtttggcacttgttacctcaaaagaacccctgcgagccaatttcatcaactacctcagaatggccgcgcaggaggcaggtggaaaccttcccgaaggcaccatcatactctgcgtgaatgccaatcttgaccttgcgtgcggagtcattgagagacaagctgcagaacgagccgtaggggaaatcgaagagttgatccaggaagagattgacgcgcgacgtcgacatcgcatgcaacggccgaacgagccctatttcgaccctggcctcacgcgatggtcgacttccattcctcatccttacaagcttacgccgagtctcacaggtctcaattctgaacagatggccatctatgatgacttcgcgcgacaacccagaggtgccgtccagagcagcacggcgcatgcatcgtctgcctcagatgcaaccaggaatctcgccaacgaggtactagccgaccagtacagtgctgtgcaaaacctggccacgccggcagagacgccgtccttaccacacatcaactcccaactgtcatcgtacccacatgtacatactggtgttccaaatggccgatctgccgctcaccctagccaactggatgctagggccattgaagaaagagtggcaaaattttgcgacgaactcaaacacctagcagagagctctaccgaacaacactacagagacctacaccagccacatgatctgctcgatgtcgtggacgcgtttcatcagttcatcatctcaacatcgcagactacagacactccagctgtctacgctgctgagaagatatgtagcctactgtttggtcgatacacacagaacaacgaaacgctgttccttgagactctggtgcacatactgcagattatactcaaaattgcaggaggcggccttggcgatcgtctgcagcttacctttattcaacagcctgctgagaatcttcttcagatacctgtgatcactgcattaattcaggaggacctccttgatatcttcaatatcgatcgtattatcgcgagggagctgcgagaaggtttcacgccagccctattcgagttctacgaacaactcctagaagttaccctcttcgaagacaaatcgggcattctctacgcggatttgatgcaaagtctgtcggtagcgtggtcacgcatcgatgaagagccagatctcgaagtagcgcagagactgaaggcaaagctccagccactgagatcgtgtaaaccacaccatgagctgaacgatgcgcatcatgaatacctcttcagcgaatgggtccagctgtatacttctctccctatgggcgatcatgcgatgattgcctttgttcgacagctgcgcagcagggccatcggtaaaagcactgaggcgatgctcatctttttcagaaaggctgttgagatctcgatccatcataatgagagtgtgatgcaagccggcggccaccatatagatgcctatggcgctgtcgacgccctcgtcggcttcgtcaccgttttcgcacaagatacatttgttcagggagaaccgcccgagactggactgctcgccatattcaagtctgtgatcagcgtcacccgtctgatgctttgcatgcaccatatgtctcgaggaatacaattcaaccaacgagtcttcttccgtttgttgtctatgctcatgcactccgctgatgctctcttcgttgacgagctgcaacattgccgaaaggatttcctgctctttttggcagacgttttcgttgagatcagccccgagcgatttcccggtttcacctttgaatgggtcgcacttgtgtcgcaccgccagttcatgcctcacttgctctctgcatctgagtcgtcgtggggctgggcacctttcacgaagatcctacagatcccactccgaaacctctctgagcaattcaaatcggtcgatgttctacttcaagtcaaagactactaccgagcagtgctcaagctcttactagtgatctctcacgatttcccggagttcatgtcggccaacgcttccgagctctgtagcagtatcataccccatcttcggcagatgagaaatgcaattctgcattgccgtcccaacagatccgaacttgaggaagtcaatccacctttcgcatcgctcggagaggcaaacttggtcgacattctggaacagctcatgcaaaccggacctagcgaagatgctatcgcacatctgactcacgccatcaatcgaggcaatgcaaatgtgatcgagaccacctttggaaatgtgcgcatcaacgtcgatgcccggcttatcgacgatgttgtggcctatcttggtcatcacgcactgtccagagcccagcaaggtggggctgtcttcattcctggttccagcgacatcgctaccttgaccctcttagcccacgagctatcacccgagggccggctctacttgctgggaagcattgcagacagactacgccatcccggaccaacaaccgagtatttctcacgtgccattcttgatttgtttggtcaggatatcaacgatccggaggagacagacatccgtcagcagattgttcgcgttctgctggagcgcatcgcctgccactttccgcaaccatggggcctcattacggtcgtctttgagttgaccaagaatgagaaatatatgttcttcgagcagccttttatcaaggccgatcgcgatgtttccgatcagttcttggctatcgcctcgcaggcttga

SEQ ID NO: 35679 - protein, 2182 aa, Muscodor strobelii
  misc_feature: SGI Peptide ID NO. 572360
  misc_feature (1823)..(2181): Pfam Id: PF04054 Pfam Desc: CCR4-Not complex component, Not1
  misc_feature (2032)..(2166): Pfam Id: PF04054 Pfam Desc: CCR4-Not complex component, Not1
  misc_feature (1858)..(1965): Pfam Id: PF04054 Pfam Desc: CCR4-Not complex component, Not1
  misc_feature (1)..(2182): NCBI GI: 46128193 Blast Desc: FG08474.1 [Gibberella zeae PH-1]
  misc_feature (11)..(2182): NCBI GI: 116202173 Blast Desc: CHGG_08971 [Chaetomium globosum CBS 148.51] gi|88177489|gb|EAQ84957.1| CHGG_08971 [Chaetomium globosum CBS 148.51]
  misc_feature (99)..(2175): NCBI GI: 85067749 Blast Desc: NCU04766 [Neurospora crassa OR74A] gi|28921785|gb|EAA31063.1| conserved [Neurospora crassa OR74A] gi|40882290|emb|CAF06113.1| related to CDC39 protein [Neurospora
  misc_feature (1)..(2178): NCBI GI: 145606192 Blast Desc: MGG_02476 [Magnaporthe grisea 70-15] gi|145013915|gb|EDJ98556.1| MGG_02476 [Magnaporthe grisea 70-15]
  misc_feature (92)..(2178): NCBI GI: 171682098 Blast Desc: protein product [Podospora anserina] gi|170941008|emb|CAP66658.1| protein product [Podospora anserina]
  misc_feature (11)..(2171): NCBI GI: 156052951 Blast Desc: SS1G_06643 [Sclerotinia sclerotiorum 1980] gi|154704421|gb|EDO04160.1| SS1G_06643 [Sclerotinia sclerotiorum 1980]
  misc_feature (11)..(2175): NCBI GI: 226288767 Blast Desc: general negative regulator of transcription subunit 1 [Paracoccidioides brasiliensis Pb18]
  misc_feature (11)..(2175): NCBI GI: 226284137 Blast Desc: general negative regulator of transcription subunit 1 [Paracoccidioides brasiliensis Pb01]
  misc_feature (64)..(2178): NCBI GI: 240108340 Blast Desc: CCR4-Not complex component, Not1 family protein [Coccidioides posadasii C735 delta SOWgp]
  misc_feature (57)..(2178): NCBI GI: 119491879 Blast Desc: Ccr4-Not transcription complex subunit (NOT1), [Neosartorya fischeri NRRL 181] gi|119411594|gb|EAW21537.1| Ccr4-Not transcription complex subunit (NOT1), [Neosartorya NRRL
MVPPPPSSHLRSGTFSPLPAQALQTGLAHTPAQAQAQGPLSAGATPSTSSPTAPATNSLTKIVVAQVYLLLSTINKDKDRAKFELQVDQLNKLLDDHGMEVFSRYFTRLVAGNASQIFPGLNRSATNPGNYTLLKSEMAKISHELDQASKIAESIETANEDIFRDFDLSTFMEHFKLDALEKTILALAFKFGSRSDLKTKADAILSTNFPTFVNIMSRPTYGDHSDLTPSFIAAIVDRYIQGHPPNFNPASKHELSHKVQLRWSQNDQAPPLEVLAALDLIRVLGDKPPNGLALYIQKTGPDFTRDEDTCLSYLQNRPANVQLSEESVSAALTYTTVSVTYRHKPSVLVAALRRVLPITFNWHGAVSYFDQRDVRVSSEQFLRLYNALLPIAQSQDDQAPPFDIQTLWGGSHWENPETQLSFICAFASLSPDELDASTIPGLQPTFTLDEYAHSSPEVRERAAIAVKHPLVSRPALSAIFQVALHSQYASQSSEAKRLFQAVVVPNLDIFIVSAFGVPKPWPQMAVDTLGSLFDTFLKKTDHYRFVLDSLWRKDRELVTSRLIDVHAMKPGELPLIFDHVMTQGWLDDLVYLPNGFSLDLVSLAHAQGQIDLTQWARNISDKGQTQPVSMALAQFLVIKAELEIQSQKALSNGQTPLTTSTSLHLKTLLTLLQILEDFLPRGPIPELIRVQRTCITAYPRLVNYGEGYDEVIDANGLRGHRLPPAAVEKMEEQYKKMYSEESEVKAVVQRLDSYKHSRDPLEQDIFACMIHGLFDEYSHFSSYPLEALATTAVLFGGIISHKLISELPLKIGLGMILEAVRDHTPDENMYKFGLQALMQLFSRFREWPGFCKQLLQIPGLHGTEAWKKAEEIVREDEEERARTQNGNGAGNHLGEPLANGATEASDAHTAPFSAIHIDPPRPGSIFEDPVMEIQDRIQFGLNNLTTNSLQATFQELETVLEEPHQQWFASHLVEERAKMQPNYHHVYLDLVKLFQDSELWSEVLRQTYISVARMLNAESTLQNSTDRTQLKYLGAWLGLLTLARDQPIRHKNIAFKKLLIEAHDTKRLVVVVPFVCKVLIQASKSTIFRPPNPWLMDIIAFLIELYHNAELKLNQKFEIEVLCKDLNLDHKSIEPSNELQDREPMGDVGELSIPELEQFDSLSLNGLVAQNGLVGHVAPGLSPQSLPVAIPDISSLISLPPTSDMVANTGRLHELVRTALGKALAEIIQPVVDRSITIAAISTREMIHKDFATEPDENKLQTAALNMVKATAGSLALVTSKEPLRANFINYLRMAAQEAGGNLPEGTIILCVNANLDLACGVIERQAAERAVGEIEELIQEEIDARRRHRMQRPNEPYFDPGLTRWSTSIPHPYKLTPSLTGLNSEQMAIYDDFARQPRGAVQSSTAHASSASDATRNLANEVLADQYSAVQNLATPAETPSLPHINSQLSSYPHVHTGVPNGRSAAHPSQLDARAIEERVAKFCDELKHLAESSTEQHYRDLHQPHDLLDVVDAFHQFIISTSQTTDTPAVYAAEKICSLLFGRYTQNNETLFLETLVHILQIILKIAGGGLGDRLQLTFIQQPAENLLQIPVITALIQEDLLDIFNIDRIIARELREGFTPALFEFYEQLLEVTLFEDKSGILYADLMQSLSVAWSRIDEEPDLEVAQRLKAKLQPLRSCKPHHELNDAHHEYLFSEWVQLYTSLPMGDHAMIAFVRQLRSRAIGKSTEAMLIFFRKAVEISIHHNESVMQAGGHHIDAYGAVDALVGFVTVFAQDTFVQGEPPETGLLAIFKSVISVTRLMLCMHHMSRGIQFNQRVFFRLLSMLMHSADALFVDELQHCRKDFLLFLADVFVEISPERFPGFTFEWVALVSHRQFMPHLLSASESSWGWAPFTKILQIPLRNLSEQFKSVDVLLQVKDYYRAVLKLLLVISHDFPEFMSANASELCSSIIPHLRQMRNAILHCRPNRSELEEVNPPFASLGEANLVDILEQLMQTGPSEDAIAHLTHAINRGNANVIETTFGNVRINVDARLIDDVVAYLGHHALSRAQQGGAVFIPGSSDIATLTLLAHELSPEGRLYLLGSIADRLRHPGPTTEYFSRAILDLFGQDINDPEETDIRQQIVRVLLERIACHFPQPWGLITVVFELTKNEKYMFFEQPFIKADRDVSDQFLAIASQA

SEQ ID NO: 35680 - DNA, 7606 bp, Muscodor strobelii
  misc_feature: SGI EST ID NO. CUFF.85190.0
  misc_feature: Variant of the nucleotide sequence at SEQ ID NO 35678
ccccgccccgagcttgtgcctgccacagacagacgcgagcacctcagcttcaaaatccatcacttgtcaaatccatcctcatcccaatccccacactaccagcatcctaaccacatactgcatccacatcattcctcaacgaatctcaaactgtttgctgcgctgcgcactcgacgagactccaatcacacccgacgttgttccgacattgtcacaggcatcgacagccggatagacagatcccacagatcccacatcccatctccagccacacgccgtcgtcgcatcttcgcgccgtcgatcttcatgagttgcacaccgcacgagctcacacttcccgttcacctctgcgccgtcgagtagtggagcagccgtccgtctgcctccctcgtccgggcattgccttgccccccgtctgcggtcaacatcaccgtcccgtggaatcgcgaggggttctcggggattcgtctctccccccaacctcgtctctccccccaacaccgtcttccccctcggtccctcgcccgcctgccaggtcatggtccctccaccgccctcctcccacctcagatccggaaccttctcgcccctgcctgctcaggccctgcagaccggcctagcccacacgcccgcgcaagcccaagcccaaggccccctgagcgctggcgcgacgccctccacaagcagcccgaccgcgccagccaccaactcgctcaccaagatcgtcgtcgcccaggtctacctcctgctgagcaccatcaacaaggacaaggaccgcgccaagtttgagctgcaggtggaccagctgaacaaggtatgtagcgtcacaacagatgacacgagtgctgatgctaatgatgacgccccataacaaacagctcctcgatgaccacggcatggaggtcttctctcgctacttcacccgcctggtggctggcaatgcctcccagatcttccccggcctcaaccggtcggccaccaacccgggcaactacacgctgctgaagtccgagatggccaagatctcccacgagctcgaccaggcctccaagatcgccgagtccattgagaccgccaacgaggacatcttcagagacttcgacctgtccaccttcatggagcacttcaagctcgacgctctcgagaagaccatcctcgccctggccttcaagttcggctcgcgctccgatctcaagactaaggccgacgccatcctctccaccaacttcccgaccttcgtgaacatcatgtcgcggcccacctacggcgaccactccgacctgaccccgtctttcatcgccgccatcgtcgatcggtacatccagggccacccgcccaacttcaaccccgcctccaagcacgaactgagccacaaggtccaactgcgctggtcacagaacgaccaagctccgcctctcgaagtcctggctgccctcgacctgatccgcgtgctgggcgacaagccacccaacggcctggccctgtacatccagaagaccgggcccgacttcaccagagacgaggacacatgtctgagctacctgcagaacagacccgccaatgtgcagctgagcgaggagtcggtctcggccgccctgacctacacgaccgtcagcgtgacgtatcgacacaagccctccgtcctcgtggctgctctgcggcgcgtcctgcccatcaccttcaactggcacggtgccgtttcctacttcgaccagcgcgatgtgcgcgtctcctccgaacagtttctgcgtctctacaacgcccttcttcccatcgcgcaatcccaagacgaccaggcgccgcccttcgacatccagaccctgtggggcgggagccactgggagaatcccgagacacaactttccttcatctgcgcatttgcctccttgtctccggatgagctcgacgcgagcaccatacctggtcttcagcccacgttcaccctggatgaatatgcccattcctctccagaagtccgcgaacgcgctgccattgccgtcaaacatcccctcgtctccagacccgccctgtccgccatattccaggtcgctctccattcccagtatgctagtcagagctcggaagcgaagcgcttgttccaggcagtagtggttcccaacctcgacatcttcatcgtctcggcgttcggcgttcccaagccctggccacagatggccgtcgacaccttgggctccctgttcgatacgtttctcaagaaaactgaccactaccgatttgtcctcgacagcctgtggaggaaagacagggaattggtgacgtccagactcattgatgttcatgcgatgaagccgggcgagctgcccctcatttttgatcatgtcatgacgcagggctggttggatgatctcgtctaccttcccaatggctttagtctggatctcgtgtctctggcccatgctcaaggccaaatagatctgacgcaatgggcccgcaacatctcggacaaaggtcagacccagcctgtctcgatggctttggcacaatttctcgtcatcaaggcggagctggagatacaatcacagaaagctctcagcaatggccaaacaccattgactacaagcacctcgctccatctcaagacactcttgacgctgctacagatactggaagacttcttacctagagggcccattccggaactgattcgcgtgcaacgcacctgtattactgcctatcctagacttgtcaactatggtgagggctacgacgaggtgatcgatgccaacggcttgaggggccacagacttcccccggctgcggtagagaaaatggaggagcagtataagaagatgtacagcgaggagagcgaagtgaaggctgtcgtccagaggctcgattcgtacaagcactcccgagaccccttggaacaggacatctttgcctgtatgattcacgggctgttcgacgagtactcacacttctctagctatccactcgaagcgctggctactactgccgttctgttcggtggcatcatctcgcacaagttaatttcagaactaccgctgaagattgggctgggcatgatattagaggcggttagagaccacacgccagatgagaatatgtacaaatttggcctccaagctctgatgcagctattctcccggttcagagagtggcctggtttttgcaaacaactgttacagataccaggtcttcacggtaccgaggcttggaagaaggccgaagagattgtgcgtgaggacgaggaagaacgggcccgtacccagaatggtaacggggcaggtaatcatctgggagagcctctcgcaaatggggctaccgaggcgtcagatgctcacacggctcccttctctgccattcacatcgatcctccacgaccaggctctatattcgaggatcctgtcatggagatccaggaccgaattcaattcggcctgaacaacttgaccaccaactcgctccaagctactttccaggagctcgaaactgtgctcgaagagccccatcagcaatggtttgcaagccatcttgtcgaggaaagagctaaaatgcagccgaactaccaccacgtctacctggatctggttaaactcttccaggattcggaactgtggtcggaagttctcagacaaacttacataagcgtggctcgaatgctaaacgcagagagtacattgcagaactctaccgataggactcagctaaagtatctaggagcctggctggggctcttgacgcttgcgagggatcaacctatcaggcacaagaatatcgcgttcaagaaattactgatagaggcgcatgacacgaaacgattggtcgttgtagtgccatttgtctgcaaggttctcatacaggcttccaagtccacgatcttccgtccaccaaatccgtggctgatggacatcatcgcctttctcatcgaactgtaccacaatgccgagctcaagctcaaccaaaaattcgagatcgaggtgttgtgcaaagatctaaacctcgaccacaagagcatagaaccctccaacgagcttcaagatcgcgagcctatgggcgatgttggcgagctctctattccggaattggaacagtttgacagtctctccctgaacggcctagtcgcacagaacgggttggtaggtcatgtcgctcctggcctatcgccacaatcgttaccggttgcgattccagatatcagcagtcttatctcgctgccgcccaccagtgacatggttgcaaatactggccgtctccacgaacttgtacgcaccgccctgggcaaggctttggccgaaatcatccagcctgtggtcgatcgctctattacgattgcagctattagcacacgggagatgattcacaaggattttgctactgaaccagacgagaacaaactccaaacagctgctcttaatatggtgaaggctactgcaggtagtttggcacttgttacctcaaaagaacccctgcgagccaatttcatcaactacctcagaatggccgcgcaggaggcaggtggaaaccttcccgaaggcaccatcatactctgcgtgaatgccaatcttgaccttgcgtgcggagtcattgagagacaagctgcagaacgagccgtaggggaaatcgaagagttgatccaggaagagattgacgcgcgacgtcgacatcgcatgcaacggccgaacgagccctatttcgaccctggcctcacgcgatggtcgacttccattcctcatccttacaagcttacgccgagtctcacaggtctcaattctgaacagatggccatctatgatgacttcgcgcgacaacccagaggtgccgtccagagcagcacggcgcatgcatcgtctgcctcagatgcaaccaggaatctcgccaacgaggtactagccgaccagtacagtgctgtgcaaaacctggccacgccggcagagacgccgtccttaccacacatcaactcccaactgtcatcgtacccacatgtacatactggtgttccaaatggccgatctgccgctcaccctagccaactggatgctagggccattgaagaaagagtggcaaaattttgcgacgaactcaaacacctagcagagagctctaccgaacaacactacagagacctacaccagccacatgatctgctcgatgtcgtggacgcgtttcatcagttcatcatctcaacatcgcagactacagacactccagctgtctacgctgctgagaagatatgtagcctactgtttggtcgatacacacagaacaacgaaacgctgttccttgagactctggtgcacatactgcagattatactcaaaattgcaggaggcggccttggcgatcgtctgcagcttacctttattcaacagcctgctgagaatcttcttcagatacctgtgatcactgcattaattcaggaggacctccttgatatcttcaatatcgatcgtattatcgcgagggagctgcgagaaggtttcacgccagccctattcgagttctacgaacaactcctagaagttaccctcttcgaagacaaatcgggcattctctacgcggatttgatgcaaagtctgtcggtagcgtggtcacgcatcgatgaagagccagatctcgaagtagcgcagagactgaaggcaaagctccagccactgagatcgtgtaaaccacaccatgagctgaacgatgcgcatcatgaatacctcttcagcgaatgggtccagctgtatacttctctccctatgggcgatcatgcgatgattgcctttgttcgacagctgcgcagcagggccatcggtaaaagcactgaggcgatgctcatctttttcagaaaggctgttgagatctcgatccatcataatgagagtgtgatgcaagccggcggccaccatatagatgcctatggcgctgtcgacgccctcgtcggcttcgtcaccgttttcgcacaagatacatttgttcagggagaaccgcccgagactggactgctcgccatattcaagtctgtgatcagcgtcacccgtctgatgctttgcatgcaccatatgtctcgaggaatacaattcaaccaacgagtcttcttccgtttgttgtctatgctcatgcactccgctgatgctctcttcgttgacgagctgcaacattgccgaaaggatttcctgctctttttggcagacgttttcgttgagatcagccccgagcgatttcccggtttcacctttgaatgggtcgcacttgtgtcgcaccgccagttcatgcctcacttgctctctgcatctgagtcgtcgtggggctgggcacctttcacgaagatcctacagatcccactccgaaacctctctgagcaattcaaatcggtcgatgttctacttcaagtcaaagactactaccgagcagtgctcaagctcttactagtgatctctcacgatttcccggagttcatgtcggccaacgcttccgagctctgtagcagtatcataccccatcttcggcagatgagaaatgcaattctgcattgccgtcccaacagatccgaacttgaggaagtcaatccacctttcgcatcgctcggagaggcaaacttggtcgacattctggaacagctcatgcaaaccggacctagcgaagatgctatcgcacatctgactcacgccatcaatcgaggcaatgcaaatgtgatcgagaccacctttggaaatgtgcgcatcaacgtcgatgcccggcttatcgacgatgttgtggcctatcttggtcatcacgcactgtccagagcccagcaaggtggggctgtcttcattcctggttccagcgacatcgctaccttgaccctcttagcccacgagctatcacccgagggccggctctacttgctgggaagcattgcagacagactacgccatcccggaccaacaaccgagtatttctcacgtgccattcttgatttgtttggtcaggatatcaacgatccggaggagacagacatccgtcagcagattgttcgcgttctgctggagcgcatcgcctgccactttccgcaaccatggggcctcattacggtcgtctttgagttgaccaagaatgagaaatatatgttcttcgagcagccttttatcaaggccgatcgcgatgtttccgatcagttcttggctatcgcctcgcaggcttgaggtagcttagtaattgcctgtcatcagctttagaactcagcgaagtgtctcgatgtttctcagcgagattgcacataataggacaggaggatatggttagtttctcgattatcagaattcgaatgcatgacggcatggacaaaagggggccatggcttctagttcgggtagtggatcattgatacggaaatggtttgatgatacggcattctacggcgtttcgggccatgaccattaggactgtacttatgtacttttgatacctgcgtttcgtggccattggggcctggctatgagcctggtatcgtgtatgttgctgtatgatatatatgagtaatagcgttgggcaggaagcctgagaactcgtggatcaatagctggcaaccctttgaccccacccattataattcggtaatttgtagtttatattgccaatggaagtaatcggagtaatt

SEQ ID NO: 35681 - DNA, 6519 bp, Muscodor strobelii
  misc_feature: SGI cDNA ID NO. 572361
  misc_feature: Encodes the peptide sequence at SEQ ID NO 35682
atggtccctccaccgccctcctcccacctcagatccggaaccttctcgcccctgcctgctcaggccctgcagaccggcctagcccacacgcccgcgcaagcccaagcccaaggccccctgagcgctggcgcgacgccctccacaagcagcccgaccgcgccagccaccaactcgctcaccaagatcgtcgtcgcccaggtctacctcctgctgagcaccatcaacaaggacaaggaccgcgccaagtttgagctgcaggtggaccagctgaacaagctcctcgatgaccacggcatggaggtcttctctcgctacttcacccgcctggtggctggcaatgcctcccagatcttccccggcctcaaccggtcggccaccaacccgggcaactacacgctgctgaagtccgagatggccaagatctcccacgagctcgaccaggcctccaagatcgccgagtccattgagaccgccaacgaggacatcttcagagacttcgacctgtccaccttcatggagcacttcaagctcgacgctctcgagaagaccatcctcgccctggccttcaagttcggctcgcgctccgatctcaagactaaggccgacgccatcctctccaccaacttcccgaccttcgtgaacatcatgtcgcggcccacctacggcgaccactccgacctgaccccgtctttcatcgccgccatcgtcgatcggtacatccagggccacccgcccaacttcaaccccgcctccaagcacgaactgagccacaaggtccaactgcgctggtcacagaacgaccaagctccgcctctcgaagtcctggctgccctcgacctgatccgcgtgctgggcgacaagccacccaacggcctggccctgtacatccagaagaccgggcccgacttcaccagagacgaggacacatgtctgagctacctgcagaacagacccgccaatgtgcagctgagcgaggagtcggtctcggccgccctgacctacacgaccgtcagcgtgacgtatcgacacaagccctccgtcctcgtggctgctctgcggcgcgtcctgcccatcaccttcaactggcacggtgccgtttcctacttcgaccagcgcgatgtgcgcgtctcctccgaacagtttctgcgtctctacaacgcccttcttcccatcgcgcaatcccaagacgaccaggcgccgcccttcgacatccagaccctgtggggcgggagccactgggagaatcccgagacacaactttccttcatctgcgcatttgcctccttgtctccggatgagctcgacgcgagcaccatacctggtcttcagcccacgttcaccctggatgaatatgcccattcctctccagaagtccgcgaacgcgctgccattgccgtcaaacatcccctcgtctccagacccgccctgtccgccatattccaggtcgctctccattcccagtatgctagtcagagctcggaagcgaagcgcttgttccaggcagtagtggttcccaacctcgacatcttcatcgtctcggcgttcggcgttcccaagccctggccacagatggccgtcgacaccttgggctccctgttcgatacgtttctcaagaaaactgaccactaccgatttgtcctcgacagcctgtggaggaaagacagggaattggtgacgtccagactcattgatgttcatgcgatgaagccgggcgagctgcccctcatttttgatcatgtcatgacgcagggctggttggatgatctcgtctaccttcccaatggctttagtctggatctcgtgtctctggcccatgctcaaggccaaatagatctgacgcaatgggcccgcaacatctcggacaaaggtcagacccagcctgtctcgatggctttggcacaatttctcgtcatcaaggcggagctggagatacaatcacagaaagctctcagcaatggccaaacaccattgactacaagcacctcgctccatctcaagacactcttgacgctgctacagatactggaagacttcttacctagagggcccattccggaactgattcgcgtgcaacgcacctgtattactgcctatcctagacttgtcaactatggtgagggctacgacgaggtgatcgatgccaacggcttgaggggccacagacttcccccggctgcggtagagaaaatggaggagcagtataagaagatgtacagcgaggagagcgaagtgaaggctgtcgtccagaggctcgattcgtacaagcactcccgagaccccttggaacaggacatctttgcctgtatgattcacgggctgttcgacgagtactcacacttctctagctatccactcgaagcgctggctactactgccgttctgttcggtggcatcatctcgcacaagttaatttcagaactaccgctgaagattgggctgggcatgatattagaggcggttagagaccacacgccagatgagaatatgtacaaatttggcctccaagctctgatgcagctattctcccggttcagagagtggcctggtttttgcaaacaactgttacagataccaggtcttcacggtaccgaggcttggaagaaggccgaagagattgtgcgtgaggacgaggaagaacgggcccgtacccagaatggtaacggggcaggtaatcatctgggagagcctctcgcaaatggggctaccgaggcgtcagatgctcacacggctcccttctctgccattcacatcgatcctccacgaccaggctctatattcgaggatcctgtcatggagatccaggaccgaattcaattcggcctgaacaacttgaccaccaactcgctccaagctactttccaggagctcgaaactgtgctcgaagagccccatcagcaatggtttgcaagccatcttgtcgaggaaagagctaaaatgcagccgaactaccaccacgtctacctggatctggttaaactcttccaggattcggaactgtggtcggaagttctcagacaaacttacataagcgtggctcgaatgctaaacgcagagagtacattgcagaactctaccgataggactcagctaaagtatctaggagcctggctggggctcttgacgcttgcgagggatcaacctatcaggcacaagaatatcgcgttcaagaaattactgatagaggcgcatgacacgaaacgattggtcgttgtagtgccatttgtctgcaaggttctcatacaggcttccaagtccacgatcttccgtccaccaaatccgtggctgatggacatcatcgcctttctcatcgaactgtaccacaatgccgagctcaagctcaaccaaaaattcgagatcgaggtgttgtgcaaagatctaaacctcgaccacaagagcatagaaccctccaacgagcttcaagatcgcgagcctatgggcgatgttggcgagctctctattccggaattggaacagtttgacagtctctccctgaacggcctagtcgcacagaacgggttggtaggtcatgtcgctcctggcctatcgccacaatcgttaccggttgcgattccagatatcagcagtcttatctcgctgccgcccaccagtgacatggttgcaaatactggccgtctccacgaacttgtacgcaccgccctgggcaaggctttggccgaaatcatccagcctgtggtcgatcgctctattacgattgcagctattagcacacgggagatgattcacaaggattttgctactgaaccagacgagaacaaactccaaacagctgctcttaatatggtgaaggctactgcaggtagtttggcacttgttacctcaaaagaacccctgcgagccaatttcatcaactacctcagaatggccgcgcaggaggcaggtggaaaccttcccgaaggcaccatcatactctgcgtgaatgccaatcttgaccttgcgtgcggagtcattgagagacaagctgcagaacgagccgtaggggaaatcgaagagttgatccaggaagagattgacgcgcgacgtcgacatcgcatgcaacggccgaacgagccctatttcgaccctggcctcacgcgatggtcgacttccattcctcatccttacaagcttacgccgagtctcacaggtctcaattctgaacagatggccatctatgatgacttcgcgcgacaacccagaggtgccgtccagagcagcacggcgcatgcatcgtctgcctcagatgcaaccaggaatctcgccaacgaggtactagccgaccagtacagtgctgtgcaaaacctggccacgccggcagagacgccgtccttaccacacatcaactcccaactgtcatcgtacccacatgtacatactggtgttccaaatggccgatctgccgctcaccctagccaactggatgctagggccattgaagaaagagtggcaaaattttgcgacgaactcaaacacctagcagagagctctaccgaacaacactacagagacctacaccagccacatgatctgctcgatgtcgtggacgcgtttcatcagttcatcatctcaacatcgcagactacagacactccagctgtctacgctgctgagaagatatgtagcctactgtttggtcgatacacacagaacaacgaaacgctgttccttgagactctggtgcacatactgcagattatactcaaaattgcaggaggcggccttggcgatcgtctgcagcttacctttattcaacagcctgctgagaatcttcttcagatacctgtgatcactgcattaattcaggaggacctccttgatatcttcaatatcgatcgtattatcgcgagggagctgcgagaaggtttcacgccagccctattcgagttctacgaacaactcctagaagttaccctcttcgaagacaaatcgggcattctctacgcggatttgatgcaaagtctgtcggtagcgtggtcacgcatcgatgaagagccagatctcgaagtagcgcagagactgaaggcaaagctccagccactgagatcgtgtaaaccacaccatgagctgaacgatgcgcatcatgaatacctcttcagcgaatgggtccagctgtatacttctctccctatgggcgatcatgcgatgattgcctttgttcgacagctgcgcagcagggccatcggtaaaagcactgaggcgatgctcatctttttcagaaaggctgttgagatctcgatccatcataatgagagtgtgatgcaagccggcggccaccatatagatgcctatggcgctgtcgacgccctcgtcggcttcgtcaccgttttcgcacaagatacatttgttcagggagaaccgcccgagactggactgctcgccatattcaagtctgtgatcagcgtcacccgtctgatgctttgcatgcaccatatgtctcgaggaatacaattcaaccaacgagtcttcttccgtttgttgtctatgctcatgcactccgctgatgctctcttcgttgacgagctgcaacattgccgaaaggatttcctgctctttttggcagacgttttcgttgagatcagccccgagcgatttcccggtttcacctttgaatgggtcgcacttgtgtcgcaccgccagttcatgcctcacttgctctctgcatctgagtcgtcgtggggctgggcacctttcacgaagatcctacagatcccactccgaaacctctctgagcaattcaaatcggtcgatgttctacttcaagtcaaagactactaccgagcagtgctcaagctcttactagtgatctctcacgatttcccggagttcatgtcggccaacgcttccgagctctgtagcagtatcataccccatcttcggcagatgagaaatgcaattctgcattgccgtcccaacagatccgaacttgaggaagtcaatccacctttcgcatcgctcggagaggcaaacttggtcgacattctggaacagctcatgcaaaccggacctagcgaagatgctatcgcacatctgactcacgccatcaatcgaggcaatgcaaatgtgatcgagaccacctttggaaatgtgcgcatcaacgtcgatgcccggcttatcgacgatgttgtggcctatcttggtcatcacgcactgtccagagcccagcaaggtggggctgtcttcattcctggttccagcgacatcgctaccttgaccctcttagcccacgagctatcacccgagggccggctctacttgctgggaagcattgcagacagactacgccatcccggaccaacaaccgagtatttctcacgtgccattcttgatttgtttggtcaggatatcaacgatccggaggagacagacatccgtcagcagattgttcgcgttctgctggagcgcatcgcctgccactttccgcaaccatggggcctcattacggtcgtctttgagttgaccaagaatgagaaatatatgttcttcgagcagccttttatcaaggccgatcgcgatgtaagttga

SEQ ID NO: 35682 - protein, 2172 aa, Muscodor strobelii
  misc_feature: SGI Peptide ID NO. 572361
  misc_feature (1823)..(2172): Pfam Id: PF04054 Pfam Desc: CCR4-Not complex component, Not1
  misc_feature (2032)..(2166): Pfam Id: PF04054 Pfam Desc: CCR4-Not complex component, Not1
  misc_feature (1858)..(1965): Pfam Id: PF04054 Pfam Desc: CCR4-Not complex component, Not1
  misc_feature (1)..(2172): NCBI GI: 46128193 Blast Desc: FG08474.1 [Gibberella zeae PH-1]
  misc_feature (11)..(2172): NCBI GI: 116202173 Blast Desc: CHGG_08971 [Chaetomium globosum CBS 148.51] gi|88177489|gb|EAQ84957.1| CHGG_08971 [Chaetomium globosum CBS 148.51]
  misc_feature (99)..(2171): NCBI GI: 85067749 Blast Desc: NCU04766 [Neurospora crassa OR74A] gi|28921785|gb|EAA31063.1| conserved [Neurospora crassa OR74A] gi|40882290|emb|CAF06113.1| related to CDC39 protein [Neurospora
  misc_feature (1)..(2172): NCBI GI: 145606192 Blast Desc: MGG_02476 [Magnaporthe grisea 70-15] gi|145013915|gb|EDJ98556.1| MGG_02476 [Magnaporthe grisea 70-15]
  misc_feature (92)..(2172): NCBI GI: 171682098 Blast Desc: protein product [Podospora anserina] gi|170941008|emb|CAP66658.1| protein product [Podospora anserina]
  misc_feature (11)..(2171): NCBI GI: 156052951 Blast Desc: SS1G_06643 [Sclerotinia sclerotiorum 1980] gi|154704421|gb|EDO04160.1| SS1G_06643 [Sclerotinia sclerotiorum 1980]
  misc_feature (11)..(2172): NCBI GI: 226288767 Blast Desc: general negative regulator of transcription subunit 1 [Paracoccidioides brasiliensis Pb18]
  misc_feature (11)..(2172): NCBI GI: 226284137 Blast Desc: general negative regulator of transcription subunit 1 [Paracoccidioides brasiliensis Pb01]
  misc_feature (64)..(2167): NCBI GI: 240108340 Blast Desc: CCR4-Not complex component, Not1 family protein [Coccidioides posadasii C735 delta SOWgp]
  misc_feature (57)..(2167): NCBI GI: 119491879 Blast Desc: Ccr4-Not transcription complex subunit (NOT1), [Neosartorya fischeri NRRL 181] gi|119411594|gb|EAW21537.1| Ccr4-Not transcription complex subunit (NOT1), [Neosartorya NRRL
MVPPPPSSHLRSGTFSPLPAQALQTGLAHTPAQAQAQGPLSAGATPSTSSPTAPATNSLTKIVVAQVYLLLSTINKDKDRAKFELQVDQLNKLLDDHGMEVFSRYFTRLVAGNASQIFPGLNRSATNPGNYTLLKSEMAKISHELDQASKIAESIETANEDIFRDFDLSTFMEHFKLDALEKTILALAFKFGSRSDLKTKADAILSTNFPTFVNIMSRPTYGDHSDLTPSFIAAIVDRYIQGHPPNFNPASKHELSHKVQLRWSQNDQAPPLEVLAALDLIRVLGDKPPNGLALYIQKTGPDFTRDEDTCLSYLQNRPANVQLSEESVSAALTYTTVSVTYRHKPSVLVAALRRVLPITFNWHGAVSYFDQRDVRVSSEQFLRLYNALLPIAQSQDDQAPPFDIQTLWGGSHWENPETQLSFICAFASLSPDELDASTIPGLQPTFTLDEYAHSSPEVRERAAIAVKHPLVSRPALSAIFQVALHSQYASQSSEAKRLFQAVVVPNLDIFIVSAFGVPKPWPQMAVDTLGSLFDTFLKKTDHYRFVLDSLWRKDRELVTSRLIDVHAMKPGELPLIFDHVMTQGWLDDLVYLPNGFSLDLVSLAHAQGQIDLTQWARNISDKGQTQPVSMALAQFLVIKAELEIQSQKALSNGQTPLTTSTSLHLKTLLTLLQILEDFLPRGPIPELIRVQRTCITAYPRLVNYGEGYDEVIDANGLRGHRLPPAAVEKMEEQYKKMYSEESEVKAVVQRLDSYKHSRDPLEQDIFACMIHGLFDEYSHFSSYPLEALATTAVLFGGIISHKLISELPLKIGLGMILEAVRDHTPDENMYKFGLQALMQLFSRFREWPGFCKQLLQIPGLHGTEAWKKAEEIVREDEEERARTQNGNGAGNHLGEPLANGATEASDAHTAPFSAIHIDPPRPGSIFEDPVMEIQDRIQFGLNNLTTNSLQATFQELETVLEEPHQQWFASHLVEERAKMQPNYHHVYLDLVKLFQDSELWSEVLRQTYISVARMLNAESTLQNSTDRTQLKYLGAWLGLLTLARDQPIRHKNIAFKKLLIEAHDTKRLVVVVPFVCKVLIQASKSTIFRPPNPWLMDIIAFLIELYHNAELKLNQKFEIEVLCKDLNLDHKSIEPSNELQDREPMGDVGELSIPELEQFDSLSLNGLVAQNGLVGHVAPGLSPQSLPVAIPDISSLISLPPTSDMVANTGRLHELVRTALGKALAEIIQPVVDRSITIAAISTREMIHKDFATEPDENKLQTAALNMVKATAGSLALVTSKEPLRANFINYLRMAAQEAGGNLPEGTIILCVNANLDLACGVIERQAAERAVGEIEELIQEEIDARRRHRMQRPNEPYFDPGLTRWSTSIPHPYKLTPSLTGLNSEQMAIYDDFARQPRGAVQSSTAHASSASDATRNLANEVLADQYSAVQNLATPAETPSLPHINSQLSSYPHVHTGVPNGRSAAHPSQLDARAIEERVAKFCDELKHLAESSTEQHYRDLHQPHDLLDVVDAFHQFIISTSQTTDTPAVYAAEKICSLLFGRYTQNNETLFLETLVHILQIILKIAGGGLGDRLQLTFIQQPAENLLQIPVITALIQEDLLDIFNIDRIIARELREGFTPALFEFYEQLLEVTLFEDKSGILYADLMQSLSVAWSRIDEEPDLEVAQRLKAKLQPLRSCKPHHELNDAHHEYLFSEWVQLYTSLPMGDHAMIAFVRQLRSRAIGKSTEAMLIFFRKAVEISIHHNESVMQAGGHHIDAYGAVDALVGFVTVFAQDTFVQGEPPETGLLAIFKSVISVTRLMLCMHHMSRGIQFNQRVFFRLLSMLMHSADALFVDELQHCRKDFLLFLADVFVEISPERFPGFTFEWVALVSHRQFMPHLLSASESSWGWAPFTKILQIPLRNLSEQFKSVDVLLQVKDYYRAVLKLLLVISHDFPEFMSANASELCSSIIPHLRQMRNAILHCRPNRSELEEVNPPFASLGEANLVDILEQLMQTGPSEDAIAHLTHAINRGNANVIETTFGNVRINVDARLIDDVVAYLGHHALSRAQQGGAVFIPGSSDIATLTLLAHELSPEGRLYLLGSIADRLRHPGPTTEYFSRAILDLFGQDINDPEETDIRQQIVRVLLERIACHFPQPWGLITVVFELTKNEKYMFFEQPFIKADRDVS

SEQ ID NO: 35683 - DNA, 7542 bp, Muscodor strobelii
  misc_feature: SGI EST ID NO. CUFF.85190.1
  misc_feature: Variant of the nucleotide sequence at SEQ ID NO 35681
ccccgccccgagcttgtgcctgccacagacagacgcgagcacctcagcttcaaaatccatcacttgtcaaatccatcctcatcccaatccccacactaccagcatcctaaccacatactgcatccacatcattcctcaacgaatctcaaactgtttgctgcgctgcgcactcgacgagactccaatcacacccgacgttgttccgacattgtcacaggcatcgacagccggatagacagatcccacagatcccacatcccatctccagccacacgccgtcgtcgcatcttcgcgccgtcgatcttcatgagttgcacaccgcacgagctcacacttcccgttcacctctgcgccgtcgagtagtggagcagccgtccgtctgcctccctcgtccgggcattgccttgccccccgtctgcggtcaacatcaccgtcccgtggaatcgcgaggggttctcggggattcgtctctccccccaacctcgtctctccccccaacaccgtcttccccctcggtccctcgcccgcctgccaggtcatggtccctccaccgccctcctcccacctcagatccggaaccttctcgcccctgcctgctcaggccctgcagaccggcctagcccacacgcccgcgcaagcccaagcccaaggccccctgagcgctggcgcgacgccctccacaagcagcccgaccgcgccagccaccaactcgctcaccaagatcgtcgtcgcccaggtctacctcctgctgagcaccatcaacaaggacaaggaccgcgccaagtttgagctgcaggtggaccagctgaacaagctcctcgatgaccacggcatggaggtcttctctcgctacttcacccgcctggtggctggcaatgcctcccagatcttccccggcctcaaccggtcggccaccaacccgggcaactacacgctgctgaagtccgagatggccaagatctcccacgagctcgaccaggcctccaagatcgccgagtccattgagaccgccaacgaggacatcttcagagacttcgacctgtccaccttcatggagcacttcaagctcgacgctctcgagaagaccatcctcgccctggccttcaagttcggctcgcgctccgatctcaagactaaggccgacgccatcctctccaccaacttcccgaccttcgtgaacatcatgtcgcggcccacctacggcgaccactccgacctgaccccgtctttcatcgccgccatcgtcgatcggtacatccagggccacccgcccaacttcaaccccgcctccaagcacgaactgagccacaaggtccaactgcgctggtcacagaacgaccaagctccgcctctcgaagtcctggctgccctcgacctgatccgcgtgctgggcgacaagccacccaacggcctggccctgtacatccagaagaccgggcccgacttcaccagagacgaggacacatgtctgagctacctgcagaacagacccgccaatgtgcagctgagcgaggagtcggtctcggccgccctgacctacacgaccgtcagcgtgacgtatcgacacaagccctccgtcctcgtggctgctctgcggcgcgtcctgcccatcaccttcaactggcacggtgccgtttcctacttcgaccagcgcgatgtgcgcgtctcctccgaacagtttctgcgtctctacaacgcccttcttcccatcgcgcaatcccaagacgaccaggcgccgcccttcgacatccagaccctgtggggcgggagccactgggagaatcccgagacacaactttccttcatctgcgcatttgcctccttgtctccggatgagctcgacgcgagcaccatacctggtcttcagcccacgttcaccctggatgaatatgcccattcctctccagaagtccgcgaacgcgctgccattgccgtcaaacatcccctcgtctccagacccgccctgtccgccatattccaggtcgctctccattcccagtatgctagtcagagctcggaagcgaagcgcttgttccaggcagtagtggttcccaacctcgacatcttcatcgtctcggcgttcggcgttcccaagccctggccacagatggccgtcgacaccttgggctccctgttcgatacgtttctcaagaaaactgaccactaccgatttgtcctcgacagcctgtggaggaaagacagggaattggtgacgtccagactcattgatgttcatgcgatgaagccgggcgagctgcccctcatttttgatcatgtcatgacgcagggctggttggatgatctcgtctaccttcccaatggctttagtctggatctcgtgtctctggcccatgctcaaggccaaatagatctgacgcaatgggcccgcaacatctcggacaaaggtcagacccagcctgtctcgatggctttggcacaatttctcgtcatcaaggcggagctggagatacaatcacagaaagctctcagcaatggccaaacaccattgactacaagcacctcgctccatctcaagacactcttgacgctgctacagatactggaagacttcttacctagagggcccattccggaactgattcgcgtgcaacgcacctgtattactgcctatcctagacttgtcaactatggtgagggctacgacgaggtgatcgatgccaacggcttgaggggccacagacttcccccggctgcggtagagaaaatggaggagcagtataagaagatgtacagcgaggagagcgaagtgaaggctgtcgtccagaggctcgattcgtacaagcactcccgagaccccttggaacaggacatctttgcctgtatgattcacgggctgttcgacgagtactcacacttctctagctatccactcgaagcgctggctactactgccgttctgttcggtggcatcatctcgcacaagttaatttcagaactaccgctgaagattgggctgggcatgatattagaggcggttagagaccacacgccagatgagaatatgtacaaatttggcctccaagctctgatgcagctattctcccggttcagagagtggcctggtttttgcaaacaactgttacagataccaggtcttcacggtaccgaggcttggaagaaggccgaagagattgtgcgtgaggacgaggaagaacgggcccgtacccagaatggtaacggggcaggtaatcatctgggagagcctctcgcaaatggggctaccgaggcgtcagatgctcacacggctcccttctctgccattcacatcgatcctccacgaccaggctctatattcgaggatcctgtcatggagatccaggaccgaattcaattcggcctgaacaacttgaccaccaactcgctccaagctactttccaggagctcgaaactgtgctcgaagagccccatcagcaatggtttgcaagccatcttgtcgaggaaagagctaaaatgcagccgaactaccaccacgtctacctggatctggttaaactcttccaggattcggaactgtggtcggaagttctcagacaaacttacataagcgtggctcgaatgctaaacgcagagagtacattgcagaactctaccgataggactcagctaaagtatctaggagcctggctggggctcttgacgcttgcgagggatcaacctatcaggcacaagaatatcgcgttcaagaaattactgatagaggcgcatgacacgaaacgattggtcgttgtagtgccatttgtctgcaaggttctcatacaggcttccaagtccacgatcttccgtccaccaaatccgtggctgatggacatcatcgcctttctcatcgaactgtaccacaatgccgagctcaagctcaaccaaaaattcgagatcgaggtgttgtgcaaagatctaaacctcgaccacaagagcatagaaccctccaacgagcttcaagatcgcgagcctatgggcgatgttggcgagctctctattccggaattggaacagtttgacagtctctccctgaacggcctagtcgcacagaacgggttggtaggtcatgtcgctcctggcctatcgccacaatcgttaccggttgcgattccagatatcagcagtcttatctcgctgccgcccaccagtgacatggttgcaaatactggccgtctccacgaacttgtacgcaccgccctgggcaaggctttggccgaaatcatccagcctgtggtcgatcgctctattacgattgcagctattagcacacgggagatgattcacaaggattttgctactgaaccagacgagaacaaactccaaacagctgctcttaatatggtgaaggctactgcaggtagtttggcacttgttacctcaaaagaacccctgcgagccaatttcatcaactacctcagaatggccgcgcaggaggcaggtggaaaccttcccgaaggcaccatcatactctgcgtgaatgccaatcttgaccttgcgtgcggagtcattgagagacaagctgcagaacgagccgtaggggaaatcgaagagttgatccaggaagagattgacgcgcgacgtcgacatcgcatgcaacggccgaacgagccctatttcgaccctggcctcacgcgatggtcgacttccattcctcatccttacaagcttacgccgagtctcacaggtctcaattctgaacagatggccatctatgatgacttcgcgcgacaacccagaggtgccgtccagagcagcacggcgcatgcatcgtctgcctcagatgcaaccaggaatctcgccaacgaggtactagccgaccagtacagtgctgtgcaaaacctggccacgccggcagagacgccgtccttaccacacatcaactcccaactgtcatcgtacccacatgtacatactggtgttccaaatggccgatctgccgctcaccctagccaactggatgctagggccattgaagaaagagtggcaaaattttgcgacgaactcaaacacctagcagagagctctaccgaacaacactacagagacctacaccagccacatgatctgctcgatgtcgtggacgcgtttcatcagttcatcatctcaacatcgcagactacagacactccagctgtctacgctgctgagaagatatgtagcctactgtttggtcgatacacacagaacaacgaaacgctgttccttgagactctggtgcacatactgcagattatactcaaaattgcaggaggcggccttggcgatcgtctgcagcttacctttattcaacagcctgctgagaatcttcttcagatacctgtgatcactgcattaattcaggaggacctccttgatatcttcaatatcgatcgtattatcgcgagggagctgcgagaaggtttcacgccagccctattcgagttctacgaacaactcctagaagttaccctcttcgaagacaaatcgggcattctctacgcggatttgatgcaaagtctgtcggtagcgtggtcacgcatcgatgaagagccagatctcgaagtagcgcagagactgaaggcaaagctccagccactgagatcgtgtaaaccacaccatgagctgaacgatgcgcatcatgaatacctcttcagcgaatgggtccagctgtatacttctctccctatgggcgatcatgcgatgattgcctttgttcgacagctgcgcagcagggccatcggtaaaagcactgaggcgatgctcatctttttcagaaaggctgttgagatctcgatccatcataatgagagtgtgatgcaagccggcggccaccatatagatgcctatggcgctgtcgacgccctcgtcggcttcgtcaccgttttcgcacaagatacatttgttcagggagaaccgcccgagactggactgctcgccatattcaagtctgtgatcagcgtcacccgtctgatgctttgcatgcaccatatgtctcgaggaatacaattcaaccaacgagtcttcttccgtttgttgtctatgctcatgcactccgctgatgctctcttcgttgacgagctgcaacattgccgaaaggatttcctgctctttttggcagacgttttcgttgagatcagccccgagcgatttcccggtttcacctttgaatgggtcgcacttgtgtcgcaccgccagttcatgcctcacttgctctctgcatctgagtcgtcgtggggctgggcacctttcacgaagatcctacagatcccactccgaaacctctctgagcaattcaaatcggtcgatgttctacttcaagtcaaagactactaccgagcagtgctcaagctcttactagtgatctctcacgatttcccggagttcatgtcggccaacgcttccgagctctgtagcagtatcataccccatcttcggcagatgagaaatgcaattctgcattgccgtcccaacagatccgaacttgaggaagtcaatccacctttcgcatcgctcggagaggcaaacttggtcgacattctggaacagctcatgcaaaccggacctagcgaagatgctatcgcacatctgactcacgccatcaatcgaggcaatgcaaatgtgatcgagaccacctttggaaatgtgcgcatcaacgtcgatgcccggcttatcgacgatgttgtggcctatcttggtcatcacgcactgtccagagcccagcaaggtggggctgtcttcattcctggttccagcgacatcgctaccttgaccctcttagcccacgagctatcacccgagggccggctctacttgctgggaagcattgcagacagactacgccatcccggaccaacaaccgagtatttctcacgtgccattcttgatttgtttggtcaggatatcaacgatccggaggagacagacatccgtcagcagattgttcgcgttctgctggagcgcatcgcctgccactttccgcaaccatggggcctcattacggtcgtctttgagttgaccaagaatgagaaatatatgttcttcgagcagccttttatcaaggccgatcgcgatgtttccgatcagttcttggctatcgcctcgcaggcttgaggtagcttagtaattgcctgtcatcagctttagaactcagcgaagtgtctcgatgtttctcagcgagattgcacataataggacaggaggatatggttagtttctcgattatcagaattcgaatgcatgacggcatggacaaaagggggccatggcttctagttcgggtagtggatcattgatacggaaatggtttgatgatacggcattctacggcgtttcgggccatgaccattaggactgtacttatgtacttttgatacctgcgtttcgtggccattggggcctggctatgagcctggtatcgtgtatgttgctgtatgatatatatgagtaatagcgttgggcaggaagcctgagaactcgtggatcaatagctggcaaccctttgaccccacccattataattcggtaatttgtagtttatattgccaatggaagtaatcggagtaatt

SEQ ID NO: 35684 - DNA, 1851 bp, Muscodor strobelii
  misc_feature: SGI cDNA ID NO. 572362
  misc_feature: Encodes the peptide sequence at SEQ ID NO 35685
atgcggttcgagacattcgctagtatactcagcttagtcacaaggtgtaaatgtgcaaatttcgcctttgaagccatagtcctcacggaaagcgacgtgaccaaattccctgacatcgccttcggcaacctttcaacaacaagccctacgtacgacggaccagcatgtaaagtctatcccggtacagaaaactggccattagagtcagaatggacgcagctaaataactcacttaatggtgctttactccatcccgtgcctcctgctgccgtatgctacgatgggccatacaaagacacgacgcaatgcaatttcttgcttcggaccgcgagttctacaagatattattcgaacgatccgctcactgtactgacgaattggcccgagggcgactcatgttatgccactgcgagcacgacaggattaacttgcacgaggggtgggtaccccgagtatgtcgtcaatgtatcaacggtgaagcacgtccaggccgctgtaaactttgcaaggaataaggatttgagggtagttatcaagaacaccgggcatgacttcctcggtcgatcggtaggcttcggtgctctgagcatttggacacattggctgaaatactttgaattcctaccatcctacagcatcggcgagtatagcggcatggcggcgcgagtcggagccgggttggagagttgggaattgtttgcttacatggcgcagtataacatgacggttctagttgcgggttcttacactgttggcgcatatgggggctggattcttggaggagggcattctgctctagcttcgacctatgggatgggagctgatcaggtgttggcgtttgaggttgttactgctgatgggaacttcgtcacggccgatgtggaacagaatacggatttgttctttgcgttaaggggtggagggggtggaaatttcgggattgtgacctcgatcattgtgaaggcacacccgcctatctcagtcttgagctcgtcgctcgcattttcggtaccggctggatccaataacgtcgaaggattttggtccgccgttgatgcataccacgattttggactcgatatcctcgataataacggcacggcttatagttatatacagcgttcgggcagcggcacatctccaggctttagcttttcgaccgatattgagatgccgggtatgacggcatcccagctttcggttttcgtccagcctttatatgctcgcatcgcggctctgggtttcagcgttaagtctccagtcgtcacgcaggcgtcgaattgggtagatacaagacatggtgtcggagatacgccaggcgttggctcccggttctctagccggatattcccacgcgcgagctttgaggatccggatcgctttgttggcacacaacgagcgattcgtgacgttgtcgaggctggctaccagtttcatggtatccatcttgccccgaccctcaacgtcgctggatatcctggacgtgatagtgcagtaaaccctgcttttcggatagcagccatgcatgcagatatattcgaagggacgagcctgcgaggactcaacgcaaccagtgtccaagcagctcatgctaagttcaacatctacatggatagaattcgaaaggcaaccccggaaggcggttcatatttgaatgaagcggatgtcgaagagcctaactggcaacaggcattcttcggagacaactacgagcgacttttggcggtgaagaagagttgggatccatggcgactattttacaccgctgtaggcgtggggagcgaagaatgggccttgaagcttgatcgtggtctgcctactcaggacgggccgctctgtagagctggatga

SEQ ID NO: 35685 - protein, 616 aa, Muscodor strobelii
  misc_feature: SGI Peptide ID NO. 572362
  misc_feature (549)..(593): Pfam Id: PF08031 Pfam Desc: Berberine and berberine like
  misc_feature (150)..(293): Pfam Id: PF01565 Pfam Desc: FAD binding domain
  misc_feature (18)..(616): NCBI GI: 39963299 Blast Desc: MGG_09727 [Magnaporthe grisea 70-15] gi|145015492|gb|EDK00029.1| MGG_09727 [Magnaporthe grisea 70-15]
  misc_feature (28)..(614): NCBI GI: 116194254 Blast Desc: CHGG_03725 [Chaetomium globosum CBS 148.51] gi|88179638|gb|EAQ87106.1| CHGG_03725 [Chaetomium globosum CBS 148.51]
  misc_feature (21)..(616): NCBI GI: 116204239 Blast Desc: CHGG_10003 [Chaetomium globosum CBS 148.51] gi|88176131|gb|EAQ83599.1| CHGG_10003 [Chaetomium globosum CBS 148.51]
  misc_feature (21)..(614): NCBI GI: 171678675 Blast Desc: protein product [Podospora anserina] gi|170937407|emb|CAP62065.1| protein product [Podospora anserina]
  misc_feature (1)..(616): NCBI GI: 145616342 Blast Desc: MGG_02367 [Magnaporthe grisea 70-15] gi|145013094|gb|EDJ97735.1| MGG_02367 [Magnaporthe grisea 70-15]
  misc_feature (20)..(614): NCBI GI: 171678659 Blast Desc: protein product [Podospora anserina] gi|170937399|emb|CAP62057.1| protein product [Podospora anserina]
  misc_feature (28)..(614): NCBI GI: 171683693 Blast Desc: protein product [Podospora anserina] gi|170941806|emb|CAP67460.1| protein product [Podospora anserina]
  misc_feature (55)..(614): NCBI GI: 169780200 Blast Desc: [Aspergillus oryzae RIB40] gi|83773304|dbj|BAE63431.1| protein product [Aspergillus oryzae]
  misc_feature (55)..(614): NCBI GI: 238505715 Blast Desc: conserved [Aspergillus flavus NRRL3357] gi|220690182|gb|EED46532.1| conserved [Aspergillus flavus NRRL3357]
  misc_feature (28)..(614): NCBI GI: 242779826 Blast Desc: conserved [Talaromyces stipitatus ATCC 10500] gi|218719614|gb|EED19033.1| conserved [Talaromyces stipitatus ATCC 10500]
MRFETFASILSLVTRCKCANFAFEAIVLTESDVTKFPDIAFGNLSTTSPTYDGPACKVYPGTENWPLESEWTQLNNSLNGALLHPVPPAAVCYDGPYKDTTQCNFLLRTASSTRYYSNDPLTVLTNWPEGDSCYATASTTGLTCTRGGYPEYVVNVSTVKHVQAAVNFARNKDLRVVIKNTGHDFLGRSVGFGALSIWTHWLKYFEFLPSYSIGEYSGMAARVGAGLESWELFAYMAQYNMTVLVAGSYTVGAYGGWILGGGHSALASTYGMGADQVLAFEVVTADGNFVTADVEQNTDLFFALRGGGGGNFGIVTSIIVKAHPPISVLSSSLAFSVPAGSNNVEGFWSAVDAYHDFGLDILDNNGTAYSYIQRSGSGTSPGFSFSTDIEMPGMTASQLSVFVQPLYARIAALGFSVKSPVVTQASNWVDTRHGVGDTPGVGSRFSSRIFPRASFEDPDRFVGTQRAIRDVVEAGYQFHGIHLAPTLNVAGYPGRDSAVNPAFRIAAMHADIFEGTSLRGLNATSVQAAHAKFNIYMDRIRKATPEGGSYLNEADVEEPNWQQAFFGDNYERLLAVKKSWDPWRLFYTAVGVGSEEWALKLDRGLPTQDGPLCRAG

SEQ ID NO: 35686 - DNA, 3156 bp, Muscodor strobelii
  misc_feature: SGI cDNA ID NO. 572363
  misc_feature: Encodes the peptide sequence at SEQ ID NO 35687
atggcaagtggcttggtgacgcaagacgggggaggagaagcacaacaggaatcgcataatcatggccccttcaactcatcccatttgctccggcgccatcggagccctctagcaaagcggaacactcgctccgactcgctcaactctctggacagaatcttcgagacccgctccggagaggctcatgagttgccctctcccgccgctgcaaagagcccttcagtgacgccgcaggagaagcaattccttgatagcacatatggcgttgaggaaatgcgagacggctttttcgacgccgtattcctccctcctgaggaatctgatgccgaggccctcacgagccacgccgaggcaactctgcccatagcattccgcaagaaaggccccctttccctgtcaaacttctttccaagacagtgtcacgaggctgcgagtgttgtacgccggatcactaccacgagagccggaataaagctcctcaagtctttcctggcctatttcattgcttacatattgtgtctcgtgcccattgttcaaggtaccttcggccgatatgcttatatcatggcaatatccaccctgatcaaccaccctggaaggacactgggagctcaggtagatggtacgatactgaccatcatcggaactgcgactggtctgggctggggagcatttggcttatgggtttccaccgccacggcttctgcgagagtggggttcggcggcattcttgctacgtttctcttcttatacatctttgtgatcgcctgtctgcgttcgtattatatccgtacctaccagggtgtcatttgtgctggaatcgctatctcatatacctgcctggctgaaatctctggagtaggagtgtcctggtctaagctactcgcttatggcttaccatggctcgccggacaagccatttcgctcgtgatatgtgctgtcgtctctcccagtgcgggctcacggcctttggctgctggtctacaccaaacctttaccgtgatgttggaaggtttgcaccctatcacagcggagcccatgagaacgcgaaggcgacttactcaatcttttgtcggaatgtctcagatataccgggacctagtcgtcgacttttccattacgacattcaatccaaaagatgtcctggtactgcgcaaccttatacagagcgtaatccgttctcttctgagcttgaggacagatacgaagctgtttgatcatctggccatggctaaattttctgagagaacggaagactttgttgttggcattaatagacaaggacatttgagcaccagcgaagacgagaatcggattctgaagttcgtcactaaaagccttgcggatccgactgaaagtctcttgaaatcgatgagacaagctctgcagagttgcgatgccactctaatggatatgtgcggccatcgccgttctctcggaccaccacctgatgtatcaaacgatgttcataccgccctgacacatcttcgaaggcacatggtcgcgttcaacaactgtcaggaacatgtcctagcaagtgaccgactaccgcacacctactctaagtttcctgaagtggctaaaatatttgcattttgcttacccgtccagcaagcagcggcatctatcgagactctagcaaataaaataaatgaactgcaacagacgcagtcgagattctccaagttccactttcctagctatcccttctccaaagctttacatcgtacgaatgctcaggttcgccacgacagaggaggtgtcactgctggatcatatttcagaagcttcagcgacatagcaaaaatcatacagaaactcaaatcacgggaatttaatcccactgatatgaagagtcggaatgagacaaacttcgaatcatctctagctaccatgacagccgatgatatgaatgatgactcgggttccgagaagaatcgtctacgtcacaaaatttggaccggtttaaaacgagcacagggtttcgagacacgctttggcttgaaaacagcactggtgacgtctgtactcgcaatacctgcctacttaactaacagtgacagctggtgggacaattatgaaatttggtgggcggttgttatgggatggctcatcatgggccctcgtacgggcgggaatgtccaagatctctttactcgagctttctgtgccgttctcggctctctttggggtggtcttgcgtacgcggctggaaacggaaacccatatgtcatgggcgtgttcgcggcgatctatatgatccctatgatgtatcgatacacacagagttctcatccacgatcaggattggtgggatgtatctctttcaccgtcgtatccctgacagaggtcattgcacaaggcatgccatcaccagcagcagtcgccgctactaagggagcagcaatggttcttggagtggtggcgtccatcattgtcaactgggttctctggccattcgtcgctcgacatgatcttcgcaaggggatggcgtctatgattttctattgtagcatcatctacagaaatatcgtggcaaaatatgtatactacgaggagggtcaagcaccaacaaaagccgacatcgaggcttctgaagtcctcgaagggcgacttcgagaaggattcgttagactaagacagctaatgggcctgacacgccatgaaatccgcctccgggcgccgtttgaccccttaccatactcagggctcgtcgatgcgtgcgaacgatttttcgagtatatcgtcacggtgcgacaatcatctctgaggcaccatccacaattcatccgagataattccgcggcagctatgactctccttggatacaggagagatgcgattgctacgattctgacgaatctctatgttctttctggtgccctaagagcgaatcgggaggtacctaaatatctccctagcgcctatgtcacgcgcaagcggctactggacaaaatggccgagcttgagagcgagatcgatattagtgagaaatacagcaaagaacaacgacagcaggaaatcaaattggcgcaaatttatagcttctcgtataatgagagcttgacgggttgtatggaacagctgggtcagcttgaaaagtatacgaaggctattgttggagagcaaggatttgattatgggtttaaggactaa

SEQ ID NO: 35687 - protein, 1051 aa, Muscodor strobelii
  misc_feature: SGI Peptide ID NO. 572363
  misc_feature (86)..(1051): NCBI GI: 156052997 Blast Desc: SS1G_06666 [Sclerotinia sclerotiorum 1980] gi|154704444|gb|EDO04183.1| SS1G_06666 [Sclerotinia sclerotiorum 1980]
  misc_feature (79)..(1050): NCBI GI: 261359601 Blast Desc: conserved [Verticillium albo-atrum VaMs.102]
  misc_feature (86)..(1043): NCBI GI: 46135989 Blast Desc: FG09510.1 [Gibberella zeae PH-1]
  misc_feature (86)..(1043): NCBI GI: 256727694 Blast Desc: NECHADRAFT_33625 [Nectria haematococca mpVI 77-13-4]
  misc_feature (86)..(883): NCBI GI: 154318431 Blast Desc: BC1G_03383 [Botryotinia fuckeliana B05.10] gi|150842906|gb|EDN18099.1| BC1G_03383 [Botryotinia fuckeliana B05.10]
  misc_feature (79)..(1012): NCBI GI: 50557328 Blast Desc: YALI0F30921p [Yarrowia lipolytica] gi|49651942|emb|CAG78885.1| YALI0F30921p [Yarrowia lipolytica]
  misc_feature (87)..(1043): NCBI GI: 255711688 Blast Desc: KLTH0B07810p [Lachancea thermotolerans] gi|238933505|emb|CAR21689.1| KLTH0B07810p [Lachancea thermotolerans]
  misc_feature (60)..(1047): NCBI GI: 50285965 Blast Desc: protein product [Candida glabrata] gi|49524715|emb|CAG58317.1| protein product [Candida glabrata]
  misc_feature (87)..(1045): NCBI GI: 256274051 Blast Desc: Bre4p [Saccharomyces cerevisiae JAY291]
  misc_feature (87)..(1045): NCBI GI: 151941777 Blast Desc: Zinc finger protein containing five transmembrane domains [Saccharomyces cerevisiae YJM789]
MASGLVTQDGGGEAQQESHNHGPFNSSHLLRRHRSPLAKRNTRSDSLNSLDRIFETRSGEAHELPSPAAAKSPSVTPQEKQFLDSTYGVEEMRDGFFDAVFLPPEESDAEALTSHAEATLPIAFRKKGPLSLSNFFPRQCHEAASVVRRITTTRAGIKLLKSFLAYFIAYILCLVPIVQGTFGRYAYIMAISTLINHPGRTLGAQVDGTILTIIGTATGLGWGAFGLWVSTATASARVGFGGILATFLFLYIFVIACLRSYYIRTYQGVICAGIAISYTCLAEISGVGVSWSKLLAYGLPWLAGQAISLVICAVVSPSAGSRPLAAGLHQTFTVMLEGLHPITAEPMRTRRRLTQSFVGMSQIYRDLVVDFSITTFNPKDVLVLRNLIQSVIRSLLSLRTDTKLFDHLAMAKFSERTEDFVVGINRQGHLSTSEDENRILKFVTKSLADPTESLLKSMRQALQSCDATLMDMCGHRRSLGPPPDVSNDVHTALTHLRRHMVAFNNCQEHVLASDRLPHTYSKFPEVAKIFAFCLPVQQAAASIETLANKINELQQTQSRFSKFHFPSYPFSKALHRTNAQVRHDRGGVTAGSYFRSFSDIAKIIQKLKSREFNPTDMKSRNETNFESSLATMTADDMNDDSGSEKNRLRHKIWTGLKRAQGFETRFGLKTALVTSVLAIPAYLTNSDSWWDNYEIWWAVVMGWLIMGPRTGGNVQDLFTRAFCAVLGSLWGGLAYAAGNGNPYVMGVFAAIYMIPMMYRYTQSSHPRSGLVGCISFTVVSLTEVIAQGMPSPAAVAATKGAAMVLGVVASIIVNWVLWPFVARHDLRKGMASMIFYCSIIYRNIVAKYVYYEEGQAPTKADIEASEVLEGRLREGFVRLRQLMGLTRHEIRLRAPFDPLPYSGLVDACERFFEYIVTVRQSSLRHHPQFIRDNSAAAMTLLGYRRDAIATILTNLYVLSGALRANREVPKYLPSAYVTRKRLLDKMAELESEIDISEKYSKEQRQQEIKLAQIYSFSYNESLTGCMEQLGQLEKYTKAIVGEQGFDYGFKD

SEQ ID NO: 35688 - DNA, 1517 bp, Muscodor strobelii
  misc_feature: SGI EST ID NO. CUFF.84995.0
  misc_feature: Variant of the nucleotide sequence at SEQ ID NO 35686
ctggtctacaccaaacctttaccgtgatgttggaaggtttgcaccctatcacagcggagcccatgagaacgcgaaggcgacttactcaatcttttgtcggaatgtctcagatataccgggacctagtcgtcgacttttccattacgacattcaatccaaaagatgtcctggtactgcgcaaccttatacagagcgtaatccgttctcttctgagcttgaggacagatacgaagctgtttgatcatctggccatggctaaattttctgagagaacggaagactttgttgttggcattaatagacaaggacatttgagcaccagcgaagacgagaatcggattctgaagttcgtcactaaaagccttgcggatccgactgaaagtctcttgaaatcgatgagacaagctctgcagagttgcgatgccactctaatggatatgtgcggccatcgccgttctctcggaccaccacctgatgtatcaaacgatgttcataccgccctgacacatcttcgaaggcacatggtcgcgttcaacaactgtcaggaacatgtcctagcaagtgaccgactaccgcacacctactctaagtttcctgaagtggctaaaatatttgcattttgcttacccgtccagcaagcagcggcatctatcgagactctagcaaataaaataaatgaactgcaacagacgcagtcgagattctccaagttccactttcctagctatcccttctccaaagctttacatcgtacgaatgctcaggttcgccacgacagaggaggtgtcactgctggatcatatttcagaagcttcagcgacatagcaaaaatcatacagaaactcaaatcacgggaatttaatcccactgatatgaagagtcggaatgagacaaacttcgaatcatctctagctaccatgacagccgatgatatgaatgatgactcgggttccgagaagaatcgtctacgtcacaaaatttggaccggtttaaaacgagcacagggtttcgagacacgctttggcttgaaaacagcactggtgacgtctgtactcgcaatacctgcctacttaactaacagtgacagctggtgggacaattatgaaatttggtgggcggttgttatgggatggctcatcatgggccctcgtacgggcgggaatgtccaagatctctttactcgagctttctgtgccgttctcggctctctttggggtggtcttgcgtacgcggctggaaacggaaacccatatgtcatgggcgtgttcgcggcgatctatatgatccctatgatgtatcgatacacacagagttctcatccacgatcaggattggtgggatgtatctctttcaccgtcgtatccctgacagaggtcattgcacaaggcatgccatcaccagcagcagtcgccgctactaagggagcagcaatggttcttggagtggtggcgtccatcattgtcaactgggttctctggccattcgtcgctcgacatgatcttcgcaaggggatggcg

SEQ ID NO: 35689 - DNA, 378 bp, Muscodor strobelii
  misc_feature: SGI cDNA ID NO. 572364
  misc_feature: Encodes the peptide sequence at SEQ ID NO 35690
atggagagccttgcgcccgaggagatcgcggcccagttcgcgggaaagtactatgccgacttccaggctaatcgtcaggcctttgtcgagtacttctaccgtgaacactcgaccttgaccttcgagtccaacaccatccagggagtccaggccatcggccagaagtggaccgaggacttcctcaagactgccaagcaccaggtcaccacgactaatgctcagagggtgcccggtggcttcgtcatcatcctcatcaccggtctcatccagctcaccgagaacgaccagcccatgaatttcactcagtctttcctcatttccatggacgagaagggaatcttctgtaacaacgacctcttcaagctcgtttacggttaa

SEQ ID NO: 35690 - protein, 125 aa, Muscodor strobelii
  misc_feature: SGI Peptide ID NO. 572364
  misc_feature (9)..(122): Pfam Id: PF02136 Pfam Desc: Nuclear transport factor 2 (NTF2) domain
  misc_feature (7)..(125): NCBI GI: 46128199 Blast Desc: FG08477.1 [Gibberella zeae PH-1]
  misc_feature (7)..(124): NCBI GI: 67537544 Blast Desc: AN4942.2 [Aspergillus nidulans FGSC A4] gi|52783210|sp|Q96VN3.1|NTF2_EMENI RecName: Full=Nuclear transport factor 2; Short=NTF-2 gi|14700035|gb|AAK71467.1| factor
  misc_feature (7)..(125): NCBI GI: 115396234 Blast Desc: nuclear transport factor 2 [Aspergillus terreus NIH2624] gi|114193325|gb|EAU35025.1| nuclear transport factor 2 [Aspergillus terreus NIH2624]
  misc_feature (7)..(125): NCBI GI: 156052963 Blast Desc: nuclear transport factor 2 [Sclerotinia sclerotiorum 1980] gi|154704427|gb|EDO04166.1| nuclear transport factor 2 [Sclerotinia sclerotiorum 1980]
  misc_feature (7)..(124): NCBI GI: 70999712 Blast Desc: nuclear transport factor NTF-2 [Aspergillus fumigatus Af293] gi|119491835|ref|XP_001263412.1| nuclear transport factor NTF-2, [Neosartorya fischeri NRRL 181] gi|66852210|gb|EAL92535.1|
  misc_feature (7)..(125): NCBI GI: 145252476 Blast Desc: An16g04400 [Aspergillus niger] gi|134083302|emb|CAK46857.1| protein product [Aspergillus niger]
  misc_feature (9)..(124): NCBI GI: 255936877 Blast Desc: Pc13g10440 [Penicillium chrysogenum Wisconsin 54-1255] gi|211584085|emb|CAP92113.1| Pc13g10440 [Penicillium chrysogenum Wisconsin 54-1255]
  misc_feature (9)..(125): NCBI GI: 154318463 Blast Desc: nuclear transport factor 2 [Botryotinia fuckeliana B05.10] gi|150842922|gb|EDN18115.1| nuclear transport factor 2 [Botryotinia fuckeliana B05.10]
  misc_feature (7)..(125): NCBI GI: 238486994 Blast Desc: nuclear transport factor NTF-2, [Aspergillus flavus NRRL3357] gi|220699614|gb|EED55953.1| nuclear transport factor NTF-2, [Aspergillus flavus NRRL3357]
  misc_feature (9)..(125): NCBI GI: 171682070 Blast Desc: protein product [Podospora anserina] gi|170940994|emb|CAP66644.1| protein product [Podospora anserina]
MESLAPEEIAAQFAGKYYADFQANRQAFVEYFYREHSTLTFESNTIQGVQAIGQKWTEDFLKTAKHQVTTTNAQRVPGGFVIILITGLIQLTENDQPMNFTQSFLISMDEKGIFCNNDLFKLVYG

SEQ ID NO: 35691 - DNA, 1081 bp, Muscodor strobelii
  misc_feature: SGI EST ID NO. CUFF.85010.0
  misc_feature: Variant of the nucleotide sequence at SEQ ID NO 35689
gaaattcatagctgcccctccacacgtccgcgatcactgcgcccggcgccgacgactgcttcccagtgctccctcccctccaccacgcccgcgtttcggtagcctgcctctactttctcaagcgtcgctaacaaaaaataacgccccttccggtcgagacagcagcatcttcgactctttgtgccgctcgctatttcttgccacaggaagaaccattaatctgtgatcctcagtcacgatggagagccttgcgcccgaggagatcgcggcccagttcgcgggaaagtactatgccgacttccaggctaatcgtcaggcctttgtcgagtacttctaccgtgaacactcgaccttgaccttcgagtccaacaccatccagggagtccaggccatcggccagaagtggaccgaggacttcctcaagactgccaagcaccaggtcaccacgactaatgctcagagggtgcccggtggcttcgtcatcatcctcatcaccggtctcatccagctcaccgagaacgaccagcccatgaatttcactcagtctttcctcatttccatggacgagaagggaatcttctgtaacaacgacctcttcaagctcgtttacggttaagcactgttgcgccacaatttccaatacctcttcccctcccaacctagcgatcactcgagggggagagcaatgaagagctctttttcgtataccgttctcttcccttcattgtcggaaatagaaatgcaagccagactgtaaccacccccttgcgtggtgaggcactgcgcctggcgagattcgcatggacttaggctattcaagtctgcaataggaaaatcaagaagatcagaagggtcatctctcctttgttttcgttgcgtgaaactcggtagattgcggcatatttcaagagtgacgtctagattccagacagatgacccagcatttcccgatactatatgattgaacgtgattgcaatatatttagtatcataatgtctagagacttccgatacgaaattagcgttatcccagagcccacttcagatttatgttgtaaacttcacgtacaccagatcttgc

SEQ ID NO: 35692 - DNA, 3492 bp, Muscodor strobelii
  misc_feature: SGI cDNA ID NO. 572365
  misc_feature: Reduced expression when VOC is produced
  misc_feature: Encodes the peptide sequence at SEQ ID NO 35693
atgttttccaccttcaccggctcgtcccgccgcccgcgaaacgtcgacctcagcggccaccgcaacaagaacccgtgggccagcaccccgggtgctcccaaccagtccggagcctccaagaccgtcgctcaggcacaggccgagagagagcggaggcagcgcgagcgcgaggagctggctgccacgcggcgtctgcagaagctctggcgaggccacagcgaccgccgccgcgtgaaagacgtgcggcgccatgagtacgactccatctaccaagaacactcagcccatccagtccccgaggacatccgccgccgcctcgcacgtgtctttcctctcctcctcgccgtcttcaccccttcgcggcctgacgaccagcagcgtctagatctcttcgtctccgacctccgagctctctacccgaccctcgccccctccgtcgatgtccgcacgttcacttctgcacaatgggagcgcttggctcgtctcctggtaggcgctatcggagaacgaaccccggacacaacctctgaactcctcactttggcagtcgacatcatcaaacataggcccgcctctgtcaagcctgttctaaactcatactataatgcactgacacagctgagtcgaggtccgggacgtggtagttcctcccagcagcaaggtgacatattagcacaggccgtggcagctccgttggcatcaagctccgatcgagaaccagatattcaagcataccaaagtcttgcctttaatttcttaacctcctcgcaattagaattcgtccagcgtacgcctcgtcgcatagctcaatccttagatcttcccatactttctaggagcatcatcgatgctttctcggcttcaggattgccggcaagctcctccaaggatgatctcctgtggcttctggcccacttcatcgccttgaacaaggccgattcaaatgcgcaaggctctcaatatctcgaggcgctgtacctgcaaatgggatatctggccgacgaggtccggtctcgatcgggttctccaaagggggccgatgaatctgatcttgacgatgatatcgagatggtcgacttttctcccttgcctgcatacgtcgctcttcaactaaatttcttagtcaacgaagacggcatcgcggatcttctgcacggattctccttgactgcctcgtctaccagtcatctgtcacagagcgcaagcctgcttgccgggtatactctcggccttttgcaatgtttcctcacgcatggtgacgatatcaagatgcgtctcttccaaggagacattcggatttctggtgatggcaactgtgacataccgctcgtaaaatatttttggaatgcggcttccaaaacccaagtgttcaaaagtattgcacagcaagcaaaacctcaggagaacccagtatctatcgctgctcttgtccaaccagatcctacacgcgacttggagtggcgaacgctactgctctttcttgaactatacaacttccttcttcgagtcactgacgacgaagactttctgcctcgtgagacacaagtagctgcacagcagagtcaggccacacaaagaatccgttccagtggcctcaagctagatgaattaaaactactagtgaattttcttaaaaatctaaccttccccttccactataatttagcccagattctcaacccaacacacacctcagcgcgactcgacgccatcatgggtggtcataccgcacgcccggccccacgcactgataatggttctttaccctcatttgcaggcatcggcggtatggatgtccttggtctccgagaattagcatcatctgtgacgcgtgccctgtacgagcgagactctcggcggccattcttacccaaagactattggctaatgacgaccaagttcgacatgaatgtctttgtttctgctattgttctcgaagaggcacgcaacattgaagaggaagacgaggaggatggcgatttggaagtggagctttacggctctgttatattcgaggattggttatcccgatcgacggatcgtaggcgcgggcaagcaggccatactgtggactttcgaaaccaggtcggaccgaaactggaggttctccgaaacatgccattcgtcattccttttgagctgagagtacagattttccgccagtttgtttatctcgacaagaccaaacgccgaggcggccacgtagatccagaccagtggcgtcttgccatcatgtcaggggaccatatggacgctggtggcaaccaaaggcgagatttcttaactcgccatactgcacgcatcagccgtgggaaggagttcgatgacgcttttgatcagttctacactctaggcgacggactcaaagagcctatccaaatcacttttgttgatcaattcgacacacctgaggcgggcattgatggcggaggcgtgacaaaagagtttctaactaacgtcactaacgatgcattcaatccccagcgtgatttcaaccagagctacttcatttcgaacgagcaaaatctactgtatcccaatcccaccatcttcgatgatgtcggtgcccagctcgagagtgacgggtttccagtcggtagtgtcacacgaagagaggcaatgaaggacctaatgaaacgctacgaattcctgggccggatagtaggcaagtgtctgtatgaggggatcctcatcgatatctcctttgcgagcttcttccttctcaagtggtcttcgtcgggacaggatggcactgggactgacaaccgcgccaacgtgaacgatctacgagatctcgatccggaactctatcaaggtcttatgagtctaaagaattactcaggcgatatggcagatctctcgcttgattttaccgttacagattcgatatggcacccatctggacaacggcgcacagtcaccagaccgctacgagaaggcggtgcagacatgcccgtgacgaacaaagaccgaccgctgtacattttctacgtggcccatcaccggctcgtagcgcaacaaaggagacagacggctgctttccttcggggcttgggcactatcgttaatcccgcttggttagccatgttcaatcaatccgagctgcagcgtctcatcggtggcgactctcaagagatcgacatcgaggacttgagacggaacacggcctactcgggtctctaccaaatcggcgacgacgggcaagaacatcccacgatcaagcacttctgggacgtgatgcggagtatgccggacgaggagcgccggatggtgctcaagtacgtcacctcgactccccgagcaccgctgctaggattccagggcttagtcccgaagttcagtattcgagatggtgggaacgacgagaagaggttgccgagcgcgagcacgtgtatcaacttgctcaagctccccgtctataagagcgcaggtaatctgagaagtaaactactctatgccgttaagtcgggggctgggtttgatttgagctag

SEQ ID NO: 35693 - protein, 1163 aa, Muscodor strobelii
  misc_feature: SGI Peptide ID NO. 572365
  misc_feature (818)..(1163): Pfam Id: PF00632 Pfam Desc: HECT-domain (ubiquitin-transferase)
  misc_feature (881)..(1163): Pfam Id: PF00632 Pfam Desc: HECT-domain (ubiquitin-transferase)
  misc_feature (1)..(1163): NCBI GI: 145602610 Blast Desc: MGG_09504 [Magnaporthe grisea 70-15] gi|145011004|gb|EDJ95660.1| MGG_09504 [Magnaporthe grisea 70-15]
  misc_feature (1)..(1163): NCBI GI: 256733555 Blast Desc: NECHADRAFT_35630 [Nectria haematococca mpVI 77-13-4]
  misc_feature (1)..(1163): NCBI GI: 170674511 Blast Desc: E3 ubiquitin-protein ligase [Epichloe festucae]
  misc_feature (1)..(1163): NCBI GI: 46128089 Blast Desc: FG08422.1 [Gibberella zeae PH-1]
  misc_feature (1)..(1163): NCBI GI: 156064715 Blast Desc: SS1G_00365 [Sclerotinia sclerotiorum 1980] gi|154691227|gb|EDN90965.1| SS1G_00365 [Sclerotinia sclerotiorum 1980]
  misc_feature (1)..(1163): NCBI GI: 169771149 Blast Desc: [Aspergillus oryzae RIB40] gi|83767903|dbj|BAE58042.1| protein product [Aspergillus oryzae]
  misc_feature (1)..(1163): NCBI GI: 238486328 Blast Desc: IQ and HECT domain protein [Aspergillus flavus NRRL3357] gi|220699281|gb|EED55620.1| IQ and HECT domain protein [Aspergillus flavus NRRL3357]
  misc_feature (1)..(1163): NCBI GI: 171681918 Blast Desc: protein product [Podospora anserina] gi|170940918|emb|CAP66568.1| protein product [Podospora anserina]
  misc_feature (1)..(1163): NCBI GI: 119189889 Blast Desc: CIMG_04992 [Coccidioides immitis RS]
  misc_feature (1)..(1163): NCBI GI: 212540252 Blast Desc: IQ and HECT domain protein [Penicillium marneffei ATCC 18224] gi|210067580|gb|EEA21672.1| IQ and HECT domain protein [Penicillium marneffei ATCC 18224]
  misc_feature: Useful for introducing or modulating the production of volatile compounds
MFSTFTGSSRRPRNVDLSGHRNKNPWASTPGAPNQSGASKTVAQAQAERERRQREREELAATRRLQKLWRGHSDRRRVKDVRRHEYDSIYQEHSAHPVPEDIRRRLARVFPLLLAVFTPSRPDDQQRLDLFVSDLRALYPTLAPSVDVRTFTSAQWERLARLLVGAIGERTPDTTSELLTLAVDIIKHRPASVKPVLNSYYNALTQLSRGPGRGSSSQQQGDILAQAVAAPLASSSDREPDIQAYQSLAFNFLTSSQLEFVQRTPRRIAQSLDLPILSRSIIDAFSASGLPASSSKDDLLWLLAHFIALNKADSNAQGSQYLEALYLQMGYLADEVRSRSGSPKGADESDLDDDIEMVDFSPLPAYVALQLNFLVNEDGIADLLHGFSLTASSTSHLSQSASLLAGYTLGLLQCFLTHGDDIKMRLFQGDIRISGDGNCDIPLVKYFWNAASKTQVFKSIAQQAKPQENPVSIAALVQPDPTRDLEWRTLLLFLELYNFLLRVTDDEDFLPRETQVAAQQSQATQRIRSSGLKLDELKLLVNFLKNLTFPFHYNLAQILNPTHTSARLDAIMGGHTARPAPRTDNGSLPSFAGIGGMDVLGLRELASSVTRALYERDSRRPFLPKDYWLMTTKFDMNVFVSAIVLEEARNIEEEDEEDGDLEVELYGSVIFEDWLSRSTDRRRGQAGHTVDFRNQVGPKLEVLRNMPFVIPFELRVQIFRQFVYLDKTKRRGGHVDPDQWRLAIMSGDHMDAGGNQRRDFLTRHTARISRGKEFDDAFDQFYTLGDGLKEPIQITFVDQFDTPEAGIDGGGVTKEFLTNVTNDAFNPQRDFNQSYFISNEQNLLYPNPTIFDDVGAQLESDGFPVGSVTRREAMKDLMKRYEFLGRIVGKCLYEGILIDISFASFFLLKWSSSGQDGTGTDNRANVNDLRDLDPELYQGLMSLKNYSGDMADLSLDFTVTDSIWHPSGQRRTVTRPLREGGADMPVTNKDRPLYIFYVAHHRLVAQQRRQTAAFLRGLGTIVNPAWLAMFNQSELQRLIGGDSQEIDIEDLRRNTAYSGLYQIGDDGQEHPTIKHFWDVMRSMPDEERRMVLKYVTSTPRAPLLGFQGLVPKFSIRDGGNDEKRLPSASTCINLLKLPVYKSAGNLRSKLLYAVKSGAGFDLS

SEQ ID NO: 35694 - DNA, 4334 bp, Muscodor strobelii
  misc_feature: SGI EST ID NO. CUFF.85054.0
  misc_feature: Variant of the nucleotide sequence at SEQ ID NO 35692
tcaggctgctggaatgtcacggaacttctcgtcttgattaacgtgttgctgctttcgctatgtgtaaatttataattatttaactcatttactgctacctatacccacatgtggcctccaacaattggatattgctaaggccagtttcaagcgctgttcgtggtcgtatctccgtcgacacagcagcaagggcagcttcttgcagcttacgctttgcgcaattccaacacggcgcaaaacctccaagctgtataagtcgtttgccagcctaggtagtctagatacttttctacgaagccgccaacttcttgacccatttgttccgaacctccgtcgccctcgtcgtgcagtctgttttggacatcccgaaaacatcgagctggctcagctcagccaaggtctcgtgcgatctcgggcattacgtcaacaagagcattccacactcgacatctccgaccgctgtccacgctcaccacgaaccgagcttggctttggcagcatgtcagcttcggtgatattctgaggaggatctgtgtctgccacctgccgtcctcaacatgttttccaccttcaccggctcgtcccgccgcccgcgaaacgtcgacctcagcggccaccgcaacaagaacccgtgggccagcaccccgggtgctcccaaccagtccggagcctccaagaccgtcgctcaggcacaggccgagagagagcggaggcagcgcgagcgcgaggagctggctgccacgcggcgtctgcagaagctctggcgaggccacagcgaccgccgccgcgtgaaagacgtgcggcgccatgagtacgactccatctaccaagaacactcagcccatccagtccccgaggacatccgccgccgcctcgcacgtgtctttcctctcctcctcgccgtcttcaccccttcgcggcctgacgaccagcagcgtctagatctcttcgtctccgacctccgagctctctacccgaccctcgccccctccgtcgatgtccgcacgttcacttctgcacaatgggagcgcttggctcgtctcctggtaggcgctatcggagagtaggtccgctctgctctgctttttcggcgccctcgacatgtccagctaactgctaactgctaacttgttgcttggtagacgaaccccggacacaacctctgaactcctcactttggcagtcgacatcatcaaacataggcccgcctctgtcaagcctgttctaaactcatactataatgcactgacacagctgagtcgaggtccgggacgtggtagttcctcccagcagcaaggtgacatattagcacaggccgtggcagctccgttggcatcaagctccgatcgagaaccagatattcaagcataccaaagtcttgcctttaatttcttaacctcctcgcaattagaattcgtccagcgtacgcctcgtcgcatagctcaatccttagatcttcccatactttctaggagcatcatcgatgctttctcggcttcaggattgccggcaagctcctccaaggatgatctcctgtggcttctggcccacttcatcgccttgaacaaggccgattcaaatgcgcaaggctctcaatatctcgaggcgctgtacctgcaaatgggatatctggccgacgaggtccggtctcgatcgggttctccaaagggggccgatgaatctgatcttgacgatgatatcgagatggtcgacttttctcccttgcctgcatacgtcgctcttcaactaaatttcttagtcaacgaagacggcatcgcggatcttctgcacggattctccttgactgcctcgtctaccagtcatctgtcacagagcgcaagcctgcttgccgggtatactctcggccttttgcaatgtttcctcacgcatggtgacgatatcaagatgcgtctcttccaaggagacattcggatttctggtgatggcaactgtgacataccgctcgtaaaatatttttggaatgcggcttccaaaacccaagtgttcaaaagtattgcacagcaagcaaaacctcaggagaacccagtatctatcgctgctcttgtccaaccagatcctacacgcgacttggagtggcgaacgctactgctctttcttgaactatacaacttccttcttcgagtcactgacgacgaagactttctgcctcgtgagacacaagtagctgcacagcagagtcaggccacacaaagaatccgttccagtggcctcaagctagatgaattaaaactactagtgaattttcttaaaaatctaaccttccccttccactataatttagcccagattctcaacccaacacacacctcagcgcgactcgacgccatcatgggtggtcataccgcacgcccggccccacgcactgataatggttctttaccctcatttgcaggcatcggcggtatggatgtccttggtctccgagaattagcatcatctgtgacgcgtgccctgtacgagcgagactctcggcggccattcttacccaaagactattggctaatgacgaccaagttcgacatgaatgtctttgtttctgctattgttctcgaagaggcacgcaacattgaagaggaagacgaggaggatggcgatttggaagtggagctttacggctctgttatattcgaggattggttatcccgatcgacggatcgtaggcgcgggcaagcaggccatactgtggactttcgaaaccaggtcggaccgaaactggaggttctccgaaacatgccattcgtcattccttttgagctgagagtacagattttccgccagtttgtttatctcgacaagaccaaacgccgaggcggccacgtagatccagaccagtggcgtcttgccatcatgtcaggggaccatatggacgctggtggcaaccaaaggcgagatttcttaactcgccatactgcacgcatcagccgtgggaaggagttcgatgacgcttttgatcagttctacactctaggcgacggactcaaagagcctatccaaatcacttttgttgatcaattcgacacacctgaggcgggcattgatggcggaggcgtgacaaaagagtttctaactaacgtcactaacgatgcattcaatccccagcgtgatttcaaccagagctacttcatttcgaacgagcaaaatctactgtatcccaatcccaccatcttcgatgatgtcggtgcccagctcgagagtgacgggtttccagtcggtagtgtcacacgaagagaggcaatgaaggacctaatgaaacgctacgaattcctgggccggatagtaggcaagtgtctgtatgaggggatcctcatcgatatctcctttgcgagcttcttccttctcaagtggtcttcgtcgggacaggatggcactgggactgacaaccgcgccaacgtgaacgatctacgagatctcgatccggaactctatcaaggtcttatgagtctaaagaattactcaggcgatatggcagatctctcgcttgattttaccgttacagattcgatatggcacccatctggacaacggcgcacagtcaccagaccgctacgagaaggcggtgcagacatgcccgtgacgaacaaagaccgaccgctgtacattttctacgtggcccatcaccggctcgtagcgcaacaaaggagacagacggctgctttccttcggggcttgggcactatcgttaatcccgcttggttagccatgttcaatcaatccgagctgcagcgtctcatcggtggcgactctcaagagatcgacatcgaggacttgagacggaacacggcctactcgggtctctaccaaatcggcgacgacgggcaagaacatcccacgatcaagcacttctgggacgtgatgcggagtatgccggacgaggagcgccggatggtgctcaagtacgtcacctcgactccccgagcaccgctgctaggattccagggcttagtcccgaagttcagtattcgagatggtgggaacgacgagaagaggttgccgagcgcgagcacgtgtatcaacttgctcaagctccccgtctataagagcgcaggtaatctgagaagtaaactactctatgccgttaagtcgggggctgggtttgatttgagctagattgggtggcggcgatgaacaatgaattacctggctagctattgctaaggagtccagttgagttgtggctttgatgattagaggagttggtggcgagaagtctgcggaggcatgaaatgaggacacttaaaatgaataatgtatgatgattacgaagctaacactacatatttcgctctatccattggagtatatataagtgacct

SEQ ID NO: 35695 - DNA, 2295 bp, Muscodor strobelii
  misc_feature: SGI cDNA ID NO. 572366
  misc_feature: Reduced expression when VOC is produced
  misc_feature: Encodes the peptide sequence at SEQ ID NO 35696
atgtctgctgccactacctccggcgctgttgaccagcttgccgctgatctcggcaacacttcgctcaacgctggcgatgctcgccctgccaccattgacaccaacgtcgctcccaacgcaaccggcgaggagcccgacaccgctggccctacgcccagctccgcccagaccccccaccccgctgcttctgcctccctctatgtcggcgagctcgatccctccgtcaccgaggccatgcttttcgagctgttctcgcagataggatctgtggcctcgatccgcgtctgccgcgatgccgtcacccgccgctcgctcggctatgcctacgtcaactacaacaccaccaccgacggcgagcgtgctctcgacgagctcaactacacccagatcaagggccgtccctgccgcatcatgtggtcgcagcgcgaccccaacctgcgcaagagcggcgccggcaacatcttcatcaagaaccttgacgctgccatcgacaacaaggctcttcacgacacctttgccgctttcggcaacatcctcagctgcaaggtcgcccaggacgagaccggtaactccaagggctacggcttcgtgcactacgagaccgatgaggctgctgcggccgccatcaagcacgtcaacggcatgctgctgaacgagaagaaggtctacgtcggccaccacattcccaagaaggaccgccagagcaagttcgaggagatgaaggccaacttcaccaatgtctacgtcaagaacatccagcccgatgccaccgacgacgacttccacaagctctttgagaagttcggagatgtcacctcatcttctctggcacgcgacggcgaaggcaagtcgcgcggctttggcttcgtcaacttcaccacccatgaggccgctgcgcaggccgtcgaggagcttaacggcaaagacttccagggtcaggatctctacgtcggccgtgcccagaagaagcatgagcgcgaggaggagcttcgcaagtcgtacgaagccgcccgacaggagaaggccacgaagtaccagggtgtcaacctgtacatcaagaacctcgacgacgatgttgacgacgcccaactccgagagttgttcagcaagttcggacccattagctctgccaaggtcatgcgtgataccactcccgagggcgaggaggacaaggacggcaaagacaaggagaaccagaaggattctggtgacgaggagaagaccgagggtgagaagaagggcgacaagaagctcggcaagagcaagggcttcggcttcgtctgcttcgtcaaccctgacgatgccaccaaggccatcggcgagatgaaccagcgcatgattgacaacaagccgttgtatgttgcgttggcccagcgcaaggatgtccggaagcaccagcttgaaactagtatccaggcccgcaaccagctccgtatgcaacacgccgccgccgctgccggcatgcctcagaccttcatgcagccccagggtgtcttctacccccccggccagcagcctggcttccctccgcagggtggccgcggtatgcccttccaacccgtcggcatgcctggcgtgcaaggcggacgacctggccaattccctaaccagtacggtgctccccagggcgggcgcaacggagccattccccagcagatgcctccggccatgtacatgcccggacagttccctcccaacgctccctacgctcagcccggcactcctcagttcatggctgccatggctcagatgcagcagatgggcggacgcaatgtcccagctggccgcgggcctggtatgcagggaatgcccggcaatgtcggcatgcagggccccatgcctggatatccccccaactcccgccagggtccggccggtcgtggcggcatgaacaaccgcggtggccagcagggcggccaattcgctcaaggtggccgtggagcacccgcccaacagggtagcggtgcgccccccgcccctaccggacacacttctgctctccaagcccagttggatgctgctgctggcaaccccggccagcagaagcaaatgcttggcgaggctatcttccccaagatttcggtcattcagcccgatcttgctggcaagattaccggcatgttgttggagatggacaacgccgagctcgttcagcttgtcgacgacgaggcccagctccgctccaaggttgaagaggcgatggctgtctacgacgactacgtcaagtccaaccagggtcccaacggcgagggcgaggctcccaagcaagaggaggcaaaggaagaaaaggcttag

SEQ ID NO: 35696 - protein, 764 aa, Muscodor strobelii
  misc_feature: SGI Peptide ID NO. 572366
  misc_feature (664)..(737): Pfam Id: PF00658 Pfam Desc: Poly-adenylate binding protein, unique domain
  misc_feature (247)..(317): Pfam Id: PF00076 Pfam Desc: RNA recognition motif. (a.k.a. RRM, RBD, or RNP domain)
  misc_feature (66)..(137): Pfam Id: PF00076 Pfam Desc: RNA recognition motif. (a.k.a. RRM, RBD, or RNP domain)
  misc_feature (154)..(224): Pfam Id: PF00076 Pfam Desc: RNA recognition motif. (a.k.a. RRM, RBD, or RNP domain)
  misc_feature (350)..(454): Pfam Id: PF00076 Pfam Desc: RNA recognition motif. (a.k.a. RRM, RBD, or RNP domain)
  misc_feature (672)..(737): Pfam Id: PF00658 Pfam Desc: Poly-adenylate binding protein, unique domain
  misc_feature (415)..(454): Pfam Id: PF00076 Pfam Desc: RNA recognition motif. (a.k.a. RRM, RBD, or RNP domain)
  misc_feature (350)..(386): Pfam Id: PF00076 Pfam Desc: RNA recognition motif. (a.k.a. RRM, RBD, or RNP domain)
  misc_feature (1)..(756): NCBI GI: 116202083 Blast Desc: CHGG_08926 [Chaetomium globosum CBS 148.51] gi|121932498|sp|Q2GSX8.1|PABP_CHAGB RecName: Full=Polyadenylate-binding protein, cytoplasmic and nuclear; CBS
  misc_feature (1)..(758): NCBI GI: 170674510 Blast Desc: poly(A) RNA binding protein [Epichloe festucae]
  misc_feature (1)..(764): NCBI GI: 39961142 Blast Desc: MGG_09505 [Magnaporthe grisea 70-15] gi|158514092|sp|A4QUF0.1|PABP_MAGGR RecName: Full=Polyadenylate-binding protein, cytoplasmic and nuclear;
  misc_feature (3)..(763): NCBI GI: 85097328 Blast Desc: polyadenylate-binding protein [Neurospora crassa OR74A] gi|74696454|sp|Q7S6N6.1|PABP_NEUCR RecName: Full=Polyadenylate-binding protein, cytoplasmic and nuclear;
  misc_feature (1)..(743): NCBI GI: 154322853 Blast Desc: BC1G_00769 [Botryotinia fuckeliana B05.10] gi|150848103|gb|EDN23296.1| BC1G_00769 [Botryotinia fuckeliana B05.10]
  misc_feature (1)..(743): NCBI GI: 171681916 Blast Desc: protein product [Podospora anserina] gi|170940917|emb|CAP66567.1| protein product [Podospora anserina]
  misc_feature (1)..(764): NCBI GI: 156064711 Blast Desc: SS1G_00363 [Sclerotinia sclerotiorum 1980] gi|154691225|gb|EDN90963.1| SS1G_00363 [Sclerotinia sclerotiorum 1980]
  misc_feature (1)..(746): NCBI GI: 256734061 Blast Desc: NECHADRAFT_59146 [Nectria haematococca mpVI 77-13-4]
  misc_feature (1)..(749): NCBI GI: 46128087 Blast Desc: FG08421.1 [Gibberella zeae PH-1]
  misc_feature (31)..(753): NCBI GI: 225557655 Blast Desc: polyadenylate-binding protein [Ajellomyces capsulatus G186AR] gi|240278336|gb|EER41843.1| polyadenylate-binding protein [Ajellomyces capsulatus H143]
  misc_feature: Useful for introducing or modulating the production of volatile compounds
MSAATTSGAVDQLAADLGNTSLNAGDARPATIDTNVAPNATGEEPDTAGPTPSSAQTPHPAASASLYVGELDPSVTEAMLFELFSQIGSVASIRVCRDAVTRRSLGYAYVNYNTTTDGERALDELNYTQIKGRPCRIMWSQRDPNLRKSGAGNIFIKNLDAAIDNKALHDTFAAFGNILSCKVAQDETGNSKGYGFVHYETDEAAAAAIKHVNGMLLNEKKVYVGHHIPKKDRQSKFEEMKANFTNVYVKNIQPDATDDDFHKLFEKFGDVTSSSLARDGEGKSRGFGFVNFTTHEAAAQAVEELNGKDFQGQDLYVGRAQKKHEREEELRKSYEAARQEKATKYQGVNLYIKNLDDDVDDAQLRELFSKFGPISSAKVMRDTTPEGEEDKDGKDKENQKDSGDEEKTEGEKKGDKKLGKSKGFGFVCFVNPDDATKAIGEMNQRMIDNKPLYVALAQRKDVRKHQLETSIQARNQLRMQHAAAAAGMPQTFMQPQGVFYPPGQQPGFPPQGGRGMPFQPVGMPGVQGGRPGQFPNQYGAPQGGRNGAIPQQMPPAMYMPGQFPPNAPYAQPGTPQFMAAMAQMQQMGGRNVPAGRGPGMQGMPGNVGMQGPMPGYPPNSRQGPAGRGGMNNRGGQQGGQFAQGGRGAPAQQGSGAPPAPTGHTSALQAQLDAAAGNPGQQKQMLGEAIFPKISVIQPDLAGKITGMLLEMDNAELVQLVDDEAQLRSKVEEAMAVYDDYVKSNQGPNGEGEAPKQEEAKEEKA

SEQ ID NO: 35697 - DNA, 3642 bp, Muscodor strobelii
  misc_feature: SGI EST ID NO. CUFF.85262.0
  misc_feature: Variant of the nucleotide sequence at SEQ ID NO 35695
gaaaaacacaaaatttcaatcggctgtaaggaggaccctcctctttctccttctctccttcttcaacgacaccgcagctcagcaaccgtcgcccaccaacgctcaaagagattcagtctttgagcacgatctgcccgtcgtgcttcagttctgttctcccaagtacatccaacaaaacaccaaaaaaaactcggaaaaatctaaaaaaatcccacacccaccaccgtcatcgcctcctccgtcccgcttccagcacctcccgccatcgcaacctcctgcatcaccaactcttacaacctcctatcttccgcgtcgccccgtcttgtgcagcatcttatctccaggacgacaccggtccgtcttctattgccacggccatctcatcgcagattgccggcatctctaacacatcctcgacctcaacctctgtttgaatgtgagtatctacatgtatctctacctgccgacaaaccaccttcttctgtctgctctttgacgtcgcagacatcacctcgcctctttgtttgtctgtctactctgcctctatgtcatcctcgcctgtacctttgtgtctctactacagttccaacgcagttgcttgtcatctctgaacttgttcccgcctcttgatctttccttgctacaatctcgttcaactacgtagacaaacagcctcacatttcccacatggcaaaatacaaataattcctcctcgcaccagtgctaggcctgagctcatcctccatttccgttgctaacatcgtccccaacagcgagttaatcatgtctgctgccactacctccggcgctgttgaccagcttgccgctgatctcggcaacacttcgctcaacgctggcgatgctcgccctgccaccattgacaccaacgtcgctcccaacgcaaccggcgaggagcccgacaccgctggccctacgcccagctccgcccagaccccccaccccgctgcttctgcctccctctatgtcggcgagctcgatccctccgtcaccgaggccatgcttttcgagctgttctcgcagataggatctgtggcctcgatccgcgtctgccgcgatgccgtcacccgccgctcgctcggctatgcctacgtcaactacaacaccaccaccgacggcgagcgtgctctcgacgagctcaactacacccagatcaagggccgtccctgccgcatcatgtggtcgcagcgcgaccccaacctgcgcaagagcggcgccggcaacatcttcatcaagaaccttgacgctgccatcgacaacaaggctcttcacgacacctttgccgctttcggcaacatcctcagctgcaaggtcgcccaggacgagaccggtaactccaagggctacggcttcgtgcactacgagaccgatgaggctgctgcggccgccatcaagcacgtcaacggcatgctgctgaacgagaagaaggtctacgtcggccaccacattcccaagaaggaccgccagagcaagttcgaggagatgaaggccaacttcaccaatgtctacgtcaagaacatccagcccgatgccaccgacgacgacttccacaagctctttgagaagttcggagatgtcacctcatcttctctggcacgcgacggcgaaggcaagtcgcgcggctttggcttcgtcaacttcaccacccatgaggccgctgcgcaggccgtcgaggagcttaacggcaaagacttccagggtcaggatctctacgtcggccgtgcccagaagaagcatgagcgcgaggaggagcttcgcaagtcgtacgaagccgcccgacaggagaaggccacgaagtaccagggtgtcaacctgtacatcaagaacctcgacgacgatgttgacgacgcccaactccgagagttgttcagcaagttcggacccattagctctgccaaggtcatgcgtgataccactcccgagggcgaggaggacaaggacggcaaagacaaggagaaccagaaggattctggtgacgaggagaagaccgagggtgagaagaagggcgacaagaagctcggcaagagcaagggcttcggcttcgtctgcttcgtcaaccctgacgatgccaccaaggccatcggcgagatgaaccagcgcatgattgacaacaagccgttgtatgttgcgttggcccagcgcaaggatgtccggaagcaccagcttgaaactagtatccaggcccgcaaccagctccgtatgcaacacgccgccgccgctgccggcatgcctcagaccttcatgcagccccagggtgtcttctacccccccggccagcagcctggcttccctccgcagggtggccgcggtatgcccttccaacccgtcggcatgcctggcgtgcaaggcggacgacctggccaattccctaaccagtacggtgctccccagggcgggcgcaacggagccattccccagcagatgcctccggccatgtacatgcccggacagttccctcccaacgctccctacgctcagcccggcactcctcagttcatggctgccatggctcagatgcagcagatgggcggacgcaatgtcccagctggccgcgggcctggtatgcagggaatgcccggcaatgtcggcatgcagggccccatgcctggatatccccccaactcccgccagggtccggccggtcgtggcggcatgaacaaccgcggtggccagcagggcggccaattcgctcaaggtggccgtggagcacccgcccaacagggtagcggtgcgccccccgcccctaccggacacacttctgctctccaagcccagttggatgctgctgctggcaaccccggccagcagaagcaaatgcttggcgaggctatcttccccaagatttcggtcattcagcccgatcttgctggcaagattaccggcatgttgttggagatggacaacgccgagctcgttcagcttgtcgacgacgaggcccagctccgctccaaggttgaagaggcgatggctgtctacgacgactacgtcaagtccaaccagggtcccaacggcgagggcgaggctcccaagcaagaggaggcaaaggaagaaaaggcttaggtctccttgcgatctcactaaaatcttggactcttgttcgactcctcgattcacgatggttgacctattaatttgtcggcatgatcgatttgtttcgttttttttactacgcaacggttcggaaaagtttattgatgacagctgttcggccaaggcaggcgaacctaccacatcaatttcagcatttgttttgggtgtctcacccacgccaccatgaatactcgatgaccccgctgtcctctcggtcttcggactggacggagcctacctctgactagatgggcaggtgtccttctgaccattcttgtattgctagctaggtggcgaaggggagcagagaggaggacaaggagtattgcgtggcagttcggatgacagtactcaggcgttcacggttatgctcggtcggctctggggagctttcccacggtcggatggattgcggcggcaccatatggtttctgaccaaaataccccttaaggttgccggtgggaggaaacaaaaagcagaggcgatcccatagaacttgatctgctaatgaatgaaaaaagtacttctaacta

SEQ ID NO: 35698 - DNA, 2058 bp, Muscodor strobelii
  misc_feature: SGI cDNA ID NO. 572367
  misc_feature: Encodes the peptide sequence at SEQ ID NO 35699
atggcaggtctaggcaggcagcagatgtccctcgaggccgccatggaggaggagcggaaggaggtagaggccctgatctccatgcagcaggcctcgaggcgagcgccctcggtcgcccgctccacctcgccctaccccaatcccagatcgccagtccggagcatgctggacatcggcggcgacgagcccagaagccctcctccgcaggcgcccgtccgcagcatgttggacgtggacagccccccgcccgtgccgcgccacacccctcgcagcatgctcgacatcgacagcgccgtcgccgcgcccacgagcacccacacctcgccgaccctgtccttcaagtcccccgtgctcgacaacaccacgcgccacaggagcatgtccgacgctgcctcgcagcccgccgccgacctccctctgcgctcgccacccctgctcagcccgcgtgccaacgatccgctgtccacgtacaagtttcacgacatcctgacccccaatgtcgggcccagcatcctgtccaagcgtggctccggcgccggcgggactcggactggctcgctcggcgaagcgctacgagggtccaacaataagtccaagtcgccgaacaatcgatttgcgctgcgctctggctctcctttcgcagcctcgtcctcgtcgaaacgcgcgcagcagcagtcacgatcgttcatgatagggtctgatgagatcgatgccagcaatgcgtataggaggctgtctgacgcccatctcgcctacgggaactccagcttggcgtcgttggctcgcaagaatctggattcctcggatggccacggccgaatcgccaaggacaacctaagcccctatggggagctcttgcccgacgagagcgatgacgaggccgcgaattcctcggacgaggagaatgagcgcggcaggaaactgacgacccgggcagagtcgcaggacgagaaggccgccaaaagcttgatggctgcggtagaggatgagcgcaagcatgtctcggcggtgcagccgcaatacagatcgctctttgatgatccggccatcaccatcacaagcccaacgggagagaaatctaaagccaaggccaagcaaacggtgcagccggctaccagcttcgacgagcctctctctggtacccaaacgccactggatcccgacttggatgcagacgtcagtgccatcaaatttgctcaaaaaatgcagctctcattgacgcccatcatctcgtcgcctgaggtgcaccgctccatccgactcatctatcgcggcgagtaccccaagattcaacgagaggccgaggaagaacaccgacgccttaggaaatatctggtagcgacagatctcagcgatgagtctacacatgcgctcgagtgggccattgggacggtgctacgggatggcgataccctcatcgcgatgtactgcttggatgaggaaagcagtggttccatcgacgctggcagtctggtgcctgatgacccaaaggcgatgaaggagcaggcggcggccattaatgccatgacaaaaaccgcaaacgcggggccgggtcaacgcagtagcatggctgcggcaagtcccttcactttcggtcgtgccgccaactcgccgcgactccgtgccgttgatggtggcggcagcgtcgcttcgtcgccgggccccggctccaaggggaagagtaagctagaggaggaaagagatcgggcggttcttgacatcactgagagggtctccaagctactgcgcaagactcagcttcaagtgcgcgtgattgttgaggtcatccactgcaagaaccccaagcatctgatcacagaagtgatcgatattgtcaatcccactctggtggtactgggtagtaggggccgaagtgccctgaaagggactctgttaggatcattctctaattatctagtgacgaagagctcagtacccgtcatggtggcacgcaagcgactcaggaagaagagcaagtaccaaccaccgccaacgaagcaggtcaacaatctagccaaccccgcagctcgcagcctcgagatggcgcgtatcgactag

SEQ ID NO: 35699 - protein, 685 aa, Muscodor strobelii
  misc_feature: SGI Peptide ID NO. 572367
  misc_feature (440)..(651): Pfam Id: PF00582 Pfam Desc: Universal stress protein family
  misc_feature (5)..(685): NCBI GI: 116202087 Blast Desc: CHGG_08928 [Chaetomium globosum CBS 148.51] gi|88177446|gb|EAQ84914.1| CHGG_08928 [Chaetomium globosum CBS 148.51]
  misc_feature (4)..(685): NCBI GI: 39961163 Blast Desc: MGG_09507 [Magnaporthe grisea 70-15] gi|145011008|gb|EDJ95664.1| MGG_09507 [Magnaporthe grisea 70-15]
  misc_feature (7)..(685): NCBI GI: 46128081 Blast Desc: FG08418.1 [Gibberella zeae PH-1]
  misc_feature (9)..(685): NCBI GI: 256733552 Blast Desc: NECHADRAFT_59142 [Nectria haematococca mpVI 77-13-4]
  misc_feature (9)..(685): NCBI GI: 164426050 Blast Desc: NCU04807 [Neurospora crassa OR74A] gi|157071179|gb|EAA31197.2| conserved [Neurospora crassa OR74A]
  misc_feature (7)..(639): NCBI GI: 171681896 Blast Desc: protein product [Podospora anserina] gi|170940907|emb|CAP66557.1| protein product [Podospora anserina]
  misc_feature (9)..(685): NCBI GI: 154322859 Blast Desc: BC1G_00772 [Botryotinia fuckeliana B05.10] gi|150848106|gb|EDN23299.1| BC1G_00772 [Botryotinia fuckeliana B05.10]
  misc_feature (340)..(685): NCBI GI: 261359590 Blast Desc: Usp domain-containing protein [Verticillium albo-atrum VaMs.102]
  misc_feature (364)..(685): NCBI GI: 170674508 Blast Desc: 17A8-01 [Epichloe festucae]
  misc_feature (10)..(685): NCBI GI: 189190808 Blast Desc: PTRG_01410 [Pyrenophora tritici-repentis Pt-1C-BFP] gi|187973349|gb|EDU40848.1| PTRG_01410 [Pyrenophora tritici-repentis Pt-1C-BFP]
MAGLGRQQMSLEAAMEEERKEVEALISMQQASRRAPSVARSTSPYPNPRSPVRSMLDIGGDEPRSPPPQAPVRSMLDVDSPPPVPRHTPRSMLDIDSAVAAPTSTHTSPTLSFKSPVLDNTTRHRSMSDAASQPAADLPLRSPPLLSPRANDPLSTYKFHDILTPNVGPSILSKRGSGAGGTRTGSLGEALRGSNNKSKSPNNRFALRSGSPFAASSSSKRAQQQSRSFMIGSDEIDASNAYRRLSDAHLAYGNSSLASLARKNLDSSDGHGRIAKDNLSPYGELLPDESDDEAANSSDEENERGRKLTTRAESQDEKAAKSLMAAVEDERKHVSAVQPQYRSLFDDPAITITSPTGEKSKAKAKQTVQPATSFDEPLSGTQTPLDPDLDADVSAIKFAQKMQLSLTPIISSPEVHRSIRLIYRGEYPKIQREAEEEHRRLRKYLVATDLSDESTHALEWAIGTVLRDGDTLIAMYCLDEESSGSIDAGSLVPDDPKAMKEQAAAINAMTKTANAGPGQRSSMAAASPFTFGRAANSPRLRAVDGGGSVASSPGPGSKGKSKLEEERDRAVLDITERVSKLLRKTQLQVRVIVEVIHCKNPKHLITEVIDIVNPTLVVLGSRGRSALKGTLLGSFSNYLVTKSSVPVMVARKRLRKKSKYQPPPTKQVNNLANPAARSLEMARID

SEQ ID NO: 35700 - DNA, 4903 bp, Muscodor strobelii
  misc_feature: SGI EST ID NO. CUFF.85026.0
  misc_feature: Variant of the nucleotide sequence at SEQ ID NO 35698
gttgtattccatggcctactgcacgtacgttttaggcgagtggaagtcagttctatacctaccaaaagctggaaatctttcccagacactcaactatctaagctactaaatactcaatgccttcgggacctacggcatctaccttggtagttctgagtgccgacttccatagggtggtagcatgcggacatagtgcagacacggctgttcccgaggactcaggtacggcactgaaggcctgtaaacctacatgtgccgagacaccaccaagcccaaccctgaagcacgcgacaagtacatcaaaccagacgtctattcaagcttcaatgacgccaaaatcccccaaattcctttacaccgaggcaggtagtcgacagaagttggcgtggaaatgatcagagggatgagcagagccggggcgggccaatgcccaggcctgccgcctggtgtctcctcccggctgcagtcgactgtcgactgtcgactgtggtgcgtcgatgtcttggccatgaaggagcttggcccaaatgtgctgctcattctcgtctcgccccgcctttgtcattgcactctccacgtcttaaccaaagtgagtttgcgcatgcgatatttgcctgttgctcttgcttggcgacgcgaggcctccgtactcgaacaaattcaacatcggcttaactcttggctggctcctcagggccaacttcccatctcaatcgcagcatctaagctcaccataccgatcagtgtgctccgtgtctcggcgtctgaactgcattgatcagtttcttctttgtttatttgcacgagccaacacgtcggcagaccattgaagctgcatcgacatcgaggcgactggctcgactaatacagtgcccactgcataaggttgttacttgatgctctgctgggtactgtgcagaaaaagagacagccgagacagctgtggaccttttgcgcagctacaccttacaatacaatacgtgcggggggcagagccgtgtccagctagagtgcccaccttgtgcgctacgactttgatgggattcccacctcgaacgcaccacatcctcagtcctagctttgacatccaaggaccagcgggctgaccaagcgaggcactgcaccactcactgagactcatcccacactcgaacccgtggtcgccttgctcgttccacactgcgcctctcccatcttgagcccctcctctccggcctgcttgcaaccgccgccggccaccgcacgggagacgccagtcggaaacactaaacacccaggacacactcagctgttgggcgttgcgagtctgagagccatgagccaggccccaacctcgcaaaccttgcacctgctagactgattgagcgacgacacccgcaatgctctgcttctctggtccgatcaccagacgacctaccatcataccacgataacaccagcttcggtagtagtagtaattctaacagcacaactaactctatttgcctgcattcagacctcccgagctacgctctgggcgcgagtctacacatatacatttcaagcatacatccgaatagacgtccgaacaggtatccgactaggcatccgagcatacgtcacggcgagaaaacaccaatcggcacaagatacaactctattcgggggcacagcgcatcgcctcgtttgcatagtatcatcttaaatactttctatcgccagactcgtgccgggaagagagagcgccatggcaggtctaggcaggcagcagatgtccctcgaggccgccatggaggaggagcggaaggaggtagaggccctgatctccatgcagcaggcctcgaggcgagcgccctcggtcgcccgctccacctcgccctaccccaatcccagatcgccagtccggagcatgctggacatcggcggcgacgagcccagaagccctcctccgcaggcgcccgtccgcagcatgttggacgtggacagccccccgcccgtgccgcgccacacccctcgcagcatgctcgacatcgacagcgccgtcgccgcgcccacgagcacccacacctcgccgaccctgtccttcaagtcccccgtgctcgacaacaccacgcgccacaggagcatgtccgacgctgcctcgcagcccgccgccgacctccctctgcgctcgccacccctgctcagcccgcgtgccaacgatccgctgtccacgtacaagtttcacgacatcctgacccccaatgtcgggcccagcatcctgtccaagcgtggctccggcgccggcgggactcggactggctcgctcggcgaagcgctacgagggtccaacaataagtccaagtcgccgaacaatcgatttgcgctgcgctctggctctcctttcgcagcctcgtcctcgtcgaaacgcgcgcagcagcagtcacgatcgttcatgatagggtctgatgagatcgatgccagcaatgcgtataggaggctgtctgacgcccatctcgcctacgggaactccagcttggcgtcgttggctcgcaagaatctggattcctcggatggccacggccgaatcgccaaggacaacctaagcccctatggggagctcttgcccgacgagagcgatgacgaggccgcgaattcctcggacgaggagaatgagcgcggcaggaaactgacgacccgggcagagtcgcaggacgagaaggccgccaaaagcttgatggctgcggtagaggatgagcgcaagcatgtctcggcggtgcagccgcaatacagatcgctctttgatgatccggccatcaccatcacaagcccaacgggagagaaatctaaagccaaggccaagcaaacggtgcagccggctaccagcttcgacgagcctctctctggtacccaaacgccactggatcccgacttggatgcagacgtcagtgccatcaaatttgctcaaaaaatgcagctctcattgacgcccatcatctcgtcgcctgaggtgcaccgctccatccgactcatctatcgcggcgagtaccccaagattcaacgagaggccgaggaagaacaccgacgccttaggaaatatctggtagcgacagatctcagcgatgagtctacacatgcgctcgagtgggccattgggacggtgctacgggatggcgataccctcatcgcgatgtactgcttggatgaggaaagcagtggttccatcgacgctggcagtctggtgcctgatgacccaaaggcgatgaaggagcaggcggcggccattaatgccatgacaaaaaccgcaaacgcggggccgggtcaacgcagtagcatggctgcggcaagtcccttcactttcggtcgtgccgccaactcgccgcgactccgtgccgttgatggtggcggcagcgtcgcttcgtcgccgggccccggctccaaggggaagagtaagctagaggaggaaagagatcgggcggttcttgacatcactgagagggtctccaagctactgcgcaagactcagcttcaagtgcgcgtgattgttgaggtcatccactgcaagaaccccaagcatctgatcacagaagtgatcgatattgtcaatcccactctggtggtactgggtagtaggggccgaagtgccctgaaagggactctgttaggatcattctctaattatctagtgacgaagagctcagtacccgtcatggtggcacgcaagcgactcaggaagaagagcaagtaccaaccaccgccaacgaagcaggtcaacaatctagccaaccccgcagctcgcagcctcgagatggcgcgtatcgactaggagttcggaccaaaatgcgaagatagcagcagctggtatgacatttcacggtagccttggctggatggcgcctccttttactttgatcaacgtccttggacttgccaggtcacgcaaacgaagttacgacgatatgaaccattattttcaacactacagcggctaaatgctgggctttcaactttgggctgaccagagcgtatttgcttatgtgctttttttacatgttaccaagaagtagcagcctagattatctctactctacttagtagctaacgtacccactcttctcgccactgccatgcctctcgcctgtgtccgttttcgcatccataaggttgtgtttactcttttgttttgagggatttgaggaaaagtatcaggtgacaatgcagacaacacagagccaatggcgggacgttgtgattgtttatatggggcggggtattcccagtcagtcgcggtctgtacgtgtttaattgcttgcagacgcgtaaagtgcttgcagcaatgcgaccatagggagaaacgtgattcggtccatattctggcaatgggggggttctgtgcgcaccaatgagagggccggagagcttatgcagacgagagaaagtgcatccctcattggacgggtgctttaggtgctttcgtcagggcatacttgatcgagttgaaggctgttgggcatagtgagttcaggccagacgagcgataggagacacctgtatgtacctgatatgattcaactcatctacgtagctacaagagtagtgccgctgtctacgcgcccacattaaagaacatagaggtcagtggtttgctgcgggcggagggagacctcgctggactataagatgagaagcaatcccgattcgggaccaacgggaccggatgaacctcccgctctcgagactctttaggttgacaatcctgtttggtccaggcctagtgtacttgccctcccagatatcctgttcaaattcttagaactggctggtatgcatgtatctcggtatctcggcttacattaaagttcgaccgtaccttgcaggaagaacattgcgtacggagaagaagacagccatctgtctcaaagttcatcagcttccacagctcaga

SEQ ID NO: 35701 - DNA, 1836 bp, Muscodor strobelii
  misc_feature: SGI cDNA ID NO. 572368
  misc_feature: Encodes the peptide sequence at SEQ ID NO 35702
atgacgtcgatgtactccgaggccagcttggacgacgtcgacttcgcgactccgatgtcaccgccgttgctgaagaggccgccgttcgggtacccgtcggcccactccggctttggctttccggccgtgggggccggaaatcccgacgagagcgacgacaacctggatgacacagattcttactcgactggcaactatagcccgccggcctggcgacgcctagagaacggagaccgttggtatggtaactggcgcggtggtaacgatgtccttggtcgccgtcacctggacaaatcgagagttgtggggcagaacgatagacaggtgttcgaggaggcacgtagaactcgcttgccggatggaagtgtgagcccagaaaagggccgtactcccgagcctcgagcgcgcgacgaagacgaaaccctcacaaagatgaaatgtgaaagtatgccgccacttaaagagcatatcggctcggtcaaggaggaggctgagagacaccggttgatagcatcaatgccaccagaagcagctagagataattatatacgattcgcgctgcgcgcggatatacaacaacgcacagaacctatcgacgcggcgctcaacttctcgcaaaaagtctaccgaagaatgacgcatagttggtggaatgtagccattgctatattcgctacaatactaacaataccaatgggtcgcatgctactccaacctgctaccctgcggccatcacctgatctcgttaaagttgccggcctcgctcgctccttcgagccactcatctactactctgagaatggagtatcacaggttggcgacttacaagccacgggcgtcgctgtttgggatcttggagaaagcgtgagatccagtaacatgacttctgctcccatcattgtcaaggagcttgatgagctatcagatagcctaaagacattggctatggaactcacgagattctttgccaatgtcgatggagatatcgacagcatcttgatcgtcatggactgggcaagacgcgagctttcgcaaatacaggctgccccaagcccgcctctttcgacggcattttccaacatccataatctgctttgctcggcggggttgctcgagaatcctaccacagggactccaaccaaacttggtgcggttgcgacggctgtatttggcacttcgcagacgcagcatacgcggcagacgctacagcgcactttcaccgagttcctgtctgtgcttgaagaggcgattgagaatgagctgcagcatagcctagcgctatttggtcttttcgaaagtatcgatcggcaatttctcaatttggcacggacggtgattcgtgaggcgaatgtgcaggaggagcaacatggggagctactctcatccctttggacgaggattctcggtccccgcgctagtgaggtaaagaaatttgagaggaatcatgaacttcttgccaatgtaagggaaaagacggtcaggaacaaggggattctcgtcgagcataatggcaagctacagacgctcaaggcaaatttagagagcttgaggagaaagttggttagccccttggtcaggagcgtgaatagcagtacgatcacgctcgatgagcagattaagggccttgaggatgtcggggtttatctagagggagtgagggcgaggcagaagggaaagcttatggaaatgctttatggcgggagcagcaatcgggctggtatcgctgctacggcgtctgcgagactagtaggtgttggacggtttggtgtaagattttacgaggtaaataagtacgcaagtgcttctacttctactttcttgggtatcattgcttga

SEQ ID NO: 35702 - protein, 611 aa, Muscodor strobelii
  misc_feature: SGI Peptide ID NO. 572368
  misc_feature (7)..(571): NCBI GI: 116202085 Blast Desc: CHGG_08927 [Chaetomium globosum CBS 148.51] gi|88177445|gb|EAQ84913.1| CHGG_08927 [Chaetomium globosum CBS 148.51]
  misc_feature (51)..(572): NCBI GI: 164426052 Blast Desc: NCU04808 [Neurospora crassa OR74A] gi|157071180|gb|EAA31198.2| conserved [Neurospora crassa OR74A]
  misc_feature (51)..(568): NCBI GI: 261359589 Blast Desc: conserved [Verticillium albo-atrum VaMs.102]
  misc_feature (27)..(580): NCBI GI: 154322901 Blast Desc: BC1G_00793 [Botryotinia fuckeliana B05.10] gi|150848127|gb|EDN23320.1| BC1G_00793 [Botryotinia fuckeliana B05.10]
  misc_feature (8)..(590): NCBI GI: 156064665 Blast Desc: SS1G_00340 [Sclerotinia sclerotiorum 1980] gi|154691202|gb|EDN90940.1| SS1G_00340 [Sclerotinia sclerotiorum 1980]
  misc_feature (58)..(569): NCBI GI: 145602614 Blast Desc: MGG_09506 [Magnaporthe grisea 70-15] gi|145011007|gb|EDJ95663.1| MGG_09506 [Magnaporthe grisea 70-15]
  misc_feature (7)..(583): NCBI GI: 46128085 Blast Desc: FG08420.1 [Gibberella zeae PH-1]
  misc_feature (51)..(566): NCBI GI: 256733554 Blast Desc: [Nectria haematococca mpVI 77-13-4]
  misc_feature (53)..(565): NCBI GI: 170674509 Blast Desc: 17A8-02 [Epichloe festucae]
  misc_feature (14)..(573): NCBI GI: 171681908 Blast Desc: protein product [Podospora anserina] gi|170940913|emb|CAP66563.1| protein product [Podospora anserina]
MTSMYSEASLDDVDFATPMSPPLLKRPPFGYPSAHSGFGFPAVGAGNPDESDDNLDDTDSYSTGNYSPPAWRRLENGDRWYGNWRGGNDVLGRRHLDKSRVVGQNDRQVFEEARRTRLPDGSVSPEKGRTPEPRARDEDETLTKMKCESMPPLKEHIGSVKEEAERHRLIASMPPEAARDNYIRFALRADIQQRTEPIDAALNFSQKVYRRMTHSWWNVAIAIFATILTIPMGRMLLQPATLRPSPDLVKVAGLARSFEPLIYYSENGVSQVGDLQATGVAVWDLGESVRSSNMTSAPIIVKELDELSDSLKTLAMELTRFFANVDGDIDSILIVMDWARRELSQIQAAPSPPLSTAFSNIHNLLCSAGLLENPTTGTPTKLGAVATAVFGTSQTQHTRQTLQRTFTEFLSVLEEAIENELQHSLALFGLFESIDRQFLNLARTVIREANVQEEQHGELLSSLWTRILGPRASEVKKFERNHELLANVREKTVRNKGILVEHNGKLQTLKANLESLRRKLVSPLVRSVNSSTITLDEQIKGLEDVGVYLEGVRARQKGKLMEMLYGGSSNRAGIAATASARLVGVGRFGVRFYEVNKYASASTSTFLGIIA

SEQ ID NO: 35703 - DNA, 3153 bp, Muscodor strobelii
  misc_feature: SGI EST ID NO. CUFF.85029.0
  misc_feature: Variant of the nucleotide sequence at SEQ ID NO 35701
aagacgcagtcactcccagcctctcgatttcgctggctgctgtgaagtctgtctgtctatctaccagttccatacatacctacgtgcagttcggtcagagtgaacatcagcgcccagtcttcaacgcggctcatttgtttcttgaaactctcaaattcagatttatcgttcctctatgtgctcttttgtattatcactttggactacttccactttcagagcctctttgccccgccaatcgcaagtacaaacaatacatactattcgtccactcacttacttgcaccaagtcggatcgaactagccgctgggcgcaaatcctcaaaacgtagtattctttcatgagctggtactatctctcagtttggcgacatattgagacgacgggctacatcgagggcccccgtcttgcatttcaatgcagccgctggtatcggtgaacactcatactcatatctcactgctcagcattcacgtcacgcccggtacctttctcgctgcgctcgcgctaacactattcgtattcttcgcatatctctccattagtggtcttccacttcgactgttgaccgcgattcgccttcccagctttggtaggaagacgctcgttgcgccgagagctcctgaaccattgattatagaagaaattattgaggagttcccattgtccgtagaaaaggccttgcctccattaccgcctattacacctcccaggaataaaagacctttactccttacagaagcgcctcattatagccgatcatcctcctcttcaagtcgcagcttacgatccattttctcttctcgttctcctaaagcacttacaagttccacaagcgcgagtctcagtccaaccacaagccccttatccagctcgagagtcggcgcaaataacgcggataacaagcaattggtccgcgccactcgaaatcatgacgtcgatgtactccgaggccagcttggacgacgtcgacttcgcgactccgatgtcaccgccgttgctgaagaggccgccgttcgggtacccgtcggcccactccggctttggctttccggccgtgggggccggaaatcccgacgagagcgacgacaacctggatgacacagattcttactcgactggcaactatagcccgccggcctggcgacgcctagagaacggagaccgttggtatggtaactggcgcggtggtaacgatgtccttggtcgccgtcacctggacaaatcgagagttgtggggcagaacgatagacaggtgttcgaggaggcacgtagaactcgcttgccggatggaagtgtgagcccagaaaagggccgtactcccgagcctcgagcgcgcgacgaagacgaaaccctcacaaagatgaaatgtgaaagtatgccgccacttaaagagcatatcggctcggtcaaggaggaggctgagagacaccggttgatagcatcaatgccaccagaagcagctagagataattatatacgattcgcgctgcgcgcggatatacaacaacgcacagaacctatcgacgcggcgctcaacttctcgcaaaaagtctaccgaagaatgacgcatagttggtggaatgtagccattgctatattcgctacaatactaacaataccaatgggtcgcatgctactccaacctgctaccctgcggccatcacctgatctcgttaaagttgccggcctcgctcgctccttcgagccactcatctactactctgagaatggagtatcacaggttggcgacttacaagccacgggcgtcgctgtttgggatcttggagaaagcgtgagatccagtaacatgacttctgctcccatcattgtcaaggagcttgatgagctatcagatagcctaaagacattggctatggaactcacgagattctttgccaatgtcgatggagatatcgacagcatcttgatcgtcatggactgggcaagacgcgagctttcgcaaatacaggctgccccaagcccgcctctttcgacggcattttccaacatccataatctgctttgctcggcggggttgctcgagaatcctaccacagggactccaaccaaacttggtgcggttgcgacggctgtatttggcacttcgcagacgcagcatacgcggcagacgctacagcgcactttcaccgagttcctgtctgtgcttgaagaggcgattgagaatgagctgcagcatagcctagcgctatttggtcttttcgaaagtatcgatcggcaatttctcaatttggcacggacggtgattcgtgaggcgaatgtgcaggaggagcaacatggggagctactctcatccctttggacgaggattctcggtccccgcgctagtgaggtaaagaaatttgagaggaatcatgaacttcttgccaatgtaagggaaaagacggtcaggaacaaggggattctcgtcgagcataatggcaagctacagacgctcaaggcaaatttagagagcttgaggagaaagttggttagccccttggtcaggagcgtgaatagcagtacgatcacgctcgatgagcagattaagggccttgaggatgtcggggtttatctagagggagtgagggcgaggcagaagggaaagcttatggaaatgctttatggcgggagcagcaatcgggctggtatcgctgctacggcgtctgcgagactagtaggtgaaggggcaaggtcgagctattagtgtggtggcgaggtgtgttgctgttgagattacatggtgtggcctttgagggtcatttggagtacgctcctagcgatacgccatgaattaccgtcctcgacatacatagatacacgcgaagatggtcatggtatcacgacgtacgtcgcatttaggtgttggacggtttggtgtaagattttacgaggtaaataagtacgcaagtgcttctacttctactttcttgggtatcattgcttgaaatgtattaaatgttgattaaacggcgcataacctctaaggtcagactcatgagcttagataacgtggtggttggttccggatgagcatgaacatacactacatagcaattcttggaggatgcgtcaaagcacacaaggacctgtatagttttatcgattacctacgttagaattcgaaattttaacctcgtccagtccctaat

SEQ ID NO: 35704 - DNA, 876 bp, Muscodor strobelii
  misc_feature: SGI cDNA ID NO. 572369
  misc_feature: Encodes the peptide sequence at SEQ ID NO 35705
atgccataccaatccatactcgccgaccaggcgttcacacctgtgccttcgaaccgaaactcctgcaacaacagtcccatggccggtctatcaaagaatgagcgggtcgccgtgctaaaggggaaacagaatcaaccgcaactcaagaatctcaccatcagccaggagacgagcttccccgtgacgaggagcacgcacgagcagcatagtgagccaagtcatgcgcataacaatgacttcaatacgacgccgcagacgagagacgacgttctagatatcgcggcgctgctggaacgatcggaagatgacacgtttgagtggcttacatcggatcttgttgtggttccgttccgggagtggattagggacagtgttatggtgcagcaatctggttctgctactacgccctcacctgcttcgctgtctagccccatggttgcgcttgggccggcggtcctaagcccgaaccctggggctgttatgggtgggaatgaggcttctatggttgatcttgcgagagtccacaaggagacagtgaggttctttgagcgggagatcaagaaggatgaggatattccgattccgactatcgaggagcttagcgctgtgcttggaagtcatgctgtgctttcgcctatcacgccaagctcggcgagttggcagtttgatagaagatttgatacggggagaaatgtgacacttgccgttagcttggaggaccttgttaagaggttcgttctttcgttgctcaggattaatctgaaggctggtgggatttgggaagagtgggataggaagcttgggtattcgcgcccgattgctgttgcgttgagggtgtatcaacacttaactggtgctgagaggcagggtgcgtag

SEQ ID NO: 35705 - protein, 291 aa, Muscodor strobelii
  misc_feature: SGI Peptide ID NO. 572369
MPYQSILADQAFTPVPSNRNSCNNSPMAGLSKNERVAVLKGKQNQPQLKNLTISQETSFPVTRSTHEQHSEPSHAHNNDFNTTPQTRDDVLDIAALLERSEDDTFEWLTSDLVVVPFREWIRDSVMVQQSGSATTPSPASLSSPMVALGPAVLSPNPGAVMGGNEASMVDLARVHKETVRFFEREIKKDEDIPIPTIEELSAVLGSHAVLSPITPSSASWQFDRRFDTGRNVTLAVSLEDLVKRFVLSLLRINLKAGGIWEEWDRKLGYSRPIAVALRVYQHLTGAERQGA

SEQ ID NO: 35706 - DNA, 1360 bp, Muscodor strobelii
  misc_feature: SGI EST ID NO. CUFF.85023.0
  misc_feature: Variant of the nucleotide sequence at SEQ ID NO 35704
tggtgagattgggattaaggttcccgcgtggctggctccccgcgtcggattggtgacattggcggcgttcgagaatcagcgcttggacatgaggcgcatctcttagctacgtactgtgggatttggtgggaaatggacactcggactggttttcatatgtaagcagatcttaggtttttaataacagggcgctcctatcaaaaggtaggttgagatggacgctgacttgttgcccttcttttcgctcagatatcttacttcatccaaagtacatgtaattataactcgcgcgtatcatcaaaatgccataccaatccatactcgccgaccaggcgttcacacctgtgccttcgaaccgaaactcctgcaacaacagtcccatggccggtctatcaaagaatgagcgggtcgccgtgctaaaggggaaacagaatcaaccgcaactcaagaatctcaccatcagccaggagacgagcttccccgtgacgaggagcacgcacgagcagcatagtgagccaagtcatgcgcataacaatgacttcaatacgacgccgcagacgagagacgacgttctagatatcgcggcgctgctggaacgatcggaagatgacacgtttgagtggcttacatcggatcttgttgtggttccgttccgggagtggattagggacagtgttatggtgcagcaatctggttctgctactacgccctcacctgcttcgctgtctagccccatggttgcgcttgggccggcggtcctaagcccgaaccctggggctgttatgggtgggaatgaggcttctatggttgatcttgcgagagtccacaaggagacagtgaggttctttgagcgggagatcaagaaggatgaggatattccgattccgactatcgaggagcttagcgctgtgcttggaagtcatgctgtgctttcgcctatcacgccaagctcggcgagttggcagtttgatagaagatttgatacggggagaaatgtgacacttgccgttagcttggaggaccttgttaagaggttcgttctttcgttgctcaggattaatctgaaggctggtgggatttgggaagagtgggataggaagcttgggtattcgcgcccgattgctgttgcgttgagggtgtatcaacacttaactggtgctgagaggcagggtgcgtaggtctggttgatggtttagtgatgagtatgatttagacttgcgtctgggttgaagatatagaggaataaaatgaataatttggtgtaaagtcacgtatgaatattgcttcgaaatatagtactagtctagactgatatggtttacgaactgtaggtcgacatgtcgcgttgtccatcagatct

SEQ ID NO: 35707 - DNA, 1158 bp, Muscodor strobelii
  misc_feature: SGI cDNA ID NO. 572370
  misc_feature: Reduced expression when VOC is produced
  misc_feature: Encodes the peptide sequence at SEQ ID NO 35708
atgttgaacaagattgcttccaccgccgctgtggtgttggctgcctcgcaaatcgtctctgcccagacacacactgactgtgatcccaggaagaagtcttgccccaatgacccggctgttggcattgagaaccctgtgaccatcgatttcaccaagggtgaaagcgacttcttcgctgccgctgacggaactaccattaaatacactgataagggtgccgagttcgccatcaacaaggccaccgatgcccctacggctaccagcaccaagtacattttcttcggccgtgtggacctcgacgtacttgtcgctcctggcgctggtctcgtgactagcttggttcttgagtctgacgatcttgatgagatcgactacgagtggattggcaacgatttcaagagtgtccagacgaactatttcggcaagggtgatgacagtacctttgaccgaggtggctattctcctgccgccaatgctcagaccgagcttcacacctacaccattgactggactaaggaacgtattgagtggtctgtcgatggtgccgttgtccgcacgctgaagtacgaggatgctcagggcggctctcgctatcctcagactccttgcaaggtcaagatcggtacttgggacgctggtgctcccaactcccccaatggtactgctgagtgggctggtggccgcaccgatttctctcaagctccttttgttgcctactacaagacgatgaaggtggtcgattatgccaacggtgtaacgggcgccaaggagtatgagtggaagtctggctctgacggctcataccagagcatcattgtcaagaccactggtggcgatgagtcttctgacgattcctctaccactagcgccagcaaaaccacctctgccagcaagacgactactgctaaggctaccaccactgctgtctccaccacgctgaagggtcacgaagttagcaccactttgtccaccggcaccagctccggtgctgcctctgtcacttccgcgccctcttctggtgatggaagctcttccggatctcccacatcctccagtgcctccggttccacttctcctacacccactggtgctgctttcaaggccgggtttaacggtgctttggttggcgccggtctcctggctgctctcgccttgtag

SEQ ID NO: 35708 - protein, 385 aa, Muscodor strobelii
  misc_feature: SGI Peptide ID NO. 572370
  misc_feature (53)..(226): Pfam Id: PF00722 Pfam Desc: Glycosyl hydrolases family 16
  misc_feature (13)..(293): NCBI GI: 85090875 Blast Desc: NCU05974 [Neurospora crassa OR74A] gi|28920004|gb|EAA29391.1| NCU05974 [Neurospora crassa OR74A]
  misc_feature (1)..(333): NCBI GI: 47078047 Blast Desc: ice nucleation protein [Fusarium acuminatum]
  misc_feature (11)..(328): NCBI GI: 46134299 Blast Desc: FG09289.1 [Gibberella zeae PH-1]
  misc_feature (5)..(298): NCBI GI: 42742375 Blast Desc: allergen rAsp f9-like protein [Verticillium dahliae]
  misc_feature (1)..(271): NCBI GI: 256727720 Blast Desc: NECHADRAFT_28207 [Nectria haematococca mpVI 77-13-4]
  misc_feature (5)..(298): NCBI GI: 261359616 Blast Desc: ice nucleation protein [Verticillium albo-atrum VaMs.102]
  misc_feature (1)..(271): NCBI GI: 256727252 Blast Desc: NECHADRAFT_66036 [Nectria haematococca mpVI 77-13-4]
  misc_feature (1)..(283): NCBI GI: 84795041 Blast Desc: cell wall glucanosyltransferase Mwg1 [Metarhizium anisopliae] gi|84795043|gb|ABC65825.1| cell wall glucanosyltransferase Mwg1 [Metarhizium anisopliae]
  misc_feature (1)..(270): NCBI GI: 46122759 Blast Desc: FG05757.1 [Gibberella zeae PH-1]
  misc_feature (1)..(385): NCBI GI: 39974523 Blast Desc: conserved [Magnaporthe grisea 70-15] gi|58257389|gb|AAW69316.1| [Magnaporthe grisea] gi|145018505|gb|EDK02784.1| conserved [Magnaporthe grisea 70-15]
  misc_feature: Useful for introducing or modulating the production of volatile compounds
MLNKIASTAAVVLAASQIVSAQTHTDCDPRKKSCPNDPAVGIENPVTIDFTKGESDFFAAADGTTIKYTDKGAEFAINKATDAPTATSTKYIFFGRVDLDVLVAPGAGLVTSLVLESDDLDEIDYEWIGNDFKSVQTNYFGKGDDSTFDRGGYSPAANAQTELHTYTIDWTKERIEWSVDGAVVRTLKYEDAQGGSRYPQTPCKVKIGTWDAGAPNSPNGTAEWAGGRTDFSQAPFVAYYKTMKVVDYANGVTGAKEYEWKSGSDGSYQSIIVKTTGGDESSDDSSTTSASKTTSASKTTTAKATTTAVSTTLKGHEVSTTLSTGTSSGAASVTSAPSSGDGSSSGSPTSSSASGSTSPTPTGAAFKAGFNGALVGAGLLAALAL

SEQ ID NO: 35709 - DNA, 2103 bp, Muscodor strobelii
  misc_feature: SGI EST ID NO. CUFF.85368.0
  misc_feature: Variant of the nucleotide sequence at SEQ ID NO 35707
ccttttcctaatagagaaagcgaccggggcctagacgatcgggcgtttccatgagccctgaacgtccatgacaataaaactcagctgggatctccgtcctcctttccgtccttccccctctgctacgactgtttacatcttcttgccttttgtatacgaccatctttgccttattaatactaattcatcacactcgctcagagcatattgcctgcccaccatctacactacttcactcgcttcatagtagttgtatctgttgtttgtctctcgctaaaaacgaacagaaacaccgcattccagtttcacattcttaagcccatctcatcacatcgtagatctattgctttcttgaacattctcatcacacacaacaagatgttgaacaagattgcttccaccgccgctgtggtgttggctgcctcgcaaatcgtctctgcccagacacacactgactgtgatcccaggaagaagtcttgccccaatgacccggctgttggcattgagaaccctgtgaccatcgatttcaccaagggtgaaagcgacttcttcgctgccgctgacggaactaccattaaatacactgataagggtgccgagttcgccatcaacaaggccaccgatgcccctacggctaccagcaccaagtacattttcttcggccgtgtggacctcgacgtacttgtcgctcctggcgctggtctcgtgactagcttggttcttgagtctgacgatcttgatgagatcgactacgagtggattggcaacgatttcaagagtgtccagacgaactatttcggcaagggtgatgacagtacctttgaccgaggtggctattctcctgccgccaatgctcagaccgagcttcacacctacaccattgactggactaaggaacgtattgagtggtctgtcgatggtgccgttgtccgcacgctgaagtacgaggatgctcagggcggctctcgctatcctcagactccttgcaaggtcaagatcggtacttgggacgctggtgctcccaactcccccaatggtactgctgagtgggctggtggccgcaccgatttctctcaagctccttttgttgcctactacaagacgatgaaggtggtcgattatgccaacggtgtaacgggcgccaaggagtatgagtggaagtctggctctgacggctcataccagagcatcattgtcaagaccactggtggcgatgagtcttctgacgattcctctaccactagcgccagcaaaaccacctctgccagcaagacgactactgctaaggctaccaccactgctgtctccaccacgctgaagggtcacgaagttagcaccactttgtccaccggcaccagctccggtgctgcctctgtcacttccgcgccctcttctggtgatggaagctcttccggatctcccacatcctccagtgcctccggttccacttctcctacacccactggtgctgctttcaaggccgggtttaacggtgctttggttggcgccggtctcctggctgctctcgccttgtagatgactgcacctgtctccacacgtccgtaaaatcaatctggcttcgctacccgaaatctattttattctggacaattcaccgccgtttcgaccggatgttgcacagctttgcataaataaggtggcgatatggattggatgtttcttggaattagcgtatagcatctttcataatacaggtttagcggccttgccagcaaacgacaggggcttgatgcctagcgaaaagataaaggagtatttggtgcttcaagatcaaattttggaaactggcgaattgggacttcttgttttatgaatgcatgtacaaagtgaatgttggggatgatcatcgggggctcagttgcaattagcaaaccatcgatagaacggttctagagaattatatagcttatccgtcaagatcaaatgtccttgtgaagtttgacacaacagcaattttactatccacttggcaagtcttggtcgagaatatcattcaacttctattgtgacgcgctgctttaaaggctgcgggctgataaacacagcgtcatagcgtcttgctcccaattcgaattccgtgcg

SEQ ID NO: 35710 - DNA, 2187 bp, Muscodor strobelii
  misc_feature: SGI cDNA ID NO. 572371
  misc_feature: Elevated expression when VOC is produced
  misc_feature: Encodes the peptide sequence at SEQ ID NO 35711
atgaagtcgaccttctcgtctttggcgcttctcagcgctctggctccggctattcaggcccagcctctcgcctctccccccgaccagtatggtattgacttgaccttcccccgtattcctgttcagaacgatttcccccagacttcggatcttattctgcccaatgtcaagccagctaaggactcgtacgagtacgttgtcattggttctggtcccggtggctctcctcttgctgccaagctcgctcaagctggctacgatgtcttgttgatcgatgccggtggtgactatggtcacttgcgagaggtcgagtctccggctctggccaacccttcttccgagagaaccaacgtctcttgggtctacttcactcaccactacgaggatatcgagatggccaagaaggaccgcaagctcacctacttgactcctgataaccagtactactctggtaccaaccctcctgagggatctactatgcttggtaactggtaccccagatatggtggtctcggtggctgctctgagcacaatgctcttgttggtctcatgcccagcaagtctgactgggacaatattgccgagctcaccggcgatgactcctggctcaacgacaatatgagacagtggttcgtcgagatggagaagcttgagtaccccgtccctggtgatgacaccaccggtcacggcaccaatggttacattgacatggccgtcaacccacttgccatcgctgctcaagacatcaagattatgtctgctgtctccggtgctgccaaggctttcggtgtctccaccgacgccctcaacgccgctatcgaggagaccctcgatgccacccgcagcaacagcattgatgctactggcttgatcccgctgaactacactgagggtcttaccgacgcgctctctcagaccctcatgtgggacgctaacaccaacgctcccgaccgtgatcttatcaactacttcggtatcttgccccagaccatggacaacgtcctctaccgtcgttcgtctcctcgtgaccttgtgtacaatgtcgccactgccaagaacgctgatggctctaagaagtacaagcttgacgttgccttgaacactctcgccaccaaggtcaacttcgacaccactggtgacgttcccaaggccaacggtgttgagtatctgttcggagagtccctgtaccgtgctgatgagcgtgccagccgcaccgaagatggtggtgagcccggctccgtcaaggttaccaaggaagttatcgttgctggtggtgcctacaactctccccagatcctgaagctctctggtgttggtgccaaggaagagcttgagcaatttgatattcccgtcgttgtcgatctccctggtgtcggtaccaacttgcaggatcgtattgagactgccgtcggcgctgattatcctagcaacttcacccgtatcctcgaatgctactacctcgctgccggtgttggtgaggatccttgctggacccagtatgtcgatcccaagaacgtcggtgctgagaagggtacatacgcttccaacggtgtcgtcttcggtgctttctggccctctagcttctccgagactggtgaacaggatctctggattggaggcttccccgcccagttcaacggtttctatcctggttactctgccaactccgccagcgttcagtacaagaaccactggtcgtggcttgttcttaaggcacacaccagaaaccgtgccggtaccgtcaagctgcttagcgccaaccctcgtgacacccctaacatcaccttccacaacatgtacgagggtatgactaaggaggatgctgataaggatgtcggtgctatggttgagggtatgaagatggcattcagcttctttgacaacgttcccgatatccagggcactcctactcgctactggcctccccccaacatgactcaaaccgacgagcagatcgccgagtgggtcaaggaggaggcttggggacatcacgcctcttgctccaaccctatcggtgctgatgacaacccaatggctgtgctcgacagcaagctccgcgtccgtggaactgagggtcttcgtgtcgtcgatgcttccgtcttccccgttatcccaggtaccttccctgttgccccgatcatgatgatctccaacaaggtcgccgccgacattatcgctggcaattaa

SEQ ID NO: 35711 - protein, 728 aa, Muscodor strobelii
  misc_feature: SGI Peptide ID NO. 572371
  misc_feature (565)..(720): Pfam Id: PF05199 Pfam Desc: GMC oxidoreductase
  misc_feature (63)..(480): Pfam Id: PF00732 Pfam Desc: GMC oxidoreductase
  misc_feature (649)..(720): Pfam Id: PF05199 Pfam Desc: GMC oxidoreductase
  misc_feature (418)..(480): Pfam Id: PF00732 Pfam Desc: GMC oxidoreductase
  misc_feature (64)..(101): Pfam Id: PF07992 Pfam Desc: Pyridine nucleotide-disulphide oxidoreductase
  misc_feature (61)..(726): NCBI GI: 154321511 Blast Desc: BC1G_01630 [Botryotinia fuckeliana B05.10] gi|150852168|gb|EDN27360.1| BC1G_01630 [Botryotinia fuckeliana B05.10]
  misc_feature (61)..(725): NCBI GI: 240275508 Blast Desc: GMC oxidoreductase [Ajellomyces capsulatus H143]
  misc_feature (61)..(725): NCBI GI: 225561900 Blast Desc: glucose-methanol-choline oxidoreductase [Ajellomyces capsulatus G186AR]
  misc_feature (61)..(725): NCBI GI: 261197980 Blast Desc: choline dehydrogenase [Ajellomyces dermatitidis SLH14081] gi|239595355|gb|EEQ77936.1| choline dehydrogenase [Ajellomyces dermatitidis SLH14081]
  misc_feature (61)..(725): NCBI GI: 239607795 Blast Desc: choline dehydrogenase [Ajellomyces dermatitidis ER-3]
  misc_feature (39)..(727): NCBI GI: 261352468 Blast Desc: alcohol dehydrogenase [Verticillium albo-atrum VaMs.102]
  misc_feature (63)..(728): NCBI GI: 226290978 Blast Desc: choline dehydrogenase [Paracoccidioides brasiliensis Pb18]
  misc_feature (63)..(725): NCBI GI: 225679266 Blast Desc: choline dehydrogenase [Paracoccidioides brasiliensis Pb03]
  misc_feature (63)..(725): NCBI GI: 226278146 Blast Desc: choline dehydrogenase [Paracoccidioides brasiliensis Pb01]
  misc_feature (63)..(726): NCBI GI: 242791737 Blast Desc: choline dehydrogenase, [Talaromyces stipitatus ATCC 10500] gi|218718402|gb|EED17822.1| choline dehydrogenase, [Talaromyces stipitatus ATCC 10500]
  misc_feature (63)..(724): SWISSPROT Homolog: EC 1.1.99.1 Choline dehydrogenase
  misc_feature: Useful for introducing or modulating the production of volatile compounds
MKSTFSSLALLSALAPAIQAQPLASPPDQYGIDLTFPRIPVQNDFPQTSDLILPNVKPAKDSYEYVVIGSGPGGSPLAAKLAQAGYDVLLIDAGGDYGHLREVESPALANPSSERTNVSWVYFTHHYEDIEMAKKDRKLTYLTPDNQYYSGTNPPEGSTMLGNWYPRYGGLGGCSEHNALVGLMPSKSDWDNIAELTGDDSWLNDNMRQWFVEMEKLEYPVPGDDTTGHGTNGYIDMAVNPLAIAAQDIKIMSAVSGAAKAFGVSTDALNAAIEETLDATRSNSIDATGLIPLNYTEGLTDALSQTLMWDANTNAPDRDLINYFGILPQTMDNVLYRRSSPRDLVYNVATAKNADGSKKYKLDVALNTLATKVNFDTTGDVPKANGVEYLFGESLYRADERASRTEDGGEPGSVKVTKEVIVAGGAYNSPQILKLSGVGAKEELEQFDIPVVVDLPGVGTNLQDRIETAVGADYPSNFTRILECYYLAAGVGEDPCWTQYVDPKNVGAEKGTYASNGVVFGAFWPSSFSETGEQDLWIGGFPAQFNGFYPGYSANSASVQYKNHWSWLVLKAHTRNRAGTVKLLSANPRDTPNITFHNMYEGMTKEDADKDVGAMVEGMKMAFSFFDNVPDIQGTPTRYWPPPNMTQTDEQIAEWVKEEAWGHHASCSNPIGADDNPMAVLDSKLRVRGTEGLRVVDASVFPVIPGTFPVAPIMMISNKVAADIIAGN

SEQ ID NO: 35712 - DNA, 2994 bp, Muscodor strobelii
  misc_feature: SGI EST ID NO. CUFF.85180.0
  misc_feature: Variant of the nucleotide sequence at SEQ ID NO 35710
cgagcctcaatgtgttgagaagagcgcctgtatataagtcttgagatcagcctcgagtcttggtactagaattttgatatcctcatcctcctcttctatactcttcttccatacaggctagagtagccttttatactctcctgtcttctttcattgttctttttcgtttctcgcgaaacccacatctctaagttttagtttgcttgagattttgttattcattcactgtcgcgacacaatgaagtcgaccttctcgtctttggcgcttctcagcgctctggctccggctattcaggcccagcctctcgcctctccccccgaccagtatggtattgacttgaccttcccccgtattcctgttcagaacgatttcccccagacttcggatcttattctgcccaatgtcaagccagctaaggactcgtacgagtacgttgtcattggttctggtcccggtggctctcctcttgctgccaagctcgctcaagctggctacgatgtcttgttgatcgatgccggtggtgactatggtcacttgcgagaggtcgagtctccggctctggccaacccttcttccgagagaaccaacgtctcttgggtctacttcactcaccactacgaggatatcgagatggccaagaaggaccgcaagctcacctacttgactcctgataaccagtactactctggtaccaaccctcctgagggatctactatgcttggtaactggtaccccagatatggtggtctcggtggctgctctgagcacaatgctcttgttggtctcatgcccagcaagtctgactgggacaatattgccgagctcaccggcgatgactcctggctcaacgacaatatgagacagtggttcgtcgagatggagaagcttgagtaccccgtccctggtgatgacaccaccggtcacggcaccaatggttacattgacatggccgtcaacccacttgccatcgctgctcaagacatcaagattatgtctgctgtctccggtgctgccaaggctttcggtgtctccaccgacgccctcaacgccgctatcgaggagaccctcgatgccacccgcagcaacagcattgatgctactggcttgatcccgctgaactacactgagggtcttaccgacgcgctctctcagaccctcatgtgggacgctaacaccaacgctcccgaccgtgatcttatcaactacttcggtatcttgccccagaccatggacaacgtcctctaccgtcgttcgtctcctcgtgaccttgtgtacaatgtcgccactgccaagaacgctgatggctctaagaagtacaagcttgacgttgccttgaacactctcgccaccaaggtcaacttcgacaccactggtgacgttcccaaggccaacggtgttgagtatctgttcggagagtccctgtaccgtgctgatgagcgtgccagccgcaccgaagatggtggtgagcccggctccgtcaaggttaccaaggaagttatcgttgctggtggtgcctacaactctccccagatcctgaagctctctggtgttggtgccaaggaagagcttgagcaatttgatattcccgtcgttgtcgatctccctggtgtcggtaccaacttgcaggatcgtattgagactgccgtcggcgctgattatcctagcaacttcacccgtatcctcgaatgctactacctcgctgccggtgttggtgaggatccttgctggacccagtatgtcgatcccaagaacgtcggtgctgagaagggtacatacgcttccaacggtgtcgtcttcggtgctttctggccctctagcttctccgagactggtgaacaggatctctggattggaggcttccccgcccagttcaacggtttctatcctggttactctgccaactccgccagcgttcagtacaagaaccactggtcgtggcttgttcttaaggcacacaccagaaaccgtgccggtaccgtcaagctgcttagcgccaaccctcgtgacacccctaacatcaccttccacaacatgtacgagggtatgactaaggaggatgctgataaggatgtcggtgctatggttgagggtatgaagatggcattcagcttctttgacaacgttcccgatatccagggcactcctactcgctactggcctccccccaacatgactcaaaccgacgagcagatcgccgagtgggtcaaggaggaggcttggggacatcacgcctcttgctccaaccctatcggtgctgatgacaacccaatggctgtgctcgacagcaagctccgcgtccgtggaactgagggtcttcgtgtcgtcgatgcttccgtcttccccgttatcccaggtaccttccctgttgccccgatcatgatgatctccaacaaggtcgccgccgacattatcgctggcaattaattggagatgggggacgcaaaataatagtgaagatttggattgacgtttctacgataccccacactggacagaagactggaaaatatgtcactatttggatagaaacgagcgaccaaggctcaacatctcattggatattttcattgtatatattgcttggtaattctcaacttgagagaacatattgatactgcatttacgaggatagcactggttatgatactacttttgagcgcagaatagaatgaatattttgaaaattctagccgccgacttgtcctgttcattctggaccgtcgcgtgcttgcctggtgctcgaaccatcgtagaatttacgaaatagcggccaagactattttccagtaccgcgtctgttcgactattgttctatcgctcgcctaccgaacaagagagaacagggtgcacttacacttcgtggacctagagttgcagaccctggtcgttcccttgcatgtggatccaccaaacacactgatcggtaatttctccccgactgcttcgcgacctacgacggaaacccatgtcagcgtgctactgtgcactccacg

SEQ ID NO: 35713 - DNA, 1461 bp, Muscodor strobelii
  misc_feature: SGI cDNA ID NO. 572372
  misc_feature: Encodes the peptide sequence at SEQ ID NO 35714
atggctgggatcacaagtgacgatcaaccacacattggtattgttggggcgggagtgtctggacttcgttgtgccgatattctcctatcgcacggcttcaaggttaccattctcgaagctagagatcggattggcggtagaatatgtcaatctaatgagttgggctacacggtcgatattggaccaaattggattcacacatgggatagtgatggggttcatccgatctggaatcttgcgcaagcgtcagggactcccgttcatttctggaacgcaaagcagttaatctatgatcccacgggtctgccgttgccggaccagaaagcagacactctttcgactcttctctgggagatcatcaacgaggctttcgtaattagtgcagccgccaaggaccaagatggaagcaaaagtattccaagcgacgactcgttgtatgattttgtcaagaggagagccgaagaaaaggtagcggatgaaaatgacagaagactcttgatccaaatgagtgagatgtggggcgcatacgtaggtgaacctatatggaaacaaagcttgagatttgcttggatggaggaatgctgcggaggagaggaaatgttcgtcgagtctaattacgcagcaatcttgagtatgatagctgaacacgctaaggagaaggccgaaatcatcttgagagcggaggttgtccgaattcgtacgtgcgaacacagagcagcaggtcagaaagtcgaagtgacaaccagctctgatcgccagcatcgatttgacgaagtggttgtgacgacaccgctcgggtggctccagaagaacctcgcatgcttcgagccacgtctgcccccaagaacaagctcggcaatcaacaacttgaagttatctcagcttgaaaaggtttttatcacctttcctacagctttttggattgcggactctgcaagagatgactttcctagctatacgaactggctcgcaccgacttacgcaatggatacgaatcccaaatcatggcctcaagaagtttggaatttagcatcttttgctagtcccaaccgtcaccctacacttctcttctatctgtacggagattgctcgcggtacattgtcaacaacatatatagcaagccgaaggaggagagacacaagtttctcagggactttttctatccatattattctcgtcttcccggtttcaatgccgcgcatacagcctgcgagcctagagcgatactagccacagaatggctcaaagacgagttttgtggaaatgggagttattgcaacttccaagttgggatcgaagaagctgataaagacgtagaggctctccgggatgggtgtcccgagcggaggttgtggttctgtggtgaacacgccgctccgttcgaagaatgtgggacagtcgcaggtgcgtatctctctggggatactgctgggaagaatattatttcgctatataaataa

SEQ ID NO: 35714 - protein, 486 aa, Muscodor strobelii
  misc_feature: SGI Peptide ID NO. 572372
  misc_feature (19)..(482): Pfam Id: PF01593 Pfam Desc: Flavin containing amine oxidoreductase
  misc_feature (19)..(307): Pfam Id: PF01593 Pfam Desc: Flavin containing amine oxidoreductase
  misc_feature (11)..(46): Pfam Id: PF01266 Pfam Desc: FAD dependent oxidoreductase
  misc_feature (11)..(47): Pfam Id: PF00070 Pfam Desc: Pyridine nucleotide-disulphide oxidoreductase
  misc_feature (61)..(485): NCBI GI: 261358734 Blast Desc: conserved [Verticillium albo-atrum VaMs.102]
  misc_feature (10)..(485): NCBI GI: 189207957 Blast Desc: amine oxidase [Pyrenophora tritici-repentis Pt-1C-BFP] gi|187976405|gb|EDU43031.1| amine oxidase [Pyrenophora tritici-repentis Pt-1C-BFP]
  misc_feature (10)..(485): NCBI GI: 154304869 Blast Desc: BC1G_09020 [Botryotinia fuckeliana B05.10] gi|150853882|gb|EDN29074.1| BC1G_09020 [Botryotinia fuckeliana B05.10]
  misc_feature (10)..(481): NCBI GI: 225683715 Blast Desc: conserved [Paracoccidioides brasiliensis Pb03]
  misc_feature (5)..(481): NCBI GI: 226277798 Blast Desc: conserved [Paracoccidioides brasiliensis Pb01]
  misc_feature (9)..(485): NCBI GI: 46137537 Blast Desc: FG10284.1 [Gibberella zeae PH-1]
  misc_feature (5)..(481): NCBI GI: 261190542 Blast Desc: flavin containing amine oxidase [Ajellomyces dermatitidis SLH14081] gi|239591103|gb|EEQ73684.1| flavin containing amine oxidase [Ajellomyces dermatitidis SLH14081]
  misc_feature (5)..(481): NCBI GI: 239614793 Blast Desc: flavin containing amine oxidase [Ajellomyces dermatitidis ER-3]
  misc_feature (10)..(481): NCBI GI: 225561187 Blast Desc: conserved [Ajellomyces capsulatus G186AR]
  misc_feature (5)..(481): NCBI GI: 154277340 Blast Desc: [Ajellomyces capsulatus NAm1] gi|150413096|gb|EDN08479.1| [Ajellomyces capsulatus NAm1]
  misc_feature (10)..(307): SWISSPROT Homolog: EC 1.5.3.11 Polyamine oxidase
MAGITSDDQPHIGIVGAGVSGLRCADILLSHGFKVTILEARDRIGGRICQSNELGYTVDIGPNWIHTWDSDGVHPIWNLAQASGTPVHFWNAKQLIYDPTGLPLPDQKADTLSTLLWEIINEAFVISAAAKDQDGSKSIPSDDSLYDFVKRRAEEKVADENDRRLLIQMSEMWGAYVGEPIWKQSLRFAWMEECCGGEEMFVESNYAAILSMIAEHAKEKAEIILRAEVVRIRTCEHRAAGQKVEVTTSSDRQHRFDEVVVTTPLGWLQKNLACFEPRLPPRTSSAINNLKLSQLEKVFITFPTAFWIADSARDDFPSYTNWLAPTYAMDTNPKSWPQEVWNLASFASPNRHPTLLFYLYGDCSRYIVNNIYSKPKEERHKFLRDFFYPYYSRLPGFNAAHTACEPRAILATEWLKDEFCGNGSYCNFQVGIEEADKDVEALRDGCPERRLWFCGEHAAPFEECGTVAGAYLSGDTAGKNIISLYK

SEQ ID NO: 35715 - DNA, 2508 bp, Muscodor strobelii
  misc_feature: SGI EST ID NO. CUFF.85060.1
  misc_feature: Variant of the nucleotide sequence at SEQ ID NO 35713
ctataactcattgcgcgtagtgtgctaatgattatcagttgaatagcatgtccctgggcttaagtttatgcgaagtcctaatatcaatgccattctaatgttaggaaaagctttctaagaatttttcttcctcgacatcaatgaatctcaagtcaaaagcgtgagtttacaacgtatgctccacgtagcgacgcttgtttcgtcggtggcaggtcgtttcatgacctgtatacccgtggccatgatgggagatagcatcatcgcatgcatgtaaagacgtgcaccaagataaacatccggtactgatcggggcgttgcagacattctaagatgtaagctaattgatacacggattctcctcacgcagcagagatggcagcatccagtgagactttctccacatgcgacggttggggggaggtcttgcacggcggtgcatgccagctgacgaacaccatgcagcaccacccatgctctaagtaatcgagctgaagacatttctcgttgaaaccaatgagatgggccgactctcatgccactgcctacatacggctgctcttgagccaatccgccttggatgatagcccttggagatctgcggaagtctcgttgtcggtctgcgagttgcatatatgagcgattggttccgtatcagatcaccgccgccggagaactacgatatttatagagaattgagagcagcttcaattatatgctgattattctggatattgaggtttttgatccgattacatgctaatggctgggatcacaagtgacgatcaaccacacattggtattgttggggcgggagtgtctggacttcgttgtgccgatattctcctatcgcacggcttcaaggttaccattctcgaagctagagatcggattggcggtagaatatgtcaatctaatgagttgggctacacggtcgatattggaccaaattggattcacacatgggatagtgatggggttcatccgatctggaatcttgcgcaagcgtcagggactcccgttcatttctggaacgcaaagcagttaatctatgatcccacgggtctgccgttgccggaccagaaagcagacactctttcgactcttctctgggagatcatcaacgaggctttcgtaattagtgcagccgccaaggaccaagatggaagcaaaagtattccaagcgacgactcgttgtatgattttgtcaagaggagagccgaagaaaaggtagcggatgaaaatgacagaagactcttgatccaaatgagtgagatgtggggcgcatacgtaggtgaacctatatggaaacaaagcttgagatttgcttggatggaggaatgctgcggaggagaggaaatgttcgtcgagtctaattacgcagcaatcttgagtatgatagctgaacacgctaaggagaaggccgaaatcatcttgagagcggaggttgtccgaattcgtacgtgcgaacacagagcagcaggtcagaaagtcgaagtgacaaccagctctgatcgccagcatcgatttgacgaagtggttgtgacgacaccgctcgggtggctccagaagaacctcgcatgcttcgagccacgtctgcccccaagaacaagctcggcaatcaacaacttgaagttatctcagcttgaaaaggtttttatcacctttcctacagctttttggattgcggactctgcaagagatgactttcctagctatacgaactggctcgcaccgacttacgcaatggatacgaatcccaaatcatggcctcaagaagtttggaatttagcatcttttgctagtcccaaccgtcaccctacacttctcttctatctgtacggagattgctcgcggtacattgtcaacaacatatatagcaagccgaaggaggagagacacaagtttctcagggactttttctatccatattattctcgtcttcccggtttcaatgccgcgcatacagcctgcgagcctagagcgatactagccacagaatggctcaaagacgagttttgtggaaatgggagttattgcaacttccaagttgggatcgaagaagctgataaagacgtagaggctctccgggatgggtgtcccgagcggaggttgtggttctgtggtgaacacgccgctccgttcgaagaatgtgggacagtcgcaggtgcgtatctctctggggatactgctgggaagaatattatttcgctatataaataatcttcaccatgccctgaatgggagccccttgggtactgtctggctagttcccttgcctacctcctagaaagtacctgatcagcagcacgtaactttgttaccgaaaaaaccctatttcaacaaagatcttatcgtgtagaagatcatttactggcgaacgtataatcgattgctcagatgagaaggactgcaagtatattttccttcggctgtaggacataacctagagtcacgggctgaaggattgcatgtacttcgagctcttagaatataatgtgtctcttcgcg

SEQ ID NO: 35716 - DNA, 2904 bp, Muscodor strobelii
  misc_feature: SGI cDNA ID NO. 572373
  misc_feature: Encodes the peptide sequence at SEQ ID NO 35717
atgggccaaaatgcagagcttggtttcttggtaaagtccggtccccaggaccctttctttccacaagaagcagagtacaatgcagcttttcttgataccggagcatgtctctgcgcccttcagacgacaccgggcagtgacggttcagacgacaccgaagtcaacgaagaaatcagtaaaagagcgtcaggagacgggtatgctgcatggcaatgtatagggaaccaaacccaaggtgtataccaagtaacgacgggcaaatggtttaatagtctccacggaggcggcaaggttaattttccgatttacgatgcctcgaatggtccgaatacaaccactgcttacatgtggaacaataatgatgctttcgtcaaggtcgactccaagaagctttccgtttatgataatgcctgtacgggtcagaacgatacgactttctccaccgcattctacagagcgtacgagcaaaacaaagccggagaaactccagtagatgccgctccgtgttggaggccaaatgcgtatcccattgcgatacaaaacgcttctttgtgggaagatgtcggttgtctagagggatttctatgcgcaaacaacaccgtcaactcccttccgcaatactgtcctcctatcacccaatgtcaagagtcaagagtagcgggtgaggtctgcacttttaacggcactaatattggcatgggtcccttcgagcccgttgtctgtcggcaagggaattattgccccttagagaaaggtggtcgcgagatcataccgtgtcctgctggcacgtattgtcagcccggtgcctcgacaccgacgccctggacaagagagtcgcacaaatcatcgaagccaaaagggatcagcgctatctctgcgaaggccacgggttataaccagctattcgattctggcgacgatgacgcagacacagagatgataccgatggaggcaacctatatcccgggggcggatgcttggactggtttcgaagcggctcttgacctacccatacccgtgtcaacggaggatttgcatgattatgattctggtctttcgcctcaactattggcttttgtagagtctatgcgcaaggcgacggacgcgcaaacatttggattatccttcacatatacggacttgagcttccatccgaaaagcgctcaaacacctattcttcagaacgtcacggggtcaattgagagagggacactcacagctgtgatgggaggatctggtgctggaaagtcgaccttcgtcaacgtattaatgggcaagacaacgaatacaggcggatcggtcacggtcaacaatgtgccggggaaaatcaaaaagtacaaaaaacttatcggctacgtcccacaagacgatattgttcttccggaactcacagtgtttgaaaacattatgcattccgcaagaattcgactgccgcgaacttggcaggaagcagacataagagctctcgtcgactcagtcataaactgcttggagttgtcacacgtgcgaaattccatggttggaagcgtggggaaacccatcatcagcggaggacagaggaaacgagtgagcataggcatggagttagctgctgctcctatggctatcttccttgacgagcccacaagtgggttggacgctacatcagcgtcgtccatcatgcggacgttgaaggctattgcccgacttggtatttcagtcattgtcatcattcatcagcctcgcatggagattttcgagatgctggatgacctgatcttgttaggcaatggacaaatcatctatgagggcaaagagagcgaagtgcagggatttttcgagggtatcggctttcagtttcccaagcatgcgaacaacggtgatgtgatcacagacatcattacaggcaacggtcgaatatacaagagatcgggcgaagtgtcaaaggatgcactaatccgaaattgggccagctctcgccagaacgccgaactcaaggaccgccacgaatcccttcgacaacaacgcctctctatggttaaacctccgcaaatacatcgcaagttactcaaacaacgcggtgcaccacgcatcaaacaaggctggctttgtctcaagcgtgctatgcttcagcaatggcgcaccaagtctagtttctggttcgagatgggactcgcttcggtcgctggcttattgctcggattagcagaacgaagcaaagacggcattctcttcaaaggtatctataactcgccttttgaaatcttgtctgttgcaacagatgttcagtccgtgccagagctcgctctattgacagcgatcgcaattggcctcgtatcgggagcgccaggcgtcaaggtattctcagaagaaatgctcctataccgccgtgaagcagaagctggtcattcccggatttcgtatttcttagccaagaatctttccgttttgcccaggatggtatccgcctgtctacacttcacgacattcattctaatacttgccacgccaatcatcccatgggggtgggcattcctcgccaatctcctctatttctactgtatccatggattagcaagtgtcatatcgatggtggtacggagggaagatgcgccgctcttcgctactttgatcagtttgattgttggcatcctttcgggtgctgcaccaccactatcgaaagtaaaagagtggcacattgaatggctatggcgagcatcaccagcgacctggctcgctgagttctatttcggtcacatgatcgaaccattccgatatctctacgacgtcgatctagcggcacgtatcgcaggattccatctcaggaatacgatgacgaacgtgttggttttattgttgataggcactatataccgcgttcttgccttcataggccttgtaggtggcagtcgtcttcggatctga

SEQ ID NO: 35717 - protein, 967 aa, Muscodor strobelii
  misc_feature: SGI Peptide ID NO. 572373
  misc_feature (692)..(914): Pfam Id: PF01061 Pfam Desc: ABC-2 type transporter
  misc_feature (403)..(591): Pfam Id: PF00005 Pfam Desc: ABC transporter
  misc_feature (780)..(907): Pfam Id: PF01061 Pfam Desc: ABC-2 type transporter
  misc_feature (15)..(966): NCBI GI: 46121395 Blast Desc: FG05076.1 [Gibberella zeae PH-1]
  misc_feature (16)..(967): NCBI GI: 164424641 Blast Desc: NCU06946 [Neurospora crassa OR74A] gi|157070600|gb|EAA28980.2| conserved [Neurospora crassa OR74A]
  misc_feature (198)..(967): NCBI GI: 171678905 Blast Desc: protein product [Podospora anserina] gi|170937523|emb|CAP62181.1| protein product [Podospora anserina]
  misc_feature (298)..(964): NCBI GI: 154315605 Blast Desc: BC1G_04375 [Botryotinia fuckeliana B05.10] gi|150847315|gb|EDN22508.1| BC1G_04375 [Botryotinia fuckeliana B05.10]
  misc_feature (233)..(961): NCBI GI: 156060231 Blast Desc: SS1G_02254 [Sclerotinia sclerotiorum 1980] gi|154699662|gb|EDN99400.1| SS1G_02254 [Sclerotinia sclerotiorum 1980]
  misc_feature (188)..(693): NCBI GI: 261354648 Blast Desc: ATP-binding cassette sub-family G member 2 [Verticillium albo-atrum VaMs.102]
  misc_feature (373)..(952): NCBI GI: 119499225 Blast Desc: ABC transporter, [Neosartorya fischeri NRRL 181] gi|119414534|gb|EAW24473.1| ABC transporter, [Neosartorya fischeri NRRL 181]
  misc_feature (391)..(726): NCBI GI: 212544158 Blast Desc: spermidine/putrescine import ATP-binding protein potA, [Penicillium marneffei ATCC 18224] gi|210065202|gb|EEA19296.1| spermidine/putrescine import ATP-binding protein potA, marneffei
  misc_feature (153)..(960): NCBI GI: 284089213 Blast Desc: abc transporter aaa ATPase [Naegleria gruberi]
  misc_feature (177)..(960): NCBI GI: 284088030 Blast Desc: abc transporter family protein [Naegleria gruberi]
MGQNAELGFLVKSGPQDPFFPQEAEYNAAFLDTGACLCALQTTPGSDGSDDTEVNEEISKRASGDGYAAWQCIGNQTQGVYQVTTGKWFNSLHGGGKVNFPIYDASNGPNTTTAYMWNNNDAFVKVDSKKLSVYDNACTGQNDTTFSTAFYRAYEQNKAGETPVDAAPCWRPNAYPIAIQNASLWEDVGCLEGFLCANNTVNSLPQYCPPITQCQESRVAGEVCTFNGTNIGMGPFEPVVCRQGNYCPLEKGGREIIPCPAGTYCQPGASTPTPWTRESHKSSKPKGISAISAKATGYNQLFDSGDDDADTEMIPMEATYIPGADAWTGFEAALDLPIPVSTEDLHDYDSGLSPQLLAFVESMRKATDAQTFGLSFTYTDLSFHPKSAQTPILQNVTGSIERGTLTAVMGGSGAGKSTFVNVLMGKTTNTGGSVTVNNVPGKIKKYKKLIGYVPQDDIVLPELTVFENIMHSARIRLPRTWQEADIRALVDSVINCLELSHVRNSMVGSVGKPIISGGQRKRVSIGMELAAAPMAIFLDEPTSGLDATSASSIMRTLKAIARLGISVIVIIHQPRMEIFEMLDDLILLGNGQIIYEGKESEVQGFFEGIGFQFPKHANNGDVITDIITGNGRIYKRSGEVSKDALIRNWASSRQNAELKDRHESLRQQRLSMVKPPQIHRKLLKQRGAPRIKQGWLCLKRAMLQQWRTKSSFWFEMGLASVAGLLLGLAERSKDGILFKGIYNSPFEILSVATDVQSVPELALLTAIAIGLVSGAPGVKVFSEEMLLYRREAEAGHSRISYFLAKNLSVLPRMVSACLHFTTFILILATPIIPWGWAFLANLLYFYCIHGLASVISMVVRREDAPLFATLISLIVGILSGAAPPLSKVKEWHIEWLWRASPATWLAEFYFGHMIEPFRYLYDVDLAARIAGFHLRNTMTNVLVLLLIGTIYRVLAFIGLVGGSRLRI

SEQ ID NO: 35718 - DNA, 2332 bp, Muscodor strobelii
  misc_feature: SGI EST ID NO. CUFF.85077.1
  misc_feature: Variant of the nucleotide sequence at SEQ ID NO 35716
cggaatcggaagctattgcccagagaaatctgtcagacaggtcttcgtaattccaatagtattgcttatcatcatcgacaccattcttgtaatcggactggtgtggtatcttatcaaccgacgttttcgcaggacaagagagtcgcacaaatcatcgaagccaaaagggatcagcgctatctctgcgaaggccacgggttataaccagctattcgattctggcgacgatgacgcagacacagagatgataccgatggaggcaacctatatcccgggggcggatgcttggactggtttcgaagcggctcttgacctacccatacccgtgtcaacggaggatttgcatgattatgattctggtctttcgcctcaactattggcttttgtagagtctatgcgcaaggcgacggacgcgcaaacatttggattatccttcacatatacggacttgagcttccatccgaaaagcgctcaaacacctattcttcagaacgtcacggggtcaattgagagagggacactcacagctgtgatgggaggatctggtgctggaaagtcgaccttcgtcaacgtattaatgggcaagacaacgaatacaggcggatcggtcacggtcaacaatgtgccggggaaaatcaaaaagtacaaaaaacttatcggctacgtcccacaagacgatattgttcttccggaactcacagtgtttgaaaacattatgcattccgcaagaattcgactgccgcgaacttggcaggaagcagacataagagctctcgtcgactcagtcataaactgcttggagttgtcacacgtgcgaaattccatggttggaagcgtggggaaacccatcatcagcggaggacagaggaaacgagtgagcataggcatggagttagctgctgctcctatggctatcttccttgacgagcccacaagtgggttggacgctacatcagcgtcgtccatcatgcggacgttgaaggctattgcccgacttggtatttcagtcattgtcatcattcatcagcctcgcatggagattttcgagatgctggatgacctgatcttgttaggcaatggacaaatcatctatgagggcaaagagagcgaagtgcagggatttttcgagggtatcggctttcagtttcccaagcatgcgaacaacggtgatgtgatcacagacatcattacaggcaacggtcgaatatacaagagatcgggcgaagtgtcaaaggatgcactaatccgaaattgggccagctctcgccagaacgccgaactcaaggaccgccacgaatcccttcgacaacaacgcctctctatggttaaacctccgcaaatacatcgcaagttactcaaacaacgcggtgcaccacgcatcaaacaaggctggctttgtctcaagcgtgctatgcttcagcaatggcgcaccaagtctagtttctggttcgagatgggactcgcttcggtcgctggcttattgctcggattagcagaacgaagcaaagacggcattctcttcaaaggtatctataactcgccttttgaaatcttgtctgttgcaacagatgttcagtccgtgccagagctcgctctattgacagcgatcgcaattggcctcgtatcgggagcgccaggcgtcaaggtattctcagaagaaatgctcctataccgccgtgaagcagaagctggtcattcccggatttcgtatttcttagccaagaatctttccgttttgcccaggatggtatccgcctgtctacacttcacgacattcattctaatacttgccacgccaatcatcccatgggggtgggcattcctcgccaatctcctctatttctactgtatccatggattagcaagtgtcatatcgatggtggtacggagggaagatgcgccgctcttcgctactttgatcagtttgattgttggcatcctttcgggtgctgcaccaccactatcgaaagtaaaagagtggcacattgaatggctatggcgagcatcaccagcgacctggctcgctgagttctatttcggtcacatgatcgaaccattccgatatctctacgacgtcgatctagcggcacgtatcgcaggattccatctcaggaatacgatgacgaacgtgttggttttattgttgataggcactatataccgcgttcttgccttcataggccttgtaggtggcagtcgtcttcggatctgatagaaggggttcaggcgggtcattccacttctatcaaatttccatatggttagaaatagcttaatagtcatatagatggagcaaggtttacagacatattcatatcgatacccataaaac

SEQ ID NO: 35719 - DNA, 3048 bp, Muscodor strobelii
  misc_feature: SGI cDNA ID NO. 572374
  misc_feature: Encodes the peptide sequence at SEQ ID NO 35720
atgggccaaaatgcagagcttggtttcttggtaaagtccggtccccaggaccctttctttccacaagaagcagagtacaatgcagcttttcttgataccggagcatgtctctgcgcccttcagacgacaccgggcagtgacggttcagacgacaccgaagtcaacgaagaaatcagtaaaagagcgtcaggagacgggtatgctgcatggcaatgtatagggaaccaaacccaaggtgtataccaagtaacgacgggcaaatggtttaatagtctccacggaggcggcaaggttaattttccgatttacgatgcctcgaatggtccgaatacaaccactgcttacatgtggaacaataatgatgctttcgtcaaggtcgactccaagaagctttccgtttatgataatgcctgtacgggtcagaacgatacgactttctccaccgcattctacagagcgtacgagcaaaacaaagccggagaaactccagtagatgccgctccgtgttggaggccaaatgcgtatcccattgcgatacaaaacgcttctttgtgggaagatgtcggttgtctagagggatttctatgcgcaaacaacaccgtcaactcccttccgcaatactgtcctcctatcacccaatgtcaagagtcaagagtagcgggtgaggtctgcacttttaacggcactaatattggcatgggtcccttcgagcccgttgtctgtcggcaagggaattattgccccttagagaaaggtggtcgcgagatcataccgtgtcctgctggcacgtattgtcagcccggtgcctcgacaccgacgccctgtgatctaacctgcggaatcggaagctattgcccagagaaatctgtcagacaggtcttcgtaattccaatagtattgcttatcatcatcgacaccattcttgtaatcggactggtgtggtatcttatcaaccgacgttttcgcaggacaagagagtcgcacaaatcatcgaagccaaaagggatcagcgctatctctgcgaaggccacgggttataaccagctattcgattctggcgacgatgacgcagacacagagatgataccgatggaggcaacctatatcccgggggcggatgcttggactggtttcgaagcggctcttgacctacccatacccgtgtcaacggaggatttgcatgattatgattctggtctttcgcctcaactattggcttttgtagagtctatgcgcaaggcgacggacgcgcaaacatttggattatccttcacatatacggacttgagcttccatccgaaaagcgctcaaacacctattcttcagaacgtcacggggtcaattgagagagggacactcacagctgtgatgggaggatctggtgctggaaagtcgaccttcgtcaacgtattaatgggcaagacaacgaatacaggcggatcggtcacggtcaacaatgtgccggggaaaatcaaaaagtacaaaaaacttatcggctacgtcccacaagacgatattgttcttccggaactcacagtgtttgaaaacattatgcattccgcaagaattcgactgccgcgaacttggcaggaagcagacataagagctctcgtcgactcagtcataaactgcttggagttgtcacacgtgcgaaattccatggttggaagcgtggggaaacccatcatcagcggaggacagaggaaacgagtgagcataggcatggagttagctgctgctcctatggctatcttccttgacgagcccacaagtgggttggacgctacatcagcgtcgtccatcatgcggacgttgaaggctattgcccgacttggtatttcagtcattgtcatcattcatcagcctcgcatggagattttcgagatgctggatgacctgatcttgttaggcaatggacaaatcatctatgagggcaaagagagcgaagtgcagggatttttcgagggtatcggctttcagtttcccaagcatgcgaacaacggtgatgtgatcacagacatcattacaggcaacggtcgaatatacaagagatcgggcgaagtgtcaaaggatgcactaatccgaaattgggccagctctcgccagaacgccgaactcaaggaccgccacgaatcccttcgacaacaacgcctctctatggttaaacctccgcaaatacatcgcaagttactcaaacaacgcggtgcaccacgcatcaaacaaggctggctttgtctcaagcgtgctatgcttcagcaatggcgcaccaagtctagtttctggttcgagatgggactcgcttcggtcgctggcttattgctcggattagcagaacgaagcaaagacggcattctcttcaaaggtatctataactcgccttttgaaatcttgtctgttgcaacagatgttcagtccgtgccagagctcgctctattgacagcgatcgcaattggcctcgtatcgggagcgccaggcgtcaaggtattctcagaagaaatgctcctataccgccgtgaagcagaagctggtcattcccggatttcgtatttcttagccaagaatctttccgttttgcccaggatggtatccgcctgtctacacttcacgacattcattctaatacttgccacgccaatcatcccatgggggtgggcattcctcgccaatctcctctatttctactgtatccatggattagcaagtgtcatatcgatggtggtacggagggaagatgcgccgctcttcgctactttgatcagtttgattgttggcatcctttcgggtgctgcaccaccactatcgaaagtaaaagagtggcacattgaatggctatggcgagcatcaccagcgacctggctcgctgagttctatttcggtcacatgatcgaaccattccgatatctctacgacgtcgatctagcggcacgtatcgcaggattccatctcaggaatacgatgacgaacgtgttggttttattgttgataggcactatataccgcgttcttgccttcataggccttgtaggtggcagtcgtcttcggatctga

SEQ ID NO: 35720 - protein, 1015 aa, Muscodor strobelii
  misc_feature: SGI Peptide ID NO. 572374
  misc_feature (740)..(962): Pfam Id: PF01061 Pfam Desc: ABC-2 type transporter
  misc_feature (451)..(639): Pfam Id: PF00005 Pfam Desc: ABC transporter
  misc_feature (828)..(955): Pfam Id: PF01061 Pfam Desc: ABC-2 type transporter
  misc_feature (15)..(1014): NCBI GI: 46121395 Blast Desc: FG05076.1 [Gibberella zeae PH-1]
  misc_feature (16)..(1015): NCBI GI: 164424641 Blast Desc: NCU06946 [Neurospora crassa OR74A] gi|157070600|gb|EAA28980.2| conserved [Neurospora crassa OR74A]
  misc_feature (198)..(1015): NCBI GI: 171678905 Blast Desc: protein product [Podospora anserina] gi|170937523|emb|CAP62181.1| protein product [Podospora anserina]
  misc_feature (233)..(1009): NCBI GI: 156060231 Blast Desc: SS1G_02254 [Sclerotinia sclerotiorum 1980] gi|154699662|gb|EDN99400.1| SS1G_02254 [Sclerotinia sclerotiorum 1980]
  misc_feature (346)..(1012): NCBI GI: 154315605 Blast Desc: BC1G_04375 [Botryotinia fuckeliana B05.10] gi|150847315|gb|EDN22508.1| BC1G_04375 [Botryotinia fuckeliana B05.10]
  misc_feature (233)..(741): NCBI GI: 261354648 Blast Desc: ATP-binding cassette sub-family G member 2 [Verticillium albo-atrum VaMs.102]
  misc_feature (421)..(1000): NCBI GI: 119499225 Blast Desc: ABC transporter, [Neosartorya fischeri NRRL 181] gi|119414534|gb|EAW24473.1| ABC transporter, [Neosartorya fischeri NRRL 181]
  misc_feature (439)..(774): NCBI GI: 212544158 Blast Desc: spermidine/putrescine import ATP-binding protein potA, [Penicillium marneffei ATCC 18224] gi|210065202|gb|EEA19296.1| spermidine/putrescine import ATP-binding protein potA, marneffei
  misc_feature (208)..(1008): NCBI GI: 284089213 Blast Desc: abc transporter aaa ATPase [Naegleria gruberi]
  misc_feature (177)..(1008): NCBI GI: 284088030 Blast Desc: abc transporter family protein [Naegleria gruberi]
MGQNAELGFLVKSGPQDPFFPQEAEYNAAFLDTGACLCALQTTPGSDGSDDTEVNEEISKRASGDGYAAWQCIGNQTQGVYQVTTGKWFNSLHGGGKVNFPIYDASNGPNTTTAYMWNNNDAFVKVDSKKLSVYDNACTGQNDTTFSTAFYRAYEQNKAGETPVDAAPCWRPNAYPIAIQNASLWEDVGCLEGFLCANNTVNSLPQYCPPITQCQESRVAGEVCTFNGTNIGMGPFEPVVCRQGNYCPLEKGGREIIPCPAGTYCQPGASTPTPCDLTCGIGSYCPEKSVRQVFVIPIVLLIIIDTILVIGLVWYLINRRFRRTRESHKSSKPKGISAISAKATGYNQLFDSGDDDADTEMIPMEATYIPGADAWTGFEAALDLPIPVSTEDLHDYDSGLSPQLLAFVESMRKATDAQTFGLSFTYTDLSFHPKSAQTPILQNVTGSIERGTLTAVMGGSGAGKSTFVNVLMGKTTNTGGSVTVNNVPGKIKKYKKLIGYVPQDDIVLPELTVFENIMHSARIRLPRTWQEADIRALVDSVINCLELSHVRNSMVGSVGKPIISGGQRKRVSIGMELAAAPMAIFLDEPTSGLDATSASSIMRTLKAIARLGISVIVIIHQPRMEIFEMLDDLILLGNGQIIYEGKESEVQGFFEGIGFQFPKHANNGDVITDIITGNGRIYKRSGEVSKDALIRNWASSRQNAELKDRHESLRQQRLSMVKPPQIHRKLLKQRGAPRIKQGWLCLKRAMLQQWRTKSSFWFEMGLASVAGLLLGLAERSKDGILFKGIYNSPFEILSVATDVQSVPELALLTAIAIGLVSGAPGVKVFSEEMLLYRREAEAGHSRISYFLAKNLSVLPRMVSACLHFTTFILILATPIIPWGWAFLANLLYFYCIHGLASVISMVVRREDAPLFATLISLIVGILSGAAPPLSKVKEWHIEWLWRASPATWLAEFYFGHMIEPFRYLYDVDLAARIAGFHLRNTMTNVLVLLLIGTIYRVLAFIGLVGGSRLRI

SEQ ID NO: 35721 - DNA, 2332 bp, Muscodor strobelii; identical to SEQ ID NO: 35718
  misc_feature: SGI EST ID NO. CUFF.85077.1
  misc_feature: Variant of the nucleotide sequence at SEQ ID NO 35719

SEQ ID NO: 35722 - DNA, 1533 bp, Muscodor strobelii
  misc_feature: SGI cDNA ID NO. 572375
  misc_feature: Reduced expression when VOC is produced
  misc_feature: Encodes the peptide sequence at SEQ ID NO 35723
atgtctctgttggtgcccggactgcgcaggctgcccatcggcctgccaaatgggcagttcgtctgccggcaatgtctacaaacagggccacggcgcggcttgcaaaccgcagcgtcgacggccagctcgcccgcctcccgcatcttgcagcacctgcgacaatcgcgacaatctcgccgctccgccagcactatcaccagcaccactgccaccagcactgctaaggccaatgcctcgagacgtgcgaccgcccggccagcccggccagccctgccgacttcgttcttcagcaccaccgcccgagcggcgaactcgtctgccgcgccctccgtagctccagcggacgcgagccggcccaagagctttccccagcagagcaagaagtctgtcgcctactggctgctgggcagcgctgccagcgtcttcggcatcgtcgtcttcggcggtctcacgcgcctgaccgagtcgggcctcagcatcacggaatggaagccggtgaccggatcgctgcctccgacgtcccgcgacgactgggaggccgagttcgacaagtacagggcctcgcccgagttcaggatgctgaactccgccatggacctcgacgagttcaagaagatctactggatggagtggacgcaccgcctctggggccgcttcatcggcctctccttcgtcctgcccaccgcctatttcatcgcccgccgccgtgtcaccaagcccatggcctggaatctcgtcggcatctccgccctcatcggcttccagggcttcatcggctggtggatggtcagctccggcctgaaggatgatctgttcgccccgggctcccacccgcgcgtgagccagtaccgtctcacagcccacttggccaccgcctttgcctgctactcgtggatgttgctggccggcctcagcattctccggacacgccgcctgcatgcgaaccctagaaaagcagcccagctcctcactgctatcaagtcgcccgccctgcgcccgttcaagcgcgccttgggagtagtcacagccctggtttgcaccaccattctctccggcgcgctcgtggcgggtctcgatgccggtctcatctacaatgagttccctaagatgggagtcggcctcaccccgccctcgtcggaactgtgggacaaattctacagccgcaaacaagatggctccgatctctggtggaggaatattctggagaatcctagcttggtgcaactcaatcatcggatcctcgccacgactaccttttgctccatcattgcactgttcgcctacagtcgcacaggtcgcatcgccgccatcatgccgaaacagggtcggaagggcatgatggggctagtgcatctggcttgtctccaagtcgctctcggcatcagtacgctgatctacatcgtgcctatccccttggctgcggctcaccaggctggtgctcttgccctgcttacggggacgctcgtcttgggtcaccgattgagattgcctaggtccatgatgcgtaatatgaccagaaagatgaaaacgtaa

SEQ ID NO: 35723 - protein, 510 aa, Muscodor strobelii
  misc_feature: SGI Peptide ID NO. 572375
  misc_feature (123)..(493): Pfam Id: PF02628 Pfam Desc: Cytochrome oxidase assembly protein
  misc_feature (1)..(509): NCBI GI: 171681860 Blast Desc: protein product [Podospora anserina] gi|170940889|emb|CAP66539.1| protein product [Podospora anserina]
  misc_feature (1)..(508): NCBI GI: 39940542 Blast Desc: MGG_04969 [Magnaporthe grisea 70-15] gi|145010796|gb|EDJ95452.1| MGG_04969 [Magnaporthe grisea 70-15]
  misc_feature (2)..(509): NCBI GI: 46128765 Blast Desc: FG08760.1 [Gibberella zeae PH-1]
  misc_feature (1)..(485): NCBI GI: 116202069 Blast Desc: cytochrome c oxidase assembly protein, [Chaetomium globosum CBS 148.51] gi|88177437|gb|EAQ84905.1| cytochrome c oxidase assembly protein, [Chaetomium globosum CBS 148.51]
  misc_feature (1)..(509): NCBI GI: 256734026 Blast Desc: [Nectria haematococca mpVI 77-13-4]
  misc_feature (1)..(508): NCBI GI: 85097401 Blast Desc: NCU04817 [Neurospora crassa OR74A] gi|28921934|gb|EAA31207.1| NCU04817 [Neurospora crassa OR74A]
  misc_feature (1)..(481): NCBI GI: 261359504 Blast Desc: electron transfer protein [Verticillium albo-atrum VaMs.102]
  misc_feature (5)..(497): NCBI GI: 145243432 Blast Desc: An11g02430 [Aspergillus niger] gi|134078918|emb|CAK48309.1| protein product [Aspergillus niger]
  misc_feature (5)..(497): NCBI GI: 121699123 Blast Desc: cytochrome C oxidase assembly protein cox15 [Aspergillus clavatus NRRL 1] gi|119396060|gb|EAW06492.1| cytochrome C oxidase assembly protein cox15 [Aspergillus clavatus
  misc_feature (15)..(509): NCBI GI: 238837973 Blast Desc: cytochrome c oxidase assembly protein COX15 [Microsporum canis CBS 113480]
  misc_feature: Useful for introducing or modulating the production of volatile compounds
MSLLVPGLRRLPIGLPNGQFVCRQCLQTGPRRGLQTAASTASSPASRILQHLRQSRQSRRSASTITSTTATSTAKANASRRATARPARPALPTSFFSTTARAANSSAAPSVAPADASRPKSFPQQSKKSVAYWLLGSAASVFGIVVFGGLTRLTESGLSITEWKPVTGSLPPTSRDDWEAEFDKYRASPEFRMLNSAMDLDEFKKIYWMEWTHRLWGRFIGLSFVLPTAYFIARRRVTKPMAWNLVGISALIGFQGFIGWWMVSSGLKDDLFAPGSHPRVSQYRLTAHLATAFACYSWMLLAGLSILRTRRLHANPRKAAQLLTAIKSPALRPFKRALGVVTALVCTTILSGALVAGLDAGLIYNEFPKMGVGLTPPSSELWDKFYSRKQDGSDLWWRNILENPSLVQLNHRILATTTFCSIIALFAYSRTGRIAAIMPKQGRKGMMGLVHLACLQVALGISTLIYIVPIPLAAAHQAGALALLTGTLVLGHRLRLPRSMMRNMTRKMKT

SEQ ID NO: 35724 - DNA, 1844 bp, Muscodor strobelii
  misc_feature: SGI EST ID NO. CUFF.85089.0
  misc_feature: Variant of the nucleotide sequence at SEQ ID NO 35722
gcattgtccatctttcgcaacacaatcagcgaccgctggcagttgactctcaggctacccagcatgtctctgttggtgcccggactgcgcaggctgcccatcggcctgccaaatgggcagttcgtctgccggcaatgtctacaaacagggccacggcgcggcttgcaaaccgcagcgtcgacggccagctcgcccgcctcccgcatcttgcagcacctgcgacaatcgcgacaatctcgccgctccgccagcactatcaccagcaccactgccaccagcactgctaaggccaatgcctcgagacgtgcgaccgcccggccagcccggccagccctgccgacttcgttcttcagcaccaccgcccgagcggcgaactcgtctgccgcgccctccgtagctccagcggacgcgagccggcccaagagctttccccagcagagcaagaagtctgtcgcctactggctgctgggcagcgctgccagcgtcttcggcatcgtcgtcttcggcggtctcacgcgcctgaccgagtcgggcctcagcatcacggaatggaagccggtgaccggatcgctgcctccgacgtcccgcgacgactgggaggccgagttcgacaagtacagggcctcgcccgagttcaggatgctgaactccgccatggacctcgacgagttcaagaagatctactggatggagtggacgcaccgcctctggggccgcttcatcggcctctccttcgtcctgcccaccgcctatttcatcgcccgccgccgtgtcaccaagcccatggcctggaatctcgtcggcatctccgccctcatcggcttccagggcttcatcggctggtggatggtcagctccggcctgaaggatgatctgttcgccccgggctcccacccgcgcgtgagccagtaccgtctcacagcccacttggccaccgcctttgcctgctactcgtggatgttgctggccggcctcagcattctccggacacgccgcctgcatgcgaaccctagaaaagcagcccagctcctcactgctatcaagtcgcccgccctgcgcccgttcaagcgcgccttgggagtagtcacagccctggtttgcaccaccattctctccggcgcgctcgtggcgggtctcgatgccggtctcatctacaatgagttccctaagatgggagtcggcctcaccccgccctcgtcggaactgtgggacaaattctacagccgcaaacaagatggctccgatctctggtggaggaatattctggagaatcctagcttggtgcaactcaatcatcggatcctcgccacgactaccttttgctccatcattgcactgttcgcctacagtcgcacaggtcgcatcgccgccatcatgccgaaacagggtcggaagggcatgatggggctagtgcatctggcttgtctccaagtcgctctcggcatcagtacgctgatctacatcgtgcctatccccttggctgcggctcaccaggctggtgctcttgccctgcttacggggacgctcgtcttgggtcaccgattgagattgcctaggtccatgatgcgtaatatgaccagaaagatgaaaacgtaatgctgtatgatcgtgtatagttgtattattaagcccaagccgtcactgtactggcattacgcggagtattgttgtaaatatagcccgaaatctcacgtccacttccaccctcattatgtttttccgataagcagcatgcacacatgttaatgtgtaatagaagcaagttctctgatgtgatcatgttctgcaccaccatcaccgcggttactaccattgaagtgttacacactcaagcgatcgtccaa

SEQ ID NO: 35725 - DNA, 936 bp, Muscodor strobelii
  misc_feature: SGI cDNA ID NO. 572376
  misc_feature: Reduced expression when VOC is produced
  misc_feature: Encodes the peptide sequence at SEQ ID NO 35726
atggcgcctgcggcctcaggtctgtccaatggggcacagcctcccaatccctccagattcgatcctcggttcacccagctctgtctcgacaccatgggcccgaacgtcacaccacgaaaccgacaagttctgggtgccctcatccggcacctccacgacttctctcgggaagtggagctgaccatcgacgaatggatggccgctgtccactttgtgaacgacgtcggcaagatctacgctgagtctggcaagaccagaaatgaggcacaccgtgtttccgatattctcggactcgagacgctcgtggacgaaatcgcccacaagatcgtgtcagacacgggcagtgatcccacatcatcagccattctagggcctttctggtcacctaacgcgcccttccgtgagaatggaagcaccatcattcagaacccggcgcccaacgcccgtgtttgtctcatgcatggtgtcattacggatctggtgactggcaagcctattcccaacgccgtattcgacatttggcaagcctcgtccaacggcaagtacgatttccaggatccagacaaccagtcgcccaacaatctccgtggcaaattccgggcggacgagaacggcaaatacttcttctactgctaccacccgaccgcgtactcgctgcccacggacgggccttcctacaagttgctgcagatgatggatcgccaccccatgcgcccagcacacattcacatcatggtgacgcacccggaatacaagggctgcacgacacagctgtaccccaaggacgacccatggctggcgacggacacggtgtttgcggtcaaagacgacctcgtggtagactttgtgccgctcaagggcgacgacaaggcggagctggaactcaacttcaacgtggtgctagcgcccaaagactaccagggtaaggcgttctaa

SEQ ID NO: 35726 - protein, 311 aa, Muscodor strobelii
  misc_feature: SGI Peptide ID NO. 572376
  misc_feature (122)..(304): Pfam Id: PF00775 Pfam Desc: Dioxygenase
  misc_feature (37)..(113): Pfam Id: PF04444 Pfam Desc: Catechol dioxygenase N terminus
  misc_feature (37)..(106): Pfam Id: PF04444 Pfam Desc: Catechol dioxygenase N terminus
  misc_feature (19)..(310): NCBI GI: 85086358 Blast Desc: NCU04072 [Neurospora crassa OR74A] gi|28918781|gb|EAA28451.1| NCU04072 [Neurospora crassa OR74A]
  misc_feature (18)..(311): NCBI GI: 70720935 Blast Desc: [Epichloe festucae]
  misc_feature (4)..(308): NCBI GI: 156061267 Blast Desc: SS1G_02776 [Sclerotinia sclerotiorum 1980] gi|154700180|gb|EDN99918.1| SS1G_02776 [Sclerotinia sclerotiorum 1980]
  misc_feature (5)..(307): NCBI GI: 154319868 Blast Desc: BC1G_02415 [Botryotinia fuckeliana B05.10] gi|150856073|gb|EDN31265.1| BC1G_02415 [Botryotinia fuckeliana B05.10]
  misc_feature (2)..(303): NCBI GI: 226290263 Blast Desc: chlorocatechol 1,2-dioxygenase [Paracoccidioides brasiliensis Pb18]
  misc_feature (20)..(303): NCBI GI: 226285330 Blast Desc: conserved [Paracoccidioides brasiliensis Pb01]
  misc_feature (19)..(307): NCBI GI: 261194813 Blast Desc: catechol dioxygenase [Ajellomyces dermatitidis SLH14081] gi|239588349|gb|EEQ70992.1| catechol dioxygenase [Ajellomyces dermatitidis SLH14081]
  misc_feature (19)..(307): NCBI GI: 239613373 Blast Desc: catechol dioxygenase [Ajellomyces dermatitidis ER-3]
  misc_feature (9)..(304): NCBI GI: 225559669 Blast Desc: catechol 1,2-dioxygenase [Ajellomyces capsulatus G186AR]
  misc_feature (9)..(304): NCBI GI: 240279414 Blast Desc: hydroxyquinol 1,2-dioxygenase [Ajellomyces capsulatus H143]
  misc_feature (24)..(302): SWISSPROT Homolog: EC 1.13.11.1 Catechol 1,2-dioxygenase
  misc_feature: Useful for introducing or modulating the production of volatile compounds
MAPAASGLSNGAQPPNPSRFDPRFTQLCLDTMGPNVTPRNRQVLGALIRHLHDFSREVELTIDEWMAAVHFVNDVGKIYAESGKTRNEAHRVSDILGLETLVDEIAHKIVSDTGSDPTSSAILGPFWSPNAPFRENGSTIIQNPAPNARVCLMHGVITDLVTGKPIPNAVFDIWQASSNGKYDFQDPDNQSPNNLRGKFRADENGKYFFYCYHPTAYSLPTDGPSYKLLQMMDRHPMRPAHIHIMVTHPEYKGCTTQLYPKDDPWLATDTVFAVKDDLVVDFVPLKGDDKAELELNFNVVLAPKDYQGKAF

SEQ ID NO: 35727 - DNA, 1610 bp, Muscodor strobelii
  misc_feature: SGI EST ID NO. CUFF.85093.0
  misc_feature: Variant of the nucleotide sequence at SEQ ID NO 35725
ctgacggacaccctatcatgctccattcattgcgaatctgatgacatgaggattatggcctaggtaataggagacttagagtattgataaatatcccgcttcttcgtccagccatgtctttgcttccgcttcgctcatcctcatcgtttcctctttctagctcttcaccacgaccaccttgacttacctcggatccttcttgtgcaatccgccactgtatattacttcactacctacacgtaacgctttcgtcttcccttaaccaagacgtcgaagatggcgcctgcggcctcaggtctgtccaatggggcacagcctcccaatccctccagattcgatcctcggttcacccagctctgtctcgacaccatgggcccgaacgtcacaccacgaaaccgacaagttctgggtgccctcatccggcacctccacgacttctctcgggaagtggagctgaccatcgacgaatggatggccgctgtccactttgtgaacgacgtcggcaagatctacgctgagtctggcaagaccagaaatgaggcacaccgtgtttccgatattctcggactcgagacgctcgtggacgaaatcgcccacaagatcgtgtcagacacgggcagtgatcccacatcatcagccattctagggcctttctggtcacctaacgcgcccttccgtgagaatggaagcaccatcattcagaacccggcgcccaacgcccgtgtttgtctcatgcatggtgtcattacggatctggtgactggcaagcctattcccaacgccgtattcgacatttggcaagcctcgtccaacggcaagtacgatttccaggatccagacaaccagtcgcccaacaatctccgtggcaaattccgggcggacgagaacggcaaatacttcttctactgctaccacccgaccgcgtactcgctgcccacggacgggccttcctacaagttgctgcagatgatggatcgccaccccatgcgcccagcacacattcacatcatggtgacgcacccggaatacaagggctgcacgacacagctgtaccccaaggacgacccatggctggcgacggacacggtgtttgcggtcaaagacgacctcgtggtagactttgtgccgctcaagggcgacgacaaggcggagctggaactcaacttcaacgtggtgctagcgcccaaagactaccagggtaaggcgttctaaaacacaccttgttttagaagcgtaaaaaaataacaaagtggtggcgaaggcgtaacactgccgaaagcaaagctgtgatggcgagatcgatagtggcatgtgaggaagaatgagagatgtcgggactgtcgacgggagcatgcatatatcatttcaaggcgccaggcgaacggaagggggctacgtcgttacatttatttttttcccagcatcatcactgaacattgccatttttctgtcatgagaagatgagtattcggggtcaggatacttgaagtctgtagccaagtctggtagcttcaatctacatctaatgtgaccaaacaaattgatgagaaagcactcacgattatgagaagaagcagaaacaaacagtctccgaacaccctcgcagttca

SEQ ID NO: 35728 - DNA, 1086 bp, Muscodor strobelii
  misc_feature: SGI cDNA ID NO. 572377
  misc_feature: Encodes the peptide sequence at SEQ ID NO 35729
atgccgatccaccacttgatgatagggacctggacgccccctggggccatattcacggtggcattcgacaacgagaagttgacattagacctggtcaagcggacagagattcctcacgatgaacccatttcatggatgaccttcgaccatgcgaagaagaacatctacggggcagccatgaagaaatggtctagcttcgccgtgaagagcccaaccgacattgtccacgaagcttcccatcccatgaaccatgatccgcaagcgagcctagccacaaccaatacgcgagccatcttcctactagcagccaaacagcctccctacactgtctactgtaatccattctactcacacgcgggccacggatccgtcttttcgccatcgtcgacgggagcgttggggaagaacatacaaaacttctcgtaccaaccgaacacgggtattcacggcatggtattcgaccccacggagacatatctctactcggcagatctgaaagccaacaaactgtgggtacacaaaaaggcgccctcgggggaggtggagctcgtgggcagcgtggatgcgccggcgccgcaagatcacccgagatgggtggcgatgcacccgagcggccagtacctgtacgcactcatggaagcaggcaaccggctctgcgagtacgtgatcgatccagcgacgcacatgcccgtgtacacgcatcatgcatacccgttaatcccgccgggcatccccaagtccgacacgatgtaccggagcgatgtgtgcgtgctcagcaagtcggggagatacctgtttgcgacgagcagggccaacagcttcgagctccaggggtacatcgcggcgttccggcttcgtgattgcggatcgatcgaggagcaaatctgcctaaacccgacgccgacgagcggggggcacagcaacgcggtggcgccgtgcgactggagcgacgagtggattgcgattaccgatgaccaagaagggtggatcgagatatataggtggcgtgatgagttcctgggccgggtagcgcggtgccggatcccggagcccgggtttggtatgaacgccatctggtatgactga

SEQ ID NO: 35729 - protein, 361 aa, Muscodor strobelii
  misc_feature: SGI Peptide ID NO. 572377
  misc_feature (1)..(361): NCBI GI: 171682352 Blast Desc: protein product [Podospora anserina] gi|170941135|emb|CAP66785.1| protein product [Podospora anserina]
  misc_feature (1)..(361): NCBI GI: 85086354 Blast Desc: NCU04071 [Neurospora crassa OR74A] gi|729079|sp|P38677.3|CMLE_NEUCR RecName: Full=Carboxy-cis,cis-muconate cyclase; AltName: lactonizing
  misc_feature (1)..(361): NCBI GI: 145613830 Blast Desc: 3-carboxy-cis,cis-muconate cyclase [Magnaporthe grisea 70-15] gi|145020845|gb|EDK04974.1| 3-carboxy-cis,cis-muconate cyclase [Magnaporthe grisea 70-15]
  misc_feature (2)..(361): NCBI GI: 20663927 Blast Desc: 3-carboxy-cis,cis-muconate cyclase [Magnaporthe grisea 70-15] gi|145020845|gb|EDK04974.1| 3-carboxy-cis,cis-muconate cyclase [Magnaporthe grisea 70-15]
  misc_feature (1)..(361): NCBI GI: 46135939 Blast Desc: FG09485.1 [Gibberella zeae PH-1]
  misc_feature (1)..(361): NCBI GI: 256727684 Blast Desc: [Nectria haematococca mpVI 77-13-4]
  misc_feature (1)..(361): NCBI GI: 70720936 Blast Desc: [Epichloe festucae]
  misc_feature (1)..(361): NCBI GI: 116202715 Blast Desc: carboxy-cis,cis-muconate cyclase [Chaetomium globosum CBS 148.51] gi|88177760|gb|EAQ85228.1| carboxy-cis,cis-muconate cyclase [Chaetomium globosum CBS 148.51]
  misc_feature (1)..(361): NCBI GI: 261359564 Blast Desc: carboxy-cis,cis-muconate cyclase [Verticillium albo-atrum VaMs.102]
  misc_feature (1)..(361): NCBI GI: 169600781 Blast Desc: SNOG_03242 [Phaeosphaeria nodorum SN15] gi|111068853|gb|EAT89973.1| SNOG_03242 [Phaeosphaeria nodorum SN15]
  misc_feature (1)..(361): SWISSPROT Homolog: EC 5.5.1.5 Carboxy-cis,cis-muconate cyclase
MPIHHLMIGTWTPPGAIFTVAFDNEKLTLDLVKRTEIPHDEPISWMTFDHAKKNIYGAAMKKWSSFAVKSPTDIVHEASHPMNHDPQASLATTNTRAIFLLAAKQPPYTVYCNPFYSHAGHGSVFSPSSTGALGKNIQNFSYQPNTGIHGMVFDPTETYLYSADLKANKLWVHKKAPSGEVELVGSVDAPAPQDHPRWVAMHPSGQYLYALMEAGNRLCEYVIDPATHMPVYTHHAYPLIPPGIPKSDTMYRSDVCVLSKSGRYLFATSRANSFELQGYIAAFRLRDCGSIEEQICLNPTPTSGGHSNAVAPCDWSDEWIAITDDQEGWIEIYRWRDEFLGRVARCRIPEPGFGMNAIWYD

SEQ ID NO: 35730 - DNA, 5791 bp, Muscodor strobelii
  misc_feature: SGI EST ID NO. CUFF.85259.2
  misc_feature: Variant of the nucleotide sequence at SEQ ID NO 35728
tgatagtccacctactgcgaagcgcgtcctctacagattaggcgcggcagggaattatagaaaaaatgtcgtactgggaaaaatgacccaatgcagtctgtcaagtgcctagaggatgcgctgcaggcaaggatcaccacgttgtgtctctccgatctagacgcctactcgtcaaatcgcttaagatctggatcgaaaaggcggcgattcaagattcagcacacagactcattcactattcgtgacacccatgctttgctgggcccggtctgctcgagtagggtagaacaacggccgaaaccactgataacatcacaatcgtcgctacgaccttaccgcgctactggcagagacggttcaagaccgtgtgaaatgggttgactactgcagctggcgcagaggtgggataaaggcgcttgaaaagcgtttacccggtgaaaaggtgagaggttcgaattgacccgtccatctaccgccgcttggagccgagccgaccttgcgtgcagagctctttccccacaaactgatccggcttcatggagtcagctcataggatacgacatggcatatcattgacaattcgaccccaacacagcagaaaaaacactcctcgcaaccccatccaccacatacgtgcgtatcagccaattgaatgcaccggtaagtcacgatggaatcgtaactcctcagaccagtcgtagacttcaatcacccatgcattgtggggacgccttcggtttggatgccgttagagaaaccgtacactatctacccctccgctgagggccagccaggaaccaaaaaagagtcgagcccagaaaaagaggcaatacctcgacactgcggagtagccgcatttcgtgtgaatagttaacccgctgagctctttggcgaattctccattgaactaataatttagcatacgtcagacctggtgagataatcgactaacccagctatcaccacctccgttgcatgtttcggtctcgtcatcttttagggaggagtgtgaataccacttccttacagttcaagatgccgatccaccacttgatgatagggacctggacgccccctggggccatattcacggtggcattcgacaacgagaagttgacattagacctggtcaagcggacagagattcctcacgatgaacccatttcatggatgaccttcgaccatgcgaagaagaacatctacggggcagccatgaagaaatggtctagcttcgccgtgaagagcccaaccgacattgtccacgaagcttcccatcccatgaaccatgatccgcaagcgagcctagccacaaccaatacgcgagccatcttcctactagcagccaaacagcctccctacactgtctactgtaatccattctactcacacgcgggccacggatccgtcttttcgccatcgtcgacgggagcgttggggaagaacatacaaaacttctcgtaccaaccgaacacgggtattcacggcatggtattcgaccccacggagacatatctctactcggcagatctgaaagccaacaaactgtgggtacacaaaaaggcgccctcgggggaggtggagctcgtgggcagcgtggatgcgccggcgccgcaagatcacccgagatgggtggcgatgcacccgagcggccagtacctgtacgcactcatggaagcaggcaaccggctctgcgagtacgtgatcgatccagcgacgcacatgcccgtgtacacgcatcatgcatacccgttaatcccgccgggcatccccaagtccgacacgatgtaccggagcgatgtgtgcgtgctcagcaagtcggggagatacctgtttgcgacgagcagggccaacagcttcgagctccaggggtacatcgcggcgttccggcttcgtgattgcggatcgatcgaggagcaaatctgcctaaacccgacgccgacgagcggggggcacagcaacgcggtggcgccgtgcgactggagcgacgagtggattgcgattaccgatgaccaagaagggtggatcgagatatataggtggcgtgatgagttcctgggccgggtagcgcggtgccggatcccggagcccgggtttggtatgaacgccatctggtatgactgagggcggaacgaagctaaggtcgatacactatcctgcctaccatgatgggaaactggcaatttgtcacaattgtatgcgggatgaggtaaagaaccatcatcaatcttatgcacatatagacgcacatggatgccgcatcatatcccgaataatatctgcacatacatgtggctcacaaacacgagccttagatcgatcgtattcagacaacctcaatgtaggtactgtattggcttcgatgtctgcatgaagccaatcaagcattgcatatatatttttaacaagacactatggtcgagttaggtgcattatctcaagatactttggcgtgtctacgagttgttgggatggtgacgtgctgaattaggtagaggatgtttcggaggatgtctcatggcttctggcggggtcgtgtcgtgcacgacagcgctgatgatgatggtggggaagcttgaacctatctgcagggacaggaatgtcgggggagtatgaacacagtgcttgacccgagcttaactacctcgactacgcggtcggaagtgtcggtggtaggatgaacgggaaccaattcacactgtaggaaaataggagcttttatccggatgaggaagtgggcgggggagcttcatgacatgacacggatgatgtcagtatttcccgggtagccctcagcacagtaagagagaaggtcggatagctagagagacaagagtcgcttcgacatgctctcgacgacacggctccagcctcaagagactgcaccatccatcgcaacgtcgacgtctcgagatgggccctccgccttgcgccgcctagtgttgttgtcgtctgtttgttgtatctgtgcattgccaattgccaattgcctgtctccgtctcctgtcctgcgtcgtcggccacacagcattccagcttccgtccataccgctgtgctgcctctcgatcgactgaccactcactgtagagatcaccacgccccctttccccttgccccggcatcgtccaccaatcccaccaacgccggggagaacatgcatcgtcgcaatgcggttctcgacgctcgatacttcgtgataggcctcgctcgcctgctggccgcgcccctcgccgccgccgcccccgtccagtccctcctcgagaagtccctcctgctgtcccgcgcgcgccacggcgacgatgacgacgacgacgacgacgccggcagcgcgctgtgggtgctctacatcgtgtccatggtgctcgtgctgctggggggcgccttcgcgggcttgacgatcgcactcatgggccaggacgagatctacctgcaggtcatctcgctcgacgccgaggagccgcagcgcaagaacgccaagcgcgtccacgacctgctcaaccgcggcaagcactgggtcctcgtcaccctgctgctgtccaacgtcatcgtcaacgagaccctgcccgtcgtgctcgaccgctgcttcggcggcggcatcgcggccgtcgtcggctccaccgtcctcatcgtcatcttcggcgagatcctgccccagagcgtctgcgtccgctacggcctgcagatcggcggctacatgtccaagcccgtcctcgccctcatgtgggccatggcccccctcgcctggcccaccgccaagctgctcgactggctgctcggccaggaccacggcaccgtctacaagaagagcggcctcaagaccctcgtcaccctgcacaagtcgctcggcgaggtcgacgagcgcctcaaccaggacgaggtcaccatcatctccgccgtcctcgacctcaagcgcaagcccgtcgaggacgtcatgaccccgatggacgacgtcttcgtcatgtccgaggacaccgtgctcgacgagaagactatcgatcagatcctcgacgccggctactcccgcatccccatccaccagtccgccaaccccaccaacttcgtcggcatgctgctcgtcaagatcctcatcacctacgaccccgaggacggcaagcgcgtcagggactttgccctcgccaccctgcccgagacccgccccgagacctcctgcctcgacatcctcaacttcttccaggagggcaagtcccacatggtcctcatctccgagtaccccggcgacgatcacggagcgctgggcgtcattactttggaggacgtcatagaggagctcatcggcgaggagattatcgacgagtctgatgtctatgtggatgtccataaagccattcgccgtgctcatcccgcccccaaagctcgggctcatcgtaaagatctgatgaacaaggatgcagcagtcaaggacggcaatctcatcgacttggcagaggagggggaagagggcgaaaacggagtgggccgtcagcagcgagtttcgtctctcagcgcggcgccggaatctactctattgtctcgaagtccaaagacgacaaaactgttgatgaggcggagttcggccgaccaggatggccgaatgatacacaccacagttcctgtcaagtcaaactacgaggacatgatgaatcatttcaaacacctcggtccctcgaatccggcggcaaatccaaagagcactcgcgtctcggccgtcaaaatcaaacctggatcgactgccgcagcaacgtggcaggccaggtcaaattcggcaatcgacatccatcaccgggattcacacgacggtgccgacgaacgcacgagtctattgccaccagcgagagatggaatccaggctctacatcacagctactatggttcaccgctttctggaacagatgttgtgcagaaaccgacaattgtcacggataatggagacaacgcggacggcgcagacaccaacacgtcgcggaagaaagcaagcgcgtctagcgatgacaacatttcacccactagtactgacagcaacgaaatggatcccattggccggcggagaggatatgtgagaagtggtagtatcacggaaaacattatcgaagccggcggtgtgcgaaaggtggttctcgaggccaacagctcctcttccgaatcagaagatgacattgccgagcttgggccatccgcgaccccttcagacgcggagaacaagccgtcgaggagaaagaagaatagacgcaaggcaaagaaaggcggctcgtaatgagccttttgcaaccttgtaagtgtattcaagctgagctccgggagcaaggccgctccgagccgtggggctagtgacacttcacgttctccaagatatagtgtgcaccaaggttcgcagggtctcttcaggcggcttctcagctgcctccacgggtgcaatcgaaagcgtccaggatttcgtcatgctgaacagaggacggagacgacaccggagccggaattcagcgcagcacgtgctgagatatacgatggacaatatcttgggacaagagcgaatgccagaaggagcttattcttggaggactatacaggccatggttcggctatggcttagacgatacatgtatatttatattacaaacaagacgtttgggatatccaaaaccaagcaatacataaattctcgtcaactgacattatcctaggtcaaccctgggagtgctactctatgcatgcgaattagactatttcatcgatgtgtgagatacaaactctagctccctgcgtctcattcacccgagaggtcgaaagataattgcg

SEQ ID NO: 35731 - DNA, 2097 bp, Muscodor strobelii
  misc_feature: SGI cDNA ID NO. 572378
  misc_feature: Reduced expression when VOC is produced
  misc_feature: Encodes the peptide sequence at SEQ ID NO 35732
atgcatcgtcgcaatgcggttctcgacgctcgatacttcgtgataggcctcgctcgcctgctggccgcgcccctcgccgccgccgcccccgtccagtccctcctcgagaagtccctcctgctgtcccgcgcgcgccacggcgacgatgacgacgacgacgacgacgccggcagcgcgctgtgggtgctctacatcgtgtccatggtgctcgtgctgctggggggcgccttcgcgggcttgacgatcgcactcatgggccaggacgagatctacctgcaggtcatctcgctcgacgccgaggagccgcagcgcaagaacgccaagcgcgtccacgacctgctcaaccgcggcaagcactgggtcctcgtcaccctgctgctgtccaacgtcatcgtcaacgagaccctgcccgtcgtgctcgaccgctgcttcggcggcggcatcgcggccgtcgtcggctccaccgtcctcatcgtcatcttcggcgagatcctgccccagagcgtctgcgtccgctacggcctgcagatcggcggctacatgtccaagcccgtcctcgccctcatgtgggccatggcccccctcgcctggcccaccgccaagctgctcgactggctgctcggccaggaccacggcaccgtctacaagaagagcggcctcaagaccctcgtcaccctgcacaagtcgctcggcgaggtcgacgagcgcctcaaccaggacgaggtcaccatcatctccgccgtcctcgacctcaagcgcaagcccgtcgaggacgtcatgaccccgatggacgacgtcttcgtcatgtccgaggacaccgtgctcgacgagaagactatcgatcagatcctcgacgccggctactcccgcatccccatccaccagtccgccaaccccaccaacttcgtcggcatgctgctcgtcaagatcctcatcacctacgaccccgaggacggcaagcgcgtcagggactttgccctcgccaccctgcccgagacccgccccgagacctcctgcctcgacatcctcaacttcttccaggagggcaagtcccacatggtcctcatctccgagtaccccggcgacgatcacggagcgctgggcgtcattactttggaggacgtcatagaggagctcatcggcgaggagattatcgacgagtctgatgtctatgtggatgtccataaagccattcgccgtgctcatcccgcccccaaagctcgggctcatcgtaaagatctgatgaacaaggatgcagcagtcaaggacggcaatctcatcgacttggcagaggagggggaagagggcgaaaacggagtgggccgtcagcagcgagtttcgtctctcagcgcggcgccggaatctactctattgtctcgaagtccaaagacgacaaaactgttgatgaggcggagttcggccgaccaggatggccgaatgatacacaccacagttcctgtcaagtcaaactacgaggacatgatgaatcatttcaaacacctcggtccctcgaatccggcggcaaatccaaagagcactcgcgtctcggccgtcaaaatcaaacctggatcgactgccgcagcaacgtggcaggccaggtcaaattcggcaatcgacatccatcaccgggattcacacgacggtgccgacgaacgcacgagtctattgccaccagcgagagatggaatccaggctctacatcacagctactatggttcaccgctttctggaacagatgttgtgcagaaaccgacaattgtcacggataatggagacaacgcggacggcgcagacaccaacacgtcgcggaagaaagcaagcgcgtctagcgatgacaacatttcacccactagtactgacagcaacgaaatggatcccattggccggcggagaggatatgtgagaagtggtagtatcacggaaaacattatcgaagccggcggtgtgcgaaaggtggttctcgaggccaacagctcctcttccgaatcagaagatgacattgccgagcttgggccatccgcgaccccttcagacgcggagaacaagccgtcgaggagaaagaagaatagacgcaaggcaaagaaaggcggctcgtaa

SEQ ID NO: 35732 - protein, 698 aa, Muscodor strobelii
  misc_feature: SGI Peptide ID NO. 572378
  misc_feature (260)..(380): Pfam Id: PF00571 Pfam Desc: CBS domain pair
  misc_feature (62)..(237): Pfam Id: PF01595 Pfam Desc: Domain of function DUF21
  misc_feature (51)..(672): NCBI GI: 164426055 Blast Desc: NCU04814 [Neurospora crassa OR74A] gi|157071181|gb|EAA31204.2| conserved [Neurospora crassa OR74A]
  misc_feature (3)..(673): NCBI GI: 171681872 Blast Desc: protein product [Podospora anserina] gi|170940895|emb|CAP66545.1| protein product [Podospora anserina]
  misc_feature (11)..(659): NCBI GI: 145613860 Blast Desc: MGG_11236 [Magnaporthe grisea 70-15] gi|145020878|gb|EDK05007.1| MGG_11236 [Magnaporthe grisea 70-15]
  misc_feature (11)..(695): NCBI GI: 261359563 Blast Desc: MAM3 [Verticillium albo-atrum VaMs.102]
  misc_feature (5)..(662): NCBI GI: 154313920 Blast Desc: BC1G_04903 [Botryotinia fuckeliana B05.10] gi|150849049|gb|EDN24242.1| BC1G_04903 [Botryotinia fuckeliana B05.10]
  misc_feature (7)..(661): NCBI GI: 238487716 Blast Desc: DUF21 and CBS domain protein (Mam3), [Aspergillus flavus NRRL3357] gi|220699975|gb|EED56314.1| DUF21 and CBS domain protein (Mam3), [Aspergillus flavus NRRL3357]
  misc_feature (7)..(661): NCBI GI: 169769951 Blast Desc: [Aspergillus oryzae RIB40] gi|83767304|dbj|BAE57443.1| protein product [Aspergillus oryzae]
  misc_feature (5)..(668): NCBI GI: 116202057 Blast Desc: CHGG_08913 [Chaetomium globosum CBS 148.51] gi|88177431|gb|EAQ84899.1| CHGG_08913 [Chaetomium globosum CBS 148.51]
  misc_feature (7)..(654): NCBI GI: 145243620 Blast Desc: An11g03290 [Aspergillus niger] gi|134079010|emb|CAL00367.1| protein product [Aspergillus niger]
  misc_feature (5)..(602): NCBI GI: 156047691 Blast Desc: SS1G_09535 [Sclerotinia sclerotiorum 1980] gi|154693930|gb|EDN93668.1| SS1G_09535 [Sclerotinia sclerotiorum 1980]
  misc_feature: Useful for introducing or modulating the production of volatile compounds
MHRRNAVLDARYFVIGLARLLAAPLAAAAPVQSLLEKSLLLSRARHGDDDDDDDDAGSALWVLYIVSMVLVLLGGAFAGLTIALMGQDEIYLQVISLDAEEPQRKNAKRVHDLLNRGKHWVLVTLLLSNVIVNETLPVVLDRCFGGGIAAVVGSTVLIVIFGEILPQSVCVRYGLQIGGYMSKPVLALMWAMAPLAWPTAKLLDWLLGQDHGTVYKKSGLKTLVTLHKSLGEVDERLNQDEVTIISAVLDLKRKPVEDVMTPMDDVFVMSEDTVLDEKTIDQILDAGYSRIPIHQSANPTNFVGMLLVKILITYDPEDGKRVRDFALATLPETRPETSCLDILNFFQEGKSHMVLISEYPGDDHGALGVITLEDVIEELIGEEIIDESDVYVDVHKAIRRAHPAPKARAHRKDLMNKDAAVKDGNLIDLAEEGEEGENGVGRQQRVSSLSAAPESTLLSRSPKTTKLLMRRSSADQDGRMIHTTVPVKSNYEDMMNHFKHLGPSNPAANPKSTRVSAVKIKPGSTAAATWQARSNSAIDIHHRDSHDGADERTSLLPPARDGIQALHHSYYGSPLSGTDVVQKPTIVTDNGDNADGADTNTSRKKASASSDDNISPTSTDSNEMDPIGRRRGYVRSGSITENIIEAGGVRKVVLEANSSSSESEDDIAELGPSATPSDAENKPSRRKKNRRKAKKGGS

SEQ ID NO: 35733 - DNA, 5791 bp, Muscodor strobelii; identical to SEQ ID NO: 35730
  misc_feature: SGI EST ID NO. CUFF.85259.2
  misc_feature: Variant of the nucleotide sequence at SEQ ID NO 35731

SEQ ID NO: 35734 - DNA, 1515 bp, Muscodor strobelii
  misc_feature: SGI cDNA ID NO. 572379
  misc_feature: Reduced expression when VOC is produced
  misc_feature: Encodes the peptide sequence at SEQ ID NO 35735
atggaccaggtcggcggtgagggtccggacgaccccaaagccggacctccatctctcgacgccgccgagtatcatcacattgatccggttatcgagcaacgcgtcgtgagaaagattgatttacgtcttgtctctttggtctttgcgctttttctcgttgctttccttgaccgctccaatattggaaatgcgcagaccgctggcatgggcaaagacctcggtcttagtgacgaccagtatcagtggctcttgacgatattttatatcccctacatcgttttagagtggacggcgttattctggaaaatcgtaccgccgtttgttaccatcatccctttcattttaaactcgatcactaacttctacagacacctgtgggcctttggatgtgttctaatatggggcatcgcctcaacactacaagctgccgccttcaactggtccggcctattagctgctcgtttcttccttgcaacagcagaaacagcttttgcaccaggtgttccttatcttctctcattcttctataagagacacgaactgggcttgcgatgcggtatctacgtgtccgctgcaccacttgctactactttcgccggtgctctagcatatggtatcacctccgggcatcccaagatcgctaattggcgacttctgttcctcgtagaaggaatcccatctgtaatcttagcatttgttgcgtatagatacatgcctgattctgcggatacggcacgctttctgactgaggaggagaagcatgtggctagggctcgagccgtgcaacaaacaggccaagtgggtaaagctcgtattggtgggatcaatttgaaagagacttttgctgctctcaaagatttcaagacttggattccgccgctgatgtattttagctgcaatgtctcgtacagtagtctacctgtttcccttccagctattctggagggtctcggcttctcgtccatcaacgctcagggtctcagcgcaccaccatacttcctgtcgttcttggtctgcatttcaacgacgtggatcgcagataaaacgcagcagcgtggactcatgataatatgcctatcgctcattggcggaattggctatatcgtgctcgcaacgtgcaaaggcgtcggagccagatattttgccgtgttcctcgcgtccgctggtgttttcccttcgatcgccaatgtacttccctggactatcaacaatcagggaagcgactcaaaaagaggcgctggaattgctctgcttaatatcattgggcaggctggtcctctgctgggaacaagggtctttcctaagaaggatggaccgtattatgttaaagggatgagcatttgtgcggcgttcatgttctttaatgctcttcttgcacttacgctgaggatttatcttgcgtgggataataggaaatttgagagaagggatgcggagagaagacagggtaatagcgatgtggcgaggaggatcgggtctgaggatgagggatatggattccggaacgtgctgtag

SEQ ID NO: 35735 - protein, 504 aa, Muscodor strobelii
  misc_feature: SGI Peptide ID NO. 572379
  misc_feature (47)..(430): Pfam Id: PF07690 Pfam Desc: Major Facilitator Superfamily
  misc_feature (125)..(430): Pfam Id: PF07690 Pfam Desc: Major Facilitator Superfamily
  misc_feature (10)..(504): NCBI GI: 238487978 Blast Desc: MFS transporter, [Aspergillus flavus NRRL3357] gi|220700106|gb|EED56445.1| MFS transporter, [Aspergillus flavus NRRL3357]
  misc_feature (4)..(504): NCBI GI: 121699279 Blast Desc: MFS transporter, [Aspergillus clavatus NRRL 1] gi|119396110|gb|EAW06542.1| MFS transporter, [Aspergillus clavatus NRRL 1]
  misc_feature (27)..(504): NCBI GI: 259481496 Blast Desc: TPA: MFS transporter, (AFU_orthologue; AFUA_6G08340) [Aspergillus nidulans FGSC A4]
  misc_feature (9)..(504): NCBI GI: 145243280 Blast Desc: An11g01720 [Aspergillus niger] gi|134078847|emb|CAK45906.1| protein product [Aspergillus niger]
  misc_feature (27)..(502): NCBI GI: 189211381 Blast Desc: pantothenate transporter liz1 [Pyrenophora tritici-repentis Pt-1C-BFP] gi|187978114|gb|EDU44740.1| pantothenate transporter liz1 [Pyrenophora tritici-repentis
  misc_feature (27)..(485): NCBI GI: 67526943 Blast Desc: AN3929.2 [Aspergillus nidulans FGSC A4] gi|40740048|gb|EAA59238.1| AN3929.2 [Aspergillus nidulans FGSC A4]
  misc_feature (10)..(504): NCBI GI: 119469461 Blast Desc: MFS transporter, [Neosartorya fischeri NRRL 181] gi|119406102|gb|EAW16053.1| MFS transporter, [Neosartorya fischeri NRRL 181]
  misc_feature (10)..(504): NCBI GI: 70991749 Blast Desc: MFS transporter [Aspergillus fumigatus Af293] gi|66848356|gb|EAL88685.1| MFS transporter, [Aspergillus fumigatus Af293] gi|159124285|gb|EDP49403.1| MFS transporter,
  misc_feature (7)..(502): NCBI GI: 169599515 Blast Desc: SNOG_02577 [Phaeosphaeria nodorum SN15] gi|111068188|gb|EAT89308.1| SNOG_02577 [Phaeosphaeria nodorum SN15]
  misc_feature (6)..(504): NCBI GI: 261192332 Blast Desc: MFS transporter [Ajellomyces dermatitidis SLH14081] gi|239589448|gb|EEQ72091.1| MFS transporter [Ajellomyces dermatitidis SLH14081]
  misc_feature: Useful for introducing or modulating the production of volatile compounds
MDQVGGEGPDDPKAGPPSLDAAEYHHIDPVIEQRVVRKIDLRLVSLVFALFLVAFLDRSNIGNAQTAGMGKDLGLSDDQYQWLLTIFYIPYIVLEWTALFWKIVPPFVTIIPFILNSITNFYRHLWAFGCVLIWGIASTLQAAAFNWSGLLAARFFLATAETAFAPGVPYLLSFFYKRHELGLRCGIYVSAAPLATTFAGALAYGITSGHPKIANWRLLFLVEGIPSVILAFVAYRYMPDSADTARFLTEEEKHVARARAVQQTGQVGKARIGGINLKETFAALKDFKTWIPPLMYFSCNVSYSSLPVSLPAILEGLGFSSINAQGLSAPPYFLSFLVCISTTWIADKTQQRGLMIICLSLIGGIGYIVLATCKGVGARYFAVFLASAGVFPSIANVLPWTINNQGSDSKRGAGIALLNIIGQAGPLLGTRVFPKKDGPYYVKGMSICAAFMFFNALLALTLRIYLAWDNRKFERRDAERRQGNSDVARRIGSEDEGYGFRNVL

SEQ ID NO: 35736 - DNA, 1890 bp, Muscodor strobelii
  misc_feature: SGI EST ID NO. CUFF.85095.0
  misc_feature: Variant of the nucleotide sequence at SEQ ID NO 35734
ggcccaccgaagcttggattcggtgactcgacacaattgccggacggcatgtatgaatttgtacagggattgagaataaactgacagcggatgtggaatcgggtttttaatagcttcatatgctgcagagtatggattaacgaggtgcctcataacttggcaaggctgaagtcatccatttttctacgttgtgctgctgcgttgaatcgaacattagtaaataatccttcaattctaaattgtataatgccaatggaccaggtcggcggtgagggtccggacgaccccaaagccggacctccatctctcgacgccgccgagtatcatcacattgatccggttatcgagcaacgcgtcgtgagaaagattgatttacgtcttgtctctttggtctttgcgctttttctcgttgctttccttgaccgctccaatattggaaatgcgcagaccgctggcatgggcaaagacctcggtcttagtgacgaccagtatcagtggctcttgacgatattttatatcccctacatcgttttagagtggacggcgttattctggaaaatcgtaccgccacacctgtgggcctttggatgtgttctaatatggggcatcgcctcaacactacaagctgccgccttcaactggtccggcctattagctgctcgtttcttccttgcaacagcagaaacagcttttgcaccaggtgttccttatcttctctcattcttctataagagacacgaactgggcttgcgatgcggtatctacgtgtccgctgcaccacttgctactactttcgccggtgctctagcatatggtatcacctccgggcatcccaagatcgctaattggcgacttctgttcctcgtagaaggaatcccatctgtaatcttagcatttgttgcgtatagatacatgcctgattctgcggatacggcacgctttctgactgaggaggagaagcatgtggctagggctcgagccgtgcaacaaacaggccaagtgggtaaagctcgtattggtgggatcaatttgaaagagacttttgctgctctcaaagatttcaagacttggattccgccgctgatgtattttagctgcaatgtctcgtacagtagtctacctgtttcccttccagctattctggagggtctcggcttctcgtccatcaacgctcagggtctcagcgcaccaccatacttcctgtcgttcttggtctgcatttcaacgacgtggatcgcagataaaacgcagcagcgtggactcatgataatatgcctatcgctcattggcggaattggctatatcgtgctcgcaacgtgcaaaggcgtcggagccagatattttgccgtgttcctcgcgtccgctggtgttttcccttcgatcgccaatgtacttccctggactatcaacaatcagggaagcgactcaaaaagaggcgctggaattgctctgcttaatatcattgggcaggctggtcctctgctgggaacaagggtctttcctaagaaggatggaccgtattatgttaaagggatgagcatttgtgcggcgttcatgttctttaatgctcttcttgcacttacgctgaggatttatcttgcgtgggataataggaaatttgagagaagggatgcggagagaagacagggtaatagcgatgtggcgaggaggatcgggtctgaggatgagggatatggattccggaacgtgctgtaggggattttgcataagagtgtacgcaatgtcttgggaggcttccgagatgagctctatgagacttcagcctctcattaattatgagggactagtctatggctatcatccgtagaagagtctatggaaaatgatacttaacttacctaacgaagctagggcactggcttcaatgag

SEQ ID NO: 35737 - DNA, 1611 bp, Muscodor strobelii
  misc_feature: SGI cDNA ID NO. 572380
  misc_feature: Elevated expression when VOC is produced
  misc_feature: Encodes the peptide sequence at SEQ ID NO 35738
atgccaaagttcggctgctcgttagccatattcaacgtacgaccaaccgacgccgcaatctttcaggcttgccgcgattgggacgtggaccgggttagatacctactcgaaaatggggaggcaagcatatacgatgcagacgataagattggcggcttgcttgagcacacagtgcagggagactacaagcatttttggtatacggccgacaaagggaagatcaatcagatacgacagctagtcgagtacctcttagatttaggatgtgaccccggcggattttacggaccggtcttggaatacagattaccagctgtgttatttgcatttgatcggggttatgccacagcggtctctgccatgctctctcgaggggcagacatgcttgcatttacctcgacgcttgcaggatttctacacgacgtcaatagcagcttctcatggaagatcaatgttctacgatcaataggctactctgattggagacccgaatccattcttgatccaagcttatctaataccatcctgcatggagcgtgcgagtcaggccaaatcgaggaggtattgttcgcactggaaatcgtaggcttagaccccaacacggagggagtacacagacgcactcctctagggcatgcagcacataacaacttcttcgaggggactgtcatattgatcgagtctggtgctgacgtcaattcgggtttattttctagcaatggaacaccattgatcaggagtctctttcatttcgtgcggacgtcaaaagcggttgataccactcagtttctactgttgaatggagctgatccgctgctaaagactggttacggtgaatctgcgtgggtacacatttgggattgtgcctgtaataaggtagggatgagaccagatcgatggtcatttatcacgctagaaggcgaactatcccatctgctcttacacggtgcagatccgttcgaattattctcagacccggaggagatgattcgcggaatgtaccattcctaccacttgtacgcatcgagcttatatctaagagcaccggaaattgccagatcctggagctatgggatcagccgcaaacatgtcaatagagccccaactgaggagtggatagcgagtttcgaatattcagagcagactagattaccccctttaagtttcacatggtctacatcgggccacattcaccaagagcagacggaacaagggaatcaaagatcttatgacgaaggagcagaagggccggtgacattcttcaaaaatcaaacgcaattctttcaccacattgcttctgccgaaggacgcaagcagctctcgcgctttccgatggctttggcgctttgtgatgccttgcaatatgccgggtatcgcgcagagatggataacgaaggggatatatggtatgaatgcgaagacggcgacagatattatgacgcgagagagcatattgctaaagacgggcttgaagactggacggtgatgttatgcccaatctgtcaagacttcgacagtcatggtctaggtcacgtcctgagagaggcggacgaagcgaagattaagctttggagatacagggaaaaggtcaaagctgtgcggcgctattag

SEQ ID NO: 35738 - protein, 536 aa, Muscodor strobelii
  misc_feature: SGI Peptide ID NO. 572380
  misc_feature (195)..(535): NCBI GI: 171691460 Blast Desc: protein product [Podospora anserina] gi|170945678|emb|CAP71791.1| protein product [Podospora anserina]
  misc_feature (139)..(529): NCBI GI: 256726357 Blast Desc: [Nectria haematococca mpVI 77-13-4]
  misc_feature (1)..(125): NCBI GI: 256726357 Blast Desc: [Nectria haematococca mpVI 77-13-4]
  misc_feature (32)..(278): NCBI GI: 212537575 Blast Desc: ankyrin repeat domain protein, [Penicillium marneffei ATCC 18224] gi|210068685|gb|EEA22776.1| ankyrin repeat domain protein, [Penicillium marneffei ATCC 18224]
  misc_feature (80)..(271): NCBI GI: 229582572 Blast Desc: Ankyrin [Sulfolobus islandicus Y.N.15.51] gi|228013288|gb|ACP49049.1| Ankyrin [Sulfolobus islandicus Y.N.15.51]
  misc_feature (9)..(276): NCBI GI: 189502738 Blast Desc: Aasi_1435 [Candidatus Amoebophilus asiaticus 5a2] gi|189498179|gb|ACE06726.1| Aasi_1435 [Candidatus Amoebophilus asiaticus 5a2]
  misc_feature (57)..(270): NCBI GI: 212532817 Blast Desc: multiple ankyrin repeats single kh domain protein, [Penicillium marneffei ATCC 18224] gi|210071929|gb|EEA26018.1| multiple ankyrin repeats single kh domain protein, [Penicillium
  misc_feature (1)..(278): NCBI GI: 189502738 Blast Desc: Aasi_1435 [Candidatus Amoebophilus asiaticus 5a2] gi|189498179|gb|ACE06726.1| Aasi_1435 [Candidatus Amoebophilus asiaticus 5a2]
  misc_feature (27)..(328): NCBI GI: 238508580 Blast Desc: Pfs, NACHT and Ankyrin domain protein [Aspergillus flavus NRRL3357] gi|220688371|gb|EED44724.1| Pfs, NACHT and Ankyrin domain protein [Aspergillus flavus NRRL3357]
  misc_feature (7)..(90): NCBI GI: 154310991 Blast Desc: BC1G_06474 [Botryotinia fuckeliana B05.10] gi|150851273|gb|EDN26466.1| BC1G_06474 [Botryotinia fuckeliana B05.10]
  misc_feature: Useful for introducing or modulating the production of volatile compounds
MPKFGCSLAIFNVRPTDAAIFQACRDWDVDRVRYLLENGEASIYDADDKIGGLLEHTVQGDYKHFWYTADKGKINQIRQLVEYLLDLGCDPGGFYGPVLEYRLPAVLFAFDRGYATAVSAMLSRGADMLAFTSTLAGFLHDVNSSFSWKINVLRSIGYSDWRPESILDPSLSNTILHGACESGQIEEVLFALEIVGLDPNTEGVHRRTPLGHAAHNNFFEGTVILIESGADVNSGLFSSNGTPLIRSLFHFVRTSKAVDTTQFLLLNGADPLLKTGYGESAWVHIWDCACNKVGMRPDRWSFITLEGELSHLLLHGADPFELFSDPEEMIRGMYHSYHLYASSLYLRAPEIARSWSYGISRKHVNRAPTEEWIASFEYSEQTRLPPLSFTWSTSGHIHQEQTEQGNQRSYDEGAEGPVTFFKNQTQFFHHIASAEGRKQLSRFPMALALCDALQYAGYRAEMDNEGDIWYECEDGDRYYDAREHIAKDGLEDWTVMLCPICQDFDSHGLGHVLREADEAKIKLWRYREKVKAVRRY

SEQ ID NO: 35739 - DNA, 2559 bp, Muscodor strobelii
  misc_feature: SGI EST ID NO. CUFF.85105.0
  misc_feature: Variant of the nucleotide sequence at SEQ ID NO 35737
ccgtctgaccaatgtgtaagtgcatgaaatgtacttaatgttagcatcatgctgaggataattacggagctagaaacaagaatcaggctcacgaggagacaacaccacgcgcaacgaggagcaactcagacaagggaagcctcaaccagcggaaatctgtgatacagattctgacgacaaagttgatcctggcatgagacttgttgaacacaatatgagaagaagtctctggcattattccactaagtacggaagtctatgcagtcctcctggctccgagaagctcacaataggaacgtcaatggctgcgcagactaagcggaatagtcggaaggtgagactcgtgttagaaatcggcttcagttgcttctgtgagcatgtgctacagttcgaactcgatctgcagcaaactgcgcgacaatggatcaatatgccaaagttcggctgctcgttagccatattcaacgtacgaccaaccgacgccgcaatctttcaggcttgccgcgattgggacgtggaccgggttagatacctactcgaaaatggggaggcaagcatatacgatgcagacgataagattggcggcttgcttgagcacacagtgcagggagactacaagcatttttggtatacggccgacaaagggaagatcaatcagatacgacagctagtcgagtacctcttagatttaggatgtgaccccggcggattttacggaccggtcttggaatacagattaccagctgtgttatttgcatttgatcggggttatgccacagcggtctctgccatgctctctcgaggggcagacatgcttgcatttacctcgacgcttgcaggatttctacacgacgtcaatagcagcttctcatggaagatcaatgttctacgatcaataggctactctgattggagacccgaatccattcttgatccaagcttatctaataccatcctgcatggagcgtgcgagtcaggccaaatcgaggaggtattgttcgcactggaaatcgtaggcttagaccccaacacggagggagtacacagacgcactcctctagggcatgcagcacataacaacttcttcgaggggactgtcatattgatcgagtctggtgctgacgtcaattcgggtttattttctagcaatggaacaccattgatcaggagtctctttcatttcgtgcggacgtcaaaagcggttgataccactcagtttctactgttgaatggagctgatccgctgctaaagactggttacggtgaatctgcgtgggtacacatttgggattgtgcctgtaataaggtagggatgagaccagatcgatggtcatttatcacgctagaaggcgaactatcccatctgctcttacacggtgcagatccgttcgaattattctcagacccggaggagatgattcgcggaatgtaccattcctaccacttgtacgcatcgagcttatatctaagagcaccggaaattgccagatcctggagctatgggatcagccgcaaacatgtcaatagagccccaactgaggagtggatagcgagtttcgaatattcagagcagactagattaccccctttaagtttcacatggtctacatcgggccacattcaccaagagcagacggaacaagggaatcaaagatcttatgacgaaggagcagaagggccggtgacattcttcaaaaatcaaacgcaattctttcaccacattgcttctgccgaaggacgcaagcagctctcgcgctttccgatggctttggcgctttgtgatgccttgcaatatgccgggtatcgcgcagagatggataacgaaggggatatatggtatgaatgcgaagacggcgacagatattatgacgcgagagagcatattgctaaagacgggcttgaagactggacggtgatgttatgcccaatctgtcaagacttcgacagtcatggtctaggtcacgtcctgagagaggcggacgaagcgaagattaagctttggagatacagggaaaaggtcaaagctgtgcggcgctattaggactctttccgaaagcgcttgactggcgacttgcgaatcctggtgagctgttaatgaaattggctttatcattgatatcactccacctcacatagatattgcggttcagatattcgaatgggaagcagattcaagactatcccttactacaatgagccatttcatgaggcggtagtgctataggtatggaatagtacgaaaatactgcgaggttagtcgagaagctcaacgtacactctgaatcgaatacttgacgcatttactttgcacattgggacaaggcggtgtcagaccgaacctcattaatgggagggcctaagatatatatggagggaacgctgttatcactaagcctagtcgcctctgtttaagtacttatcaacttgtcaagacagtcttgctttttctcgcccgagcatctgagctagcacaccgcttcggaacagttgatgacgcaagtaccactattcttgctacattgatacatacggcagcaagtttctatctctgggtggaat

SEQ ID NO: 35740 - DNA, 1314 bp, Muscodor strobelii
  misc_feature: SGI cDNA ID NO. 572381
  misc_feature: Reduced expression when VOC is produced
  misc_feature: Encodes the peptide sequence at SEQ ID NO 35741
atggtggcgaggcctgctttacatctgcttgccagagcgacgacccggcgagcctacgcaactataccatcgaagactcaccaccatgtcgtaatagtgggaggcgggactgccggtgtcacggctgctgcgcagttgcagaagtcgcagggcttagagaaaaaggatatcgccattttagatccagctcaaacgcatcactatcagcccggatggactctcgtaggttctggtttgaagggactgagtgacacacagcgaccgatgggccatattattccagagggagtgaagcactatccgctccgcgtctcaactttcgacccggagaacaacgccctcaagacatcagaaggcgttgacatatcatacgactatctcgtcgttgctcccggcctagaaaccaatttcggtggcatcaaggggcttccagaagcactcgaagatcctgctagccaagtatcctctatctactccgataagagcgtcgagcaggtatggcgcaacatccaggatttcaaaaagggacctgcgatcttcacacagcctgcgggaatcataaagtgcgcaggcgccccccagaaaatcatgtggatggcgctatcacagtggaagaatgatggtgtgagaggcgacatagatgtcacgtttgccactggtgccccagctatgttcgccgtgcccaagtactcgcaagcgcttgagaagctacgcaaggagcgggatgtgaacggctggttccaacataatctcacgggcgttgatacgaagaagaaagtcgccacgttcaagaatgccgacggcgctgaggtccagagagagtttgaatttttacacgtggtgccgccgcagagaccctacgactgggtcgcagagtctaagatcgctgatgcggccggctgggttgatgtggataagtccacgacgcaacacaataagttcaagaacatcttttcggtcggcgatgcatccagtctgccgaacagcaagacagctgcagccatcacatcgcaaattcccgtcatgatcgacaacatgttggccacgatgtcgggtaaagagctgacagccgcttatgatggctatgccagttgcccattactaacgggtcacaacgagctcatgctctgtgagttcaagtacggtggtattccaaaggagagcttcgagggtatctttggcgggcaggagactcctcgtgcatcattctattatctgaagaagaacatattccctttcgtatactggaaccactttgtcagaggaaattggtacgggcccaaccattttttcaaacccgagacttcgtcctag

SEQ ID NO: 35741 - protein, 437 aa, Muscodor strobelii
  misc_feature: SGI Peptide ID NO. 572381
  misc_feature (29)..(328): Pfam Id: PF07992 Pfam Desc: Pyridine nucleotide-disulphide oxidoreductase
  misc_feature (29)..(61): Pfam Id: PF01266 Pfam Desc: FAD dependent oxidoreductase
  misc_feature (29)..(52): Pfam Id: PF00890 Pfam Desc: FAD binding domain
  misc_feature (29)..(146): Pfam Id: PF07992 Pfam Desc: Pyridine nucleotide-disulphide oxidoreductase
  misc_feature (15)..(427): NCBI GI: 189211203 Blast Desc: Sulfide:quinone oxidoreductase, mitochondrial precursor [Pyrenophora tritici-repentis Pt-1C-BFP] gi|187978025|gb|EDU44651.1| Sulfide:quinone oxidoreductase,
  misc_feature (13)..(433): NCBI GI: 169853240 Blast Desc: CC1G_04280 [Coprinopsis cinerea okayama7#130] gi|116505679|gb|EAU88574.1| CC1G_04280 [Coprinopsis cinerea okayama7#130]
  misc_feature (2)..(420): NCBI GI: 169619347 Blast Desc: SNOG_12870 [Phaeosphaeria nodorum SN15] gi|160703800|gb|EAT79670.2| SNOG_12870 [Phaeosphaeria nodorum SN15]
  misc_feature (26)..(428): NCBI GI: 71005352 Blast Desc: UM01195.1 [Ustilago maydis 521] gi|46096746|gb|EAK81979.1| UM01195.1 [Ustilago maydis 521]
  misc_feature (10)..(427): NCBI GI: 256728325 Blast Desc: [Nectria haematococca mpVI 77-13-4]
  misc_feature (13)..(432): NCBI GI: 154293147 Blast Desc: BC1G_14559 [Botryotinia fuckeliana B05.10] gi|150845599|gb|EDN20792.1| BC1G_14559 [Botryotinia fuckeliana B05.10]
  misc_feature (11)..(427): NCBI GI: 259484273 Blast Desc: TPA: conserved [Aspergillus nidulans FGSC A4]
  misc_feature (13)..(432): NCBI GI: 70982732 Blast Desc: conserved [Aspergillus fumigatus Af293] gi|66844518|gb|EAL84856.1| conserved [Aspergillus fumigatus Af293] gi|159122865|gb|EDP47985.1| conserved [Aspergillus A1163]
  misc_feature (10)..(428): NCBI GI: 85096512 Blast Desc: NCU07112 [Neurospora crassa OR74A] gi|28921758|gb|EAA31037.1| conserved [Neurospora crassa OR74A]
  misc_feature (17)..(427): NCBI GI: 255940252 Blast Desc: Pc16g05560 [Penicillium chrysogenum Wisconsin 54-1255] gi|211585518|emb|CAP93226.1| Pc16g05560 [Penicillium chrysogenum Wisconsin 54-1255]
  misc_feature: Useful for introducing or modulating the production of volatile compounds
MVARPALHLLARATTRRAYATIPSKTHHHVVIVGGGTAGVTAAAQLQKSQGLEKKDIAILDPAQTHHYQPGWTLVGSGLKGLSDTQRPMGHIIPEGVKHYPLRVSTFDPENNALKTSEGVDISYDYLVVAPGLETNFGGIKGLPEALEDPASQVSSIYSDKSVEQVWRNIQDFKKGPAIFTQPAGIIKCAGAPQKIMWMALSQWKNDGVRGDIDVTFATGAPAMFAVPKYSQALEKLRKERDVNGWFQHNLTGVDTKKKVATFKNADGAEVQREFEFLHVVPPQRPYDWVAESKIADAAGWVDVDKSTTQHNKFKNIFSVGDASSLPNSKTAAAITSQIPVMIDNMLATMSGKELTAAYDGYASCPLLTGHNELMLCEFKYGGIPKESFEGIFGGQETPRASFYYLKKNIFPFVYWNHFVRGNWYGPNHFFKPETSS

SEQ ID NO: 35742 - DNA, 1602 bp, Muscodor strobelii
  misc_feature: SGI EST ID NO. CUFF.85118.0
  misc_feature: Variant of the nucleotide sequence at SEQ ID NO 35740
ctgaattattcccgaggctgttgatcttatgtcagtcactcgttactcggaaaatttatgaaagatggtggcgaggcctgctttacatctgcttgccagagcgacgacccggcgagcctacgcaactataccatcgaagactcaccaccatgtcgtaatagtgggaggcgggactgccggtgtcacggctgctgcgcagttgcagaagtcgcagggcttagagaaaaaggatatcgccattttagatccagctcaaacgcatcactatcagcccggatggactctcgtaggttctggtttgaagggactgagtgacacacagcgaccgatgggccatattattccagagggagtgaagcactatccgctccgcgtctcaactttcgacccggagaacaacgccctcaagacatcagaaggcgttgacatatcatacgactatctcgtcgttgctcccggcctagaaaccaatttcggtggcatcaaggggcttccagaagcactcgaagatcctgctagccaagtatcctctatctactccgataagagcgtcgagcaggtatggcgcaacatccaggatttcaaaaagggacctgcgatcttcacacagcctgcgggaatcataaagtgcgcaggcgccccccagaaaatcatgtggatggcgctatcacagtggaagaatgatggtgtgagaggcgacatagatgtcacgtttgccactggtgccccagctatgttcgccgtgcccaagtactcgcaagcgcttgagaagctacgcaaggagcgggatgtgaacggctggttccaacataatctcacgggcgttgatacgaagaagaaagtcgccacgttcaagaatgccgacggcgctgaggtccagagagagtttgaatttttacacgtggtgccgccgcagagaccctacgactgggtcgcagagtctaagatcgctgatgcggccggctgggttgatgtggataagtccacgacgcaacacaataagttcaagaacatcttttcggtcggcgatgcatccagtctgccgaacagcaagacagctgcagccatcacatcgcaaattcccgtcatgatcgacaacatgttggccacgatgtcgggtaaagagctgacagccgcttatgatggctatgccagttgcccattactaacgggtcacaacgagctcatgctctgtgagttcaagtacggtggtattccaaaggagagcttcgagggtatctttggcgggcaggagactcctcgtgcatcattctattatctgaagaagaacatattccctttcgtatactggaaccactttgtcagaggaaattggtacgggcccaaccattttttcaaacccgagacttcgtcctaggttattctcgatggtgtaaaagtagttaccgcgctgtcgaactgaagccggttgtgtttcgatacgatagatgaaaacgaagctctcagaggacaaaagtgatgaatagaaaaatttgtgtatatgaatatcatcccagagtcggccgtatttcgtccttcttccaataacatagatactaccaccgtttaaagaagagcatgcaatcttaacttgtcgatgga

SEQ ID NO: 35743 - DNA, 2292 bp, Muscodor strobelii
  misc_feature: SGI cDNA ID NO. 572382
  misc_feature: Reduced expression when VOC is produced
  misc_feature: Encodes the peptide sequence at SEQ ID NO 35744
atggcggacaagggctccaagaaggacaaggcggccaaggtcaacatggccgaggcagagatgaagccggcgcccgagttcctgcagacgcggctggacatgttcgagcggctcaagaagcagcacgacgaggcggtggccaagaagccgcgcgagcagatcaccatcacgatgccggacgggtcgctcaaggtgggcaccagctgggagacgacgccgggcgacatcgccaaggccatctccaacagcctgtacaagcgcaccgtcgtcgcccgcctcgacggcagcccggacgcgctgtgggacctcgaccgcccgctggagcgcagctgcgcgctcgagctgctgagcttcgacgacccccagggcaagcaggtcttctggcacagctccgcccacgtcctcggcgaggcctgcgagcgccgcttcggctgcagcctgtgcatcgggccccccaccgacgacggcttctactacgagatggccctgcccggcggcgccgccgtccagcaggccgactgggccctgctcgagggcatcgtcggcggcatcgtcaaggagcgccagcgcttcgagcgcctcgagatcgccaaggacgacctgctggccatgttcagctacaacaagtacaagcagtacatcatcgacaccaagatccccgacggcacctccaccaccgtctaccgcaacgggcccctcatcgacctctgccgcggcccccacatccccgacaccggccgcatcgaggccttctccatcatgaagaactcggcctcgtactggctcggctcccaggacaacgactcgctgcagcgcatctacggcgtctccttcgacaacaagaagaagatggccgagtacaagaagttcctcgaggaggccgccaagcgggaccaccgcaagctcggccgcgagcaggagctgttcatgttccacgagatgtcccccggcagcaccttcttcctgccccacggcacccgcatctacaacaccctcctcgcctacctgcgcgagcagtaccacaagagagactaccaggaggtcatcacccccaacatcttcaacagcgagctgtggaagatgtccggccattgggactactacaaggacgacatgtttctcgtcaaccaggacaaagaggtctggggcatgaagcccatgaactgccccgcccactttctcgtcttcgccaacagcccccggatatacaaccagctgcccctgaggctggccgattttggcgtcctccaccgcaacgaggccagcggtgctctgtcgggtctgacccgtgtgcgccgcttccagcaggacgacgcccacatcttctgccgcctcgatcaggtcaccgacgagatcaaggacctgttcgacttcctccgtgagatgtatggcctgctgggattctccttcaagctgcatctgtccacccgccccgacaagtacatgggtgagctggagacgtggaacaacgctgagcgcatgttgaaggaggccctcgatgagtttgcaggcgcccctggtggcgtcccgtgggccctcaatgagggtgacggcgccttctatggccccaagatcgatattaagattctagactgcttgaatcgggagtggcaatgtgctaccatccagctcgacttccagggcccagagaattttggtctcgaatacgtcacggctgagtcgcccgccaccaaggccaagaccgccgacggcgccggcaaacccgcagaagctgaggcagaggccaaggctcctgagccagagaaggccgacgctgccgacaaggacgcgaagcctaagagagttatcaagcctgtgactaccggttgcgcgcgccctgtcatcatacatcgtgctatggccggcagtatcgaaagattcatgggtatcctaatcgaacactttgccggcaaatggccgttctggttgagtcctcgacaggtcatggtgattcctgtgggcatgggctttctggcctacgcgcaggaagtgaagcaagcactcaagaaagccaagatctttgtcgatatcgattcaagtggtaacacgcttcaaaagaaggtgcgaacagcacaacttgcgcagtataatttcatctttatcgtgggagacgaagagatgaaaggacgacaggtcaacattcggtaccgtgacgatacatcggcgcaagatcgttgcaagccggtcgggctggaggaggctatcgaaaagctcacgaagctcggcgaagatagaggcacgtataatccatttgccggagaaacggtaccggagagaccgaaagagggttga

SEQ ID NO: 35744 - protein, 763 aa, Muscodor strobelii
  misc_feature: SGI Peptide ID NO. 572382
  misc_feature (647)..(741): Pfam Id: PF03129 Pfam Desc: Anticodon binding domain
  misc_feature (54)..(117): Pfam Id: PF02824 Pfam Desc: TGS domain
  misc_feature (328)..(492): Pfam Id: PF00587 Pfam Desc: tRNA synthetase class II core domain (G, H, P, S and T)
  misc_feature (225)..(274): Pfam Id: PF07973 Pfam Desc: Threonyl and Alanyl tRNA synthetase second additional domain
  misc_feature (11)..(751): NCBI GI: 39942942 Blast Desc: conserved [Magnaporthe grisea 70-15] gi|58257459|gb|AAW69351.1| threonyl-tRNA synthetase-like protein [Magnaporthe grisea] gi|145009886|gb|EDJ94542.1| conserved grisea
  misc_feature (20)..(761): NCBI GI: 261361173 Blast Desc: threonyl-tRNA synthetase [Verticillium albo-atrum VaMs.102]
  misc_feature (14)..(753): NCBI GI: 154300294 Blast Desc: BC1G_11336 [Botryotinia fuckeliana B05.10] gi|150856659|gb|EDN31851.1| BC1G_11336 [Botryotinia fuckeliana B05.10]
  misc_feature (20)..(754): NCBI GI: 156042356 Blast Desc: SS1G_10975 [Sclerotinia sclerotiorum 1980] gi|154695362|gb|EDN95100.1| SS1G_10975 [Sclerotinia sclerotiorum 1980]
  misc_feature (20)..(751): NCBI GI: 85093975 Blast Desc: threonyl-tRNA synthetase [Neurospora crassa OR74A] gi|28921255|gb|EAA30565.1| threonyl-tRNA synthetase [Neurospora crassa OR74A]
  misc_feature (20)..(751): NCBI GI: 189091896 Blast Desc: [Podospora anserina] gi|27803058|emb|CAD60761.1| protein product [Podospora anserina] gi|188219301|emb|CAP49281.1| protein product [Podospora anserina]
  misc_feature (21)..(751): NCBI GI: 169617674 Blast Desc: SNOG_12019 [Phaeosphaeria nodorum SN15] gi|111059311|gb|EAT80431.1| SNOG_12019 [Phaeosphaeria nodorum SN15]
  misc_feature (21)..(745): NCBI GI: 189200603 Blast Desc: threonyl-tRNA synthetase [Pyrenophora tritici-repentis Pt-1C-BFP] gi|187983737|gb|EDU49225.1| threonyl-tRNA synthetase [Pyrenophora tritici-repentis Pt-1C-BFP]
  misc_feature (20)..(751): NCBI GI: 116179548 Blast Desc: CHGG_00402 [Chaetomium globosum CBS 148.51] gi|88184699|gb|EAQ92167.1| CHGG_00402 [Chaetomium globosum CBS 148.51]
  misc_feature (15)..(749): NCBI GI: 213403436 Blast Desc: threonyl-tRNA synthetase [Schizosaccharomyces japonicus yFS275] gi|212000537|gb|EEB06197.1| threonyl-tRNA synthetase [Schizosaccharomyces japonicus yFS275]
  misc_feature (27)..(730): SWISSPROT Homolog: EC 6.1.1.3 Threonine--tRNA ligase
  misc_feature: Useful for introducing or modulating the production of volatile compounds
MADKGSKKDKAAKVNMAEAEMKPAPEFLQTRLDMFERLKKQHDEAVAKKPREQITITMPDGSLKVGTSWETTPGDIAKAISNSLYKRTVVARLDGSPDALWDLDRPLERSCALELLSFDDPQGKQVFWHSSAHVLGEACERRFGCSLCIGPPTDDGFYYEMALPGGAAVQQADWALLEGIVGGIVKERQRFERLEIAKDDLLAMFSYNKYKQYIIDTKIPDGTSTTVYRNGPLIDLCRGPHIPDTGRIEAFSIMKNSASYWLGSQDNDSLQRIYGVSFDNKKKMAEYKKFLEEAAKRDHRKLGREQELFMFHEMSPGSTFFLPHGTRIYNTLLAYLREQYHKRDYQEVITPNIFNSELWKMSGHWDYYKDDMFLVNQDKEVWGMKPMNCPAHFLVFANSPRIYNQLPLRLADFGVLHRNEASGALSGLTRVRRFQQDDAHIFCRLDQVTDEIKDLFDFLREMYGLLGFSFKLHLSTRPDKYMGELETWNNAERMLKEALDEFAGAPGGVPWALNEGDGAFYGPKIDIKILDCLNREWQCATIQLDFQGPENFGLEYVTAESPATKAKTADGAGKPAEAEAEAKAPEPEKADAADKDAKPKRVIKPVTTGCARPVIIHRAMAGSIERFMGILIEHFAGKWPFWLSPRQVMVIPVGMGFLAYAQEVKQALKKAKIFVDIDSSGNTLQKKVRTAQLAQYNFIFIVGDEEMKGRQVNIRYRDDTSAQDRCKPVGLEEAIEKLTKLGEDRGTYNPFAGETVPERPKEG

SEQ ID NO: 35745 - DNA, 3438 bp, Muscodor strobelii
  misc_feature: SGI EST ID NO. CUFF.85718.1
  misc_feature: Variant of the nucleotide sequence at SEQ ID NO 35743
ttgatggatttaatttggaggggcgagtcaactagggccgccaatcggcaaggggagcgagtcaccaaagtcaatcgagtcactcgctttcagggacccctccaaagtgaaaaaggcgtcgactgccccgcccccacctgtgtgtatgttggcatatcggccagataattgacagataccttagttaccttaggtattgattgtacggaaagaacgcctccaacgtctgcgaggttgcccattgcacgttgcccgtttcagcgtttatttttttccctattgaacatccatttgggtaccgacgaaactcgaacgacgacacgatcaattccgatcaaaagctacaaacagatttagtctggtcaggcagtacaccctcgacgcgccgccgcgcacacccactgcctctgcacgtgtttactctctcgactcgacacagcgatggcggacaagggctccaagaaggacaaggcggccaaggtcaacatggccgaggcagagatgaagccggcgcccgagttcctgcagacgcggctggacatgttcgagcggctcaagaagcagcacgacgaggcggtggccaagaagccgcgcgagcagatcaccatcacgatgccggacgggtcgctcaaggtgggcaccagctgggagacgacgccgggcgacatcgccaaggccatctccaacagcctgtacaagcgcaccgtcgtcgcccgcctcgacggcagcccggacgcgctgtgggacctcgaccgcccgctggagcgcagctgcgcgctcgagctgctgagcttcgacgacccccagggcaagcaggtcttctggcacagctccgcccacgtcctcggcgaggcctgcgagcgccgcttcggctgcagcctgtgcatcgggccccccaccgacgacggcttctactacgagatggccctgcccggcggcgccgccgtccagcaggccgactgggccctgctcgagggcatcgtcggcggcatcgtcaaggagcgccagcgcttcgagcgcctcgagatcgccaaggacgacctgctggccatgttcagctacaacaagtacaagcagtacatcatcgacaccaagatccccgacggcacctccaccaccgtctaccgcaacgggcccctcatcgacctctgccgcggcccccacatccccgacaccggccgcatcgaggccttctccatcatgaagaactcggcctcgtactggctcggctcccaggacaacgactcgctgcagcgcatctacggcgtctccttcgacaacaagaagaagatggccgagtacaagaagttcctcgaggaggccgccaagcgggaccaccgcaagctcggccgcgagcaggagctgttcatgttccacgagatgtcccccggcagcaccttcttcctgccccacggcacccgcatctacaacaccctcctcgcctacctgcgcgagcagtaccacaagagagactaccaggaggtcatcacccccaacatcttcaacagcgagctgtggaagatgtccggccattgggactactacaaggacgacatgtttctcgtcaaccaggacaaagaggtctggggcatgaagcccatgaactgccccgcccactttctcgtcttcgccaacagcccccggatatacaaccagctgcccctgaggctggccgattttggcgtcctccaccgcaacgaggccagcggtgctctgtcgggtctgacccgtgtgcgccgcttccagcaggacgacgcccacatcttctgccgcctcgatcaggtcaccgacgagatcaaggacctgttcgacttcctccgtgagatgtatggcctgctgggattctccttcaagctgcatctgtccacccgccccgacaagtacatgggtgagctggagacgtggaacaacgctgagcgcatgttgaaggaggccctcgatgagtttgcaggcgcccctggtggcgtcccgtgggccctcaatgagggtgacggcgccttctatggccccaagatcgatattaagattctagactgcttgaatcgggagtggcaatgtgctaccatccagctcgacttccagggcccagagaattttggtctcgaatacgtcacggctgagtcgcccgccaccaaggccaagaccgccgacggcgccggcaaacccgcagaagctgaggcagaggccaaggctcctgagccagagaaggccgacgctgccgacaaggacgcgaagcctaagagagttatcaagcctgtgactaccggttgcgcgcgccctgtcatcatacatcgtgctatggccggcagtatcgaaagattcatgggtaagctggctccaccaaccgcagatggtagcaattctaagtctaacacatattaggtatcctaatcggtatgtcctgggttaataaaactacgattatgtgtcgccacaccagtgccaacataaccccgccaatcatattgcttttggtgctacatagataatagcaagatcaatctactgacagtattatttccaacagaacactttgccggcaaatggccgttctggttgagtcctcgacaggtcatggtgattcctgtgggcatgggctttctggcctacgcgcaggaagtgaagcaagcactcaagaaagccaagatctttgtcgatatcgattcaagtggtaacacgcttcaaaagaaggtgcgaacagcacaacttgcgcagtataatttcatctttatcgtgggagacgaagagatgaaaggacgacaggtcaacattcggtaccgtgacgatacatcggcgcaagatcgttgcaagccggtcgggctggaggaggctatcgaaaagctcacgaagctcggcgaagatagaggcacgtataatccatttgccggagaaacggtaccggagagaccgaaagagggttgagaaagaaagaaatagaagctagaagtatgtagccatgtacaagaatgttgtcatgatgagagaataggcgagatatgaatgagtctacgttgaacataagctcttgtttgggttgtgcataagtcaagcaattggcaattccagcactagaagaactgcccatagaagcaacaagacactaagtagataggtacaatgctctatgtcgtatcccaatcaaatgcgacatatttattggctactactttgataaatttcgatagcattcgacatggagtatcaattgatcacatctaactacaatttcaagttgttacgaaaacgacttgttgtgacaatagtcgttaatgcgaagtggagttaatgacgttgttctacacaacagatgccgcatctctctcgcaggtcaaattgaacattaaagtgtaattgatcctacttgtctccccaaatttgcaaagaataagatcataaccaattttatcatcctacctgatgatgtggattggactgata

SEQ ID NO: 35746 - DNA, 1905 bp, Muscodor strobelii
  misc_feature: SGI cDNA ID NO. 572383
  misc_feature: Reduced expression when VOC is produced
  misc_feature: Encodes the peptide sequence at SEQ ID NO 35747
atgtcggaatcgggccacgcggccggcgagtcgcccgctgctgctaaggcgagcgccgttaaagacaagaactgtccttattgtggccaggctttcacgtcgtcttccctggggagacatctcgacctctacatcaaggagaagaacccgaagcctcccgacggcctgcacgacgtcgacgctatccgcaaaatgcgaggctccatcacacgccgtcagccccgcggctccctcgcccaccgagatgtctccaaccccggcactcccaatcctccctccaggaccaccaagagcccggcgcccgagcccatcatcaagcccccggccatccccaaggagggccagttcgtcgttgatcgcccgagcatgggctatcccttccagctctcctggacctccaccggcgtcatcaacgacatccccgctgcgaatggcgacgtcggtagcggctccaagagtccttgggaagactcgctcggccgagatcaccaggcacggctgcaacatgcacggagagccccgggccgcgttacacagaaggtacagctcgatgccagacagaaatatgacgacgccatggatacggcgcgtgccgccgagctagccctgcgggaactactgagctccatgagggctgccaagcaacatatcgatatgaactcgcttccttttgactttgagccattgtctctcgatttcccagcgctcaccctacaatgcctacaagcgccacccacgctcttctcctcgacgccccacccgacgtcgacctcatggtccatccagccgccaggccagaagcagtacgaggcgctgcagacctatttccaggaggagttccgtaaatggcgcgtcgaatgtgccacagctaccacggtgacctcggaagatctgacgtacccgccctcggaggcgcacgttccccgtgatgtatttgaaggggtgaagaaagcggagaggacggccgcgctgcttgagaaacaagtcaacgagcatctgcagtcgacgtaccatgtgtgggagcagttaccgacgcagcgccggaacgaactctggggcttggaactagctagaagcgtggggaggagacagaaagagatagggacactcaaggaggcgcagtatgcgctgaaccaggagaacgctaacctcaaaatccagattgaacagctcaaccatttgcaacagcccagagagttcagaatcgtgccacccgccaccatccccattgaggagtccctgctgtcctatctacggggcctgggccacaaaggagagcacggtgttggtttaaccatggaggaccgacatgtcgatcttcatactatggtctcgcgagccatcgaacgctggaagaaggtgatcgtatcctcgaggaacacgggcatgagcggccagaagtctctggatcaggtgacgccctctgcgacacccacgacggctacgcctgttacgctagccccggccccacgcgggactggcacacaggcacacatgcaaaagcctctggccgtcccaatggcgcattcaacggcatcttcgacgacgacggcacctccgtcggtggcgaacgagggcgatagcgatgcagatgccgacgccgacgccgatgcggacttggatgccgatgcggacgcagacgcagacatggacgaggtagagagcttcgcaccggcggcgccgcaggtgcagatgaagctggaggtgccgcggactcgggcgcataacccgagggcggcaagcgcgggcggggcccggctggccaacggccacggggccaagcagcggggtgttagcgtccggcggtccacggctatgggcgggccgggccaggggagcagcaataattacatgggtagcagcaatgcgggtgtgatgggcggcgacccaatgttcatggactaa

SEQ ID NO: 35747 - protein, 634 aa, Muscodor strobelii
  misc_feature: SGI Peptide ID NO. 572383
  misc_feature (16)..(634): NCBI GI: 256733518 Blast Desc: NECHADRAFT_35517 [Nectria haematococca mpVI 77-13-4]
  misc_feature (16)..(479): NCBI GI: 46128769 Blast Desc: FG08762.1 [Gibberella zeae PH-1]
  misc_feature (16)..(481): NCBI GI: 261359480 Blast Desc: conserved [Verticillium albo-atrum VaMs.102]
  misc_feature (12)..(558): NCBI GI: 116202691 Blast Desc: CHGG_09230 [Chaetomium globosum CBS 148.51] gi|88177748|gb|EAQ85216.1| CHGG_09230 [Chaetomium globosum CBS 148.51]
  misc_feature (4)..(480): NCBI GI: 171682340 Blast Desc: protein product [Podospora anserina] gi|170941129|emb|CAP66779.1| protein product [Podospora anserina]
  misc_feature (19)..(470): NCBI GI: 39940550 Blast Desc: MGG_04965 [Magnaporthe grisea 70-15] gi|145010800|gb|EDJ95456.1| MGG_04965 [Magnaporthe grisea 70-15]
  misc_feature (7)..(459): NCBI GI: 85086134 Blast Desc: NCU04018 [Neurospora crassa OR74A] gi|28918727|gb|EAA28397.1| [Neurospora crassa OR74A] gi|29150131|emb|CAD79691.1| [Neurospora crassa]
  misc_feature (1)..(597): NCBI GI: 156034414 Blast Desc: SS1G_13510 [Sclerotinia sclerotiorum 1980] gi|154698913|gb|EDN98651.1| SS1G_13510 [Sclerotinia sclerotiorum 1980]
  misc_feature (14)..(418): NCBI GI: 154292946 Blast Desc: BC1G_14371 [Botryotinia fuckeliana B05.10] gi|150845712|gb|EDN20905.1| BC1G_14371 [Botryotinia fuckeliana B05.10]
  misc_feature (9)..(474): NCBI GI: 225557488 Blast Desc: conserved [Ajellomyces capsulatus G186AR]
  misc_feature: Useful for introducing or modulating the production of volatile compounds
MSESGHAAGESPAAAKASAVKDKNCPYCGQAFTSSSLGRHLDLYIKEKNPKPPDGLHDVDAIRKMRGSITRRQPRGSLAHRDVSNPGTPNPPSRTTKSPAPEPIIKPPAIPKEGQFVVDRPSMGYPFQLSWTSTGVINDIPAANGDVGSGSKSPWEDSLGRDHQARLQHARRAPGRVTQKVQLDARQKYDDAMDTARAAELALRELLSSMRAAKQHIDMNSLPFDFEPLSLDFPALTLQCLQAPPTLFSSTPHPTSTSWSIQPPGQKQYEALQTYFQEEFRKWRVECATATTVTSEDLTYPPSEAHVPRDVFEGVKKAERTAALLEKQVNEHLQSTYHVWEQLPTQRRNELWGLELARSVGRRQKEIGTLKEAQYALNQENANLKIQIEQLNHLQQPREFRIVPPATIPIEESLLSYLRGLGHKGEHGVGLTMEDRHVDLHTMVSRAIERWKKVIVSSRNTGMSGQKSLDQVTPSATPTTATPVTLAPAPRGTGTQAHMQKPLAVPMAHSTASSTTTAPPSVANEGDSDADADADADADLDADADADADMDEVESFAPAAPQVQMKLEVPRTRAHNPRAASAGGARLANGHGAKQRGVSVRRSTAMGGPGQGSSNNYMGSSNAGVMGGDPMFMD

SEQ ID NO: 35748 - DNA, 3580 bp, Muscodor strobelii
  misc_feature: SGI EST ID NO. CUFF.86150.2
  misc_feature: Variant of the nucleotide sequence at SEQ ID NO 35746
cgtacctgtaggtacagtttctgtactctttgcgagtatgtcatgattgggagtacagggcttgcaagggttcagcggctccaccccggctgctcacccgctcccgcctgctgtatcgagtggtatccagtaccactagcatatacgagtatgctcgcatttgctactcatcagtcttgtttgtccttgtactgtatgccccgccgggcgtgtacggttccgtcacgcaggtaaagtcaatcgccagatgtgtcatgtagtcaggaacgcctgcgcaagaactccaagttcacgagcagacaagcacctacagtcaccaaaggcagatgtagatgatgcaggcacgacttggaaatcatgaactccttcggccgctagatggatcgtccccacgcggatccacgcctgccacgacggcgaaacaagtacacctacgtcgttgtccactccagggccagcaggttcccacccgctccatctccacgcacccctgcctccctggattccaacggatctcagcctaacgcaaggtacagcactctacctacctgacaggagacgccaacggaccatgcagaaaaagtgacaagaggcttgccgacgagcagacgccagaggaacaaaacacctcccgtcctctgctaagcgccgacctgctcgtatctcatctcatccccatctcatccccatctcaccgccgccccagagcctcatcgctggcggacgacacacgactcccggcatcaccacttatcatgggccccattgctacgtgggagaaccgcccagcctgtctctcgtctagctcctcctcttgatccccttcctgcggcgtcactgtcgacgtcaccctctcatccggtcgtgcctcggtccgccgccgtcacatcacagcttcatccccatcgcccgccgtctccttctccgcggttggatgactgtccctccgggagagctcctacggggcattgccgacactcaacaccaccatccctctcgccacacacctgcgtctcctcgtcaactagatccgagtccaatttctaattgccttccaattctccgatacatacgcatatagtatctgaactgctgctctatacaaataccttatccctctgatcacctcgaactcgcttccgtgactatgtcggaatcgggccacgcggccggcgagtcgcccgctgctgctaaggcgagcgccgttaaagacaagaactgtccttattgtggccaggctttcacgtcgtcttccctggggagacatctcgacctctacatcaaggagaagaacccgaagcctcccgacggcctgcacgacgtcgacgctatccgcaaaatgcgaggctccatcacacgccgtcagccccgcggctccctcgcccaccgagatgtctccaaccccggcactcccaatcctccctccaggaccaccaagagcccggcgcccgagcccatcatcaagcccccggccatccccaaggagggccagttcgtcgttgatcgcccgagcatgggctatcccttccagctctcctggacctccaccggcgtcatcaacgacatccccgctgcgaatggcgacgtcggtagcggctccaagagtccttgggaagactcgctcggccgagatcaccaggcacggctgcaacatgcacggagagccccgggccgcgttacacagaaggtacagctcgatgccagacagaaatatgacgacgccatggatacggcgcgtgccgccgagctagccctgcgggaactactgagctccatgagggctgccaagcaacatatcgatatgaactcgcttccttttgactttgagccattgtctctcgatttcccagcgctcaccctacaatgcctacaagcgccacccacgctcttctcctcgacgccccacccgacgtcgacctcatggtccatccagccgccaggccagaagcagtacgaggcgctgcagacctatttccaggaggagttccgtaaatggcgcgtcgaatgtgccacagctaccacggtgacctcggaagatctgacgtacccgccctcggaggcgcacgttccccgtgatgtatttgaaggggtgaagaaagcggagaggacggccgcgctgcttgagaaacaagtcaacgagcatctgcagtcgacgtaccatgtgtgggagcagttaccgacgcagcgccggaacgaactctggggcttggaactagctagaagcgtggggaggagacagaaagagatagggacactcaaggaggcgcagtatgcgctgaaccaggagaacgctaacctcaaaatccagattgaacagctcaaccatttgcaacagcccagagagttcagaatcgtgccacccgccaccatccccattgaggagtccctgctgtcctatctacggggcctgggccacaaaggagagcacggtgttggtttaaccatggaggaccgacatgtcgatcttcatactatggtctcgcgagccatcgaacgctggaagaaggtgatcgtatcctcgaggaacacgggcatgagcggccagaagtctctggatcaggtgacgccctctgcgacacccacgacggctacgcctgttacgctagccccggccccacgcgggactggcacacaggcacacatgcaaaagcctctggccgtcccaatggcgcattcaacggcatcttcgacgacgacggcacctccgtcggtggcgaacgagggcgatagcgatgcagatgccgacgccgacgccgatgcggacttggatgccgatgcggacgcagacgcagacatggacgaggtagagagcttcgcaccggcggcgccgcaggtgcagatgaagctggaggtgccgcggactcgggcgcataacccgagggcggcaagcgcgggcggggcccggctggccaacggccacggggccaagcagcggggtgttagcgtccggcggtccacggctatgggcgggccgggccaggggagcagcaataattacatgggtagcagcaatgcgggtgtgatgggcggcgacccaatgttcatggactaatggcgttagctggctgggattacggcgtttcgaaaaagtgggatagaatagcgaaagggaccaagatatagtcatttgctttgaacagcccccgaggggcgttgggcgacggcgttcgggtcttagagatggtaaaaaggggggtgtctccagttcaggctttcgcccccttattgaaattcacggactgcatggcaattcgaataactcacatgacctctaagtagtattatataatgaaacaagattcgaatatgaggcaaagtgttgacaacaagcatgagcatgtcttagtacagaaagcgtaggagagagtggggcaggcaagatggattagtaggatctctacaacagtctgggtcgcgcagtgagtgaaggaagcaaaagttgaagtcgcagctttgctggcatgtacatggtaggttatggacgcagggaaactgacctagacgcggtacagaaattgcacgaggccgtcatcgagttaaggcggcgagagcgtgggtgcggtctcccgctcaagcaggc

SEQ ID NO: 35749 - DNA, 423 bp, Muscodor strobelii
  misc_feature: SGI cDNA ID NO. 572384
  misc_feature: Reduced expression when VOC is produced
  misc_feature: Encodes the peptide sequence at SEQ ID NO 35750
atgccgcccgctatcagcgacgacgagggttccgacctcggcgacattgcgctccccgtcactgccagcaagcgcgccaagtccgcctccaaagaccgtgatgcctccgacgatgacgacatgctcgacgtggtcggcaacggcaccaagggcaacggcgccgccgacgatgacgaggatgggggagacgacaacgacggagaggatgaagacctggaggaggacgagttcatcgtcgagaagatcatctcgcacagcatagaggccaatggcgagctgagattcaaggtcaagtgggaaggctacgacaagaaggcagaccagacctgggaggacgaggagaacttgagggagaatgccacacaggttctcgacgagtacctcgagagcgtcggcggccgcgacaagatcatggacgagggc

SEQ ID NO: 35750 - protein, 141 aa, Muscodor strobelii
  misc_feature: SGI Peptide ID NO. 572384
  misc_feature (77)..(130): Pfam Id: PF00385 Pfam Desc: 'chromo' (CHRromatin Organisation MOdifier) domain
  misc_feature (1)..(140): NCBI GI: 156034290 Blast Desc: SS1G_13448 [Sclerotinia sclerotiorum 1980] gi|154698851|gb|EDN98589.1| SS1G_13448 [Sclerotinia sclerotiorum 1980]
  misc_feature (1)..(140): NCBI GI: 46128771 Blast Desc: FG08763.1 [Gibberella zeae PH-1]
  misc_feature (4)..(140): NCBI GI: 256734025 Blast Desc: NECHADRAFT_77727 [Nectria haematococca mpVI 77-13-4]
  misc_feature (77)..(140): NCBI GI: 154310907 Blast Desc: BC1G_06432 [Botryotinia fuckeliana B05.10] gi|150851231|gb|EDN26424.1| BC1G_06432 [Botryotinia fuckeliana B05.10]
  misc_feature (1)..(141): NCBI GI: 261359481 Blast Desc: heterochromatin protein one [Verticillium albo-atrum VaMs.102]
  misc_feature (77)..(134): NCBI GI: 119468585 Blast Desc: chromo domain protein [Neosartorya fischeri NRRL 181] gi|119406025|gb|EAW15976.1| chromo domain protein [Neosartorya fischeri NRRL 181]
  misc_feature (1)..(132): NCBI GI: 38374207 Blast Desc: heterochromatin protein one [Magnaporthe grisea]
  misc_feature (81)..(132): NCBI GI: 145602380 Blast Desc: MGG_04964 [Magnaporthe grisea 70-15] gi|145010801|gb|EDJ95457.1| MGG_04964 [Magnaporthe grisea 70-15]
  misc_feature (81)..(139): NCBI GI: 38374203 Blast Desc: heterochromatin protein one [Neurospora crassa]
  misc_feature (81)..(139): NCBI GI: 85086129 Blast Desc: NCU04017 [Neurospora crassa OR74A] gi|28918726|gb|EAA28396.1| NCU04017 [Neurospora crassa OR74A] gi|29150130|emb|CAD79690.1| conserved [Neurospora crassa] protein
  misc_feature: Useful for introducing or modulating the production of volatile compounds
MPPAISDDEGSDLGDIALPVTASKRAKSASKDRDASDDDDMLDVVGNGTKGNGAADDDEDGGDDNDGEDEDLEEDEFIVEKIISHSIEANGELRFKVKWEGYDKKADQTWEDEENLRENATQVLDEYLESVGGRDKIMDEG

SEQ ID NO: 35751 - DNA, 1219 bp, Muscodor strobelii
  misc_feature: SGI EST ID NO. CUFF.85120.1
  misc_feature: Variant of the nucleotide sequence at SEQ ID NO 35749
gcgggacgcgcaataagtggcaccgcaactgcccacttcatgctttttgcaatgctcgttatgccgtcggagaccactgattttcacccagcctagaagaattggattaatatctgatcaatctaggttttggtgatatatttcttcctaactcgggatgcatgtaggatactcgtaaaggtgccctctgattcccagcccacctcgaccaggtatcttatgacaaagtgcagagtacatgctctgcggttcggctcactgtgcaacaaaataactgacaacagctctgtgcaaagctgaggcaatctactcggtaaggaaaagtaccattaccaggtagtagctgagggcggcgcatgcatcgaggtgttgcatgtaccctactaagtccccagccactccatccgtcatccaccgccagtagcacccagctagcgcgcatcaggaggaacctttgatcgcagctcctcccgcacccacctcgcagctcgccacgcacagagacagcagagacaggcagctcgctccaggcacacgctccagtgctttctccatcgcattgcccaattgatctcggcgcgcgcagcgacgtgccatcggctgctttcgccctctcgagaacaccacccggtacctgtcgttgccgctgcgcatcccacgcatcccacgccacgcgctcctccgtttgttgattctcccgcctggctcgcgccgccgctccgcagacatgccgcccgctatcagcgacgacgagggttccgacctcggcgacattgcgctccccgtcactgccagcaagcgcgccaagtccgcctccaaagaccgtgatgcctccgacgatgacgacatgctcgacgtggtcggcaacggcaccaagggcaacggcgccgccgacgatgacgaggatgggggagacgacaacgacggagaggatgaagacctggaggaggacgagtacgatgcgcccggactcatcaccatcaatccaccgcccagctctgctaaccgcacatctgccttctcaggttcatcgtcgagaagatcatctcgcacagcatagaggccaatggcgagctgagattcaaggtcaagtgggaaggctacgacaagaaggcagaccagacctgggaggacgaggagaacttgagggagaatgccacacaggttctcgacgagtacctcgagagcgtcggcggccgcgacaagatcatggacgagg

SEQ ID NO: 35752 - DNA, 3519 bp, Muscodor strobelii
  misc_feature: SGI cDNA ID NO. 572385
  misc_feature: Elevated expression when VOC is produced
  misc_feature: Encodes the peptide sequence at SEQ ID NO 35753
atgtcacctagcgaaggtcaaaagcccaagttccgagacaagttgcgtgcattacgtgccaagcttcggggaaaacctgatgatggtcctaaacgcgaagagaagaaacaaaatgccgaagagaaaatcagtatcgtgttggctgacaaagaaacgcagaatggattgcaagactcagaactcgacaaatcgctcacggctcagaggaactccctcgggatacgaagtactgatacaaccagtcaggaatatgtagttaatcaccttgattctaccactagcaatgatattatgagccaatcgtcagacttgtggagctcagcttacagagaggctatcgagggcttaggagataatatcgataaggctattcttgaaggcgagaatgtgatgcaattatttcgggttctcgaaaacatcgacaaagagacgtcagcggaatcgacatttctcaaaggcgtcaagtatctgaacagattggaagtacctttgaagaaatttaagctggctttagatgtagctagtccccttacaaatcttgagccaacaagcgctacggtctttggtgttgtgaggaacgtcaccgcaatcgcaataagtatttcggcagctgatgtcgacttcgctaaacaaatcggagatatgctccagcatatcacctacattgacgactgcgataccttaggccaaaaactagaaaagatggacatacacaaagcactggtaatggtataccagaaattattagagttttacaaggccgcattcgacatcgtgaccagccatagagtcaagttggtgttggctgttttcttagagacagaccgtctcccgattatcgtgaaagagtttcttcaccacgccgaatttctacagaagttggtgcaaaaagcgacattggagatcctagacgatgtcagagcaatgctttatgaccaagagatttaccgatggcttggtattgctaagattggcagactctaccagtttcactccagtttaaagcagcttcaagcacctgaagcttgtcaatggctcttggaagatgacacgtttaatcgctggtatcaatcaacagagtcccagcagttagtgaacttaggtgacatgggttctgggaagacaatggctatggcattcctcatagatgagctcggccagcgaaaggaccatcatataccgcagccaaaaatatgctatcattattgtcgagacgacgagagcggcaaagccgtctacatatactcaacccttatcctagctatcctcgaacagctttcgggtttgaagaagacattttacgattggtacaagcagaatgtggccgcgggccatttggatcccgccaaaagctcggagaaacttgaggagttcctggatgagaccattacaaatctcgatcgaccactctacattgtcattgacggaatggacgagtgtgacagggcttcctgcggtgccctgctcattttcttgaaaaggttatcacagaaatcgtcgagactcaaaacaattctatcctcacgtccagaacaagagatattggagcagttcgatggaacactagtcgtcacattgagtgccaatgaggagcgcgatcggataattgtcgagaagacagtggcatcacaactccggcatctgtctcctgacgtgaagaaatacttaacggatactttatcggagcaagcaaaaggcagcgcaatatggacaaagatgattgtcgaattaatcgcagccaagaaaatcaaagcgctcggcgccatgaagagcttccttgaaagcgtaccactacccggagaactattcaaactttaccggaacatcttccttcgctacaccgaagacgatcccgataataaaaatcttgcagcaatcgctttagagttactggctgtatcgagaagggctttgagcgtactcgaactatcttgggcagtaacgttgggcgcagctgaagagagcatcacgactactgctacgctagggcacctcgtcgaccacgagaggattattagtctaattcagccgtttattgcccgtattgaattcgatgatttaagaaagcggcaggttcgtcttacccatcaatcggtcaaagagtttgtagttcgagaatggccgctatacaaccgtgatcaacaaggtaccagtgcgccaagaagtttcagtgcttctacggttcgccagaaaactcaacaacttgacatgaaaatgacgaatctttgtattcaataccttattctcaatgaaatagatcagattgatctgctatcagaagagcatgtcgcatttcaagagcttccaatggagtttggccttttcgacgagaagctcgaagagttaccatacgatctcagcgaatcctgggaaacctggcaacactgggatctgtgggagaaggatatgatacattttgacccaattagtcgcggctttggagagttttggctctatgctgcttgtcattggaatgaacacttcggttcgctcgatgctgaatttctgccgtccttgggtgggatagagcagactgcgccctcgaacagagattccgcataccggcgcatactagagacggcaaacttcagcaaaagctgttaccattcaaataccgccgtcggcgcggcagatgagattctacgatggggtgacatgtctaggttacacaccttgcttgctagtaatattggctaccagcttcacaattacgaattcttcgccggagtgctcatcaagaaatggtcttggtcccttgagatttggcgtgattgggacacagcatttgatcttgtgcgaaaagttactacgagcatggtgcgagaaaaatggggaaggaatctcctttgcgaagcaagcagaatggcctgcttgccgatcattcgacggcttttcgaagaagctcaaaaggacgagttcctaatgaatgaactcgtgcgcgaccctattggagatctcgagggaggtttcatacaccaatcagtcggccttgccgtcctcgagaatcactacaatgtcgtggaatatttgctcggcgagaagaaaatcgagagccatctgcgataccggaatcaacaaggccaaactgttttacatttagcagctgaacgatgtaatcctgcgatgattcaaatcctaatacgtcattttactgaggacctgcatcagcttgacgaaaatggtgacccgcccttgagacgagtcttgctaagtcctagaaaacgagaagatatgttcgagtctgcgggtattttgatgaaacagcggtctgcgcgtgacaaggccaatatcacaaatatccttcaacgtgcattgcaagaagcgatacagctcggcgacatttctatgtgcgagtttcttcttagcactggcttcgtcgaaccttcaagagtcatagtacatgatcttgatggtactgttacattattagaaaagcctgcagtccatgagtctgacgctcatgccatactgaaactcatgactgacaacctggagcagcaaaagtccaaagggaaatag

SEQ ID NO: 35753 - protein, 1172 aa, Muscodor strobelii
  misc_feature: SGI Peptide ID NO. 572385
  misc_feature (1026)..(1059): Pfam Id: PF00023 Pfam Desc: Ankyrin repeat
  misc_feature (10)..(964): NCBI GI: 212537823 Blast Desc: conserved [Penicillium marneffei ATCC 18224] gi|210068809|gb|EEA22900.1| conserved [Penicillium marneffei ATCC 18224]
  misc_feature (270)..(964): NCBI GI: 159125706 Blast Desc: NACHT domain protein [Aspergillus fumigatus A1163]
  misc_feature (309)..(980): NCBI GI: 256722945 Blast Desc: NECHADRAFT_97420 [Nectria haematococca mpVI 77-13-4]
  misc_feature (270)..(843): NCBI GI: 159128144 Blast Desc: NACHT domain protein [Aspergillus fumigatus A1163]
  misc_feature (378)..(1017): NCBI GI: 169605027 Blast Desc: SNOG_05529 [Phaeosphaeria nodorum SN15] gi|160706692|gb|EAT86593.2| SNOG_05529 [Phaeosphaeria nodorum SN15]
  misc_feature (309)..(979): NCBI GI: 46137825 Blast Desc: FG10428.1 [Gibberella zeae PH-1]
  misc_feature (593)..(980): NCBI GI: 145252172 Blast Desc: An16g02870 [Aspergillus niger] gi|134083144|emb|CAK48596.1| [Aspergillus niger]
  misc_feature (102)..(243): NCBI GI: 242785320 Blast Desc: TSTA_033780 [Talaromyces stipitatus ATCC 10500] gi|218720717|gb|EED20136.1| TSTA_033780 [Talaromyces stipitatus ATCC 10500]
  misc_feature (280)..(876): NCBI GI: 116179072 Blast Desc: CHGG_00164 [Chaetomium globosum CBS 148.51] gi|88184461|gb|EAQ91929.1| CHGG_00164 [Chaetomium globosum CBS 148.51]
  misc_feature (340)..(829): NCBI GI: 46136249 Blast Desc: FG09640.1 [Gibberella zeae PH-1]
  misc_feature: Useful for introducing or modulating the production of volatile compounds
MSPSEGQKPKFRDKLRALRAKLRGKPDDGPKREEKKQNAEEKISIVLADKETQNGLQDSELDKSLTAQRNSLGIRSTDTTSQEYVVNHLDSTTSNDIMSQSSDLWSSAYREAIEGLGDNIDKAILEGENVMQLFRVLENIDKETSAESTFLKGVKYLNRLEVPLKKFKLALDVASPLTNLEPTSATVFGVVRNVTAIAISISAADVDFAKQIGDMLQHITYIDDCDTLGQKLEKMDIHKALVMVYQKLLEFYKAAFDIVTSHRVKLVLAVFLETDRLPIIVKEFLHHAEFLQKLVQKATLEILDDVRAMLYDQEIYRWLGIAKIGRLYQFHSSLKQLQAPEACQWLLEDDTFNRWYQSTESQQLVNLGDMGSGKTMAMAFLIDELGQRKDHHIPQPKICYHYCRDDESGKAVYIYSTLILAILEQLSGLKKTFYDWYKQNVAAGHLDPAKSSEKLEEFLDETITNLDRPLYIVIDGMDECDRASCGALLIFLKRLSQKSSRLKTILSSRPEQEILEQFDGTLVVTLSANEERDRIIVEKTVASQLRHLSPDVKKYLTDTLSEQAKGSAIWTKMIVELIAAKKIKALGAMKSFLESVPLPGELFKLYRNIFLRYTEDDPDNKNLAAIALELLAVSRRALSVLELSWAVTLGAAEESITTTATLGHLVDHERIISLIQPFIARIEFDDLRKRQVRLTHQSVKEFVVREWPLYNRDQQGTSAPRSFSASTVRQKTQQLDMKMTNLCIQYLILNEIDQIDLLSEEHVAFQELPMEFGLFDEKLEELPYDLSESWETWQHWDLWEKDMIHFDPISRGFGEFWLYAACHWNEHFGSLDAEFLPSLGGIEQTAPSNRDSAYRRILETANFSKSCYHSNTAVGAADEILRWGDMSRLHTLLASNIGYQLHNYEFFAGVLIKKWSWSLEIWRDWDTAFDLVRKVTTSMVREKWGRNLLCEASRMACLPIIRRLFEEAQKDEFLMNELVRDPIGDLEGGFIHQSVGLAVLENHYNVVEYLLGEKKIESHLRYRNQQGQTVLHLAAERCNPAMIQILIRHFTEDLHQLDENGDPPLRRVLLSPRKREDMFESAGILMKQRSARDKANITNILQRALQEAIQLGDISMCEFLLSTGFVEPSRVIVHDLDGTVTLLEKPAVHESDAHAILKLMTDNLEQQKSKGK

SEQ ID NO: 35754 - DNA, 923 bp, Muscodor strobelii
  misc_feature: SGI EST ID NO. CUFF.85138.0
  misc_feature: Variant of the nucleotide sequence at SEQ ID NO 35752
gtttgcctctaagacaagatgtcacctagcgaaggtcaaaagcccaagttccgagacaagttgcgtgcattacgtgccaagcttcggggaaaacctgatgatggtcctaaacgcgaagagaagaaacaaaatgccgaagagaaaatcagtatcgtgttggctgacaaagaaacgcagaatggattgcaagactcagaactcgacaaatcgctcacggctcagaggaactccctcgggatacgaagtactgatacaaccagtcaggaatatgtagttaatcaccttgattctaccactagcaatgatattatgagccaatcgtcagacttgtggagctcagcttacagagaggctatcgagggcttaggagataatatcgataaggctattcttgaaggcgagaatgtgatgcaattatttcgggttctcgaaaacatcgacaaagagacgtcagcggaatcgacatttctcaaaggcgtcaagtatctgaacagattggaagtacctttgaagaaatttaagctggctttagatgtagctagtccccttacaaatcttgagccaacaagcgctacggtctttggtgttgtgaggaacgtcaccgcaatcgcaataagtatttcggcagctgatgtcgacttcgctaaacaaatcggagatatgctccagcatatcacctacattgacgactgcgataccttaggccaaaaactagaaaagatggacatacacaaagcactggtaatggtataccagaaattattagagttttacaaggccgcattcgacatcgtgaccagccatagagtcaagttggtgttggctgttttcttagagacagaccgtctcccgattatcgtgaaagagtttcttcaccacgccgaatttctacagaagttggtgcaaaaagcgacattggagat

SEQ ID NO: 35755 - DNA, 1734 bp, Muscodor strobelii
  misc_feature: SGI cDNA ID NO. 572386
  misc_feature: Encodes the peptide sequence at SEQ ID NO 35756
atgtcgccctcttggtccctcaatgctctcggagctctaccccttattctatcaacttcctacgccgtggccagcgcaagctcatattacccagtcccacgagattaccccatgaatagtgtgcaatggagcgactgtccgtcacaatttcaagatatccttgctatagaaggcggcaagatacaatgtggcacactcactgtgccgcttgactacctagctcccaccaacaacaagacactagacctgtcactcgtcagagtacccgcgctcaaggggctggcaaataatagtattatcttcaactttggaggtcccggcgcagaagctcgctttacgcttgcttcgttggcggacaagttgatggcccagactggaagtgtctacgatctcgtcgcttgggatccgcgtggaaccgctgagaccttaacgttcaaatgcttcgaaaattcagcaaatcggtctgcctattctgcccagtttacgtatgggaattcctccgacgtttccaagggccgggcatgggccgctggaacgaactatgctgaagtctgtgcggactacccagatgcagtagagaaagcaccttatattggaaccgcctccaccgcccgcgatgctgccaagatcagcgaagtcttgaacagtgatggaatgattcgatactggggcttctcgtacggatctgttctaggcgctaccatcgccgctatgttcccggacaaagtcgaaagcctggttatcgatggtgttgtcaatccattcgaatactactatgcatatctcgacactcaacaattcgaaggcgctgatcctaccctgtccgagtttttcaggcaatgtgtcgcatcacccgaagtctgtcttttggcgggcaacaacccgaacgcaacagcggaacaactggaagctgaagcttacgatctcatcgacgagcttaaattcagacccattgcataccaagggaacttaatcgactacacactcttgaagaccgcaatccgattcagcttgtacagtcccagcggatgggttcagcttggagccgctctcgacggattcctgagcgaaccacgcaacataacggcagcggcaacgcagctcaatgccatcaccggcggaggcttggcctcgagcttgggagccgacgagtcacccatcggtatcaactgtgtagacgtcgagcctcgtaccgattccttcgatgctgtccagccgtcgtgggaggctgccgagaaaatcagccgttctcatggagatattctggtaacgcttggtgctgtttgctcacagtggaaattggagcccgtggagagatacgagggacgcttcgttaatgtgcatactcgaaagccaatgcttgtaatcggaaacactttcgaccccgccactcccttgcaagcggcccaaaacgtcactgacaccattgagagcagtgtgctgcttgagcacggcggtgttgggcatgctactcttggtcagccatctatctgtactggtaaaacgatcaagaactacttcgtctctggcgagcttcctgaagctggcaccgtctgccctcccctcacaggagcattcgagtacgcagcaggtggggaggactgggagcccctgcttgaggctctcggctaccaggcccctggcaacggaacgaaaaatgccaataatatggccagggatgctttaaagagcacggtgccccatgttaggcgaagtccatttttcgctcaataa

SEQ ID NO: 35756 - protein, 577 aa, Muscodor strobelii
  misc_feature: SGI Peptide ID NO. 572386
  misc_feature (129)..(505): Pfam Id: PF00561 Pfam Desc: alpha/beta hydrolase fold
  misc_feature (415)..(519): Pfam Id: PF08386 Pfam Desc: TAP-like protein
  misc_feature (129)..(255): Pfam Id: PF00561 Pfam Desc: alpha/beta hydrolase fold
  misc_feature (427)..(519): Pfam Id: PF08386 Pfam Desc: TAP-like protein
  misc_feature (41)..(508): NCBI GI: 238845947 Blast Desc: conserved [Microsporum canis CBS 113480]
  misc_feature (14)..(488): NCBI GI: 238485384 Blast Desc: conserved [Aspergillus flavus NRRL3357] gi|220698809|gb|EED55148.1| conserved [Aspergillus flavus NRRL3357]
  misc_feature (23)..(542): NCBI GI: 238500650 Blast Desc: conserved [Aspergillus flavus NRRL3357] gi|220691796|gb|EED48143.1| conserved [Aspergillus flavus NRRL3357]
  misc_feature (41)..(519): NCBI GI: 238492397 Blast Desc: conserved [Aspergillus flavus NRRL3357] gi|220695929|gb|EED52271.1| conserved [Aspergillus flavus NRRL3357]
  misc_feature (84)..(523): NCBI GI: 242815417 Blast Desc: conserved [Talaromyces stipitatus ATCC 10500] gi|218714903|gb|EED14326.1| conserved [Talaromyces stipitatus ATCC 10500]
  misc_feature (7)..(543): NCBI GI: 39974645 Blast Desc: MGG_00531 [Magnaporthe grisea 70-15] gi|145018569|gb|EDK02848.1| MGG_00531 [Magnaporthe grisea 70-15]
  misc_feature (172)..(527): NCBI GI: 169772007 Blast Desc: [Aspergillus oryzae RIB40] gi|83768332|dbj|BAE58471.1| protein product [Aspergillus oryzae]
  misc_feature (39)..(543): NCBI GI: 256720823 Blast Desc: NECHADRAFT_85518 [Nectria haematococca mpVI 77-13-4]
  misc_feature (63)..(519): NCBI GI: 145248299 Blast Desc: An13g02620 [Aspergillus niger] gi|134081149|emb|CAK41659.1| protein product [Aspergillus niger]
  misc_feature (41)..(488): NCBI GI: 169782750 Blast Desc: [Aspergillus oryzae RIB40] gi|83774581|dbj|BAE64704.1| protein product [Aspergillus oryzae]
MSPSWSLNALGALPLILSTSYAVASASSYYPVPRDYPMNSVQWSDCPSQFQDILAIEGGKIQCGTLTVPLDYLAPTNNKTLDLSLVRVPALKGLANNSIIFNFGGPGAEARFTLASLADKLMAQTGSVYDLVAWDPRGTAETLTFKCFENSANRSAYSAQFTYGNSSDVSKGRAWAAGTNYAEVCADYPDAVEKAPYIGTASTARDAAKISEVLNSDGMIRYWGFSYGSVLGATIAAMFPDKVESLVIDGVVNPFEYYYAYLDTQQFEGADPTLSEFFRQCVASPEVCLLAGNNPNATAEQLEAEAYDLIDELKFRPIAYQGNLIDYTLLKTAIRFSLYSPSGWVQLGAALDGFLSEPRNITAAATQLNAITGGGLASSLGADESPIGINCVDVEPRTDSFDAVQPSWEAAEKISRSHGDILVTLGAVCSQWKLEPVERYEGRFVNVHTRKPMLVIGNTFDPATPLQAAQNVTDTIESSVLLEHGGVGHATLGQPSICTGKTIKNYFVSGELPEAGTVCPPLTGAFEYAAGGEDWEPLLEALGYQAPGNGTKNANNMARDALKSTVPHVRRSPFFAQ

SEQ ID NO: 35757 - DNA, 629 bp, Muscodor strobelii
  misc_feature: SGI EST ID NO. CUFF.85166.0
  misc_feature: Variant of the nucleotide sequence at SEQ ID NO 35755
gaaatgtcgccctcttggtccctcaatgctctcggagctctaccccttattctatcaacttcctacgccgtggccagcgcaagctcatattacccagtcccacgagattaccccatgaatagtgtgcaatggagcgactgtccgtcacaatttcaagatatccttgctatagaaggcggcaagatacaatgtggcacactcactgtgccgcttgactacctagctcccaccaacaacaagacactagacctgtcactcgtcagagtacccgcgctcaaggggctggcaaataatagtattatcttcaactttggaggtcccggcgcagaagctcgctttacgcttgcttcgttggcggacaagttgatggcccagactggaagtgtctacgatctcgtcgcttgggatccgcgtggaaccgctgagaccttaacgttcaaatgcttcgaaaattcagcaaatcggtctgcctattctgcccagtttacgtatgggaattcctccgacgtttccaagggccgggcatgggccgctggaacgaactatgctgaagtctgtgcggactacccagatgcagtagagaaagcaccttatattggaaccgcctccaccgcccgcgatgctgccaa

SEQ ID NO: 35758 - DNA, 1185 bp, Muscodor strobelii
  misc_feature: SGI cDNA ID NO. 572387
  misc_feature: Encodes the peptide sequence at SEQ ID NO 35759
atggctaaaagtaccaaagccctctgcaagaccgtcgccagcgtgagaatcaaaatcaaaatcacagatcttccttgtgaggtcatcgcgggagttctaggcaagttggacgatcttcgagatcttccgaacgcgctgctcagctgccggtatttctactcggcatacaaagaatttccaggcatagcagtcgatatcctaacgcctcaccacattcatccaacgttgctgccctacttggttgctgtacgcgaggcatcgcatctgccacggccccgtctacgacgtgatatcaagcagctcttagacagcttgcacgacgatccgaaggtcttgacgaaccgccttcgccatatgcccctctccgtcatcctagagatgagttacttccacggcctggttgaatttctggccaacgattttgcctataaggcttgggacacactcgaagagattgcgacgctaccgccaagctcacatgaatatcggagagactatttttacgatgcgattctcgagacgcaattcggcgaaagcagaaagatgaaacgccataacggtcaacacgagggcttcttgcttacttggtcggaggaattccgattccaacgtgcgttctatcgcgtagccctgtttctgcatctattcggaggcgatataatggaagatgaggagtgcaggcttccgaccgatcagatcgacttatttctgtctagacatcctccgtgggtcaatgaccagctttggtgctggcgagatcatatcaactctagaaagtggattggcttcagagagtacaaatacgtgactccacagattcagcgacttttagagccgttgttcatttacaaccaaaaggtgcaaaggttcgaggacgtcctcgaatcgtcaatgaagcgacaaatggaaaaaatggagagtctacgtagcggccccaatgagggatggagcgatgaagagctgaaggtgctagaaccaacgccagattcagaagacactgacgcagggccgttcttgaactggaagcacctcttcaccgccagcgttgggcccgatgcacgctactgttacaagtacaatcgcttcaaccgccggagcgcatacgtcttctgggacacagcccgggcagaacgatacagcttgcccgaacttttcctcgagatttacgagacggacattatctaa

SEQ ID NO: 35759 - protein, 394 aa, Muscodor strobelii
  misc_feature: SGI Peptide ID NO. 572387
  misc_feature (18)..(258): NCBI GI: 240109431 Blast Desc: CPC735_029360 [Coccidioides posadasii C735 delta SOWgp]
  misc_feature (18)..(312): NCBI GI: 119182895 Blast Desc: [Coccidioides immitis RS]
MAKSTKALCKTVASVRIKIKITDLPCEVIAGVLGKLDDLRDLPNALLSCRYFYSAYKEFPGIAVDILTPHHIHPTLLPYLVAVREASHLPRPRLRRDIKQLLDSLHDDPKVLTNRLRHMPLSVILEMSYFHGLVEFLANDFAYKAWDTLEEIATLPPSSHEYRRDYFYDAILETQFGESRKMKRHNGQHEGFLLTWSEEFRFQRAFYRVALFLHLFGGDIMEDEECRLPTDQIDLFLSRHPPWVNDQLWCWRDHINSRKWIGFREYKYVTPQIQRLLEPLFIYNQKVQRFEDVLESSMKRQMEKMESLRSGPNEGWSDEELKVLEPTPDSEDTDAGPFLNWKHLFTASVGPDARYCYKYNRFNRRSAYVFWDTARAERYSLPELFLEIYETDII

SEQ ID NO: 35760 - DNA, 1030 bp, Muscodor strobelii
  misc_feature: SGI EST ID NO. CUFF.85171.0
  misc_feature: Variant of the nucleotide sequence at SEQ ID NO 35758
ataagtcatacaacgagaagtcatatcatatcatccggccctcttgtgtctccttgtctctcttcgacatcaatcaaagacagatttgcgagtcattctggattcatctctcaccccagattttccatacctccattacatcaatcccgtcgacatcatggctaaaagtaccaaagccctctgcaagaccgtcgccagcgtgagaatcaaaatcaaaatcacagatcttccttgtgaggtcatcgcgggagttctaggcaagttggacgatcttcgagatcttccgaacgcgctgctcagctgccggtatttctactcggcatacaaagaatttccaggcatagcagtcgatatcctaacgcctcaccacattcatccaacgttgctgccctacttggttgctgtacgcgaggcatcgcatctgccacggccccgtctacgacgtgatatcaagcagctcttagacagcttgcacgacgatccgaaggtcttgacgaaccgccttcgccatatgcccctctccgtcatcctagagatgagttacttccacggcctggttgaatttctggccaacgattttgcctataaggcttgggacacactcgaagagattgcgacgctaccgccaagctcacatgaatatcggagagactatttttacgatgcgattctcgagacgcaattcggcgaaagcagaaagatgaaacgccataacggtcaacacgagggcttcttgcttacttggtcggaggaattccgattccaacgtgcgttctatcgcgtagccctgtttctgcatctattcggaggcgatataatggaagatgaggagtgcaggcttccgaccgatcagatcgacttatttctgtctagacatcctccgtgggtcaatgaccagctttggtgctggcgagatcatatcaactctagaaagtggattggcttcagagagtacaaatacgtgactccacagattcagcgacttttagagccgttgttcatttacaaccaaaaggtgcaaaggttcgag

SEQ ID NO: 35761 - DNA, 2637 bp, Muscodor strobelii
  misc_feature: SGI cDNA ID NO. 572388
  misc_feature: Elevated expression when VOC is produced
  misc_feature: Encodes the peptide sequence at SEQ ID NO 35762
atgtcggttcttgcagaattgtccgaactgccagaattagttcgggatagcaaactagaggttcagttctatccagatgcttccgcacctactgccacagtacatacgtactcacgttctagacggaaaaaacagcaggatatatggacacgcgtgaggcctctcggacacggcggctacggtattgtgtggttggagaagactcaggtcgggaacgagcaatcacaaaagtttcgggcggtgaaggaattgaagcgagacaagggcagcccccaattgcgagaatgcactcgggaattggaggctttagccaagttctctcagaacagtttcaatcgctttttcgtcaaactgcacggatggtacgagacaccagaaaagcttttcattgcgatggagtactgcccatacggcgacatgttcagttacatgagggaaaaccgattgcacgaggaagaggtcaaggatatcgtatggcaactgcttcaaggtctagtctttatgcatgaaagcggttttgcgcatcgtgatctcaaaccaaagaacatgttgatcagggagagacctccgcatgaggacgggtggtgggtcaagttatgcgatcttggccttaccaagcgagttgagggtgatactcaatctaccatcgtccaaggcacgccggctttcatggctccagagctctggataaaacgagacacctataagcctgacccatatgcatccgacatgtggtccctgggcgaaacaaccttccagatgctcaccagccggccaacatttagtgattcagttgcgcttcacagctatgtgaacggtatcgtccagtttccaacaatagtgccccatgattcggattcaagtgctcgcgacgcaacggactttgtgcaaatgcttatggcggtatccccaaccggcaggatgagcgccaaggaagcagcagagcacaagtgggtgattactggcgctaggcaatccgacgaagatgaaactaaattccctggaatatccccgagggaagatcaatcgggaaatatcgagaatatataccctgcgttcgctgaactaagtctattgggaagcaaagacgtctccttaacggatgcatccggtcggtggaccacattgccctcgtcaccgggcattggaccaacagcatcagcaaggaatagtgacaagaatgacaaaacactcgatgctaaaaagtggcaccatcctgagcaattgcctggcgcggtccggcaagacctcccgaagcttcatggctttgctaactaccaaactccagttggtatcatgcgcctccatttccatggcgctaaacatcttcgtaattccgagacgcgacaggaattgcacccttatgttcgtgtccttctctcaggcgtcgagaagacacgcactataactcattatagcacaggagatccagcctggaatgaagtattttatgtccccatgcactcacctcgagactctctgaagcttgaggttatgaatgtaagatcgacgggcaaagattgtagtttaggccttgtggaaattctgggccatgagtatatccatacaaatacgacaggaggttaccaggtctacgagaaagatcggctgctcagtagagatctactttccggggatgatggtatcgccactggaaccctgatttattcggcctctttctatccgacatttaacgtaggcgacccattagaaaagaaagacgacgatcgaggaacaccacaaagtgcaatcgaggagtcaacgctggtccgtgtcactcccatggaacaactcaaacacaagacagggttgttgatcttctggctgcttgaagcatcaatggaaaaaagtggcttatgcgtggagttatttgtcgacaatatgcgttacccctcgtatatttcgaaaagggcagaacacaaaaaccacattttcgacgaggttggagaatgctttattcgggagctcgacttttctcggctcaccatcaaggtgcaagacagacgtgtgaggcatatagagcagagagactatgcccacacactagcccagatgacaggcagtacattagagatgcttaaacaatgtttgaataacccgacctcgctaaagttaaaggacaaagaaggtagaacgacccttgtcaaagtcagtatggggtgggttccagtcggaatggatatcgatccaaaggagaacattgttaatatggggagtctccgcgtcgacgtactctactgtctgaatcttcatatatccgataaagaccgaagcagcggtctctacgccaagtttcacctgaacgaccaaaaagtttatataacgaaacagtgtagagcaactgagcatcgctgggatgaatcctttgaaattgctatcacttcaaaggcagatgcaagacttcgtgtcagccttcataaaaaactcattggcactcgtgacgaatggttgttgggcgttgcggattttaatatccaaaacctggatccgtttagcgcgacggagcttgtcttgccgctatctggccagtctggctcattgaaagtccgactacttttcagacaagagtacagtatatcattcgctggcaccttagtcagggctatggacaaattgaagcgcaaaaggggacattag

SEQ ID NO: 35762 - protein, 878 aa, Muscodor strobelii
  misc_feature: SGI Peptide ID NO. 572388
  misc_feature (433)..(514): Pfam Id: PF00168 Pfam Desc: C2 domain
  misc_feature (49)..(319): Pfam Id: PF00069 Pfam Desc: Protein kinase domain
  misc_feature (740)..(815): Pfam Id: PF00168 Pfam Desc: C2 domain
  misc_feature (116)..(211): Pfam Id: PF07714 Pfam Desc: Protein tyrosine kinase
  misc_feature (424)..(857): NCBI GI: 145605327 Blast Desc: MGG_09947 [Magnaporthe grisea 70-15] gi|145013148|gb|EDJ97789.1| MGG_09947 [Magnaporthe grisea 70-15]
  misc_feature (424)..(872): NCBI GI: 256732677 Blast Desc: [Nectria haematococca mpVI 77-13-4]
  misc_feature (424)..(872): NCBI GI: 46125015 Blast Desc: FG06885.1 [Gibberella zeae PH-1]
  misc_feature (424)..(857): NCBI GI: 164427174 Blast Desc: NCU03263 [Neurospora crassa OR74A] gi|157071637|gb|EAA35180.2| NCU03263 [Neurospora crassa OR74A]
  misc_feature (422)..(866): NCBI GI: 226280831 Blast Desc: tricalbin-3 [Paracoccidioides brasiliensis Pb01]
  misc_feature (429)..(866): NCBI GI: 154301125 Blast Desc: BC1G_10535 [Botryotinia fuckeliana B05.10] gi|150856283|gb|EDN31475.1| BC1G_10535 [Botryotinia fuckeliana B05.10]
  misc_feature (422)..(866): NCBI GI: 156057007 Blast Desc: SS1G_04234 [Sclerotinia sclerotiorum 1980] gi|154702020|gb|EDO01759.1| SS1G_04234 [Sclerotinia sclerotiorum 1980]
  misc_feature (422)..(866): NCBI GI: 240111459 Blast Desc: C2 domain containing protein [Coccidioides posadasii C735 delta SOWgp]
  misc_feature (422)..(866): NCBI GI: 119188845 Blast Desc: CIMG_04470 [Coccidioides immitis RS]
  misc_feature (422)..(859): NCBI GI: 6687541 Blast Desc: transmembrane protein [Erysiphe pisi]
  misc_feature: Useful for introducing or modulating the production of volatile compounds
MSVLAELSELPELVRDSKLEVQFYPDASAPTATVHTYSRSRRKKQQDIWTRVRPLGHGGYGIVWLEKTQVGNEQSQKFRAVKELKRDKGSPQLRECTRELEALAKFSQNSFNRFFVKLHGWYETPEKLFIAMEYCPYGDMFSYMRENRLHEEEVKDIVWQLLQGLVFMHESGFAHRDLKPKNMLIRERPPHEDGWWVKLCDLGLTKRVEGDTQSTIVQGTPAFMAPELWIKRDTYKPDPYASDMWSLGETTFQMLTSRPTFSDSVALHSYVNGIVQFPTIVPHDSDSSARDATDFVQMLMAVSPTGRMSAKEAAEHKWVITGARQSDEDETKFPGISPREDQSGNIENIYPAFAELSLLGSKDVSLTDASGRWTTLPSSPGIGPTASARNSDKNDKTLDAKKWHHPEQLPGAVRQDLPKLHGFANYQTPVGIMRLHFHGAKHLRNSETRQELHPYVRVLLSGVEKTRTITHYSTGDPAWNEVFYVPMHSPRDSLKLEVMNVRSTGKDCSLGLVEILGHEYIHTNTTGGYQVYEKDRLLSRDLLSGDDGIATGTLIYSASFYPTFNVGDPLEKKDDDRGTPQSAIEESTLVRVTPMEQLKHKTGLLIFWLLEASMEKSGLCVELFVDNMRYPSYISKRAEHKNHIFDEVGECFIRELDFSRLTIKVQDRRVRHIEQRDYAHTLAQMTGSTLEMLKQCLNNPTSLKLKDKEGRTTLVKVSMGWVPVGMDIDPKENIVNMGSLRVDVLYCLNLHISDKDRSSGLYAKFHLNDQKVYITKQCRATEHRWDESFEIAITSKADARLRVSLHKKLIGTRDEWLLGVADFNIQNLDPFSATELVLPLSGQSGSLKVRLLFRQEYSISFAGTLVRAMDKLKRKRGH

SEQ ID NO: 35763 - DNA, 2945 bp, Muscodor strobelii
  misc_feature: SGI EST ID NO. CUFF.85178.0
  misc_feature: Variant of the nucleotide sequence at SEQ ID NO 35761
aggttcagttctatccagatgcttccgcacctactgccacagtacatacgtactcacgttctagacggaaaaaacagcaggatatatggacacgcgtgaggcctctcggacacggcggctacggtattgtgtggttggagaagactcaggtcgggaacgagcaatcacaaaagtttcgggcggtgaaggaattgaagcgagacaagggcagcccccaattgcgagaatgcactcgggaattggaggctttagccaagttctctcagaacagtttcaatcgctttttcgtcaaactgcacggatggtacgagacaccagaaaagcttttcattgcgatggagtactgcccatacggcgacatgttcagttacatgagggaaaaccgattgcacgaggaagaggtcaaggatatcgtatggcaactgcttcaaggtctagtctttatgcatgaaagcggttttgcgcatcgtgatctcaaaccaaaggtgagtattgaaccgaatcaagtgatctgacatacatgacttacccgagggacagaacatgttgatcagggagagacctccgcatgaggacgggtggtgggtcaagttatgcgatcttggccttaccaagcgagttgagggtgatactcaatctaccatcgtccaaggcacgccggctttcatggctccagagctctggataaaacgagacacctataagcctgacccatatgcatccgacatgtggtccctgggcgaaacaaccttccagatgctcaccagccggccaacatttagtgattcagttgcgcttcacagctatgtgaacggtatcgtccagtttccaacaatagtgccccatgattcggattcaagtgctcgcgacgcaacggactttgtgcaaatgcttatggcggtatccccaaccggcaggatgagcgccaaggaagcagcagagcacaagtgggtgattactggcgctaggcaatccgacgaagatgaaactaaattccctggaatatccccgagggaagatcaatcgggaaatatcgagaatatataccctgcgttcgctgaactaagtctattgggaagcaaagacgtctccttaacggatgcatccggtcggtggaccacattgccctcgtcaccgggcattggaccaacagcatcagcaaggaatagtgacaagaatgacaaaacactcgatgctaaaaagtggcaccatcctgagcaattgcctggcgcggtccggcaagacctcccgaagcttcatggctttgctaactaccaaactccagttggtatcatgcgcctccatttccatggcgctaaacatcttcgtaattccgagacgcgacaggaattgcacccttatgttcgtgtccttctctcaggcgtcgagaagacacgcactataactcattatagcacaggagatccagcctggaatgaagtattttatgtccccatgcactcacctcgagactctctgaagcttgaggttatgaatgtaagatcgacgggcaaagattgtagtttaggccttgtggaaattctgggccatgagtatatccatacaaatacgacaggaggttaccaggtctacgagaaagatcggctgctcagtagagatctactttccggggatgatggtatcgccactggaaccctgatttattcggcctctttctatccgacatttaacgtaggcgacccattagaaaagaaagacgacgatcgaggaacaccacaaagtgcaatcgaggagtcaacgctggtccgtgtcactcccatggaacaactcaaacacaagacagggttgttgatcttctggctgcttgaagcatcaatggaaaaaagtggcttatgcgtggagttatttgtcgacaatatgcgttacccctcgtatatttcgaaaagggcagaacacaaaaaccacattttcgacgaggttggagaatgctttattcgggagctcgacttttctcggctcaccatcaaggtgcaagacagacgtgtgaggcatatagagcagagagactatgcccacacactagcccagatgacaggcagtacattagagatgcttaaacaatgtttgaataacccgacctcgctaaagttaaaggacaaagaaggtagaacgacccttgtcaaagtcagtatggggtgggttccagtcggaatggatatcgatccaaaggagaacattgttaatatggggagtctccgcgtcgacgtactctactgtctgaatcttcatatatccgataaagaccgaagcagcggtctctacgccaagtttcacctgaacgaccaaaaagtttatataacgaaacagtgtagagcaactgagcatcgctgggatgaatcctttgaaattgctatcacttcaaaggcagatgcaagacttcgtgtcagccttcataaaaaactcattggcactcgtgacgaatggttgttgggcgttgcggattttaatatccaaaacctggatccgtttagcgcgacggagcttgtcttgccgctatctggccagtctggctcattgaaagtccgactacttttcagacaagagtacagtatatcattcgctggcaccttagtcagggctatggacaaattgaagcgcaaaaggggacattagggcatctggaagaacttacgagagcaaagtcgggattgcgtctgagaaacatgcctagagaccattaccattctcagtcctgcgctttcggaactgagcatgacgtgatccacaaattcgagttctatggatgactatctttcgttcacaatgtcaatatgaaaataccactgtaagtggctctactgcaactactgcaagtgagactccggcatgagcgccgcttggctatgaaatggcaccgagaaggctcgactgtgcttctccgatacctgtatttgatcaacttgtagtgccagaaaagattgaat

SEQ ID NO: 35764 - DNA, 1878 bp, Muscodor strobelii
  misc_feature: SGI cDNA ID NO. 572389
  misc_feature: Encodes the peptide sequence at SEQ ID NO 35765
atgtcgaattcactacgggtgtcacatctgggccgatactctgcatattcacacaccagagtctctgtacggtggtacgcaaaagagacaacatcacatactatctcatctcagaacttgcgcaaaagagagcgcttcactcgcctgtcccgcttctggtccttaacaggtggcatcacgccaactggatctgaagatggtcatgccaaacttatcagagctggatatctgcgacagtccaatccgggcatgtttcatttgcttccgctaggcttgcgagttcaaaacaagcttgagaatctaatagataaatacatgtcgcagttggacgcatcaaaagtgtcgctctcatccatctcatcacaatggctgtggcagcacacagatagactagaaggctacggaccagagctattccggctcaacgatagaaaggagacgcctctgctcctggcacccactcatgaagaagaaatcacgacactcgtaggcagaacagtcaagtcctataaaagcctcccactgaggctttatcaaataggccgcaaatatcgcgacgagatccgcccgcgacatggagtattgcgctccagagagttcgtcatgaaagacctctacactttcgactattctgcgcagactgccctgctaacgtacgaaactgttcgaattgcatacaacgagcttttcaacgagttgaaactgccctatcttgttgctgaagctagttccggagatatagggggcgatctgagtcacgaataccacctgccatcgccgataggcgaagacaacgtcatcagctgccagtcgtgcgattatgtcgcaaacgaagaactagctgtcgcacgacctggatcagaaattgtgcaggaccatcatgaagcaagagaatggaagggcatatccaaagaccgaaagaccctcataaacgtttggtatccgagctggttttgcgctgccgatctcaacatccacgccattaaagctgtgtgcccaggactggattccagcctcggagaggcttcagaattatgggaaggggctgtttccaaagtggcgcaggcttcttcgcccgagaccactctcaaaatcttggacattgttgattacaggcttgcttcgatctttgatgaagaacttggtcccgaactgggtttgtgggaacgcttaattcatcattatcgtgtcgaccgatcgaagtgggattacgagtgcgtgacgtcgacacctggaaacgagcctttcaacgcaatacgtatccatgatggagaccactgcccacgctgcacttcaggagaactgaaagtacagaaagcgatagaactcggacacacatttcacctaggaacgaaatactccgatgccctcgaagcgcgtatccaagtgcctaactccttactagaaccgtcggcaccaccatctaccgacggtgctacctccccaaaatcaaacgatcagtcaatggtatcaatgcaaatgggctgccacggcataggcgtatcccgcatcatcggcgccgtcgccaaccacctggcagacgacaagggtctgaactggccgcgtgtcatcgcgccatttgaggttatcgtcatccccggcaaaggcacggagaaagatgctgatgaactctcgtccatgttgactgaaccgagtgagacatcgtctattgatttgatagtggatgatcgtacggaacctttgccgtggaagttgaaagacgctgatcttattgggtaccctgttgtattggtgcttggacggaaatggtcttcggaccgtatggtcgaggtccagtgtcggagacttggggttaaggagtttgttgttgtcgacaatttgttggagtatgttcatgctttgcttgcaaaattgtga

SEQ ID NO: 35765 - protein, 625 aa, Muscodor strobelii
  misc_feature: SGI Peptide ID NO. 572389
  misc_feature (528)..(621): Pfam Id: PF03129 Pfam Desc: Anticodon binding domain
  misc_feature (94)..(264): Pfam Id: PF00587 Pfam Desc: tRNA synthetase class II core domain (G, H, P, S and T)
  misc_feature (67)..(625): NCBI GI: 256735019 Blast Desc: NECHADRAFT_89892 [Nectria haematococca mpVI 77-13-4]
  misc_feature (67)..(625): NCBI GI: 46108902 Blast Desc: FG01333.1 [Gibberella zeae PH-1]
  misc_feature (46)..(621): NCBI GI: 171688027 Blast Desc: protein product [Podospora anserina] gi|170943975|emb|CAP69627.1| protein product [Podospora anserina]
  misc_feature (47)..(625): NCBI GI: 116180206 Blast Desc: CHGG_00731 [Chaetomium globosum CBS 148.51] gi|88185028|gb|EAQ92496.1| CHGG_00731 [Chaetomium globosum CBS 148.51]
  misc_feature (11)..(580): NCBI GI: 164422625 Blast Desc: NCU09892 [Neurospora crassa OR74A] gi|157069749|gb|EAA29381.2| [Neurospora crassa OR74A]
  misc_feature (47)..(625): NCBI GI: 255940600 Blast Desc: Pc16g07440 [Penicillium chrysogenum Wisconsin 54-1255] gi|211585692|emb|CAP93414.1| Pc16g07440 [Penicillium chrysogenum Wisconsin 54-1255]
  misc_feature (47)..(625): NCBI GI: 242768112 Blast Desc: prolyl-tRNA synthetase [Talaromyces stipitatus ATCC 10500] gi|218724701|gb|EED24118.1| prolyl-tRNA synthetase [Talaromyces stipitatus ATCC 10500]
  misc_feature (47)..(625): NCBI GI: 212542487 Blast Desc: prolyl-tRNA synthetase [Penicillium marneffei ATCC 18224] gi|210066305|gb|EEA20398.1| prolyl-tRNA synthetase [Penicillium marneffei ATCC 18224]
  misc_feature (11)..(625): NCBI GI: 238498424 Blast Desc: prolyl-tRNA synthetase [Aspergillus flavus NRRL3357] gi|220693721|gb|EED50066.1| prolyl-tRNA synthetase [Aspergillus flavus NRRL3357]
  misc_feature (42)..(625): NCBI GI: 258569006 Blast Desc: [Uncinocarpus reesii 1704] gi|237906693|gb|EEP81094.1| [Uncinocarpus reesii 1704]
  misc_feature (68)..(618): SWISSPROT Homolog: EC 6.1.1.15 Proline--tRNA ligase
MSNSLRVSHLGRYSAYSHTRVSVRWYAKETTSHTISSQNLRKRERFTRLSRFWSLTGGITPTGSEDGHAKLIRAGYLRQSNPGMFHLLPLGLRVQNKLENLIDKYMSQLDASKVSLSSISSQWLWQHTDRLEGYGPELFRLNDRKETPLLLAPTHEEEITTLVGRTVKSYKSLPLRLYQIGRKYRDEIRPRHGVLRSREFVMKDLYTFDYSAQTALLTYETVRIAYNELFNELKLPYLVAEASSGDIGGDLSHEYHLPSPIGEDNVISCQSCDYVANEELAVARPGSEIVQDHHEAREWKGISKDRKTLINVWYPSWFCAADLNIHAIKAVCPGLDSSLGEASELWEGAVSKVAQASSPETTLKILDIVDYRLASIFDEELGPELGLWERLIHHYRVDRSKWDYECVTSTPGNEPFNAIRIHDGDHCPRCTSGELKVQKAIELGHTFHLGTKYSDALEARIQVPNSLLEPSAPPSTDGATSPKSNDQSMVSMQMGCHGIGVSRIIGAVANHLADDKGLNWPRVIAPFEVIVIPGKGTEKDADELSSMLTEPSETSSIDLIVDDRTEPLPWKLKDADLIGYPVVLVLGRKWSSDRMVEVQCRRLGVKEFVVVDNLLEYVHALLAKL

SEQ ID NO: 35766 - DNA, 6743 bp, Muscodor strobelii
  misc_feature: SGI EST ID NO. CUFF.85299.0
  misc_feature: Variant of the nucleotide sequence at SEQ ID NO 35764
ctcgcctgtgtgtaaaataccctgtgtgaatccctgattcgtggtaattcttctcgtgatccgtcaccttgtcgtagctgagtgacgcaccgacgtaatcccctggtgcatgaaacccgcccagccttacattgatatcaatcaaacctgtttgtcagtcctctttggctgaattgagtttcatgatacgtttttcgtacctctatattaccctgattcgcctcgcaagttgattcgtagaagaccaaggcgagtttaccttcagctgtgcatatatagaactcctgccccgcatcatctacacctcaactttaacttgacctcagctcatacctcaggtagagaacttgagatatctacaaatctattaaaccaacacagtcatacttagattgtttcaacactacttagaatcatggctaccgcagagaccgtaaccctaggagctccccatccacccaaggaggaatcaatcaaagccttcggcgaagtagaagaagagctaaagaaacaattgcttcacatgaagcacacataccacaaacacgaaccagaatacttcgccccagtccaacatctcagcgacagcgacctaacctcattttccacctcatccaatctcgagaccgtgcgcgtcgcagcagtagactacggcgtaatcctcttcggcaagatccgcatccccgccatgccgacgtccggtccagcatatatccacgtgcgaatcttctctaaggggcccgagtctgaggatcctgcggagtttcatagtattcataccgaggaacgcgaggttgaggggggtgataagaaatatagggcgatttttgatgagggtgatgagttggagtttttcgctacttaggagggggaataaagggattgattgggttgatggatgatggaatggtgtgggtatggagggaattatgttgagatgtaggtaatgagtgaatgagatgaaattaaatgtttagtatcatgtctggtaactcattgagtgctagcttatgtgcgtggagcgatgctatcaagtgacttcccatggagcctcatatcttcgacctaaacttttcaatttctgtacatatccttcaccctactccatcatctccgcataatcatcagcagaagcaaatagcggcaaggccctgagcgccttcttcctcttcgtgcgcgccgatactggcttcttctccttttcattcacaacttgttcaacttcctcttcttcttcctcatcgctgtcatcgtcgtcagactcgtccagattaaaattatcttcatcatcctcttccatagcctttctgaattcctgatctgactcatccaggctcatcatatcctccaacccagcatcatcatcagagtcttcctggatctccggtcgtgaattaacaagcgcatcccagatttcatcttcgttctgctcctcgtcatcttcgtcttcatcttcgacatccttcttcttcttctgcttcttctcgcgctcgacctgtcctggtttgccgacttgcgcgaagtacttgtggaagaagacatcctcaagcggaacgtcctcactcttcttattccagaatgttgccgtgttcacggagtcggcagcatccttgaatgacgccttatttgatactaagatgctgccttgactgctggcggcgatcggttgcatgatcgatgctcccttgccgtggtctgtcgtcttggcgttcttgtatacaaacttatctaggaaagcgatgagggtatgattcgccaaatctggctttttaaccggcttttgaccattgagaagggatgtggcaaaaacatcgaccgatgggtgatagtgtttgatgaaaggtaatatttcccagagacagctcagatgtgcgttgctgtactccggatcacgtttgcgcccatcgtaggcgtttttaggtctggagggcaggttgtcggcggcatcgacaagtgtctcttcatctgggagctcggagtcttcgaaatcgttctcttccggctcactgagtagagtcttgatatcgggaaacgcgacacatagttcggtagtaagatacaggatcccacaaacaaatgaagatgaatgcagattgaggatttgtaacattcgcttgacaaaagccttgactcggcgaacatcgatgtctgatttgagacttcggtagagaaggttgaggtatagagcctgttttgacgatgtaatgagacgagggtccaataaagactcatacagtgttcggaagtatcgctctgttgcaagctgcctatttgccgctagttgttggatcagcattagggcttgtatactagtattgaaatttgaagagtgtgtgatgcggaagagggtatctagatgagattcgagtgtggactggtctgcctgggagaagggcacggctctgttcacgccagtgagaatggccgagacgagtttttcagcagcctcattctcgccaccggcaactggtggagtcttgtcgttggcttcctttgtaggagccggccttcctttcctcggtttacgctgcggggcgggcttcgatccgtcaataacagaatcgagctggccaagttccccactctttaacagggacagaaacattccaaagtagatacgtagtaaagaatctgcaagctcgggctctctggtactgaggatagtctgattgagagtgttaacggcataatatttggcgcgattattctgacccggtcggaagatgacgtcttgctcaactgcccgcacaatgacttgtttcattcggggatgtgtggtgagcatctgaagtaagagataggaggctctcgaagcaatcttcctgtctcggtcgccgagcttgttgaccagcaatcgaagtaggttggactcttgctcgggcttgtctcgaagcagagcgaagacctggtcaagtgctttcgttcgggcataggtgacctcatcgtcacaccatacctctagactttgaatcatcttgaagtaagcatccttcaaccagtcttcgaaataccacgagagcaggtgttccttggtgatctttccaggtagttcctggctagagttccatgacttgacattgtgcttttgcaaagttcctattaagccgagctgagagccaaaggtgcgaagtcgtctatcggaggggaggatcatgcccggaccgaacatgtcgaccaaagcagcgagagccgagagcgcttgatcacggctccgcttggagcccagacccatgagattctcaagagccttgatgttgtgcattggcgactcctggacggcgagagtcaaggcagacaccttgtcggacatggtaccggaggtcatgatctgggacatgaattttcgagacgaggtggcggcatatgtggtattgtacgcagctgtgtcttcttgaagtatggtcttggcatagtctttcaaggctgctattgagctggagaagggggcaacatcgtcagaggtcggggctgaaagggatttcaagttaacagcatgccagtcaggccgtggctcaaatatctattattgagattagctggatgtctcagcaaattcagggagcttagagaggcttactgaccgttttcctgttgggatctttgatgctttcatcctgcgcctcgtcttcagactcttcgtcgtcctcatcaacttcctcgtcttcgtcttcgtcggcaggctcatcatcttcgccatcgctagaaggctctggggcaacctcgtcaaagccgagtccagcagcaaactttgccagctcggcacggagtgctttatctgcgttcttgtcgctcttctggttgttgactgcgtcgtcgtccgactcaacgccgtcgatcagcttgtaatcatcttcatcgcccccgagagccttgatttcgtcgagtaaggcatcggaggcgttcgcttgcgcaggcttgtgaggcttgtgaggcttgtcgcttggtttggatttgcggtctgcgaactggcccttcggtttggcatcgaatttggtatgtttcccgctcgacatgccattgggcgcgatgtttggctttccatttgttttcagatatggctttccgttgtgcttgctaaccttgggcttgtcttgctgactccgcttcttcgagggcggttgtaccgcatcgttcgatggttctaatttccgttttcctttgctgttatctttggattcggggttcttaattcccgcaagcttgttgtcaagcttggccgtcaatttggccagagcagcctcgtcaaagtctgccatatttgtcgttgaaacagcgcctctgactctgtctggttgtgctggagggatggctcaacaacagcgaccgcccgcagaaaaatcaaagccagcaaaaaaaagttgagcggggcgaggctgcatatttagcgaagtgggctgccaattgacagggatcttcagcggccttagcgctcttagcgtctccgtccaccctgcaaggctgctaaagctctcgactgcgtcgcatgtcgaggtgcgaatgagattaagatgtttgcccactttgatctattcccatgcgcttgtactgaattcttttgactatctacattataccgagatggatgcatatgactgatatcaatatcgactttgtcggcgatctggcggggatatcggcacgcgtcgcctggctttaggcgcgtcgtgcagattttcattcagactgttgaaatgtcgaattcactacgggtgtcacatctgggccgatactctgcatattcacacaccagagtctctgtacggtggtacgcaaaagagacaacatcacatactatctcatctcagaacttgcgcaaaagagagcgcttcactcgcctgtcccgcttctggtccttaacaggtggcatcacgccaactggatctgaagatggtcatgccaaacttatcagagctggatatctgcgacagtccaatccgggcatgtttcatttgcttccgctaggcttgcgagttcaaaacaagcttgagaatctaatagataaatacatgtcgcagttggacgcatcaaaagtgtcgctctcatccatctcatcacaatggctgtggcagcacacagatagactagaaggctacggaccagagctattccggctcaacgatagaaaggagacgcctctgctcctggcacccactcatgaagaagaaatcacgacactcgtaggcagaacagtcaagtcctataaaagcctcccactgaggctttatcaaataggccgcaaatatcgcgacgagatccgcccgcgacatggagtattgcgctccagagagttcgtcatgaaagacctctacactttcgactattctgcgcagactgccctgctaacgtacgaaactgttcgaattgcatacaacgagcttttcaacgagttgaaactgccctatcttgttgctgaagctagttccggagatatagggggcgatctgagtcacgaataccacctgccatcgccgataggcgaagacaacgtcatcagctgccagtcgtgcgattatgtcgcaaacgaagaactagctgtcgcacgacctggatcagaaattgtgcaggaccatcatgaagcaagagaatggaagggcatatccaaagaccgaaagaccctcataaacgtttggtatccgagctggttttgcgctgccgatctcaacatccacgccattaaagctgtgtgcccaggactggattccagcctcggagaggcttcagaattatgggaaggggctgtttccaaagtggcgcaggcttcttcgcccgagaccactctcaaaatcttggacattgttgattacaggcttgcttcgatctttgatgaagaacttggtcccgaactgggtttgtgggaacgcttaattcatcattatcgtgtcgaccgatcgaagtgggattacgagtgcgtgacgtcgacacctggaaacgagcctttcaacgcaatacgtatccatgatggagaccactgcccacgctgcacttcaggagaactgaaagtacagaaagcgatagaactcggacacacatttcacctaggaacgaaatactccgatgccctcgaagcgcgtatccaagtgcctaactccttactagaaccgtcggcaccaccatctaccgacggtgctacctccccaaaatcaaacgatcagtcaatggtatcaatgcaaatgggctgccacggcataggcgtatcccgcatcatcggcgccgtcgccaaccacctggcagacgacaagggtctgaactggccgcgtgtcatcgcgccatttgaggttatcgtcatccccggcaaaggcacggagaaagatgctgatgaactctcgtccatgttgactgaaccgagtgagacatcgtctattgatttgatagtggatgatcgtacggaacctttgccgtggaagttgaaagacgctgatcttattgggtaccctgttgtattggtgcttggacggaaatggtcttcggaccgtatggtcgaggtccagtgtcggagacttggggttaaggagtttgttgttgtcgacaatttgttggagtatgttcatgctttgcttgcaaaattgtgaagtcagcggggtttgcgttgtattattactgtatttggttagagatatatttatatgggtcttcgaagccgtagttgtccaatagactggtcagaatctataccgatacttccacatttgtatgcaaacaggtttcatttgtttagtcagcagagacgcccacacccatcattg

SEQ ID NO: 35767 - DNA, 3096 bp, Muscodor strobelii
  misc_feature: SGI cDNA ID NO. 572390
  misc_feature: Encodes the peptide sequence at SEQ ID NO 35768
atggcagactttgacgaggctgctctggccaaattgacggccaagcttgacaacaagcttgcgggaattaagaaccccgaatccaaagataacagcaaaggaaaacggaaattagaaccatcgaacgatgcggtacaaccgccctcgaagaagcggagtcagcaagacaagcccaaggttagcaagcacaacggaaagccatatctgaaaacaaatggaaagccaaacatcgcgcccaatggcatgtcgagcgggaaacataccaaattcgatgccaaaccgaagggccagttcgcagaccgcaaatccaaaccaagcgacaagcctcacaagcctcacaagcctgcgcaagcgaacgcctccgatgccttactcgacgaaatcaaggctctcgggggcgatgaagatgattacaagctgatcgacggcgttgagtcggacgacgacgcagtcaacaaccagaagagcgacaagaacgcagataaagcactccgtgccgagctggcaaagtttgctgctggactcggctttgacgaggttgccccagagccttctagcgatggcgaagatgatgagcctgccgacgaagacgaagacgaggaagttgatgaggacgacgaagagtctgaagacgaggcgcaggatgaaagcatcaaagatcccaacaggaaaacgatatttgagccacggcctgactggcatgctgttaacttgaaatccctttcagccccgacctctgacgatgttgcccccttctccagctcaatagcagccttgaaagactatgccaagaccatacttcaagaagacacagctgcgtacaataccacatatgccgccacctcgtctcgaaaattcatgtcccagatcatgacctccggtaccatgtccgacaaggtgtctgccttgactctcgccgtccaggagtcgccaatgcacaacatcaaggctcttgagaatctcatgggtctgggctccaagcggagccgtgatcaagcgctctcggctctcgctgctttggtcgacatgttcggtccgggcatgatcctcccctccgatagacgacttcgcacctttggctctcagctcggcttaataggaactttgcaaaagcacaatgtcaagtcatggaactctagccaggaactacctggaaagatcaccaaggaacacctgctctcgtggtatttcgaagactggttgaaggatgcttacttcaagatgattcaaagtctagaggtatggtgtgacgatgaggtcacctatgcccgaacgaaagcacttgaccaggtcttcgctctgcttcgagacaagcccgagcaagagtccaacctacttcgattgctggtcaacaagctcggcgaccgagacaggaagattgcttcgagagcctcctatctcttacttcagatgctcaccacacatccccgaatgaaacaagtcattgtgcgggcagttgagcaagacgtcatcttccgaccgggtcagaataatcgcgccaaatattatgccgttaacactctcaatcagactatcctcagtaccagagagcccgagcttgcagattctttactacgtatctactttggaatgtttctgtccctgttaaagagtggggaacttggccagctcgattctgttattgacggatcgaagcccgccccgcagcgtaaaccgaggaaaggaaggccggctcctacaaaggaagccaacgacaagactccaccagttgccggtggcgagaatgaggctgctgaaaaactcgtctcggccattctcactggcgtgaacagagccgtgcccttctcccaggcagaccagtccacactcgaatctcatctagataccctcttccgcatcacacactcttcaaatttcaatactagtatacaagccctaatgctgatccaacaactagcggcaaataggcagcttgcaacagagcgatacttccgaacactgtatgagtctttattggaccctcgtctcattacatcgtcaaaacaggctctatacctcaaccttctctaccgaagtctcaaatcagacatcgatgttcgccgagtcaaggcttttgtcaagcgaatgttacaaatcctcaatctgcattcatcttcatttgtttgtgggatcctgtatcttactaccgaactatgtgtcgcgtttcccgatatcaagactctactcagtgagccggaagagaacgatttcgaagactccgagctcccagatgaagagacacttgtcgatgccgccgacaacctgccctccagacctaaaaacgcctacgatgggcgcaaacgtgatccggagtacagcaacgcacatctgagctgtctctgggaaatattacctttcatcaaacactatcacccatcggtcgatgtttttgccacatcccttctcaatggtcaaaagccggttaaaaagccagatttggcgaatcataccctcatcgctttcctagataagtttgtatacaagaacgccaagacgacagaccacggcaagggagcatcgatcatgcaaccgatcgccgccagcagtcaaggcagcatcttagtatcaaataaggcgtcattcaaggatgctgccgactccgtgaacacggcaacattctggaataagaagagtgaggacgttccgcttgaggatgtcttcttccacaagtacttcgcgcaagtcggcaaaccaggacaggtcgagcgcgagaagaagcagaagaagaagaaggatgtcgaagatgaagacgaagatgacgaggagcagaacgaagatgaaatctgggatgcgcttgttaattcacgaccggagatccaggaagactctgatgatgatgctgggttggaggatatgatgagcctggatgagtcagatcaggaattcagaaaggctatggaagaggatgatgaagataattttaatctggacgagtctgacgacgatgacagcgatgaggaagaagaagaggaagttgaacaagttgtgaatgaaaaggagaagaagccagtatcggcgcgcacgaagaggaagaaggcgctcagggccttgccgctatttgcttctgctgatgattatgcggagatgatggagtag

SEQ ID NO: 35768 - protein, 1031 aa, Muscodor strobelii
  misc_feature: SGI Peptide ID NO. 572390
  misc_feature (628)..(799): Pfam Id: PF03914 Pfam Desc: CBF/Mak21 family
  misc_feature (229)..(1031): NCBI GI: 255952060 Blast Desc: Pc24g01460 [Penicillium chrysogenum Wisconsin 54-1255] gi|211904418|emb|CAP87054.1| Pc24g01460 [Penicillium chrysogenum Wisconsin 54-1255]
  misc_feature (226)..(1030): NCBI GI: 189189714 Blast Desc: CCAAT/enhancer-binding protein zeta [Pyrenophora tritici-repentis Pt-1C-BFP] gi|187972802|gb|EDU40301.1| CCAAT/enhancer-binding protein zeta [Pyrenophora tritici-repentis
  misc_feature (4)..(1030): NCBI GI: 238839110 Blast Desc: CCAAT-box-binding transcription factor [Microsporum canis CBS 113480]
  misc_feature (226)..(984): NCBI GI: 169608013 Blast Desc: SNOG_07072 [Phaeosphaeria nodorum SN15] gi|111064603|gb|EAT85723.1| SNOG_07072 [Phaeosphaeria nodorum SN15]
  misc_feature (100)..(1030): NCBI GI: 39976887 Blast Desc: MGG_06346 [Magnaporthe grisea 70-15] gi|145016253|gb|EDK00743.1| MGG_06346 [Magnaporthe grisea 70-15]
  misc_feature (4)..(1030): NCBI GI: 171688025 Blast Desc: protein product [Podospora anserina] gi|170943974|emb|CAP69626.1| protein product [Podospora anserina]
  misc_feature (4)..(1030): NCBI GI: 85090858 Blast Desc: NCU09894 [Neurospora crassa OR74A] gi|28919995|gb|EAA29383.1| conserved [Neurospora crassa OR74A]
  misc_feature (4)..(993): NCBI GI: 116180208 Blast Desc: CHGG_00732 [Chaetomium globosum CBS 148.51] gi|88185029|gb|EAQ92497.1| CHGG_00732 [Chaetomium globosum CBS 148.51]
  misc_feature (88)..(1030): NCBI GI: 256734311 Blast Desc: NECHADRAFT_98648 [Nectria haematococca mpVI 77-13-4]
  misc_feature (118)..(1030): NCBI GI: 261357294 Blast Desc: ribosome biogenesis protein MAK21 [Verticillium albo-atrum VaMs.102]
MADFDEAALAKLTAKLDNKLAGIKNPESKDNSKGKRKLEPSNDAVQPPSKKRSQQDKPKVSKHNGKPYLKTNGKPNIAPNGMSSGKHTKFDAKPKGQFADRKSKPSDKPHKPHKPAQANASDALLDEIKALGGDEDDYKLIDGVESDDDAVNNQKSDKNADKALRAELAKFAAGLGFDEVAPEPSSDGEDDEPADEDEDEEVDEDDEESEDEAQDESIKDPNRKTIFEPRPDWHAVNLKSLSAPTSDDVAPFSSSIAALKDYAKTILQEDTAAYNTTYAATSSRKFMSQIMTSGTMSDKVSALTLAVQESPMHNIKALENLMGLGSKRSRDQALSALAALVDMFGPGMILPSDRRLRTFGSQLGLIGTLQKHNVKSWNSSQELPGKITKEHLLSWYFEDWLKDAYFKMIQSLEVWCDDEVTYARTKALDQVFALLRDKPEQESNLLRLLVNKLGDRDRKIASRASYLLLQMLTTHPRMKQVIVRAVEQDVIFRPGQNNRAKYYAVNTLNQTILSTREPELADSLLRIYFGMFLSLLKSGELGQLDSVIDGSKPAPQRKPRKGRPAPTKEANDKTPPVAGGENEAAEKLVSAILTGVNRAVPFSQADQSTLESHLDTLFRITHSSNFNTSIQALMLIQQLAANRQLATERYFRTLYESLLDPRLITSSKQALYLNLLYRSLKSDIDVRRVKAFVKRMLQILNLHSSSFVCGILYLTTELCVAFPDIKTLLSEPEENDFEDSELPDEETLVDAADNLPSRPKNAYDGRKRDPEYSNAHLSCLWEILPFIKHYHPSVDVFATSLLNGQKPVKKPDLANHTLIAFLDKFVYKNAKTTDHGKGASIMQPIAASSQGSILVSNKASFKDAADSVNTATFWNKKSEDVPLEDVFFHKYFAQVGKPGQVEREKKQKKKKDVEDEDEDDEEQNEDEIWDALVNSRPEIQEDSDDDAGLEDMMSLDESDQEFRKAMEEDDEDNFNLDESDDDDSDEEEEEEVEQVVNEKEKKPVSARTKRKKALRALPLFASADDYAEMME

SEQ ID NO: 35769 - DNA, 4914 bp, Muscodor strobelii
  misc_feature: SGI EST ID NO. CUFF.85298.1
  misc_feature: Variant of the nucleotide sequence at SEQ ID NO 35767
agatagtatgtgatgttgtctcttttgcgtaccaccgtacagagactctggtgtgtgaatatgcagagtatcggcccagatgtgacacccgtagtgaattcgacatttcaacagtctgaatgaaaatctgcacgacgcgcctaaagccaggcgacgcgtgccgatatccccgccagatcgccgacaaagtcgatattgatatcagtcatatgcatccatctcggtataatgtagatagtcaaaagaattcagtacaagcgcatgggaatagatcaaagtgggcaaacatcttaatctcattcgcacctcgacatgcgacgcagtcgagagctttagcagccttgcagggtggacggagacgctaagagcgctaaggccgctgaagatccctgtcaattggcagcccacttcgctaaatatgcagcctcgccccgctcaacttttttttgctggctttgatttttctgcgggcggtcgctgttgttgagccatccctccagcacaaccagacagagtcagaggcgctgtttcaacgacaaatatggcagactttgacgaggctgctctggccaaattgacggccaagcttgacaacaagcttgcgggaattaagaaccccgaatccaaagataacagcaaaggaaaacggaaattagaaccatcgaacgatgcggtacaaccgccctcgaagaagcggagtcagcaagacaagcccaaggttagcaagcacaacggaaagccatatctgaaaacaaatggaaagccaaacatcgcgcccaatggcatgtcgagcgggaaacataccaaattcgatgccaaaccgaagggccagttcgcagaccgcaaatccaaaccaagcgacaagcctcacaagcctcacaagcctgcgcaagcgaacgcctccgatgccttactcgacgaaatcaaggctctcgggggcgatgaagatgattacaagctgatcgacggcgttgagtcggacgacgacgcagtcaacaaccagaagagcgacaagaacgcagataaagcactccgtgccgagctggcaaagtttgctgctggactcggctttgacgaggttgccccagagccttctagcgatggcgaagatgatgagcctgccgacgaagacgaagacgaggaagttgatgaggacgacgaagagtctgaagacgaggcgcaggatgaaagcatcaaagatcccaacaggaaaacgatatttgagccacggcctgactggcatgctgttaacttgaaatccctttcagccccgacctctgacgatgttgcccccttctccagctcaatagcagccttgaaagactatgccaagaccatacttcaagaagacacagctgcgtacaataccacatatgccgccacctcgtctcgaaaattcatgtcccagatcatgacctccggtaccatgtccgacaaggtgtctgccttgactctcgccgtccaggagtcgccaatgcacaacatcaaggctcttgagaatctcatgggtctgggctccaagcggagccgtgatcaagcgctctcggctctcgctgctttggtcgacatgttcggtccgggcatgatcctcccctccgatagacgacttcgcacctttggctctcagctcggcttaataggaactttgcaaaagcacaatgtcaagtcatggaactctagccaggaactacctggaaagatcaccaaggaacacctgctctcgtggtatttcgaagactggttgaaggatgcttacttcaagatgattcaaagtctagaggtatggtgtgacgatgaggtcacctatgcccgaacgaaagcacttgaccaggtcttcgctctgcttcgagacaagcccgagcaagagtccaacctacttcgattgctggtcaacaagctcggcgaccgagacaggaagattgcttcgagagcctcctatctcttacttcagatgctcaccacacatccccgaatgaaacaagtcattgtgcgggcagttgagcaagacgtcatcttccgaccgggtcagaataatcgcgccaaatattatgccgttaacactctcaatcagactatcctcagtaccagagagcccgagcttgcagattctttactacgtatctactttggaatgtttctgtccctgttaaagagtggggaacttggccagctcgattctgttattgacggatcgaagcccgccccgcagcgtaaaccgaggaaaggaaggccggctcctacaaaggaagccaacgacaagactccaccagttgccggtggcgagaatgaggctgctgaaaaactcgtctcggccattctcactggcgtgaacagagccgtgcccttctcccaggcagaccagtccacactcgaatctcatctagataccctcttccgcatcacacactcttcaaatttcaatactagtatacaagccctaatgctgatccaacaactagcggcaaataggcagcttgcaacagagcgatacttccgaacactgtatgagtctttattggaccctcgtctcattacatcgtcaaaacaggctctatacctcaaccttctctaccgaagtctcaaatcagacatcgatgttcgccgagtcaaggcttttgtcaagcgaatgttacaaatcctcaatctgcattcatcttcatttgtttgtgggatcctgtatcttactaccgaactatgtgtcgcgtttcccgatatcaagactctactcagtgagccggaagagaacgatttcgaagactccgagctcccagatgaagagacacttgtcgatgccgccgacaacctgccctccagacctaaaaacgcctacgatgggcgcaaacgtgatccggagtacagcaacgcacatctgagctgtctctgggaaatattacctttcatcaaacactatcacccatcggtcgatgtttttgccacatcccttctcaatggtcaaaagccggttaaaaagccagatttggcgaatcataccctcatcgctttcctagataagtttgtatacaagaacgccaagacgacagaccacggcaagggagcatcgatcatgcaaccgatcgccgccagcagtcaaggcagcatcttagtatcaaataaggcgtcattcaaggatgctgccgactccgtgaacacggcaacattctggaataagaagagtgaggacgttccgcttgaggatgtcttcttccacaagtacttcgcgcaagtcggcaaaccaggacaggtcgagcgcgagaagaagcagaagaagaagaaggatgtcgaagatgaagacgaagatgacgaggagcagaacgaagatgaaatctgggatgcgcttgttaattcacgaccggagatccaggaagactctgatgatgatgctgggttggaggatatgatgagcctggatgagtcagatcaggaattcagaaaggctatggaagaggatgatgaagataattttaatctggacgagtctgacgacgatgacagcgatgaggaagaagaagaggaagttgaacaagttgtgaatgaaaaggagaagaagccagtatcggcgcgcacgaagaggaagaaggcgctcagggccttgccgctatttgcttctgctgatgattatgcggagatgatggagtagggtgaaggatatgtacagaaattgaaaagtttaggtcgaagatatgaggctccatgggaagtcacttgatagcatcgctccacgcacataagctagcactcaatgagttaccagacatgatactaaacatttaatttcatctcattcactcattacctacatctcaacataattccctccatacccacaccattccatcatccatcaacccaatcaatccctttattccccctcctaagtagcgaaaaactccaactcatcaccctcatcaaaaatcgccctatatttcttatcacccccctcaacctcgcgttcctcggtatgaatactatgaaactccgcaggatcctcagactcgggccccttagagaagattcgcacgtggatatatgctggaccggacgtcggcatggcggggatgcggatcttgccgaagaggattacgccgtagtctactgctgcgacgcgcacggtctcgagattggatgaggtggaaaatgaggttaggtcgctgtcgctgagatgttggactggggcgaagtattctggttcgtgttctgtggggaaagaaggaccttgttagtcgattgttgatcatgatgttggtggtgatggtatgggaggtgtacggaataagagggatgttaagcggcaaggggatggtattgaaaggggaagaaggtcgagatgggagatttactgtggtatgtgtgcttcatgtgaagcaattgtttctttagctcttcttctacttcgccgaaggctttgattgattcctccttgggtggatggggagctcctagggttacggtctctgcggtagcctagttgcgcatcagtctctattaccttgcgaagtatcatatcatagggctatgaacataccatgattctaagtagtgttgaaacaatctaagtatgactgtgttggtttaatagatttgtagatatctcaagttctctacctgaggtatgagctgaggtcaagttaaagttgaggtgtagatgatgcggggcaggagttctatatatgcacagctgaaggtaaactcgccttggtcttctacgaatcaacttgcgaggcgaatcagggtaatatagaggtacgaaaaacgtatcatgaaactcaattcagccaaagaggactgacaaacaggtttgattgatatcaatgtaaggctgggcgggtttcatgcaccaggggattacgtcggtgcgtcactcagctacgacaaggtgacggatcacgagaagaattaccacgaatcagggattca

SEQ ID NO: 35770 - DNA, 450 bp, Muscodor strobelii
  misc_feature: SGI cDNA ID NO. 572391
  misc_feature: Elevated expression when VOC is produced
  misc_feature: Encodes the peptide sequence at SEQ ID NO 35771
atggctaccgcagagaccgtaaccctaggagctccccatccacccaaggaggaatcaatcaaagccttcggcgaagtagaagaagagctaaagaaacaattgcttcacatgaagcacacataccacaaacacgaaccagaatacttcgccccagtccaacatctcagcgacagcgacctaacctcattttccacctcatccaatctcgagaccgtgcgcgtcgcagcagtagactacggcgtaatcctcttcggcaagatccgcatccccgccatgccgacgtccggtccagcatatatccacgtgcgaatcttctctaaggggcccgagtctgaggatcctgcggagtttcatagtattcataccgaggaacgcgaggttgaggggggtgataagaaatatagggcgatttttgatgagggtgatgagttggagtttttcgctacttag

SEQ ID NO: 35771 - protein, 149 aa, Muscodor strobelii
  misc_feature: SGI Peptide ID NO. 572391
  misc_feature (1)..(147): NCBI GI: 39976889 Blast Desc: MGG_06347 [Magnaporthe grisea 70-15] gi|145016252|gb|EDK00742.1| MGG_06347 [Magnaporthe grisea 70-15]
  misc_feature (1)..(149): NCBI GI: 46108898 Blast Desc: FG01331.1 [Gibberella zeae PH-1]
  misc_feature (1)..(149): NCBI GI: 189191062 Blast Desc: conserved [Pyrenophora tritici-repentis Pt-1C-BFP] gi|187973476|gb|EDU40975.1| conserved [Pyrenophora tritici-repentis Pt-1C-BFP]
  misc_feature (1)..(149): NCBI GI: 169606960 Blast Desc: SNOG_06533 [Phaeosphaeria nodorum SN15] gi|111065244|gb|EAT86364.1| SNOG_06533 [Phaeosphaeria nodorum SN15]
  misc_feature (1)..(147): NCBI GI: 156030581 Blast Desc: SS1G_14386 [Sclerotinia sclerotiorum 1980] gi|154700777|gb|EDO00516.1| SS1G_14386 [Sclerotinia sclerotiorum 1980]
  misc_feature (1)..(147): NCBI GI: 154304087 Blast Desc: BC1G_09679 [Botryotinia fuckeliana B05.10] gi|150854314|gb|EDN29506.1| BC1G_09679 [Botryotinia fuckeliana B05.10]
  misc_feature (7)..(147): NCBI GI: 169847267 Blast Desc: [Coprinopsis cinerea okayama7#130] gi|116508597|gb|EAU91492.1| [Coprinopsis cinerea okayama7#130]
  misc_feature (1)..(68): NCBI GI: 171688023 Blast Desc: protein product [Podospora anserina] gi|170943973|emb|CAP69625.1| protein product [Podospora anserina]
  misc_feature (1)..(63): NCBI GI: 238606371 Blast Desc: MPER_03017 [Moniliophthora perniciosa FA553] gi|215469744|gb|EEB97629.1| MPER_03017 [Moniliophthora perniciosa FA553]
  misc_feature: Useful for introducing or modulating the production of volatile compounds
MATAETVTLGAPHPPKEESIKAFGEVEEELKKQLLHMKHTYHKHEPEYFAPVQHLSDSDLTSFSTSSNLETVRVAAVDYGVILFGKIRIPAMPTSGPAYIHVRIFSKGPESEDPAEFHSIHTEEREVEGGDKKYRAIFDEGDELEFFAT

SEQ ID NO: 35772 - DNA, 6743 bp, Muscodor strobelii; identical to SEQ ID NO: 35766
  misc_feature: SGI EST ID NO. CUFF.85299.0
  misc_feature: Variant of the nucleotide sequence at SEQ ID NO 35770

SEQ ID NO: 35773 - DNA, 879 bp, Muscodor strobelii
  misc_feature: SGI cDNA ID NO. 572392
  misc_feature: Reduced expression when VOC is produced
  misc_feature: Encodes the peptide sequence at SEQ ID NO 35774
atgtcatccgcggctgctctccgggtgttgcgaagccggaatctcacttcgaggccggtgaaaagacttgccgttcgcccggaggcgcctcggctacagcctcaccgcttctcgagttctatacatgccgcacccatcgagccaccacccccgaaggcctcgctgctacgccgtgcagccaccgtattcgccatcggcgttatctgcacatctctcggcttcaccatggccttcttgccggtagttcccgtagtccagcaactcttaaatccacctacagacgaacagacactctccttatttaaggctaacacgcccacgcaactcgagatcgacgagcacatcaagaaccaccctgtagcgaaagaactacgtgcaaatgcgtctttctccgaatctcgaccgcatctcaaaatcccggaagagttccgaagccacagctttacaggcggcacactgtcaggaacaggacggatcgaagtgccaccattagccttcgccgaagaaggcggcaaatccctcgtggcactcttctacctcggtgggcaactgagcggccacccgggtataattcacggtggccttatcgccacaatcctcgacgagagcatggcgcggtgctgtttccccgtgctcccccacaaaatcggcgttacggcaacgttaaacatcaattaccggaaacccgccatggcagattcatactacgtcttccgcgcgactactacgaaatctgagggcaggaaggcatgggtcgagggaagaatcgagacgcttgttcccgagggagagacaccggttgtcgtggctgacgccacggcgctgttcgtctccccgagacaggctgctttgatgacgaatattttcccttccacgtga

SEQ ID NO: 35774 - protein, 292 aa, Muscodor strobelii
  misc_feature: SGI Peptide ID NO. 572392
  misc_feature (188)..(265): Pfam Id: PF03061 Pfam Desc: Thioesterase superfamily
  misc_feature (48)..(292): NCBI GI: 156030583 Blast Desc: SS1G_14387 [Sclerotinia sclerotiorum 1980] gi|154700778|gb|EDO00517.1| SS1G_14387 [Sclerotinia sclerotiorum 1980]
  misc_feature (30)..(289): NCBI GI: 169781616 Blast Desc: [Aspergillus oryzae RIB40] gi|83774013|dbj|BAE64138.1| protein product [Aspergillus oryzae]
  misc_feature (38)..(284): NCBI GI: 255936449 Blast Desc: Pc13g08260 [Penicillium chrysogenum Wisconsin 54-1255] gi|211583871|emb|CAP91895.1| Pc13g08260 [Penicillium chrysogenum Wisconsin 54-1255]
  misc_feature (50)..(289): NCBI GI: 145239549 Blast Desc: An08g03040 [Aspergillus niger] gi|134076932|emb|CAK45341.1| protein product [Aspergillus niger]
  misc_feature (93)..(292): NCBI GI: 238498410 Blast Desc: thioesterase family protein [Aspergillus flavus NRRL3357] gi|220693714|gb|EED50059.1| thioesterase family protein [Aspergillus flavus NRRL3357]
  misc_feature (29)..(292): NCBI GI: 146322590 Blast Desc: thioesterase family protein [Aspergillus fumigatus Af293] gi|129557743|gb|EAL90407.2| thioesterase family protein [Aspergillus fumigatus Af293] gi|159131200|gb|EDP56313.1| family
  misc_feature (8)..(292): NCBI GI: 121701833 Blast Desc: thioesterase family protein [Aspergillus clavatus NRRL 1] gi|119397324|gb|EAW07755.1| thioesterase family protein [Aspergillus clavatus NRRL 1]
  misc_feature (52)..(289): NCBI GI: 119184192 Blast Desc: CIMG_06920 [Coccidioides immitis RS]
  misc_feature (92)..(289): NCBI GI: 115491463 Blast Desc: conserved [Aspergillus terreus NIH2624] gi|114197219|gb|EAU38919.1| conserved [Aspergillus terreus NIH2624]
  misc_feature (92)..(292): NCBI GI: 119495825 Blast Desc: thioesterase family protein [Neosartorya fischeri NRRL 181] gi|119412851|gb|EAW22792.1| thioesterase family protein [Neosartorya fischeri NRRL 181]
  misc_feature: Useful for introducing or modulating the production of volatile compounds
MSSAAALRVLRSRNLTSRPVKRLAVRPEAPRLQPHRFSSSIHAAPIEPPPPKASLLRRAATVFAIGVICTSLGFTMAFLPVVPVVQQLLNPPTDEQTLSLFKANTPTQLEIDEHIKNHPVAKELRANASFSESRPHLKIPEEFRSHSFTGGTLSGTGRIEVPPLAFAEEGGKSLVALFYLGGQLSGHPGIIHGGLIATILDESMARCCFPVLPHKIGVTATLNINYRKPAMADSYYVFRATTTKSEGRKAWVEGRIETLVPEGETPVVVADATALFVSPRQAALMTNIFPST

SEQ ID NO: 35775 - DNA, 1505 bp, Muscodor strobelii
  misc_feature: SGI EST ID NO. CUFF.85204.1
  misc_feature: Variant of the nucleotide sequence at SEQ ID NO 35773
gcggcggccatcagcgaagcgcaacgtgccattgtctgctccgatgaacagctgcagcatggtgatatgacacgggactaagttctctacgcattcctcctcctctcccacccgaccacccacacggagcccgattagggttcacccagcccaccatgtcatccgcggctgctctccgggtgttgcgaagccggaatctcacttcgaggccggtgaaaagacttgccgttcgcccggaggcgcctcggctacagcctcaccgcttctcgagttctatacatgccgcacccatcgagccaccacccccgaaggcctcgctgctacgccgtgcagccaccgtattcgccatcggcgttatctgcacatctctcggcttcaccatggccttcttgccggtagttcccgtagtccagcaactcttaaatccacctacagacgaacagacactctccttatttaaggctaacacgcccacgcaactcgagatcgacgagcacatcaagaaccaccctgtagcgaaagaactacgtgcaaatgcgtctttctccgaatctcgaccgcatctcaaaatcccggaagagttccgaagccacagctttacaggcggcacactgtcaggaacaggacggatcgaagtgccaccattagccttcgccgaagaaggcggcaaatccctcgtggcactcttctacctcggtgggcaactgagcggccacccgggtataattcacggtggccttatcgccacaatcctcgacgagagcatggcgcggtgctgtttccccgtgctcccccacaaaatcggcgttacggcaacgttaaacatcaattaccggaaacccgccatggcagattcatactacgtcttccgcgcgactactacgaaatctgagggcaggaaggcatgggtcgagggaagaatcgagacgcttgttcccgagggagagacaccggttgtcgtggctgacgccacggcgctgttcgtctccccgagacaggctgctttgatgacgaatattttcccttccacgtgagggaagaagtatatgaacatctagttacgataaatgcgacaaacgaggctgagacaaccatctcatgcacattattagaggaacatgtgatgcatttacaggcgacaatggttcgaatagtgagcccaatgccagctctattgttaataccagaagaacgaaaagagtgccaatacgaggcgaagcatttaaagagaagagacgcacagagctcggagtttgggatcagtattttgtatacactagatcagttgcattgagatagatttgacataatcgtccttgcgcaactattacataattggctgtcgttctatttccacttgcacgaggctgtcacttcacagcaggacatttcgtaatatgacgccttgcgtgcgacaaatcgtttttacaaatggattgcctcgtaaggaaatcctgcgaaatcctatccttggtcgtagctactaatcgagtctgacacgtgaa

SEQ ID NO: 35776 - DNA, 879 bp, Muscodor strobelii
  misc_feature: SGI cDNA ID NO. 572393
  misc_feature: Reduced expression when VOC is produced
  misc_feature: Encodes the peptide sequence at SEQ ID NO 35777
atgtcatccgcggctgctctccgggtgttgcgaagccggaatctcacttcgaggccggtgaaaagacttgccgttcgcccggaggcgcctcggctacagcctcaccgcttctcgagttctatacatgccgcacccatcgagccaccacccccgaaggcctcgctgctacgccgtgcagccaccgtattcgccatcggcgttatctgcacatctctcggcttcaccatggccttcttgccggtagttcccgtagtccagcaactcttaaatccacctacagacgaacagacactctccttatttaaggctaacacgcccacgcaactcgagatcgacgagcacatcaagaaccaccctgtagcgaaagaactacgtgcaaatgcgtctttctccgaatctcgaccgcatctcaaaatcccggaagagttccgaagccacagctttacaggcggcacactgtcaggaacaggacggatcgaagtgccaccattagccttcgccgaagaaggcggcaaatccctcgtggcactcttctacctcggtgggcaactgagcggccacccgggtataattcacggtggccttatcgccacaatcctcgacgagagcatggcgcggtgctgtttccccgtgctcccccacaaaatcggcgttacggcaacgttaaacatcaattaccggaaacccgccatggcagattcatactacgtcttccgcgcgactactacgaaatctgagggcaggaaggcatgggtcgagggaagaatcgagacgcttgttcccgagggagagacaccggttgtcgtggctgacgccacggcgctgttcgtctccccgagacaggctgctgtaggtttcacccatttcctttctaattga

SEQ ID NO: 35777 - protein, 292 aa, Muscodor strobelii
  misc_feature: SGI Peptide ID NO. 572393
  misc_feature (188)..(265): Pfam Id: PF03061 Pfam Desc: Thioesterase superfamily
  misc_feature (48)..(284): NCBI GI: 156030583 Blast Desc: SS1G_14387 [Sclerotinia sclerotiorum 1980] gi|154700778|gb|EDO00517.1| SS1G_14387 [Sclerotinia sclerotiorum 1980]
  misc_feature (38)..(284): NCBI GI: 255936449 Blast Desc: Pc13g08260 [Penicillium chrysogenum Wisconsin 54-1255] gi|211583871|emb|CAP91895.1| Pc13g08260 [Penicillium chrysogenum Wisconsin 54-1255]
  misc_feature (30)..(283): NCBI GI: 169781616 Blast Desc: [Aspergillus oryzae RIB40] gi|83774013|dbj|BAE64138.1| protein product [Aspergillus oryzae]
  misc_feature (50)..(284): NCBI GI: 145239549 Blast Desc: An08g03040 [Aspergillus niger] gi|134076932|emb|CAK45341.1| protein product [Aspergillus niger]
  misc_feature (93)..(283): NCBI GI: 238498410 Blast Desc: thioesterase family protein [Aspergillus flavus NRRL3357] gi|220693714|gb|EED50059.1| thioesterase family protein [Aspergillus flavus NRRL3357]
  misc_feature (30)..(283): NCBI GI: 146322590 Blast Desc: thioesterase family protein [Aspergillus fumigatus Af293] gi|129557743|gb|EAL90407.2| thioesterase family protein [Aspergillus fumigatus Af293] gi|159131200|gb|EDP56313.1| family
  misc_feature (52)..(284): NCBI GI: 119184192 Blast Desc: CIMG_06920 [Coccidioides immitis RS]
  misc_feature (52)..(290): NCBI GI: 226291385 Blast Desc: thioesterase family protein [Paracoccidioides brasiliensis Pb18]
  misc_feature (8)..(283): NCBI GI: 121701833 Blast Desc: thioesterase family protein [Aspergillus clavatus NRRL 1] gi|119397324|gb|EAW07755.1| thioesterase family protein [Aspergillus clavatus NRRL 1]
  misc_feature (52)..(284): NCBI GI: 240109802 Blast Desc: thioesterase family protein [Coccidioides posadasii C735 delta SOWgp]
  misc_feature: Useful for introducing or modulating the production of volatile compounds
MSSAAALRVLRSRNLTSRPVKRLAVRPEAPRLQPHRFSSSIHAAPIEPPPPKASLLRRAATVFAIGVICTSLGFTMAFLPVVPVVQQLLNPPTDEQTLSLFKANTPTQLEIDEHIKNHPVAKELRANASFSESRPHLKIPEEFRSHSFTGGTLSGTGRIEVPPLAFAEEGGKSLVALFYLGGQLSGHPGIIHGGLIATILDESMARCCFPVLPHKIGVTATLNINYRKPAMADSYYVFRATTTKSEGRKAWVEGRIETLVPEGETPVVVADATALFVSPRQAAVGFTHFLSN

SEQ ID NO: 35778 - DNA, 1505 bp, Muscodor strobelii; identical to SEQ ID NO: 35775
  misc_feature: SGI EST ID NO. CUFF.85204.1
  misc_feature: Variant of the nucleotide sequence at SEQ ID NO 35776

SEQ ID NO: 35779 - DNA, 630 bp, Muscodor strobelii
  misc_feature: SGI cDNA ID NO. 572394
  misc_feature: Encodes the peptide sequence at SEQ ID NO 35780
atggcgaccaacataacatggcacccctcgctctcacgctctgagcgtcagacgctacgcaaacaaaagggcttcacactttggttcaccggtctctccgccagcggtaaatccacagtcgcgacagctctagagcaacatcttctccacctcggtctggcagcttaccgtctggacggcgataatgtccggtttgggttgaacaaggatctcgggttttcggataaggaccgtacggagaacattcgacgcattggcgaggtcgcaaagctcttcgcagactcctcaacaatcgccctaacgtccttcatctcccccttcaaagcagaccgtgctctcgcgcgggacgtgcacggcgccacatctcccggctcagccgacgaagcgatccccttcatcgaagtctacgtcgaggtgcccatttccgtagccgaacaacgggaccccaagggtctctacaaaaaggcccgcgctggtgaaatcaaagagttcaccggtatcagttcgccgtatgaggcgcccgagaacccagagatcactatcaacaccgcggagaagagcgtcgaggagtgtgttgtgcatattgcgaattggcttgaggggaagggatatattcctaagagtgcttag

SEQ ID NO: 35780 - protein, 209 aa, Muscodor strobelii
  misc_feature: SGI Peptide ID NO. 572394
  misc_feature (23)..(188): Pfam Id: PF01583 Pfam Desc: Adenylylsulphate kinase
  misc_feature (1)..(205): NCBI GI: 39976891 Blast Desc: conserved [Magnaporthe grisea 70-15] gi|145016250|gb|EDK00740.1| conserved [Magnaporthe grisea 70-15]
  misc_feature (1)..(208): NCBI GI: 171688019 Blast Desc: protein product [Podospora anserina] gi|170943971|emb|CAP69623.1| protein product [Podospora anserina]
  misc_feature (1)..(205): NCBI GI: 261357296 Blast Desc: adenylyl-sulfate kinase [Verticillium albo-atrum VaMs.102]
  misc_feature (1)..(207): NCBI GI: 46108894 Blast Desc: FG01329.1 [Gibberella zeae PH-1]
  misc_feature (1)..(205): NCBI GI: 85090862 Blast Desc: adenylyl-sulfate kinase [Neurospora crassa OR74A] gi|28919997|gb|EAA29385.1| adenylyl-sulfate kinase [Neurospora crassa OR74A]
  misc_feature (1)..(205): NCBI GI: 169607379 Blast Desc: SNOG_06746 [Phaeosphaeria nodorum SN15] gi|111064277|gb|EAT85397.1| SNOG_06746 [Phaeosphaeria nodorum SN15]
  misc_feature (1)..(205): NCBI GI: 156030585 Blast Desc: conserved [Sclerotinia sclerotiorum 1980] gi|154700779|gb|EDO00518.1| conserved [Sclerotinia sclerotiorum 1980]
  misc_feature (1)..(205): NCBI GI: 189189530 Blast Desc: adenylyl-sulfate kinase [Pyrenophora tritici-repentis Pt-1C-BFP] gi|187972710|gb|EDU40209.1| adenylyl-sulfate kinase [Pyrenophora tritici-repentis Pt-1C-BFP]
  misc_feature (1)..(200): NCBI GI: 154304083 Blast Desc: conserved [Botryotinia fuckeliana B05.10] gi|150854312|gb|EDN29504.1| conserved [Botryotinia fuckeliana B05.10]
  misc_feature (1)..(209): NCBI GI: 225560009 Blast Desc: adenylsulfate kinase [Ajellomyces capsulatus G186AR]
  misc_feature (1)..(205): SWISSPROT Homolog: EC 2.7.1.25 Adenylyl-sulfate kinase
MATNITWHPSLSRSERQTLRKQKGFTLWFTGLSASGKSTVATALEQHLLHLGLAAYRLDGDNVRFGLNKDLGFSDKDRTENIRRIGEVAKLFADSSTIALTSFISPFKADRALARDVHGATSPGSADEAIPFIEVYVEVPISVAEQRDPKGLYKKARAGEIKEFTGISSPYEAPENPEITINTAEKSVEECVVHIANWLEGKGYIPKSA

SEQ ID NO: 35781 - DNA, 1396 bp, Muscodor strobelii
  misc_feature: SGI EST ID NO. CUFF.85256.0
  misc_feature: Variant of the nucleotide sequence at SEQ ID NO 35779
aaacaaggttcaaggaacacacccatagctcaagttaactacactccaaagttcagggtccacacctcacacaagcccttccagttccaaacgggtgcccctgtgcctgagtcgtaagtctggcgccgtaagccgcccgagctgtttttagcccagaattcgatttgttgcatcattccattataccattgccagtaaatccgcatttgcataagaactctgaggtcggacatttatgagacgctgcccgtccgtttcgcgttttgaaagatccataccaacccacctgcgtgacgaatatcttacccgcatagagaagctgttgcgcaagctgctcccccagttcagattcttcttcatctacaatatatattaagactgcgattgcgcaacttgtttcgaagattgcaacatttactctctctctttgactatttgacaattagatattgacaaaatggcgaccaacataacatggcacccctcgctctcacgctctgagcgtcagacgctacgcaaacaaaagggcttcacactttggttcaccggtctctccgccagcggtaaatccacagtcgcgacagctctagagcaacatcttctccacctcggtctggcagcttaccgtctggacggcgataatgtccggtttgggttgaacaaggatctcgggttttcggataaggaccgtacggagaacattcgacgcattggcgaggtttgtggatcctttccttatgagtgatgatccgattttggtttacctgggttttatttggttgggatggggatgtagatcgttgtctatctcggacactcggtcatggacggatggttcgggagacttgtccggcggctcggatggcggacacggagacggataacaaaacgctaccgacatactcccaccagacttgctaacaaatacccaggtcgcaaagctcttcgcagactcctcaacaatcgccctaacgtccttcatctcccccttcaaagcagaccgtgctctcgcgcgggacgtgcacggcgccacatctcccggctcagccgacgaagcgatccccttcatcgaagtctacgtcgaggtgcccatttccgtagccgaacaacgggaccccaagggtctctacaaaaaggcccgcgctggtgaaatcaaagagttcaccggtatcagttcgccgtatgaggcgcccgagaacccagagatcactatcaacaccgcggagaagagcgtcgaggagtgtgttgtgcatattgcgaattggcttgaggggaagggatatattcctaagagtgcttaggcgaatagatgggaagttgaatgatgcgtaggattatccaggtatagagagagaaaatatatagaaatgaaagaattagatgcatatgctttcac

SEQ ID NO: 35782 - DNA, 1149 bp, Muscodor strobelii
  misc_feature: SGI cDNA ID NO. 572395
  misc_feature: Encodes the peptide sequence at SEQ ID NO 35783
atggcgtccaagtacgtcctgctgtcgcttccgtccacccttgactctctcaaagctaccgtcgccgacaatggctctgtggtccccttccccgtccccgagttcaagataggcaccctcgacgccctagtccagcaggcagatgacctcgccaagctcgactcggcctgcgaggctctagtggccaaggtcggcgactccctcaagactctctacgatggcgacgaggccaaagctgctgaccagaagatggtcaacgacaaacccacggaccagtacatacgcaactttgcctggaacaaagtccgctaccgagctgacaagcccgtcggcgagctcgtcagtaacctgcaaaaggagctggttacgatcgacaacgacatcaagggcaagctcaaccagtacaaccagaccaagacaaacctcactacattagaaagaaaacagactggcaacctctctacaaagtccctcacatccatcgttgacccgagcgccctcgtccaagactcagaataccttgagacccacctcatcgccgtgccctccaacctcaagaaagacttcatcaaatcctacgagacactgtccgagcgcgtcgtcccacgctccgcaaccgaactagctaaagacgacgaattcatcctctacggcgtcacgacgtttaagaagaacagtgcagacttccaacaaaagtgtcgagaggcaaaatggacccccagacagtacaagtatgtcgagggcggcaaggaagaagagaagcgtgagctggatcgtgtcgccagagaggaaaagaaggtctggggcgaagctctccgcattacgcgcacaggatatagtgaggtggtcatggtatgggcacacaccatggctctgagggtgtttgtcgagtcggtattgcgatacggcctgccgttggagtttgtgtctgccctggtcgcaacgaataacaaactcgttaagaaggtaaagacgagcttagatagttcgtactcttacttaggaggcaatgcggtgggtagggataagagaggcagaattaccaaggacgatgcgtccttaacatcggatatggcggcggctggtgtgggtggccaaggagagggaagtgaatacactgcttatgtttattacgaatttgagttatag

SEQ ID NO: 35783 - protein, 382 aa, Muscodor strobelii
  misc_feature: SGI Peptide ID NO. 572395
  misc_feature (5)..(376): Pfam Id: PF03223 Pfam Desc: V-ATPase subunit C
  misc_feature (3)..(382): NCBI GI: 145608820 Blast Desc: MGG_06349 [Magnaporthe grisea 70-15] gi|145016249|gb|EDK00739.1| MGG_06349 [Magnaporthe grisea 70-15]
  misc_feature (3)..(382): NCBI GI: 171688017 Blast Desc: protein product [Podospora anserina] gi|170943970|emb|CAP69622.1| protein product [Podospora anserina]
  misc_feature (3)..(382): NCBI GI: 85090864 Blast Desc: NCU09897 [Neurospora crassa OR74A] gi|28919998|gb|EAA29386.1| NCU09897 [Neurospora crassa OR74A]
  misc_feature (1)..(382): NCBI GI: 256735020 Blast Desc: [Nectria haematococca mpVI 77-13-4]
  misc_feature (3)..(382): NCBI GI: 238839084 Blast Desc: vacuolar ATP synthase subunit C 1-A [Microsporum canis CBS 113480]
  misc_feature (4)..(382): NCBI GI: 225679648 Blast Desc: vacuolar ATP synthase subunit C 1 [Paracoccidioides brasiliensis Pb03]
  misc_feature (1)..(382): NCBI GI: 261357297 Blast Desc: vacuolar ATP synthase subunit C [Verticillium albo-atrum VaMs.102]
  misc_feature (4)..(382): NCBI GI: 226291386 Blast Desc: vacuolar ATP synthase subunit C 1 [Paracoccidioides brasiliensis Pb18]
  misc_feature (4)..(382): NCBI GI: 261203541 Blast Desc: vacuolar ATP synthase subunit C [Ajellomyces dermatitidis SLH14081] gi|239586769|gb|EEQ69412.1| vacuolar ATP synthase subunit C [Ajellomyces dermatitidis SLH14081]
  misc_feature (4)..(382): NCBI GI: 226285913 Blast Desc: vacuolar ATP synthase subunit c [Paracoccidioides brasiliensis Pb01]
MASKYVLLSLPSTLDSLKATVADNGSVVPFPVPEFKIGTLDALVQQADDLAKLDSACEALVAKVGDSLKTLYDGDEAKAADQKMVNDKPTDQYIRNFAWNKVRYRADKPVGELVSNLQKELVTIDNDIKGKLNQYNQTKTNLTTLERKQTGNLSTKSLTSIVDPSALVQDSEYLETHLIAVPSNLKKDFIKSYETLSERVVPRSATELAKDDEFILYGVTTFKKNSADFQQKCREAKWTPRQYKYVEGGKEEEKRELDRVAREEKKVWGEALRITRTGYSEVVMVWAHTMALRVFVESVLRYGLPLEFVSALVATNNKLVKKVKTSLDSSYSYLGGNAVGRDKRGRITKDDASLTSDMAAAGVGGQGEGSEYTAYVYYEFEL

SEQ ID NO: 35784 - DNA, 1333 bp, Muscodor strobelii
  misc_feature: SGI EST ID NO. CUFF.85193.0
  misc_feature: Variant of the nucleotide sequence at SEQ ID NO 35782
ggccagagctccagccaaagcagctcggacgtcataccgtggatctgaagctgtctctgaaccacgctcatattctctcccacctcgtcgcgacaacatcgcaaagatggcgtccaagtacgtcctgctgtcgcttccgtccacccttgactctctcaaagctaccgtcgccgacaatggctctgtggtccccttccccgtccccgagttcaagataggcaccctcgacgccctagtccagcaggcagatgacctcgccaagctcgactcggcctgcgaggctctagtggccaaggtcggcgactccctcaagactctctacgatggcgacgaggccaaagctgctgaccagaagatggtcaacgacaaacccacggaccagtacatacgcaactttgcctggaacaaagtccgctaccgagctgacaagcccgtcggcgagctcgtcagtaacctgcaaaaggagctggttacgatcgacaacgacatcaagggcaagctcaaccagtacaaccagaccaagacaaacctcactacattagaaagaaaacagactggcaacctctctacaaagtccctcacatccatcgttgacccgagcgccctcgtccaagactcagaataccttgagacccacctcatcgccgtgccctccaacctcaagaaagacttcatcaaatcctacgagacactgtccgagcgcgtcgtcccacgctccgcaaccgaactagctaaagacgacgaattcatcctctacggcgtcacgacgtttaagaagaacagtgcagacttccaacaaaagtgtcgagaggcaaaatggacccccagacagtacaagtatgtcgagggcggcaaggaagaagagaagcgtgagctggatcgtgtcgccagagaggaaaagaaggtctggggcgaagctctccgcattacgcgcacaggatatagtgaggtggtcatggtatgggcacacaccatggctctgagggtgtttgtcgagtcggtattgcgatacggcctgccgttggagtttgtgtctgccctggtcgcaacgaataacaaactcgttaagaaggtaaagacgagcttagatagttcgtactcttacttaggaggcaatgcggtgggtagggataagagaggcagaattaccaaggacgatgcgtccttaacatcggatatggcggcggctggtgtgggtggccaaggagagggaagtgaatacactgcttatgtttattacgaatttgagttatagattattcagtgtttattcgagcgtttatacatatacttagccttgcgtgtatagacgagatgactataccatttcccc

SEQ ID NO: 35785 - DNA, 2934 bp, Muscodor strobelii
  misc_feature: SGI cDNA ID NO. 572396
  misc_feature: Reduced expression when VOC is produced
  misc_feature: Encodes the peptide sequence at SEQ ID NO 35786
atggctaccgctactagccaaaacactgccggctcggtccatgcaccgacgactgatcccaacagaaactcgagcgccagcatccagacgccctccgagtcaccaaccctcctggcgcctgcgccgacgttgaccggcgccacgatcaacggcagcaccaatggcgtcgccaaccccaaccaagcgcccatggaaggcaccatcgccgccgacatgagggtctatccccgcgatggccgcgtgcgcaatcctgtcccgagcaagctgaagaatgtcaacgagtccatgaaaggaaattttagtgttatgcacatggacgtggccagtcaccgcgccagcgaggggcgcgatgctgcagccaagcggaccagcgagagcactttactgcaagccaaattggcccagaccgaccaatacgtctcccatcagcgaagagcaaactacccgcgacccccaggcttgaagcagttcagcggaagcccaaagagagctaaatctgtcaagcctcccgtcgaaccccaagctccagttgtcgcgcgtcccttaacaaccatcgagaccaaaggggagcaggcgcgtctcctgactctgttgcgcaccttgcctcatcatactgtcgtcgatcagatctgtaaaggactggccttcttcggcggtattcccgatgcgcctccgccagcggacggcaaattccccgagagcgccgaggccaatggctcgggctcgctctttgttggatggatagctgagatcttcccggataccgaacgcccgagaagaacgatgcccgcgcccgtcgtgcaggccaatatccccaagcgtcctagagggaggcccaagggcagtaaggcctccaagtcacgaagcgacaagggcatcaagaaaggctcccagaagagcggcaaaggcgctgaaatccacgaccaagatgcacacgacgaaagctgggtggatgtcgacatggacgtggacgatagtgtgttggagctaaacgagtcgggtgatttgatgatacccagacccagcacacctgaggctacttcaattggtggtggtttgataaatgccactcctgcgacgggctctacaggcgggtttcgttccatcaatgatgccggcagtgccccaggaacgaacaccaagaagcgagggcggcctaaaggttccaagaatcgacccaaggaaaaatcagcatcgcagtcggggccgccacccaaggtgactccagtacctgtgcccgtcccgatgatcgaccctcaggcgcaggctcaggctccgatcccggtacaaaccaaacccagcataacgaccaagcccaagtcgagtaagagtcgacccaagcctgccgcagagcccatcagcgagacaacgatatcatcccatcaacagcccgtagatcccaacgtccctccagccatgccttctcatcaggcgtcaacagctacgcaaaactatccagacgtggcagatcttcatggcctcaatggggtggcagcatataatcaggaaacacacatgccagtgcagcctttaggacccgctacccaatcccctgccaaccaggtaaaagcctcgacagttacagctaagaagcggaaaaggccgagtgcgaatgctgccgctcacgctcgtgcagagagcaaccctgtggttgttggtgctcccgtaatctcacatcaagatgcatccaatgggacccatttgatgccgtctccacagatacaaacgcaaaccgcccagcccatacctcaacctacaccaccccagatctcagcacccccgccagccaagcgttctcgcaaatcacaagattcgtcgtcctcggcggtggcgaggcgtcaaactcctaacaatgcgaaccaaaaagctactgcacctccgttgcctgtggttgcggagactgtcaacaatccgcctgaacttgggaatgtcatgtctccgaatcctcctgtgcatgtggccgaaggacttgaagcacactacgccgctatgcagagtcacaccgatagctataataatcgcgcacaacacaaacagcagtcaatatctaccgctgctatgagatctacagcatcccctgctcctgcgacagccccgcctcttgccgaaggtctagatgcccactacgagcattttcaatctcttcagcagcagtctctgcccgacaactctagacagaatgtaaccaatcgacagcagcagcagcagcaacgaacgacccagactgcttcgcccataccgactcagcccacgaagcccccgcagatgtcaaacgcattatcatctcagaggcagacaggttcctcgcagggatactatgcccaaaatcaaggtcttgcgtcttcttacaattcccaacagacgtcgtactcgacgaaccaaaggggcatggcgaacaactcacctaatacgggacttgtgcaacatgttaccaattctccacaattcagcaaccaatccaactcgccacttatgcagacagataatgggtaccgctcgtcgccgtcgttcaacgccgcagcatttggaaatcgccgaacaacttccgcatcgccgctcgatagcagcgcgtatcgctccaccactaacactggccatggagtgcctaaccattcgccacatttcagcacgcgacagacttcaacgacgacagcatcgcataactcgacttcacatccagctctttcttcggcatcattctccacctactcggaccccacgtcgttcttggacatgagcctcgactccagcggtgggcatggcagcctaggcatcggcggcgcttcatacggcctcaacaataatactgtacagcaacagcagcggacctcgacctcgagcacggcacccctgtactcgtctgccgggatgaataacaactttctcggcaacacaggcatggggaggaccagtcaaaaccgatgggccagctga

SEQ ID NO: 35786 - protein, 977 aa, Muscodor strobelii
  misc_feature: SGI Peptide ID NO. 572396
  misc_feature (77)..(399): NCBI GI: 164422619 Blast Desc: NCU09898 [Neurospora crassa OR74A] gi|157069748|gb|EAA29387.2| [Neurospora crassa OR74A]
  misc_feature (77)..(398): NCBI GI: 171688015 Blast Desc: protein product [Podospora anserina] gi|170943969|emb|CAP69621.1| protein product [Podospora anserina]
  misc_feature (77)..(394): NCBI GI: 116180214 Blast Desc: CHGG_00735 [Chaetomium globosum CBS 148.51] gi|88185032|gb|EAQ92500.1| CHGG_00735 [Chaetomium globosum CBS 148.51]
  misc_feature (77)..(398): NCBI GI: 39976895 Blast Desc: MGG_06350 [Magnaporthe grisea 70-15] gi|145016248|gb|EDK00738.1| MGG_06350 [Magnaporthe grisea 70-15]
  misc_feature (77)..(286): NCBI GI: 156053365 Blast Desc: SS1G_06850 [Sclerotinia sclerotiorum 1980] gi|154704628|gb|EDO04367.1| SS1G_06850 [Sclerotinia sclerotiorum 1980]
  misc_feature (152)..(402): NCBI GI: 256734314 Blast Desc: expressed protein [Nectria haematococca mpVI 77-13-4]
  misc_feature (180)..(284): NCBI GI: 46108890 Blast Desc: FG01327.1 [Gibberella zeae PH-1]
  misc_feature (78)..(151): NCBI GI: 256734314 Blast Desc: expressed protein [Nectria haematococca mpVI 77-13-4]
  misc_feature (51)..(170): NCBI GI: 46108890 Blast Desc: FG01327.1 [Gibberella zeae PH-1]
  misc_feature: Useful for introducing or modulating the production of volatile compounds
MATATSQNTAGSVHAPTTDPNRNSSASIQTPSESPTLLAPAPTLTGATINGSTNGVANPNQAPMEGTIAADMRVYPRDGRVRNPVPSKLKNVNESMKGNFSVMHMDVASHRASEGRDAAAKRTSESTLLQAKLAQTDQYVSHQRRANYPRPPGLKQFSGSPKRAKSVKPPVEPQAPVVARPLTTIETKGEQARLLTLLRTLPHHTVVDQICKGLAFFGGIPDAPPPADGKFPESAEANGSGSLFVGWIAEIFPDTERPRRTMPAPVVQANIPKRPRGRPKGSKASKSRSDKGIKKGSQKSGKGAEIHDQDAHDESWVDVDMDVDDSVLELNESGDLMIPRPSTPEATSIGGGLINATPATGSTGGFRSINDAGSAPGTNTKKRGRPKGSKNRPKEKSASQSGPPPKVTPVPVPVPMIDPQAQAQAPIPVQTKPSITTKPKSSKSRPKPAAEPISETTISSHQQPVDPNVPPAMPSHQASTATQNYPDVADLHGLNGVAAYNQETHMPVQPLGPATQSPANQVKASTVTAKKRKRPSANAAAHARAESNPVVVGAPVISHQDASNGTHLMPSPQIQTQTAQPIPQPTPPQISAPPPAKRSRKSQDSSSSAVARRQTPNNANQKATAPPLPVVAETVNNPPELGNVMSPNPPVHVAEGLEAHYAAMQSHTDSYNNRAQHKQQSISTAAMRSTASPAPATAPPLAEGLDAHYEHFQSLQQQSLPDNSRQNVTNRQQQQQQRTTQTASPIPTQPTKPPQMSNALSSQRQTGSSQGYYAQNQGLASSYNSQQTSYSTNQRGMANNSPNTGLVQHVTNSPQFSNQSNSPLMQTDNGYRSSPSFNAAAFGNRRTTSASPLDSSAYRSTTNTGHGVPNHSPHFSTRQTSTTTASHNSTSHPALSSASFSTYSDPTSFLDMSLDSSGGHGSLGIGGASYGLNNNTVQQQQRTSTSSTAPLYSSAGMNNNFLGNTGMGRTSQNRWAS

SEQ ID NO: 35787 - DNA, 4945 bp, Muscodor strobelii
  misc_feature: SGI EST ID NO. CUFF.85201.0
  misc_feature: Variant of the nucleotide sequence at SEQ ID NO 35785
tgaacaacaggtggaagcgacgtggacggaaagagaatactcggacagcacggtggcaggagagggcagagagggcagaataacccgcagcaggagcacagctgcagcgagcgttgtagcaggcagttgcagcacgtaattgagtacgagaagcgagaaacgagagagaagaaaatcaattcaacccacccggaccctttttcgactattatcgagcttgattgcttcaatcccacttcgcccaccagctacggcgatatggactaggaaggttattagcaacaaacaccaaaacgggcatcattgttgttttcctgtccttgcatgcttcttactacacaccaccaccggccgactgccgtctgaactatctctctctgccctgtgtgtctcgcagcccggagccgcagctgtctattaattgtcgcgactattacacgcagatataaccgcccccagccacaatctggtctctgggagcagcaccaacgcactgccggcgccaacgtcaatgacacccaccagatagccgacaacactaacaccaccaccagtcgtagtggctcaccactggcccctggatctgtgatctgttgtagcaacgtcgcaccgaaccctatcgccctccccatctgctccacgacagacagaaatcacaccagaaaaccaacgggcagcctgacgagcgacgagtaattgccagagacacccctaatagtccgtgtagtgccgttggcccatcttgtcgcgcagctgaaccaccttctgtccgtatttgtcgaccgtctcagctctccgctctcctctccctcgccgcgcatactcgcacacgcatacacacctacacacctacgcacaacacacatacatatccgcattcgctcccgagtccgtgtttgttaccatctatcgcatctgagacgaaacatacttgtacatatctacatcagttatcagtccgagaatctacgcccgcccattgtcgagacacgcatctacattctacattctgcatctgcatccgccgagcctcgtcgttatcgatgggcatgggagacggcctgcaggccaatgccctccagcgcaccgccgaccgcgtcttgtagataactgctttgctcccaggcgtttgcatcactgccatggtcgttgtcggccggtccaatggctaccgctactagccaaaacactgccggctcggtccatgcaccgacgactgatcccaacagaaactcgagcgccagcatccagacgccctccgagtcaccaaccctcctggcgcctgcgccgacgttgaccggcgccacgatcaacggcagcaccaatggcgtcgccaaccccaaccaagcgcccatggaaggcaccatcgccgccgacatgagggtctatccccgcgatggccgcgtgcgcaatcctgtcccgagcaagctgaagaatgtcaacgagtccatgaaaggaaattttagtgttatgcacatggacgtggccagtcaccgcgccagcgaggggcgcgatgctgcagccaagcggaccagcgagagcactttactgcaagccaaattggcccagaccgaccaatacgtctcccatcagcgaagagcaaactacccgcgacccccaggcttgaagcagttcagcggaagcccaaagagagctaaatctgtcaagcctcccgtcgaaccccaagctccagttgtcgcgcgtcccttaacaaccatcgagaccaaaggggagcaggcgcgtctcctgactctgttgcgcaccttgcctcatcatactgtcgtcgatcagatctgtaaaggactggccttcttcggcggtattcccgatgcgcctccgccagcggacggcaaattccccgagagcgccgaggccaatggctcgggctcgctctttgttggatggatagctgagatcttcccggataccgaacgcccgagaagaacgatgcccgcgcccgtcgtgcaggccaatatccccaagcgtcctagagggaggcccaagggcagtaaggcctccaagtcacgaagcgacaagggcatcaagaaaggctcccagaagagcggcaaaggcgctgaaatccacgaccaagatgcacacgacgaaagctgggtggatgtcgacatggacgtggacgatagtgtgttggagctaaacgagtcgggtgatttgatgatacccagacccagcacacctgaggctacttcaattggtggtggtttgataaatgccactcctgcgacgggctctacaggcgggtttcgttccatcaatgatgccggcagtgccccaggaacgaacaccaagaagcgagggcggcctaaaggttccaagaatcgacccaaggaaaaatcagcatcgcagtcggggccgccacccaaggtgactccagtacctgtgcccgtcccgatgatcgaccctcaggcgcaggctcaggctccgatcccggtacaaaccaaacccagcataacgaccaagcccaagtcgagtaagagtcgacccaagcctgccgcagagcccatcagcgagacaacgatatcatcccatcaacagcccgtagatcccaacgtccctccagccatgccttctcatcaggcgtcaacagctacgcaaaactatccagacgtggcagatcttcatggcctcaatggggtggcagcatataatcaggaaacacacatgccagtgcagcctttaggacccgctacccaatcccctgccaaccaggtaaaagcctcgacagttacagctaagaagcggaaaaggccgagtgcgaatgctgccgctcacgctcgtgcagagagcaaccctgtggttgttggtgctcccgtaatctcacatcaagatgcatccaatgggacccatttgatgccgtctccacagatacaaacgcaaaccgcccagcccatacctcaacctacaccaccccagatctcagcacccccgccagccaagcgttctcgcaaatcacaagattcgtcgtcctcggcggtggcgaggcgtcaaactcctaacaatgcgaaccaaaaagctactgcacctccgttgcctgtggttgcggagactgtcaacaatccgcctgaacttgggaatgtcatgtctccgaatcctcctgtgcatgtggccgaaggacttgaagcacactacgccgctatgcagagtcacaccgatagctataataatcgcgcacaacacaaacagcagtcaatatctaccgctgctatgagatctacagcatcccctgctcctgcgacagccccgcctcttgccgaaggtctagatgcccactacgagcattttcaatctcttcagcagcagtctctgcccgacaactctagacagaatgtaaccaatcgacagcagcagcagcagcaacgaacgacccagactgcttcgcccataccgactcagcccacgaagcccccgcagatgtcaaacgcattatcatctcagaggcagacaggttcctcgcagggatactatgcccaaaatcaaggtcttgcgtcttcttacaattcccaacagacgtcgtactcgacgaaccaaaggggcatggcgaacaactcacctaatacgggacttgtgcaacatgttaccaattctccacaattcagcaaccaatccaactcgccacttatgcagacagataatgggtaccgctcgtcgccgtcgttcaacgccgcagcatttggaaatcgccgaacaacttccgcatcgccgctcgatagcagcgcgtatcgctccaccactaacactggccatggagtgcctaaccattcgccacatttcagcacgcgacagacttcaacgacgacagcatcgcataactcgacttcacatccagctctttcttcggcatcattctccacctactcggaccccacgtcgttcttggacatgagcctcgactccagcggtgggcatggcagcctaggcatcggcggcgcttcatacggcctcaacaataatactgtacagcaacagcagcggacctcgacctcgagcacggcacccctgtactcgtctgccgggatgaataacaactttctcggcaacacaggcatggggaggaccagtcaaaaccgatgggccagctgaaacggctaaaaccacgtacgctcccatcataacgattcacagacttgcttcagcacaaaacttggcgcggcgtacggaaacagcgggatatgtgacggttttctttttctaataatatttcttcatcttcatgacatacggcgttttatttctgggcatattcaaccactgcttcatgagaatacggatggagggaaaactaacacaacattataatgctcttatcaaacggccgagagagatgagattatgtgcttctcttcaatagcttggacacggggcacgagatgggtatctccaatgggatgattagtgagccagccttgttcacgtctgaatggaatcggaatgggatgaactgggacgggagggacatgatgctataccagcgcctgggttcttttctttgctctctttcttcatcagggaaaattcatgacttggtggttaagtccatgggatggattatttagcatgggattatttatatggcctctccggtttactgtcgtcgatgttgatgtttagggaatgtgatgagacttagttaggtagttcgagtgttgctgagtgagatagcttgctcatctccgtcattttgttgagttgtgacatggctgttttgagttcgctgtgataggtgatgagagtgctagctgaaggtttgcgaataatggctaactgctgagatttctaccttgaccccagacttcaaaactcatttgctcaatttcttaccatttcatatcttatagcgattaactttttctagttcagtcattgttgatataaactattagatatttataaagtttagtacttatttgtggtgatttttattgcggag

SEQ ID NO: 35788 - DNA, 1587 bp, Muscodor strobelii
  misc_feature: SGI cDNA ID NO. 572397
  misc_feature: Encodes the peptide sequence at SEQ ID NO 35789
atggatccaccacacatgaccgagttcgcctcgccgcgatacttcgacaagttaaaacagatcaccgagaaccagcccgcagacgctgccgggtcgtcgcatgatgccatccatgcgcaacagtctcagttcatcttacccataggccagccgagagcgccggaaccccaggtcgcacacgatgtctatcacaagcccgacaagcgccagaagttcagcctgaggaccatcctgacctcgcggacgtcggcagagcacgatgctcgtagggtttctctggagacaccaaagaggaagagtaaaccatttgatcagctgtttctcagcctgccaaacgagctgaagatcgagatcatcgcttctctccctctctccgacatcctcaacctccggttagcatcgcggtcctggctcaccatgataaccataaacgagtttcccattacgaaataccacctcgatcaccatgtgccagcctacgcgacaaggctgtatcctgctcctaacccatctgacatgaagctccactatctttgtggaatatggcatagattacacgttgcatcgaagctgtcgatcttgattagcgaaagagtgaccaaggaaatattcttacggcagacagaagttcagcgtcaagagttccaaccgcaatacgaacgcatgcgacgacgactcgtcccgttactattcaccatcttccactttttcgagacctaccgaaagctccacctcgaattcattagagaacacggctatggcttgcgacaggagccatacacgatcaatcccatcgagcaaaagatcatgagcatgtacgatgatcaaacactactacgagtacaccaggtattccccttggtaatatcttccttctgtcgacgactgcggccgccttcgtatgtgggtcgattcgagcgttccatcagaggttacctcagaggcgagccggaagaagaggtctatgtcacggctctgtgtattggtggacttcgacaagtggagcgcttttgggagatcaaaggttataactcgagacgaaccgctgttgacacctggttcaactcggttgtcagagagcctgtcgagcagactaacctcatgccaccacctccgaagccccgacgaggtttcatgggtctcagccgtaagaagtcgagtatgaacgttggcgaggctaaccggactgtgcccgagcttgcagctcacgggcgcgagcgacgtggatccgagagcagccgtcgtggaagcgatgcttcggcgcagcatgcgtggagggacttcatcttcgggacgagtctatcggagggaatgcctatgggatcattggcgcgagaggacctgggctcattactgcccgacctcccaggtctcaagtcgatatggcttcagtcagctgaggctctcatactggacaggggcatcgtcggccgtgcacaggatatcaaacgcaatggccaggcgctattggacctgatccaggagaacggcgccgctgaggaggacgagtgttggtatggccgaactgcgcccgaactcgtacggccaccgctcgaggccatcgaagaggaccctattgatgaatag

SEQ ID NO: 35789 - protein, 528 aa, Muscodor strobelii
  misc_feature: SGI Peptide ID NO. 572397
  misc_feature (105)..(152): Pfam Id: PF00646 Pfam Desc: F-box domain
  misc_feature (1)..(524): NCBI GI: 50897831 Blast Desc: Frp1 [Fusarium oxysporum f. sp. lycopersici]
  misc_feature (1)..(524): NCBI GI: 256735021 Blast Desc: NECHADRAFT_103049 [Nectria haematococca mpVI 77-13-4]
  misc_feature (1)..(526): NCBI GI: 116180216 Blast Desc: CHGG_00736 [Chaetomium globosum CBS 148.51] gi|88185033|gb|EAQ92501.1| CHGG_00736 [Chaetomium globosum CBS 148.51]
  misc_feature (1)..(524): NCBI GI: 46108888 Blast Desc: FG01326.1 [Gibberella zeae PH-1]
  misc_feature (1)..(525): NCBI GI: 171688013 Blast Desc: protein product [Podospora anserina] gi|170943968|emb|CAP69620.1| protein product [Podospora anserina]
  misc_feature (1)..(527): NCBI GI: 85090868 Blast Desc: NCU09899 [Neurospora crassa OR74A] gi|28920000|gb|EAA29388.1| NCU09899 [Neurospora crassa OR74A]
  misc_feature (2)..(527): NCBI GI: 145608818 Blast Desc: MGG_06351 [Magnaporthe grisea 70-15] gi|145016247|gb|EDK00737.1| MGG_06351 [Magnaporthe grisea 70-15]
  misc_feature (1)..(510): NCBI GI: 156030611 Blast Desc: SS1G_14401 [Sclerotinia sclerotiorum 1980] gi|154700792|gb|EDO00531.1| SS1G_14401 [Sclerotinia sclerotiorum 1980]
  misc_feature (97)..(510): NCBI GI: 154304063 Blast Desc: BC1G_09667 [Botryotinia fuckeliana B05.10] gi|150854302|gb|EDN29494.1| BC1G_09667 [Botryotinia fuckeliana B05.10]
  misc_feature (270)..(510): NCBI GI: 261357299 Blast Desc: Frp1 [Verticillium albo-atrum VaMs.102]
MDPPHMTEFASPRYFDKLKQITENQPADAAGSSHDAIHAQQSQFILPIGQPRAPEPQVAHDVYHKPDKRQKFSLRTILTSRTSAEHDARRVSLETPKRKSKPFDQLFLSLPNELKIEIIASLPLSDILNLRLASRSWLTMITINEFPITKYHLDHHVPAYATRLYPAPNPSDMKLHYLCGIWHRLHVASKLSILISERVTKEIFLRQTEVQRQEFQPQYERMRRRLVPLLFTIFHFFETYRKLHLEFIREHGYGLRQEPYTINPIEQKIMSMYDDQTLLRVHQVFPLVISSFCRRLRPPSYVGRFERSIRGYLRGEPEEEVYVTALCIGGLRQVERFWEIKGYNSRRTAVDTWFNSVVREPVEQTNLMPPPPKPRRGFMGLSRKKSSMNVGEANRTVPELAAHGRERRGSESSRRGSDASAQHAWRDFIFGTSLSEGMPMGSLAREDLGSLLPDLPGLKSIWLQSAEALILDRGIVGRAQDIKRNGQALLDLIQENGAAEEDECWYGRTAPELVRPPLEAIEEDPIDE

SEQ ID NO: 35790 - DNA, 3594 bp, Muscodor strobelii
  misc_feature: SGI EST ID NO. CUFF.85208.0
  misc_feature: Variant of the nucleotide sequence at SEQ ID NO 35788
ttaggatactccgccaggccaaggcgagtcgtccgtgctttaaagttgcctgccctcgatcgccaaacgcccaagaaagggctggcttggctgctcagggctgccgggtctcactcacacttcgcacttcacacccccatgctggtacaaaccttcttcttgactccctcccccggtcatttccagtgtcagtgctagtcttgctagtccccgtctgtccccgtctcgctggagaggtgctcggagtacctgctgtagcccactgtccaatgtccaagccccatgctccttcctgcattgcgctgcatgccctttcgtcagaggtacctccctccagcagtacccacgcctgacagcctctgggagagagacccattctcggcctcttttcctcgctatcctgcccccccatccacccaacccataccaagcccataccatctccatcctgtcccagtgccatcggtcccatcccgtccacttcggccttattgtcctccattccttctctacaccactctattcctattcctactaatcctgttacctacactactcctcttccaccccgttccctcatcacacgctcgacaactcgccgactcaccaccaggcgtcgcacagaaacccttttcgactgaccatccgccctcttttcgcctttcccgtcgcctgagctcgcctgcatctatctttccggaactattcccatccaggccgcctacttctctcctcaccatcaccacatccgtctggaattggccagcttttcgcattcgtctgcatgcgcatgatcctctagcccgccggcgatactgacgattaagcgaagtcgacgaccttcggcttcctttccgccgagttcactaactcatttaactggacgaccagcgtttggactcgatcacgccgttgcgctcgagttccaaggcgggctttcaggctaacgagggattgatctggatcctgtgtttgttcacgacaacggaataattgacgaatcgccctcgagtttgagatagcggagaacgaaaaggggtttgtcggtgacgattcaaggtgtcgtctcactcgactcgccatcaactagtcactcgctctcaggttccgaccgaactcgatcccgtcgctcgtttggatcgtgtcaacgtcgaatccagcaaacacgctcacctcataactcttgaagctattcgtctggcttcgtagcaccctcgggctgaagaccatctgctgatttcgatgtctcaacatgcttaatgtgcaatcgaccgccgccaagatttccagtactaccatcgccgccttcgctgtcttgctgaggacaccggtgcattaggagcaccgcctgtcctctgatcgcatacggctccttgtgcgtcgactcgagcacatccatccgtcgccatggatccaccacacatgaccgagttcgcctcgccgcgatacttcgacaagttaaaacagatcaccgagaaccagcccgcagacgctgccgggtcgtcgcatgatgccatccatgcgcaacagtctcagttcatcttacccataggccagccgagagcgccggaaccccaggtcgcacacgatgtctatcacaagcccgacaagcgccagaagttcagcctgaggaccatcctgacctcgcggacgtcggcagagcacgatgctcgtagggtttctctggagacaccaaagaggaagagtaaaccatttgatcagctgtttctcagcctgccaaacgagctgaagatcgagatcatcgcttctctccctctctccgacatcctcaacctccggttagcatcgcggtcctggctcaccatgataaccataaacgagtttcccattacgaaataccacctcgatcaccatgtgccagcctacgcgacaaggctgtatcctgctcctaacccatctgacatgaagctccactatctttgtggaatatggcatagattacacgttgcatcgaagctgtcgatcttgattagcgaaagagtgaccaaggaaatattcttacggcagacagaagttcagcgtcaagagttccaaccgcaatacgaacgcatgcgacgacgactcgtcccgttactattcaccatcttccactttttcgagacctaccgaaagctccacctcgaattcattagagaacacggctatggcttgcgacaggagccatacacgatcaatcccatcgagcaaaagatcatgagcatgtacgatgatcaaacactactacgagtacaccaggtattccccttggtaatatcttccttctgtcgacgactgcggccgccttcgtatgtgggtcgattcgagcgttccatcagaggttacctcagaggcgagccggaagaagaggtctatgtcacggctctgtgtattggtggacttcgacaagtggagcgcttttgggagatcaaaggttataactcgagacgaaccgctgttgacacctggttcaactcggttgtcagagagcctgtcgagcagactaacctcatgccaccacctccgaagccccgacgaggtttcatgggtctcagccgtaagaagtcgagtatgaacgttggcgaggctaaccggactgtgcccgagcttgcagctcacgggcgcgagcgacgtggatccgagagcagccgtcgtggaagcgatgcttcggcgcagcatgcgtggagggacttcatcttcgggacgagtctatcggagggaatgcctatgggatcattggcgcgagaggacctgggctcattactgcccgacctcccaggtctcaagtcgatatggcttcagtcagctgaggctctcatactggacaggggcatcgtcggccgtgcacaggatatcaaacgcaatggccaggcgctattggacctgatccaggagaacggcgccgctgaggaggacgagtgttggtatggccgaactgcgcccgaactcgtacggccaccgctcgaggccatcgaagaggaccctattgatgaatagaccgccactatgatgatgacatactacatcgcgcttcactatccgaattctttctgagcatttacgggcgttgggaccaaagggatacatcgtctttgcatagccgggacgaaaatgtttactgtctaccaaagtctatctcatccggcgggactgacttgattattattctactacctattaccgacatcttttttgttacaacaacaataacgacaacgagcaccaacacaagtgcatcttccctatcttatctgttacttattctttcttgagaaacaactgcattgcgcgggcttgccgggttttgccggggtgggaacggcaattggattacttgggattatactacatggggcaaaggcgcactacggtggggttgaagagataccataccataccacgtggtttccccatgattgggggatcgaagatatagatgacatatatctattattattacctgctactatcgtgaatgaagattacataattattcacaatcctgctatcgacgaatgcttcgagtgataactattgcgatgccttggaccatatcgacgttattcacaacgtgtaatatctcgtcatcagattacg

SEQ ID NO: 35791 - DNA, 1017 bp, Muscodor strobelii
  misc_feature: SGI cDNA ID NO. 572398
  misc_feature: Reduced expression when VOC is produced
  misc_feature: Encodes the peptide sequence at SEQ ID NO 35792
atggaaaacaaaccggtaacagacgcaacctcttccggatctgcgctgtctataccaaatagctctgccaacggtggtcagcagggtgaggttacagactcacccacatcaccttcctctccaaatgccttggcacgcttcgagttcgagacggggcggggcaacgagggtagcaagatattaatggtccaatggaatccttcatacgacgacggccgtgaactcacgcccgaagacctaaaagggtggcaagtgacttgggaaggcaaatctgcgccatatgggctgaatgatgacgagaaggacccagaaccattgctgcggatttacttcctacttcgtgagaatgatccgataccgccctctgtcacgatctcgcacgcggccaaaggacgaacgcttgtaacaaaatgcatgcctgcgatttttaccactggtctcggagctagccaaccagatccaggcctcagaggcgtcctgcacacaatatgggccaaaaagcgtctgtcgcagctacaggatgaaattcgcaaggagctgcaagataacagtgaaggtgtcgctctcgaaatggcacttcaggagcgatcatgggttattgaacatttcggcctcgaagatccttacgctcatgagaatccagcgcctccacccaccccattaagtcctcagaccccgcggtctccggtgggcgggcgtctaggcgagaaactaaggggactaaagctctcgacttcgccagcggatctcgtcaatacgtcaagtgcgactccacgaactacattccaaccgtttttgtcgagttctttgaataccatctctgttccatcactaggtataccgatgccgaaagccggaaccgcaccggctgtcgcatctctggacgcaattattgacaactcgcaacccgtcgcccccgtgtcacagagtaaagatacggaggacgacctgtttgcgctcccgatgagtccccgaagcccggaaatgaaggcgagccctttcagtcttttgagatag

SEQ ID NO: 35792 - protein, 338 aa, Muscodor strobelii
  misc_feature: SGI Peptide ID NO. 572398
  misc_feature (14)..(337): NCBI GI: 171688011 Blast Desc: protein product [Podospora anserina] gi|170943967|emb|CAP69619.1| protein product [Podospora anserina]
  misc_feature (37)..(337): NCBI GI: 39976901 Blast Desc: MGG_06353 [Magnaporthe grisea 70-15] gi|145016245|gb|EDK00735.1| MGG_06353 [Magnaporthe grisea 70-15]
  misc_feature (30)..(337): NCBI GI: 116180218 Blast Desc: CHGG_00737 [Chaetomium globosum CBS 148.51] gi|88185034|gb|EAQ92502.1| CHGG_00737 [Chaetomium globosum CBS 148.51]
  misc_feature (39)..(336): NCBI GI: 156030595 Blast Desc: SS1G_14393 [Sclerotinia sclerotiorum 1980] gi|154700784|gb|EDO00523.1| SS1G_14393 [Sclerotinia sclerotiorum 1980]
  misc_feature (35)..(336): NCBI GI: 154304073 Blast Desc: BC1G_09672 [Botryotinia fuckeliana B05.10] gi|150854307|gb|EDN29499.1| BC1G_09672 [Botryotinia fuckeliana B05.10]
  misc_feature (30)..(336): NCBI GI: 226289699 Blast Desc: conserved [Paracoccidioides brasiliensis Pb18]
  misc_feature (30)..(336): NCBI GI: 225682316 Blast Desc: conserved [Paracoccidioides brasiliensis Pb03]
  misc_feature (35)..(336): NCBI GI: 238485672 Blast Desc: conserved [Aspergillus flavus NRRL3357] gi|220698953|gb|EED55292.1| conserved [Aspergillus flavus NRRL3357]
  misc_feature (35)..(336): NCBI GI: 169771739 Blast Desc: [Aspergillus oryzae RIB40] gi|83768198|dbj|BAE58337.1| protein product [Aspergillus oryzae]
  misc_feature (40)..(336): NCBI GI: 226279824 Blast Desc: conserved [Paracoccidioides brasiliensis Pb01]
  misc_feature: Useful for introducing or modulating the production of volatile compounds
MENKPVTDATSSGSALSIPNSSANGGQQGEVTDSPTSPSSPNALARFEFETGRGNEGSKILMVQWNPSYDDGRELTPEDLKGWQVTWEGKSAPYGLNDDEKDPEPLLRIYFLLRENDPIPPSVTISHAAKGRTLVTKCMPAIFTTGLGASQPDPGLRGVLHTIWAKKRLSQLQDEIRKELQDNSEGVALEMALQERSWVIEHFGLEDPYAHENPAPPPTPLSPQTPRSPVGGRLGEKLRGLKLSTSPADLVNTSSATPRTTFQPFLSSSLNTISVPSLGIPMPKAGTAPAVASLDAIIDNSQPVAPVSQSKDTEDDLFALPMSPRSPEMKASPFSLLR

SEQ ID NO: 35793 - DNA, 2218 bp, Muscodor strobelii
  misc_feature: SGI EST ID NO. CUFF.85232.0
  misc_feature: Variant of the nucleotide sequence at SEQ ID NO 35791
agtctccgccgcgtaccgtaatcagtggccatcataactcgccaagctgttgagcgttcccttttcagccgtatgtgtcatgcaagcgagaaggggaaaagatcgttatcctccccgcttcgtcgtctttttcttcgagaacaagggctagcttggatagaccgcgcacgaatggtggaccggctaacttgtatctcgaattgtttgtttaagtgcacttcacacctacctaacctagctaaaatctacttactcgtacacgctgctgcatgttcattctcttgtcgtctttgcctcaatcggtgtgaaagcttctcgatactctgggttactagacctcgagggtcacgtatacaacgtcggcgaacgtccatttgcagaccgtttcgctctcgcccctacaaagtggacgccaatccacttagtgggacagcctacacctcctcccaccaactgccgagggcatcagttcgagtatattcaaagaagaggagttgaagcggtaccgaagaagactacccagccttttgttgcgtagagatattatccagtacatcaaccggtagctgccagatttccccagatagctccccgcgcgtctagctacgacacagccgcggctcttttcgaacgcgacggtgggattggtcgactctgcatacattcgcgccgtgaagcgcgctcatcgctcccttgatatcccctgatacagagtggcatcgaatgagtccatagcgttgttctattgactggacacagcattgttcgggaggtacccccgtatccacagccgacgtatcttgcgccagccgagcgcctcgtggcactatggaaaacaaaccggtaacagacgcaacctcttccggatctgcgctgtctataccaaatagctctgccaacggtggtcagcagggtgaggttacagactcacccacatcaccttcctctccaaatgccttggcacgcttcgagttcgagacggggcggggcaacgagggtagcaagatattaatggtccaatggaatccttcatacgacgacggccgtgaactcacgcccgaagacctaaaagggtggcaagtgacttgggaaggcaaatctgcgccatatgggctgaatgatgacgagaaggacccagaaccattgctgcggatttacttcctacttcgtgagaatgatccgataccgccctctgtcacgatctcgcacgcggccaaaggacgaacgcttgtaacaaaatgcatgcctgcgatttttaccactggtctcggagctagccaaccagatccaggcctcagaggcgtcctgcacacaatatgggccaaaaagcgtctgtcgcagctacaggatgaaattcgcaaggagctgcaagataacagtgaaggtgtcgctctcgaaatggcacttcaggagcgatcatgggttattgaacatttcggcctcgaagatccttacgctcatgagaatccagcgcctccacccaccccattaagtcctcagaccccgcggtctccggtgggcgggcgtctaggcgagaaactaaggggactaaagctctcgacttcgccagcggatctcgtcaatacgtcaagtgcgactccacgaactacattccaaccgtttttgtcgagttctttgaataccatctctgttccatcactaggtataccgatgccgaaagccggaaccgcaccggctgtcgcatctctggacgcaattattgacaactcgcaacccgtcgcccccgtgtcacagagtaaagatacggaggacgacctgtttgcgctcccgatgagtccccgaagcccggaaatgaaggcgagccctttcagtcttttgagataggcacgctaccggaccggcgcgaaaagggagctttgactcgctgcaactgcggctttagattgaagattactaataacgacacctatataggcacttaagtgctggatgagaaaacgtgactaagatcaatgagacgcctgattgctctaagagtaataaggcactcatgactacgaaaaggaaatgacatgggccggcagggccagcaggaactcacaagactagaatacttttatcactaccctcttaaacctagtaaagtacagttgtgactgggagtttatacactctacactacaactcgtcgcatacaaacctagcatagcgtaatacgatgcggacgtaatctgcgctctactcggtctaatcgttg

SEQ ID NO: 35794 - DNA, 1647 bp, Muscodor strobelii
  misc_feature: SGI cDNA ID NO. 572399
  misc_feature: Encodes the peptide sequence at SEQ ID NO 35795
atgttagaacatggccacagcatcaatgatgaagccactgcaaagctcggtgttgcggtccgaacctgtagtttgggcgtcattgagaaattgatcatggccaacgcagatgtcaataagccgactgctctaaatggcattgtcccaagtgccccaactgtcctccaggccgcagcggagtctggccgtctcgacgttgttgaaagattgctcagagccaatgcggttgaaaagaacccgctaaatcggactcaggctcgcactccacttcaagcagcttgtgagcatgggaatctcgtcatggtagaaagactacttgcatcaggcgcggatgtaaatgctcctgcccaggactacggtcgtcgtactgcgcttcaggccgccgctgagaatggtcatctccatcttgtagagacgttactttcagccaatgcagatgtgaatgccgctgcctacagcggcagcggtcgcactgcacttcaagcggcttctgaacaaggtcatattaagattgtagaagcacttctagcagccggcgcaaatgtgaatgatttaagattaagtgctgaggggtggactgcactcggagcagctgccagacgcgataaggttgatgttgcaaaactattggtagcggctggggcatctgtcaatacctccattcggcacccgggctggaggtgttcaggcagcagcctaatcgagattgctgccaagtacggtcgatcagatatcatggaagtaatgctcgagactgatctatctttcgagaattacagctgcgcacttcgcgaagctgctgatggcggtcacctggcggttttcaacttgctttggactactggagtaacattcacgggcgatcaagagcttctcgccaagttacttccttccgccataggaggcggcaactccgacatcttgaagatcgttatcgaagcaggagcagatgtttacggttcaggggctcttcgactcgctgtcgaggcgaacaatcttgacatagtactgcaacttatggctgccggggcagataccaaaactaccgctggttacacgggccgtacgttactcgagaccgctgttgataagaacaatgccgacatagtgagagttcttctcgaaaatggtgccagtattgtcagcatttctaatgcaactggtgaccgttcaaggagtacgaccgtacttatggcaggtgttgagaagagaaattcagcaatcatcgatttactaatccaagctggggacgatgtcaatgttaaggcgggtgatctttattatcattcagccactgcactcatgcgcgctatcgacggtcaagatttccacgttgtcgataagctgatcaaagctggcgctgatgtcaatgctgtaatccaaagagatgacatatttaggcctcgtactgcgcttatagccgccgccgctgctgccaatagcgatccacgtatattagatctcctaatcgaagccggcgtcgatacgaatatgagtaacgcaactgtcagcgatgccatagcgctcgcccatcaacggggaaacatcgacatcatccagagactggaaaatataaatatgtgcgtcacgcgagataagcgacgtttgttcagactgagtgcgaggccgaagggtcggtcgagttag

SEQ ID NO: 35795 - protein, 548 aa, Muscodor strobelii
  misc_feature: SGI Peptide ID NO. 572399
  misc_feature (155)..(187): Pfam Id: PF00023 Pfam Desc: Ankyrin repeat
  misc_feature (85)..(117): Pfam Id: PF00023 Pfam Desc: Ankyrin repeat
  misc_feature (120)..(152): Pfam Id: PF00023 Pfam Desc: Ankyrin repeat
  misc_feature (190)..(222): Pfam Id: PF00023 Pfam Desc: Ankyrin repeat
  misc_feature (190)..(218): Pfam Id: PF00023 Pfam Desc: Ankyrin repeat
  misc_feature (353)..(385): Pfam Id: PF00023 Pfam Desc: Ankyrin repeat
  misc_feature (429)..(461): Pfam Id: PF00023 Pfam Desc: Ankyrin repeat
  misc_feature (32)..(522): NCBI GI: 242760147 Blast Desc: Pfs, NACHT and Ankyrin domain protein [Talaromyces stipitatus ATCC 10500] gi|218723125|gb|EED22542.1| Pfs, NACHT and Ankyrin domain protein [Talaromyces stipitatus ATCC 10500]
  misc_feature (41)..(522): NCBI GI: 242760147 Blast Desc: Pfs, NACHT and Ankyrin domain protein [Talaromyces stipitatus ATCC 10500] gi|218723125|gb|EED22542.1| Pfs, NACHT and Ankyrin domain protein [Talaromyces stipitatus ATCC 10500]
  misc_feature (1)..(522): NCBI GI: 242760147 Blast Desc: Pfs, NACHT and Ankyrin domain protein [Talaromyces stipitatus ATCC 10500] gi|218723125|gb|EED22542.1| Pfs, NACHT and Ankyrin domain protein [Talaromyces stipitatus ATCC 10500]
  misc_feature (16)..(524): NCBI GI: 242816359 Blast Desc: multiple ankyrin repeats single kh domain protein, [Talaromyces stipitatus ATCC 10500] gi|218715100|gb|EED14523.1| multiple ankyrin repeats single kh domain protein, [Talaromyces
  misc_feature (1)..(522): NCBI GI: 242816359 Blast Desc: multiple ankyrin repeats single kh domain protein, [Talaromyces stipitatus ATCC 10500] gi|218715100|gb|EED14523.1| multiple ankyrin repeats single kh domain protein, [Talaromyces
  misc_feature (1)..(496): NCBI GI: 212532817 Blast Desc: multiple ankyrin repeats single kh domain protein, [Penicillium marneffei ATCC 18224] gi|210071929|gb|EEA26018.1| multiple ankyrin repeats single kh domain protein, [Penicillium
  misc_feature (25)..(533): NCBI GI: 115664471 Blast Desc: : similar to ankyrin 2,3/unc44 [Strongylocentrotus purpuratus] gi|115694587|ref|XP_001183131.1| : similar to ankyrin 2,3/unc44 [Strongylocentrotus purpuratus]
  misc_feature (1)..(522): NCBI GI: 242760147 Blast Desc: Pfs, NACHT and Ankyrin domain protein [Talaromyces stipitatus ATCC 10500] gi|218723125|gb|EED22542.1| Pfs, NACHT and Ankyrin domain protein [Talaromyces stipitatus ATCC 10500]
  misc_feature (25)..(524): NCBI GI: 115941717 Blast Desc: : similar to ankyrin 2,3/unc44, partial [Strongylocentrotus purpuratus] gi|115943115|ref|XP_786997.2| : similar to ankyrin 2,3/unc44, partial [Strongylocentrotus
  misc_feature (9)..(522): NCBI GI: 189502738 Blast Desc: Aasi_1435 [Candidatus Amoebophilus asiaticus 5a2] gi|189498179|gb|ACE06726.1| Aasi_1435 [Candidatus Amoebophilus asiaticus 5a2]
  misc_feature (40)..(380): SWISSPROT Homolog: EC 2.7.11.1 Non-specific serine/threonine protein kinase
MLEHGHSINDEATAKLGVAVRTCSLGVIEKLIMANADVNKPTALNGIVPSAPTVLQAAAESGRLDVVERLLRANAVEKNPLNRTQARTPLQAACEHGNLVMVERLLASGADVNAPAQDYGRRTALQAAAENGHLHLVETLLSANADVNAAAYSGSGRTALQAASEQGHIKIVEALLAAGANVNDLRLSAEGWTALGAAARRDKVDVAKLLVAAGASVNTSIRHPGWRCSGSSLIEIAAKYGRSDIMEVMLETDLSFENYSCALREAADGGHLAVFNLLWTTGVTFTGDQELLAKLLPSAIGGGNSDILKIVIEAGADVYGSGALRLAVEANNLDIVLQLMAAGADTKTTAGYTGRTLLETAVDKNNADIVRVLLENGASIVSISNATGDRSRSTTVLMAGVEKRNSAIIDLLIQAGDDVNVKAGDLYYHSATALMRAIDGQDFHVVDKLIKAGADVNAVIQRDDIFRPRTALIAAAAAANSDPRILDLLIEAGVDTNMSNATVSDAIALAHQRGNIDIIQRLENINMCVTRDKRRLFRLSARPKGRSS

SEQ ID NO: 35796 - DNA, 245 bp, Muscodor strobelii
  misc_feature: SGI EST ID NO. CUFF.85244.0
  misc_feature: Variant of the nucleotide sequence at SEQ ID NO 35794
gccaagttacttccttccgccataggaggcggcaactccgacatcttgaagatcgttatcgaagcaggagcagatgtttacggttcaggggctcttcgactcgctgtcgaggcgaacaatcttgacatagtactgcaacttatggctgccggggcagataccaaaactaccgctggttacacgggccgtacgttactcgagaccgctgttgataagaacaatgccgacatagtgagagttcttct

SEQ ID NO: 35797 - DNA, 3390 bp, Muscodor strobelii
  misc_feature: SGI cDNA ID NO. 572400
  misc_feature: Encodes the peptide sequence at SEQ ID NO 35798
atggcggaagaagtcgatgagatggacaccgatgtccccgtcgctcccatccctaacggtggcgacaacacaatagacatggatgccgagggagaagaggtcgacgatctaaaggacataggccacccacagcatggagattataccaaagacgagatctatagtgtcggggtgcagaaagacgtcaaggaagggctggatacaacagaggacatcgagaatgatgaaggcgacagtggccccgaggctgacgacgacggcggtagcaaccgtgatgctgagggtgaagatgacccagaagatgacgaggttgacgaagaccatgatgacatagacgaggaggaggcagaaggtgtgggcgctgttaagatcaagcccggcgataccgacgacgaggacgacgatgatagcgacaacggctccgagagtggtgagggttcagactttagtgacagagaatcctcagccgaatggcacgatgcccacgagcacgacgaggaagatgaggaacaagatgatgcggatgaggatgatgagtctgatgttgaagccaaatactccctccacgacgacgacgactcagaccgcgaatcggagctcaactcagaggcagaggacgtcgaagacaacatcgatgcggatggcgatgtagatagagagtccaagacccgctccaccagtcgatccacacacaaccacactgacacccaggaggaactccccgacacccccgccaaccgcgaggctgatggtgatgacctctctcctacctctgccagacgatcttcagcaccccagattgcgcgcgacctcctacctgcgcaacgcgggctcaagactgactcccattctgtcttcaaccaactcgtacttgatgaagaccccatggatggctcgcgggtcttgaggaagaggaagacctcgtccgccgaggccgaggatagggtcgaggaagagaccatgtcattgcgcaaacgacgaaagaacacctccgacgagtccaccgagggtgacgcgactcaggaacagaccaatgacggcaactcgtcaacacgctcctcgagaccttcgcgttcttccagacagaaagctacctctgcttcctcacaagccacagttgtcaagaaatctaagagtagtattgtcgtggccatacacatcaagaaccccaccgaactcagccagatcctagagaagaccgccaagccgtccaggaagcgctcgggaggcaggtctgcggcttcgcagtcgtcgagaaacaccgcagcgcgaaacaacacagcaatcgctagcacctctgcggctcctccaactacggcattcttcccatccagctattctcagccattctattcgttctatgataaggagacagatgatttgaagggcaagccgtatggtggcattttgacagaagctcaagcagacacgagcaagacactgcccaccgccgaggatcgcaaacgctttgacgaggcgaaacagaaagccgaggacaaatggaggaagcgaatggaggagatgcagaaggaagaggaggcacctctcaacaagaagtcgaagcaaccaagtgccccggccagtcagatcaagtttatcgaatttggcggttgggagatcaaaacctggtatgctgcaccctatcccgaagagtatagccgaaactcggtgctttacatttgcgaattttgcttgaagtatatgaactcggattacgtggcctggcgtcataaactcaagtgtcccgcaaagtttccgcctggtgacgagatctaccgacaagggtccatctctttctttgaagtcgatggccgcaagaacccagtttattgccagaacttatgtctgctggctaagctgttcctgggctccaagactttgtactacgacgtcgagcccttcttattttacgtcctttgcgagtacgacgatctcggttatcacttcgtcggctacttctccaaagagaagcgtgccagtagtcagaataacgttagctgcattctgacgctccctattcgtcaacgaaagggttacggcaatcttcttattgatttctcttacctcctcacccgagttgaggagaagaatggttcacccgagaaacctctgtccgacatggggctagtctcgtaccgcaactactggagactcgttctctgcaaatatttgatcgatcaaatgcctgaagataagtcccagaggaaagggatcagcatccgtcagatggccgacgacacgggaatgactgctgatgacgttgtctctgcgcttgaagcccttcgatttcttgtgaaagacaaggtctctaacacctacgccttccgtgtcgatctgtcattttgccgcaaggaggtagagcgttgggaatccaaaggctacgtcaagctcaaccctcaagcactcacatggacaccatatgtcatggggcgtagcaatgcgaccaacttcgagcttgggcctgctcttaatgcgatcgctccacgcgaagatgatgatgagcccaagcccgtcaatgctgtggccgaaactgcagttcccgcggatgcttcaactgtcaccaacggcctcgcccagaaagcaattctggcaagcgactctgctgtcctcgagtctacagaacccaacgatcatattcttgccgatatctcagaggccaccaagactaatggagtagccaaggagaatgacagtcgtcacacatccgagcaaggtcgcggtatatcgtctgttggtgggcgcactgagaacaatgacgacgaagagaactggctgaaacaatacgacaatatccccgtcactcgatttgaagtcttccctccgatcagcaaacgcccaggcccatctcgcgccgcatctagcctcacgaggcctccgccgctggctcgcccagcgcccgctgtccgcactccagcatcgcgccccggtcctaaaccccgcaagtcaacgggagctagcagtgccagaaagtcagccgcgaagaagaccagctctgccaaacgcaagacaggcggtacaggacgcggaccaggacgatggccgcggggcactaagaagagcgactatggcaatgctgacagtggccctggtcttcctccgggatggcttgcgaagaaagcacaagaatcagcgtctagcgttgccgtcaaagatgctgacgaggataacgagacacaagacacagttcaagtgcaagtcgcaaagggaaaacaagtcgagaccatcgctgctgtcttcgcagtcaaggacaatggccaatctgaaggctccggatcaaaaggcaaaggaaaggccaaagccaatggtgttccgagcgacgaggggattgcacctgtccagggcgatatggaggtcgacgaagatgaggacgcacccggagaggatgagtag

SEQ ID NO: 35798 - protein, 1129 aa, Muscodor strobelii
  misc_feature: SGI Peptide ID NO. 572400
  misc_feature (583)..(776): Pfam Id: PF01853 Pfam Desc: MOZ/SAS family
  misc_feature (118)..(1064): NCBI GI: 39979199 Blast Desc: related to histone acetyltransferase [Neurospora crassa]
  misc_feature (258)..(1064): NCBI GI: 164426027 Blast Desc: NCU04782 [Neurospora crassa OR74A] gi|157071170|gb|EAA30995.2| conserved [Neurospora crassa OR74A]
  misc_feature (242)..(1065): NCBI GI: 116202125 Blast Desc: CHGG_08947 [Chaetomium globosum CBS 148.51] gi|88177465|gb|EAQ84933.1| CHGG_08947 [Chaetomium globosum CBS 148.51]
  misc_feature (93)..(1072): NCBI GI: 145614542 Blast Desc: MGG_04615 [Magnaporthe grisea 70-15] gi|145021448|gb|EDK05577.1| MGG_04615 [Magnaporthe grisea 70-15]
  misc_feature (291)..(1039): NCBI GI: 256733949 Blast Desc: NECHADRAFT_91747 [Nectria haematococca mpVI 77-13-4]
  misc_feature (291)..(1128): NCBI GI: 46128207 Blast Desc: FG08481.1 [Gibberella zeae PH-1]
  misc_feature (119)..(1102): NCBI GI: 156064609 Blast Desc: SS1G_00312 [Sclerotinia sclerotiorum 1980] gi|154691174|gb|EDN90912.1| SS1G_00312 [Sclerotinia sclerotiorum 1980]
  misc_feature (255)..(947): NCBI GI: 238843906 Blast Desc: histone acetyltransferase mst2 [Microsporum canis CBS 113480]
  misc_feature (26)..(947): NCBI GI: 261199808 Blast Desc: mst2 [Ajellomyces dermatitidis SLH14081] gi|239594513|gb|EEQ77094.1| mst2 [Ajellomyces dermatitidis SLH14081] gi|239607903|gb|EEQ84890.1| mst2 [Ajellomyces ER-3]
  misc_feature (79)..(992): NCBI GI: 145258095 Blast Desc: An04g05760 [Aspergillus niger] gi|134074545|emb|CAK38838.1| protein product [Aspergillus niger]
MAEEVDEMDTDVPVAPIPNGGDNTIDMDAEGEEVDDLKDIGHPQHGDYTKDEIYSVGVQKDVKEGLDTTEDIENDEGDSGPEADDDGGSNRDAEGEDDPEDDEVDEDHDDIDEEEAEGVGAVKIKPGDTDDEDDDDSDNGSESGEGSDFSDRESSAEWHDAHEHDEEDEEQDDADEDDESDVEAKYSLHDDDDSDRESELNSEAEDVEDNIDADGDVDRESKTRSTSRSTHNHTDTQEELPDTPANREADGDDLSPTSARRSSAPQIARDLLPAQRGLKTDSHSVFNQLVLDEDPMDGSRVLRKRKTSSAEAEDRVEEETMSLRKRRKNTSDESTEGDATQEQTNDGNSSTRSSRPSRSSRQKATSASSQATVVKKSKSSIVVAIHIKNPTELSQILEKTAKPSRKRSGGRSAASQSSRNTAARNNTAIASTSAAPPTTAFFPSSYSQPFYSFYDKETDDLKGKPYGGILTEAQADTSKTLPTAEDRKRFDEAKQKAEDKWRKRMEEMQKEEEAPLNKKSKQPSAPASQIKFIEFGGWEIKTWYAAPYPEEYSRNSVLYICEFCLKYMNSDYVAWRHKLKCPAKFPPGDEIYRQGSISFFEVDGRKNPVYCQNLCLLAKLFLGSKTLYYDVEPFLFYVLCEYDDLGYHFVGYFSKEKRASSQNNVSCILTLPIRQRKGYGNLLIDFSYLLTRVEEKNGSPEKPLSDMGLVSYRNYWRLVLCKYLIDQMPEDKSQRKGISIRQMADDTGMTADDVVSALEALRFLVKDKVSNTYAFRVDLSFCRKEVERWESKGYVKLNPQALTWTPYVMGRSNATNFELGPALNAIAPREDDDEPKPVNAVAETAVPADASTVTNGLAQKAILASDSAVLESTEPNDHILADISEATKTNGVAKENDSRHTSEQGRGISSVGGRTENNDDEENWLKQYDNIPVTRFEVFPPISKRPGPSRAASSLTRPPPLARPAPAVRTPASRPGPKPRKSTGASSARKSAAKKTSSAKRKTGGTGRGPGRWPRGTKKSDYGNADSGPGLPPGWLAKKAQESASSVAVKDADEDNETQDTVQVQVAKGKQVETIAAVFAVKDNGQSEGSGSKGKGKAKANGVPSDEGIAPVQGDMEVDEDEDAPGEDE

SEQ ID NO: 35799 - DNA, 4117 bp, Muscodor strobelii
  misc_feature: SGI EST ID NO. CUFF.85371.1
  misc_feature: Variant of the nucleotide sequence at SEQ ID NO 35797
cgccagtcaaacagattgtggagcatccaacaccaccactcctccaataccgagggcagctcccgtcgcatcaccgctgccggtctcaacatcgccgtgacagccttgcgcctgcttctttcaacaatcaatctcttgccatttattgtcgagcttgttcgccgacccatagcgagtctttcctgtcacccagcgctgtttggcgccctgtgcgccgctctccttaaccacaattcacactcgttcacggcaccctgtcgcccgcggtcctcacaaccggccgtaatattttaacccattgctgcacaaaagtatggcggaagaagtcgatgagatggacaccgatgtccccgtcgctcccatccctaacggtggcgacaacacaatagacatggatgccgagggagaagaggtcgacgatctaaaggacataggccacccacagcatggagattataccaaagacgagatctatagtgtcggggtgcagaaagacgtcaaggaagggctggatacaacagaggacatcgagaatgatgaaggcgacagtggccccgaggctgacgacgacggcggtagcaaccgtgatgctgagggtgaagatgacccagaagatgacgaggttgacgaagaccatgatgacatagacgaggaggaggcagaaggtgtgggcgctgttaagatcaagcccggcgataccgacgacgaggacgacgatgatagcgacaacggctccgagagtggtgagggttcagactttagtgacagagaatcctcagccgaatggcacgatgcccacgagcacgacgaggaagatgaggaacaagatgatgcggatgaggatgatgagtctgatgttgaagccaaatactccctccacgacgacgacgactcagaccgcgaatcggagctcaactcagaggcagaggacgtcgaagacaacatcgatgcggatggcgatgtagatagagagtccaagacccgctccaccagtcgatccacacacaaccacactgacacccaggaggaactccccgacacccccgccaaccgcgaggctgatggtgatgacctctctcctacctctgccagacgatcttcagcaccccagattgcgcgcgacctcctacctgcgcaacgcgggctcaagactgactcccattctgtcttcaaccaactcgtacttgatgaagaccccatggatggctcgcgggtcttgaggaagaggaagacctcgtccgccgaggccgaggatagggtcgaggaagagaccatgtcattgcgcaaacgacgaaagaacacctccgacgagtccaccgagggtgacgcgactcaggaacagaccaatgacggcaactcgtcaacacgctcctcgagaccttcgcgttcttccagacagaaagctacctctgcttcctcacaagccacagttgtcaagaaatctaagagtagtattgtcgtggccatacacatcaagaaccccaccgaactcagccagatcctagagaagaccgccaagccgtccaggaagcgctcgggaggcaggtctgcggcttcgcagtcgtcgagaaacaccgcagcgcgaaacaacacagcaatcgctagcacctctgcggctcctccaactacggcattcttcccatccagctattctcagccattctattcgttctatgataaggagacagatgatttgaagggcaagccgtatggtggcattttgacagaagctcaagcagacacgagcaagacactgcccaccgccgaggatcgcaaacgctttgacgaggcgaaacagaaagccgaggacaaatggaggaagcgaatggaggagatgcagaaggaagaggaggcacctctcaacaagaagtcgaagcaaccaagtgccccggccagtcagatcaagtttatcgaatttggcggttgggagatcaaaacctggtatgctgcaccctatcccgaagagtatagccgaaactcggtgctttacatttgcgaattttgcttgaagtatatgaactcggattacgtggcctggcgtcataaactcaagtgtcccgcaaagtttccgcctggtgacgagatctaccgacaagggtccatctctttctttgaagtcgatggccgcaagaacccagtttattgccagaacttatgtctgctggctaagctgttcctgggctccaagactttgtactacgacgtcgagcccttcttattttacgtcctttgcgagtacgacgatctcggttatcacttcgtcggctacttctccaaagagaagcgtgccagtagtcagaataacgttagctgcattctgacgctccctattcgtcaacgaaagggttacggcaatcttcttattgatttctcttacctcctcacccgagttgaggagaagaatggttcacccgagaaacctctgtccgacatggggctagtctcgtaccgcaactactggagactcgttctctgcaaatatttgatcgatcaaatgcctgaagataagtcccagaggaaagggatcagcatccgtcagatggccgacgacacgggaatgactgctgatgacgttgtctctgcgcttgaagcccttcgatttcttgtgaaagacaaggtctctaacacctacgccttccgtgtcgatctgtcattttgccgcaaggaggtagagcgttgggaatccaaaggctacgtcaagctcaaccctcaagcactcacatggacaccatatgtcatggggcgtagcaatgcgaccaacttcgagcttgggcctgctcttaatgcgatcgctccacgcgaagatgatgatgagcccaagcccgtcaatgctgtggccgaaactgcagttcccgcggatgcttcaactgtcaccaacggcctcgcccagaaagcaattctggcaagcgactctgctgtcctcgagtctacagaacccaacgatcatattcttgccgatatctcagaggccaccaagactaatggagtagccaaggagaatgacagtcgtcacacatccgagcaaggtcgcggtatatcgtctgttggtgggcgcactgagaacaatgacgacgaagagaactggctgaaacaatacgacaatatccccgtcactcgatttgaagtcttccctccgatcagcaaacgcccaggcccatctcgcgccgcatctagcctcacgaggcctccgccgctggctcgcccagcgcccgctgtccgcactccagcatcgcgccccggtcctaaaccccgcaagtcaacgggagctagcagtgccagaaagtcagccgcgaagaagaccagctctgccaaacgcaagacaggcggtacaggacgcggaccaggacgatggccgcggggcactaagaagagcgactatggcaatgctgacagtggccctggtcttcctccgggatggcttgcgaagaaagcacaagaatcagcgtctagcgttgccgtcaaagatgctgacgaggataacgagacacaagacacagttcaagtgcaagtcgcaaagggaaaacaagtcgagaccatcgctgctgtcttcgcagtcaaggacaatggccaatctgaaggctccggatcaaaaggcaaaggaaaggccaaagccaatggtgttccgagcgacgaggggattgcacctgtccagggcgatatggaggtcgacgaagatgaggacgcacccggagaggatgagtaggcattcctcgttccggtgctcactctctaaatcggccttgtaagattctttgtatttattctaggttatggccacggagtcttcggttcattaggacagctcggcgttactaggtctcggttcggactcggtcgtgcgagtgtttagatgacacttacgacctcgagtgagatttatcgagaaaagacggactgcgctactgctcacagagctaggggtttggggtggataggagtcaagactaggtggttgagggttggcgattaagatacctgatacttgatacctagagtagctaaactcttgctatgatattatatgagtcttttcgtgagggatgactatgaatgcatgatgcagcatagttcgtggttcagctaaatgtagagagacctcataaggaggatgccaggc

SEQ ID NO: 35800 - DNA, 261 bp, Muscodor strobelii
  misc_feature: SGI cDNA ID NO. 572401
  misc_feature: Encodes the peptide sequence at SEQ ID NO 35801
atgcccgtccctttcgaagctctgattccttatgggattgttctcgccatgttcggcgccaccggtgctggcttgtccaaactgaggcactggcagaacggcaacaagcgcccccgtcgctctctcgaccagtgggatagagtactgatggaccgagaccgccgaattacaggcctcttacgaggacagagcgatgagcccgttgcaccgccaggattcgagttcaataatggatggagggttgagaaacggatagcatag

SEQ ID NO: 35801 - protein, 86 aa, Muscodor strobelii
  misc_feature: SGI Peptide ID NO. 572401
  misc_feature (1)..(86): NCBI GI: 261360773 Blast Desc: conserved [Verticillium albo-atrum VaMs.102]
  misc_feature (1)..(86): NCBI GI: 171681950 Blast Desc: protein product [Podospora anserina] gi|170940934|emb|CAP66584.1| protein product [Podospora anserina]
  misc_feature (1)..(85): NCBI GI: 156064611 Blast Desc: SS1G_00313 [Sclerotinia sclerotiorum 1980] gi|154691175|gb|EDN90913.1| SS1G_00313 [Sclerotinia sclerotiorum 1980]
  misc_feature (1)..(86): NCBI GI: 119194297 Blast Desc: CIMG_01523 [Coccidioides immitis RS] gi|240105363|gb|EER23556.1| CPC735_049260 [Coccidioides posadasii C735 delta SOWgp]
  misc_feature (1)..(86): NCBI GI: 46128205 Blast Desc: FG08480.1 [Gibberella zeae PH-1]
  misc_feature (1)..(85): NCBI GI: 154287502 Blast Desc: conserved [Ajellomyces capsulatus NAm1] gi|150408187|gb|EDN03728.1| conserved [Ajellomyces capsulatus NAm1]
  misc_feature (1)..(85): NCBI GI: 225559874 Blast Desc: conserved [Ajellomyces capsulatus G186AR] gi|225559923|gb|EEH08205.1| conserved [Ajellomyces capsulatus G186AR]
  misc_feature (1)..(82): NCBI GI: 226290056 Blast Desc: conserved [Paracoccidioides brasiliensis Pb18]
  misc_feature (1)..(85): NCBI GI: 121707849 Blast Desc: conserved [Aspergillus clavatus NRRL 1] gi|119400107|gb|EAW10533.1| conserved [Aspergillus clavatus NRRL 1]
  misc_feature (1)..(85): NCBI GI: 189192921 Blast Desc: PTRG_02466 [Pyrenophora tritici-repentis Pt-1C-BFP] gi|187978363|gb|EDU44989.1| PTRG_02466 [Pyrenophora tritici-repentis Pt-1C-BFP]
MPVPFEALIPYGIVLAMFGATGAGLSKLRHWQNGNKRPRRSLDQWDRVLMDRDRRITGLLRGQSDEPVAPPGFEFNNGWRVEKRIA

SEQ ID NO: 35802 - DNA, 5950 bp, Muscodor strobelii
  misc_feature: SGI EST ID NO. CUFF.86226.3
  misc_feature: Variant of the nucleotide sequence at SEQ ID NO 35800
agcaaagtacgaccgactcccaggcgatgcacccacttgcgcacgatactgacgtggtcaaacgatagtgatggaccgagaccgccgaattacaggcctcttacgaggacagagcgatgagcccgttgcaccgccaggattcgagttcaataatggatggagggttgagaaacggatagcataggggaaacaagcagacaatacccaacgaaatcaactacttgtacaatcaacaaaagcaagcaccaaatgacatagattcctttgtttctcgccatgaaaattctcgggtatcattccgtctagtctgaaattgtacatgctgacctgccgtggatacctctctaacgccttgccaacaaaacttctataatgtgatttctgcccgattcttatttaacccatctagcagcatgcaagcctggcagagcctctgactggagatatagccacacttctcacacgtgcccaggttctgcttccgcacgatagggaccgaagtgccgggtcttccaggtcttcccttcttcggctgctcgtcttcggcttgcttcaaattatctggctgtggctcgctgaccttgagggctgatatctccgtttctagtccagccgcctcggccgcttcgttggccctcagctgcttctccatggctgccatatcaccgccgccggtcagcccgttactcgagccgcatccgccggccttctcgtcctccccaacagcctgtgacaacgaagtcttcccattgcaagcgcacgagtctggtgctgcgcccggcactagtcttgccatgtcctcgccacttcggacaacatccaggatcgcactcggtcgaacacgctctagattcttgataagagctcttgcgcttcctctgaaagcctcggggctgtatatgcactcggtgctgaagtagtctaatttcttatgatgcgcatacagcacaatctccttctcgtaggcgtatttgagaggtttactgcgcttgacctcacttgaatcgttgcctgtgacgatacttgtgctcctcgataaccggggcaggtctcctcgtagtaggttcatcaagacagtctcggcgacatcgtcggcattgtgtcccgtgacaacatgcttgatgccaagcatcttcgctcctctgtccagcgcctgccgccggaacacaccacaatatgtgcagttacccttcttcccgatagtctcaacaacttggtccatggtccatccgtacagctcatcataccccacgattttcaatggcatctcgtactgaaccgcattccgcttgacagtctcgagtgaatcgtcgcggtaacctttgatgccctcatcgatacttagaagcactaagtccagcccgtagtcgtacctttcgttgagtgttttgagtactgaggccaacactgttgaatccttgccacctgatgcgcctatcgctaccctttcgccacggacgaatagattggatgaggttatggtgtgatgagtctcatcctcgaatatttgtatgaaacacgccttgcagagcttctggtaattcttgggcctcttgatgagtgcccgctcggtcttgcagatggcgcagggcgccggtgccatctcggaatatcgttcctcaggtaggatgtactactaagtgaatatcaacgagaggaatctatttgctgatgagtttcttgaagttgtgacaagtacagatgagattctcagagtagttttctaaagctattgaaaaagctgaagtgatgaatgactcttaaaccgccaccattacaaactgcagtctcagtgctccagtgagttcaggctggcatgcagcggggtgtaaaaaggtacgaaggtacctggcgagcctggcttcgaggggcattgtatgctaatactctttgggcttagtctccatttaggtcgctctcacaatcgattaccgacgattcaccggccctcaccagtcccccccaaattgcaaaaaaccctacagcccgctccacacaatcgcagctaactcagattttcgggtcggacacttctcacgagatcttccttcttcacacctctcaccaacggtcgactcgatactaacccacgacctcacgacagcactccgtcaacatgcctcccaagactggaaagaaggccgccccggccccctttgggtcttccaagtcctccaagaaggcacccaagaaccctctcatcgagaagaagccccgcaacttcggcatcggccaggacatccagcccaagcgcaacctctcgcgcatggtgaagtggcccgagtatgtccgtctccagcgccagcgcaagatcatcaacatgcgcctcaaggtcccccctgccattgcccagttccagcacgtccttgaccgcaacaccgccgcccaggccctcaagctcctcaacaagtaccgccccgagaccaaggccgagaagaaggagcgcctggtcaaggaggccaccgccatcaaggagggcaagaagaaggaggacgtctccaagaagccctacaccgtcaagtacggcctcaaccacgtcgtcggcctcgtcgagaacaagaaggcctcgctcgtcctcatccccaatgacgtcgaccccatcgagctcgtcatcttcctccccgccctctgccgcaagttcggcattccctacgccatcatcaagggtaaggcccgtctcggaactgtcgtccacaagaagaccgccgccgtcgtcgccctgaccgaggtccgctccgaggacaagaacgagcactccaagcttattagcgccatcaaggagggctacctggccaactccgagaacgctcgcaagtcttggggtggtggtatcatgggtgagaaggccaacaagcgcattgagaagaagaagaaggccgccgagtctgctctcaagatctaggtcaaggtctaggttgattggttgagcacgtgcatgccgtcatgaaatgggtctggagtttgtagctttgcacagtttcggcgtttgggaagggacaaaatggaataccaacatttgtggatttgcatgacgacaagcccaatcctctacagaccctgaaatgacagccaatgtgaacaaggcatagtttgaccaatgactcgaccaccaattagtaaaaatcatctaaattcggaagtgctcgcgaggtttctgttttcatcgcgtggtgtcgtatgagaattgtatgattctgacagatatacgagtggctgactgagatgcgtatacggcgtagtgaccggaactcgcccgagatgttttggccaagcttagccaagaatacaaacaaacgtaatacgtttagccaaggacacatctgacagataagagatcctaaagcattggcatctcacttctcggctcactaaattcctcccgcgagtcccgcattctcttccccgcttgagctacacggcattgcgcttgctgttgtaatatgattcgcatagagctacctctttgaccagcattgcagtgggacaattgacgatacacagggatcaacaggcacttgcattagctgcaacgtcggtgctaatcccggggcagctatgcaccatccaattgttgatatctacaccatcacggcttgagaagtcagaacctcactcctcaacaaacatagtatataccttcctcccatcgatcatataattatagccaagaatcgatgaatcagatataatccgcgagccgcgaccagtaccgctcctgcgcctgatcctctacataccatgtttcatccgatatccctgtccggcaagtgcaacactgtgagatttgatgaacttggcgtgaacttggcacggaaagactctctgcagcaaacaagacaagagaagctgagaagctccggcttccccggcagccggatatgacagcatagcagtctgcgtgagaatgtccgacggtgtgcaactcgaggcatgcatgatctctgtcctctgtgccggggagcaatggcacatcgcatgcctggccagcatcttgttcccttatctgcgctcgcctacccaaaggagatctcagctgcatattccctagtcagattggtatcttcatcgctgtagtaattagattgcgtgctcctttgcattcggctggccctacttcattgagtttcgggttgtttttctaagctggccttctcttatacctactctcgacctatatacctatgatataacgctttgaaagcaaggaggaaacggacatctcaagttgcaccatcgcagactcggacactccacacccaaatttactcgagagaaataatacaggaaaataagaaataggatatctgcagcaggggctcagcttaccaccctatattaccacgcctcacatccaaagacaaagctgagcgtcgccgaataccgagctggggaaatatcaacgtcgagcccacggacttggactcggactcgttcggcgttcaattgttcacgctaccacgacgatattatcatttttattttttttagttgtgctcgcacatacatcgctaccgttgaacaaaaggcaaacaagaggagtcaagaagaatcacagttgaactgttatcatagttcaaactatggcccgccagcgtgagtaaacgcacccccttcatcgaccgggcgattatctctgcccttagtgtcgccctgcattgcccatgtgaaagaaagaaagagaactcgacaacaacaattgcggagactcaagtaaacgagtaaacgaaactgcaaacatcatcccacggtggaatacctcatctcatttctctttcgcgttattgtcacttttccccttgctgttgtgaaacccaaaaatcccaatgcgatggatgagaagcaaaaggaacgctcagaactgagaaagaaatggcatgaagcttacgagatgaccaaaccagaggatgttttcagctacgcgctgacgtcgaacaaggcctgggctggttataagggacaccagaacccggacttcttccctcgtctcgctgctggacagtcgcctcagatcttatggctaggctgttccgactcccgctgccccgaaacaacgatcatgggtcttcagccgggggacatattcgttcaccgcaacatcgccaacatcatatccccaacagacctcaacacatccgccgtcatcgaatacgccgtatcctttcttcgggtccaccacatagttctctgcggccactcctgctgcggcggcgccatcgcgactgtctccgatacctccgtcggtcaacttctcgatctttggcttacgccacttcgcgctgtgcgagacaagaataaggaagaaattgacgggattaagaatgagggggagaaagcgattagactcgcggagaagaatgttgaacagggtgtggaggttttactggccaatcgcacggtgaagagcgcgattgaggagagaggactgcaggtccatgggtgtttgtttgatattgagcgggggattgttagggagcttgggtgtgggactaagaaggcgggggttgagatggagggcactgttaagggtgatcatgcgatgcttgtgtttaggggggatggcgcggggatgaagatcatggatcgttgagaaggtatgagagagaggttgagagtggtagggagtttgggattgagggttatggattgtcttgtttgagtatgagggtttggtatgggataggataaggattgacgatggatcatggaacgacaggatggtgaatgaaggcattggcatggcgaggataactggatgggaggtttgagtctttggcgagctggggtttgggtgtttgagtttgagattatgatgcgatatgagaagacatcgcactggcattaggcatatgctgtgaaattgagattgatttcctaatgtgtgaagtaacttcaggttctgtgattgtgcgagcttgattcgggggttcgggatgtttttctgcggtttgga

SEQ ID NO: 35803 - DNA, 264 bp, Muscodor strobelii
  misc_feature: SGI cDNA ID NO. 572402
  misc_feature: Encodes the peptide sequence at SEQ ID NO 35804
atgcccgtccctttcgaagctctgattccttatgggattgttctcgccatgttcggcgccaccggtgctggcttgtccaaactgaggcactggcagaacggcaacaagcgcccccgtcgctctctcgaccagtgggatagagtactgatggaccgagaccgccgaattacaggcctcttacgaggacagagcgatgagcccgttgcaccgccaggattcgagttcaataatggatggagggtatgttcctacgcgcgaaattaa

SEQ ID NO: 35804 - protein, 87 aa, Muscodor strobelii
  misc_feature: SGI Peptide ID NO. 572402
  misc_feature (1)..(81): NCBI GI: 261360773 Blast Desc: conserved [Verticillium albo-atrum VaMs.102]
  misc_feature (1)..(80): NCBI GI: 171681950 Blast Desc: protein product [Podospora anserina] gi|170940934|emb|CAP66584.1| protein product [Podospora anserina]
  misc_feature (1)..(81): NCBI GI: 156064611 Blast Desc: SS1G_00313 [Sclerotinia sclerotiorum 1980] gi|154691175|gb|EDN90913.1| SS1G_00313 [Sclerotinia sclerotiorum 1980]
  misc_feature (1)..(82): NCBI GI: 226290056 Blast Desc: conserved [Paracoccidioides brasiliensis Pb18]
  misc_feature (1)..(83): NCBI GI: 46128205 Blast Desc: FG08480.1 [Gibberella zeae PH-1]
  misc_feature (1)..(81): NCBI GI: 119194297 Blast Desc: CIMG_01523 [Coccidioides immitis RS] gi|240105363|gb|EER23556.1| CPC735_049260 [Coccidioides posadasii C735 delta SOWgp]
  misc_feature (1)..(81): NCBI GI: 154287502 Blast Desc: conserved [Ajellomyces capsulatus NAm1] gi|150408187|gb|EDN03728.1| conserved [Ajellomyces capsulatus NAm1]
  misc_feature (1)..(81): NCBI GI: 225559874 Blast Desc: conserved [Ajellomyces capsulatus G186AR] gi|225559923|gb|EEH08205.1| conserved [Ajellomyces capsulatus G186AR]
  misc_feature (1)..(81): NCBI GI: 189192921 Blast Desc: PTRG_02466 [Pyrenophora tritici-repentis Pt-1C-BFP] gi|187978363|gb|EDU44989.1| PTRG_02466 [Pyrenophora tritici-repentis Pt-1C-BFP]
  misc_feature (1)..(81): NCBI GI: 121707849 Blast Desc: conserved [Aspergillus clavatus NRRL 1] gi|119400107|gb|EAW10533.1| conserved [Aspergillus clavatus NRRL 1]
MPVPFEALIPYGIVLAMFGATGAGLSKLRHWQNGNKRPRRSLDQWDRVLMDRDRRITGLLRGQSDEPVAPPGFEFNNGWRVCSYARN

SEQ ID NO: 35805 - DNA, 214 bp, Muscodor strobelii
  misc_feature: SGI EST ID NO. CUFF.86194.0
  misc_feature: Variant of the nucleotide sequence at SEQ ID NO 35803
cgtagagcttgacctcctcgacctttgaaccacccaagattggctggacaacaccacccagcagtcgaccacgatgcccgtccctttcgaagctctgattccttatgggattgttctcgccatgttcggcgccaccggtgctggcttgtccaaactgaggcactggcagaacggcaacaagcgcccccgtcgctctctcgaccagtgggataga

SEQ ID NO: 35806 - DNA, 1236 bp, Muscodor strobelii
  misc_feature: SGI cDNA ID NO. 572403
  misc_feature: Encodes the peptide sequence at SEQ ID NO 35807
atggcaccggcgccctgcgccatctgcaagaccgagcgggcactcatcaagaggcccaagaattaccagaagctctgcaaggcgtgtttcatacaaatattcgaggatgagactcatcacaccataacctcatccaatctattcgtccgtggcgaaagggtagcgataggcgcatcaggtggcaaggattcaacagtgttggcctcagtactcaaaacactcaacgaaaggtacgactacgggctggacttagtgcttctaagtatcgatgagggcatcaaaggttaccgcgacgattcactcgagactgtcaagcggaatgcggttcagtacgagatgccattgaaaatcgtggggtatgatgagctgtacggatggaccatggaccaagttgttgagactatcgggaagaagggtaactgcacatattgtggtgtgttccggcggcaggcgctggacagaggagcgaagatgcttggcatcaagcatgttgtcacgggacacaatgccgacgatgtcgccgagactgtcttgatgaacctactacgaggagacctgccccggttatcgaggagcacaagtatcgtcacaggcaacgattcaagtgaggtcaagcgcagtaaacctctcaaatacgcctacgagaaggagattgtgctgtatgcgcatcataagaaattagactacttcagcaccgagtgcatatacagccccgaggctttcagaggaagcgcaagagctcttatcaagaatctagagcgtgttcgaccgagtgcgatcctggatgttgtccgaagtggcgaggacatggcaagactagtgccgggcgcagcaccagactcgtgcgcttgcaatgggaagacttcgttgtcacaggctgttggggaggacgagaaggccggcggatgcggctcgagtaacgggctgaccggcggcggtgatatggcagccatggagaagcagctgagggccaacgaagcggccgaggcggctggactagaaacggagatatcagccctcaaggtcagcgagccacagccagataatttgaagcaagccgaagacgagcagccgaagaagggaagacctggaagacccggcacttcggtccctatcgtgcggaagcagaacctgggcacgtgtgagaagtgtggctatatctccagtcagaggctctgccaggcttgcatgctgctagatgggttaaataagaatcgggcagaaatcacattatag

SEQ ID NO: 35807 - protein, 411 aa, Muscodor strobelii
  misc_feature: SGI Peptide ID NO. 572403
  misc_feature (53)..(244): Pfam Id: PF01171 Pfam Desc: PP-loop family
  misc_feature (147)..(184): Pfam Id: PF01171 Pfam Desc: PP-loop family
  misc_feature (53)..(90): Pfam Id: PF01171 Pfam Desc: PP-loop family
  misc_feature (1)..(411): NCBI GI: 116202123 Blast Desc: CHGG_08946 [Chaetomium globosum CBS 148.51] gi|88177464|gb|EAQ84932.1| CHGG_08946 [Chaetomium globosum CBS 148.51]
  misc_feature (1)..(409): NCBI GI: 154312244 Blast Desc: BC1G_06155 [Botryotinia fuckeliana B05.10] gi|150850118|gb|EDN25311.1| BC1G_06155 [Botryotinia fuckeliana B05.10]
  misc_feature (1)..(411): NCBI GI: 39945262 Blast Desc: MGG_04613 [Magnaporthe grisea 70-15] gi|145021450|gb|EDK05579.1| MGG_04613 [Magnaporthe grisea 70-15]
  misc_feature (1)..(409): NCBI GI: 156064273 Blast Desc: SS1G_00144 [Sclerotinia sclerotiorum 1980] gi|154691006|gb|EDN90744.1| SS1G_00144 [Sclerotinia sclerotiorum 1980]
  misc_feature (1)..(411): NCBI GI: 85096263 Blast Desc: VEG136 protein [Neurospora crassa OR74A] gi|28921712|gb|EAA30993.1| VEG136 protein [Neurospora crassa OR74A] gi|39979201|emb|CAE85572.1| conserved [Neurospora crassa]
  misc_feature (1)..(411): NCBI GI: 46128203 Blast Desc: FG08479.1 [Gibberella zeae PH-1]
  misc_feature (1)..(411): NCBI GI: 242802619 Blast Desc: PP-loop ATPase superfamily protein, [Talaromyces stipitatus ATCC 10500] gi|218717352|gb|EED16773.1| PP-loop ATPase superfamily protein, [Talaromyces stipitatus ATCC 10500]
  misc_feature (1)..(411): NCBI GI: 256733950 Blast Desc: [Nectria haematococca mpVI 77-13-4]
  misc_feature (1)..(406): NCBI GI: 189192725 Blast Desc: PTRG_02368 [Pyrenophora tritici-repentis Pt-1C-BFP] gi|187978265|gb|EDU44891.1| PTRG_02368 [Pyrenophora tritici-repentis Pt-1C-BFP]
  misc_feature (1)..(411): NCBI GI: 261360774 Blast Desc: ATP-binding domain-containing protein [Verticillium albo-atrum VaMs.102]
MAPAPCAICKTERALIKRPKNYQKLCKACFIQIFEDETHHTITSSNLFVRGERVAIGASGGKDSTVLASVLKTLNERYDYGLDLVLLSIDEGIKGYRDDSLETVKRNAVQYEMPLKIVGYDELYGWTMDQVVETIGKKGNCTYCGVFRRQALDRGAKMLGIKHVVTGHNADDVAETVLMNLLRGDLPRLSRSTSIVTGNDSSEVKRSKPLKYAYEKEIVLYAHHKKLDYFSTECIYSPEAFRGSARALIKNLERVRPSAILDVVRSGEDMARLVPGAAPDSCACNGKTSLSQAVGEDEKAGGCGSSNGLTGGGDMAAMEKQLRANEAAEAAGLETEISALKVSEPQPDNLKQAEDEQPKKGRPGRPGTSVPIVRKQNLGTCEKCGYISSQRLCQACMLLDGLNKNRAEITL

SEQ ID NO: 35808 - DNA, 6793 bp, Muscodor strobelii
  misc_feature: SGI EST ID NO. CUFF.86226.4
  misc_feature: Variant of the nucleotide sequence at SEQ ID NO 35806
caaaatcatcatcgcgggactcactgaacggactcccgccttacttagtgagatccgaggcaacgtctttcgaatgtctatcgcaggtaaccaaaacttccatcactcctgactctccttatgaacaagagtatagcaatctcatccttccctcaaatactctcatactaaaccttctccctccatcccaaaactaatacccctctaaccaataacccctacaacatccaaccaccctccaaaccgcagaaaaacatcccgaacccccgaatcaagctcgcacaatcacagaacctgaagttacttcacacattaggaaatcaatctcaatttcacagcatatgcctaatgccagtgcgatgtcttctcatatcgcatcataatctcaaactcaaacacccaaaccccagctcgccaaagactcaaacctcccatccagttatcctcgccatgccaatgccttcattcaccatcctgtcgttccatgatccatcgtcaatccttatcctatcccataccaaaccctcatactcaaacaagacaatccataaccctcaatcccaaactccctaccactctcaacctctctctcataccttctcaacgatccatgatcttcatccccgcgccatcccccctaaacacaagcatcgcatgatcacccttaacagtgccctccatctcaacccccgccttcttagtcccacacccaagctccctaacaatcccccgctcaatatcaaacaaacacccatggacctgcagtcctctctcctcaatcgcgctcttcaccgtgcgattggccagtaaaacctccacaccctgttcaacattcttctccgcgagtctaatcgctttctccccctcattcttaatcccgtcaatttcttccttattcttgtctcgcacagcgcgaagtggcgtaagccaaagatcgagaagttgaccgacggaggtatcggagacagtcgcgatggcgccgccgcagcaggagtggccgcagagaactatgtggtggacccgaagaaaggatacggcgtattcgatgacggcggatgtgttgaggtctgttggggatatgatgttggcgatgttgcggtgaacgaatatgtcccccggctgaagacccatgatcgttgtttcggggcagcgggagtcggaacagcctagccatactagacgcaaaatacactttgttagtctgagttgggtgtgaggctggggactagtgtggaattccgaagtgaaaaggcagggtcaagtacccggtgatagagggtatcgataatagtgttatggagatagtgagagagtaggcggacttacagatctgaggcgactgtccagcagcgagacgagggaagaagtccgggttctggtgtcccttataaccagcccaggccttgttcgacgtcagcgcgtagctgaaaacatcctctggtttggtcatctcgtaagcttcatgccatttctttctcagttctgagcgttccttttgcttctcatccatcgcattgggatttttgggtttcacaacagcaaggggaaaagtgacaataacgcgaaagagaaatgagatgaggtattccaccgtgggatgatgtttgcagtttcgtttactcgtttacttgagtctccgcaattgttgttgtcgagttctctttctttctttcacatgggcaatgcagggcgacactaagggcagagataatcgcccggtcgatgaagggggtgcgtttactcacgctggcgggccatagtttgaactatgataacagttcaactgtgattcttcttgactcctcttgtttgccttttgttcaacggtagcgatgtatgtgcgagcacaactaaaaaaaataaaaatgataatatcgtcgtggtagcgtgaacaattgaacgccgaacgagtccgagtccaagtccgtgggctcgacgttgatatttccccagctcggtattcggcgacgctcagctttgtctttggatgtgaggcgtggtaatatagggtggtaagctgagcccctgctgcagatatcctatttcttattttcctgtattatttctctcgagtaaatttgggtgtggagtgtccgagtctgcgatggtgcaacttgagatgtccgtttcctccttgctttcaaagcgttatatcataggtatataggtcgagagtaggtataagagaaggccagcttagaaaaacaacccgaaactcaatgaagtagggccagccgaatgcaaaggagcacgcaatctaattactacagcgatgaagataccaatctgactagggaatatgcagctgagatctcctttgggtaggcgagcgcagataagggaacaagatgctggccaggcatgcgatgtgccattgctccccggcacagaggacagagatcatgcatgcctcgagttgcacaccgtcggacattctcacgcagactgctatgctgtcatatccggctgccggggaagccggagcttctcagcttctcttgtcttgtttgctgcagagagtctttccgtgccaagttcacgccaagttcatcaaatctcacagtgttgcacttgccggacagggatatcggatgaaacatggtatgtagaggatcaggcgcaggagcggtactggtcgcggctcgcggattatatctgattcatcgattcttggctataattatatgatcgatgggaggaaggtatatactatgtttgttgaggagtgaggttctgacttctcaagccgtgatggtgtagatatcaacaattggatggtgcatagctgccccgggattagcaccgacgttgcagctaatgcaagtgcctgttgatccctgtgtatcgtcaattgtcccactgcaatgctggtcaaagaggtagctctatgcgaatcatattacaacagcaagcgcaatgccgtgtagctcaagcggggaagagaatgcgggactcgcgggaggaatttagtgagccgagaagtgagatgccaatgctttaggatctcttatctgtcagatgtgtccttggctaaacgtattacgtttgtttgtattcttggctaagcttggccaaaacatctcgggcgagttccggtcactacgccgtatacgcatctcagtcagccactcgtatatctgtcagaatcatacaattctcatacgacaccacgcgatgaaaacagaaacctcgcgagcacttccgaatttagatgatttttactaattggtggtcgagtcattggtcaaactatgccttgttcacattggctgtcatttcagggtctgtagaggattgggcttgtcgtcatgcaaatccacaaatgttggtattccattttgtcccttcccaaacgccgaaactgtgcaaagctacaaactccagacccatttcatgacggcatgcacgtgctcaaccaatcaacctagaccttgacctagatcttgagagcagactcggcggccttcttcttcttctcaatgcgcttgttggccttctcacccatgataccaccaccccaagacttgcgagcgttctcggagttggccaggtagccctccttgatggcgctaataagcttggagtgctcgttcttgtcctcggagcggacctcggtcagggcgacgacggcggcggtcttcttgtggacgacagttccgagacgggccttacccttgatgatggcgtagggaatgccgaacttgcggcagagggcggggaggaagatgacgagctcgatggggtcgacgtcattggggatgaggacgagcgaggccttcttgttctcgacgaggccgacgacgtggttgaggccgtacttgacggtgtagggcttcttggagacgtcctccttcttcttgccctccttgatggcggtggcctccttgaccaggcgctccttcttctcggccttggtctcggggcggtacttgttgaggagcttgagggcctgggcggcggtgttgcggtcaaggacgtctgtttgcgcacacacacaagtcagatcattactgttcttcatagattgtagttcgaggcttgggctgcagtgcttacgctggaactgggcaatggcaggggggaccttgaggcgcatgttgatgatcttgcgctggcgctggagacggacatactcgggccacttcaccatgcgcgagaggttgcgcttgggctggatgtcctggccgatgccgaagttgcggggcttcttctcgatgagagggttctgattgtacacaattagcatagacgaggggggaggggagtcgaggagaagcaactcaccttgggtgccttcttggaggacttggaagacccaaagggggccggggcggccttctttccagtcttgggaggctatcattgagaaagaagacatcagtaaatgtttgattcattgactgaagtcttgctgaactctagagaggaagctcgacggtggcatgtctcagcacacacgacgaagctagctcaagccagttcttcacccgcgcccgaaggcgacgggcggaaaagcgacgtctcgcagcgcgagagccattgctttgatagaaaaattgataaaatcgagtgctcgaggcacatcgatgctgaatgggcattcaggtgcttaccatgttgacggagtgctgtcgtgaggtcgtgggttagtatcgagtcgaccgttggtgagaggtgtgaagaaggaagatctcgtgagaagtgtccgacccgaaaatctgagttagctgcgattgtgtggagcgggctgtagggttttttgcaatttgggggggactggtgagggccggtgaatcgtcggtaatcgattgtgagagcgacctaaatggagactaagcccaaagagtattagcatacaatgcccctcgaagccaggctcgccaggtaccttcgtacctttttacaccccgctgcatgccagcctgaactcactggagcactgagactgcagtttgtaatggtggcggtttaagagtcattcatcacttcagctttttcaatagctttagaaaactactctgagaatctcatctgtacttgtcacaacttcaagaaactcatcagcaaatagattcctctcgttgatattcacttagtagtacatcctacctgaggaacgatattccgagatggcaccggcgccctgcgccatctgcaagaccgagcgggcactcatcaagaggcccaagaattaccagaagctctgcaaggcgtgtttcatacaaatattcgaggatgagactcatcacaccataacctcatccaatctattcgtccgtggcgaaagggtagcgataggcgcatcaggtggcaaggattcaacagtgttggcctcagtactcaaaacactcaacgaaaggtacgactacgggctggacttagtgcttctaagtatcgatgagggcatcaaaggttaccgcgacgattcactcgagactgtcaagcggaatgcggttcagtacgagatgccattgaaaatcgtggggtatgatgagctgtacggatggaccatggaccaagttgttgagactatcgggaagaagggtaactgcacatattgtggtgtgttccggcggcaggcgctggacagaggagcgaagatgcttggcatcaagcatgttgtcacgggacacaatgccgacgatgtcgccgagactgtcttgatgaacctactacgaggagacctgccccggttatcgaggagcacaagtatcgtcacaggcaacgattcaagtgaggtcaagcgcagtaaacctctcaaatacgcctacgagaaggagattgtgctgtatgcgcatcataagaaattagactacttcagcaccgagtgcatatacagccccgaggctttcagaggaagcgcaagagctcttatcaagaatctagagcgtgttcgaccgagtgcgatcctggatgttgtccgaagtggcgaggacatggcaagactagtgccgggcgcagcaccagactcgtgcgcttgcaatgggaagacttcgttgtcacaggctgttggggaggacgagaaggccggcggatgcggctcgagtaacgggctgaccggcggcggtgatatggcagccatggagaagcagctgagggccaacgaagcggccgaggcggctggactagaaacggagatatcagccctcaaggtcagcgagccacagccagataatttgaagcaagccgaagacgagcagccgaagaagggaagacctggaagacccggcacttcggtccctatcgtgcggaagcagaacctgggcacgtgtgagaagtgtggctatatctccagtcagaggctctgccaggcttgcatgctgctagatgggttaaataagaatcgggcagaaatcacattatagaagttttgttggcaaggcgttagagaggtatccacggcaggtcagcatgtacaatttcagactagacggaatgatacccgagaattttcatggcgagaaacaaaggaatctatgtcatttggtgcttgcttttgttgattgtacaagtagttgatttcgttgggtattgtctgcttgtttcccctatgctatccgtttctcaacctacggcttcgtgtcagtgatcgtaacttgattcgtattaatttcgcgcgtaggaacataccctccatccattattgaactcgaatcctggcggtgcaacgggctcatcgctctgtcctcgtaagaggcctgtaattcggcggtctcggtccatcactatcgtttgaccacgtcagtatcgtgcgcaagtgggtgcatcgcctgggagtcggtcgtactttgct

SEQ ID NO: 35809 - DNA, 786 bp, Muscodor strobelii
  misc_feature: SGI cDNA ID NO. 572404
  misc_feature: Reduced expression when VOC is produced
  misc_feature: Encodes the peptide sequence at SEQ ID NO 35810
atgcctcccaagactggaaagaaggccgccccggccccctttgggtcttccaagtcctccaagaaggcacccaagaaccctctcatcgagaagaagccccgcaacttcggcatcggccaggacatccagcccaagcgcaacctctcgcgcatggtgaagtggcccgagtatgtccgtctccagcgccagcgcaagatcatcaacatgcgcctcaaggtcccccctgccattgcccagttccagcacgtccttgaccgcaacaccgccgcccaggccctcaagctcctcaacaagtaccgccccgagaccaaggccgagaagaaggagcgcctggtcaaggaggccaccgccatcaaggagggcaagaagaaggaggacgtctccaagaagccctacaccgtcaagtacggcctcaaccacgtcgtcggcctcgtcgagaacaagaaggcctcgctcgtcctcatccccaatgacgtcgaccccatcgagctcgtcatcttcctccccgccctctgccgcaagttcggcattccctacgccatcatcaagggtaaggcccgtctcggaactgtcgtccacaagaagaccgccgccgtcgtcgccctgaccgaggtccgctccgaggacaagaacgagcactccaagcttattagcgccatcaaggagggctacctggccaactccgagaacgctcgcaagtcttggggtggtggtatcatgggtgagaaggccaacaagcgcattgagaagaagaagaaggccgccgagtctgctctcaagatctag

SEQ ID NO: 35810 - protein, 261 aa, Muscodor strobelii
  misc_feature: SGI Peptide ID NO. 572404
  misc_feature (119)..(214): Pfam Id: PF01248 Pfam Desc: Ribosomal protein L7Ae/L30e/S12e/Gadd45 family
  misc_feature (1)..(261): NCBI GI: 261360775 Blast Desc: 60S ribosomal protein L8 [Verticillium albo-atrum VaMs.102]
  misc_feature (1)..(261): NCBI GI: 256733462 Blast Desc: [Nectria haematococca mpVI 77-13-4]
  misc_feature (1)..(261): NCBI GI: 116202121 Blast Desc: 60S ribosomal protein L8 [Chaetomium globosum CBS 148.51] gi|88177463|gb|EAQ84931.1| 60S ribosomal protein L8 [Chaetomium globosum CBS 148.51]
  misc_feature (1)..(261): NCBI GI: 156064275 Blast Desc: 40S ribosomal protein S3aE [Sclerotinia sclerotiorum 1980] gi|154691007|gb|EDN90745.1| 40S ribosomal protein S3aE [Sclerotinia sclerotiorum 1980]
  misc_feature (1)..(261): NCBI GI: 85096259 Blast Desc: 60S ribosomal protein L8 [Neurospora crassa OR74A] gi|28921711|gb|EAA30992.1| 60S ribosomal protein L8 [Neurospora crassa OR74A] gi|39979202|emb|CAE85573.1| ribosomal protein
  misc_feature (1)..(261): NCBI GI: 39945260 Blast Desc: MGG_04612 [Magnaporthe grisea 70-15] gi|145021451|gb|EDK05580.1| MGG_04612 [Magnaporthe grisea 70-15]
  misc_feature (1)..(261): NCBI GI: 46128201 Blast Desc: FG08478.1 [Gibberella zeae PH-1]
  misc_feature (1)..(261): NCBI GI: 225560908 Blast Desc: 60S ribosomal protein L7A [Ajellomyces capsulatus G186AR]
  misc_feature (1)..(261): NCBI GI: 240280535 Blast Desc: cytosolic large ribosomal subunit protein L7A [Ajellomyces capsulatus H143]
  misc_feature (1)..(261): NCBI GI: 154277842 Blast Desc: ribosomal protein L7a [Ajellomyces capsulatus NAm1] gi|150413339|gb|EDN08722.1| ribosomal protein L7a [Ajellomyces capsulatus NAm1]
  misc_feature: Useful for introducing or modulating the production of volatile compounds
MPPKTGKKAAPAPFGSSKSSKKAPKNPLIEKKPRNFGIGQDIQPKRNLSRMVKWPEYVRLQRQRKIINMRLKVPPAIAQFQHVLDRNTAAQALKLLNKYRPETKAEKKERLVKEATAIKEGKKKEDVSKKPYTVKYGLNHVVGLVENKKASLVLIPNDVDPIELVIFLPALCRKFGIPYAIIKGKARLGTVVHKKTAAVVALTEVRSEDKNEHSKLISAIKEGYLANSENARKSWGGGIMGEKANKRIEKKKKAAESALKI

SEQ ID NO: 35811 - DNA, 5950 bp, Muscodor strobelii; identical to SEQ ID NO: 35802
  misc_feature: SGI EST ID NO. CUFF.86226.3
  misc_feature: Variant of the nucleotide sequence at SEQ ID NO 35809

SEQ ID NO: 35812 - DNA, 759 bp, Muscodor strobelii
  misc_feature: SGI cDNA ID NO. 572405
  misc_feature: Elevated expression when VOC is produced
  misc_feature: Encodes the peptide sequence at SEQ ID NO 35813
atggatgagaagcaaaaggaacgctcagaactgagaaagaaatggcatgaagcttacgagatgaccaaaccagaggatgttttcagctacgcgctgacgtcgaacaaggcctgggctggttataagggacaccagaacccggacttcttccctcgtctcgctgctggacagtcgcctcagatcttatggctaggctgttccgactcccgctgccccgaaacaacgatcatgggtcttcagccgggggacatattcgttcaccgcaacatcgccaacatcatatccccaacagacctcaacacatccgccgtcatcgaatacgccgtatcctttcttcgggtccaccacatagttctctgcggccactcctgctgcggcggcgccatcgcgactgtctccgatacctccgtcggtcaacttctcgatctttggcttacgccacttcgcgctgtgcgagacaagaataaggaagaaattgacgggattaagaatgagggggagaaagcgattagactcgcggagaagaatgttgaacagggtgtggaggttttactggccaatcgcacggtgaagagcgcgattgaggagagaggactgcaggtccatgggtgtttgtttgatattgagcgggggattgttagggagcttgggtgtgggactaagaaggcgggggttgagatggagggcactgttaagggtgatcatgcgatgcttgtgtttaggggggatggcgcggggatgaagatcatggatcgttga

SEQ ID NO: 35813 - protein, 252 aa, Muscodor strobelii
  misc_feature: SGI Peptide ID NO. 572405
  misc_feature (54)..(217): Pfam Id: PF00484 Pfam Desc: Carbonic anhydrase
  misc_feature (25)..(249): NCBI GI: 116202119 Blast Desc: CHGG_08944 [Chaetomium globosum CBS 148.51] gi|88177462|gb|EAQ84930.1| CHGG_08944 [Chaetomium globosum CBS 148.51]
  misc_feature (25)..(244): NCBI GI: 85096255 Blast Desc: NCU04778 [Neurospora crassa OR74A] gi|28921710|gb|EAA30991.1| conserved [Neurospora crassa OR74A] gi|39979203|emb|CAE85574.1| related to carbonic anhydrase crassa]
  misc_feature (23)..(244): NCBI GI: 226815601 Blast Desc: beta class carbonic anhydrase [Sordaria macrospora]
  misc_feature (24)..(222): NCBI GI: 171681944 Blast Desc: protein product [Podospora anserina] gi|170940931|emb|CAP66581.1| protein product [Podospora anserina]
  misc_feature (25)..(247): NCBI GI: 154312240 Blast Desc: BC1G_06153 [Botryotinia fuckeliana B05.10] gi|150850116|gb|EDN25309.1| BC1G_06153 [Botryotinia fuckeliana B05.10]
  misc_feature (25)..(247): NCBI GI: 156064277 Blast Desc: SS1G_00146 [Sclerotinia sclerotiorum 1980] gi|154691008|gb|EDN90746.1| SS1G_00146 [Sclerotinia sclerotiorum 1980]
  misc_feature (32)..(247): NCBI GI: 145614544 Blast Desc: MGG_04611 [Magnaporthe grisea 70-15] gi|145021452|gb|EDK05581.1| MGG_04611 [Magnaporthe grisea 70-15]
  misc_feature (24)..(222): NCBI GI: 239607897 Blast Desc: carbonic anhydrase [Ajellomyces dermatitidis ER-3]
  misc_feature (24)..(222): NCBI GI: 261199796 Blast Desc: carbonic anhydrase [Ajellomyces dermatitidis SLH14081] gi|239594507|gb|EEQ77088.1| carbonic anhydrase [Ajellomyces dermatitidis SLH14081]
  misc_feature (26)..(235): NCBI GI: 168830923 Blast Desc: CtnG [Monascus aurantiacus]
  misc_feature (32)..(216): SWISSPROT Homolog: EC 4.2.1.1 Carbonate dehydratase
  misc_feature: Useful for introducing or modulating the production of volatile compounds
MDEKQKERSELRKKWHEAYEMTKPEDVFSYALTSNKAWAGYKGHQNPDFFPRLAAGQSPQILWLGCSDSRCPETTIMGLQPGDIFVHRNIANIISPTDLNTSAVIEYAVSFLRVHHIVLCGHSCCGGAIATVSDTSVGQLLDLWLTPLRAVRDKNKEEIDGIKNEGEKAIRLAEKNVEQGVEVLLANRTVKSAIEERGLQVHGCLFDIERGIVRELGCGTKKAGVEMEGTVKGDHAMLVFRGDGAGMKIMDR

SEQ ID NO: 35814 - DNA, 5950 bp, Muscodor strobelii; identical to SEQ ID NO: 35802
  misc_feature: SGI EST ID NO. CUFF.86226.3
  misc_feature: Variant of the nucleotide sequence at SEQ ID NO 35812

SEQ ID NO: 35815 - DNA, 1359 bp, Muscodor strobelii
  misc_feature: SGI cDNA ID NO. 572406
  misc_feature: Encodes the peptide sequence at SEQ ID NO 35816
atggcagctgccgacacatttggggagctaggcctctccatcattggcctcggagctcaataccctcccaacaaactcaaaccagaagagctggccaaattggccgcgcggttctatccagactcaccttctatggagaaggtcctgtcaatcaacaaatacacagggattgagactcggtcgtctattggaacatcggatcatccgctagtaaacaaacgtgatgcaccttcaatagccgatttgcatgcgactttcatgagcgatggcgtaccactcgctgttgctgcagcgcagaaagctttatcagaggcccgcgtagacgcttcacaggtcactcacgtcgtctcgacaacgtgtacggatagcgcgaatccaggatttgaccactttgtcgcattagagttgggactgtcctcaaacatcgagaaggttctgttacacggtgttgggtgttcaggtgggttggcgactcttcgcacggcagcaaacctcgctttgggacacaagttccgaggtcgtcctgcccgcatcttatgcgtcgctctcgaagtcagcacgataatggtacgcagtgagctagacagcatcaattcttcacaagaaacaagaattggcgcatgtctattctcagactgtgcaagcgccttggtattaagcaatggtatcggtgatgccactcggcagccaatctaccagctactaggatgggatcacagagtcatcccaggtacggagggcgatctgggatttgatgtcgatcctgccggctggaaagtgatactctctccacgggtgccggcgttgacaaaggaggttcttgcgcccgctttcgcagacttgatatcgagtgttgcaccccagttgcccgaaagctaccgcgatgcgccagactttgactgggccatgcatcccggtggccttacaattctaacaaactcggaacgagccttaaatatcacgccagagcatatgcgcgccagctaccatcgatatatgcagcacggaaactctagctcggctactattttcagcgtcatggaccatctacgaagcaaggagatggatggtatggcacctggaggacatgcaaaggactatgttgtaggctgcgctttcggtcctggcatcaccgttgagatgtgtatgttgaagaggaacatggatccaactggcgttcagacaccccccgaaaccgacagtgaagcaagtcgaagtgaacagggcgaagaggaatggaatggacttgacagaaataaagacttaagctccggacaaacggtggcgggtgaaaataatgctggggcgagcgaagacgcttttgtcgccgaagcgatagcaaacatagacttagattaa

SEQ ID NO: 35816 - protein, 452 aa, Muscodor strobelii
  misc_feature: SGI Peptide ID NO. 572406
  misc_feature (289)..(386): Pfam Id: PF08541 Pfam Desc: 3-Oxoacyl-[acyl-carrier-protein (ACP)] synthase III C terminal
  misc_feature (233)..(388): Pfam Id: PF02797 Pfam Desc: Chalcone and stilbene synthases, C-terminal domain
  misc_feature (2)..(223): Pfam Id: PF00195 Pfam Desc: Chalcone and stilbene synthases, N-terminal domain
  misc_feature (68)..(219): Pfam Id: PF00195 Pfam Desc: Chalcone and stilbene synthases, N-terminal domain
  misc_feature (1)..(452): NCBI GI: 85097336 Blast Desc: NCU04801 [Neurospora crassa OR74A] gi|28921918|gb|EAA31191.1| conserved [Neurospora crassa OR74A]
  misc_feature (1)..(452): NCBI GI: 197305162 Blast Desc: NCU04801 [Neurospora crassa OR74A] gi|28921918|gb|EAA31191.1| conserved [Neurospora crassa OR74A]
  misc_feature (1)..(414): NCBI GI: 46128001 Blast Desc: FG08378.1 [Gibberella zeae PH-1]
  misc_feature (9)..(452): NCBI GI: 145614534 Blast Desc: MGG_04643 [Magnaporthe grisea 70-15] gi|145021441|gb|EDK05570.1| MGG_04643 [Magnaporthe grisea 70-15]
  misc_feature (10)..(386): NCBI GI: 211939441 Blast Desc: MGG_04643 [Magnaporthe grisea 70-15] gi|145021441|gb|EDK05570.1| MGG_04643 [Magnaporthe grisea 70-15]
  misc_feature (10)..(386): NCBI GI: 212375055 Blast Desc: MGG_04643 [Magnaporthe grisea 70-15] gi|145021441|gb|EDK05570.1| MGG_04643 [Magnaporthe grisea 70-15]
  misc_feature (1)..(452): NCBI GI: 171681906 Blast Desc: protein product [Podospora anserina] gi|170940912|emb|CAP66562.1| protein product [Podospora anserina]
  misc_feature (7)..(411): NCBI GI: 154311997 Blast Desc: BC1G_06032 [Botryotinia fuckeliana B05.10] gi|150850682|gb|EDN25875.1| BC1G_06032 [Botryotinia fuckeliana B05.10]
  misc_feature (44)..(421): NCBI GI: 156060399 Blast Desc: SS1G_02338 [Sclerotinia sclerotiorum 1980] gi|154699746|gb|EDN99484.1| SS1G_02338 [Sclerotinia sclerotiorum 1980]
  misc_feature (12)..(386): NCBI GI: 240105186 Blast Desc: chalcone synthase, [Coccidioides posadasii C735 delta SOWgp]
  misc_feature (13)..(385): SWISSPROT Homolog: EC 2.3.1.95 Trihydroxystilbene synthase
MAAADTFGELGLSIIGLGAQYPPNKLKPEELAKLAARFYPDSPSMEKVLSINKYTGIETRSSIGTSDHPLVNKRDAPSIADLHATFMSDGVPLAVAAAQKALSEARVDASQVTHVVSTTCTDSANPGFDHFVALELGLSSNIEKVLLHGVGCSGGLATLRTAANLALGHKFRGRPARILCVALEVSTIMVRSELDSINSSQETRIGACLFSDCASALVLSNGIGDATRQPIYQLLGWDHRVIPGTEGDLGFDVDPAGWKVILSPRVPALTKEVLAPAFADLISSVAPQLPESYRDAPDFDWAMHPGGLTILTNSERALNITPEHMRASYHRYMQHGNSSSATIFSVMDHLRSKEMDGMAPGGHAKDYVVGCAFGPGITVEMCMLKRNMDPTGVQTPPETDSEASRSEQGEEEWNGLDRNKDLSSGQTVAGENNAGASEDAFVAEAIANIDLD

SEQ ID NO: 35817 - DNA, 3032 bp, Muscodor strobelii
  misc_feature: SGI EST ID NO. CUFF.86233.0
  misc_feature: Variant of the nucleotide sequence at SEQ ID NO 35815
gtcagaaagtatgaatcgacaattaccatggaaaacatccattaggtatggtcttctcctttcttcctcacgctccaactttgtccgatgagggtccacagaatcctcgttttgttcatccgtcccaatcacagaggtgctaatgacactaatacacccaacacttcgttcgaggacacatgtacataatgtcattacggcgctgcttctcattaacgttgctaatatgatcatacctcacgttacgaatgacataagccatctggagttccgagcattcttgaaggatccgaaaacgatctaccaatcggctatcatcgtcgtaccaacaatttagtgcatctatattcactgtatccactattcgcacagcctcaaagcgtgccgatgcatgcctctgtgcatgctaagccttcggcctatcgactatagtgatcagctattcattgcctcggtctactgtcattgcctcaaagcagaaaaagaccttgcagctggaaacttcttgtccccatcaattgattacagcacgttgagtgtgctcaattcgtctcggctaccttagcacgattcctaaacaagatatatatgatgcctgaactggtctcaaaaacgtctcagctgttccgtcggttgctagctgcgccgaagtgccgccccagcaccacagaatccttcgactaataacctaaacaccatctagaaagctctgatgggataatgagttggtaaacttgtcgctgacgatgcgcaattggcagcgacgattacctagataggcaaaggagatgtgtactgagccactgtcatgataaaccagactattggcagtcgcaccagtgattgcctggttgagtctgaagttcccgactcctggtgaacatatagagaagcgatgtccaagtcgagtcgtcatcgattgtaacagatcctctcaactcaccgctacgcattgattccttcgcctccaaatctcacctatttgcatatatcattaaattcaataaaggtcaatagccacagtctcgaaagtgaactatccacgctgtcggatcacatcatcctagtaccgttccgcctgtccacgttttgacgcagctgcccctgagctgttgaagccgttgtgaaacaccttagcttagctctcaacaacgacggctagggatacaagcacgcgacaaccttttgctcacaacaacgattgattcgccgacgacagatcattttcaattccttaataagactcttcgtgcgatttaatcttgacgacaaccagatcatggcagctgccgacacatttggggagctaggcctctccatcattggcctcggagctcaataccctcccaacaaactcaaaccagaagagctggccaaattggccgcgcggttctatccagactcaccttctatggagaaggtcctgtcaatcaacaaatacacagggattgagactcggtcgtctattggaacatcggatcatccgctagtaaacaaacgtgatgcaccttcaatagccgatttgcatgcgactttcatgagcgatggcgtaccactcgctgttgctgcagcgcagaaagctttatcagaggcccgcgtagacgcttcacaggtcactcacgtcgtctcgacaacgtgtacggatagcgcgaatccaggatttgaccactttgtcgcattagagttgggactgtcctcaaacatcgagaaggttctgttacacggtgttgggtgttcaggtgggttggcgactcttcgcacggcagcaaacctcgctttgggacacaagttccgaggtcgtcctgcccgcatcttatgcgtcgctctcgaagtcagcacgataatggtacgcagtgagctagacagcatcaattcttcacaagaaacaagaattggcgcatgtctattctcagactgtgcaagcgccttggtattaagcaatggtatcggtgatgccactcggcagccaatctaccagctactaggatgggatcacagagtcatcccaggtacggagggcgatctgggatttgatgtcgatcctgccggctggaaagtgatactctctccacgggtgccggcgttgacaaaggaggttcttgcgcccgctttcgcagacttgatatcgagtgttgcaccccagttgcccgaaagctaccgcgatgcgccagactttgactgggccatgcatcccggtggccttacaattctaacaaactcggaacgagccttaaatatcacgccagagcatatgcgcgccagctaccatcgatatatgcagcacggaaactctagctcggctactattttcagcgtcatggaccatctacgaagcaaggagatggatggtatggcacctggaggacatgcaaaggactatgttgtaggctgcgctttcggtcctggcatcaccgttgagatgtgtatgttgaagaggaacatggatccaactggcgttcagacaccccccgaaaccgacagtgaagcaagtcgaagtgaacagggcgaagaggaatggaatggacttgacagaaataaagacttaagctccggacaaacggtggcgggtgaaaataatgctggggcgagcgaagacgcttttgtcgccgaagcgatagcaaacatagacttagattaagggcaaatagagccgagtgatagcacacagcacgcaactccgcctcgcgcgatgtatatacaagattcattagactttcctactacatgatattgcatgccaagtggctgatgtacactgaataaaatgcgcctcttccttgggttcaacgggcggctcgatttcggcacttccgcctagtaacgggagcaccgcatcattcaagtatcacactctcgtgagtagcaacactgtggcgaatctgtacaatgaggtccacgagaatcggtccgttatgcctctagaacttgttgtcgagcggcaaaaggggtgaacgagttgattattggaggaaatgatgttcctttgaggaactaagtcttacacggatgggagacacattgctcgaggaaat

SEQ ID NO: 35818 - DNA, 951 bp, Muscodor strobelii
  misc_feature: SGI cDNA ID NO. 572407
  misc_feature: Reduced expression when VOC is produced
  misc_feature: Encodes the peptide sequence at SEQ ID NO 35819
atgttctccaccatgcaactccttcttgcttcagcaggacttctcccgtctgtatcgtttgctctgaatatccccagattccctggagaccatgaactggcctcccgcgcaagcccctaccagaatctaatcgtcgaaaccggatcgacttttggcgaagaaaccaacggagtatggcagctgattgacgccaacggcgacggtgtgccggacctcgcatacatcaagacaagcttgactggaaccggtaccgtggaagtgcatattgcatcctcatcctccaacttccagacccgcattttcgaggcggggacgaccttcggtgaggagacagacggcacctggctcctcgtgccgtcgaagaactcggcccttccggacctggccttcatcaagacggccaacaccccgtccggcaacgtcgaggtgcatatcgcgtccggcgcgtccaagtacacgacgcgcacgcaggagacggccactgatttcgccaacgagaacaacggcgtctggtcgctctacgactacgacggtgacggcgtccttgaccttatctacatcaagacgcgcaacacgggcacgggcaccgtcgaggtccacgtcgcttccggcgtgtcgggctacagtcagcgcattctcgagacgggaacaactttcgcaccagagacggatggatattggctcttggccccgtactcctcgcgtggcgctgccgatctcgtcttcatcaaggatgctaacacgggtacgggtaccgtagaagttcacgtggcgtccatgtcttcgggatatcagaagaggattcttgaaactgggagccgctttgcacaggaggcgaacggggtgtggaatctcattgattataacagagatggcattcctgatctgacttacatcaaggatcgcaacacaggcacgggaacaatcgaggtctttgtagctactggttaa

SEQ ID NO: 35819 - protein, 316 aa, Muscodor strobelii
  misc_feature: SGI Peptide ID NO. 572407
  misc_feature (7)..(316): NCBI GI: 156031050 Blast Desc: SS1G_14133 [Sclerotinia sclerotiorum 1980] gi|154700524|gb|EDO00263.1| SS1G_14133 [Sclerotinia sclerotiorum 1980]
  misc_feature (36)..(316): NCBI GI: 238486310 Blast Desc: FG-GAP repeat protein, [Aspergillus flavus NRRL3357] gi|220699272|gb|EED55611.1| FG-GAP repeat protein, [Aspergillus flavus NRRL3357]
  misc_feature (36)..(316): NCBI GI: 169771163 Blast Desc: [Aspergillus oryzae RIB40] gi|83767910|dbj|BAE58049.1| protein product [Aspergillus oryzae]
  misc_feature (34)..(316): NCBI GI: 146322430 Blast Desc: FG-GAP repeat protein [Aspergillus fumigatus Af293] gi|129557013|gb|EAL88124.2| FG-GAP repeat protein, [Aspergillus fumigatus Af293]
  misc_feature (34)..(316): NCBI GI: 119496955 Blast Desc: FG-GAP repeat protein [Neosartorya fischeri NRRL 181] gi|119413411|gb|EAW23352.1| FG-GAP repeat protein [Neosartorya fischeri NRRL 181]
  misc_feature (32)..(259): NCBI GI: 146322430 Blast Desc: FG-GAP repeat protein [Aspergillus fumigatus Af293] gi|129557013|gb|EAL88124.2| FG-GAP repeat protein, [Aspergillus fumigatus Af293]
  misc_feature (32)..(259): NCBI GI: 119496955 Blast Desc: FG-GAP repeat protein [Neosartorya fischeri NRRL 181] gi|119413411|gb|EAW23352.1| FG-GAP repeat protein [Neosartorya fischeri NRRL 181]
  misc_feature (32)..(262): NCBI GI: 238486310 Blast Desc: FG-GAP repeat protein, [Aspergillus flavus NRRL3357] gi|220699272|gb|EED55611.1| FG-GAP repeat protein, [Aspergillus flavus NRRL3357]
  misc_feature (32)..(262): NCBI GI: 169771163 Blast Desc: [Aspergillus oryzae RIB40] gi|83767910|dbj|BAE58049.1| protein product [Aspergillus oryzae]
  misc_feature (56)..(259): NCBI GI: 159130639 Blast Desc: FG-GAP repeat protein, [Aspergillus fumigatus A1163]
  misc_feature: Useful for introducing or modulating the production of volatile compounds
MFSTMQLLLASAGLLPSVSFALNIPRFPGDHELASRASPYQNLIVETGSTFGEETNGVWQLIDANGDGVPDLAYIKTSLTGTGTVEVHIASSSSNFQTRIFEAGTTFGEETDGTWLLVPSKNSALPDLAFIKTANTPSGNVEVHIASGASKYTTRTQETATDFANENNGVWSLYDYDGDGVLDLIYIKTRNTGTGTVEVHVASGVSGYSQRILETGTTFAPETDGYWLLAPYSSRGAADLVFIKDANTGTGTVEVHVASMSSGYQKRILETGSRFAQEANGVWNLIDYNRDGIPDLTYIKDRNTGTGTIEVFVATG

SEQ ID NO: 35820 - DNA, 1501 bp, Muscodor strobelii
  misc_feature: SGI EST ID NO. CUFF.86247.0
  misc_feature: Variant of the nucleotide sequence at SEQ ID NO 35818
gtttctacaaaatctcctcttcaattcgcatcttcaagattcacatcaagatgttctccaccatgcaactccttcttgcttcagcaggacttctcccgtctgtatcgtttgctctgaatatccccagattccctggagaccatgaactggcctcccgcgcaagcccctaccagaatctaatcgtcgaaaccggatcgacttttggcgaagaaaccaacggagtatggcagctgattgacgccaacggcgacggtgtgccggacctcgcatacatcaagacaagcttgactggaaccggtaccgtggaagtgcatattgcatcctcatcctccaacttccagacccgcattttcgaggcggggacgaccttcggtgaggagacagacggcacctggctcctcgtgccgtcgaagaactcggcccttccggacctggccttcatcaagacggccaacaccccgtccggcaacgtcgaggtgcatatcgcgtccggcgcgtccaagtacacgacgcgcacgcaggagacggccactgatttcgccaacgagaacaacggcgtctggtcgctctacgactacgacggtgacggcgtccttgaccttatctacatcaagacgcgcaacacgggcacgggcaccgtcgaggtccacgtcgcttccggcgtgtcgggctacagtcagcgcattctcgagacgggaacaactttcgcaccagagacggatggatattggctcttggccccgtactcctcgcgtggcgctgccgatctcgtcttcatcaaggatgctaacacgggtacgggtaccgtagaagttcacgtggcgtccatgtcttcgggatatcagaagaggattcttgaaactgggagccgctttgcacaggaggcgaacggggtgtggaatctcattgattataacagagatggcattcctgatctgacttacatcaaggatcgcaacacaggcacgggaacaatcgaggtctttgtagctactggttaaatgatggcctcggcttgaacactgttgcctggaggatcctgggatacaatgtcgcaatcgggacaggagagttctatgtctgattgtgattcggaaatagatatgttagtactgttaatattcaaactacgccataggagccgtgcagtaggagattgtgttgcttttgttgctcgctcgaggattccttaggccgcgtgcttcattcatcgcattacggatatctctagggcgaggtcagcttatcttgcaggaaatgggcaggtgtgctgcatgagctttcatcaacagactgtgatcttgggtgcggaatgccgttatcatacaataccgactgtgagccggaatataatgcaaaggtgaccgccaagatgcactataaagctcgcaagcaatcgccagatgaccctagatgattctatcgttgggagggactaattatcatgatgttgtcagggaaacatagcgttatctcaggcttggtacccttttcaatcaat

SEQ ID NO: 35821 - DNA, 2070 bp, Muscodor strobelii
  misc_feature: SGI cDNA ID NO. 572408
  misc_feature: Encodes the peptide sequence at SEQ ID NO 35822
atgtctgcatcacgacttcaggttaagagaaaccaaggaaggttagccaattattgggtcaactttggtaggaaatggtcgaatacgtggctttgggaaatagtgtccatcattctgagcctcatcaccctcggcgtgatactcggattcctcaaagcttatgatcaacagccggtaccacactttgctgctggactcactctcaacgctattatatcaatcctcaccacgacgtcagaatcctcacttcttgttgcggtagccggggctattggccagctgaaatggagatggtatcagcggcgaagccggagcgccctcgacttgcagttattcgacgacgcaagccggggcccattaggctctataacattgcttgctacacgtagctggtctctagtctctattggagccttggtgtctattctggctttgtcattcggcccattcgctcagcagcttcttctgtatccgattcgaactacagttgctacaaatcccccttcgaatatctcgcgggcgctgacttacttaataactgggggcgaggagaatctagcatctgaattgactgatactttgaatattgtggcaagtgcagtttgggccaatatcaacgagaccgacttcttcgcacaaacacaatgctcaacaggaaattgcaaatgggacgaatttgagagcttggcattatgctctcagtgcgaggataggacaactgatgtgaaactgaccgatacttcattctattggccgaatgacactagattcctagctgaaggccgtgtggcagaggtggaatgggctagagagttcaacgtgactttgccgcccgatgctcactgtaattttgaccaaggcgacctcattgcgatattcgatcaggacacaccaccaaccgtagccgtgtcgtatactgcggatgtattcggtcttggatcaccttggtatggagcctcgcttggtctcgcacaaaacggaacgaattcatttaatacgacaagatgggacacccgctcaatggctttagcgactatctgccatgcccacctcgaaaagacaggaggaaacggcacagagaagctctccgtcgggcatgcaactctatgtagccttactccttgtgtcaagaaatatgcattttctatcgacaacggtacagcgtccctgaatacaactggcattcgatatggaacttggttcattaataggaccaagggggccgaagaccccaaagtcgttggctatgtatgggaagacacgtcaagcgatcataagcgtgtgagagatttgcacagtttcgctcgatcttcggcatcattcacgattgggcacgggtaccccgttgtgttcgtgaattctttgttacaattagctgggagcatcgacgtcaatgaagtatacacgggcggaaatataaacgaaagcaactacaacaatacgaaaggtctcagattaacaccgcagaattacatcgggaaaggtgtacagggctactttcgctccgaagctacagatccaatttttcaacaaatcgcaattcagggaggtttagcttcagtcatacctcgagtagcagcccaactgagcagacatattcgtgaaaaaaccgaagtaccagtccagggcaaaacacatacggcgatagcaattgtggaggttcgatggcagtggatcattttccccctatccataggcgttctcggggcaatcttcgtcgtcctcgccatgtatctctgtcgtggcgataaagccctgtggaaaacttcaagccttccactcctgtatcacggctttgactcgcaagtcatggaggatatcatagaaggcgcatccgatgacctcgaacaaatcagcggcatgcggcgctctgccagaactatctatgtccagcttcggaagagttctgctgacgaccaactaagactggcacggacgttagctgacgaacgcgatgagaatcaggcagaagaaaattcaagactgtcaagcgatagtaacggcgggatggtcagtattcagagtgaatctgataggtatgagcggcctgtagagtcagtgccatcatga

SEQ ID NO: 35822 - protein, 689 aa, Muscodor strobelii
  misc_feature: SGI Peptide ID NO. 572408
  misc_feature (30)..(606): NCBI GI: 240280136 Blast Desc: conserved [Ajellomyces capsulatus H143]
  misc_feature (30)..(606): NCBI GI: 225560573 Blast Desc: conserved [Ajellomyces capsulatus G186AR]
  misc_feature (27)..(650): NCBI GI: 169612752 Blast Desc: SNOG_09502 [Phaeosphaeria nodorum SN15] gi|111061647|gb|EAT82767.1| SNOG_09502 [Phaeosphaeria nodorum SN15]
  misc_feature (1)..(642): NCBI GI: 145236391 Blast Desc: An06g00150 [Aspergillus niger] gi|134075297|emb|CAK44931.1| protein product [Aspergillus niger]
  misc_feature (21)..(245): NCBI GI: 169785503 Blast Desc: [Aspergillus oryzae RIB40] gi|83775960|dbj|BAE66079.1| protein product [Aspergillus oryzae]
  misc_feature (30)..(500): NCBI GI: 189190860 Blast Desc: conserved [Pyrenophora tritici-repentis Pt-1C-BFP] gi|187973375|gb|EDU40874.1| conserved [Pyrenophora tritici-repentis Pt-1C-BFP]
  misc_feature (29)..(239): NCBI GI: 164425452 Blast Desc: NCU05801 [Neurospora crassa OR74A] gi|157070931|gb|EAA30825.2| NCU05801 [Neurospora crassa OR74A]
  misc_feature (30)..(237): NCBI GI: 169599855 Blast Desc: SNOG_02753 [Phaeosphaeria nodorum SN15] gi|111068364|gb|EAT89484.1| SNOG_02753 [Phaeosphaeria nodorum SN15]
  misc_feature (24)..(626): NCBI GI: 85093286 Blast Desc: NCU08172 [Neurospora crassa OR74A] gi|28921111|gb|EAA30428.1| [Neurospora crassa OR74A]
  misc_feature (30)..(245): NCBI GI: 242787121 Blast Desc: conserved [Talaromyces stipitatus ATCC 10500] gi|218721087|gb|EED20506.1| conserved [Talaromyces stipitatus ATCC 10500]
MSASRLQVKRNQGRLANYWVNFGRKWSNTWLWEIVSIILSLITLGVILGFLKAYDQQPVPHFAAGLTLNAIISILTTTSESSLLVAVAGAIGQLKWRWYQRRSRSALDLQLFDDASRGPLGSITLLATRSWSLVSIGALVSILALSFGPFAQQLLLYPIRTTVATNPPSNISRALTYLITGGEENLASELTDTLNIVASAVWANINETDFFAQTQCSTGNCKWDEFESLALCSQCEDRTTDVKLTDTSFYWPNDTRFLAEGRVAEVEWAREFNVTLPPDAHCNFDQGDLIAIFDQDTPPTVAVSYTADVFGLGSPWYGASLGLAQNGTNSFNTTRWDTRSMALATICHAHLEKTGGNGTEKLSVGHATLCSLTPCVKKYAFSIDNGTASLNTTGIRYGTWFINRTKGAEDPKVVGYVWEDTSSDHKRVRDLHSFARSSASFTIGHGYPVVFVNSLLQLAGSIDVNEVYTGGNINESNYNNTKGLRLTPQNYIGKGVQGYFRSEATDPIFQQIAIQGGLASVIPRVAAQLSRHIREKTEVPVQGKTHTAIAIVEVRWQWIIFPLSIGVLGAIFVVLAMYLCRGDKALWKTSSLPLLYHGFDSQVMEDIIEGASDDLEQISGMRRSARTIYVQLRKSSADDQLRLARTLADERDENQAEENSRLSSDSNGGMVSIQSESDRYERPVESVPS

SEQ ID NO: 35823 - DNA, 249 bp, Muscodor strobelii
  misc_feature: SGI EST ID NO. CUFF.86250.0
  misc_feature: Variant of the nucleotide sequence at SEQ ID NO 35821
gccggggctattggccagctgaaatggagatggtatcagcggcgaagccggagcgccctcgacttgcagttattcgacgacgcaagccggggcccattaggctctataacattgcttgctacacgtagctggtctctagtctctattggagccttggtgtctattctggctttgtcattcggcccattcgctcagcagcttcttctgtatccgattcgaactacagttgctacaaatcccccttcgaat

SEQ ID NO: 35824 - DNA, 1551 bp, Muscodor strobelii
  misc_feature: SGI cDNA ID NO. 572409
  misc_feature: Encodes the peptide sequence at SEQ ID NO 35825
atgttatcaagcttgcaatcacaagcacccatctcgggtcccctgctgacttggatgcaacagcccagcgcgatgggattcagtatattcgctgccattctcatcgcaacagtcgtccgctcaacatggaaccccacgcgcgacgactacgacacggttaacccaaggaaatggttcgagtttacagacgccgaagcgacgaagaaatttttgatccacgcaagggattatctgcatgtctcgcacaagacaaccccaaacagaccgtttagagtcatcgcagacgttggagataccttggtgcttcccaattcgtacgccgatgaggtgcgcaacatcaaagacctggataatgacgccgtgtctcgaaaagactttcatacgcatctttctagcttcgcatccttcagaataggtgtagatggttccggattatccaagtctgtcgtccaaaaacaacttacccagagcctcggcctggtgacggaccctctctctacggagtgcgacttggcactgcgagaagtgctttcagataaccaagattggcacctcatatccccacttcgagacgcagtcctcatgatcgttgctcgcctgtcatccaaggtctttcttggcgaagagttgtgccacaaccaagaatggttgaagatcacggccgaacacacgaccacagcattccaagcagtcgaagaactccgtctatggccaccaatcctgagacctgtagtacattgggttttgccgtcgtgtcggcgggcaagagcacaaatcgccagaagccgcgagattatcaatcccgtactcgaaaagcgacgagaggcaagaagatggggtggagagagaccgcacgatggcatcgagtggtttgagaataacgctaagggccgcaactacgacccagctctcgctcagctcaacttatccatcgctgccatgcacaccacaaccgatctacttatgcaaactatcctagacatcgcaaaacatcccgagatcgtcgagccattgcgtcaagaagtccgcggcgcattgcatgagcatgggtgggagaagacggcgttgtataagatgaagctgcttgacagcgcgatcaaggagacgcagcgtatcaagccgattcaaatgatctctatgcgtcgcttgccacttcgcaatattacgctatctgacggcactctacttcgcaaagatcgggaggtggtcgtcgccgccgatcgcatgtgggatgagtccgtttacactgagcccgagatatggaatccgtaccggttctacaaattgcggaaggcgcaaggctcctcgttcgagcatactgcccagcttgtgagcacaagtgcagatcatctaggtttcggacatggaatgcacgcatgccctggccgcttcttcgcagccaacgaagtaaaggtcgcgttagctcaacttttgcttaaatatgactggaagctacctgagggagcggatgctagcttcctgcagcatggatggtccatggtggcgaatccatttgttgggatcctactcaggagaagagatgaaaattga

SEQ ID NO: 35825 - protein, 516 aa, Muscodor strobelii
  misc_feature: SGI Peptide ID NO. 572409
  misc_feature (78)..(512): Pfam Id: PF00067 Pfam Desc: Cytochrome P450
  misc_feature (328)..(512): Pfam Id: PF00067 Pfam Desc: Cytochrome P450
  misc_feature (30)..(515): NCBI GI: 240282093 Blast Desc: cytochrome P450 [Ajellomyces capsulatus H143]
  misc_feature (2)..(515): NCBI GI: 239614263 Blast Desc: trichothecene C-8 hydroxylase [Ajellomyces dermatitidis ER-3]
  misc_feature (2)..(515): NCBI GI: 261204397 Blast Desc: trichothecene C-8 hydroxylase [Ajellomyces dermatitidis SLH14081] gi|239587197|gb|EEQ69840.1| trichothecene C-8 hydroxylase [Ajellomyces dermatitidis SLH14081]
  misc_feature (30)..(515): NCBI GI: 154273751 Blast Desc: HCAG_07149 [Ajellomyces capsulatus NAm1] gi|150415335|gb|EDN10688.1| HCAG_07149 [Ajellomyces capsulatus NAm1]
  misc_feature (7)..(513): NCBI GI: 85110002 Blast Desc: NCU05376 [Neurospora crassa OR74A] gi|16416002|emb|CAB91316.2| cytochrome P450 monooxygenase (lovA) [Neurospora crassa] gi|28924857|gb|EAA33953.1| NCU05376 crassa
  misc_feature (23)..(514): NCBI GI: 256726660 Blast Desc: NECHADRAFT_32184 [Nectria haematococca mpVI 77-13-4]
  misc_feature (56)..(516): NCBI GI: 225679929 Blast Desc: P450 monooxygenase [Paracoccidioides brasiliensis Pb03]
  misc_feature (53)..(515): NCBI GI: 3549879 Blast Desc: cytochrome P450 monooxygenase [Gibberella fujikuroi]
  misc_feature (53)..(515): NCBI GI: 122938156 Blast Desc: GA14 synthase [Fusarium proliferatum]
  misc_feature (53)..(515): NCBI GI: 42661492 Blast Desc: GA14-synthase [Fusarium proliferatum]
  misc_feature (98)..(488): SWISSPROT Homolog: EC 1.14.13.78 Ent-kaurene oxidase
MLSSLQSQAPISGPLLTWMQQPSAMGFSIFAAILIATVVRSTWNPTRDDYDTVNPRKWFEFTDAEATKKFLIHARDYLHVSHKTTPNRPFRVIADVGDTLVLPNSYADEVRNIKDLDNDAVSRKDFHTHLSSFASFRIGVDGSGLSKSVVQKQLTQSLGLVTDPLSTECDLALREVLSDNQDWHLISPLRDAVLMIVARLSSKVFLGEELCHNQEWLKITAEHTTTAFQAVEELRLWPPILRPVVHWVLPSCRRARAQIARSREIINPVLEKRREARRWGGERPHDGIEWFENNAKGRNYDPALAQLNLSIAAMHTTTDLLMQTILDIAKHPEIVEPLRQEVRGALHEHGWEKTALYKMKLLDSAIKETQRIKPIQMISMRRLPLRNITLSDGTLLRKDREVVVAADRMWDESVYTEPEIWNPYRFYKLRKAQGSSFEHTAQLVSTSADHLGFGHGMHACPGRFFAANEVKVALAQLLLKYDWKLPEGADASFLQHGWSMVANPFVGILLRRRDEN

SEQ ID NO: 35826 - DNA, 822 bp, Muscodor strobelii
  misc_feature: SGI cDNA ID NO. 572410
  misc_feature: Encodes the peptide sequence at SEQ ID NO 35827
atggcgacttatttgattactggagcctcaaggggcatcgggttctctcttctgtctgttatttcgagcgactctaagaacaccgtcattgggttggttcgaaacaaagaagcagcagaagagagagtagcgaaggagctgagcgggaggtccaatattcatgtccttacggccgacatgaaagactatcagtctatacagaaagcagtcgaagatgccgggaagattaccgggggtagtctcgatttcgtcattgcgaatgctggcgccatgtcatctgccgagacattctcaaatattggagagctcgctgaggaccccatctcctttgaaaaagaatttaactggaccatgcagactaatgtacttggcaacgttcatctgttcgcgctgactcttccccttgttctgaaagggaaagagaagaaagttatcgctatttctagcggcgcatccgatatagagctagtgcgcaacttcgatctcaagttatcaccatggtacgcctcgagcaagtctgtcctaaacacttttattgccaagttcagcgcccagtacgcaaaagacggagtcttattccagagcatctgccctggtgtcgtcgatacgtcgcccttagatcttgcaggcgcaagcgaggagcagcttgggaaacttggagaattctttggaggaattaagcgttatgccccgcatttcgaaaagcctgatcacccagatgatgcagccagaagtattttgtccgttattgagaaatcgagcgtgaaaaatggcgatggtggatcatttgtttcgcactttggaaccaaacaatgggtttga

SEQ ID NO: 35827 - protein, 273 aa, Muscodor strobelii
  misc_feature: SGI Peptide ID NO. 572410
  misc_feature (2)..(187): Pfam Id: PF00106 Pfam Desc: short chain dehydrogenase
  misc_feature (2)..(152): Pfam Id: PF00106 Pfam Desc: short chain dehydrogenase
  misc_feature (1)..(273): NCBI GI: 258575181 Blast Desc: conserved [Uncinocarpus reesii 1704] gi|237902038|gb|EEP76439.1| conserved [Uncinocarpus reesii 1704]
  misc_feature (1)..(273): NCBI GI: 46114388 Blast Desc: FG03036.1 [Gibberella zeae PH-1]
  misc_feature (1)..(273): NCBI GI: 256730666 Blast Desc: NECHADRAFT_29697 [Nectria haematococca mpVI 77-13-4]
  misc_feature (1)..(273): NCBI GI: 67522387 Blast Desc: AN1650.2 [Aspergillus nidulans FGSC A4] gi|40745614|gb|EAA64770.1| AN1650.2 [Aspergillus nidulans FGSC A4] gi|259486986|tpe|CBF85294.1| TPA: short chain dehydrogenase
  misc_feature (1)..(273): NCBI GI: 242772417 Blast Desc: short chain dehydrogenase (AtsC), [Talaromyces stipitatus ATCC 10500] gi|218721654|gb|EED21072.1| short chain dehydrogenase (AtsC), [Talaromyces stipitatus ATCC 10500]
  misc_feature (1)..(273): NCBI GI: 119473497 Blast Desc: short chain dehydrogenase (AtsC), [Neosartorya fischeri NRRL 181] gi|119406777|gb|EAW16727.1| short chain dehydrogenase (AtsC), [Neosartorya fischeri NRRL 181]
  misc_feature (1)..(273): NCBI GI: 238494946 Blast Desc: short chain dehydrogenase (AtsC), [Aspergillus flavus NRRL3357] gi|220695359|gb|EED51702.1| short chain dehydrogenase (AtsC), [Aspergillus flavus NRRL3357]
  misc_feature (1)..(273): NCBI GI: 67540978 Blast Desc: AN6659.2 [Aspergillus nidulans FGSC A4] gi|40738998|gb|EAA58188.1| AN6659.2 [Aspergillus nidulans FGSC A4] gi|259480241|tpe|CBF71192.1| TPA: short chain dehydrogenase
  misc_feature (1)..(273): NCBI GI: 121714479 Blast Desc: short chain dehydrogenase (AtsC), [Aspergillus clavatus NRRL 1] gi|119403004|gb|EAW13424.1| short chain dehydrogenase (AtsC), [Aspergillus clavatus NRRL 1]
  misc_feature (1)..(273): NCBI GI: 189201619 Blast Desc: conserved [Pyrenophora tritici-repentis Pt-1C-BFP] gi|187984245|gb|EDU49733.1| conserved [Pyrenophora tritici-repentis Pt-1C-BFP]
  misc_feature (3)..(209): SWISSPROT Homolog: EC 1.1.1.206 Tropinone reductase I
MATYLITGASRGIGFSLLSVISSDSKNTVIGLVRNKEAAEERVAKELSGRSNIHVLTADMKDYQSIQKAVEDAGKITGGSLDFVIANAGAMSSAETFSNIGELAEDPISFEKEFNWTMQTNVLGNVHLFALTLPLVLKGKEKKVIAISSGASDIELVRNFDLKLSPWYASSKSVLNTFIAKFSAQYAKDGVLFQSICPGVVDTSPLDLAGASEEQLGKLGEFFGGIKRYAPHFEKPDHPDDAARSILSVIEKSSVKNGDGGSFVSHFGTKQWV

SEQ ID NO: 35828 - DNA, 909 bp, Muscodor strobelii
  misc_feature: SGI cDNA ID NO. 572411
  misc_feature: Encodes the peptide sequence at SEQ ID NO 35829
atggcgacttatttgattactggagcctcaaggggcatcgggttctctcttctgtctgttatttcgagcgactctaagaacaccgtcattgggttggttcgaaacaaagaagcagcagaagagagagtagcgaaggagctgagcgggaggtccaatattcatgtccttacggccgacatgaaagactatcagtctatacagaaagcagtcgaagatgccgggaagattaccgggggtagtctcgatttcgtcattgcgaatgctggcgccatgtcatctgccgagacattctcaaatattggagagctcgctgaggaccccatctcctttgaaaaagaatttaactggaccatgcagactaatgtacttggcaacgttcatctgttcgcgctgactcttccccttgttctgaaagggaaagagaagaaagttatcgctatttctagcggcgcatccgatatagagctagtgcgcaacttcgatctcaagttatcaccatggtacgcctcgagcaagtctgtcctaaacacttttattgccaagttcagcgcccagtacgcaaaagacggagtcttattccagagcatctgccctggtgtcgtcgatacgtcgcccttagatcttgcaggcggtaagctatttaatactgacatcgtggctctaattcaaacgtcacttatttctttactcatgctgatcgattaccatcactttacagcaagcgaggagcagcttgggaaacttggagaattctttggaggaattaagcgttatgccccgcatttcgaaaagcctgatcacccagatgatgcagccagaagtattttgtccgttattgagaaatcgagcgtgaaaaatggcgatggtggatcatttgtttcgcactttggaaccaaacaatgggtttga

SEQ ID NO: 35829 - protein, 302 aa, Muscodor strobelii
  misc_feature: SGI Peptide ID NO. 572411
  misc_feature (2)..(187): Pfam Id: PF00106 Pfam Desc: short chain dehydrogenase
  misc_feature (2)..(152): Pfam Id: PF00106 Pfam Desc: short chain dehydrogenase
  misc_feature (1)..(302): NCBI GI: 258575181 Blast Desc: conserved [Uncinocarpus reesii 1704] gi|237902038|gb|EEP76439.1| conserved [Uncinocarpus reesii 1704]
  misc_feature (1)..(302): NCBI GI: 256730666 Blast Desc: NECHADRAFT_29697 [Nectria haematococca mpVI 77-13-4]
  misc_feature (1)..(302): NCBI GI: 46114388 Blast Desc: FG03036.1 [Gibberella zeae PH-1]
  misc_feature (1)..(302): NCBI GI: 242772417 Blast Desc: short chain dehydrogenase (AtsC), [Talaromyces stipitatus ATCC 10500] gi|218721654|gb|EED21072.1| short chain dehydrogenase (AtsC), [Talaromyces stipitatus ATCC 10500]
  misc_feature (1)..(302): NCBI GI: 67522387 Blast Desc: AN1650.2 [Aspergillus nidulans FGSC A4] gi|40745614|gb|EAA64770.1| AN1650.2 [Aspergillus nidulans FGSC A4] gi|259486986|tpe|CBF85294.1| TPA: short chain dehydrogenase
  misc_feature (1)..(302): NCBI GI: 119473497 Blast Desc: short chain dehydrogenase (AtsC), [Neosartorya fischeri NRRL 181] gi|119406777|gb|EAW16727.1| short chain dehydrogenase (AtsC), [Neosartorya fischeri NRRL 181]
  misc_feature (1)..(302): NCBI GI: 67540978 Blast Desc: AN6659.2 [Aspergillus nidulans FGSC A4] gi|40738998|gb|EAA58188.1| AN6659.2 [Aspergillus nidulans FGSC A4] gi|259480241|tpe|CBF71192.1| TPA: short chain dehydrogenase
  misc_feature (1)..(302): NCBI GI: 238494946 Blast Desc: short chain dehydrogenase (AtsC), [Aspergillus flavus NRRL3357] gi|220695359|gb|EED51702.1| short chain dehydrogenase (AtsC), [Aspergillus flavus NRRL3357]
  misc_feature (1)..(302): NCBI GI: 121714479 Blast Desc: short chain dehydrogenase (AtsC), [Aspergillus clavatus NRRL 1] gi|119403004|gb|EAW13424.1| short chain dehydrogenase (AtsC), [Aspergillus clavatus NRRL 1]
  misc_feature (1)..(302): NCBI GI: 256730091 Blast Desc: NECHADRAFT_95010 [Nectria haematococca mpVI 77-13-4]
  misc_feature (3)..(209): SWISSPROT Homolog: EC 1.1.1.206 Tropinone reductase I
MATYLITGASRGIGFSLLSVISSDSKNTVIGLVRNKEAAEERVAKELSGRSNIHVLTADMKDYQSIQKAVEDAGKITGGSLDFVIANAGAMSSAETFSNIGELAEDPISFEKEFNWTMQTNVLGNVHLFALTLPLVLKGKEKKVIAISSGASDIELVRNFDLKLSPWYASSKSVLNTFIAKFSAQYAKDGVLFQSICPGVVDTSPLDLAGGKLFNTDIVALIQTSLISLLMLIDYHHFTASEEQLGKLGEFFGGIKRYAPHFEKPDHPDDAARSILSVIEKSSVKNGDGGSFVSHFGTKQWV

SEQ ID NO: 35830 - DNA, 969 bp, Muscodor strobelii
  misc_feature: SGI cDNA ID NO. 572412
  misc_feature: Encodes the peptide sequence at SEQ ID NO 35831
atgcctaagaatggaattctctctggggtcaagactattgcaagctgtgcagtagagattggagacaacctctgcttcatatgtcttcctcttacattatcatgtccaagtagtgagattggtttcaatgaagagccacagtcctctagagatccaagtcctaaggtttatgacgttgtgaaagcagaggagccggggttttggctagaaattggcacatattgcactggcaaccgttataagaacattccctacgatgaatacgaggaccagaaagtgttgggccggttctgtttcattgatgtgggaaattttctctgtaaagacgaacaaaacacggtaacactgacggtaaagcccaataacaatgatttccaccgccaaaaactagatctcgcttgggatgaatcaaagtggaagtccgcggacgctgcagatctatccaaggacaagataatagcttgggaaatgaaatttcgccttactatgcgtccgtttggttcagactcctttatggttctcagctacgaataccgggaaaaaatggaacgtccccaacatgaaggttctgcaaccacgaagcaaaagaccaagacgtattaccgacctggagttccaataaaagtccacttctacatcgacgaagaggataaagaaaacgccgatagacagggagacttctgttcgggtcaattcaatggaagactgataactctaaaggagaacgatacgaatgaagagaccgcagttggaatcacttatcgcacgatggatgacgagaaggcagacgaggaaggcgaagcagaagtcacaactgtttctgtcgaagaaatgtcggaggagttcttccaggaggtgaggaagcaatttggacttgaagatgtgaagcaagatcaatatcaactttggcctcagctcaagttaagagaggattgtttcaaaactctatgcgaggcagaacaatcatga

SEQ ID NO: 35831 - protein, 322 aa, Muscodor strobelii
  misc_feature: SGI Peptide ID NO. 572412
MPKNGILSGVKTIASCAVEIGDNLCFICLPLTLSCPSSEIGFNEEPQSSRDPSPKVYDVVKAEEPGFWLEIGTYCTGNRYKNIPYDEYEDQKVLGRFCFIDVGNFLCKDEQNTVTLTVKPNNNDFHRQKLDLAWDESKWKSADAADLSKDKIIAWEMKFRLTMRPFGSDSFMVLSYEYREKMERPQHEGSATTKQKTKTYYRPGVPIKVHFYIDEEDKENADRQGDFCSGQFNGRLITLKENDTNEETAVGITYRTMDDEKADEEGEAEVTTVSVEEMSEEFFQEVRKQFGLEDVKQDQYQLWPQLKLREDCFKTLCEAEQS

SEQ ID NO: 35832 - DNA, 513 bp, Muscodor strobelii
  misc_feature: SGI EST ID NO. CUFF.86274.0
  misc_feature: Variant of the nucleotide sequence at SEQ ID NO 35830
ctgcaaccacgaagcaaaagaccaagacgtattaccgacctggagttccaataaaagtccacttctacatcgacgaagaggataaagaaaacgccgatagacagggagacttctgttcgggtcaattcaatggaagactgataactctaaaggagaacgatacgaatgaagagaccgcagttggaatcacttatcgcacgatggatgacgagaaggcagacgaggaaggcgaagcagaagtcacaactgtttctgtcgaagaaatgtcggaggagttcttccaggaggtgaggaagcaatttggacttgaagatgtgaagcaagatcaatatcaactttggcctcagctcaagttaagagaggattgtttcaaaactctatgcgaggcagaacaatcatgaagggaataagcagtaattactgttggcagctttgtatggtgtagaaatcatgtttgtttggtaacatgagttggaggtatgtactccaggccgtactttatgcagtgtagga

SEQ ID NO: 35833 - DNA, 552 bp, Muscodor strobelii
  misc_feature: SGI cDNA ID NO. 572413
  misc_feature: Elevated expression when VOC is produced
  misc_feature: Encodes the peptide sequence at SEQ ID NO 35834
atggccgtctctaaatcagagaaatcttggcttcttagcatgccagctgagattcgcaacagcatctatgatctcgtcgtcaggagcgagtggggaaacacaaccacgtccgactcacacttcgtactagatcggcccctgccagcgctcttccgcaccaacaagcagattcgctctgaagctctagacaactttctgttgaagaatcgctttcatgtttacacatgcaaagttggtttcaaatggctggagatcctcgggaaagatgtcaacagattccgcttcctttccctgttcgttgatcttagcatcgagaattggcgcaaatacattagcgccctcctacctatgatttcgccataccttcagctcaggattaggaaagctgctgtttcgctgcaagatgctaaactcaatcgcatggtgaaggctctggggcttgacaattcaaatatctggacaagcgagagaatcagtccagatgaagtgctctataaacggattggctcgctgcccggggcacgtgtaacaagatcgtctggaacagtttag

SEQ ID NO: 35834 - protein, 183 aa, Muscodor strobelii
  misc_feature: SGI Peptide ID NO. 572413
  misc_feature: Useful for introducing or modulating the production of volatile compounds
MAVSKSEKSWLLSMPAEIRNSIYDLVVRSEWGNTTTSDSHFVLDRPLPALFRTNKQIRSEALDNFLLKNRFHVYTCKVGFKWLEILGKDVNRFRFLSLFVDLSIENWRKYISALLPMISPYLQLRIRKAAVSLQDAKLNRMVKALGLDNSNIWTSERISPDEVLYKRIGSLPGARVTRSSGTV

SEQ ID NO: 35835 - DNA, 1287 bp, Muscodor strobelii
  misc_feature: SGI EST ID NO. CUFF.86287.0
  misc_feature: Variant of the nucleotide sequence at SEQ ID NO 35833
caaaactctagatttcatacctcaacagtacaggccatttatttagccatatttcgtcttcctttcgactgatcagggagtgatattcatacttacgtttgcatcaacactccgttactttatttcggagctcccatcctgcctttggggcccatcaccgtctagtaccgtgatatttcctgcgaattccccaacctaggtaccgcttaccggttaacatcttgcgccaacatggccgtctctaaatcagagaaatcttggcttcttagcatgccagctgagattcgcaacagcatctatgatctcgtcgtcaggagcgagtggggaaacacaaccacgtccgactcacacttcgtactagatcggcccctgccagcgctcttccgcaccaacaagcagattcgctctgaagctctagacaactttctgttgaagaatcgctttcatgtttacacatgcaaagttggtttcaaatggctggagatcctcgggaaagatgtcaacagattccgcttcctttccctgttcgttgatcttagcatcgagaattggcgcaaatacattagcgccctcctacctatgatttcgccataccttcagctcaggattaggaaagctgctgtttcgctgcaagatgctaaactcaatcgcatggtgaaggctctggggcttgacaattcaaatatctggacaagcgagagaatcagtccagatgaagtgctctataaacggattggctcgctgcccggggcacgtgtaacaagatcgtctggaacagtttaggaagaaggacaaagaatcaaatcatttgatcttcttccgtcttcggcattactatcgacgtcccgtgtagcagcgttgagcaaatcaaacacgactctgcttatcagggcagattttgctagttcgccagattcaatccagaggatgagagtccttggatctgctccaattcatccgcgtccgttcaaaattcaacttaaatctcaacattctctcagcaatatatgctgccgggtcctttacagatatagagcgatattgtcagcaatttcagccgagtatgaatttaaaagaaacatagattttgaggcacctgagtacacaatgtttgcggcactggccggatatcaatgatctttatatgcaactcacaaactctcagaatttagccaaagagtacatgaatatgaaatgatcaaaaagtatcacaaggttacgagtggcgcagtctcaatatgatagagttagtctcgatctctaggcagtctgctggagcatccaaac

SEQ ID NO: 35836 - DNA, 1365 bp, Muscodor strobelii
  misc_feature: SGI cDNA ID NO. 572414
  misc_feature: Elevated expression when VOC is produced
  misc_feature: Encodes the peptide sequence at SEQ ID NO 35837
atgccagcctcggataatgtgtgtcgtcacgatacactgcagctggactgttcaccatgggccgagttggctggatttgaacgcaccaatcctgagaaaaggcttgcagcagcaacgaaagcaggtcgaaatccattagcaagtcggggagtgtcaaaagatgtagtcgcacaacgcgtccgcgaagtaacaaataagattcgattgtcatttcctggtccgcttctactacctaaggatgagctgaattgggacccggactgtcccgcacaatcctttcgatcttggcatagcgaaactcaaagaaacaagccatcagcaacacacaagactatctacgttgtacctgcgcctacgattactagcgatgtgagttttatgaaggactggacgaatatcaccacaagctctacgaatgagcacattccacttgagccaccatctgcggataatctcttgcaatacctcggtgcattctatcatggcatggaagtgagggcgctgccgcagcacctgcgtttcgtgccatgggctcaatgcgtgccccgtgccagacgcggacattcaggttcttatgttgggttggcaacggacaaatcctccacacgcatccgctaccggccgacgccagacaatagactgccgaaccagctgaatctcaacgacatcctcgatgcggcgatcgcaatgctaccggctgatgcctacgccattatcttgctaatggatatcgatttgtatgaggatgaagatgatgatttctgctgcggtcgggcatatggaggcagtcgtgtctgcgtcgtgtcttctgcacgctataatccagcattggacgctgaagagggtatcgactatcaccacatgtggccggcttcacactgcatgaagttcgttgatgaactgtgtgccatagaagggcttgaaccacgaacactcagtaggccaaaagacagccatacatccgcgctataccaagcagtggaagcagcccaacaggttggtataccatcgacaaaagaagaactgagcggattgtggttctcgcgagtcgcgcgcactgcagtgcatgaactcggccactgcttgggcatgggtcattgtatatactacgcttgcaatttgcaagggaccgcgggtataatagaagatgtgagacagccgccatacgtgtgccctgtgtgtctcgaaaagatctgtcatgcgatagcgtgcgaggctcaaggtcgagatcaaaaaggaaaggaagagtacgtgaaggagagatacaatgctttggcagatttctgcgatgcatggcagcatgttgggctgtttgctgagtacgccacttggctacgcgcaagactaacacagctgtcgagctag

SEQ ID NO: 35837 - protein, 454 aa, Muscodor strobelii
  misc_feature: SGI Peptide ID NO. 572414
  misc_feature (8)..(454): NCBI GI: 256730072 Blast Desc: NECHADRAFT_82709 [Nectria haematococca mpVI 77-13-4]
  misc_feature (6)..(452): NCBI GI: 121704537 Blast Desc: conserved [Aspergillus clavatus NRRL 1] gi|119398677|gb|EAW09106.1| conserved [Aspergillus clavatus NRRL 1]
  misc_feature (6)..(448): NCBI GI: 238497311 Blast Desc: conserved [Aspergillus flavus NRRL3357] gi|220694771|gb|EED51115.1| conserved [Aspergillus flavus NRRL3357]
  misc_feature (2)..(453): NCBI GI: 261354430 Blast Desc: conserved [Verticillium albo-atrum VaMs.102]
  misc_feature (18)..(452): NCBI GI: 46121345 Blast Desc: FG05051.1 [Gibberella zeae PH-1]
  misc_feature (8)..(446): NCBI GI: 259485850 Blast Desc: TPA: conserved [Aspergillus nidulans FGSC A4]
  misc_feature (8)..(446): NCBI GI: 67525469 Blast Desc: AN3192.2 [Aspergillus nidulans FGSC A4] gi|40743769|gb|EAA62956.1| AN3192.2 [Aspergillus nidulans FGSC A4]
  misc_feature (69)..(444): NCBI GI: 115400773 Blast Desc: [Aspergillus terreus NIH2624] gi|114191641|gb|EAU33341.1| [Aspergillus terreus NIH2624]
  misc_feature (70)..(452): NCBI GI: 154322951 Blast Desc: BC1G_00818 [Botryotinia fuckeliana B05.10] gi|150848152|gb|EDN23345.1| BC1G_00818 [Botryotinia fuckeliana B05.10]
  misc_feature (8)..(452): NCBI GI: 256726779 Blast Desc: NECHADRAFT_76119 [Nectria haematococca mpVI 77-13-4]
  misc_feature: Useful for introducing or modulating the production of volatile compounds
MPASDNVCRHDTLQLDCSPWAELAGFERTNPEKRLAAATKAGRNPLASRGVSKDVVAQRVREVTNKIRLSFPGPLLLPKDELNWDPDCPAQSFRSWHSETQRNKPSATHKTIYVVPAPTITSDVSFMKDWTNITTSSTNEHIPLEPPSADNLLQYLGAFYHGMEVRALPQHLRFVPWAQCVPRARRGHSGSYVGLATDKSSTRIRYRPTPDNRLPNQLNLNDILDAAIAMLPADAYAIILLMDIDLYEDEDDDFCCGRAYGGSRVCVVSSARYNPALDAEEGIDYHHMWPASHCMKFVDELCAIEGLEPRTLSRPKDSHTSALYQAVEAAQQVGIPSTKEELSGLWFSRVARTAVHELGHCLGMGHCIYYACNLQGTAGIIEDVRQPPYVCPVCLEKICHAIACEAQGRDQKGKEEYVKERYNALADFCDAWQHVGLFAEYATWLRARLTQLSS

SEQ ID NO: 35838 - DNA, 1800 bp, Muscodor strobelii
  misc_feature: SGI EST ID NO. CUFF.86289.0
  misc_feature: Variant of the nucleotide sequence at SEQ ID NO 35836
ccttgacagcgtctacatgagatgcaaggtcgaagtgcacctacacagcctcaaatgttctagcttgcagttaagcaaggcaccagcgaggcagacactctctagtctagccatggatttgtgggaaatataagtatcggagcttgtagctgcgattatctatagtctgcaggctccttgacaggttttgatttccttcattatgccagcctcggataatgtgtgtcgtcacgatacactgcagctggactgttcaccatgggccgagttggctggatttgaacgcaccaatcctgagaaaaggcttgcagcagcaacgaaagcaggtcgaaatccattagcaagtcggggagtgtcaaaagatgtagtcgcacaacgcgtccgcgaagtaacaaataagattcgattgtcatttcctggtccgcttctactacctaaggatgagctgaattgggacccggactgtcccgcacaatcctttcgatcttggcatagcgaaactcaaagaaacaagccatcagcaacacacaagactatctacgttgtacctgcgcctacgattactagcgatgtgagttttatgaaggactggacgaatatcaccacaagctctacgaatgagcacattccacttgagccaccatctgcggataatctcttgcaatacctcggtgcattctatcatggcatggaagtgagggcgctgccgcagcacctgcgtttcgtgccatgggctcaatgcgtgccccgtgccagacgcggacattcaggttcttatgttgggttggcaacggacaaatcctccacacgcatccgctaccggccgacgccagacaatagactgccgaaccagctgaatctcaacgacatcctcgatgcggcgatcgcaatgctaccggctgatgcctacgccattatcttgctaatggatatcgatttgtatgaggatgaagatgatgatttctgctgcggtcgggcatatggaggcagtcgtgtctgcgtcgtgtcttctgcacgctataatccagcattggacgctgaagagggtatcgactatcaccacatgtggccggcttcacactgcatgaagttcgttgatgaactgtgtgccatagaagggcttgaaccacgaacactcagtaggccaaaagacagccatacatccgcgctataccaagcagtggaagcagcccaacaggttggtataccatcgacaaaagaagaactgagcggattgtggttctcgcgagtcgcgcgcactgcagtgcatgaactcggccactgcttgggcatgggtcattgtatatactacgcttgcaatttgcaagggaccgcgggtataatagaagatgtgagacagccgccatacgtgtgccctgtgtgtctcgaaaagatctgtcatgcgatagcgtgcgaggctcaaggtcgagatcaaaaaggaaaggaagagtacgtgaaggagagatacaatgctttggcagatttctgcgatgcatggcagcatgttgggctgtttgctgagtacgccacttggctacgcgcaagactaacacagctgtcgagctaggtcaagggatttggccgagatagcctaacctttagtttctttcccagatatctagggcataatgatcctttttcgatactacatggctacgttaaaatactgaagactcacatgatctcggagaacagacacgacgtatttgggaggacttgatcgccgtgctaaatcggcctcggagctccgcgtggctcttctatatactcggagcttgccagtacatagctatgatgagg

SEQ ID NO: 35839 - DNA, 429 bp, Muscodor strobelii
  misc_feature: SGI cDNA ID NO. 572415
  misc_feature: Encodes the peptide sequence at SEQ ID NO 35840
atggagttggactatgattgtgccgaatctgtagaggtggatctgaagttaatcgacaagaatagtgagatcttgtatgatacgctatttgatgtgagagctcgctatggctctccgatgataagccacatgcccgcagacttccgagataagctcctccgacttgctgctcaggccccgaaggaactcgatcttgataagaactcagttctgaccaaggctatctggagaaaggggtatgttgatctagacgtaacgaggggaagactcgctgtgaaggatggtacggttgtagaagccgatgtcgtgatactacttggtgattatactataggtgcccacttgatcactgataggcgggaaagcttcagggagaagtataaagccatcctagactcgaagaaagactggatggtacttcgagaatga

SEQ ID NO: 35840 - protein, 142 aa, Muscodor strobelii
  misc_feature: SGI Peptide ID NO. 572415
  misc_feature (16)..(129): NCBI GI: 119485793 Blast Desc: FAD binding domain protein [Neosartorya fischeri NRRL 181] gi|119410395|gb|EAW20342.1| FAD binding domain protein [Neosartorya fischeri NRRL 181]
  misc_feature (16)..(105): NCBI GI: 70983949 Blast Desc: salicylate hydroxylase [Aspergillus fumigatus Af293] gi|66845126|gb|EAL85462.1| salicylate hydroxylase, [Aspergillus fumigatus Af293]
  misc_feature (16)..(105): NCBI GI: 159123522 Blast Desc: salicylate 1-monooxygenase [Aspergillus fumigatus A1163]
  misc_feature (19)..(104): NCBI GI: 145242214 Blast Desc: An09g04390 [Aspergillus niger] gi|134078299|emb|CAK40294.1| protein product [Aspergillus niger]
  misc_feature (11)..(105): NCBI GI: 261359172 Blast Desc: FAD binding domain-containing protein [Verticillium albo-atrum VaMs.102]
MELDYDCAESVEVDLKLIDKNSEILYDTLFDVRARYGSPMISHMPADFRDKLLRLAAQAPKELDLDKNSVLTKAIWRKGYVDLDVTRGRLAVKDGTVVEADVVILLGDYTIGAHLITDRRESFREKYKAILDSKKDWMVLRE

SEQ ID NO: 35841 - DNA, 2196 bp, Muscodor strobelii
  misc_feature: SGI cDNA ID NO. 572416
  misc_feature: Encodes the peptide sequence at SEQ ID NO 35842
atgtcagaccctgcagataccaatgtcgcaaatcccgtcattaataagcattcccaccatgattccattcatacccatgtcgacacgctgcaaacacctctaacggaagagactatacagtttgccaattccatccaacagcaaactgattttcccctgtcctcatcagttcctcgacccactttcaacttcaatccatcattatatgctcctctcttgttcaacaatccccaaccccaaccccattttccccaggagcgccaagaaatcaacgttcacgctccacctgcgccagtcttatctcagcaagtagcttgggatcctcatcccgagacactgacacagcaatcgcaacaaccagatcttttgggcgccacaactgatttcacagcttgcgcacccgtgccgcagacagacatgaggtacgtcggagggcatttggatgtccttagcgcggaagtatacgatgatggacgctattcgaaacggttaaagcatttgaatgatgaaagaaatgaacccgagtcatcgagaggctcgctaaatcccaagaaacgaggaagaaaacccatccaggataggcctgaagcagaggaggagacaaagagagctaggggacgtccacgcttggaatctacagaagatgtagacttaaaggagcgaagaaaactccaaatacgtgttgcgcaaagagcgtaccgggagcgaaaagaaaacgctatcagccatctcgaagccaaagtcgcaggacttcaagccgttaacactgagatcaaggatagctataagaagttacttctggactatgtgcacgagcatggggcccataatttggcacctgaactcgcacagcgtctggaacagttccaaacactattatcctcgcgtgtttcagaacctaacagtccgaaaagtgacgaagccacttcagaaacgaaagtgaacgatacccaaaccgagtcgctgagcactgcaaacccgatcaccgaatcagaagacctcaaaaagccagcagaagacccaacacaacctcaggaacttctctacggactaagagttacccacgaaccagattatcaaacaacgtctacatcaggtcaaagacatgattcttcttcatccgtcgaggacagcttcggaggctacacgatggtcgtcgcgccaactctcgacaacgcgagttttagtagtatgtctatgatgaacccaacgcaggatttcgtctcacttaactatactacgcttccgccgccctcaacaactgcatatatggactttaccttcgcccggcgccttcaccgtcgagcgaccgaaagcgccgccagactcatcaacatggacaacccgcctcccaagctcatgttccaagtgttcggtttcgtgcaaaactacgacacaattgataagatccgggagcgattgaaccgaactttaaaccgtgggctgggtgaggatctcaacgcttataacgagccttttcattcgctcggcggggctgggacgcatttcccgaaggatacggcgtcgtcatactcgtcgttcaacgaacacggaatgagtatgggacctttcgacgagcgaaagacgcatgtccgagatcatttactcgacaaactgcagcgcaccgacttacccggctggcaaggcgagtggtatgactcttacgaagtcgagaaatatctcctctccgaagaaattcttctccctgaccacgaaggctggatggaattaccgctgagactggcgtcccatcaagaccaatcctatagacctactgaaacaaacactactctcaaccaccacaacctcttctcccaagccccatccgacctttctccgcacgaacttcaaagaccggctctctacaccaccccagcgagcgccgagcctctccaactttctgtaacagcagcacaggatccctggacagcttctgcagacctgttcggaatccatcatacgacagcagctgcgctgtcttccatattagcatttgataacaccggctttcctgatacctcgcagtaccacttcccgaacgtcatgaatagtacgtcgggtggtaggagagtttggtttagcacggagaagttccaagagcgactcctccggaaggcgacatgcataggccgtggcccggctttcaggaaagaagatatcatacctgctcttctagactctgtcaaacctgagtag

SEQ ID NO: 35842 - protein, 731 aa, Muscodor strobelii
  misc_feature: SGI Peptide ID NO. 572416
  misc_feature (214)..(270): Pfam Id: PF00170 Pfam Desc: bZIP transcription factor
  misc_feature (140)..(729): NCBI GI: 171682612 Blast Desc: protein product [Podospora anserina] gi|170941265|emb|CAP66915.1| protein product [Podospora anserina]
  misc_feature (174)..(724): NCBI GI: 46124087 Blast Desc: FG06421.1 [Gibberella zeae PH-1]
  misc_feature (140)..(729): NCBI GI: 116202839 Blast Desc: CHGG_09304 [Chaetomium globosum CBS 148.51] gi|88177822|gb|EAQ85290.1| CHGG_09304 [Chaetomium globosum CBS 148.51]
  misc_feature (140)..(569): NCBI GI: 85096104 Blast Desc: NCU05637 [Neurospora crassa OR74A] gi|28921680|gb|EAA30962.1| [Neurospora crassa OR74A]
  misc_feature (182)..(569): NCBI GI: 145604821 Blast Desc: MGG_07925 [Magnaporthe grisea 70-15] gi|145012742|gb|EDJ97396.1| MGG_07925 [Magnaporthe grisea 70-15]
  misc_feature (202)..(569): NCBI GI: 261361494 Blast Desc: conserved [Verticillium albo-atrum VaMs.102]
  misc_feature (142)..(728): NCBI GI: 258564116 Blast Desc: [Uncinocarpus reesii 1704] gi|237908310|gb|EEP82711.1| [Uncinocarpus reesii 1704]
  misc_feature (218)..(582): NCBI GI: 46114396 Blast Desc: FG03040.1 [Gibberella zeae PH-1]
  misc_feature (166)..(728): NCBI GI: 119177586 Blast Desc: CIMG_07712 [Coccidioides immitis RS]
  misc_feature (414)..(561): NCBI GI: 189197167 Blast Desc: conserved [Pyrenophora tritici-repentis Pt-1C-BFP] gi|187980869|gb|EDU47495.1| conserved [Pyrenophora tritici-repentis Pt-1C-BFP]
MSDPADTNVANPVINKHSHHDSIHTHVDTLQTPLTEETIQFANSIQQQTDFPLSSSVPRPTFNFNPSLYAPLLFNNPQPQPHFPQERQEINVHAPPAPVLSQQVAWDPHPETLTQQSQQPDLLGATTDFTACAPVPQTDMRYVGGHLDVLSAEVYDDGRYSKRLKHLNDERNEPESSRGSLNPKKRGRKPIQDRPEAEEETKRARGRPRLESTEDVDLKERRKLQIRVAQRAYRERKENAISHLEAKVAGLQAVNTEIKDSYKKLLLDYVHEHGAHNLAPELAQRLEQFQTLLSSRVSEPNSPKSDEATSETKVNDTQTESLSTANPITESEDLKKPAEDPTQPQELLYGLRVTHEPDYQTTSTSGQRHDSSSSVEDSFGGYTMVVAPTLDNASFSSMSMMNPTQDFVSLNYTTLPPPSTTAYMDFTFARRLHRRATESAARLINMDNPPPKLMFQVFGFVQNYDTIDKIRERLNRTLNRGLGEDLNAYNEPFHSLGGAGTHFPKDTASSYSSFNEHGMSMGPFDERKTHVRDHLLDKLQRTDLPGWQGEWYDSYEVEKYLLSEEILLPDHEGWMELPLRLASHQDQSYRPTETNTTLNHHNLFSQAPSDLSPHELQRPALYTTPASAEPLQLSVTAAQDPWTASADLFGIHHTTAAALSSILAFDNTGFPDTSQYHFPNVMNSTSGGRRVWFSTEKFQERLLRKATCIGRGPAFRKEDIIPALLDSVKPE

SEQ ID NO: 35843 - DNA, 6529 bp, Muscodor strobelii
  misc_feature: SGI EST ID NO. CUFF.86295.1
  misc_feature: Variant of the nucleotide sequence at SEQ ID NO 35841
ctgtggtcttgtgcgcggccgtagggctcccttcatcttccgagaagctgaattggatgaggagtctcgacttcttggggaagcatggaccacaagcggcagagcgaatgatggaggacattccctcacacgatacgatgagatccagtgggatcaatgttgtaatgcgcatcgcgaaatcaccattgcatactttgtagaagtgatatgtagtagcctcgaatatctctttttttaattgattgagcgtaagtggctttcagtgaggcttctgaactctcttggcatacatcattgttggcaggcaacagagccccgggttgcacgcgttgcacacatcgacgaggaaaagcaaatatcggaagggggcctgttccttgttgggcgtctgcatgctagtgtttttggacaccccggcccgggagcgctgaagttttgcaccaaccaggattagaaaaaccgtaccgaatgcatgcaaatgcaatgtagttataaagcagctcacgtaagggagtctgacgcaatgccagctctcaacaattattagcattgaggtcccagtccccaatctgggccaaaaaatgttcactaatcattcttcacttcccgctcgaaacggaaccttcctcacaaccgagacgaccacccacaacccacccacggtacgctgctcttcgggatccgcatttcggcggcgttacccgctctccatcgcgtggatgaattgaaggctgtcgtggagacggcctttcattgccgccacatttgagataggccgaccggtgcctcatcgatggtggcaaggccggagcgaggtgatagttccgtgttggcaatttggtctcggggttcaagacactggattgtactaggagtctgagcagaacgcgactaacggtttctaccaaagtcgacccaccacttcctgcgccactcaaccttcaaacatcactagatcgcattggcgtcgctgcaactattagatattgaagagtagtgttgacgcgcctgttcatgatagttatcaggggctctggcaagactcccgcatgttgttgagattcgaggaacatcgggcgttccgactcatgggatgaaatacatccatgattgatgagtttggagatggccaatgaaaaacggattaagtggcatcactgagtcaaagacatctcgcgagatgtgctgacactttaagcatccgccggcttgcaacactatgtcagaccctgcagataccaatgtcgcaaatcccgtcattaataagcattcccaccatgattccattcatacccatgtcgacacgctgcaaacacctctaacggaagagactatacagtttgccaattccatccaacagcaaactgattttcccctgtcctcatcagttcctcgacccactttcaacttcaatccatcattatatgctcctctcttgttcaacaatccccaaccccaaccccattttccccaggagcgccaagaaatcaacgttcacgctccacctgcgccagtcttatctcagcaagtagcttgggatcctcatcccgagacactgacacagcaatcgcaacaaccagatcttttgggcgccacaactgatttcacagcttgcgcacccgtgccgcagacagacatgaggtacgtcggagggcatttggatgtccttagcgcggaagtatacgatgatggacgctattcgaaacggttaaagcatttgaatgatgaaagaaatgaacccgagtcatcgagaggctcgctaaatcccaagaaacgaggaagaaaacccatccaggataggcctgaagcagaggaggagacaaagagagctaggggacgtccacgcttggaatctacagaagatgtagacttaaaggagcgaagaaaactccaaatacgtgttgcgcaaagagcgtaccgggagcgaaaagaaaacgctatcagccatctcgaagccaaagtcgcaggacttcaagccgttaacactgagatcaaggatagctataagaagttacttctggactatgtgcacgagcatggggcccataatttggcacctgaactcgcacagcgtctggaacagttccaaacactattatcctcgcgtgtttcagaacctaacagtccgaaaagtgacgaagccacttcagaaacgaaagtgaacgatacccaaaccgagtcgctgagcactgcaaacccgatcaccgaatcagaagacctcaaaaagccagcagaagacccaacacaacctcaggaacttctctacggactaagagttacccacgaaccagattatcaaacaacgtctacatcaggtcaaagacatgattcttcttcatccgtcgaggacagcttcggaggctacacgatggtcgtcgcgccaactctcgacaacgcgagttttagtagtatgtctatgatgaacccaacgcaggatttcgtctcacttaactatactacgcttccgccgccctcaacaactgcatatatggactttaccttcgcccggcgccttcaccgtcgagcgaccgaaagcgccgccagactcatcaacatggacaacccgcctcccaagctcatgttccaagtgttcggtttcgtgcaaaactacgacacaattgataagatccgggagcgattgaaccgaactttaaaccgtgggctgggtgaggatctcaacgcttataacgagccttttcattcgctcggcggggctgggacgcatttcccgaaggatacggcgtcgtcatactcgtcgttcaacgaacacggaatgagtatgggacctttcgacgagcgaaagacgcatgtccgagatcatttactcgacaaactgcagcgcaccgacttacccggctggcaaggcgagtggtatgactcttacgaagtcgagaaatatctcctctccgaagaaattcttctccctgaccacgaaggctggatggaattaccgctgagactggcgtcccatcaagaccaatcctatagacctactgaaacaaacactactctcaaccaccacaacctcttctcccaagccccatccgacctttctccgcacgaacttcaaagaccggctctctacaccaccccagcgagcgccgagcctctccaactttctgtaacagcagcacaggatccctggacagcttctgcagacctgttcggaatccatcatacgacagcagctgcgctgtcttccatattagcatttgataacaccggctttcctgatacctcgcagtaccacttcccgaacgtcatgaatagtacgtcgggtggtaggagagtttggtttagcacggagaagttccaagagcgactcctccggaaggcgacatgcataggccgtggcccggctttcaggaaagaagatatcatacctgctcttctagactctgtcaaacctgagtagaagacaaacaccaataattagaatggatagattggactcaaaagtggggctttcaaatgcgaacaatgccaaatctcgaagaatgctttttggaaaatggaggatatacttttcgggataaacaggactgtgtttccatataggatagattagcgagcgttctttctacgtgattttggctgttgttgggaataaatacaaaccagcaaattgtcctggccccgtatctgcgcttgcgcaatattgttcataccaatgatgggccacccgtcaatgttcgtccaaccaaaggttgtgacatgtattcaatacaataatcgcctttttgagattctaatattgtacatatggtacagcaacggggtatcccaaacctcacaaatataatacaaccaacacaacaaatcatacaactcactcccgacgcactccgacccttctcaccaccaaccacgagacccaaatcacgtcctagcaccggccttccccctagtcctaaccatgacatccctccacccctcgccatgcaacatcctcatcttctcctcccagaccttcctccgttcctcatccctcttcttcttatcctcaggactaagtctcttcgcatccttcaccatatgttccttgatcctctccatcttcgcaactctatgctttggaaccggtgcatctggaggcagggctctcttaccctccagtattctacgaacgttttctggttccttttcggcttgtttctgcgcccggacttgcttgtgggggtttacttcggcttcgtgttttgtttgttttttgtgcttggttgacttgggattgggaacgctgggagggtgagcgtttggagggtctggggcttgggctgcgtacgcacttggtgagagatcgctaatatcgtgctttggcttcggagtcttgggatgttttagaatcgccggagaagaccaagagacaccgagcttgccatgtttaggagaaccctccattgacggagtcccctgtttcatggcgcgttcctcctccaactgaatcctctctctacgctcttcatggtttgcgcgtcttcttgccttactctcctccttgactctcgcatgctctctcaacaacgccgcatgtctttgcactttctctccttccgacatatatcgtggcctccgagccttttccttctgatgctgttcaaggagcgcaagatgtttttttaccttctcttctttcactccttctatcttcgtcatcccatttgcggtcgatttttcgtgttcgagtcttctcgcggccttgataagtaccggatcggtgatttcttcaccggacttcttgcgctcgaggagtgttcgctcggcttggcgtttttgggtgtcccgctcttggattctgagggcttttctgtttgcgtcgtcttttaggcgctgctggtatgctgctgctctttcttctttggtgagtttgcggtggagagggtttgggtcttcgattgctggttggctgggtttatcctgtttggacttatctgggagcgatttccctgttgcagaatcttgtctctcctgtcgtgacttctcccgggatggctgtatagaaggcgaaatcgtaatagacggcttatcagccggcataggcttccatccgagactaccatctttcttcattttgtctcgccagagccttagcttacgctgctgctttatcctcactcctttggcctgcctgcgtgcctcccactccttcgctctttcggccttcacctttgtccaatattccctgcggaccttcgcctcctccttctccttcatccaagcgtggagcttttgcatcttccggccatgtcgcgcgttgataatcttttgcttcttttcctgctccacctccctctttcttctattctcgttcgccacgatgtaccacctatcaccatgcttcgccttcatcttcgcctgccacagctttttcccctcaatatacttgttcctcctgttttccttgcgctcttcgcctgcaagtttcttctcttcaatgatcaacttcctcatcgcttcagccatagcaatgttttgctcccgctgtatccagagcttctcgttgatgtactgcacaccgtgttcgtgcagagtccacgcaaaactcctgtcgtcctgtcccatgccggggccagcgtcgttctcgtctatccactcgttttccttttcgatctgcgtttttctggaaagcagtttccaccggaccttgctatccggtttcgcccattgataagcctcgagcgccggtagaccctgttttttgcgcatgaggtccgcgacggacttctcccagtcgtcctcaagctccatatcctcttttgtagccccttctatgaaatcttgtctcatgatcattcgcctttctcgtttcctgaacttatggaacaagactctgtgtataattctgggttgtggcttcgtgaagcgcataaatgggaagtcgcccatcatgtccatatgtggaactttcctctttcctgtcccgccaagctgttccttcctgatcggtctgttgggtgtatcgtacacgatcttgggtttcgggttgtcgggcgtaggctcgggcgtgacgttgacaaggagagggcgggtccccggcttgggcgctgagctcttgtcgggccgaggcggcagagcggcttttttcgctgcagctgcatggctgcgctggcgctccgcgagtcggtcgtagagaaagtcgcgggtctggaaatggtgaggagaggtgtcggattcggcggcttctttgaggacggagagcatgcggtaaccggcttggagggcgggatagatgagtcgtgggcttgtgtctttgacgttgcgcttgaaggcgcgtgcgatgtggatggcgatcgggtctttgcccgcccagccgttcgctaggtcatcggggagggagatttgaggtgcgatgcgcaggagggcgcggtagagggcgagacctgtaatatattaacgaattagtgtttcgatactcgaagcgcgaacgtgctagtcaatgcgatcgcagacggtgcgagctccccgggttgcaggtatgagagcagagctccgaaggcattgagtgagagaataatgatcttacatgctg

SEQ ID NO: 35844 - DNA, 2574 bp, Muscodor strobelii
  misc_feature: SGI cDNA ID NO. 572417
  misc_feature: Reduced expression when VOC is produced
  misc_feature: Encodes the peptide sequence at SEQ ID NO 35845
atgtctgtgtccgtaaggccgtcatattcaaagttcttggtcccaagccggagctcgcgacatagaacagcatgtctcgccctctaccgcgccctcctgcgcatcgcacctcaaatctccctccccgatgacctagcgaacggctgggcgggcaaagacccgatcgccatccacatcgcacgcgccttcaagcgcaacgtcaaagacacaagcccacgactcatctatcccgccctccaagccggttaccgcatgctctccgtcctcaaagaagccgccgaatccgacacctctcctcaccatttccagacccgcgactttctctacgaccgactcgcggagcgccagcgcagccatgcagctgcagcgaaaaaagccgctctgccgcctcggcccgacaagagctcagcgcccaagccggggacccgccctctccttgtcaacgtcacgcccgagcctacgcccgacaacccgaaacccaagatcgtgtacgatacacccaacagaccgatcaggaaggaacagcttggcgggacaggaaagaggaaagttccacatatggacatgatgggcgacttcccatttatgcgcttcacgaagccacaacccagaattatacacagagtcttgttccataagttcaggaaacgagaaaggcgaatgatcatgagacaagatttcatagaaggggctacaaaagaggatatggagcttgaggacgactgggagaagtccgtcgcggacctcatgcgcaaaaaacagggtctaccggcgctcgaggcttatcaatgggcgaaaccggatagcaaggtccggtggaaactgctttccagaaaaacgcagatcgaaaaggaaaacgagtggatagacgagaacgacgctggccccggcatgggacaggacgacaggagttttgcgtggactctgcacgaacacggtgtgcagtacatcaacgagaagctctggatacagcgggagcaaaacattgctatggctgaagcgatgaggaagttgatcattgaagagaagaaacttgcaggcgaagagcgcaaggaaaacaggaggaacaagtatattgaggggaaaaagctgtggcaggcgaagatgaaggcgaagcatggtgataggtggtacatcgtggcgaacgagaatagaagaaagagggaggtggagcaggaaaagaagcaaaagattatcaacgcgcgacatggccggaagatgcaaaagctccacgcttggatgaaggagaaggaggaggcgaaggtccgcagggaatattggacaaaggtgaaggccgaaagagcgaaggagtgggaggcacgcaggcaggccaaaggagtgaggataaagcagcagcgtaagctaaggctctggcgagacaaaatgaagaaagatggtagtctcggatggaagcctatgccggctgataagccgtctattacgatttcgccttctatacagccatcccgggagaagtcacgacaggagagacaagattctgcaacagggaaatcgctcccagataagtccaaacaggataaacccagccaaccagcaatcgaagacccaaaccctctccaccgcaaactcaccaaagaagaaagagcagcagcataccagcagcgcctaaaagacgacgcaaacagaaaagccctcagaatccaagagcgggacacccaaaaacgccaagccgagcgaacactcctcgagcgcaagaagtccggtgaagaaatcaccgatccggtacttatcaaggccgcgagaagactcgaacacgaaaaatcgaccgcaaatgggatgacgaagatagaaggagtgaaagaagagaaggtaaaaaaacatcttgcgctccttgaacagcatcagaaggaaaaggctcggaggccacgatatatgtcggaaggagagaaagtgcaaagacatgcggcgttgttgagagagcatgcgagagtcaaggaggagagtaaggcaagaagacgcgcaaaccatgaagagcgtagagagaggattcagttggaggaggaacgcgccatgaaacaggggactccgtcaatggagggttctcctaaacatggcaagctcggtgtctcttggtcttctccggcgattctaaaacatcccaagactccgaagccaaagcacgatattagcgatctctcaccaagtgcgtacgcagcccaagccccagaccctccaaacgctcaccctcccagcgttcccaatcccaagtcaaccaagcacaaaaaacaaacaaaacacgaagccgaagtaaacccccacaagcaagtccgggcgcagaaacaagccgaaaaggaaccagaaaacgttcgtagaatactggagggtaagagagccctgcctccagatgcaccggttccaaagcatagagttgcgaagatggagaggatcaaggaacatatggtgaaggatgcgaagagacttagtcctgaggataagaagaagagggatgaggaacggaggaaggtctgggaggagaagatgaggatgttgcatggcgaggggtggagggatgtcatggttaggactagggggaaggccggtgctaggacgtga

SEQ ID NO: 35845 - protein, 857 aa, Muscodor strobelii
  misc_feature: SGI Peptide ID NO. 572417
  misc_feature (12)..(352): NCBI GI: 116202841 Blast Desc: CHGG_09305 [Chaetomium globosum CBS 148.51] gi|88177823|gb|EAQ85291.1| CHGG_09305 [Chaetomium globosum CBS 148.51]
  misc_feature (12)..(346): NCBI GI: 85096096 Blast Desc: NCU05635 [Neurospora crassa OR74A] gi|28921678|gb|EAA30960.1| [Neurospora crassa OR74A]
  misc_feature (12)..(405): NCBI GI: 171682614 Blast Desc: protein product [Podospora anserina] gi|170941266|emb|CAP66916.1| protein product [Podospora anserina]
  misc_feature (13)..(246): NCBI GI: 256727761 Blast Desc: NECHADRAFT_76912 [Nectria haematococca mpVI 77-13-4]
  misc_feature (13)..(249): NCBI GI: 261361495 Blast Desc: conserved [Verticillium albo-atrum VaMs.102]
  misc_feature: Useful for introducing or modulating the production of volatile compounds
MSVSVRPSYSKFLVPSRSSRHRTACLALYRALLRIAPQISLPDDLANGWAGKDPIAIHIARAFKRNVKDTSPRLIYPALQAGYRMLSVLKEAAESDTSPHHFQTRDFLYDRLAERQRSHAAAAKKAALPPRPDKSSAPKPGTRPLLVNVTPEPTPDNPKPKIVYDTPNRPIRKEQLGGTGKRKVPHMDMMGDFPFMRFTKPQPRIIHRVLFHKFRKRERRMIMRQDFIEGATKEDMELEDDWEKSVADLMRKKQGLPALEAYQWAKPDSKVRWKLLSRKTQIEKENEWIDENDAGPGMGQDDRSFAWTLHEHGVQYINEKLWIQREQNIAMAEAMRKLIIEEKKLAGEERKENRRNKYIEGKKLWQAKMKAKHGDRWYIVANENRRKREVEQEKKQKIINARHGRKMQKLHAWMKEKEEAKVRREYWTKVKAERAKEWEARRQAKGVRIKQQRKLRLWRDKMKKDGSLGWKPMPADKPSITISPSIQPSREKSRQERQDSATGKSLPDKSKQDKPSQPAIEDPNPLHRKLTKEERAAAYQQRLKDDANRKALRIQERDTQKRQAERTLLERKKSGEEITDPVLIKAARRLEHEKSTANGMTKIEGVKEEKVKKHLALLEQHQKEKARRPRYMSEGEKVQRHAALLREHARVKEESKARRRANHEERRERIQLEEERAMKQGTPSMEGSPKHGKLGVSWSSPAILKHPKTPKPKHDISDLSPSAYAAQAPDPPNAHPPSVPNPKSTKHKKQTKHEAEVNPHKQVRAQKQAEKEPENVRRILEGKRALPPDAPVPKHRVAKMERIKEHMVKDAKRLSPEDKKKRDEERRKVWEEKMRMLHGEGWRDVMVRTRGKAGART

SEQ ID NO: 35846 - DNA, 6559 bp, Muscodor strobelii
  misc_feature: SGI EST ID NO. CUFF.86296.0
  misc_feature: Variant of the nucleotide sequence at SEQ ID NO 35844
tgtcaacacaactaaatgtctgtgtccgtaaggccgtcatattcaaagttcttggtcccaagccggagctcgcgacatagaacagcatgtctcgccctctaccgcgccctcctgcgcatcgcacctcaaatctccctccccgatgacctagcgaacggctgggcgggcaaagacccgatcgccatccacatcgcacgcgccttcaagcgcaacgtcaaagacacaagcccacgactcatctatcccgccctccaagccggttaccgcatgctctccgtcctcaaagaagccgccgaatccgacacctctcctcaccatttccagacccgcgactttctctacgaccgactcgcggagcgccagcgcagccatgcagctgcagcgaaaaaagccgctctgccgcctcggcccgacaagagctcagcgcccaagccggggacccgccctctccttgtcaacgtcacgcccgagcctacgcccgacaacccgaaacccaagatcgtgtacgatacacccaacagaccgatcaggaaggaacagcttggcgggacaggaaagaggaaagttccacatatggacatgatgggcgacttcccatttatgcgcttcacgaagccacaacccagaattatacacagagtcttgttccataagttcaggaaacgagaaaggcgaatgatcatgagacaagatttcatagaaggggctacaaaagaggatatggagcttgaggacgactgggagaagtccgtcgcggacctcatgcgcaaaaaacagggtctaccggcgctcgaggcttatcaatgggcgaaaccggatagcaaggtccggtggaaactgctttccagaaaaacgcagatcgaaaaggaaaacgagtggatagacgagaacgacgctggccccggcatgggacaggacgacaggagttttgcgtggactctgcacgaacacggtgtgcagtacatcaacgagaagctctggatacagcgggagcaaaacattgctatggctgaagcgatgaggaagttgatcattgaagagaagaaacttgcaggcgaagagcgcaaggaaaacaggaggaacaagtatattgaggggaaaaagctgtggcaggcgaagatgaaggcgaagcatggtgataggtggtacatcgtggcgaacgagaatagaagaaagagggaggtggagcaggaaaagaagcaaaagattatcaacgcgcgacatggccggaagatgcaaaagctccacgcttggatgaaggagaaggaggaggcgaaggtccgcagggaatattggacaaaggtgaaggccgaaagagcgaaggagtgggaggcacgcaggcaggccaaaggagtgaggataaagcagcagcgtaagctaaggctctggcgagacaaaatgaagaaagatggtagtctcggatggaagcctatgccggctgataagccgtctattacgatttcgccttctatacagccatcccgggagaagtcacgacaggagagacaagattctgcaacagggaaatcgctcccagataagtccaaacaggataaacccagccaaccagcaatcgaagacccaaaccctctccaccgcaaactcaccaaagaagaaagagcagcagcataccagcagcgcctaaaagacgacgcaaacagaaaagccctcagaatccaagagcgggacacccaaaaacgccaagccgagcgaacactcctcgagcgcaagaagtccggtgaagaaatcaccgatccggtacttatcaaggccgcgagaagactcgaacacgaaaaatcgaccgcaaatgggatgacgaagatagaaggagtgaaagaagagaaggtaaaaaaacatcttgcgctccttgaacagcatcagaaggaaaaggctcggaggccacgatatatgtcggaaggagagaaagtgcaaagacatgcggcgttgttgagagagcatgcgagagtcaaggaggagagtaaggcaagaagacgcgcaaaccatgaagagcgtagagagaggattcagttggaggaggaacgcgccatgaaacaggggactccgtcaatggagggttctcctaaacatggcaagctcggtgtctcttggtcttctccggcgattctaaaacatcccaagactccgaagccaaagcacgatattagcgatctctcaccaacgttcccaatcccaagtcaaccaagcacaaaaaacaaacaaaacacgaagccgaagtaaacccccacaagcaagtccgggcgcagaaacaagccgaaaaggaaccagaaaacgttcgtagaatactggagggtaagagagccctgcctccagatgcaccggttccaaagcatagagttgcgaagatggagaggatcaaggaacatatggtgaaggatgcgaagagacttagtcctgaggataagaagaagagggatgaggaacggaggaaggtctgggaggagaagatgaggatgttgcatggcgaggggtggagggatgtcatggttaggactagggggaaggccggtgctaggacgtgatttgggtctcgtggttggtggtgagaagggtcggagtgcgtcgggagtgagttgtatgatttgttgtgttggttgtattatatttgtgaggtttgggataccccgttgctgtaccatatgtacaatattagaatctcaaaaaggcgattattgtattgaatacatgtcacaacctttggttggacgaacattgacgggtggcccatcattggtatgaacaatattgcgcaagcgcagatacggggccaggacaatttgctggtttgtatttattcccaacaacagccaaaatcacgtagaaagaacgctcgctaatctatcctatatggaaacacagtcctgtttatcccgaaaagtatatcctccattttccaaaaagcattcttcgagatttggcattgttcgcatttgaaagccccacttttgagtccaatctatccattctaattattggtgtttgtcttctactcaggtttgacagagtctagaagagcaggtatgatatcttctttcctgaaagccgggccacggcctatgcatgtcgccttccggaggagtcctgctcagcggtcagtctgaaagaaatggcacattatagaaataaaaatcgaggacgtcttacgctcttggaacttctccgtgctaaaccaaactctcctaccacccgacgtactattcatgacgttcgggaagtggtactgcgaggtatcaggaaagccggtgttatcaaatgctaatatggaagacagcgcagctgctgtcgtatgatggattccgaacaggtctgcagaagctgtccagggatcctgtgctgctgttacagaaagttggagaggctcggcgctcgctggggtggtgtagagagccggtctttgaagttcgtgcggagaaaggtcggatggggcttgggagaagaggttgtggtggttgagagtagtgtttgtttcagtaggtctataggattggtcttgatgggacgccagtctcagcggtaattccatccagccttcgtggtcagggagaagaatttcttcggagaggagatatttctcgacttcgtaagagtcataccactcgccttgccagccgggtaagtcggtgcgctgcagtttgtcgagtaaatgatctcggacatgcgtctttcgctcgtcgaaaggtcccatactcattccgtgttcgttgaacgacgagtatgacgacgccgtatccttcgggaaatgcgtcccagccccgccgagcgaatgaaaaggctcgttataagcgttgagatcctcacccagcccacggtttaaagttcggttcaatcgctcccggatcttatcaattgtgtcgtagttttgcacgaaaccgaacacttggaacatgagcttgggaggcgggttgtccatgttgatgagtctggcggcgctttcggtcgctcgacggtgaaggcgccgggcgaaggtaaagtccatatatgcagttgttgagggcggcggaagcgtagtatagttaagtgagacgaaatcctgcgttgggttcatcatagacatactactaaaactcgcgttgtcgagagttggcgcgacgaccatcgtgtagcctccgaagctgtcctcgacggatgaagaagaatcatgtctttgacctgatgtagacgttgtttgataatctggttcgtgggtaactcttagtccgtagagaagttcctgaggttgtgttgggtcttctgctggctttttgaggtcttctgattcggtgatcgggtttgcagtgctcagcgactcggtttgggtatcgttcactttcgtttctgaagtggcttcgtcacttttcggactgttaggttctgaaacacgcgaggataatagtgtttggaactgttccagacgctgtgcgagttcaggtgccaaattatgggccccatgctcgtgcacatagtccagaagtaacttcttatagctatccttgatctcagtgttaacggcttgaagtcctgcgactttggcttcgagatggctgatagcgttttcttttcgctcccggtacgctctttgcgcaacacgtatttggagttttcttcgctattgctctctcgtcaattccgatgccgtaaatacaatgagggtgagatgcgtgagcacctagtccgaacccttacctcctttaagtctacatcttctgtagattccaagcgtggacgtcccctagctctctttgtctcctcctctgcttcaggcctatcctggatgggttttcttcctcgtttcttgggatttagcgagcctctcgatgactcgggttcatttctttcatcattcaaatgctttaaccgtttcgaatagcgtccatcatcgtatacttccgcgctaaggacatccaaatgccctccgacgtacctcatgtctgtctgcggcacgggtgcgcaagctgtgaaatcagttgtggcgcccaaaagatctggttgttgcgattgctgtgtcagtgtctcgggatgaggatcccaagctacttgctgagataagactggcgcaggtggagcgtgaacgttgatttcttggcgctcctggggaaaatggggttggggttggggattgttgaacaagagaggagcatataatgatggattgaagttgaaagtgggtcgaggaactgatgaggacaggggaaaatcagtttgctgttggatggaattggcaaactgtatagtctcttccgttagaggtgtttgcagcgtgtcgacatgggtatgaatggaatcatggtgggaatgcttattaatgacgggatttgcgacattggtatctgcagggtctgacatagtgttgcaagccggcggatgcttaaagtgtcagcacatctcgcgagatgtctttgactcagtgatgccacttaatccgtttttcattggccatctccaaactcatcaatcatggatgtatttcatcccatgagtcggaacgcccgatgttcctcgaatctcaacaacatgcgggagtcttgccagagcccctgataactatcatgaacaggcgcgtcaacactactcttcaatatctaatagttgcagcgacgccaatgcgatctagtgatgtttgaaggttgagtggcgcaggaagtggtgggtcgactttggtagaaaccgttagtcgcgttctgctcagactcctagtacaatccagtgtcttgaaccccgagaccaaattgccaacacggaactatcacctcgctccggccttgccaccatcgatgaggcaccggtcggcctatctcaaatgtggcggcaatgaaaggccgtctccacgacagccttcaattcatccacgcgatggagagcgggtaacgccgccgaaatgcggatcccgaagagcagcgtaccgtgggtgggttgtgggtggtcgtctcggttgtgaggaaggttccgtttcgagcgggaagtgaagaatgattagtgaacattttttggcccagattggggactgggacctcaatgctaataattgttgagagctggcattgcgtcagactcccttacgtgagctgctttataactacattgcatttgcatgcattcggtacggtttttctaatcctggttggtgcaaaacttcagcgctcccgggccggggtgtccaaaaacactagcatgcagacgcccaacaaggaacaggcccccttccgatatttgcttttcctcgtcgatgtgtgcaacgcgtgcaacccggggctctgttgcctgccaacaatgatgtatgccaagagagttcagaagcctcactgaaagccacttacgctcaatcaattaaaaaaagagatattcgaggctactacatatcacttctacaaagtatgcaatggtgatttcgcgatgcgcattacaacattgatcccactggatctcatcgtatcgtgtgagggaatgtcctccatcattcgctctgccgcttgtggtccatgcttccccaagaagtcgagactcctcatccaattcagcttctcggaagatgaagggagccctacggccgcgcacaagaccacag

SEQ ID NO: 35847 - DNA, 429 bp, Muscodor strobelii
  misc_feature: SGI cDNA ID NO. 572418
  misc_feature: Encodes the peptide sequence at SEQ ID NO 35848
atgagcgccaaagtcccgcgcaactttcgtctcctggaggagctggagaagggcgagaagggccaaggtgcagaggcatgttcctacggtctcgacaaccccgatgacctcctcatgtccgactggaacggcaccattcttggccctcctcacagcgtccatgagaaccgcatctactcggtcaagatgcactgcggcgagaactaccccgacgtgcccccgaccatccagttcatcagccaggtcaatatcccctgcgtcaaccagagaaacggcgtcgtcgacccgagacagctgccctgcctggccaactggaagcgcgagaacaccatggagaccattctgatcgagctccgacgctacatggcttcaagtgcttgcaagaagctgccccagccacctgagggttcagtattccctggtaactag

SEQ ID NO: 35848 - protein, 142 aa, Muscodor strobelii
  misc_feature: SGI Peptide ID NO. 572418
  misc_feature (10)..(140): Pfam Id: PF00179 Pfam Desc: Ubiquitin-conjugating enzyme
  misc_feature (10)..(118): Pfam Id: PF00179 Pfam Desc: Ubiquitin-conjugating enzyme
  misc_feature (1)..(139): NCBI GI: 256727716 Blast Desc: NECHADRAFT_66787 [Nectria haematococca mpVI 77-13-4]
  misc_feature (1)..(139): NCBI GI: 261361524 Blast Desc: ubiquitin-conjugating enzyme variant MMS2 [Verticillium albo-atrum VaMs.102]
  misc_feature (1)..(139): NCBI GI: 169608153 Blast Desc: SNOG_07144 [Phaeosphaeria nodorum SN15] gi|160701576|gb|EAT85795.2| SNOG_07144 [Phaeosphaeria nodorum SN15]
  misc_feature (1)..(139): NCBI GI: 189189636 Blast Desc: ubiquitin-conjugating enzyme E2 variant 2 [Pyrenophora tritici-repentis Pt-1C-BFP] gi|187972763|gb|EDU40262.1| ubiquitin-conjugating enzyme E2 variant 2 [Pyrenophora Pt-1C-BFP]
  misc_feature (1)..(139): NCBI GI: 70993552 Blast Desc: ubiquitin conjugating enzyme (MmsB) [Aspergillus fumigatus Af293] gi|66849257|gb|EAL89585.1| ubiquitin conjugating enzyme (MmsB), [Aspergillus fumigatus Af293] ubiquitin enzyme
  misc_feature (1)..(139): NCBI GI: 169771281 Blast Desc: [Aspergillus oryzae RIB40] gi|238486176|ref|XP_002374326.1| ubiquitin conjugating enzyme (MmsB), [Aspergillus flavus NRRL3357] gi|83767969|dbj|BAE58108.1|
  misc_feature (1)..(139): NCBI GI: 145229701 Blast Desc: An01g07350 [Aspergillus niger] gi|134055268|emb|CAK43854.1| protein product [Aspergillus niger]
  misc_feature (1)..(139): NCBI GI: 121708217 Blast Desc: ubiquitin-conjugating enzyme [Aspergillus clavatus NRRL 1] gi|119400211|gb|EAW10637.1| ubiquitin-conjugating enzyme [Aspergillus clavatus NRRL 1]
  misc_feature (1)..(139): NCBI GI: 240105276 Blast Desc: ubiquitin-conjugating enzyme spm2, [Coccidioides posadasii C735 delta SOWgp]
  misc_feature (2)..(139): NCBI GI: 67526373 Blast Desc: AN3644.2 [Aspergillus nidulans FGSC A4] gi|40740662|gb|EAA59852.1| AN3644.2 [Aspergillus nidulans FGSC A4] gi|259481825|tpe|CBF75708.1| TPA: protein involved in DNA A4]
MSAKVPRNFRLLEELEKGEKGQGAEACSYGLDNPDDLLMSDWNGTILGPPHSVHENRIYSVKMHCGENYPDVPPTIQFISQVNIPCVNQRNGVVDPRQLPCLANWKRENTMETILIELRRYMASSACKKLPQPPEGSVFPGN

SEQ ID NO: 35849 - DNA, 1130 bp, Muscodor strobelii
  misc_feature: SGI EST ID NO. CUFF.85303.0
  misc_feature: Variant of the nucleotide sequence at SEQ ID NO 35847
ttacaggtgcttgtaagcaggtaccccgagcctaaggtagtcaaccccaccatcccaccttgtagcctctggttaccatcgtctgaccccatcaggcatgttccaaacatcttgaaactgtattttctttgcgaccgtacctaatcctatctcaacttgcggctttcgccgaacttatcagacggcattgtggtcacattccagcttgcttcttgctgtccaccttgcgtcaagtgccgtcacgccatcccatacattgcccgcccaacttggacactcgagcagcgtcttgttccactagcactcacggacacgcgatcctcggcccatcatgagcgccaaagtcccgcgcaactttcgtctcctggaggagctggagaagggcgagaagggccaaggtgcagaggcatgttcctacggtctcgacaaccccgatgacctcctcatgtccgactggaacggcaccattcttggccctcctcacagcgtccatgagaaccgcatctactcggtcaagatgcactgcggcgagaactaccccgacgtgcccccgaccatccagttcatcagccaggtcaatatcccctgcgtcaaccagagaaacggcgtcgtcgacccgagacagctgccctgcctggccaactggaagcgcgagaacaccatggagaccattctgatcgagctccgacgctacatggcttcaagtgcttgcaagaagctgccccagccacctgagggttcagtattccctggtaactaggtggactgcagtggagaagagaagaacactaacgagaaacgattcacggccagagatgcaagggggatcgttgggttcacatgagaaggacagaggaggagagactgtgttcaacaggaatgcatcccttactctttcacaattgtagcaagaaatgatgtaggtagggaacttatctaccgatgacatctaaaccaatgcgatatcttcgtgtccagaacatacaaacagcgccacacaccatgtgccgagtcctgtatcatgatgtgatgttctcttacccggctttgtatgtcgttgaaatggccgaggagactgtttgaatgattgccttcatcttatttgtagacctgtaatgttttgttgcgac

SEQ ID NO: 35850 - DNA, 1419 bp, Muscodor strobelii
  misc_feature: SGI cDNA ID NO. 572419
  misc_feature: Reduced expression when VOC is produced
  misc_feature: Encodes the peptide sequence at SEQ ID NO 35851
atggagaaacctgccgacaaccaaaactgtctcttggcatatgtagctgcgctccgtgacgtttacaggcttattcaggatgatctaacagctgagtgcattggccgcatgctcacactgttgcgcgaagtcatgcaactcgccacacccggtgccttcattgccgacattgaccatgcaacacctttgcagagtcaagtgctggacgtcctgaaaatgctgcgaaccgacatacccggagcgccgtcagctttgatcacccagacatccgaattcatttctctagcttttgttgatggcagtaaggaagccagtcaacgcagttcgcagaagcgtacttatgttgcgatgtccaagctgagcatggtgatattgcaatctcttatcgagtcgcatgctatggatacagacatttacaacaatggtgctttattgaccgctctgtcggctttggccaagcccatcgtactgaaatatcaatttcccataattgccaaatcagagcagccatggaagcaggcgactaaatctgccatcggaatcttgcgagccactctccgccaactaatctctctagatcctccgcgaaccatgctgcaggacatctggcacataattgtcacgatcgcaaatggtattacagatgcagattgtgaaggggctcccgacaagattaacatcgctgaagatgaggaattcgacatcgagtcgtttggtcagttgcgagagttgatcattccatatctgggagctcaggtcatccccgacaggacgcgaaagttgttcgccgaaagcctattccggatgtctatcattcatacccctacacctgctgagctctcagtcatcagtggtggtgatgctatgggactttccaatctctacaaagtccgtcggggccagactatagaccctgctccttcgaggcgtgccaaaacctcgtacgtctgtctagatgagctcttcgctcttgttgccagtcaagatgagaattctgcgacacgcattgccgtccagccaccagaagggcaacctccattgataggaagccccgcgtccgagaatattcacgagctcagagttagactcgcgagaaccaccgctccatacctgattctccgagctgccttgacactgcgtgcgtatgtagctgatcagcccctacggggccggatgccgcaaccgctcagtcaacgcaaagagttagcgcgcatcttggaacggcttgtgggcttgaagagtgagcctgatgctataccggatacgccgaatgtggagagtgagagtaggaagcacttgcttcggctttatcccctagttgttaaggcttcgagcgtggccggaacgagtggcgatgagaaggtcgcgaagcttttaacgaaggcgcttgaggttgtggggagtgagttgggcgtataa

SEQ ID NO: 35851 - protein, 472 aa, Muscodor strobelii
  misc_feature: SGI Peptide ID NO. 572419
  misc_feature (2)..(472): NCBI GI: 171682618 Blast Desc: protein product [Podospora anserina] gi|170941268|emb|CAP66918.1| protein product [Podospora anserina]
  misc_feature (2)..(472): NCBI GI: 164425503 Blast Desc: NCU05634 [Neurospora crassa OR74A] gi|157070950|gb|EAA30877.2| conserved [Neurospora crassa OR74A]
  misc_feature (2)..(472): NCBI GI: 116202845 Blast Desc: CHGG_09307 [Chaetomium globosum CBS 148.51] gi|88177825|gb|EAQ85293.1| CHGG_09307 [Chaetomium globosum CBS 148.51]
  misc_feature (3)..(472): NCBI GI: 256727714 Blast Desc: NECHADRAFT_58535 [Nectria haematococca mpVI 77-13-4]
  misc_feature (6)..(471): NCBI GI: 261361525 Blast Desc: conserved [Verticillium albo-atrum VaMs.102]
  misc_feature (5)..(472): NCBI GI: 145604803 Blast Desc: MGG_07913 [Magnaporthe grisea 70-15] gi|145012727|gb|EDJ97381.1| MGG_07913 [Magnaporthe grisea 70-15]
  misc_feature (6)..(472): NCBI GI: 156058005 Blast Desc: SS1G_04734 [Sclerotinia sclerotiorum 1980] gi|154702519|gb|EDO02258.1| SS1G_04734 [Sclerotinia sclerotiorum 1980]
  misc_feature (1)..(472): NCBI GI: 154323270 Blast Desc: BC1G_00034 [Botryotinia fuckeliana B05.10] gi|150842263|gb|EDN17456.1| BC1G_00034 [Botryotinia fuckeliana B05.10]
  misc_feature (1)..(472): NCBI GI: 169608151 Blast Desc: SNOG_07143 [Phaeosphaeria nodorum SN15] gi|160701575|gb|EAT85794.2| SNOG_07143 [Phaeosphaeria nodorum SN15]
  misc_feature (7)..(466): NCBI GI: 242768841 Blast Desc: endosomal peripheral membrane protein (Mon2), [Talaromyces stipitatus ATCC 10500] gi|218724845|gb|EED24262.1| endosomal peripheral membrane protein (Mon2), [Talaromyces ATCC
  misc_feature: Useful for introducing or modulating the production of volatile compounds
MEKPADNQNCLLAYVAALRDVYRLIQDDLTAECIGRMLTLLREVMQLATPGAFIADIDHATPLQSQVLDVLKMLRTDIPGAPSALITQTSEFISLAFVDGSKEASQRSSQKRTYVAMSKLSMVILQSLIESHAMDTDIYNNGALLTALSALAKPIVLKYQFPIIAKSEQPWKQATKSAIGILRATLRQLISLDPPRTMLQDIWHIIVTIANGITDADCEGAPDKINIAEDEEFDIESFGQLRELIIPYLGAQVIPDRTRKLFAESLFRMSIIHTPTPAELSVISGGDAMGLSNLYKVRRGQTIDPAPSRRAKTSYVCLDELFALVASQDENSATRIAVQPPEGQPPLIGSPASENIHELRVRLARTTAPYLILRAALTLRAYVADQPLRGRMPQPLSQRKELARILERLVGLKSEPDAIPDTPNVESESRKHLLRLYPLVVKASSVAGTSGDEKVAKLLTKALEVVGSELGV

SEQ ID NO: 35852 - DNA, 6904 bp, Muscodor strobelii
  misc_feature: SGI EST ID NO. CUFF.85655.0
  misc_feature: Variant of the nucleotide sequence at SEQ ID NO 35850
gtaaacttcgtgaaccccttcgtcgtagcttgtcagaccaagaacgcaaagtttacaggtattgccatcgtttgcttgtcgcgtttaatcctcgtgagcgccttgccatggtccaaactaagccccgtcctcgaagctctgcgtgaagcgacgtcggccggcctggacgtgcagctcaagattttgcaggcattgcccacgttgctacagaactatgcaagtgatatcaaaggcgacttgctcgtcaccgccctcaatatctgtttcattctacagtcaagtaaaaatggcgtcgtcaacaatacttcggctgctactttgtcgcaacttatcatgaccgtctttgaaaaggtcgcagcagaagatagtacgccttcatctcacattatgaagcgtgcacgtgtactgatatcactcagagtccacatcagacagccctcccgtgggcgaagcgtctataggtgaaggtcgagtcgttaaacttcgcactgctgccatggacgcgcatcgggtctttaaagatatctgcctgatgaccgagaatcaaagacctgaatatcttcgctttaccggtctcccccagacatttggccttgaactgatagagtcggtcttgagtcagcatgcttccctcttcctagctcatcccgaacaagcctacattcttcgtgccagagtcatgccctttatgattgaagcactgtccgggaagcctaattttgctacgtctgtaaggctagctcgtattttgtacacgttgctgaagaagcatctcgacattttgccgtcagaaggcgccaatgctctggacgccttgactcaattgttagaccaagatactcagacatggagacgagctctatgcatggaggtgttcagaggtatattcgccgaacctagtctactaagacgcattttcaccttgtatgatgccaaggagggtgaaaagaatgttctcaagaacctcacagctactttcgtgcgagtgagtaccgagaaacctgcagtcatcgggcttgggcatcaatcaacgatacccgtagcggatccttatgcgagtatgggaacatcatcggaccaagccatgctcgagtccagcggtgtcacgggaatcattggaggctcggtgaacaacgaggcacataacactggtatcagttcccaatggagtaccatcagagttgcttgcatagatcaactcgataaaacagagccgccgcccatccccgaatcctacgtatacgcacttactctatcatgtatcacctctctatcggaaggcttagccaaattcatactccccctcacagtgcctagtgacggtcgctcgcgtaagaaaggcttcaaacagggtgattccagcagggattcggtcgcaacaggagaaacggggagtgctgaggatcccaaactaggtatcgaaagaagcatttctactacggctttagagcgctctgcctcgttcaagaagaatccggtgccagttaacccgttgtccctgaaagatcatcctctccacgctgatgtccagacatgtgccaacattattgacgattgctggcctgccatattagcaacatgctcgacctttctgtcagctgcgcttgattcagaatactatcatggtcttgtccgagcattccaaaagttcgctcacgttgcaggattactgcagcttacgacaccgcgagacgcttttttgacaacgttaggcaaagccgctgtgcctccgaacatcttcactgcttgcctgaattctggctcctcaaaaccagttccggctagtcctatgccagagaccccgaacagcatcttaagtaacgcaagaggtttacttagtgtagagaatttggtaacaccagtgggtgcagctggcgaccgacagagacaggcttcgatagacgcaaatactgttcaacaggcattgaacacgcgaaatttgttatgtctaagggcgcttttgaacttgggcattgctcttgggcccacactgagctcgtcatggtctataattctggagacgttgcaacaagcagactttattctattttccaatggcaaagtgcccgggaagacgccgatcgttgctaaagtcgcagactctcgagccgagaacgaggctgcgtcgttactagctaactttggctcagagataagatccgttgagacagctgcggctagattgctggaaagcactgtcgactttcctaatgacgcttttgtggaaattgttgcatctgcttgcaacctcttggatcaacaacctctcccagaatccgaaccaccgagccgacctctgtcaccgttggcaccacccacgcccgggctacgagctccaagcggccagcacaggagactccctggtgccgtgccaacacttccctctggcccaagtcaagaggaccaattcgcactcgccaagatcggcgatcttgcgagtattaatcttgacaggctattgttttatgcacctactgtttcaggctgggatcgtatcacgactgagctcattcgaacactgagctccagctctctagctgcacctgttcgaagtcgcgcagcagatatcttggtgagactaattctagatgctgccaagactatagcgaaccagaacgacgagacgagagccaaagttcagcttcgaatctttgaagctcttcgtgcctcgcttgttcctctacaaactgaaaatcgagtcgcttcagtaaccacatactcgacagacgtcgatatacataggatcatactcgaaggattgaagagtctcgtggaagacactggtgatgcacttttaagtggctggaatatcatattcgaaattattggcacaatattcatcccaccaagatttgatgccgatagtgcgtctgactcgcaaaccaagattcaagtgctcacaacgaggtccccaaagctgattcgatctgcctttagctccttgcaactcgtttgctccgatttcctgaccagtttaccaaaatcatgtttccttagtctcgttgataccctgtataacttttgctcacaagatgatgatttgaacattgcattgactaccgtcacgttcttctgggacctgtcgaatttcctgtccggcaccaacaacaaccttttacccattaccagctctcttgtccctaatttcgacgatgcatcacttgccgaaaaggcttcgcatgctgagaacgcatcttcggatgcggctttgtggatgctgcttttaatccgactcacgacagtcgcaactaatgatagactggatcttcgaaacagtgctatccaaaccctcttaagaattttcgatgcttacggggaccgactaagtcccgaagcgtggtcgatatgtatcaaggcagtgattttccggctactatcatctgtggaatcggagctcggagcgttgaaagaccctgacgtggacgaaaaattccgccgcgactggcacgataccaccgttgttgtcctaggcgggatatcaaatctgtgtgccaactatctcgacgtacttacggcacatccaactttcaattcatactggcagcagcttttgggtcattttgagacattactcgatttccaagtgcttgagatcaatacggctacattcaaagcattgacacagatgctttcacacagtcaacatgggtcacaacagaacttcaataagacaaccattgacctcgcatgggacctgtgggcgcgcggagttcccgtcgcagatactgacaccatggagaaacctgccgacaaccaaaactgtctcttggcatatgtagctgcgctccgtgacgtttacaggcttattcaggatgatctaacagctgagtgcattggccgcatgctcacactgttgcgcgaagtcatgcaactcgccacacccggtgccttcattgccgacattgaccatgcaacacctttgcagagtcaagtgctggacgtcctgaaaatgctgcgaaccgacatacccggagcgccgtcagctttgatcacccagacatccgaattcatttctctagcttttgttgatggcagtaaggaagccagtcaacgcagttcgcagaagcgtacttatgttgcgatgtccaagctgagcatggtgatattgcaatctcttatcgagtcgcatgctatggatacagacatttacaacaatggtgctttattgaccgctctgtcggctttggccaagcccatcgtactgaaatatcaatttcccataattgccaaatcagagcagccatggaagcaggcgactaaatctgccatcggaatcttgcgagccactctccgccaactaatctctctagatcctccgcgaaccatgctgcaggacatctggcacataattgtcacgatcgcaaatggtattacagatgcagattgtgaaggggctcccgacaagattaacatcgctgaagatgaggaattcgacatcgagtcgtttggtcagttgcgagagttgatcattccatatctgggagctcaggtcatccccgacaggacgcgaaagttgttcgccgaaagcctattccggatgtctatcattcatacccctacacctgctgagctctcagtcatcagtggtggtgatgctatgggactttccaatctctacaaagtccgtcggggccagactatagaccctgctccttcgaggcgtgccaaaacctcgtacgtctgtctagatgagctcttcgctcttgttgccagtcaagatgagaattctgcgacacgcattgccgtccagccaccagaagggcaacctccattgataggaagccccgcgtccgagaatattcacgagctcagagttagactcgcgagaaccaccgctccatacctgattctccgagctgccttgacactgcgtgcgtatgtagctgatcagcccctacggggccggatgccgcaaccgctcagtcaacgcaaagagttagcgcgcatcttggaacggcttgtgggcttgaagagtgagcctgatgctataccggatacgccgaatgtggagagtgagagtaggaagcacttgcttcggctttatcccctagttgttaaggcttcgagcgtggccggaacgagtggcgatgagaaggtcgcgaagcttttaacgaaggcgcttgaggttgtggggagtgagttgggcgtataaatagctacgcagaagaaacatatagacaacagatgattgtgggtattcgaaataaaccaatggcgttaggattatggaagatccggcgcccgatcacctaatgcacgacctgttactcaattcgtgccgcctcattcttgaatatttcatatgccatcccctgctggactataatgatctcgctatcgccagtggcgtgataaaaaccagtcttcaatgccatagcttcggtacacactctcaggctgttgtctgagactgacgagagcaccaatcatgaggtatgtccgagaaatgacgcacagtggcaccaaaattccccttgcgaccactctcgaaatgccataatactccaatttcggacctgggattggtgctgttgacgtacccgacattgcgggtgtttcttgtcgcatgtcttgagaacattgttcttggaatgaggtaggactcagatacttggcccattcatttgcgtcagacgggaaaatcaaaacttcaaaagcccagagcatgaatgtggcacccatagcaatcgagctcatgactctccaccccgaaccttctatctccgtcgggaacgttgcattccatgcggcgagatgacaggccgcgtatcccttgctgatgatgaagaacagtactttgtcgatagtgccaatgtcgggatacgtatcgtcagagaggcgcataagcggtctcccatcatcatgctggaacagatcaaagaaccgtgatgttgtaggtcgctggtcgcgcagtgagcttacgtggtgtcggaaaagctttgtcgcagtttggtcgttgcttgataagatctggctcagagacgacttgatactgattttgcagctttgacgaacgtcgttaggcttttggagccagcaaatcatgtttcctagagaacaaaaggcaagaccacccgcgaatatctcgagtgcagtcatgggaaccccagcaatgatccggcccacaaggagacacgcaaatcgtgcgacctgcaagatcgcgaaccacttagcgtagagatcgactttggacttatcccatatctcgtcggccgtgatcttcggacactctatgtaccggttctgcactagaaaagcaagttgggcactatcaacaacaaagggttcaccgtctccttccggttgcagcagaaacccgcccatatcggtgaaaaaggcatggcgcagcgtccaatgcgagtgaccgaggtcgtggaaattctggaccgatcgcctcgcagatgcgtactggccgaacgcgatcgacaagacaaactccggtacgcagaccccccataccatccaaagcgcctttcttgacaagattttgaattcgttatcttgcggatgcgggatgttcagacataactttgaccaggtacagagaaagatgatcgaagcacaggacagaatgatgtccatggagcctctcgtcgccgggccaggaacccatccctatatgaatgaatacgtgatatctgatagaccatggccgtccgaggaagcagcctactcactatacttcgtgtcagctaggagacatcaggcatcggtagttattcaagcatacgcaccttcgatcatcttcgtcccgtctccattagtagagttcatctcgtgctcgtagcatcacccgtaggaaaaagatatgttgtcagaatgaggtagcagaaaattagcgacgagaagtgaaatggatgatcttggtgatgtcgtcatgaatggatgccgctgtaggttcagg

SEQ ID NO: 35853 - DNA, 5259 bp, Muscodor strobelii
  misc_feature: SGI cDNA ID NO. 572420
  misc_feature: Encodes the peptide sequence at SEQ ID NO 35854
atgacctctcagctgcttgctactgagcttgccaatctcatccaggagagcaaacgcaagcacaatgacctcagacaggccgccgagaaatctctcgatgagctgaaaagcatccgtagtgctagtgaagcccagctggccgctgaactggcccaaagagtaaacttcgtgaaccccttcgtcgtagcttgtcagaccaagaacgcaaagtttacaggtattgccatcgtttgcttgtcgcgtttaatcctcgtgagcgccttgccatggtccaaactaagccccgtcctcgaagctctgcgtgaagcgacgtcggccggcctggacgtgcagctcaagattttgcaggcattgcccacgttgctacagaactatgcaagtgatatcaaaggcgacttgctcgtcaccgccctcaatatctgtttcattctacagtcaagtaaaaatggcgtcgtcaacaatacttcggctgctactttgtcgcaacttatcatgaccgtctttgaaaaggtcgcagcagaagataagtccacatcagacagccctcccgtgggcgaagcgtctataggtgaaggtcgagtcgttaaacttcgcactgctgccatggacgcgcatcgggtctttaaagatatctgcctgatgaccgagaatcaaagacctgaatatcttcgctttaccggtctcccccagacatttggccttgaactgatagagtcggtcttgagtcagcatgcttccctcttcctagctcatcccgaacaagcctacattcttcgtgccagagtcatgccctttatgattgaagcactgtccgggaagcctaattttgctacgtctgtaaggctagctcgtattttgtacacgttgctgaagaagcatctcgacattttgccgtcagaaggcgccaatgctctggacgccttgactcaattgttagaccaagatactcagacatggagacgagctctatgcatggaggtgttcagaggtatattcgccgaacctagtctactaagacgcattttcaccttgtatgatgccaaggagggtgaaaagaatgttctcaagaacctcacagctactttcgtgcgagtgagtaccgagaaacctgcagtcatcgggcttgggcatcaatcaacgatacccgtagcggatccttatgcgagtatgggaacatcatcggaccaagccatgctcgagtccagcggtgtcacgggaatcattggaggctcggtgaacaacgaggcacataacactggtatcagttcccaatggagtaccatcagagttgcttgcatagatcaactcgataaaacagagccgccgcccatccccgaatcctacgtatacgcacttactctatcatgtatcacctctctatcggaaggcttagccaaattcatactccccctcacagtgcctagtgacggtcgctcgcgtaagaaaggcttcaaacagggtgattccagcagggattcggtcgcaacaggagaaacggggagtgctgaggatcccaaactaggtatcgaaagaagcatttctactacggctttagagcgctctgcctcgttcaagaagaatccggtgccagttaacccgttgtccctgaaagatcatcctctccacgctgatgtccagacatgtgccaacattattgacgattgctggcctgccatattagcaacatgctcgacctttctgtcagctgcgcttgattcagaatactatcatggtcttgtccgagcattccaaaagttcgctcacgttgcaggattactgcagcttacgacaccgcgagacgcttttttgacaacgttaggcaaagccgctgtgcctccgaacatcttcactgcttgcctgaattctggctcctcaaaaccagttccggctagtcctatgccagagaccccgaacagcatcttaagtaacgcaagaggtttacttagtgtagagaatttggtaacaccagtgggtgcagctggcgaccgacagagacaggcttcgatagacgcaaatactgttcaacaggcattgaacacgcgaaatttgttatgtctaagggcgcttttgaacttgggcattgctcttgggcccacactgagctcgtcatggtctataattctggagacgttgcaacaagcagactttattctattttccaatggcaaagtgcccgggaagacgccgatcgttgctaaagtcgcagactctcgagccgagaacgaggctgcgtcgttactagctaactttggctcagagataagatccgttgagacagctgcggctagattgctggaaagcactgtcgactttcctaatgacgcttttgtggaaattgttgcatctgcttgcaacctcttggatcaacaacctctcccagaatccgaaccaccgagccgacctctgtcaccgttggcaccacccacgcccgggctacgagctccaagcggccagcacaggagactccctggtgccgtgccaacacttccctctggcccaagtcaagaggaccaattcgcactcgccaagatcggcgatcttgcgagtattaatcttgacaggctattgttttatgcacctactgtttcaggctgggatcgtatcacgactgagctcattcgaacactgagctccagctctctagctgcacctgttcgaagtcgcgcagcagatatcttggtgagactaattctagatgctgccaagactatagcgaaccagaacgacgagacgagagccaaagttcagcttcgaatctttgaagctcttcgtgcctcgcttgttcctctacaaactgaaaatcgagtcgcttcagtaaccacatactcgacagacgtcgatatacataggatcatactcgaaggattgaagagtctcgtggaagacactggtgatgcacttttaagtggctggaatatcatattcgaaattattggcacaatattcatcccaccaagatttgatgccgatagtgcgtctgactcgcaaaccaagattcaagtgctcacaacgaggtccccaaagctgattcgatctgcctttagctccttgcaactcgtttgctccgatttcctgaccagtttaccaaaatcatgtttccttagtctcgttgataccctgtataacttttgctcacaagatgatgatttgaacattgcattgactaccgtcacgttcttctgggacctgtcgaatttcctgtccggcaccaacaacaaccttttacccattaccagctctcttgtccctaatttcgacgatgcatcacttgccgaaaaggcttcgcatgctgagaacgcatcttcggatgcggctttgtggatgctgcttttaatccgactcacgacagtcgcaactaatgatagactggatcttcgaaacagtgctatccaaaccctcttaagaattttcgatgcttacggggaccgactaagtcccgaagcgtggtcgatatgtatcaaggcagtgattttccggctactatcatctgtggaatcggagctcggagcgttgaaagaccctgacgtggacgaaaaattccgccgcgactggcacgataccaccgttgttgtcctaggcgggatatcaaatctgtgtgccaactatctcgacgtacttacggcacatccaactttcaattcatactggcagcagcttttgggtcattttgagacattactcgatttccaagtgcttgagatcaatacggctacattcaaagcattgacacagatgctttcacacagtcaacatgggtcacaacagaacttcaataagacaaccattgacctcgcatgggacctgtgggcgcgcggagttcccgtcgcagatactgacaccatggagaaacctgccgacaaccaaaactgtctcttggcatatgtagctgcgctccgtgacgtttacaggcttattcaggatgatctaacagctgagtgcattggccgcatgctcacactgttgcgcgaagtcatgcaactcgccacacccggtgccttcattgccgacattgaccatgcaacacctttgcagagtcaagtgctggacgtcctgaaaatgctgcgaaccgacatacccggagcgccgtcagctttgatcacccagacatccgaattcatttctctagcttttgttgatggcagtaaggaagccagtcaacgcagttcgcagaagcgtacttatgttgcgatgtccaagctgagcatggtgatattgcaatctcttatcgagtcgcatgctatggatacagacatttacaacaatggtgctttattgaccgctctgtcggctttggccaagcccatcgtactgaaatatcaatttcccataattgccaaatcagagcagccatggaagcaggcgactaaatctgccatcggaatcttgcgagccactctccgccaactaatctctctagatcctccgcgaaccatgctgcaggacatctggcacataattgtcacgatcgcaaatggtattacagatgcagattgtgaaggggctcccgacaagattaacatcgctgaagatgaggaattcgacatcgagtcgtttggtcagttgcgagagttgatcattccatatctgggagctcaggtcatccccgacaggacgcgaaagttgttcgccgaaagcctattccggatgtctatcattcatacccctacacctgctgagctctcagtcatcagtggtggtgatgctatgggactttccaatctctacaaagtccgtcggggccagactatagaccctgctccttcgaggcgtgccaaaacctcgtacgtctgtctagatgagctcttcgctcttgttgccagtcaagatgagaattctgcgacacgcattgccgtccagccaccagaagggcaacctccattgataggaagccccgcgtccgagaatattcacgagctcagagttagactcgcgagaaccaccgctccatacctgattctccgagctgccttgacactgcgtgcgtatgtagctgatcagcccctacggggccggatgccgcaaccgctcagtcaacgcaaagagttagcgcgcatcttggaacggcttgtgggcttgaagagtgagcctgatgctataccggatacgccgaatgtggagagtgagagtaggaagcacttgcttcggctttatcccctagttgttaaggcttcgagcgtggccggaacgagtggcgatgagaaggtcgcgaagcttttaacgaaggcgcttgaggttgtggggagtgagttgggcgtataa

SEQ ID NO: 35854 - protein, 1752 aa, Muscodor strobelii
  misc_feature: SGI Peptide ID NO. 572420
  misc_feature (1)..(1752): NCBI GI: 145604803 Blast Desc: MGG_07913 [Magnaporthe grisea 70-15] gi|145012727|gb|EDJ97381.1| MGG_07913 [Magnaporthe grisea 70-15]
  misc_feature (1)..(1751): NCBI GI: 164425503 Blast Desc: NCU05634 [Neurospora crassa OR74A] gi|157070950|gb|EAA30877.2| conserved [Neurospora crassa OR74A]
  misc_feature (1)..(1751): NCBI GI: 261361525 Blast Desc: conserved [Verticillium albo-atrum VaMs.102]
  misc_feature (88)..(1752): NCBI GI: 171682618 Blast Desc: protein product [Podospora anserina] gi|170941268|emb|CAP66918.1| protein product [Podospora anserina]
  misc_feature (1)..(1055): NCBI GI: 256727714 Blast Desc: NECHADRAFT_58535 [Nectria haematococca mpVI 77-13-4]
  misc_feature (90)..(1055): NCBI GI: 116202845 Blast Desc: CHGG_09307 [Chaetomium globosum CBS 148.51] gi|88177825|gb|EAQ85293.1| CHGG_09307 [Chaetomium globosum CBS 148.51]
  misc_feature (1)..(1055): NCBI GI: 154323272 Blast Desc: BC1G_00035 [Botryotinia fuckeliana B05.10] gi|150842264|gb|EDN17457.1| BC1G_00035 [Botryotinia fuckeliana B05.10]
  misc_feature (499)..(1752): NCBI GI: 156058005 Blast Desc: SS1G_04734 [Sclerotinia sclerotiorum 1980] gi|154702519|gb|EDO02258.1| SS1G_04734 [Sclerotinia sclerotiorum 1980]
  misc_feature (1)..(1749): NCBI GI: 121708213 Blast Desc: conserved [Aspergillus clavatus NRRL 1] gi|119400210|gb|EAW10636.1| conserved [Aspergillus clavatus NRRL 1]
  misc_feature (1)..(1747): NCBI GI: 169771283 Blast Desc: [Aspergillus oryzae RIB40] gi|83767970|dbj|BAE58109.1| protein product [Aspergillus oryzae]
MTSQLLATELANLIQESKRKHNDLRQAAEKSLDELKSIRSASEAQLAAELAQRVNFVNPFVVACQTKNAKFTGIAIVCLSRLILVSALPWSKLSPVLEALREATSAGLDVQLKILQALPTLLQNYASDIKGDLLVTALNICFILQSSKNGVVNNTSAATLSQLIMTVFEKVAAEDKSTSDSPPVGEASIGEGRVVKLRTAAMDAHRVFKDICLMTENQRPEYLRFTGLPQTFGLELIESVLSQHASLFLAHPEQAYILRARVMPFMIEALSGKPNFATSVRLARILYTLLKKHLDILPSEGANALDALTQLLDQDTQTWRRALCMEVFRGIFAEPSLLRRIFTLYDAKEGEKNVLKNLTATFVRVSTEKPAVIGLGHQSTIPVADPYASMGTSSDQAMLESSGVTGIIGGSVNNEAHNTGISSQWSTIRVACIDQLDKTEPPPIPESYVYALTLSCITSLSEGLAKFILPLTVPSDGRSRKKGFKQGDSSRDSVATGETGSAEDPKLGIERSISTTALERSASFKKNPVPVNPLSLKDHPLHADVQTCANIIDDCWPAILATCSTFLSAALDSEYYHGLVRAFQKFAHVAGLLQLTTPRDAFLTTLGKAAVPPNIFTACLNSGSSKPVPASPMPETPNSILSNARGLLSVENLVTPVGAAGDRQRQASIDANTVQQALNTRNLLCLRALLNLGIALGPTLSSSWSIILETLQQADFILFSNGKVPGKTPIVAKVADSRAENEAASLLANFGSEIRSVETAAARLLESTVDFPNDAFVEIVASACNLLDQQPLPESEPPSRPLSPLAPPTPGLRAPSGQHRRLPGAVPTLPSGPSQEDQFALAKIGDLASINLDRLLFYAPTVSGWDRITTELIRTLSSSSLAAPVRSRAADILVRLILDAAKTIANQNDETRAKVQLRIFEALRASLVPLQTENRVASVTTYSTDVDIHRIILEGLKSLVEDTGDALLSGWNIIFEIIGTIFIPPRFDADSASDSQTKIQVLTTRSPKLIRSAFSSLQLVCSDFLTSLPKSCFLSLVDTLYNFCSQDDDLNIALTTVTFFWDLSNFLSGTNNNLLPITSSLVPNFDDASLAEKASHAENASSDAALWMLLLIRLTTVATNDRLDLRNSAIQTLLRIFDAYGDRLSPEAWSICIKAVIFRLLSSVESELGALKDPDVDEKFRRDWHDTTVVVLGGISNLCANYLDVLTAHPTFNSYWQQLLGHFETLLDFQVLEINTATFKALTQMLSHSQHGSQQNFNKTTIDLAWDLWARGVPVADTDTMEKPADNQNCLLAYVAALRDVYRLIQDDLTAECIGRMLTLLREVMQLATPGAFIADIDHATPLQSQVLDVLKMLRTDIPGAPSALITQTSEFISLAFVDGSKEASQRSSQKRTYVAMSKLSMVILQSLIESHAMDTDIYNNGALLTALSALAKPIVLKYQFPIIAKSEQPWKQATKSAIGILRATLRQLISLDPPRTMLQDIWHIIVTIANGITDADCEGAPDKINIAEDEEFDIESFGQLRELIIPYLGAQVIPDRTRKLFAESLFRMSIIHTPTPAELSVISGGDAMGLSNLYKVRRGQTIDPAPSRRAKTSYVCLDELFALVASQDENSATRIAVQPPEGQPPLIGSPASENIHELRVRLARTTAPYLILRAALTLRAYVADQPLRGRMPQPLSQRKELARILERLVGLKSEPDAIPDTPNVESESRKHLLRLYPLVVKASSVAGTSGDEKVAKLLTKALEVVGSELGV

SEQ ID NO: 35855 - DNA, 6904 bp, Muscodor strobelii; identical to SEQ ID NO: 35852
  misc_feature: SGI EST ID NO. CUFF.85655.0
  misc_feature: Variant of the nucleotide sequence at SEQ ID NO 35853

SEQ ID NO: 35856 - DNA, 1248 bp, Muscodor strobelii
  misc_feature: SGI cDNA ID NO. 572421
  misc_feature: Reduced expression when VOC is produced
  misc_feature: Encodes the peptide sequence at SEQ ID NO 35857
atggacatcattctgtcctgtgcttcgatcatctttctctgtacctggtcaaagttatgtctgaacatcccgcatccgcaagataacgaattcaaaatcttgtcaagaaaggcgctttggatggtatggggggtctgcgtaccggagtttgtcttgtcgatcgcgttcggccagtacgcatctgcgaggcgatcggtccagaatttccacgacctcggtcactcgcattggacgctgcgccatgcctttttcaccgatatgggcgggtttctgctgcaaccggaaggagacggtgaaccctttgttgttgatagtgcccaacttgcttttctagtgcagaaccggtacatagagtgtccgaagatcacggccgacgagatatgggataagtccaaagtcgatctctacgctaagtggttcgcgatcttgcaggtcgcacgatttgcgtgtctccttgtgggccggatcattgctggggttcccatgactgcactcgagatattcgcgggtggtcttgccttttgttctctaggaaacatgatttgctggctccaaaagcctaacgacgttcgtcaaagctgcaaaatcagtatcaagtcgtctctgagccagatcttatcaagcaacgaccaaactgcgacaaagcttttccgacaccacgtaagctcactgcgcgaccagcgacctacaacatcacggttctttgatctgttccagcatgatgatgggagaccgcttatgcgcctctctgacgatacgtatcccgacattggcactatcgacaaagtactgttcttcatcatcagcaagggatacgcggcctgtcatctcgccgcatggaatgcaacgttcccgacggagatagaaggttcggggtggagagtcatgagctcgattgctatgggtgccacattcatgctctgggcttttgaagttttgattttcccgtctgacgcaaatgaatgggccaagtatctgagtcctacctcattccaagaacaatgttctcaagacatgcgacaagaaacacccgcaatgtcgggtacgtcaacagcaccaatcccaggtccgaaattggagtattatggcatttcgagagtggtcgcaaggggaattttggtgccactgtgcgtcatttctcggacatacctcatgattggtgctctcgtcagtctcagacaacagcctgagagtgtgtaccgaagctatggcattgaagactggtttttatcacgccactggcgatag

SEQ ID NO: 35857 - protein, 415 aa, Muscodor strobelii
  misc_feature: SGI Peptide ID NO. 572421
  misc_feature (1)..(414): NCBI GI: 238839519 Blast Desc: conserved [Microsporum canis CBS 113480]
  misc_feature (2)..(402): NCBI GI: 255956865 Blast Desc: Pc21g22150 [Penicillium chrysogenum Wisconsin 54-1255] gi|211590896|emb|CAP97112.1| Pc21g22150 [Penicillium chrysogenum Wisconsin 54-1255]
  misc_feature (1)..(295): NCBI GI: 156059350 Blast Desc: SS1G_03687 [Sclerotinia sclerotiorum 1980] gi|154701474|gb|EDO01213.1| SS1G_03687 [Sclerotinia sclerotiorum 1980]
  misc_feature (1)..(297): NCBI GI: 145234855 Blast Desc: An03g01740 [Aspergillus niger] gi|134057750|emb|CAK38147.1| protein product [Aspergillus niger]
  misc_feature (11)..(309): NCBI GI: 145251660 Blast Desc: An16g00290 [Aspergillus niger] gi|134082879|emb|CAK42709.1| protein product [Aspergillus niger]
  misc_feature (3)..(402): NCBI GI: 212530492 Blast Desc: PMAA_036780 [Penicillium marneffei ATCC 18224] gi|210074801|gb|EEA28888.1| PMAA_036780 [Penicillium marneffei ATCC 18224]
  misc_feature (2)..(400): NCBI GI: 169599991 Blast Desc: SNOG_02825 [Phaeosphaeria nodorum SN15] gi|111068436|gb|EAT89556.1| SNOG_02825 [Phaeosphaeria nodorum SN15]
  misc_feature (3)..(321): NCBI GI: 242796986 Blast Desc: TSTA_126340 [Talaromyces stipitatus ATCC 10500] gi|218719506|gb|EED18926.1| TSTA_126340 [Talaromyces stipitatus ATCC 10500]
  misc_feature (57)..(297): NCBI GI: 46116366 Blast Desc: FG04025.1 [Gibberella zeae PH-1]
  misc_feature (82)..(312): NCBI GI: 171682874 Blast Desc: protein product [Podospora anserina] gi|170941396|emb|CAP67046.1| protein product [Podospora anserina]
  misc_feature: Useful for introducing or modulating the production of volatile compounds
MDIILSCASIIFLCTWSKLCLNIPHPQDNEFKILSRKALWMVWGVCVPEFVLSIAFGQYASARRSVQNFHDLGHSHWTLRHAFFTDMGGFLLQPEGDGEPFVVDSAQLAFLVQNRYIECPKITADEIWDKSKVDLYAKWFAILQVARFACLLVGRIIAGVPMTALEIFAGGLAFCSLGNMICWLQKPNDVRQSCKISIKSSLSQILSSNDQTATKLFRHHVSSLRDQRPTTSRFFDLFQHDDGRPLMRLSDDTYPDIGTIDKVLFFIISKGYAACHLAAWNATFPTEIEGSGWRVMSSIAMGATFMLWAFEVLIFPSDANEWAKYLSPTSFQEQCSQDMRQETPAMSGTSTAPIPGPKLEYYGISRVVARGILVPLCVISRTYLMIGALVSLRQQPESVYRSYGIEDWFLSRHWR

SEQ ID NO: 35858 - DNA, 3854 bp, Muscodor strobelii
  misc_feature: SGI EST ID NO. CUFF.85656.1
  misc_feature: Variant of the nucleotide sequence at SEQ ID NO 35856
ctcaccccatcgcctcccgtattttcgctagtctcaaatcctgaacctacagcggcatccattcatgacgacatcaccaagatcatccatttcacttctcgtcgctaattttctgctacctcattctgacaacatatctttttcctacgggtgatgctacgagcacgagatgaactctactaatggagacgggacgaagatgatcgaagtgagtaggctgcttcctcggacggccatggtctatcagatatcacgtattcattcatatagggatgggttcctggcccggcgacgagaggctccatggacatcattctgtcctgtgcttcgatcatctttctctgtacctggtcaaagttatgtctgaacatcccgcatccgcaagataacgaattcaaaatcttgtcaagaaaggcgctttggatggtatggggggtctgcgtaccggagtttgtcttgtcgatcgcgttcggccagtacgcatctgcgaggcgatcggtccagaatttccacgacctcggtcactcgcattggacgctgcgccatgcctttttcaccgatatgggcgggtttctgctgcaaccggaaggagacggtgaaccctttgttgttgatagtgcccaacttgcttttctagtgcagaaccggtacatagagtgtccgaagatcacggccgacgagatatgggataagtccaaagtcgatctctacgctaagtggttcgcgatcttgcaggtcgcacgatttgcgtgtctccttgtgggccggatcattgctggggttcccatgactgcactcgagatattcgcgggtggtcttgccttttgttctctaggaaacatgatttgctggctccaaaagcctaacgacgttcgtcaaagctgcaaaatcagtatcaagtcgtctctgagccagatcttatcaagcaacgaccaaactgcgacaaagcttttccgacaccacgtaagctcactgcgcgaccagcgacctacaacatcacggttctttgatctgttccagcatgatgatgggagaccgcttatgcgcctctctgacgatacgtatcccgacattggcactatcgacaaagtactgttcttcatcatcagcaagggatacgcggcctgtcatctcgccgcatggaatgcaacgttcccgacggagatagaaggttcggggtggagagtcatgagctcgattgctatgggtgccacattcatgctctgggcttttgaagttttgattttcccgtctgacgcaaatgaatgggccaagtatctgagtcctacctcattccaagaacaatgttctcaagacatgcgacaagaaacacccgcaatgtcgggtacgtcaacagcaccaatcccaggtccgaaattggagtattatggcatttcgagagtggtcgcaaggggaattttggtgccactgtgcgtcatttctcggacatacctcatgattggtgctctcgtcagtctcagacaacagcctgagagtgtgtaccgaagctatggcattgaagactggtttttatcacgccactggcgatagcgagatcattatagtccagcaggggatggcatatgaaatattcaagaatgaggcggcacgaattgagtaacaggtcgtgcattaggtgatcgggcgccggatcttccataatcctaacgccattggtttatttcgaatacccacaatcatctgttgtctatatgtttcttctgcgtagctatttatacgcccaactcactccccacaacctcaagcgccttcgttaaaagcttcgcgaccttctcatcgccactcgttccggccacgctcgaagccttaacaactaggggataaagccgaagcaagtgcttcctactctcactctccacattcggcgtatccggtatagcatcaggctcactcttcaagcccacaagccgttccaagatgcgcgctaactctttgcgttgactgagcggttgcggcatccggccccgtaggggctgatcagctacatacgcacgcagtgtcaaggcagctcggagaatcaggtatggagcggtggttctcgcgagtctaactctgagctcgtgaatattctcggacgcggggcttcctatcaatggaggttgcccttctggtggctggacggcaatgcgtgtcgcagaattctcatcttgactggcaacaagagcgaagagctcatctagacagacgtacgaggttttggcacgcctcgaaggagcagggtctatagtctggccccgacggactttgtagagattggaaagtcccatagcatcaccaccactgatgactgagagctcagcaggtgtaggggtatgaatgatagacatccggaataggctttcggcgaacaactttcgcgtcctgtcggggatgacctgagctcccagatatggaatgatcaactctcgcaactgaccaaacgactcgatgtcgaattcctcatcttcagcgatgttaatcttgtcgggagccccttcacaatctgcatctgtaataccatttgcgatcgtgacaattatgtgccagatgtcctgcagcatggttcgcggaggatctagagagattagttggcggagagtggctcgcaagattccgatggcagatttagtcgcctgcttccatggctgctctgatttggcaattatgggaaattgatatttcagtacgatgggcttggccaaagccgacagagcggtcaataaagcaccattgttgtaaatgtctgtatccatagcatgcgactcgataagagattgcaatatcaccatgctcagcttggacatcgcaacataagtacgcttctgcgaactgcgttgactggcttccttactgccatcaacaaaagctagagaaatgaattcggatgtctgggtgatcaaagctgacggcgctccgggtatgtcggttcgcagcattttcaggacgtccagcacttgactctgcaaaggtgttgcatggtcaatgtcggcaatgaaggcaccgggtgtggcgagttgcatgacttcgcgcaacagtgtgagcatgcggccaatgcactcagctgttagatcatcctgaataagcctgtaaacgtcacggagcgcagctacatatgccaagagacagttttggttgtcggcaggtttctccatggtgtcagtatctgcgacgggaactccgcgcgcccacaggtcccatgcgaggtcaatggttgtcttattgaagttctgttgtgacccatgttgactgtgtgaaagcatctgtgtcaatgctttgaatgtagccgtattgatctcaagcacttggaaatcgagtaatgtctcaaaatgacccaaaagctgctgccagtatgaattgaaagttggatgtgccgtaagtacgtcgagatagttggcacacagatttgatatcccgcctaggacaacaacggtggtatcgtgccagtcgcggcggaatttttcgtccacgtcagggtctttcaacgctccgagctccgattccacagatgatagtagccggaaaatcactgccttgatacatatcgaccacgcttcgggacttagtcggtccccgtaagcatcgaaaattcttaagagggtttggatagcacctgcgaaatatagtcagaaaatggaatgcaatgtagagagaaaggtatcacacactgtttcgaagatccagtctatcattagttgcgactgtcgtgagtcggattaaaagcagcatccacaaagccgcatccgaagatgcgttctcagcatgcgaagccttttcggcaagtgatgcatcgtcgaaattagggacaagagagctggtaatgggtaaaaggttgttgttggtgccggacaggaaat

SEQ ID NO: 35859 - DNA, 1899 bp, Muscodor strobelii
  misc_feature: SGI cDNA ID NO. 572422
  misc_feature: Reduced expression when VOC is produced
  misc_feature: Encodes the peptide sequence at SEQ ID NO 35860
atggcggcatctcctgcgccccgtcggcgtgacaacctttcgccatgggccactcgatatggacggtccgatcccggaaacccgtatatgctaggaaatgaggagcattctggccttgcacccgtacaaccttcattgcatcctaaatacttcgctgatttaccgcaagttgccggtgcacgggtcccagaacctaacgacgaggaactagatcacctcttcctcacagaaatgaaccagatcgaaagactgcaaggttatacaacctggcaaaatgtgacgttcaataaatacgttaatttcggaaatagacgatacggtattattgacgccggacacagttggacgcaatttatccccgacaatctagagcgtgctttgagaattctacctcgacgtacaaagctttacaatgttagggaaagcttccgaaacaaactggcctcggagatttttgaccaagactcgcttcgagttgacgaaagccagtggcttaattttctttggcgagagagatggtacaggactgcttcttatgatatcgatgacgacaatatatggaatgtgattaggcctgctattgagctagttaatcgcatgctaaatgcgctcatagatgatcagcatgaagcgaacgatcccgatgcaaacaatgagactttagtacttttatctttgtgccaagagagagaagaagcgcggagagctggccggagatgcgatggagaatacatgatccgttatggtcccgacgattgggctaggagattacaacgtctgttgagggatgtagtctggtacttcgatgaatggatacctccgacgggctgggaaacgatgctttacgcctgcacgtttgtggcggggtttcgagacattcctattgctataggcgatgcatacttctcccccctcttcgagaacaaggacctcaccttgtccgagcgatgtcacctacaatttgtcctagctgtgactcatgttgacttcgaagacaaagaggaaattggttcctggtttgaacaccaggtctttggaggggacataggtcttaacaggccccagagaggccctggcgttccgttacaagtagaacaagtaccagcagcggggtcaactggatatatcgtaacttcactacacacttcgaaactgttctccgaatctttctggaagaaccggtcgatacgtcataaaagcgcccagtttttccactggcgtaaaatctttagtacgagagggctggccccgcctagtgtttcccggaactcgaacgtacgacatacagaagaatttgagcagctggtgcctgaagatgaaacccggcggaggacgtgggacatgttccgagctgggtggtacacagccgaacatgccttgtgggcaagaacactctgggccgttgtcgatgttcgcagagatttagctgcgattccgtattggtttaacgaacgagacgagttaagttgcgcagtgattgctgagagactggtcaaccaaatggactggacaaaccagtttgcattcgaaagagaccttccagcgcccggcgacgttgaccatagatgggtcgtgcatgcccttggactgctactcatggccgctatgcctatccgctcccaggcacggaaagtcaaacctcatagctttcccgcggttgcgacacctggccgtcgcgccagagcgaggggacgacggagggagatcaggatgacgcatgagctcctgccggacaatttctgggccggaacaggatcgtacaaagcaagcgaattgtatgatcccttaagccgacaccacgggcgtgaccgtctcgttcctactactcagttagactatctcaacagcaaaggcggtagtctaccaacagcgaacagggccaaggtcggcccctcatag

SEQ ID NO: 35860 - protein, 632 aa, Muscodor strobelii
  misc_feature: SGI Peptide ID NO. 572422
  misc_feature (62)..(205): NCBI GI: 85089861 Blast Desc: NCU09292 [Neurospora crassa OR74A] gi|28919473|gb|EAA28908.1| NCU09292 [Neurospora crassa OR74A]
  misc_feature: Useful for introducing or modulating the production of volatile compounds
MAASPAPRRRDNLSPWATRYGRSDPGNPYMLGNEEHSGLAPVQPSLHPKYFADLPQVAGARVPEPNDEELDHLFLTEMNQIERLQGYTTWQNVTFNKYVNFGNRRYGIIDAGHSWTQFIPDNLERALRILPRRTKLYNVRESFRNKLASEIFDQDSLRVDESQWLNFLWRERWYRTASYDIDDDNIWNVIRPAIELVNRMLNALIDDQHEANDPDANNETLVLLSLCQEREEARRAGRRCDGEYMIRYGPDDWARRLQRLLRDVVWYFDEWIPPTGWETMLYACTFVAGFRDIPIAIGDAYFSPLFENKDLTLSERCHLQFVLAVTHVDFEDKEEIGSWFEHQVFGGDIGLNRPQRGPGVPLQVEQVPAAGSTGYIVTSLHTSKLFSESFWKNRSIRHKSAQFFHWRKIFSTRGLAPPSVSRNSNVRHTEEFEQLVPEDETRRRTWDMFRAGWYTAEHALWARTLWAVVDVRRDLAAIPYWFNERDELSCAVIAERLVNQMDWTNQFAFERDLPAPGDVDHRWVVHALGLLLMAAMPIRSQARKVKPHSFPAVATPGRRARARGRRREIRMTHELLPDNFWAGTGSYKASELYDPLSRHHGRDRLVPTTQLDYLNSKGGSLPTANRAKVGPS

SEQ ID NO: 35861 - DNA, 1221 bp, Muscodor strobelii
  misc_feature: SGI EST ID NO. CUFF.85268.0
  misc_feature: Variant of the nucleotide sequence at SEQ ID NO 35859
ttgcacccgtacaaccttcattgcatcctaaatacttcgctgatttaccgcaagttgccggtgcacgggtcccagaacctaacgacgaggaactagatcacctcttcctcacagaaatgaaccagatcgaaagactgcaaggttatacaacctggcaaaatgtgacgttcaataaatacgttaatttcggaaatagacgatacggtattattgacgccggacacagttggacgcaatttatccccgacaatctagagcgtgctttgagaattctacctcgacgtacaaagctttacaatgttagggaaagcttccgaaacaaactggcctcggagatttttgaccaagactcgcttcgagttgacgaaagccagtggcttaattttctttggcgagagagatggtacaggactgcttcttatgatatcgatgacgacaatatatggaatgtgattaggcctgctattgagctagttaatcgcatgctaaatgcgctcatagatgatcagcatgaagctcttcagacaatactatacggtcgtttcgattattggcacagatataggaacgatcccgatgcaaacaatgagactttagtacttttatctttgtgccaagagagagaagaagcgcggagagctggccggagatgcgatggagaatacatgatccgttatggtcccgacgattgggctaggagattacaacgtctgttgagggatgtagtctggtacttcgatgaatggatacctccgacgggctgggaaacgatgctttacgcctgcacgtttgtggcggggtttcgagacattcctattgctataggcgatgcatacttctcccccctcttcgagaacaaggacctcaccttgtccgagcgatgtcacctacaatttgtcctagctgtgactgtgagttgactgttggtctttgcttagatgtattatcactaagatagttcgagatggtgcacgagttgatgcatgctctgataaggggtcgctttgatcatgacgatcggagctttgcatttcatgtagacaaatcgcttttgggagaagaacctcatgttgacttcgaagacaaagaggaaattggttcctggtttgaacaccaggtctttggaggggacataggtcttaacaggccccagagaggccctggcgttccgttacaagtagaacaagtaccagcagcggggtcaactggatatatcgtaac

SEQ ID NO: 35862 - DNA, 1218 bp, Muscodor strobelii
  misc_feature: SGI cDNA ID NO. 572423
  misc_feature: Reduced expression when VOC is produced
  misc_feature: Encodes the peptide sequence at SEQ ID NO 35863
atgtcgctgatgcgagccgaaaagctcctgagagcaagccgcacgtccggcctgcgtctcaatgcccatgcctcgccgtcctccctgcgcaacacggcgcccatcgtcctccgagcccttcacaacaccagcaaatctctcgcaccggcgccctcatcaggtgggtttggaatgggccatgtgcccccttcgtatttccagcgcccctccctgccagcgaataccgtgatccggttcgtcccgcaacagacggcctggatcgtcgagcgcatgggaaagttcagccgcatccttgagcctggcctcgctattcttgtccccttcctcgaccgcatcgcctatgtcaagagcctgaaagaagtcgcgatcgagattccctcacagagcgccatcaccgccgacaatgttacgctcgagctcgacggcgtgctgtacacacgggtctttgacgcctataacgccagctacggagtagaagacgccgaatacgcaatctcccaactagcccaaacgaccatgcgcagcgagatcggccaactaacactagaccacgtgctcaaagagcgtgcagcactcaacataaacataacagccgccataaacgaagcagcacaagcctggggcgtaacctgcctccgctacgaaataagggatatacacgcccccgacgccgtggttgaagccatgcatcgtcaagtcaccgccgagcgatccaaacgcgccgagattctggagtccgagggtcagagacaaagtgctatcaacatcgctgagggtaagaaacaaagtgttatcttggcctctgaggcgttgaaggcagagcagatcaatcgcgcgagcggtgaggccgaggctattctcatgaaagctcaagcgaccgctgccggtatcgaggccgtcgggcaaaagatcgcgatgggtggtgcatctgctcagggagctatgtctctctccgtcgccgagaaatatgtcgacgcgttcggcaaactggcacgtgagagtactgccgtcgtggttcctggaaatgtgggcgacatcggcggtatgatcgccacgggtcttagtgtctacggcaaagttggagaagcgcagagtaggagtatggcgaaagccctattggagcagcagagtaagaagaatgaggccgaggaggtgaaggaggagagtgttgttgattctatcgcgagggaattcgacaatgctgctgcgaagcagtga

SEQ ID NO: 35863 - protein, 405 aa, Muscodor strobelii
  misc_feature: SGI Peptide ID NO. 572423
  misc_feature (78)..(250): Pfam Id: PF01145 Pfam Desc: SPFH domain / Band 7 family
  misc_feature (63)..(401): NCBI GI: 164425505 Blast Desc: NCU05633 [Neurospora crassa OR74A] gi|157070951|gb|EAA30876.2| NCU05633 [Neurospora crassa OR74A]
  misc_feature (38)..(404): NCBI GI: 154323268 Blast Desc: BC1G_00033 [Botryotinia fuckeliana B05.10] gi|150842262|gb|EDN17455.1| BC1G_00033 [Botryotinia fuckeliana B05.10]
  misc_feature (38)..(405): NCBI GI: 46134309 Blast Desc: FG09294.1 [Gibberella zeae PH-1]
  misc_feature (38)..(404): NCBI GI: 156058007 Blast Desc: SS1G_04735 [Sclerotinia sclerotiorum 1980] gi|154702520|gb|EDO02259.1| SS1G_04735 [Sclerotinia sclerotiorum 1980]
  misc_feature (38)..(367): NCBI GI: 256727141 Blast Desc: [Nectria haematococca mpVI 77-13-4]
  misc_feature (39)..(376): NCBI GI: 171682620 Blast Desc: protein product [Podospora anserina] gi|170941269|emb|CAP66919.1| protein product [Podospora anserina]
  misc_feature (63)..(401): NCBI GI: 39973235 Blast Desc: MGG_07912 [Magnaporthe grisea 70-15] gi|145012726|gb|EDJ97380.1| MGG_07912 [Magnaporthe grisea 70-15]
  misc_feature (16)..(405): NCBI GI: 119496029 Blast Desc: stomatin family protein [Neosartorya fischeri NRRL 181] gi|119412950|gb|EAW22891.1| stomatin family protein [Neosartorya fischeri NRRL 181]
  misc_feature (37)..(369): NCBI GI: 226290213 Blast Desc: stomatin family protein [Paracoccidioides brasiliensis Pb18]
  misc_feature (37)..(385): NCBI GI: 226285275 Blast Desc: stomatin family protein [Paracoccidioides brasiliensis Pb01]
  misc_feature: Useful for introducing or modulating the production of volatile compounds
MSLMRAEKLLRASRTSGLRLNAHASPSSLRNTAPIVLRALHNTSKSLAPAPSSGGFGMGHVPPSYFQRPSLPANTVIRFVPQQTAWIVERMGKFSRILEPGLAILVPFLDRIAYVKSLKEVAIEIPSQSAITADNVTLELDGVLYTRVFDAYNASYGVEDAEYAISQLAQTTMRSEIGQLTLDHVLKERAALNINITAAINEAAQAWGVTCLRYEIRDIHAPDAVVEAMHRQVTAERSKRAEILESEGQRQSAINIAEGKKQSVILASEALKAEQINRASGEAEAILMKAQATAAGIEAVGQKIAMGGASAQGAMSLSVAEKYVDAFGKLARESTAVVVPGNVGDIGGMIATGLSVYGKVGEAQSRSMAKALLEQQSKKNEAEEVKEESVVDSIAREFDNAAAKQ

SEQ ID NO: 35864 - DNA, 1762 bp, Muscodor strobelii
  misc_feature: SGI EST ID NO. CUFF.85275.0
  misc_feature: Variant of the nucleotide sequence at SEQ ID NO 35862
ttcaattccagcccggagctacacgcaggccagagctcggcttcgctaccatatcgtccagcaacaacccacgatccgcccgacgcctgacgcccacggcacaacctcagcaccatgtcgctgatgcgagccgaaaagctcctgagagcaagccgcacgtccggcctgcgtctcaatgcccatgcctcgccgtcctccctgcgcaacacggcgcccatcgtcctccgagcccttcacaacaccagcaaatctctcgcaccggcgccctcatcaggtgggtttggaatgggccatgtgcccccttcgtatttccagcgcccctccctgccagcgaataccgtgatccggttcgtcccgcaacagacggcctggatcgtcgagcgcatgggaaagttcagccgcatccttgagcctggcctcgctattcttgtccccttcctcgaccgcatcgcctatgtcaagagcctgaaagaagtcgcgatcgagattccctcacagagcgccatcaccgccgacaatgttacgctcgagctcgacggcgtgctgtacacacgggtctttgacgcctataacgccagctacggagtagaagacgccgaatacgcaatctcccaactagcccaaacgaccatgcgcagcgagatcggccaactaacactagaccacgtgctcaaagagcgtgcagcactcaacataaacataacagccgccataaacgaagcagcacaagcctggggcgtaacctgcctccgctacgaaataagggatatacacgcccccgacgccgtggttgaagccatgcatcgtcaagtcaccgccgagcgatccaaacgcgccgagattctggagtccgagggtcagagacaaagtgctatcaacatcgctgagggtaagaaacaaagtgttatcttggcctctgaggcgttgaaggcagagcagatcaatcgcgcgagcggtgaggccgaggctattctcatgaaagctcaagcgaccgctgccggtatcgaggccgtcgggcaaaagatcgcgatgggtggtgcatctgctcagggagctatgtctctctccgtcgccgagaaatatgtcgacgcgttcggcaaactggcacgtgagagtactgccgtcgtggttcctggaaatgtgggcgacatcggcggtatgatcgccacgggtcttagtgtctacggcaaagttggagaagcgcagagtaggagtatggcgaaagccctattggagcagcagagtaagaagaatgaggccgaggaggtgaaggaggagagtgttgttgattctatcgcgagggaattcgacaatgctgctgcgaagcagtgaggaggctgatgagaattcttctcaatgagccccataaggcaacgaagaggaagtcatcgctggactgtgatcatatatttatgcctacctatgatatggcagatgtatcatcacggacaggcgtgtatttatagtcccccatcccatttgtctaatctacacaactgaaacagagcgatgggatgagggcaaggcaaatataggaaaaggagaaggacgaaatcagtcggcatggcgtcaacggcatcgcaaaaggcctatctatctatccacttactctccttgggatgctctttattcccatgtaattctactccggcggaaaacatacactgtagtactatagctggctagctgttccaatacgaatcacatgatatggtttggcatactgggcaactacctcattgaatgcttacacttaccggaa

SEQ ID NO: 35865 - DNA, 822 bp, Muscodor strobelii
  misc_feature: SGI cDNA ID NO. 572424
  misc_feature: Reduced expression when VOC is produced
  misc_feature: Encodes the peptide sequence at SEQ ID NO 35866
atgcagggtgatatctttcaactcgatcaactggccaccaaggcctttactccgatcgcaccaaagccacagcgtcgcacgatagatcaacccgaagttgcaatctacaacgaagacgatctgtcgcatttactctacgtggaccaccaccaccatcaccatcaggatcacagcgatttgaagacttccgctcatctcgccgggaatgattcagagcctcacctaatattctggagtgactcagaatcatgttctgaaatagacactcaatcaccacccaccccattgaccccggtcttcgaggaggctgctctcgatgcataccgcgcgaagggccgacggaatgccttagctgtcgcctttgaagatggcttcgaatttcccgtcttcctcggaaggcaagcggaagaatggccaaattgtatgccacggcagatgcacggtccaataccattcgcacctgcgcagcctgctctgagcccacttgcttccccgcccgtaacgacagcacctgtgcaaatgcctacagttgcgcccgtcaacgatataagtggcccactgatgtcgtggtggccagcgccactggagcttgacggtaatagctggccaagcgagagggcagaatgggaactccagaaccagactgaggggccgtttcagcagggcccacagagtggcatgggcaatgcacaacgtagcactgacgtgaggagtgactacgacgtgaagcatgttgacagaattgagggaccgttgatgacctggtggccggagaatgttaacacgatggagcatgaatggaatgagagattctacgagtaa

SEQ ID NO: 35866 - protein, 273 aa, Muscodor strobelii
  misc_feature: SGI Peptide ID NO. 572424
  misc_feature: Useful for introducing or modulating the production of volatile compounds
MQGDIFQLDQLATKAFTPIAPKPQRRTIDQPEVAIYNEDDLSHLLYVDHHHHHHQDHSDLKTSAHLAGNDSEPHLIFWSDSESCSEIDTQSPPTPLTPVFEEAALDAYRAKGRRNALAVAFEDGFEFPVFLGRQAEEWPNCMPRQMHGPIPFAPAQPALSPLASPPVTTAPVQMPTVAPVNDISGPLMSWWPAPLELDGNSWPSERAEWELQNQTEGPFQQGPQSGMGNAQRSTDVRSDYDVKHVDRIEGPLMTWWPENVNTMEHEWNERFYE

SEQ ID NO: 35867 - DNA, 1361 bp, Muscodor strobelii
  misc_feature: SGI EST ID NO. CUFF.85365.0
  misc_feature: Variant of the nucleotide sequence at SEQ ID NO 35865
gcaaggcggaaaatttgttctcatcacgcgttaccacacggattcgcacgatgccttgcggacttggcttgaactcttttgtatataaaagattgaggcaacattcaacattatgtcttctctcatgtttcccagacacaagcaattgaatacacacgcaatattacaaacacacaaccattgactaccactgtcatccaatctacatgcagggtgatatctttcaactcgatcaactggccaccaaggcctttactccgatcgcaccaaagccacagcgtcgcacgatagatcaacccgaagttgcaatctacaacgaagacgatctgtcgcatttactctacgtggaccaccaccaccatcaccatcaggatcacagcgatttgaagacttccgctcatctcgccgggaatgattcagagcctcacctaatattctggagtgactcagaatcatgttctgaaatagacactcaatcaccacccaccccattgaccccggtcttcgaggaggctgctctcgatgcataccgcgcgaagggccgacggaatgccttagctgtcgcctttgaagatggcttcgaatttcccgtcttcctcggaaggcaagcggaagaatggccaaattgtatgccacggcagatgcacggtccaataccattcgcacctgcgcagcctgctctgagcccacttgcttccccgcccgtaacgacagcacctgtgcaaatgcctacagttgcgcccgtcaacgatataagtggcccactgatgtcgtggtggccagcgccactggagcttgacggtaatagctggccaagcgagagggcagaatgggaactccagaaccagactgaggggccgtttcagcagggcccacagagtggcatgggcaatgcacaacgtagcactgacgtgaggagtgactacgacgtgaagcatgttgacagaattgagggaccgttgatgacctggtggccggagaatgttaacacgatggagcatgaatggaatgagagattctacgagtaattggtctatctaatcctgtccgattacagaccaaaaaagatcaggcaattgatgatggctcaacaagtgcatctgtggcttgacattttagccactactgatgccaaagagaggtccttcatcgacggcgcaatgcatataaaattcgggtttggtattccttagtgtacctctaagacgcagcatttgagttcttcaaaataaacatcatgtactctattatgtcgttttgttgtgtgtgacaacgtagatcattacattaaatcaaggaaatcggcgataattagacgctgtccatctcagagttctcggatcttcacatcattattgcta

SEQ ID NO: 35868 - DNA, 1557 bp, Muscodor strobelii
  misc_feature: SGI cDNA ID NO. 572425
  misc_feature: Encodes the peptide sequence at SEQ ID NO 35869
atggctttgcaaagctgcacgctagccttggtggcctcgctcatctacctggtcgctctggccatctatcgacttcatttccacccactcaaaaaatttcctggacccaagatagcagctatcactggatggtacgagtgttaccatgatctgaaacaacctagagggatgttcatgtacaaaattcaagaactccataatatctacggtcctatagtcaggataagcccagaggaggtccatatccaagactcaacttggatcgatacgcttttcgtcaacccaacccatggcacacgcaataaacatggtccagcagctgcacaggcaggaacccctgacggagtttttggtactgccttaaacgatattcacaagagacgtcgggcggccttgagtcctcttttctctaaggcatgtgcgaatttcgctgaaaagatgatctatgaaaacgcggagcgcctacttcgcagaatcgacgaacaaattactcgtgacggctactcagagatgcgcacggcattccttgcatatgccacggatgttgtaacacattactgcttcgggcattcgctgggtttgcttgagaacgaggcgacatccatgaattggtcccgctgcatacgagctttggcaactacaattccagtcgcgaggcaattcaactggatcattcccgtttcacatatgttacccgaaagtatcgtcaagttgttctccccagaactagctatggtgacgtcaatgcacactatgatggaaaaagaggctcgtatcgctgtccacgaacataccgaacatgagcacaatctagcgaaatctactactccatataatcgtggtcctttagaaagactggctttattccgcacagtgctccagaataacggactacctcaaccggagaagagcttcgaccggatatcccacgaaggtgttacgatcatagcggcaggtggggagaccacagcaagcgctttgatgtcagcaatgtactttatatgcgcagataaggagaacatacttccaaagttgctgatggagatccactccgccttgccgactctagattctcagccatcagttgcagagcttgagcgcctcccgtggcttaccgccgtcatcaaggagacattacgattgactacactaacggcaagattgacacgcgttgcgcctgatgaagctcttcgctaccaagactggctactaccgcctggaactccggttagcatgacgatacgcgaagtggcgctcgaccccacgatattcccagacccatacctcttcaagcctgagcgatggctccccggtaatcccgaactccagacatgcaatcgatactttgtcccattctccaaaggcagccgtatgtgtatcggaatgaacctagcatatgcagagttatacatcgcgttggctgttctattccgccgcaaggacttccagttgcatgataccgtacgtcacagagatgtcgattttgttcgagactttttcgttggtgagacttctccggagagcaggggggtacgtgtgaaatacgcgactgcatag

SEQ ID NO: 35869 - protein, 518 aa, Muscodor strobelii
  misc_feature: SGI Peptide ID NO. 572425
  misc_feature (38)..(513): Pfam Id: PF00067 Pfam Desc: Cytochrome P450
  misc_feature (304)..(479): Pfam Id: PF00067 Pfam Desc: Cytochrome P450
  misc_feature (14)..(514): NCBI GI: 110629307 Blast Desc: cytochrome P450 [Hypocrea virens]
  misc_feature (5)..(514): NCBI GI: 169783180 Blast Desc: [Aspergillus oryzae RIB40] gi|83774796|dbj|BAE64919.1| protein product [Aspergillus oryzae]
  misc_feature (12)..(514): NCBI GI: 212527464 Blast Desc: cytochrome P450, [Penicillium marneffei ATCC 18224] gi|210073287|gb|EEA27374.1| cytochrome P450, [Penicillium marneffei ATCC 18224]
  misc_feature (1)..(514): NCBI GI: 121712523 Blast Desc: benzoate 4-monooxygenase cytochrome P450 [Aspergillus clavatus NRRL 1] gi|119402025|gb|EAW12447.1| benzoate 4-monooxygenase cytochrome P450 [Aspergillus clavatus NRRL 1]
  misc_feature (14)..(513): NCBI GI: 212539279 Blast Desc: benzoate 4-monooxygenase cytochrome P450, [Penicillium marneffei ATCC 18224] gi|210069537|gb|EEA23628.1| benzoate 4-monooxygenase cytochrome P450, [Penicillium marneffei ATCC
  misc_feature (9)..(514): NCBI GI: 67526303 Blast Desc: AN3609.2 [Aspergillus nidulans FGSC A4] gi|40740627|gb|EAA59817.1| AN3609.2 [Aspergillus nidulans FGSC A4] gi|259481865|tpe|CBF75785.1| TPA: cytochrome P450, (Eurofung)
  misc_feature (9)..(514): NCBI GI: 242779375 Blast Desc: flavonoid 3-hydroxylase, [Talaromyces stipitatus ATCC 10500] gi|218723049|gb|EED22467.1| flavonoid 3-hydroxylase, [Talaromyces stipitatus ATCC 10500]
  misc_feature (3)..(513): NCBI GI: 145234316 Blast Desc: An02g13980 [Aspergillus niger] gi|134057475|emb|CAK48829.1| protein product [Aspergillus niger]
  misc_feature (9)..(513): NCBI GI: 242795016 Blast Desc: cytochrome P450, [Talaromyces stipitatus ATCC 10500] gi|218719081|gb|EED18501.1| cytochrome P450, [Talaromyces stipitatus ATCC 10500]
  misc_feature (8)..(514): NCBI GI: 238838499 Blast Desc: benzoate 4-monooxygenase cytochrome P450 [Microsporum canis CBS 113480]
  misc_feature (17)..(474): SWISSPROT Homolog: EC 1.14.14.1 Unspecific monooxygenase
MALQSCTLALVASLIYLVALAIYRLHFHPLKKFPGPKIAAITGWYECYHDLKQPRGMFMYKIQELHNIYGPIVRISPEEVHIQDSTWIDTLFVNPTHGTRNKHGPAAAQAGTPDGVFGTALNDIHKRRRAALSPLFSKACANFAEKMIYENAERLLRRIDEQITRDGYSEMRTAFLAYATDVVTHYCFGHSLGLLENEATSMNWSRCIRALATTIPVARQFNWIIPVSHMLPESIVKLFSPELAMVTSMHTMMEKEARIAVHEHTEHEHNLAKSTTPYNRGPLERLALFRTVLQNNGLPQPEKSFDRISHEGVTIIAAGGETTASALMSAMYFICADKENILPKLLMEIHSALPTLDSQPSVAELERLPWLTAVIKETLRLTTLTARLTRVAPDEALRYQDWLLPPGTPVSMTIREVALDPTIFPDPYLFKPERWLPGNPELQTCNRYFVPFSKGSRMCIGMNLAYAELYIALAVLFRRKDFQLHDTVRHRDVDFVRDFFVGETSPESRGVRVKYATA

SEQ ID NO: 35870 - DNA, 1178 bp, Muscodor strobelii
  misc_feature: SGI EST ID NO. CUFF.85317.0
  misc_feature: Variant of the nucleotide sequence at SEQ ID NO 35868
cttcaaaggatcttcactaactcgaattatcatagtggcaactacaattccagtcgcgaggcaattcaactggatcattcccgtttcacatatgttacccgaaagtatcgtcaagttgttctccccagaactagctatggtgacgtcaatgcacactatgatggaaaaagaggctcgtatcgctgtccacgaacataccgaacatgagcacaatctagcgaaatctactactccatataatcgtggtcctttagaaagactggctttattccgcacagtgctccagaataacggactacctcaaccggagaagagcttcgaccggatatcccacgaaggtgttacgatcatagcggcaggtggggagaccacagcaagcgctttgatgtcagcaatgtactttatatgcgcagataaggagaacatacttccaaagttgctgatggagatccactccgccttgccgactctagattctcagccatcagttgcagagcttgagcgcctcccgtggcttgtaagcagttttgcaatttgataacaagcaattccgtgcgggagctttaaggctaacaaactcgctcagaccgccgtcatcaaggagacattacgattgactacactaacggcaagattgacacgcgttgcgcctgatgaagctcttcgctaccaagactggctactaccgcctggagtaagtaaatctagtttcgctctgtcatcaggtacgtatctgatactagcgcaacaacagactccggttagcatgacgatacgcgaagtggcgctcgaccccacgatattcccagacccatacctcttcaagcctgagcgatggctccccggtaatcccgaactccagacatgcaatcgatactttgtcccattctccaaaggcagccgtatgtgtatcggaatgaagtaagtacagatggactcccggtatacctttttgatactgactggtctccgtgtagcctagcatatgcagagttatacatcgcgttggctgttctattccgccgcaaggacttccagttgcatgataccgtacgtcacagagatgtcgattttgttcgagactttttcgttggtgagacttctccggagagcaggggggtacgtgtgaaatacgcgactgcatagatagtagacggttgcttttgagccctgtgcgg

SEQ ID NO: 35871 - DNA, 2595 bp, Muscodor strobelii
  misc_feature: SGI cDNA ID NO. 572426
  misc_feature: Encodes the peptide sequence at SEQ ID NO 35872
atgccaacctgtcgacccgtcactccgaccagtttcagtgccgatatttccacaagtacgatcgagagacagcaagtacaagggcgcataggggaaaattataaaggggcgagaacgtacgacacttgcttcggtatgctcattattgatgccgaaaccagcctggaggcgacattaccatctaaatgtaccccagcagtagttgctttcacagacgcaatcgctaagctctatgtacaagaccaggaaatttgcgcagcaatcttcgtttcaaagccgctaagtgagctattagaccgattcggggtaacgttagccgcgactatatgtggcaagaagcgaaagttagcaaagcagttgaagcagcaagtgactagcacggaatcagcgccaggatcatacccggctgggctgtttctccagcatcctggtaggcacgaaatcgttgatggcattgagtattataacccacagtatctcctgcccccgggacaagacatgccgtctttagaatcgctgacgatatcgctgtgttgtcgaccacaaaccagtacccatgcagctcctcggtcgtcgctcggcgagcttgagaggggtcaaatgctgaggattttcgactcagcatccgagctttcaccgtccactatgatgaagcagagccctaggctacagacaaagttgaagagacatcaactcgaggcgcttgtcatgatgatcgagaaggaagcaggcatctatgatgatgcttactttcctccgctctggaagccatttccgggttacaaagagcggtatcaacatgtcaccacgggcatgttcgaaatgaagaagcctccgccggtaggaggtggcatactcgcagacgagatggggttaggtaagacgctgtctactctatccctgatttgccacacgcttgatgcactcgaaaaactaccagcttcagctcaatgcgagatgccgcgagccactctggttgtcacgccaaagtcaaccatttacggctgggagaagcagatccaaacacacatcaggaagggccgaattcgtttgatcgtatatcacggagaaagcggtcgacaagagcttcatagagctacctcttacgatatagtgctcacgacatatgatacactgcgctctgactacggtaaaggcggcccactttctaatgaaaaatgggctagagttgtcctcgatgaagcacacaagatccgcaatccttcatctaagattttccagacggtattcgaaataccggcagagaagcgatggtgccttactggtacgccgatccagaacgaccttgccgattttggagctttactctcattcgtcggcgtaccccctttcgacagagaaggcgagtttgcacgatacgtggaaaatcccgtgaacgcgaggaaagagggcagcttggatgttttgagagcacttatcgccgcaacgacgctgcggcggtcgaaggcgaatcatacccaggttctcgggctgccctgcaagactgagagggtggaaacagtggagctctgtaataaggatagacagctgtacgagtttttcaaacgccagtcttacctgattgcaaccctacgtaaatctggggcggcctcaagtggcgaaggaaaggcgcacgtggctggcggcaaaggctccaatatcttgctcctaattggtcttctccgcctcatatgtaatcacggtgaagctctcctgcccgactcggctgtcaaagcgtggaaaaagatggacaccagctccatcgattggaatatgctgaaattgggtgtcggcacctgtgtgggctgcggcaatgagatagacagtcttgatgccacggagtccgccgagcagatatttgcatgcggccatgccttctgtaccgattgtagtgccaaactccaaatgtcaggatctacttgtccgagatgcggaataaagggaactagtccgtcatcgaatacgctattgcattcgaccgtctcaagatcgccatctaggtcggatatcgacctaaaatctaccgctaaacgagaaaacgggccgtccccgtcaccttttggggaacaatatacatcatcagacaaggtgaaggcgcttcttcgcaacatcaacaacggtagtaaaggaaaacatgtggtatttagttattggaccaagatgctcgaccagattgccaaagcactcaaactgtatgacctcaaattccaaagaatcgacggccaggcctctctgcggcagagaaaagccgcaattgaaaactttagcaacgatgcaagctatcgcgtcatgattgccagcattggagcagctggagaaggcatagaactcaccgccgcaagcatagtccatgttgtagagccgcactggaatccgatggcagaagcccaagctattgaccgggtgcatcgatttggccaagaccgggatgtgactgttatcaaatacgtcgtggcaaactcgatcgaagagtacgtccagtgggtacaggcagacaagatcaagctaattaaggactccttctcggccaccgatggcgccgaggagagggtccacgaaacaagatggaatagattgttagagattctagaatag

SEQ ID NO: 35872 - protein, 864 aa, Muscodor strobelii
  misc_feature: SGI Peptide ID NO. 572426
  misc_feature (728)..(806): Pfam Id: PF00271 Pfam Desc: Helicase conserved C-terminal domain
  misc_feature (230)..(571): Pfam Id: PF00176 Pfam Desc: SNF2 family N-terminal domain
  misc_feature (38)..(823): NCBI GI: 256724319 Blast Desc: NECHADRAFT_87480 [Nectria haematococca mpVI 77-13-4]
  misc_feature (46)..(856): NCBI GI: 145235701 Blast Desc: An03g06240 [Aspergillus niger] gi|134058188|emb|CAK38380.1| protein product [Aspergillus niger]
  misc_feature (41)..(864): NCBI GI: 256721542 Blast Desc: NECHADRAFT_79818 [Nectria haematococca mpVI 77-13-4]
  misc_feature (138)..(855): NCBI GI: 85105641 Blast Desc: NCU05246 [Neurospora crassa OR74A] gi|28923601|gb|EAA32774.1| conserved [Neurospora crassa OR74A] gi|118496048|dbj|BAF37540.1| DNA repair and recombination protein
  misc_feature (85)..(846): NCBI GI: 156062442 Blast Desc: SS1G_01337 [Sclerotinia sclerotiorum 1980] gi|154696673|gb|EDN96411.1| SS1G_01337 [Sclerotinia sclerotiorum 1980]
  misc_feature (138)..(841): NCBI GI: 238482351 Blast Desc: helicase, [Aspergillus flavus NRRL3357] gi|220700464|gb|EED56802.1| helicase, [Aspergillus flavus NRRL3357]
  misc_feature (198)..(862): NCBI GI: 154302115 Blast Desc: BC1G_09738 [Botryotinia fuckeliana B05.10] gi|150855512|gb|EDN30704.1| BC1G_09738 [Botryotinia fuckeliana B05.10]
  misc_feature (223)..(855): NCBI GI: 238841798 Blast Desc: transcription termination factor 2 [Microsporum canis CBS 113480]
  misc_feature (137)..(824): NCBI GI: 242762199 Blast Desc: helicase, [Talaromyces stipitatus ATCC 10500] gi|218723523|gb|EED22940.1| helicase, [Talaromyces stipitatus ATCC 10500]
  misc_feature (72)..(855): NCBI GI: 171688590 Blast Desc: protein product [Podospora anserina] gi|170944257|emb|CAP70367.1| protein product [Podospora anserina]
MPTCRPVTPTSFSADISTSTIERQQVQGRIGENYKGARTYDTCFGMLIIDAETSLEATLPSKCTPAVVAFTDAIAKLYVQDQEICAAIFVSKPLSELLDRFGVTLAATICGKKRKLAKQLKQQVTSTESAPGSYPAGLFLQHPGRHEIVDGIEYYNPQYLLPPGQDMPSLESLTISLCCRPQTSTHAAPRSSLGELERGQMLRIFDSASELSPSTMMKQSPRLQTKLKRHQLEALVMMIEKEAGIYDDAYFPPLWKPFPGYKERYQHVTTGMFEMKKPPPVGGGILADEMGLGKTLSTLSLICHTLDALEKLPASAQCEMPRATLVVTPKSTIYGWEKQIQTHIRKGRIRLIVYHGESGRQELHRATSYDIVLTTYDTLRSDYGKGGPLSNEKWARVVLDEAHKIRNPSSKIFQTVFEIPAEKRWCLTGTPIQNDLADFGALLSFVGVPPFDREGEFARYVENPVNARKEGSLDVLRALIAATTLRRSKANHTQVLGLPCKTERVETVELCNKDRQLYEFFKRQSYLIATLRKSGAASSGEGKAHVAGGKGSNILLLIGLLRLICNHGEALLPDSAVKAWKKMDTSSIDWNMLKLGVGTCVGCGNEIDSLDATESAEQIFACGHAFCTDCSAKLQMSGSTCPRCGIKGTSPSSNTLLHSTVSRSPSRSDIDLKSTAKRENGPSPSPFGEQYTSSDKVKALLRNINNGSKGKHVVFSYWTKMLDQIAKALKLYDLKFQRIDGQASLRQRKAAIENFSNDASYRVMIASIGAAGEGIELTAASIVHVVEPHWNPMAEAQAIDRVHRFGQDRDVTVIKYVVANSIEEYVQWVQADKIKLIKDSFSATDGAEERVHETRWNRLLEILE

SEQ ID NO: 35873 - DNA, 1091 bp, Muscodor strobelii
  misc_feature: SGI EST ID NO. CUFF.85324.0
  misc_feature: Variant of the nucleotide sequence at SEQ ID NO 35871
tcttgctcctaattggtcttctccgcctcatatgtaatcacggtgaagctctcctgcccgactcggctgtcaaagcgtggaaaaagatggacaccagctccatcgattggaatatgctgaaattgggtgtcggcacctgtgtgggctgcggcaatgagatagacagtcttgatgccacggagtccgccgagcagatatttgcatgcggccatgccttctgtaccgattgtagtgccaaactccaaatgtcaggatctacttgtccgagatgcggaataaagggaactagtccgtcatcgaatacgctattgcattcgaccgtctcaagatcgccatctaggtcggatatcgacctaaaatctaccgctaaacgagaaaacgggccgtccccgtcaccttttggggaacaatatacatcatcagacaaggtgaaggcgcttcttcgcaacatcaacaacggtagtaaaggaaaacatgtggtatttagttattggaccaagatgctcgaccagattgccaaagcactcaaactgtatgacctcaaattccaaagaatcgacggccaggcctctctgcggcagagaaaagccgcaattgaaaactttagcaacgatgcaagctatcgcgtcatgattgccagcattggagcagctggagaaggcatagaactcaccgccgcaagcatagtccatgttgtagagccgcactggaatccgatggcagaagcccaagctattgaccgggtgcatcgatttggccaagaccgggatgtgactgttatcaaatacgtcgtggcaaactcgatcgaagagtacgtccagtgggtacaggcagacaagatcaagctaattaaggactccttctcggccaccgatggcgccgaggagagggtccacgaaacaagatggaatagattgttagagattctagaatagtgtcgcaaaccggccgtagtactacctctaagcgaaaactattgcgaattgcagccgcaaaacatcgactaagcgacgtataggcgatcattcggtttaaaaccttatatcttaaacttcagtatacagctttatctgtagtgcattgtgtttaaa

SEQ ID NO: 35874 - DNA, 3387 bp, Muscodor strobelii
  misc_feature: SGI cDNA ID NO. 572427
  misc_feature: Encodes the peptide sequence at SEQ ID NO 35875
atgtctacctacgaccccgccgatgaggcctttgatgctgctagaaagtcatttcgcgacggattaaaggacaagaaggtgtacgatgagataatcgcgggttctgccaccatgaacgacgtgtatcaactagcggcgaagctgcaagaagacgcggcttcgaaggcaggtatgcgccatcttggtagatggcgaccactccttgatgccctagcggggtacggacaagtcattgaagtcttcgtgcaagtgaaacctgagatcttagccctagtgtggggtccgattcgcctaatcctcaagtggtcgagcgagctgaccaaggccctcgacgacgtggccgtggtaatgctgaagattgctcaagctctgccgcagttctccgaactggtcaacgtgttctccgacaatgcacggatcaaggctgcgctggccttattttacggggatattcttcacttctaccgcgtcatcttgaagctgttccggctttcgggatggaaatcactgtgggaaacgctatggaatcgaaacaaacaggaaattgatgaaattgtgaagaaaattgccgagcatgcgctgctcatgagaaacgaggtcagcgtcgccgaaattatcaaggcggaccaagcgagggctcggttcctagctcacttagaggaagtgcaagaatttcaacagctgcaaaagttccagggcttgaggactcatctcaattcaccagagtatggcgaccgcctcgactggatacggaataggagccacagaggcagctccaagtggatgctacaggacaaagtgttccaacaatggctcgatatgtctgaaaaggacgtaacctggctctgggtgcagggcatacccggctctgggaaaacctatctcgctgctgcagctattgacgaagccgtcatgcatcacaagacattatatgtgtttgctagttataatactcagaacagcacgacggccttaatgatcacacaatcgctcgtcttccaagccgcagtcgagagtcagacgctgcagaccatagtagtcgaatttagcgagcgcgacttggcaagcgacggcggtaaggcgctggaactactgaaatcggtgctaatcgcttcgactgggacttatattatagttgatggtctggacgaggttgaagaaactgaacgccgtatcttgctgcaccgtctagatgacctagttagtgcatgcagcaaggtgaagattctcatctgtagtcgaccagaagatgatattgcagaagcaatgagcaagaagagtagacaaatcagggtagaccagaggaatatggcaagtatccagagatttgtcgatcagaaaacagaggaatggatagctcttagacaattcgatcaagaaatagcttctgaaatcagctgtttactatcaccacttccggctcgcgccaatgtgcaaggcatgttcctctacgcccgtattgtgttagagaatctagcgcagcttagtactatcaaagagatccaacaagagctccaaacactcccgacaaatatggatacgatctacgaacgggccatatctagaatctacaatttaccgcccctaatgcaaaaaaaggctctaaaggtactcagctggatagggtgcgctcctacacctatgtcaaccattgagatagaacaggccctgtctctagacgagagctcagaagaacttccttcaatcattaatggcgtcaaattcgtccagttgtgcggcccgattattgaggttgtgaatgataagccacaattcgtacacttcactgtcaaggaatacatttttaatgctgaaggctatggcaagattcgcatgaaagaagccattcaatcgctcgcgatcgccaatctatcctatttgtgcttgggtatgctcgactcggattctgtcgatacagactcaaatattcgccaaaatattcttgccgggaattatcgacttttggactataccgcctggtactggtcagggctcactctaaaagcaatacaaaatattttacccgtatctctctatggcgagaatcatgatgcctggtctcttatcaaatgcctcctttcacgagctgccgccgaagttgagaactacgattttgcgccagatgaagaatcattaaagccaatgcttgagagcgatgaccacaaatatgcgtcgcaggagtgtggcgacttgctcagcgccgcttgtcgttttcgtcgggatgaacgacagggtgactggacgatggccaatgccaagacatgggtcaaccttgacccgacaacaacttccaagaccattgttcgtgtcaagaaatgtttcgagtcgttactttgtggcaacgatacccacgatgacaccagtgctaaacagtgcaagtctgactgtcgttgggctgcgctacagcgccactatgggcctcgcttctacggtttttctatcattggtttcaactcgcagcagagaaaagatatccatgtcaaacgttttcacgaagacgaaacctcgcagatatcgatgatcgacgccgataggatggcatcttccaattttgacaatctagacgaatatgagctccagcctctgctcttcatttttgtccgggtcaataatacggaggcagtcaaacgtctcctagcctcatcgaatgcggcgaagatcaaggaaaaagccgtgatcgcagctcgcgatttagcggcaaggcaaggctcgatggctatgacgcagctcctcactcgtgagagcaaggggcgcttacctataagcgttttgacctacgcagtactgagcgaagatgtggagtttttcaagtgggggctatcatacacctctgcctcggatatgaatacaaaaccattcaataagctcatgctttgtactgcaagcgatgagtttcatttattgtgggtagctgctctcaaggaatcccagttgacgaggaaaaccctttttagcaaggccgttttcatcgacgtcaaaaataacccacttggggaagaaagacttatcactacctggaaactgctgatgcaccaaatctacttgagagagacaatgtgggatgcccttcctcaggctcttgttgcattagcgagctcaaccttatcagctcgaatcggcagaggaattttggagctgaaacctggtgagtgggcgatgcgccaggagaagacagaggccctaaggttggcagtgaagaagacgacgaaagaggctgcagagttcatgaagatgctcttagagcatgacctttacgcacgtgagcagtttgcctggaacaagatatatctatacgaagatgagcctggtccaaaagggatccagaaatggctcggcgtaacttggagagagctaatagaccaaacatggggtgtgttaagagactaa

SEQ ID NO: 35875 - protein, 1128 aa, Muscodor strobelii
  misc_feature: SGI Peptide ID NO. 572427
  misc_feature (1)..(1120): NCBI GI: 256724218 Blast Desc: NECHADRAFT_87481 [Nectria haematococca mpVI 77-13-4]
  misc_feature (1)..(1118): NCBI GI: 145235703 Blast Desc: An03g06250 [Aspergillus niger] gi|134058189|emb|CAK38381.1| protein product [Aspergillus niger]
  misc_feature (10)..(1122): NCBI GI: 159128646 Blast Desc: NACHT domain protein [Aspergillus fumigatus A1163]
  misc_feature (10)..(1122): NCBI GI: 119497799 Blast Desc: NFIA_033260 [Neosartorya fischeri NRRL 181] gi|119413821|gb|EAW23760.1| [Neosartorya fischeri NRRL 181]
  misc_feature (9)..(1121): NCBI GI: 256721517 Blast Desc: NECHADRAFT_39728 [Nectria haematococca mpVI 77-13-4]
  misc_feature (10)..(601): NCBI GI: 146322724 Blast Desc: NACHT domain protein [Aspergillus fumigatus Af293] gi|129556771|gb|EBA27303.1| NACHT domain protein [Aspergillus fumigatus Af293]
  misc_feature (1)..(477): NCBI GI: 171683077 Blast Desc: protein product [Podospora anserina] gi|170941498|emb|CAP67150.1| protein product [Podospora anserina]
  misc_feature (5)..(513): NCBI GI: 169597869 Blast Desc: SNOG_01726 [Phaeosphaeria nodorum SN15] gi|111070255|gb|EAT91375.1| SNOG_01726 [Phaeosphaeria nodorum SN15]
  misc_feature (11)..(662): NCBI GI: 242762193 Blast Desc: zinc finger protein, [Talaromyces stipitatus ATCC 10500] gi|218723522|gb|EED22939.1| zinc finger protein, [Talaromyces stipitatus ATCC 10500]
  misc_feature (8)..(559): NCBI GI: 212539077 Blast Desc: NACHT domain protein [Penicillium marneffei ATCC 18224] gi|210069436|gb|EEA23527.1| NACHT domain protein [Penicillium marneffei ATCC 18224]
MSTYDPADEAFDAARKSFRDGLKDKKVYDEIIAGSATMNDVYQLAAKLQEDAASKAGMRHLGRWRPLLDALAGYGQVIEVFVQVKPEILALVWGPIRLILKWSSELTKALDDVAVVMLKIAQALPQFSELVNVFSDNARIKAALALFYGDILHFYRVILKLFRLSGWKSLWETLWNRNKQEIDEIVKKIAEHALLMRNEVSVAEIIKADQARARFLAHLEEVQEFQQLQKFQGLRTHLNSPEYGDRLDWIRNRSHRGSSKWMLQDKVFQQWLDMSEKDVTWLWVQGIPGSGKTYLAAAAIDEAVMHHKTLYVFASYNTQNSTTALMITQSLVFQAAVESQTLQTIVVEFSERDLASDGGKALELLKSVLIASTGTYIIVDGLDEVEETERRILLHRLDDLVSACSKVKILICSRPEDDIAEAMSKKSRQIRVDQRNMASIQRFVDQKTEEWIALRQFDQEIASEISCLLSPLPARANVQGMFLYARIVLENLAQLSTIKEIQQELQTLPTNMDTIYERAISRIYNLPPLMQKKALKVLSWIGCAPTPMSTIEIEQALSLDESSEELPSIINGVKFVQLCGPIIEVVNDKPQFVHFTVKEYIFNAEGYGKIRMKEAIQSLAIANLSYLCLGMLDSDSVDTDSNIRQNILAGNYRLLDYTAWYWSGLTLKAIQNILPVSLYGENHDAWSLIKCLLSRAAAEVENYDFAPDEESLKPMLESDDHKYASQECGDLLSAACRFRRDERQGDWTMANAKTWVNLDPTTTSKTIVRVKKCFESLLCGNDTHDDTSAKQCKSDCRWAALQRHYGPRFYGFSIIGFNSQQRKDIHVKRFHEDETSQISMIDADRMASSNFDNLDEYELQPLLFIFVRVNNTEAVKRLLASSNAAKIKEKAVIAARDLAARQGSMAMTQLLTRESKGRLPISVLTYAVLSEDVEFFKWGLSYTSASDMNTKPFNKLMLCTASDEFHLLWVAALKESQLTRKTLFSKAVFIDVKNNPLGEERLITTWKLLMHQIYLRETMWDALPQALVALASSTLSARIGRGILELKPGEWAMRQEKTEALRLAVKKTTKEAAEFMKMLLEHDLYAREQFAWNKIYLYEDEPGPKGIQKWLGVTWRELIDQTWGVLRD

SEQ ID NO: 35876 - DNA, 1498 bp, Muscodor strobelii
  misc_feature: SGI EST ID NO. CUFF.85335.0
  misc_feature: Variant of the nucleotide sequence at SEQ ID NO 35874
tttcaacagctgcaaaagttccagggcttgaggactcatctcaattcaccagagtatggcgaccgcctcgactggatacggaataggagccacagaggcagctccaagtggatgctacaggacaaagtgttccaacaatggctcgatatgtctgaaaaggacgtaacctggctctgggtgcagggcatacccggctctgggaaaacctatctcgctgctgcagctattgacgaagccgtcatgcatcacaagacattatatgtgtttgctagttataatactcagaacagcacgacggccttaatgatcacacaatcgctcgtcttccaagccgcagtcgagagtcagacgctgcagaccatagtagtcgaatttagcgagcgcgacttggcaagcgacggcggtaaggcgctggaactactgaaatcggtgctaatcgcttcgactgggacttatattatagttgatggtctggacgaggttgaagaaactgaacgccgtatcttgctgcaccgtctagatgacctagttagtgcatgcagcaaggtgaagattctcatctgtagtcgaccagaagatgatattgcagaagcaatgagcaagaagagtagacaaatcagggtagaccagaggaatatggcaagtatccagagatttgtcgatcagaaaacagaggaatggatagctcttagacaattcgatcaagaaatagcttctgaaatcagctgtttactatcaccacttccggctcgcgccaatggcatgttcctctacgcccgtattgtgttagagaatctagcgcagcttagtactatcaaagagatccaacaagagctccaaacactcccgacaaatatggatacgatgtctacgaacgggccatatctagaatctacaatttaccgcccctaatgcaaaaaaaggctctaaaggtactcagctggatagggtgcgctcctacacctatgtcaaccattgagatagaacaggccctgtctctagacgagagctcagaagaacttccttcaatcattaatggcgtcaaattcgtccagttgtgcggcccgattattgaggttgtgaatgataagccacaattcgtacacttcactgtcaaggaatacatttttaatgctgaaggctatggcaagattcgcatgaaagaagccattcaatcgctcgcgatcgccaatctatcctatttgtgcttgggtatgctcgactcggattctgtcgatacagactcaaatattcgccaaaatattcttgccgggaattatcgacttttggactataccgcctggtactggtcagggctcactctaaaagcaatacaaaatattttacccgtatctctctatggcgagaatcatgatgcctggtctcttatcaaatgcctcctttcacgagctgccgccgaagttgagaactacgattttgcgccagatgaagaatcattaaagccaatgcttgagagcgatgaccacaaatatgcgtc

SEQ ID NO: 35877 - DNA, 1134 bp, Muscodor strobelii
  misc_feature: SGI cDNA ID NO. 572428
  misc_feature: Encodes the peptide sequence at SEQ ID NO 35878
atgtctcccttcgtataccaggatcttcctagttctttcaaggggctgcgcttcaattctgcatcagagtccccgaaagtcacagacatccctacgcccccagtagataatggctctgtggtcgttcgacctctgtttagctgggttgttggttacgccaacgagctctacctgaatggaaatccacgaaactatcccattccattcccaattgtaccaggctcgaacgcaatcggtcgaattgctgctgtacccgcagacgccacgatcttgaaggtcggagatcttgtcactgtggagccgttcatacatcctcgagacgatcctgactcgggtctgctcattgcaattagtcctggcattaaagaagaaactcaaaaattgtccaagagccaatggcacaacggtacttgggctgaattggttcgagtcccgcttgagaacgtccatcgattcgatgaagctgcattacagaaacaaggtatttcaatacaagatcttgggttcttcggtcaattggcgattggatatggtggtctgcgcgacgttaatttggctgccggagagaccattgcaatctctcctgcgaccggaaacttgggcggagctgctgtccatgccgcccttgctataggcgcccgcgtcattgtaatgggtcgcaatgagaaaattctctctgagcttcgaagcttggcgccggggcgtgttgagtctgtcactctgagcggcagccttgaaacagatcttcaagcgctcgctaaattcggcaaactcgatgtgttcctcgacatatccccgccacaagtcactaacacgagccacatcactgcagcgatactcagtttgcgtcacggtggaagagtcagtctgatgggtgggcttagcgagttgaccatcccctacatgtttatcacccacaataacatcactttgcagtcgacgcagatgtatactcgtgagcaagctagagacttggtgaaattgattgagactggagttctgaaacttggtgagaaagccggattgaagactatgggagtcttcaagcttgaggacggagagaaagctgtcgaggcggctgctgtacaatcgggggctggccgagctgtctatttcgctccaaatcgggagtaa

SEQ ID NO: 35878 - protein, 377 aa, Muscodor strobelii
  misc_feature: SGI Peptide ID NO. 572428
  misc_feature (37)..(152): Pfam Id: PF08240 Pfam Desc: Alcohol dehydrogenase GroES-like domain
  misc_feature (187)..(331): Pfam Id: PF00107 Pfam Desc: Zinc-binding dehydrogenase
  misc_feature (64)..(104): Pfam Id: PF08240 Pfam Desc: Alcohol dehydrogenase GroES-like domain
  misc_feature (1)..(377): NCBI GI: 261358234 Blast Desc: alcohol dehydrogenase GroES domain-containing protein [Verticillium albo-atrum VaMs.102]
  misc_feature (9)..(375): NCBI GI: 212544364 Blast Desc: alcohol dehydrogenase, [Penicillium marneffei ATCC 18224] gi|210065305|gb|EEA19399.1| alcohol dehydrogenase, [Penicillium marneffei ATCC 18224]
  misc_feature (8)..(361): NCBI GI: 256726237 Blast Desc: NECHADRAFT_81942 [Nectria haematococca mpVI 77-13-4]
  misc_feature (1)..(374): NCBI GI: 156061299 Blast Desc: SS1G_02792 [Sclerotinia sclerotiorum 1980] gi|154700196|gb|EDN99934.1| SS1G_02792 [Sclerotinia sclerotiorum 1980]
  misc_feature (9)..(372): NCBI GI: 154319662 Blast Desc: BC1G_02312 [Botryotinia fuckeliana B05.10] gi|150855970|gb|EDN31162.1| BC1G_02312 [Botryotinia fuckeliana B05.10]
  misc_feature (7)..(374): NCBI GI: 242823919 Blast Desc: quinone oxidoreductase, [Talaromyces stipitatus ATCC 10500] gi|218713077|gb|EED12502.1| quinone oxidoreductase, [Talaromyces stipitatus ATCC 10500]
  misc_feature (9)..(374): NCBI GI: 256728770 Blast Desc: NECHADRAFT_86057 [Nectria haematococca mpVI 77-13-4]
  misc_feature (9)..(374): NCBI GI: 261198679 Blast Desc: isopropanol dehydrogenase [Ajellomyces dermatitidis SLH14081] gi|239594893|gb|EEQ77474.1| isopropanol dehydrogenase [Ajellomyces dermatitidis SLH14081] gi|239609983|gb|EEQ86970.1|
  misc_feature (7)..(374): NCBI GI: 145615352 Blast Desc: MGG_05519 [Magnaporthe grisea 70-15] gi|145022190|gb|EDK06210.1| MGG_05519 [Magnaporthe grisea 70-15]
  misc_feature (9)..(359): NCBI GI: 39960341 Blast Desc: MGG_09359 [Magnaporthe grisea 70-15] gi|145014309|gb|EDJ98877.1| MGG_09359 [Magnaporthe grisea 70-15]
  misc_feature (9)..(376): SWISSPROT Homolog: EC 1.1.1.14 L-iditol 2-dehydrogenase
MSPFVYQDLPSSFKGLRFNSASESPKVTDIPTPPVDNGSVVVRPLFSWVVGYANELYLNGNPRNYPIPFPIVPGSNAIGRIAAVPADATILKVGDLVTVEPFIHPRDDPDSGLLIAISPGIKEETQKLSKSQWHNGTWAELVRVPLENVHRFDEAALQKQGISIQDLGFFGQLAIGYGGLRDVNLAAGETIAISPATGNLGGAAVHAALAIGARVIVMGRNEKILSELRSLAPGRVESVTLSGSLETDLQALAKFGKLDVFLDISPPQVTNTSHITAAILSLRHGGRVSLMGGLSELTIPYMFITHNNITLQSTQMYTREQARDLVKLIETGVLKLGEKAGLKTMGVFKLEDGEKAVEAAAVQSGAGRAVYFAPNRE

SEQ ID NO: 35879 - DNA, 2287 bp, Muscodor strobelii
  misc_feature: SGI EST ID NO. CUFF.85338.0
  misc_feature: Variant of the nucleotide sequence at SEQ ID NO 35877
ctttcacgctatggtgcctgaccacatatgcacgttcgcagaaagttgcagctgtgagttagtcatttcagctgcatcagcggactttgagtttgctgacaattgtcatgctagccaggtagtcaattaatcgaccaagatgttattgctatcaaaccgttggtgatggaagaatcgacgatgtgtagaactgtctacctatataatgcgtcatggtcgcactctacgccgggttgttaactgagcggcatcagcttcttacctctttttgatatacagcatttgtctcaaaccacaagagcatatttgaataaatcatgtctcccttcgtataccaggatcttcctagttctttcaaggggctgcgcttcaattctgcatcagagtccccgaaagtcacagacatccctacgcccccagtagataatggctctgtggtcgttcgacctctgtttagctgggttgttggttacgccaacgagctctacctgaatggaaatccacgaaactatcccattccattcccaattgtaccaggctcgaacgcaatcggtcgaattgctgctgtacccgcagacgccacgatcttgaaggtcggagatcttgtcactgtggagccgttcatacatcctcgagacgatcctgactcgggtctgctcattgcaattagtcctggcattaaagaagaaactcaaaaattgtccaagagccaatggcacaacggtacttgggctgaattggttcgagtcccgcttgagaacgtccatcgattcgatgaagctgcattacagaaacaaggtatttcaatacaagatcttgggttcttcggtcaattggcgattggatatggtggtctgcgcgacgttaatttggctgccggagagaccattgcaatctctcctgcgaccggaaacttgggcggagctgctgtccatgccgcccttgctataggcgcccgcgtcattgtaatgggtcgcaatgagaaaattctctctgagcttcgaagcttggcgccggggcgtgttgagtctgtcactctgagcggcagccttgaaacagatcttcaagcgctcgctaaattcggcaaactcgatgtgttcctcgacatatccccgccacaagtcactaacacgagccacatcactgcagcgatactcagtttgcgtcacggtggaagagtcagtctgatgggtgggcttagcgagttgaccatcccctacatgtttatcacccacaataacatcactttgcagtcgacgcagatgtatactcgtgagcaagctagagacttggtgaaattgattgagactggagttctgaaacttggtgagaaagccggattgaagactatgggagtcttcaagcttgaggacggagagaaagctgtcgaggcggctgctgtacaatcgggggctggccgagctgtctatttcgctccaaatcgggagtaatatgtagcgctaagaaagtagcgatctgagcacataggtgctacagcggctcataggtgtattcacatatatatcagccgcctgatcatctgaatggttctgagatgtagtagccctgacttagtctcttaacacaccccatgtttggtctattagctctctccaagttacgccgagccatttctggatcccttttggaccaggctcatcttcgtatagatatatcttgttccaggcaaactgctcacgtgcgtaaaggtcatgctctaagagcatcttcatgaactctgcagcctctttcgtcgtcttcttcactgccaaccttagggcctctgtcttctcctggcgcatcgcccactcaccaggtttcagctccaaaattcctctgccgattcgagctgataaggttgagctcgctaatgcaacaagagcctgaggaagggcatcccacattgtctctctcaagtagatttggtgcatcagcagtttccaggtagtgataagtctttcttccccaagtgggttatttttgacgtcgatgaaaacggccttgctaaaaagggttttcctcgtcaactgggattccttgagagcagctacccacaataaatgaaactcatcgcttgcagtacaaagcatgagcttattgaatggttttgtattcatatccgaggcagaggtgtatgatagcccccacttgaaaaactccacatcttcgctcagtactgcgtaggtcaaaacgcttataggtaagcgccccttgctctcacgagtgaggagctgcgtcatagccatcgagccttgccttgccgctaaatcgcgagctgcgatcacgg

SEQ ID NO: 35880 - DNA, 891 bp, Muscodor strobelii
  misc_feature: SGI cDNA ID NO. 572429
  misc_feature: Encodes the peptide sequence at SEQ ID NO 35881
atgacgaacacagcgaagtcgtcaaaacgcaagaaacgaaatgacgggctcattgaggccgataccgcaccacaggattcaaattatacaaaatccaagaatgagctcacattatggccacctcgaatggcgcaaccatactgtcgagatcatttcttgatggaggccgagatctattacgaacaggaaaacgagaagtacagaaagctagttgcgcactctcgaaagaagttcctcgccaaacaggggaaatattctaaggtccctccacaaacaacgaggcgtcagccgtcccgccgagcgaaaacaacgcttgcatcttcgaggacgagatctgtaacttgttcaaagatacgagacctcgaaattgcacccttccgacccccgaagatagagaaggtattccaagagtcgccggaaggcaaaatgatgcagctcctaacgatatgttataagaagtatgggttgcaccgaacctgggaacagttccgatcgcatgtagctggatctgttgatgcagtagttaaagatttacaagcggccaagaaggagagaacagagcccgatctttgcatgctctacgactcgaccagcgcccaatgccgatactgcgatgacaacccagtatcgcgacacacgaagagaatgactcttagacaaaagccaaaagctaagaatacaaaagagcaatggattgatatgtccggcatgagaatcatgatagatatctgcgaggaggacgcgaagatcttagttatacatttcaagggtctgctagattcatgcgctgagctcttcgatgaactggatattccggcgagaaataccccacaaaccgatagcaaggcgcacttggagcgggaggagaaagttctgttgaacagactttga

SEQ ID NO: 35881 - protein, 296 aa, Muscodor strobelii
  misc_feature: SGI Peptide ID NO. 572429
MTNTAKSSKRKKRNDGLIEADTAPQDSNYTKSKNELTLWPPRMAQPYCRDHFLMEAEIYYEQENEKYRKLVAHSRKKFLAKQGKYSKVPPQTTRRQPSRRAKTTLASSRTRSVTCSKIRDLEIAPFRPPKIEKVFQESPEGKMMQLLTICYKKYGLHRTWEQFRSHVAGSVDAVVKDLQAAKKERTEPDLCMLYDSTSAQCRYCDDNPVSRHTKRMTLRQKPKAKNTKEQWIDMSGMRIMIDICEEDAKILVIHFKGLLDSCAELFDELDIPARNTPQTDSKAHLEREEKVLLNRL

SEQ ID NO: 35882 - DNA, 729 bp, Muscodor strobelii
  misc_feature: SGI EST ID NO. CUFF.85347.0
  misc_feature: Variant of the nucleotide sequence at SEQ ID NO 35880
caagcggccaagaaggagagaacagagcccgatctttgcatgctctacgactcgaccagcgcccaatgccgatactgcgatgacaacccagtatcgcgacacacgaagagaatgactcttagacaaaagccaaaagctaagaatacaaaagagcaatggattgatatgtccggcatgagaatcatgatagatatctgcgaggaggacgcgaagatcttagttatacatttcaagggtctgctagattcatgcgctgagctcttcgatgaactggatattccggcgagaaataccccacaaaccgatagcaaggcgcacttggagcgggaggagaaagttctgttgaacagactttgagcgcttgcttttttcgtgcgtcgtaaatgcaccttgaactgtccatctaagggtgctactagaaaacttcacgctcaaatcattacatggccgttggaggatgcagacgtattatattccagcatagtctgttcgtacttgggagtcctaacgtgttataagcacggcacgcttttggcatcgtggagcgtggaaacaaagtgttctaatgcgacgcgaaccgcgaaacccgaaggtaacaacgtcacaatcaactgtgcctacggcactcggccccagcatcagcaacattaacacctgattgcagttcacaactatcaaaaagcaatattaaattgtgcaaacaagaaatgtagaaatatgagatgaacc

SEQ ID NO: 35883 - DNA, 6096 bp, Muscodor strobelii
  misc_feature: SGI cDNA ID NO. 572431
  misc_feature: Elevated expression when VOC is produced
  misc_feature: Encodes the peptide sequence at SEQ ID NO 35884
atggatgttttcagtcccgctgaactgcgcttaccatcaccatcaccgtcgtcctcccaatctgattcaactcatagccaccgccagccgacatcgttgagccgctctcgctttgtaaggcacttgtcgctacggcagagcaccgtgacctcgtattctagtagtacagattctgtcaccactggtaaaggtcccttagggttgacgactctccatcatgtttctaatggcgctgctccggcggcccacatcgtatttgtacatggactcggcggcggttctgagcatacatggagcaaggatggaatactatggccgagagatctacttcctcaacagaatggcttccaccaaacggcaattttctccttcggttatgactcagatttcagaaaaagcagcacgttgaatatacacgatttcgccaaatcattattgaacgaccttttgaatgatcctattatcagcgactccaagtctccgatcattcttgttggtcatagtatgggcggccttgttatgaaacaggcctatatacttgctaagcagatgtctgtatataatgccgtggccgacagagcaaaggccatggtgttcattgccactccacatacaggatcggaactagctccaatactcgaaaagctatttcgaatgacgtcggggttgaagccttatctacaagacttgggcaagaactctgcaactgtgcaagcaatcaactctcttttcccttctcaatcatccgatttgcttttgcattccttttacgagacagatgcattaagtatagggggcctgagggacgtccttattgtcccgaaaggagacgccatactcaactatgcccatgagcagtcagcactactctacggtaatcatcggagcgtttgcaaatttgcttcggcggaagaccataacttcacagcagtatggcgagcaatcgctgcatgcctccacgagctcaaacagacagatgagtgtttgtttcaatcgcagtcccccgtcagcagtgatttccaaaccaatacggaacttagcgaatgcttgaagatatgggaaccacctgctgacgagctgtaccgcgtcaagactgatcgtcttcaagggacgtctgaatggctcggcaatgatgcggaatatcaacagtggcagcatgagagcccaagccgcagaattttttggataagagggccgccagggtgcggtaagtcgtacattgctggtcatattatcgagcagcttgagaacactggccagaaccactgctactattttttccggcatggcgataaaattaaatcctcgatggaaaacttcctcctttccatggcctggcaaatggctcgacacccagatgttcggaagcggatagtgcaagtctgcactagggatcgtggtgtttcatcgggtgactatagaacattgcatcggaagctatgggatcaagcgatttttcgcgccaatttggactccgagattacatactggataatcgatgccttcgacgaatgccgcctcgggcaagaactcgcgaaattcttacaacgtgttatagacacgacccggggtctcgtcaagatcgttaccacctcaagacatccctacagtcaatattctctgcctcttactcacatacatcttcgagagatacagacgagtgacattcaagaagatatcgagagatttctgaacgcaaatcatcttgagttgccgggctctaacacagctgagcgcaatcacctcaagggccttatcctggaaaaatctaacggctgtttcctgtgggccgttctggtactacagcgcttaaggcgaattgttggttcacaagcacgtttaagagcgctcgaggagattccgccgggtatggaccaactctatgcgagaacactcgagtctatttcgaccaaagatgagctctccaccactgtgctcacctgggtcacctgtgctgtccgacctcttacaacaaatgagctgaagtttgtgcttgaagacttggcaatggacgagattggtggtatagaaacgcttttgtcccattactgctacgatttagtctatgtggacgagcgtgggctagtcaaaatgcgacactctagtgcaacgagattccttctccgacacgacgtgaattccgaatatgatgcttttactatcgacgaagggtcgggccacaaaatgctagcgatggcttgtctcaagttcttgaatgggtctgaaatgaaagcaaaaagacgcaagatggtagccatggcccaagagcgctcggtgttcgcagtgtacgcgtgtcatgctctacatgaacatgtcaataagagtcacgcgtacgacgatgagatcctcagcagcctagctgtattcttgaaatctagcgttttattctggatcgaatatctggctagcattggggatctggagacaatattacattttgcccaggtcttgaaaacctttttacgccgcaaatctcgagtcaacctgctacttggagaggatgtggtcatcgtcgatgcatgggccaccgaccttgtgagactgatcagcaagttcgggccgcaacttttggtccatccggagtctatcattagcttaatcccgcccttctgtcctttagaatctgcgccctacatccagtttgcgacctctgctatgacatcagcggtacaagttcgcggtctatcagctaggacttgggatgattatctttgtgctgttgtaccgagcgatccatatggcgttgcatcctcaacgattgttaggcgtgagcggttttactgcctttcggtttccgacaatgtattctgcatcggtacttctcttggccgcatctgtgtcttcaacgagcaaacgtgtctggaagatagaacggtctctcacggaggcccagtaacccatcttcagtccggcagctctaagccacttcttgcaagttttggcaagcggatcgttcgaatatggaatacagagacctgggatatgcaatgggagatcccgacgagacaaaattgccttgcaatgcatttcgtggacgacgatcagattctcttagtcgccttgaagaacaacactcttctggcactcaaccttgtcaatcggacatcagaatcaagtagctggaccgacaacatggatgatccatatagaaactggtatcacggcatcactccacagtgcgcgtcatttaatcctgatctaaatcttttagccgttggatattcttgtcgaagtgttttgatttacaattacgagttggagtcccaccagctattcgatcacaatgagggcgtatcagactctctgaaccaccataatataatacagctctactgcatggcattcagtaatcttcctgacacgtcccttttagccgttaattatagcacatcagagctggttctcttcgataccgacgaaggcgctatcaaagcaaaaataccatcggtatacttctcacaactagtatcttcgccagacggcagaacccttgcagctgctcgaaacgacggcgccatcgagctctatgattttgaaacgttacataagatatatcgaatacggccagcggatggttcagttgcctgtttagcatttgccgcagataacactcggttcctggtcattcgcgcgggagctcgcaattgtagcgtatggagtcccgctactttgtaccgtcgggatgttggacatgatagtgtacgttcaccatccttaggaagtgggagccaggacggcgtcaatgaccaacccgaaacctcgattacgcaaatcagcgcaatagtcagcgacgcaagcggagaggtcttttttgttggaaaagaagatttcaccgtttcaatttttgactcgaagaccggtaacccctttggcgtgcttttcgaacacgcagctacgatcaaagcctttcagttcgttgctaaggggtcactttatctgctaattagcactgataccgctggctttttgatggcgcacaaaatcatcaagatcgctagtaaatggactgctgaatgtctcttcaaacatcgagcctctgctgcgggtatccaacaatttttatgcaacgcaaatgcatcacaccttttagtctgctccaacgatcaggcctctatcatctcagccaccacaggcaaggctctaataaactcgatccagctccagggccctgagggcggaacttatttttggatgagccaccccacggatccctccttgctattgggcttaactgccacaaccgtgcagctatatgcatggtccacgctggagctcgtttcaacttcggcagaaggtgtacttgtgacagggagtctcttacctgaattacagatccgtgaagcccatttggcctttgccagttcaaatgccatgctcataaccatgctgagtctactatgcctctactcgagtgccagcctgaacatgaattctcactcaacagtcaaaggacctcagcagcgtactgaagatgatatacctatctcaccagctcgaataggcgccgacgctactgctggggctacacccaccggacctgtcgcccaagacaagccctacagcgtattcaacccgcggcagaagcgagtgctcactggcctcctcagctacgccagtctcgcctcaccgctaacagcgaatatctatcttccacttctcccactattgcaaacggaatacaatgcctcggcacaagcgatcaatctcaccatcacgctgtacgtggtggtgcaggcagtcctaccgcttttcttcgccccgaccgcagaccaatacggtcgcaggctcgtgagtatgggcacgctgtttgtgtatctgataggcagtcttggtctcactctcaacgaggctatcaacaaatcctacccagcactacttctcctccgttctctacaggccctcggcgccagcgcctgtgcgacaacgatctacggtgtcgtgagcgatgtgtgcatacctgctgaacgaggcgctatggtcggaccggtcatagggctttccaacgtcggtaccgtgctagggcctacccttggaggagtcatcgcctggagcactggcagcggagcttgggttttcggcgcactaactatatactcgggttccgtcttcatcttgattgcagtgttctggcctgaaacggcgcgaaaggtcgtagggaatggcgtagagggcaaccgtctgcaacttgcgggtttgaagggatggctggtactaggccctcggtgggcactgtcgaagagcattgcaattgatacacttagcgctgtctcgcaagaaaaggactccaatcagggctcgcaagccacagcaacaacatctgagtcccattcaacaagagtaaaaaaacgattccgatgtcccaatcctctgtcaagtttgacaatcattctctcaagagacacggcgctaattctgtggctcggtagcgctagttatgccgagtggtatacagtgaatgccgcatggccacagatattcaaggccgcctacggatggaatgagctcatcatcggactggcctacctaccgagcgcggtatccatcgtgcttgccggcttcgtgacggggccctggatgaacgcccgctaccggaagacggcgaaagaggctgggttaccagccgatgggcaccgtgttgacggatttccaattgagcgtgcgcgtctcagggaactctggatcgtctttggaattacccaccttggcatcgcgggcctgggatgggcggcgcgttatcatgcgcatccggctgtggtgctcgtcctcacggcaatcacggggttttcgaagtcaatgttgttctcatcgtgtaatacgctgttggttgacgttcatccagatagacctagcacggcggcggcggcagcgtctctagtgcgaagtggtttgagtggcatcggattggccgtgttgcagcctctcgctgacgcattaggctggggctggttctttactctactcgctttatttgtggcacttactcagggcatctgtatgctggcgttgttaagatggggtccggagtggcggaagcaaagggttgctaacgaaagagctcgggaggcagaaaagaatgaacaatcggcttcgaaatga

SEQ ID NO: 35884 - protein, 2031 aa, Muscodor strobelii
  misc_feature: SGI Peptide ID NO. 572431
  misc_feature (1535)..(1968): Pfam Id: PF07690 Pfam Desc: Major Facilitator Superfamily
  misc_feature (78)..(322): Pfam Id: PF07819 Pfam Desc: PGAP1-like protein
  misc_feature (46)..(1438): NCBI GI: 255937083 Blast Desc: Pc13g11510 [Penicillium chrysogenum Wisconsin 54-1255] gi|211584188|emb|CAP92220.1| Pc13g11510 [Penicillium chrysogenum Wisconsin 54-1255]
  misc_feature (14)..(1468): NCBI GI: 46135873 Blast Desc: FG09452.1 [Gibberella zeae PH-1]
  misc_feature (50)..(1430): NCBI GI: 256733681 Blast Desc: NECHADRAFT_36093 [Nectria haematococca mpVI 77-13-4]
  misc_feature (47)..(1420): NCBI GI: 146323333 Blast Desc: NACHT and WD domain protein [Aspergillus fumigatus Af293] gi|129558342|gb|EAL92825.2| NACHT and WD domain protein [Aspergillus fumigatus Af293]
  misc_feature (47)..(1420): NCBI GI: 159127877 Blast Desc: AFUB_041630 [Aspergillus fumigatus A1163]
  misc_feature (57)..(1463): NCBI GI: 171679241 Blast Desc: protein product [Podospora anserina] gi|170939246|emb|CAP64474.1| protein product [Podospora anserina]
  misc_feature (78)..(1428): NCBI GI: 261358157 Blast Desc: SERAC1 [Verticillium albo-atrum VaMs.102]
  misc_feature (37)..(1427): NCBI GI: 258563436 Blast Desc: [Uncinocarpus reesii 1704] gi|237907970|gb|EEP82371.1| [Uncinocarpus reesii 1704]
  misc_feature (63)..(1423): NCBI GI: 225555206 Blast Desc: NACHT and WD domain-containing protein [Ajellomyces capsulatus G186AR]
  misc_feature (63)..(1423): NCBI GI: 240281426 Blast Desc: NACHT and WD40 domain-containing protein [Ajellomyces capsulatus H143]
  misc_feature: Useful for introducing or modulating the production of volatile compounds
MDVFSPAELRLPSPSPSSSQSDSTHSHRQPTSLSRSRFVRHLSLRQSTVTSYSSSTDSVTTGKGPLGLTTLHHVSNGAAPAAHIVFVHGLGGGSEHTWSKDGILWPRDLLPQQNGFHQTAIFSFGYDSDFRKSSTLNIHDFAKSLLNDLLNDPIISDSKSPIILVGHSMGGLVMKQAYILAKQMSVYNAVADRAKAMVFIATPHTGSELAPILEKLFRMTSGLKPYLQDLGKNSATVQAINSLFPSQSSDLLLHSFYETDALSIGGLRDVLIVPKGDAILNYAHEQSALLYGNHRSVCKFASAEDHNFTAVWRAIAACLHELKQTDECLFQSQSPVSSDFQTNTELSECLKIWEPPADELYRVKTDRLQGTSEWLGNDAEYQQWQHESPSRRIFWIRGPPGCGKSYIAGHIIEQLENTGQNHCYYFFRHGDKIKSSMENFLLSMAWQMARHPDVRKRIVQVCTRDRGVSSGDYRTLHRKLWDQAIFRANLDSEITYWIIDAFDECRLGQELAKFLQRVIDTTRGLVKIVTTSRHPYSQYSLPLTHIHLREIQTSDIQEDIERFLNANHLELPGSNTAERNHLKGLILEKSNGCFLWAVLVLQRLRRIVGSQARLRALEEIPPGMDQLYARTLESISTKDELSTTVLTWVTCAVRPLTTNELKFVLEDLAMDEIGGIETLLSHYCYDLVYVDERGLVKMRHSSATRFLLRHDVNSEYDAFTIDEGSGHKMLAMACLKFLNGSEMKAKRRKMVAMAQERSVFAVYACHALHEHVNKSHAYDDEILSSLAVFLKSSVLFWIEYLASIGDLETILHFAQVLKTFLRRKSRVNLLLGEDVVIVDAWATDLVRLISKFGPQLLVHPESIISLIPPFCPLESAPYIQFATSAMTSAVQVRGLSARTWDDYLCAVVPSDPYGVASSTIVRRERFYCLSVSDNVFCIGTSLGRICVFNEQTCLEDRTVSHGGPVTHLQSGSSKPLLASFGKRIVRIWNTETWDMQWEIPTRQNCLAMHFVDDDQILLVALKNNTLLALNLVNRTSESSSWTDNMDDPYRNWYHGITPQCASFNPDLNLLAVGYSCRSVLIYNYELESHQLFDHNEGVSDSLNHHNIIQLYCMAFSNLPDTSLLAVNYSTSELVLFDTDEGAIKAKIPSVYFSQLVSSPDGRTLAAARNDGAIELYDFETLHKIYRIRPADGSVACLAFAADNTRFLVIRAGARNCSVWSPATLYRRDVGHDSVRSPSLGSGSQDGVNDQPETSITQISAIVSDASGEVFFVGKEDFTVSIFDSKTGNPFGVLFEHAATIKAFQFVAKGSLYLLISTDTAGFLMAHKIIKIASKWTAECLFKHRASAAGIQQFLCNANASHLLVCSNDQASIISATTGKALINSIQLQGPEGGTYFWMSHPTDPSLLLGLTATTVQLYAWSTLELVSTSAEGVLVTGSLLPELQIREAHLAFASSNAMLITMLSLLCLYSSASLNMNSHSTVKGPQQRTEDDIPISPARIGADATAGATPTGPVAQDKPYSVFNPRQKRVLTGLLSYASLASPLTANIYLPLLPLLQTEYNASAQAINLTITLYVVVQAVLPLFFAPTADQYGRRLVSMGTLFVYLIGSLGLTLNEAINKSYPALLLLRSLQALGASACATTIYGVVSDVCIPAERGAMVGPVIGLSNVGTVLGPTLGGVIAWSTGSGAWVFGALTIYSGSVFILIAVFWPETARKVVGNGVEGNRLQLAGLKGWLVLGPRWALSKSIAIDTLSAVSQEKDSNQGSQATATTSESHSTRVKKRFRCPNPLSSLTIILSRDTALILWLGSASYAEWYTVNAAWPQIFKAAYGWNELIIGLAYLPSAVSIVLAGFVTGPWMNARYRKTAKEAGLPADGHRVDGFPIERARLRELWIVFGITHLGIAGLGWAARYHAHPAVVLVLTAITGFSKSMLFSSCNTLLVDVHPDRPSTAAAAASLVRSGLSGIGLAVLQPLADALGWGWFFTLLALFVALTQGICMLALLRWGPEWRKQRVANERAREAEKNEQSASK

SEQ ID NO: 35885 - DNA, 1320 bp, Muscodor strobelii
  misc_feature: SGI cDNA ID NO. 572432
  misc_feature: Elevated expression when VOC is produced
  misc_feature: Encodes the peptide sequence at SEQ ID NO 35886
atgtcgctgaagctagcagagttgaaccttggtcagctcattcagcatttaccttcgaagcccgagcatgagactgatgagaacttgccggatggcataccattggatatcaacatagacagccgtccgattcagaacgatgcggaaatcaaacggttgatcaaccagaacaagattgcagtcgatagcaactttaatctcatcgttgaagaggacttcgatgcgctaggtgctcctacagaggcttggtggaccatgggcactcacgacatcccgcagcacatcattgatgaagttgatgataatgtcttagctttaatgcctgaagggactgaagttatatccatcgatccacacggtaatagtacatggtcacgaacagcggaaatacagacagagtttgaaggggagcccatatcttacttcatcaagactacagactacaaatcgggaatggtgatgtatcggagcgagtatgagtcgctcaaagctatgcacgaggcggtaccaggaatttgtcccgagccaataggctggggccattactcgtcggatccttcggtgcacttcctgctatgccattttcttgatatttataatgaaccggctgacccgaaccttcttcccccgaggatggccgagttgcatcagaaagctcttgcacctgatggcaagtgtggatggcatgtaccatcagcgggcggccaattgccagtcatggtagctaagagcgactcttgggaagactttttcagtcgttatatgcgctacatgttccgcgcggaagaaatagcgcaggggccgcggccgactgagattgaacgcctaactgccgtcttgtttgacaagatcatcccacgtctcttgcggccattagagacgggtggccgcagaatcttccccagactattacacacggatctttgggatgggaatctcggttccgataatgatgggtctgctatcatcttcgacccaatgtctatgtatgggcacaatgaattcgatttaggcgtatggaacaatcctcggcaaacgctaggaatggcgtttattaataattatcacaacttttttccaaggtcggcgccagaagaagatcactatgggcgaattgtcttgtatacgttagcatttgaagtaagagttgcggccactaaagttggcaaccctctttatagaaatgagatgatccggtacatgacagatctcgagacaagatttccagattcatacgaggaatgggctcgagctcgaggtgagaaagcctatccaccgaaagttgactctggtttgaaatggccataccgctcctcgtag

SEQ ID NO: 35886 - protein, 439 aa, Muscodor strobelii
  misc_feature: SGI Peptide ID NO. 572432
  misc_feature (107)..(396): NCBI GI: 238503680 Blast Desc: conserved [Aspergillus flavus NRRL3357] gi|220690543|gb|EED46892.1| conserved [Aspergillus flavus NRRL3357]
  misc_feature (99)..(403): NCBI GI: 255946231 Blast Desc: Pc20g14050 [Penicillium chrysogenum Wisconsin 54-1255] gi|211588618|emb|CAP86734.1| Pc20g14050 [Penicillium chrysogenum Wisconsin 54-1255]
  misc_feature (97)..(377): NCBI GI: 145256231 Blast Desc: An10g00710 [Aspergillus niger CBS 513.88] gi|134078637|emb|CAK40510.1| protein product [Aspergillus niger]
  misc_feature (98)..(384): NCBI GI: 240110347 Blast Desc: CPC735_063790 [Coccidioides posadasii C735 delta SOWgp]
  misc_feature (90)..(423): NCBI GI: 261356063 Blast Desc: conserved [Verticillium albo-atrum VaMs.102]
  misc_feature (99)..(394): NCBI GI: 258563734 Blast Desc: [Uncinocarpus reesii 1704] gi|237908119|gb|EEP82520.1| [Uncinocarpus reesii 1704]
  misc_feature (99)..(377): NCBI GI: 145605954 Blast Desc: MGG_11859 [Magnaporthe grisea 70-15] gi|145013692|gb|EDJ98333.1| MGG_11859 [Magnaporthe grisea 70-15]
  misc_feature (98)..(337): NCBI GI: 256734177 Blast Desc: [Nectria haematococca mpVI 77-13-4]
  misc_feature (98)..(384): NCBI GI: 119180471 Blast Desc: CIMG_08864 [Coccidioides immitis RS]
  misc_feature (154)..(395): NCBI GI: 171679237 Blast Desc: protein product [Podospora anserina] gi|170939244|emb|CAP64472.1| protein product [Podospora anserina]
  misc_feature: Useful for introducing or modulating the production of volatile compounds
MSLKLAELNLGQLIQHLPSKPEHETDENLPDGIPLDINIDSRPIQNDAEIKRLINQNKIAVDSNFNLIVEEDFDALGAPTEAWWTMGTHDIPQHIIDEVDDNVLALMPEGTEVISIDPHGNSTWSRTAEIQTEFEGEPISYFIKTTDYKSGMVMYRSEYESLKAMHEAVPGICPEPIGWGHYSSDPSVHFLLCHFLDIYNEPADPNLLPPRMAELHQKALAPDGKCGWHVPSAGGQLPVMVAKSDSWEDFFSRYMRYMFRAEEIAQGPRPTEIERLTAVLFDKIIPRLLRPLETGGRRIFPRLLHTDLWDGNLGSDNDGSAIIFDPMSMYGHNEFDLGVWNNPRQTLGMAFINNYHNFFPRSAPEEDHYGRIVLYTLAFEVRVAATKVGNPLYRNEMIRYMTDLETRFPDSYEEWARARGEKAYPPKVDSGLKWPYRSS

SEQ ID NO: 35887 - DNA, 2869 bp, Muscodor strobelii
  misc_feature: SGI EST ID NO. CUFF.85580.2
  misc_feature: Variant of the nucleotide sequence at SEQ ID NO 35885
cttggagtcgctgataataggatcattcaaaaggtcgttcaataatgatttggcgaaatcgtgtatattcaacgtgctgctttttctgaaatctgagtcataaccgaaggagaaaattgccgtttggtggaagccattctgttgaggaagtagatctctcggccatagtattccatccttgctccatgtatgctcagaaccgccgccgagtccatgtacaaatacgatgtgggccgccggagcagcgccattagaaacatgatggagagtcgtcaaccctaagggacctttaccagtggtgacagaatctgtactactagaatacgaggtcacggtgctctgccgtagcgacaagtgccttacaaagcgagagcggctcaacgatgtcggctggcggtggctatgagttgaatcagattgggaggacgacggtgatggtgatggtaagcgcagttcagcgggactgaaaacatccatactgccagctgctcgccagctattctcgggccaacccctatagacccggaacaaccactagtagtgggacgtgagacaaaatcttgcgactcaacacttcaagcctctatggtgcattctgaattatacgtgacatgaaaaacagactaccgctcgactgtgattgcttcaccgacccgggtgcgctcaccttacagctcggatgaggggtcaaggctaatgcttggcgcgcggcgtggtaaggcggttcctctttactgtaataccaccctggacgatgagcagatgcccgtcaaggattggcgtcaataaggtggccctgttcaatgcaggtgctactgcgaccgacaccaacaacagatctggtcgtccaaccagcgatcattatcattactctgatccccgcatcatgatacacatgcgaagacccgaaaccaagactgaaaaggctggccggcctgtcaatccgcgcgttgcgaaggctggcttcgccggtcctcttttcaatttgcctttctcgaccacaaagctctgttgcaagcccctcacgtaatggcagaagaagccgatatcacaaacgaggccatgtcgctgaagctagcagagttgaaccttggtcagctcattcagcatttaccttcgaagcccgagcatgagactgatgagaacttgccggatggcataccattggatatcaacatagacagccgtccgattcagaacgatgcggaaatcaaacggttgatcaaccagaacaagattgcagtcgatagcaactttaatctcatcgttgaagaggacttcgatgcgctaggtgctcctacagaggcttggtggaccatgggcactcacgacatcccgcagcacatcattgatgaagttgatgataatgtcttagctttaatgcctgaagggactgaagttatatccatcgatccacacggtaatagtacatggtcacgaacagcggaaatacagacagagtttgaaggggagcccatatcttacttcatcaagactacagactacaaatcgggaatggtgatgtatcggagcgagtatgagtcgctcaaagctatgcacgaggcggtaccaggaatttgtcccgagccaataggctggggccattactcgtcggatccttcggtgcacttcctgctatgccattttcttgatatttataatgaaccggctgacccgaaccttcttcccccgaggatggccgagttgcatcagaaagctcttgcacctgatggcaagtgtggatggcatgtaccatcagcgggcggccaattgccagtcatggtagctaagagcgactcttgggaagactttttcagtcgttatatgcgctacatgttccgcgcggaagaaatagcgcaggggccgcggccgactgagattgaacgcctaactgccgtcttgtttgacaagatcatcccacgtctcttgcggccattagagacgggtggccgcagaatcttccccagactattacacacggatctttgggatgggaatctcggttccgataatgatgggtctgctatcatcttcgacccaatgtctatgtatgggcacaatgaattcgatttaggcgtatggaacaatcctcggcaaacgctaggaatggcgtttattaataattatcacaacttttttccaaggtcggcgccagaagaagatcactatgggcgaattgtcttgtatacgttagcatttgaagtaagagttgcggccactaaagttggcaaccctctttatagaaatgagatgatccggtacatgacagatctcgagacaagatttccagattcatacgaggaatgggctcgagctcgaggtgagaaagcctatccaccgaaagttgactctggtttgaaatggccataccgctcctcgtagtttcgacgcaccgcgcaggtaagaaaagggtacaagaacgatgcgagttggcgcttatgtctccttttgaaatacatcaaggactggctgagtcgaagcattcttgccaggtaggcgtcggcagctgcaagaggattctttgctcttatgatggcatcggaacatatccaacaacgttaaaccgtgcggctcaagcagcctcgaggaagcgtgcatgtcgcctaggatcttggatatgtattgctttaaatatgcattgagcaagtataaacgtcgtggcggcatcaatgttctatactatcttctattgtccttgtgtttagattacgtggacatgattccgctgttgtgtatgctgaagaaatgacaagcatatgcgtgccatgctgtaaagattaactgtgcctatcacctggataccttgaggtgcgtcatcagggagcagctcagatgcaatataataagagtcttaatagaaaatctcaag

SEQ ID NO: 35888 - DNA, 1707 bp, Muscodor strobelii
  misc_feature: SGI cDNA ID NO. 572433
  misc_feature: Reduced expression when VOC is produced
  misc_feature: Encodes the peptide sequence at SEQ ID NO 35889
atgaaggcgcctgtagctgtcgatcaaagaccgttggtaagagatgtagaagatgaggaagcgggttacaggaacgaaccaaagataaagtcaggatatttcgggaaatccaagagcactcccgaaaagaaaaaagcatttaacccatcgtggaatgagcggccgggatttaatcatgatttagaagcagtggtcaatctgctgcccgacgaggttcacatgcgcgagttccttagtccagttgacctgggcggctcaaggaggatgaaggagctaggattgcgaacccgagcatatcgtcaatatttcgacgcatgggaagcacttcatctcaacgaagatgaagagaccggagaaatttccatccgcgacgacataatccagtacttgcgcgacacagtcgatgtttctaagggcagcaagaggcttgtctcgctcattcataaatacgagtccttccgctcgtttatcatcaaattcgcgaagatcttatttccgttcacgacaccatacttcgcggatcatatgagtcttcatgcatatacgaggaacggaggacgtggcattgtcctcacgggcggcgacaatcaagcaaaaatgatgttgactacgatatacacattccgcgagcttggatgcgatctaccaattgaagtcatgtatcttggagattccgatctaggcgaagacaatcgactagagctcgaggctttgcctggtgtcataacgcgcgacctatcaataatggtagacgacgcaggctggtcgctggcaggatgggctggaaagccctgggcaatactgatgtcaagctttcgcgaggtcattatgatcgacgctgacgcactcttcttcaagaacccagcagtgttattcgatgatccagactatgtcgaaacaggtgccttattcttcagagaccgcgtcatcctacctgagtcgaagagatcatttttacaacagatgcttccgaggcctatctctaaacacgcgaaagagtcgcggtggtggcagggtacttcggggcatcatcaggagagtggagttgtcgtggtggataagtggaagcatttcatctcgcttcttcttgtctgtcgctttaacggaagcgatcgtgattcgcgagacggcaagacaggcgtgtatgaattggtatacggcgacaaagaaacattctggattggctttttacttgccggcgacgaagccttcgcattccataggggctcagtcggtattcttggctccatcaatagcgataaaaaggatacgaaagaagacagcaacaaaaagaaaccaaagtctgaaacctcagaagaggatgcgtcctcggataccgaaagtacagcactagagtcggaggcaacgtcatcggcagtggcccccacctcaactccagagacgcacacaatttgtgcgccgcagctgcttcacaccgacaccgatggctcaccactatggtttaatggctggcttctagctaataagtttgacccgccagggaagcaacgatatgcgaaaatggaatcatttttactggagcccaaggctgtcaagggggaggatagcttctggaggatcgaggagagcaatatttgctgcctgacgtcgactccaaagctcagatatgatatggatgaatctgacaagaaggttctagagatgattgtcgagcgtgcgaaagaggttagagatatggaactttag

SEQ ID NO: 35889 - protein, 568 aa, Muscodor strobelii
  misc_feature: SGI Peptide ID NO. 572433
  misc_feature (61)..(563): NCBI GI: 261193455 Blast Desc: alpha-1,3-mannosyltransferase [Ajellomyces dermatitidis SLH14081] gi|239588738|gb|EEQ71381.1| alpha-1,3-mannosyltransferase [Ajellomyces dermatitidis SLH14081]
  misc_feature (61)..(563): NCBI GI: 239613937 Blast Desc: alpha-1,3-mannosyltransferase [Ajellomyces dermatitidis ER-3]
  misc_feature (61)..(562): NCBI GI: 115397063 Blast Desc: [Aspergillus terreus NIH2624] gi|114192314|gb|EAU34014.1| [Aspergillus terreus NIH2624]
  misc_feature (64)..(561): NCBI GI: 70992947 Blast Desc: alpha-1,3-mannosyltransferase [Aspergillus fumigatus Af293] gi|66848955|gb|EAL89284.1| alpha-1,3-mannosyltransferase, [Aspergillus fumigatus Af293]
  misc_feature (64)..(561): NCBI GI: 159130226 Blast Desc: alpha-1,3-mannosyltransferase, [Aspergillus fumigatus A1163]
  misc_feature (15)..(535): NCBI GI: 115387947 Blast Desc: [Aspergillus terreus NIH2624] gi|114195563|gb|EAU37263.1| [Aspergillus terreus NIH2624]
  misc_feature (7)..(563): NCBI GI: 255933027 Blast Desc: Pc12g11670 [Penicillium chrysogenum Wisconsin 54-1255] gi|211582603|emb|CAP80794.1| Pc12g11670 [Penicillium chrysogenum Wisconsin 54-1255]
  misc_feature (178)..(523): NCBI GI: 39964021 Blast Desc: MGG_09806 [Magnaporthe grisea 70-15] gi|145011108|gb|EDJ95764.1| MGG_09806 [Magnaporthe grisea 70-15]
  misc_feature (188)..(563): NCBI GI: 145251003 Blast Desc: An15g04810 [Aspergillus niger] gi|134082542|emb|CAK42458.1| protein product [Aspergillus niger]
  misc_feature (153)..(563): NCBI GI: 46127841 Blast Desc: FG08298.1 [Gibberella zeae PH-1]
  misc_feature: Useful for introducing or modulating the production of volatile compounds
MKAPVAVDQRPLVRDVEDEEAGYRNEPKIKSGYFGKSKSTPEKKKAFNPSWNERPGFNHDLEAVVNLLPDEVHMREFLSPVDLGGSRRMKELGLRTRAYRQYFDAWEALHLNEDEETGEISIRDDIIQYLRDTVDVSKGSKRLVSLIHKYESFRSFIIKFAKILFPFTTPYFADHMSLHAYTRNGGRGIVLTGGDNQAKMMLTTIYTFRELGCDLPIEVMYLGDSDLGEDNRLELEALPGVITRDLSIMVDDAGWSLAGWAGKPWAILMSSFREVIMIDADALFFKNPAVLFDDPDYVETGALFFRDRVILPESKRSFLQQMLPRPISKHAKESRWWQGTSGHHQESGVVVVDKWKHFISLLLVCRFNGSDRDSRDGKTGVYELVYGDKETFWIGFLLAGDEAFAFHRGSVGILGSINSDKKDTKEDSNKKKPKSETSEEDASSDTESTALESEATSSAVAPTSTPETHTICAPQLLHTDTDGSPLWFNGWLLANKFDPPGKQRYAKMESFLLEPKAVKGEDSFWRIEESNICCLTSTPKLRYDMDESDKKVLEMIVERAKEVRDMEL

SEQ ID NO: 35890 - DNA, 2284 bp, Muscodor strobelii
  misc_feature: SGI EST ID NO. CUFF.85389.0
  misc_feature: Variant of the nucleotide sequence at SEQ ID NO 35888
ccgaaaccgattgtggcgggcatccaattctcgtatagaatccgcgtgttcgagatgcagcgcgtcacatgttctctcatgtaatgccgagggggacatatttctcgtagttttggtttcaacgccacccagttcacctcgaccagcctgatattgtttacgccttcatcatgaaactcggcacgtcttttggacccaaggagggtcgtctgccacccgggctcctttcaccggtcttggcagatcgcagacgaaggtggccgaatgtgcatttacaaatggcttttattgcctttgtcttcttgctgtggtgtttttacagagcggttgtagtgccgcagctgatggaagacatcacagggccacggaccgtggcaggattgccgataccaaagcaaccgacttccatggtcgatatatattcacaagcatctgagctaccgccacaaggagacgatcctacgagaagaatgaaggcgcctgtagctgtcgatcaaagaccgttggtaagagatgtagaagatgaggaagcgggttacaggaacgaaccaaagataaagtcaggatatttcgggaaatccaagagcactcccgaaaagaaaaaagcatttaacccatcgtggaatgagcggccgggatttaatcatgatttagaagcagtggtcaatctgctgcccgacgaggttcacatgcgcgagttccttagtccagttgacctgggcggctcaaggaggatgaaggagctaggattgcgaacccgagcatatcgtcaatatttcgacgcatgggaagcacttcatctcaacgaagatgaagagaccggagaaatttccatccgcgacgacataatccagtacttgcgcgacacagtcgatgtttctaagggcagcaagaggcttgtctcgctcattcataaatacgagtccttccgctcgtttatcatcaaattcgcgaagatcttatttccgttcacgacaccatacttcgcggatcatatgagtcttcatgcatatacgaggaacggaggacgtggcattgtcctcacgggcggcgacaatcaagcaaaaatgatgttgactacgatatacacattccgcgagcttggatgcgatctaccaattgaagtcatgtatcttggagattccgatctaggcgaagacaatcgactagagctcgaggctttgcctggtgtcataacgcgcgacctatcaataatggtagacgacgcaggctggtcgctggcaggatgggctggaaagccctgggcaatactgatgtcaagctttcgcgaggtcattatgatcgacgctgacgcactcttcttcaagaacccagcagtgttattcgatgatccagactatgtcgaaacaggtgccttattcttcagagaccgcgtcatcctacctgagtcgaagagatcatttttacaacagatgcttccgaggcctatctctaaacacgcgaaagagtcgcggtggtggcagggtacttcggggcatcatcaggagagtggagttgtcgtggtggataagtggaagcatttcatctcgcttcttcttgtctgtcgctttaacggaagcgatcgtgattcgcgagacggcaagacaggcgtgtatgaattggtatacggcgacaaagaaacattctggattggctttttacttgccggcgacgaagccttcgcattccataggggctcagtcggtattcttggctccatcaatagcgataaaaaggatacgaaagaagacagcaacaaaaagaaaccaaagtctgaaacctcagaagaggatgcgtcctcggataccgaaagtacagcactagagtcggaggcaacgtcatcggcagtggcccccacctcaactccagagacgcacacaatttgtgcgccgcagctgcttcacaccgacaccgatggctcaccactatggtttaatggctggcttctagctaataagtttgacccgccagggaagcaacgatatgcgaaaatggaatcatttttactggagcccaaggctgtcaagggggaggatagcttctggaggatcgaggagagcaatatttgctgcctgacgtcgactccaaagctcagatatgatatggatgaatctgacaagaaggttctagagatgattgtcgagcgtgcgaaagaggttagagatatggaactttagatgatcactgaatgactgggtcgtgatactcgaacgcaagagccacgtataattagaagagcaaagacctgctttataacgaacaatccaattaaagaaaaaaaata

SEQ ID NO: 35891 - DNA, 741 bp, Muscodor strobelii
  misc_feature: SGI cDNA ID NO. 572434
  misc_feature: Elevated expression when VOC is produced
  misc_feature: Encodes the peptide sequence at SEQ ID NO 35892
atgcaatctcctgccgtactcacattgtcggctcctggtgggaatgcaaatgtcccactggtagcaaggtttgacgcagcaatgtatccgacgtcacagatctaccaagattcgctttctaatgtcctcaacaactatgaggaccactatcgtccttggccgccgttttgtcgcccagatattaccgtcaacggctatccctatgatggcgcctcatttatcaagcttactttcaagaagtggcacagaggagctttagaagatgagttcgagcttgcaatggccactgtcgaacgaaactctgagcaagacacagatatcgatgttattcttggacaggactattacagaggctttgcaatgaggcacgatagactttggaatacggcgcaaccaaccctttcgggttctcactaccaacaacctaatatgcctaatatggcacagcagggcgtctccaacagttatagcggcacttctgctcctcaaaactcagccatatcctctcttgactttggcatcgtgcctaggttctcaatgcaaggacccggtgcttcgtcgtacagtaacatcacaaatcccgccagctacttcagtgagacatctatatctagacgtggccaacaagagcattcaccacaagtaagagaggttctcgatccggccttaaatctcgacatgtcatcattatctcaactgggcgagtttcctttccaggatccgtccaccgccgatccgtaa

SEQ ID NO: 35892 - protein, 246 aa, Muscodor strobelii
  misc_feature: SGI Peptide ID NO. 572434
  misc_feature: Useful for introducing or modulating the production of volatile compounds
MQSPAVLTLSAPGGNANVPLVARFDAAMYPTSQIYQDSLSNVLNNYEDHYRPWPPFCRPDITVNGYPYDGASFIKLTFKKWHRGALEDEFELAMATVERNSEQDTDIDVILGQDYYRGFAMRHDRLWNTAQPTLSGSHYQQPNMPNMAQQGVSNSYSGTSAPQNSAISSLDFGIVPRFSMQGPGASSYSNITNPASYFSETSISRRGQQEHSPQVREVLDPALNLDMSSLSQLGEFPFQDPSTADP

SEQ ID NO: 35893 - DNA, 907 bp, Muscodor strobelii
  misc_feature: SGI EST ID NO. CUFF.85384.0
  misc_feature: Variant of the nucleotide sequence at SEQ ID NO 35891
cgaaactctgagcaagacacagatatcgatgttattcttggacaggactattacagaggctttgcaatgaggcacgatagactttggaatacggcgcaaccaaccctttcgggttctcactaccaacaacctaatatgcctaatatggcacagcagggcgtctccaacagttatagcggcacttctgctcctcaaaactcagccatatcctctcttgactttggcatcgtgcctaggttctcaatgcaaggacccggtgcttcgtcgtacagtaacatcacaaatcccgccagctacttcagtgagacatctatatctagacgtggccaacaagagcattcaccacaagtaagagaggttctcgatccggccttaaatctcgacatgtcatcattatctcaactgggcgagtttcctttccaggatccgtccaccgccgatccgtaagaacttctcgtgcaccatggtgggccgatacttctgagatggaaactcctgggagaatgctacagcccatattagtcgagcctgctcgacgcccaacgttatcttgtctagtgattcacaagtgtgaagaaatcacataatgctcaacttcatctacgttgcaacggaatcgacgacagactggtggcacgggaaacagtacgacacgatccaccgacattcgctatacgacgacactcgctacgtattcctttccttgcgtatctcaaatctggacggcttaatggggcgttgtatgttttatgggtttggtcaacggcaaattggaaaccggatgaaagttgacgaccatatgttttaatgagactgacgatgaccactgaagcacagcgctatattaatgattcacgatctttaaatatacccatcattatgccacaacatgctctcttgtctgact

SEQ ID NO: 35894 - DNA, 885 bp, Muscodor strobelii
  misc_feature: SGI cDNA ID NO. 572435
  misc_feature: Reduced expression when VOC is produced
  misc_feature: Encodes the peptide sequence at SEQ ID NO 35895
atggcgtcaaaactcaacccttttggctcttttcggagtctcgccatccgcacacgaccgatatcacaactcccacggcatcatatcagcgtcagtccggccatgatcgcccggaggaatctggctgatgatatgaacacgcgagaccactcacaaggccaagatgagatcatggacatcataccgccgcgagattggacgcccatccacgagcctttcgccgacaactacctcaacgccgaagccattgccaagctggaagagatcgctgccggccaggaagtactggagtgggaagaggaaggcctgaagtacggcatgccccgcaagcctaccaagaacgagaagctccaggaccgccatgcaccagtcatccaccagatcaccaggctgctcatgcgcgacggcaagctcagccaagcccagacgcatctatccttaatcctcaactacctccgcacacatcccgcccccaaagtctcgcctttgcgtcctctacttcctggttctccgccagcaaacgagctccctctcaaccctcttctctatctcgaacttgccatcgactccgtagcgccaatcatccgcatccggaatctcaagggtatagcaggcggtggtcaagcgctcgaagtgcctgagcccatggacagccgatcccgtcgccgaatcgccatcaagtggatcctagatattgtcaacaagaagcggtcgactggttctggccgcaagcagttcgctgcaaggttcggatcggaaatcgttagtattgtggagggacggagtgcgctgtgggataagaggcagcaagttcataagctcggcacatccagtcgtgccaatttggcgcatccgaatctgagtgggaataagaggaagaagtag

SEQ ID NO: 35895 - protein, 294 aa, Muscodor strobelii
  misc_feature: SGI Peptide ID NO. 572435
  misc_feature (107)..(279): Pfam Id: PF00177 Pfam Desc: Ribosomal protein S7p/S5e
  misc_feature (1)..(289): NCBI GI: 116202089 Blast Desc: CHGG_08929 [Chaetomium globosum CBS 148.51] gi|88177447|gb|EAQ84915.1| CHGG_08929 [Chaetomium globosum CBS 148.51]
  misc_feature (1)..(287): NCBI GI: 85097357 Blast Desc: NCU04806 [Neurospora crassa OR74A] gi|28921923|gb|EAA31196.1| [Neurospora crassa OR74A]
  misc_feature (97)..(292): NCBI GI: 46128079 Blast Desc: FG08417.1 [Gibberella zeae PH-1]
  misc_feature (80)..(292): NCBI GI: 256733551 Blast Desc: NECHADRAFT_36182 [Nectria haematococca mpVI 77-13-4]
  misc_feature (79)..(282): NCBI GI: 145602616 Blast Desc: MGG_09508 [Magnaporthe grisea 70-15] gi|145011009|gb|EDJ95665.1| MGG_09508 [Magnaporthe grisea 70-15]
  misc_feature (90)..(282): NCBI GI: 261359592 Blast Desc: conserved [Verticillium albo-atrum VaMs.102]
  misc_feature (94)..(284): NCBI GI: 119189875 Blast Desc: CIMG_04985 [Coccidioides immitis RS] gi|240111064|gb|EER29217.1| 37S ribosomal protein S7, mitochondrial precursor, [Coccidioides posadasii C735 delta
  misc_feature (102)..(285): NCBI GI: 189190812 Blast Desc: conserved [Pyrenophora tritici-repentis Pt-1C-BFP] gi|187973351|gb|EDU40850.1| conserved [Pyrenophora tritici-repentis Pt-1C-BFP]
  misc_feature (102)..(285): NCBI GI: 169607024 Blast Desc: SNOG_06564 [Phaeosphaeria nodorum SN15] gi|111065275|gb|EAT86395.1| SNOG_06564 [Phaeosphaeria nodorum SN15]
  misc_feature (76)..(283): NCBI GI: 156064701 Blast Desc: SS1G_00358 [Sclerotinia sclerotiorum 1980] gi|154691220|gb|EDN90958.1| SS1G_00358 [Sclerotinia sclerotiorum 1980]
  misc_feature: Useful for introducing or modulating the production of volatile compounds
MASKLNPFGSFRSLAIRTRPISQLPRHHISVSPAMIARRNLADDMNTRDHSQGQDEIMDIIPPRDWTPIHEPFADNYLNAEAIAKLEEIAAGQEVLEWEEEGLKYGMPRKPTKNEKLQDRHAPVIHQITRLLMRDGKLSQAQTHLSLILNYLRTHPAPKVSPLRPLLPGSPPANELPLNPLLYLELAIDSVAPIIRIRNLKGIAGGGQALEVPEPMDSRSRRRIAIKWILDIVNKKRSTGSGRKQFAARFGSEIVSIVEGRSALWDKRQQVHKLGTSSRANLAHPNLSGNKRKK

SEQ ID NO: 35896 - DNA, 1276 bp, Muscodor strobelii
  misc_feature: SGI EST ID NO. CUFF.85397.0
  misc_feature: Variant of the nucleotide sequence at SEQ ID NO 35894
caggtttccaatccagggtctgtgtgcaatctcaggcgcgcaagcctcacgcgctatcagatgttcccaaattttaatcatagcgaaggagctatcgacagacggccatcagcgaccaacaaacgacgccatcgcagcgctcgcaacaccggtagtcgggcgcttttcgaagccgaggatctagatgggaggacactgaaaccgttggcaatatggcgtcaaaactcaacccttttggctcttttcggagtctcgccatccgcacacgaccgatatcacaactcccacggcatcatatcagcgtcagtccggccatgatcgcccggaggaatctggctgatgatatgaacacgcgagaccactcacaaggccaagatgagatcatggacatcataccgccgcgagattggacgcccatccacgagcctttcgccgacaactacctcaacgccgaagccattgccaagctggaagagatcgctgccggccaggaagtactggagtgggaagaggaaggcctgaagtacggcatgccccgcaagcctaccaagaacgagaagctccaggaccgccatgcaccagtcatccaccagatcaccaggctgctcatgcgcgacggcaagctcagccaagcccagacgcatctatccttaatcctcaactacctccgcacacatcccgcccccaaagtctcgcctttgcgtcctctacttcctggttctccgccagcaaacgagctccctctcaaccctcttctctatctcgaacttgccatcgactccgtagcgccaatcatccgcatccggaatctcaagggtatagcaggcggtggtcaagcgctcgaagtgcctgagcccatggacagccgatcccgtcgccgaatcgccatcaagtggatcctagatattgtcaacaagaagcggtcgactggttctggccgcaagcagttcgctgcaaggttcggatcggaaatcgttagtattgtggagggacggagtgcgctgtgggataagaggcagcaagttcataagctcggcacatccagtcgtgccaatttggcgcatccgaatctgagtgggaataagaggaagaagtagatgagatgtcggcttgattgtctatagacattgatcaattctccaatgagagagttgcgcggttgagatattgtatgataggatgatgcgctgactagcatacttgtctactgtataaagctgtatttctgctgtgtatacgatgctttcctctaatagtggtgatgaatgaacatgca

SEQ ID NO: 35897 - DNA, 1665 bp, Muscodor strobelii
  misc_feature: SGI cDNA ID NO. 572436
  misc_feature: Encodes the peptide sequence at SEQ ID NO 35898
atgtcgcccaccgaaccatccacacaggtcaattcaacgcccaagaaaaagaacaacaagaagaaaaagagtgccgcaaagaaagcagcagatgatgcagcagcgaaagctgccgaatcaacccagaatggcgagctgcgcgacgacgagggcgaccagtccgacgatggagatgaagctccagctgcggccaaccagaaagaacacaccaacggccatgccacctcacccacaaccaatgggcacccaacaacagattccgaacccaaatccccggtcgccccgtcagactccacccatggcgcggcgcccgacccagacacgactgcacggctcgacgccatgtcacaagagagagcggctctcaaagccgaggtggaagagctgaggaaacaactggaaagcatacaaaccacccactccaaggaaacaacagacctcaagtccgaactgcaagaagtcacggcgagcaaagaagagatcgaggagaagtacgaagacctagtcgagcgagtcgagaagatcaaggagaacgtcagcgccaggctcgccagcaggaaagaagagctggaagaagccaatgcacgtatagaagagctagagacgcaaaatgaggaactacagaaaggaggcggaagattcgaggaggagatatctggccttaagatcgagttgcaagatgccgagagggagctttctagcttgcggagccggaacaacctctcccagcataattcgttaaaggaaaaggaggacatgacgcgccaaatccaacatctgcgggaagaagccgaagcagccaaagatgctatgggagactgggaggttctcgcgatggaagagcgatccataagggagaatctcaccgagaagaccagcgcactggaggaacagctcgaagctcttagggagggctacgagcgcgcagccgccgagcgcgacacgcagtcccaagctgtcgacagtctacagagggcgctgcaggaaatacaagaggctcgcaagagagagttgagagagatggtggagacatcggaagagcagctccaggccatgaagaagctcgtccagcaggccgatacgagagcctcggaagcagaatcagccaaggactcgttacaaaaggagcttgagcgaacagttccgtttgagaaggaagtcaaagagaagaacctgctgattggcaaattgcggcatgaggctattgttctcaacgaccatttgaccaaagccctacggtatctcaagaagaccaaaccagaagacagcatcgatagacaaattgtaacaaaccacttcctccaattcctagcactcgaccgttcagaccccaagaaattccaaattctacaagtcatagccggtctcctcgcctggtcagacgagcagcgcgaacaagcagggcttgcacgaccaggcgcatcgagcaactctctccgtcttccctcttccccattccacaggacaccatccacacccagcttaaacacagagttcttttccgagcccacatcagcagccgcaaccaaggaatcgctatcagatctatgggcaggattcttagagcgaagtgctgaggaggctatgggcccgtcgagaaaagctagtatgagtagtgtttctacgaatacggcgaggccggatactaggagtggaggatcataa

SEQ ID NO: 35898 - protein, 554 aa, Muscodor strobelii
  misc_feature: SGI Peptide ID NO. 572436
  misc_feature (1)..(531): NCBI GI: 261356793 Blast Desc: conserved [Verticillium albo-atrum VaMs.102]
  misc_feature (52)..(550): NCBI GI: 39971735 Blast Desc: MGG_07183 [Magnaporthe grisea 70-15] gi|145019668|gb|EDK03896.1| MGG_07183 [Magnaporthe grisea 70-15]
  misc_feature (70)..(528): NCBI GI: 156059868 Blast Desc: SS1G_03947 [Sclerotinia sclerotiorum 1980] gi|154701733|gb|EDO01472.1| SS1G_03947 [Sclerotinia sclerotiorum 1980]
  misc_feature (27)..(549): NCBI GI: 46117102 Blast Desc: FG04393.1 [Gibberella zeae PH-1]
  misc_feature (70)..(528): NCBI GI: 154316016 Blast Desc: BC1G_04580 [Botryotinia fuckeliana B05.10] gi|150846976|gb|EDN22169.1| BC1G_04580 [Botryotinia fuckeliana B05.10]
  misc_feature (110)..(546): NCBI GI: 164422592 Blast Desc: NCU10036 [Neurospora crassa OR74A] gi|157069736|gb|EAA28737.2| conserved [Neurospora crassa OR74A]
  misc_feature (120)..(542): NCBI GI: 171689150 Blast Desc: protein product [Podospora anserina] gi|170944537|emb|CAP70648.1| protein product [Podospora anserina]
  misc_feature (54)..(526): NCBI GI: 259488265 Blast Desc: TPA: Golgi matrix protein, (AFU_orthologue; AFUA_1G08830) [Aspergillus nidulans FGSC A4]
  misc_feature (58)..(539): NCBI GI: 116204999 Blast Desc: CHGG_10383 [Chaetomium globosum CBS 148.51] gi|88176511|gb|EAQ83979.1| CHGG_10383 [Chaetomium globosum CBS 148.51]
  misc_feature (97)..(531): NCBI GI: 70994948 Blast Desc: Golgi matrix protein [Aspergillus fumigatus Af293] gi|66849885|gb|EAL90212.1| Golgi matrix protein, [Aspergillus fumigatus Af293]
MSPTEPSTQVNSTPKKKNNKKKKSAAKKAADDAAAKAAESTQNGELRDDEGDQSDDGDEAPAAANQKEHTNGHATSPTTNGHPTTDSEPKSPVAPSDSTHGAAPDPDTTARLDAMSQERAALKAEVEELRKQLESIQTTHSKETTDLKSELQEVTASKEEIEEKYEDLVERVEKIKENVSARLASRKEELEEANARIEELETQNEELQKGGGRFEEEISGLKIELQDAERELSSLRSRNNLSQHNSLKEKEDMTRQIQHLREEAEAAKDAMGDWEVLAMEERSIRENLTEKTSALEEQLEALREGYERAAAERDTQSQAVDSLQRALQEIQEARKRELREMVETSEEQLQAMKKLVQQADTRASEAESAKDSLQKELERTVPFEKEVKEKNLLIGKLRHEAIVLNDHLTKALRYLKKTKPEDSIDRQIVTNHFLQFLALDRSDPKKFQILQVIAGLLAWSDEQREQAGLARPGASSNSLRLPSSPFHRTPSTPSLNTEFFSEPTSAAATKESLSDLWAGFLERSAEEAMGPSRKASMSSVSTNTARPDTRSGGS

SEQ ID NO: 35899 - DNA, 2716 bp, Muscodor strobelii
  misc_feature: SGI EST ID NO. CUFF.85406.0
  misc_feature: Variant of the nucleotide sequence at SEQ ID NO 35897
tctgtcgccgttggtgcatcgggacaagttactgtagacattccagagcaacgtcgctgtttgtcacgtttgtcacgacatctctctgtcgcttcctttcttctgcccaatgccattgaggtagatacttctgtctacaagactaccacatagagacaccatcatgtcgcccaccgaaccatccacacaggtcaattcaacgcccaagaaaaagaacaacaagaagaaaaagagtgccgcaaagaaagcagcagatgatgcagcagcgaaagctgccgaatcaacccagaatggcgagctgcgcgacgacgagggcgaccagtccgacgatggagatgaagctccagctgcggccaaccagaaagaacacaccaacggccatgccacctcacccacaaccaatgggcacccaacaacagattccgaacccaaatccccggtcgccccgtcagactccacccatggcgcggcgcccgacccagacacgactgcacggctcgacgccatgtcacaagagagagcggctctcaaagccgaggtggaagagctgaggaaacaactggaaagcatacaaaccacccactccaaggaaacaacagacctcaagtccgaactgcaagaagtcacggcgagcaaagaagagatcgaggagaagtacgaagacctagtcgagcgagtcgagaagatcaaggagaacgtcagcgccaggctcgccagcaggaaagaagagctggaagaagccaatgcacgtatagaagagctagagacgcaaaatgaggaactacagaaaggaggcggaagattcgaggaggagatatctggccttaagatcgagttgcaagatgccgagagggagctttctagcttgcggagccggaacaacctctcccagcataattcgttaaaggaaaaggaggacatgacgcgccaaatccaacatctgcgggaagaagccgaagcagccaaagatgctatgggagactgggaggttctcgcgatggaagagcgatccataagggagaatctcaccgagaagaccagcgcactggaggaacagctcgaagctcttagggagggctacgagcgcgcagccgccgagcgcgacacgcagtcccaagctgtcgacagtctacagagggcgctgcaggaaatacaagaggctcgcaagagagagttgagagagatggtggagacatcggaagagcagctccaggccatgaagaagctcgtccagcaggccgatacgagagcctcggaagcagaatcagccaaggactcgttacaaaaggagcttgagcgaacagttccgtttgagaaggaagtcaaagagaagaacctgctgattggcaaattgcggcatgaggctattgttctcaacgaccatttgaccaaagccctacggtatctcaagaagaccaaaccagaagacagcatcgatagacaaattgtaacaaaccacttcctccaattcctagcactcgaccgttcagaccccaagaaattccaaattctacaagtcatagccggtctcctcgcctggtcagacgagcagcgcgaacaagcagggcttgcacgaccaggcgcatcgagcaactctctccgtcttccctcttccccattccacaggacaccatccacacccagcttaaacacagagttcttttccgagcccacatcagcagccgcaaccaaggaatcgctatcagatctatgggcaggattcttagagcgaagtgctgaggaggctatgggcccgtcgagaaaagctagtatgagtagtgtttctacgaatacggcgaggccggatactaggagtggaggatcataacgtcgttcttcatcatgtagaccactcttccggtttctcacaagcattctatcagcatcggcgtgtaagagagtatgcgcgatacactacacattaaaagcaaaaagcaaaaagcaaaagcaaagcatcaacatggcgttgggaaacacatcacttggtcggggcataatgggaaagactacagctagggtatatgtatggttaatgcctgtttgattttcgtccaagaaaggagagatggcttggattttctaattaggcatttgcactccttgagtatcagactatctctcgatacctttaagtatgagagagaatgcaagacatgagagaagagaatgttgtgctagatgaaggtgctattctgttctcgttgcagaaactcactcgaatgaaagtcttccacgagaggtccttttattcttacgatgtggaatatgtgaaggctgtttgatattctaagaacacttgaagtttaaatcttaagctggatgctagcgagagacgtcgtgttgtatgtaagctgaaagcggattgtccgagggtatgagactacttccccctattcatgctttgtgtttgtgctttgggtttgggctagtggtgttctagcctttcaggtaaagcgattgacgactgtcatctatactcagttgagcttgtaaagtcagaggcacttgtttgaggatggtgtattcgctgttatggctgccgatttattcgcgaaaggatagtactatgaactatagattagagccaagtagtcgaagaaatctgtctatctatctgaaatgggaagtcattccgcccttcacattttgaataagtagcagtaagtaagagaagtagtgtgatgctagataaggtaatggtctttttgaagtagac

SEQ ID NO: 35900 - DNA, 1674 bp, Muscodor strobelii
  misc_feature: SGI cDNA ID NO. 572437
  misc_feature: Encodes the peptide sequence at SEQ ID NO 35901
atgtcgcccaccgaaccatccacacaggtcaattcaacccccccagcgcccaagaaaaagaacaacaagaagaaaaagagtgccgcaaagaaagcagcagatgatgcagcagcgaaagctgccgaatcaacccagaatggcgagctgcgcgacgacgagggcgaccagtccgacgatggagatgaagctccagctgcggccaaccagaaagaacacaccaacggccatgccacctcacccacaaccaatgggcacccaacaacagattccgaacccaaatccccggtcgccccgtcagactccacccatggcgcggcgcccgacccagacacgactgcacggctcgacgccatgtcacaagagagagcggctctcaaagccgaggtggaagagctgaggaaacaactggaaagcatacaaaccacccactccaaggaaacaacagacctcaagtccgaactgcaagaagtcacggcgagcaaagaagagatcgaggagaagtacgaagacctagtcgagcgagtcgagaagatcaaggagaacgtcagcgccaggctcgccagcaggaaagaagagctggaagaagccaatgcacgtatagaagagctagagacgcaaaatgaggaactacagaaaggaggcggaagattcgaggaggagatatctggccttaagatcgagttgcaagatgccgagagggagctttctagcttgcggagccggaacaacctctcccagcataattcgttaaaggaaaaggaggacatgacgcgccaaatccaacatctgcgggaagaagccgaagcagccaaagatgctatgggagactgggaggttctcgcgatggaagagcgatccataagggagaatctcaccgagaagaccagcgcactggaggaacagctcgaagctcttagggagggctacgagcgcgcagccgccgagcgcgacacgcagtcccaagctgtcgacagtctacagagggcgctgcaggaaatacaagaggctcgcaagagagagttgagagagatggtggagacatcggaagagcagctccaggccatgaagaagctcgtccagcaggccgatacgagagcctcggaagcagaatcagccaaggactcgttacaaaaggagcttgagcgaacagttccgtttgagaaggaagtcaaagagaagaacctgctgattggcaaattgcggcatgaggctattgttctcaacgaccatttgaccaaagccctacggtatctcaagaagaccaaaccagaagacagcatcgatagacaaattgtaacaaaccacttcctccaattcctagcactcgaccgttcagaccccaagaaattccaaattctacaagtcatagccggtctcctcgcctggtcagacgagcagcgcgaacaagcagggcttgcacgaccaggcgcatcgagcaactctctccgtcttccctcttccccattccacaggacaccatccacacccagcttaaacacagagttcttttccgagcccacatcagcagccgcaaccaaggaatcgctatcagatctatgggcaggattcttagagcgaagtgctgaggaggctatgggcccgtcgagaaaagctagtatgagtagtgtttctacgaatacggcgaggccggatactaggagtggaggatcataa

SEQ ID NO: 35901 - protein, 557 aa, Muscodor strobelii
  misc_feature: SGI Peptide ID NO. 572437
  misc_feature (55)..(553): NCBI GI: 39971735 Blast Desc: MGG_07183 [Magnaporthe grisea 70-15] gi|145019668|gb|EDK03896.1| MGG_07183 [Magnaporthe grisea 70-15]
  misc_feature (73)..(534): NCBI GI: 261356793 Blast Desc: conserved [Verticillium albo-atrum VaMs.102]
  misc_feature (73)..(531): NCBI GI: 156059868 Blast Desc: SS1G_03947 [Sclerotinia sclerotiorum 1980] gi|154701733|gb|EDO01472.1| SS1G_03947 [Sclerotinia sclerotiorum 1980]
  misc_feature (58)..(552): NCBI GI: 46117102 Blast Desc: FG04393.1 [Gibberella zeae PH-1]
  misc_feature (73)..(531): NCBI GI: 154316016 Blast Desc: BC1G_04580 [Botryotinia fuckeliana B05.10] gi|150846976|gb|EDN22169.1| BC1G_04580 [Botryotinia fuckeliana B05.10]
  misc_feature (113)..(549): NCBI GI: 164422592 Blast Desc: NCU10036 [Neurospora crassa OR74A] gi|157069736|gb|EAA28737.2| conserved [Neurospora crassa OR74A]
  misc_feature (123)..(545): NCBI GI: 171689150 Blast Desc: protein product [Podospora anserina] gi|170944537|emb|CAP70648.1| protein product [Podospora anserina]
  misc_feature (57)..(529): NCBI GI: 259488265 Blast Desc: TPA: Golgi matrix protein, (AFU_orthologue; AFUA_1G08830) [Aspergillus nidulans FGSC A4]
  misc_feature (61)..(542): NCBI GI: 116204999 Blast Desc: CHGG_10383 [Chaetomium globosum CBS 148.51] gi|88176511|gb|EAQ83979.1| CHGG_10383 [Chaetomium globosum CBS 148.51]
  misc_feature (100)..(534): NCBI GI: 70994948 Blast Desc: Golgi matrix protein [Aspergillus fumigatus Af293] gi|66849885|gb|EAL90212.1| Golgi matrix protein, [Aspergillus fumigatus Af293]
MSPTEPSTQVNSTPPAPKKKNNKKKKSAAKKAADDAAAKAAESTQNGELRDDEGDQSDDGDEAPAAANQKEHTNGHATSPTTNGHPTTDSEPKSPVAPSDSTHGAAPDPDTTARLDAMSQERAALKAEVEELRKQLESIQTTHSKETTDLKSELQEVTASKEEIEEKYEDLVERVEKIKENVSARLASRKEELEEANARIEELETQNEELQKGGGRFEEEISGLKIELQDAERELSSLRSRNNLSQHNSLKEKEDMTRQIQHLREEAEAAKDAMGDWEVLAMEERSIRENLTEKTSALEEQLEALREGYERAAAERDTQSQAVDSLQRALQEIQEARKRELREMVETSEEQLQAMKKLVQQADTRASEAESAKDSLQKELERTVPFEKEVKEKNLLIGKLRHEAIVLNDHLTKALRYLKKTKPEDSIDRQIVTNHFLQFLALDRSDPKKFQILQVIAGLLAWSDEQREQAGLARPGASSNSLRLPSSPFHRTPSTPSLNTEFFSEPTSAAATKESLSDLWAGFLERSAEEAMGPSRKASMSSVSTNTARPDTRSGGS

SEQ ID NO: 35902 - DNA, 2716 bp, Muscodor strobelii; identical to SEQ ID NO: 35899
  misc_feature: SGI EST ID NO. CUFF.85406.0
  misc_feature: Variant of the nucleotide sequence at SEQ ID NO 35900

SEQ ID NO: 35903 - DNA, 990 bp, Muscodor strobelii
  misc_feature: SGI cDNA ID NO. 572438
  misc_feature: Reduced expression when VOC is produced
  misc_feature: Encodes the peptide sequence at SEQ ID NO 35904
atgccagaactacgaccgagaaaggcttctgccgtcaaggcggtctccgccaccaaagggccgagcaagcgcaaagctgctgcaaacgacgatgcgcgcccgactgctgccaaaaagacaaaggccgatgtgaagcccaagaggacccagaagaaggcttctgtaatcggcgagaaggagagcaaacccgaaatacaagatgaggtcgaggaagaagcttctgaggacgaccaagtcgacgaccaagccacggccctagcccgaattgtagacagtgacgccgaagctgaggacgacgaagacacttcagacgttgaaatagcagccctagaagtaccaaaggcaccgaaggagattgtcaaatcgaccaagtcagacggaactgagccgggtgtcgtatacgttggccgtattccccgaggtttcttcgagcaccagatgcgcgagtatttcacacagtttggagtcgtcaccaagatcagaatgtcgaggaataagatcacaggccagtcaaagcacttcgctttcgtcgaatttgccgacaaggaagtcgcagagatcgtcgcaaagactatggacaactatctactcgctgggcacatcctgaaggtcaagatggtaccagcgtcaagcgtccacgagaagctctgggtcggcgccaacaagcgcttcaagaagatcccccgaaataagatagcaggcaacaagctcaagaagcccctctcagagtctaactggacgagcaggatctccaaagaggagaaacgacgagaggagagggcgaagaagctgaaggcaatcggctacgaattcgaggcacctcagctcaagacagtcgatgatgtgaaggccatcgaagcacctgccgaggatgcaccaaaagccattgaggctgctccagagccagttgaagataccacggaagagaaggaggtggttgagaccaaggcgcctgtggaccaaagccagcaaaaaggggaagaaggctaa

SEQ ID NO: 35904 - protein, 329 aa, Muscodor strobelii
  misc_feature: SGI Peptide ID NO. 572438
  misc_feature (133)..(204): Pfam Id: PF00076 Pfam Desc: RNA recognition motif. (a.k.a. RRM, RBD, or RNP domain)
  misc_feature (52)..(304): NCBI GI: 115398349 Blast Desc: ATEG_05588 [Aspergillus terreus NIH2624] gi|114192957|gb|EAU34657.1| ATEG_05588 [Aspergillus terreus NIH2624]
  misc_feature (2)..(299): NCBI GI: 46117100 Blast Desc: FG04392.1 [Gibberella zeae PH-1]
  misc_feature (2)..(300): NCBI GI: 116204997 Blast Desc: CHGG_10382 [Chaetomium globosum CBS 148.51] gi|88176510|gb|EAQ83978.1| CHGG_10382 [Chaetomium globosum CBS 148.51]
  misc_feature (70)..(309): NCBI GI: 255949696 Blast Desc: Pc22g17020 [Penicillium chrysogenum Wisconsin 54-1255] gi|211592632|emb|CAP98990.1| Pc22g17020 [Penicillium chrysogenum Wisconsin 54-1255]
  misc_feature (69)..(272): NCBI GI: 261356792 Blast Desc: MKI67 FHA domain-interacting nucleolar phosphoprotein [Verticillium albo-atrum VaMs.102]
  misc_feature (82)..(302): NCBI GI: 67528296 Blast Desc: AN4346.2 [Aspergillus nidulans FGSC A4] gi|40741317|gb|EAA60507.1| AN4346.2 [Aspergillus nidulans FGSC A4] gi|259482846|tpe|CBF77715.1| TPA: ribosomal biogenesis Gar2
  misc_feature (129)..(312): NCBI GI: 121706530 Blast Desc: ribosomal biogenesis protein Gar2 [Aspergillus clavatus NRRL 1] gi|119399675|gb|EAW10101.1| ribosomal biogenesis protein Gar2 [Aspergillus clavatus NRRL 1]
  misc_feature (130)..(299): NCBI GI: 119501252 Blast Desc: ribosomal biogenesis protein Gar2 [Neosartorya fischeri NRRL 181] gi|119415548|gb|EAW25486.1| ribosomal biogenesis protein Gar2 [Neosartorya fischeri NRRL 181]
  misc_feature (130)..(299): NCBI GI: 70994824 Blast Desc: ribosomal biogenesis protein Gar2 [Aspergillus fumigatus Af293] gi|66849823|gb|EAL90151.1| ribosomal biogenesis protein Gar2 [Aspergillus fumigatus Af293] ribosomal biogenesis
  misc_feature (76)..(298): NCBI GI: 169773955 Blast Desc: [Aspergillus oryzae RIB40] gi|238491986|ref|XP_002377230.1| ribosomal biogenesis protein Gar2 [Aspergillus flavus NRRL3357] gi|83769307|dbj|BAE59444.1|
  misc_feature: Useful for introducing or modulating the production of volatile compounds
MPELRPRKASAVKAVSATKGPSKRKAAANDDARPTAAKKTKADVKPKRTQKKASVIGEKESKPEIQDEVEEEASEDDQVDDQATALARIVDSDAEAEDDEDTSDVEIAALEVPKAPKEIVKSTKSDGTEPGVVYVGRIPRGFFEHQMREYFTQFGVVTKIRMSRNKITGQSKHFAFVEFADKEVAEIVAKTMDNYLLAGHILKVKMVPASSVHEKLWVGANKRFKKIPRNKIAGNKLKKPLSESNWTSRISKEEKRREERAKKLKAIGYEFEAPQLKTVDDVKAIEAPAEDAPKAIEAAPEPVEDTTEEKEVVETKAPVDQSQQKGEEG

SEQ ID NO: 35905 - DNA, 1564 bp, Muscodor strobelii
  misc_feature: SGI EST ID NO. CUFF.85412.0
  misc_feature: Variant of the nucleotide sequence at SEQ ID NO 35903
ctcgagtccaacctgcgactcgaccagaccaaccacaaacacagaattggatcgcaaatatgccagaactacgaccgagaaaggcttctgccgtcaaggcggtctccgccaccaaagggccgagcaagcgcaaagctgctgcaaacgacgatgcgcgcccgactgctgccaaaaagacaaaggccgatgtgaagcccaagaggacccagaagaaggcttctgtaatcggcgagaaggagagcaaacccgaaatacaagatgaggtcgaggaagaagcttctgaggacgaccaagtcgacgaccaagccacggccctagcccgaattgtagacagtgacgccgaagctgaggacgacgaagacacttcagacgttgaaatagcagccctagaagtaccaaaggcaccgaaggagattgtcaaatcgaccaagtcagacggaactgagccgggtgtcgtatacgttggccgtattccccgaggtttcttcgagcaccagatgcgcgagtatttcacacagtttggagtcgtcaccaagatcagaatgtcgaggaataagatcacaggccagtcaaagcacttcgctttcgtcgaatttgccgacaaggaagtcgcagagatcgtcgcaaagactatggacaactatctactcgctgggcacatcctgaaggtcaagatggtaccagcgtcaagcgtccacgagaagctctgggtcggcgccaacaagcgcttcaagaagatcccccgaaataagatagcaggcaacaagctcaagaagcccctctcagagtctaactggacgagcaggatctccaaagaggagaaacgacgagaggagagggcgaagaagctgaaggcaatcggctacgaattcgaggcacctcagctcaagacagtcgatgatgtgaaggccatcgaagcacctgccgaggatgcaccaaaagccattgaggctgctccagagccagttgaagataccacggaagagaaggaggtggttgagaccaaggcgcctgtggaccaaagccagcaaaaaggggaagaaggctaagaagacgaagtagacgacggttccgataattacgtagcattgtgtatggcgttcacggtaatccaaaatctgcgatcaagagagctacaacgagatttctaattatgaggtaaatgagtcaaactacagcaagagaattatcgtgagtccgggcttgaagtcgcagacaatatttaagtgtaataatgctcattcttaatcagcgtcaacgtagttttggattctcgcattccactagaatcggcagtcaatcactaagtccaatgatcgccatccccactacttcgcggatagtttaacgtcggaaagaacagactcgaggatacgtatcatgttaagatgtttgcgcatagcgaacccacactacccgtggagatagcaggcaaaggcgggattataaaggcaatgatttggtctacttctgtaagaacccgttgaacaagccagatttaccagagtccaaagacaatggctggcgtggttcaagtatgggggattcctggcgaagggtaaaa

SEQ ID NO: 35906 - DNA, 453 bp, Muscodor strobelii
  misc_feature: SGI cDNA ID NO. 572439
  misc_feature: Encodes the peptide sequence at SEQ ID NO 35907
atggcatcccaagctcaggaattgacccacgaggagatttgggatgattctgttttgatagactcttggaacgatgcgctcgaagaatacaagaaataccacagcattcacagaaacggtggcaatgtcaatgatctagtgaaacacaagcaggagatgacatcagacgccaaggaggatgcggacgaggtttccgagccgatgaaactcgaaacaactccagaaacacaagacgagagacttaatggcatctcatcagccggagcggcaccaacggcagcgacgacacagcatgcaagtccgccaccggctcctgtaggactactgagcacagtcaaggacgaaggtctgaagagacttctcatgtcatggtactacgctggctattacaccggctactatgagggtcagcgagatgggccccctcagaacgcagaaaattctggatcataa

SEQ ID NO: 35907 - protein, 150 aa, Muscodor strobelii
  misc_feature: SGI Peptide ID NO. 572439
  misc_feature (1)..(150): NCBI GI: 256729464 Blast Desc: NECHADRAFT_84059 [Nectria haematococca mpVI 77-13-4]
  misc_feature (9)..(138): NCBI GI: 156043643 Blast Desc: [Sclerotinia sclerotiorum 1980] gi|154695212|gb|EDN94950.1| [Sclerotinia sclerotiorum 1980]
  misc_feature (1)..(142): NCBI GI: 39946616 Blast Desc: [Magnaporthe grisea 70-15] gi|145012453|gb|EDJ97109.1| [Magnaporthe grisea 70-15]
  misc_feature (8)..(138): NCBI GI: 115398347 Blast Desc: conserved [Aspergillus terreus NIH2624] gi|114192956|gb|EAU34656.1| conserved [Aspergillus terreus NIH2624]
  misc_feature (8)..(138): NCBI GI: 238491984 Blast Desc: conserved [Aspergillus flavus NRRL3357] gi|220697642|gb|EED53983.1| conserved [Aspergillus flavus NRRL3357]
  misc_feature (1)..(138): NCBI GI: 154316867 Blast Desc: [Botryotinia fuckeliana B05.10] gi|150845463|gb|EDN20656.1| [Botryotinia fuckeliana B05.10]
  misc_feature (9)..(144): NCBI GI: 116204927 Blast Desc: [Chaetomium globosum CBS 148.51] gi|88176475|gb|EAQ83943.1| [Chaetomium globosum CBS 148.51]
  misc_feature (8)..(137): NCBI GI: 242766070 Blast Desc: conserved [Talaromyces stipitatus ATCC 10500] gi|218724296|gb|EED23713.1| conserved [Talaromyces stipitatus ATCC 10500]
  misc_feature (8)..(138): NCBI GI: 212528554 Blast Desc: conserved [Penicillium marneffei ATCC 18224] gi|210073832|gb|EEA27919.1| conserved [Penicillium marneffei ATCC 18224]
  misc_feature (8)..(140): NCBI GI: 121706532 Blast Desc: conserved [Aspergillus clavatus NRRL 1] gi|119399676|gb|EAW10102.1| conserved [Aspergillus clavatus NRRL 1]
MASQAQELTHEEIWDDSVLIDSWNDALEEYKKYHSIHRNGGNVNDLVKHKQEMTSDAKEDADEVSEPMKLETTPETQDERLNGISSAGAAPTAATTQHASPPPAPVGLLSTVKDEGLKRLLMSWYYAGYYTGYYEGQRDGPPQNAENSGS

SEQ ID NO: 35908 - DNA, 1617 bp, Muscodor strobelii
  misc_feature: SGI EST ID NO. CUFF.85534.2
  misc_feature: Variant of the nucleotide sequence at SEQ ID NO 35906
taaggttacctagtccagtcgccaatgatgggatggtgagctttgaataggtctcatcaatactgcacacattaatgagtcgactggatttgcgatcgtctcggtctaggagtaactttgttcagtcatatgactgatattattgctacaactccctcatcgtcgcacattgcacgtttgcatttgtactagaagcccgtcttccttaggtagtctcacgggtacccgaatgcaagcgacagtctagccaacaacatggcatcccaagctcaggaattgacccacgaggagatttgggatgattctgttttgatagactcttggaacgatgcgctcgaagaatacaagaaataccacagcattcacagaaacggtggcaatgtcaatgatctagtgaaacacaagcaggagatgacatcagacgccaaggaggatgcggacgaggtttccgagccgatgaaactcgaaacaactccagaaacacaagacgagagacttaatggcatctcatcagccggagcggcaccaacggcagcgacgacacagcatgcaagtccgccaccggctcctgtaggactactgagcacagtcaaggacgaaggtctgaagagacttctcatgtcatggtactacgctggctattacaccggctactatgagggtcagcgagatgggccccctcagaacgcagaaaattctggatcataaaaaccgacttcgatttgagctgtgtcgtccgaaatcgtggcaactaggggtatccgggagaatagtagagggtgttaatgtgagtggtcgatctgacaggggtctgcgaccggtggtgttccatgatcagatgttattgaccctgctctagaagaaggggccgccacagactacggcatgcgaggcaaaatgtcgcaactggcatttagatgatgaatgcaagattgcgcggcactttaggccgtatgaagtaattcgcacgagttttcgcggtcaaaaaaatgtgaggcgttttcgtgcgtgcgatggcagtcaagattcaaatgctgatgagaattttctacagtacatcacttaagtgcgaataagactataaaatgactcttctttcaaatcactcaaccttctacatacttagttgatcggatctattgtccattagtcaatgtgcatactctttttgagtaaatggtaggcagatcatgtattagtcaagtcttttgacgaaacgtggaaagtcgaaacattcacacatggtgtttctgaatcgtgatacatcggaggatgccatgcactcgatcacgctatgtcactaagccatagtttccaaaagtgttctctacagtagtctaaatgcatgaagaggcctccacgtttcaacacatctcaatggtcctgcgacgcacgtaacgcttagccctatgcctcgtgatatcgatatcattataccaaaacccatctttcagaatcaatggtgtaactcggatactatcaaatttgaccacccgaaatgacttatcgaccctcaggccttatgcccttggcatgtcttgtgataagaccgtagcgaaatgagaggcttccaccggctcacggaacgagattgtggctgagttctcatcagtttcc

SEQ ID NO: 35909 - DNA, 996 bp, Muscodor strobelii
  misc_feature: SGI cDNA ID NO. 572440
  misc_feature: Elevated expression when VOC is produced
  misc_feature: Encodes the peptide sequence at SEQ ID NO 35910
atgaagtattcggcagctctcctggccgctattgcgccagttaccatggccaaggctatccagaacacctatcctttagcagtgcgaaaaggcgacgacaacaggaaaaacaatgacaacaacagaggaaacaaccagcaggggcaaatcatcgctgctggcggtgctactgaaatcatcattatctgggcgaaccccggtgctggagccgccacaaccaccatcaaccaggccgtaactgttacgcagactgtcacagctggtgcccaggcaacgactgtcggaacagagaccatagcagcaagtgccactggtacagtagcaggagcagcggctactcactctgttattgttggtggagcggccggcaagatcttcactcccgatcaagttcaggctgcagttggagatatggttgttttcactttcgagtcacagaaccacaccgtcactcagtcttcgttcgccaagccctgtgaggctatggctggtggtatggactctggattcgtccccaatcccaacaacaccattgttcccgctccccaggttgctatgcaagtcatgaccactgaccctgtctggatcttctgcgctcagaccggccactgtggcaccggtatgaccttctccatcaatcctactgccgagaagtcacagtccgctttccaggccgctgccattgcacagaatggctcaggatcgggcagcgctatcaccggtaacggcacatcaacagacggtggtgcatcaagcgtcagctccgccgtcgcatcagcaaccagcgtagcgaccggcagttctgaaggctctgcaaccagcgccgcatctggcgctatcgcaagcagcacaggcaccctggaggcaggcgcttgtgtctgctccgtcacctgcggcactggaagcttcccagctgtcaacgctcagggtctcagcaacttcggtggctttgcaggtgctatccccaacagtgcgctggaggtcatcgtcgtctaa

SEQ ID NO: 35910 - protein, 331 aa, Muscodor strobelii
  misc_feature: SGI Peptide ID NO. 572440
  misc_feature (47)..(322): NCBI GI: 256729463 Blast Desc: NECHADRAFT_47748 [Nectria haematococca mpVI 77-13-4]
  misc_feature (1)..(327): NCBI GI: 116204929 Blast Desc: CHGG_10348 [Chaetomium globosum CBS 148.51] gi|88176476|gb|EAQ83944.1| CHGG_10348 [Chaetomium globosum CBS 148.51]
  misc_feature (1)..(322): NCBI GI: 171689070 Blast Desc: protein product [Podospora anserina] gi|170944497|emb|CAP70608.1| protein product [Podospora anserina]
  misc_feature (49)..(327): NCBI GI: 156043645 Blast Desc: SS1G_10826 [Sclerotinia sclerotiorum 1980] gi|154695213|gb|EDN94951.1| SS1G_10826 [Sclerotinia sclerotiorum 1980]
  misc_feature (57)..(322): NCBI GI: 46117096 Blast Desc: FG04390.1 [Gibberella zeae PH-1]
  misc_feature (1)..(324): NCBI GI: 12718247 Blast Desc: conserved [Neurospora crassa]
  misc_feature (45)..(327): NCBI GI: 154316863 Blast Desc: BC1G_03849 [Botryotinia fuckeliana B05.10] gi|150845461|gb|EDN20654.1| BC1G_03849 [Botryotinia fuckeliana B05.10]
  misc_feature (1)..(319): NCBI GI: 85082371 Blast Desc: NCU01699 [Neurospora crassa OR74A] gi|28917985|gb|EAA27669.1| [Neurospora crassa OR74A]
  misc_feature (57)..(327): NCBI GI: 39946614 Blast Desc: MGG_08593 [Magnaporthe grisea 70-15] gi|145012455|gb|EDJ97111.1| MGG_08593 [Magnaporthe grisea 70-15]
  misc_feature (37)..(322): NCBI GI: 225683683 Blast Desc: conserved [Paracoccidioides brasiliensis Pb03] gi|226293045|gb|EEH48465.1| conserved [Paracoccidioides brasiliensis Pb18]
  misc_feature: Useful for introducing or modulating the production of volatile compounds
MKYSAALLAAIAPVTMAKAIQNTYPLAVRKGDDNRKNNDNNRGNNQQGQIIAAGGATEIIIIWANPGAGAATTTINQAVTVTQTVTAGAQATTVGTETIAASATGTVAGAAATHSVIVGGAAGKIFTPDQVQAAVGDMVVFTFESQNHTVTQSSFAKPCEAMAGGMDSGFVPNPNNTIVPAPQVAMQVMTTDPVWIFCAQTGHCGTGMTFSINPTAEKSQSAFQAAAIAQNGSGSGSAITGNGTSTDGGASSVSSAVASATSVATGSSEGSATSAASGAIASSTGTLEAGACVCSVTCGTGSFPAVNAQGLSNFGGFAGAIPNSALEVIVV

SEQ ID NO: 35911 - DNA, 1841 bp, Muscodor strobelii
  misc_feature: SGI EST ID NO. CUFF.85426.0
  misc_feature: Variant of the nucleotide sequence at SEQ ID NO 35909
atttgctactactgaagaattataggcatgcatcatgagcattgtttgcgcctgtctgcccctacccacgctctactaccgtagtacaaccttgatctcattccgcaggaaagagaaaggatcgggttcagacatggccgagaggaatccatgccctgtcctattcggaacagtccctgatgcagttttgagatcagctcctgcccagggcgccaggcgaaaatgccatggatgtgtctctcaaccccagcctctgacactgatatgcttgatcttcatgctggatataagccaagccgttcccagcggccactcaagttggtttctgtttcctttctctcttcatctcattcattagacgtgctgtgtgttcgctctttcgtcctttctttcggcttcatatcttgcattccccattcagttcttgaacgagcaggccctcgccattccctcgccctccatatttgccagaaacagtagagtcgcctcttgaagagacgtcctcgatacccttaactaccatcctaatcaatctctcacaaccttcaaaatgaagtattcggcagctctcctggccgctattgcgccagttaccatggccaaggctatccagaacacctatcctttagcagtgcgaaaaggcgacgacaacaggaaaaacaatgacaacaacagaggaaacaaccagcaggggcaaatcatcgctgctggcggtgctactgaaatcatcattatctgggcgaaccccggtgctggagccgccacaaccaccatcaaccaggccgtaactgttacgcagactgtcacagctggtgcccaggcaacgactgtcggaacagagaccatagcagcaagtgccactggtacagtagcaggagcagcggctactcactctgttattgttggtggagcggccggcaagatcttcactcccgatcaagttcaggctgcagttggagatatggttgttttcactttcgagtcacagaaccacaccgtcactcagtcttcgttcgccaagccctgtgaggctatggctggtggtatggactctggattcgtccccaatcccaacaacaccattgttcccgctccccaggttgctatgcaagtcatgaccactgaccctgtctggatcttctgcgctcagaccggccactgtggcaccggtatgaccttctccatcaatcctactgccgagaagtcacagtccgctttccaggccgctgccattgcacagaatggctcaggatcgggcagcgctatcaccggtaacggcacatcaacagacggtggtgcatcaagcgtcagctccgccgtcgcatcagcaaccagcgtagcgaccggcagttctgaaggctctgcaaccagcgccgcatctggcgctatcgcaagcagcacaggcaccctggaggcaggcgcttgtgtctgctccgtcacctgcggcactggaagcttcccagctgtcaacgctcagggtctcagcaacttcggtggctttgcaggtgctatccccaacagtgcgctggaggtcatcgtcgtctaagcattgagtgtaacacttgggagaagagaatagtgatgataccaagccatgaatggttgtataacgaatagggtgtctggcaaatcaacccgaaaacttgggaggcttatagcatttttaacgagggaatgggtcaagttttagatatgactggatcgtataacaccccttattattgtcgtgtttgatgttttcgtttcttgttcgcaaagtttatgaggggtttgggtcgatgatcctagtgttaatagaagagagacgatatgagggagatcggggaataaaagatatgaaa

SEQ ID NO: 35912 - DNA, 1635 bp, Muscodor strobelii
  misc_feature: SGI cDNA ID NO. 572441
  misc_feature: Encodes the peptide sequence at SEQ ID NO 35913
atggcagtcccaggccccacgccaaataccctgcacggcggcgatccttcctcaattcctcaacctaaggacgacgagcgtagaacgataagctttgaggagtatatgtactatgctgcgataacgcgctccgaggaaaaagctgccaatgagcggtttattgcgaatagagggaaaagagacttgaaaaatgtgttgaggggcaggttctcgaaggggaaagaggcgactgttgccgtgggtgatagcgatgatggcaagaacggcgagaaagggagtgatgagggggctggtgagggagggtgggtgtttgcacagactggatatggaccgggtattgcgctttatactgtgtttgggattacttcttgctattctggatggattatctggaaagtctaccttggtctcgactctgaccagttccccctcaggggctttggtgatttcttcttccggttgtttggcccctgggcgagacacttcatcaacatcgcccaggcactgcagatgttcctcactgtcgcgattatcgtcctgtcgaatggccagagtatatcgcagatcagccgaggagaggacggcggcatggggatctgctttgtggcttgtctgattatcatcactggagctgggttggtacttggccagatcaggactttgcagagactcggttggcttgccaatctctctgtttggttgacggttggggctgtcattttaaccatggcttccgtcgggtacggaccgaactatgcagcagttgaagcgagctttggacttccgcctaatatgcccattcagacatttgctggaataccacctacgggtcttgcatctggtggctcaggcttcgttggctctttgaacggcgtgaatgtgattgcctacgcgtacggcggcgcaatgctgtttgctgctctgctcgcagagatgagacatccaatggacttttggaagggcatgataatcgccgaggtcttcatatactctgtctacgtcttgttcggcgccttcgtttattcgttccagggacaatattcatacaaccctgcaatgcaaggtatcgccaattacaagatccaaacagcaggcaatatcttgaatctattcagcaacttaatcgcagctgtgttgtacagcaacatcggcctgaaagttgtctacgtcgaggtttgccagagattacttggtttccccgaactcactaccaagatcggaaagatctggtgggcggctctgatacccgtatattggatcgtagccttcatcatcgcggctgcaatcccccagttttcgtacattgtcggacttgtcggtgccatcttcatggtttcatttacgtatgtgttccctgcttggatggcgctgggctttatggtgtgggagtctgcaattgtacctgaggaagaacgcttcgacccggcgacaaatacgtacaactatattgataagggatggaagcgttgggcacgcggcttcatgaagagaccattcttcaactcctggaatgttgtctattttctcggagcgctggtcacgtccgcactcgggacttacagtgcagctgtgagtatcagggccgcttttaccagcgatctgtcgacaagtctgtcttgtaagccgcctttgtag

SEQ ID NO: 35913 - protein, 544 aa, Muscodor strobelii
  misc_feature: SGI Peptide ID NO. 572441
  misc_feature (93)..(499): Pfam Id: PF01490 Pfam Desc: Transmembrane amino acid transporter protein
  misc_feature (104)..(172): Pfam Id: PF01490 Pfam Desc: Transmembrane amino acid transporter protein
  misc_feature (11)..(544): NCBI GI: 156054252 Blast Desc: SS1G_05974 [Sclerotinia sclerotiorum 1980] gi|154703754|gb|EDO03493.1| SS1G_05974 [Sclerotinia sclerotiorum 1980]
  misc_feature (11)..(544): NCBI GI: 154303361 Blast Desc: BC1G_09429 [Botryotinia fuckeliana B05.10] gi|150854992|gb|EDN30184.1| BC1G_09429 [Botryotinia fuckeliana B05.10]
  misc_feature (29)..(544): NCBI GI: 240109870 Blast Desc: Transmembrane amino acid transporter family protein [Coccidioides posadasii C735 delta SOWgp]
  misc_feature (103)..(544): NCBI GI: 258578059 Blast Desc: [Uncinocarpus reesii 1704] gi|237903477|gb|EEP77878.1| [Uncinocarpus reesii 1704]
  misc_feature (20)..(544): NCBI GI: 156049361 Blast Desc: SS1G_08387 [Sclerotinia sclerotiorum 1980] gi|154692786|gb|EDN92524.1| SS1G_08387 [Sclerotinia sclerotiorum 1980]
  misc_feature (102)..(543): NCBI GI: 255952971 Blast Desc: Pc21g01720 [Penicillium chrysogenum Wisconsin 54-1255] gi|211588949|emb|CAP95069.1| Pc21g01720 [Penicillium chrysogenum Wisconsin 54-1255]
  misc_feature (103)..(544): NCBI GI: 145234639 Blast Desc: An03g00640 [Aspergillus niger] gi|134057640|emb|CAK38039.1| protein product [Aspergillus niger]
  misc_feature (20)..(517): NCBI GI: 154303659 Blast Desc: BC1G_08714 [Botryotinia fuckeliana B05.10] gi|150854508|gb|EDN29700.1| BC1G_08714 [Botryotinia fuckeliana B05.10]
  misc_feature (11)..(544): NCBI GI: 154305100 Blast Desc: BC1G_08640 [Botryotinia fuckeliana B05.10] gi|150853803|gb|EDN28995.1| BC1G_08640 [Botryotinia fuckeliana B05.10]
  misc_feature (11)..(544): NCBI GI: 156045301 Blast Desc: SS1G_09839 [Sclerotinia sclerotiorum 1980] gi|154694234|gb|EDN93972.1| SS1G_09839 [Sclerotinia sclerotiorum 1980]
MAVPGPTPNTLHGGDPSSIPQPKDDERRTISFEEYMYYAAITRSEEKAANERFIANRGKRDLKNVLRGRFSKGKEATVAVGDSDDGKNGEKGSDEGAGEGGWVFAQTGYGPGIALYTVFGITSCYSGWIIWKVYLGLDSDQFPLRGFGDFFFRLFGPWARHFINIAQALQMFLTVAIIVLSNGQSISQISRGEDGGMGICFVACLIIITGAGLVLGQIRTLQRLGWLANLSVWLTVGAVILTMASVGYGPNYAAVEASFGLPPNMPIQTFAGIPPTGLASGGSGFVGSLNGVNVIAYAYGGAMLFAALLAEMRHPMDFWKGMIIAEVFIYSVYVLFGAFVYSFQGQYSYNPAMQGIANYKIQTAGNILNLFSNLIAAVLYSNIGLKVVYVEVCQRLLGFPELTTKIGKIWWAALIPVYWIVAFIIAAAIPQFSYIVGLVGAIFMVSFTYVFPAWMALGFMVWESAIVPEEERFDPATNTYNYIDKGWKRWARGFMKRPFFNSWNVVYFLGALVTSALGTYSAAVSIRAAFTSDLSTSLSCKPPL

SEQ ID NO: 35914 - DNA, 768 bp, Muscodor strobelii
  misc_feature: SGI EST ID NO. CUFF.85417.0
  misc_feature: Variant of the nucleotide sequence at SEQ ID NO 35912
cgggcggcaaaggcttgttggactatagagtgagaaggactgtgcatatttatatctatatagcatgcctctaggctaatggatcttgcgatgttattttcatgttgttaattgctagcgattggcaatttcatataacatcatggcagtcccaggccccacgccaaataccctgcacggcggcgatccttcctcaattcctcaacctaaggacgacgagcgtagaacgataagctttgaggagtatatgtactatgctgcgataacgcgctccgaggaaaaagctgccaatgagcggtttattgcgaatagagggaaaagagacttgaaaaatgtgttgaggggcaggttctcgaaggggaaagaggcgactgttgccgtgggtgatagcgatgatggcaagaacggcgagaaagggagtgatgagggggctggtgagggagggtatgtgacgagtaaggagaggaagactgctagtagagcattgaggaccgcgagttggggcacgatcttttatcttattacgacagatatcttgggtcctgtttctgctccgcaagtcgtttgcacaaaaggtgagaatcgactgattaagatatgataggtgggtgtttgcacagactggatatggaccgggtattgcgctttatactgtgtttgggattacttcttgctattctggatggattatctggaaagtctaccttggtctcgactctgaccagttccccctcaggggctttggtgatttcttcttccggttgtttg

SEQ ID NO: 35915 - DNA, 1275 bp, Muscodor strobelii
  misc_feature: SGI cDNA ID NO. 572442
  misc_feature: Elevated expression when VOC is produced
  misc_feature: Encodes the peptide sequence at SEQ ID NO 35916
atggccccagaaggagctcgtaacgccgctgcagatggcatcccttacttcacacccgcgcaagaaccaccatcaggaactttcatcggcgagggttctgctcccaagctcttcacgccattaaccattcgtggcaccacattccaaaatcgacttttcctatcgccactgtgtcagtattcggctgaaaacggatacgcgacggattggcatttaacgcatttgggtggaattatccagcgagggcctgggctagcgttcgtcgaggcaacagcagtaacagcgcggggtcgcattacacccgaggacactggactctgggaagatggacagattgagccgcttagaagaatcgtcacttttgcccacagtcagaaccaaaagatcggtattcaacttgctcatgcaggacgaaaagcgagcacgttagcgccatggctaccagtccaaggcaccgcgaccgtggacgtgaatggttggcctgatgatgtctatgcaccatcggctataccattcactgaagatagcatagtgccgaaggctttgaccgagagcgatatacaggatctcaagcaagcatttgtagatgcctgtaagcgcgcggtcaaagccgggttcgacgtcattgaaattcactccgcacacggctacctgcttcactcatttctgtcacctgtaagcaacaaacgcacagacaaatatggtggcagctttgagaaccggacacggttgttattggaaattgtcgaggctgctcgagaagttattccgaaggcaatgccgttgtttgtgcggataagcgctacagactatttcgagtttgatgaatcatccgataacccattcccagaaagctggacagtcgctcaatctgcgcaggtggccggcttactagcagataagggtgttgatctactagatgtcagctctggaggagtacatccatcagcagttaagctgatccaatcaggtcccggttaccaagcaaagttctctcaggaaatcaagaaagtcaacggtgataagatacttgtagcaacagttggcggtatcaagcatggaaagttagcggaagagcttctacaatccggccttgatgtcacaatcgcgggtagatggttccaaaagaaccctggtcttgtctacgagtttgccgacgaccttggcgccgatgtcaagatggcaaaccagatcggatggggatttggcggacgtggatcggcgaaagcggcaaaggcaaagcagcatgttactgagaaagagtccaagatttag

SEQ ID NO: 35916 - protein, 424 aa, Muscodor strobelii
  misc_feature: SGI Peptide ID NO. 572442
  misc_feature (36)..(391): Pfam Id: PF00724 Pfam Desc: NADH:flavin oxidoreductase / NADH oxidase family
  misc_feature (36)..(273): Pfam Id: PF00724 Pfam Desc: NADH:flavin oxidoreductase / NADH oxidase family
  misc_feature (1)..(406): NCBI GI: 256723925 Blast Desc: NECHADRAFT_37088 [Nectria haematococca mpVI 77-13-4]
  misc_feature (8)..(413): NCBI GI: 238490974 Blast Desc: NADH oxidase, [Aspergillus flavus NRRL3357] gi|220697137|gb|EED53478.1| NADH oxidase, [Aspergillus flavus NRRL3357]
  misc_feature (8)..(413): NCBI GI: 169773045 Blast Desc: [Aspergillus oryzae RIB40] gi|83768852|dbj|BAE58989.1| protein product [Aspergillus oryzae]
  misc_feature (1)..(406): NCBI GI: 46127399 Blast Desc: FG08077.1 [Gibberella zeae PH-1]
  misc_feature (8)..(409): NCBI GI: 145233699 Blast Desc: An02g10930 [Aspergillus niger] gi|134057155|emb|CAK48758.1| protein product [Aspergillus niger]
  misc_feature (7)..(406): NCBI GI: 189201193 Blast Desc: NADPH dehydrogenase [Pyrenophora tritici-repentis Pt-1C-BFP] gi|187984032|gb|EDU49520.1| NADPH dehydrogenase [Pyrenophora tritici-repentis Pt-1C-BFP]
  misc_feature (4)..(406): NCBI GI: 169618573 Blast Desc: SNOG_12477 [Phaeosphaeria nodorum SN15] gi|111059170|gb|EAT80290.1| SNOG_12477 [Phaeosphaeria nodorum SN15]
  misc_feature (8)..(417): NCBI GI: 226503259 Blast Desc: LOC100273631 [Zea mays] gi|194704906|gb|ACF86537.1| [Zea mays]
  misc_feature (8)..(417): NCBI GI: 46124301 Blast Desc: FG06528.1 [Gibberella zeae PH-1]
  misc_feature (8)..(407): NCBI GI: 242223402 Blast Desc: [Postia placenta Mad-698-R] gi|220723179|gb|EED77471.1| [Postia placenta Mad-698-R]
  misc_feature (8)..(404): SWISSPROT Homolog: EC 1.6.99.1 NADPH dehydrogenase
  misc_feature: Useful for introducing or modulating the production of volatile compounds
MAPEGARNAAADGIPYFTPAQEPPSGTFIGEGSAPKLFTPLTIRGTTFQNRLFLSPLCQYSAENGYATDWHLTHLGGIIQRGPGLAFVEATAVTARGRITPEDTGLWEDGQIEPLRRIVTFAHSQNQKIGIQLAHAGRKASTLAPWLPVQGTATVDVNGWPDDVYAPSAIPFTEDSIVPKALTESDIQDLKQAFVDACKRAVKAGFDVIEIHSAHGYLLHSFLSPVSNKRTDKYGGSFENRTRLLLEIVEAAREVIPKAMPLFVRISATDYFEFDESSDNPFPESWTVAQSAQVAGLLADKGVDLLDVSSGGVHPSAVKLIQSGPGYQAKFSQEIKKVNGDKILVATVGGIKHGKLAEELLQSGLDVTIAGRWFQKNPGLVYEFADDLGADVKMANQIGWGFGGRGSAKAAKAKQHVTEKESKI

SEQ ID NO: 35917 - DNA, 1971 bp, Muscodor strobelii
  misc_feature: SGI cDNA ID NO. 572443
  misc_feature: Encodes the peptide sequence at SEQ ID NO 35918
atgttgtgtccattttgcgcgttgatcaacctggatgagcttctttctgaggaaggatacgatcacttcgacgatgtcagggagatcgttaactcagcactgacctgcgaactctgccgtttgacgctggacgaagcattggagaagccaacattcatccaacgaacacctcattctctaaatgatgcacttgaggatatgggctttgacgcgtcgcaaaaagtgggactgactctaaaggtcgaagacgggctgctttattgccatttgaaatatgaaaacaacttatgtggctatttgggtcgtgatcccttaaggatctttcatcgcggcgacggagcagaaagtgaggactcaatagcgccattctcggcagctttaggtctacctctcatcggcgctggtatcccggacttacctgaccttccacacatctcatctttggtacaaggctgggttgatgaatgcaaccataagcatgaaatatgtggaagtcaaaaccgcaagagtcctgatttcatgccaactagaactcttgatgtagattttggtgatccaggagcagtccgtctagtcaataccactggactatgccacgactatgtaactctcagccactgttggggtgattcactgcctctgaggacaacaacatccaacttcactgcacaccaaaacttgatagacatccagaacctaccgcaaacgtttcgagatgccgtctcggttacgcgtagcattggcatgaagtacctttggattgacgcgctatgcattatccaggatgataaaacagactgggaaagtgaagcgccaaggatgggcgatctttacagcaacgccttcatcaccattgcggcatcgcgatgcacgagcagcacatcgggcttccttggcacacgcgagagggatactctcgtttcgattccgtcagatggcaccgggactttatgtattagccgtcgtcacagttttgcacgagacatagataatgcgccactagcgacacgagcctgggttgtccaagaacggatcttgtctcggcgtacgatacactttaccagcgcccaagtgtattgggaatgttgggcatcacaggtaggcgagaatcttgatatgctctacccaggcgttgtgaaacaggacgcttatccgcaggaatttgcccctagtggaggatgtgaaaatagtacagagctggcggctctgcgcacacctagacagtggtggcacatggttactgcctatactggctgcagtctgacatatcagaaagacaagctcattgcaattgatgggctcatccagcgcatcagccaaaggactgaacatagagccattgcaggaatcttcgaagacgtgcttcatgctggcctgttgtggtcggcgtgcgataagccgttagagaagatcaccgaaattaaagctccctcgtggagttgggcaagtcgcaaaggacgaatcaattacatgcaactatatgaatgggcggaaaatgacgatatccaactacgggagtcatcagctgattccgaacccacattgcgtggaccacgtcgaaaactgcgtgcagagctatgcattagtgagatgaaagactcaagagagtatcaaagcttcccacccgagctcgactaccatgctacgaacttccgttttgtatacttgaactcaggagaaggcgaagacgatcccggatggttaacactcgatgacgacaacgagaacacaacaccagaatgggatatgatcagctgggtcatcgtggcttataaaattaatagcggaacctcggattctaattccctaactcagcaatgccacagctcgaacgttgccctagaagaagctccttactattgcatgctcgttcgcctgaagcctgactcaacatatgagcggataggtatcggcgccgcaaggtctttaagctggtttgatgatttgaaagaagaaattgtcataagctga

SEQ ID NO: 35918 - protein, 656 aa, Muscodor strobelii
  misc_feature: SGI Peptide ID NO. 572443
  misc_feature (201)..(343): Pfam Id: PF06985 Pfam Desc: Heterokaryon incompatibility protein (HET)
  misc_feature (131)..(499): NCBI GI: 238502093 Blast Desc: conserved [Aspergillus flavus NRRL3357] gi|220691090|gb|EED47438.1| conserved [Aspergillus flavus NRRL3357]
  misc_feature (136)..(491): NCBI GI: 169613657 Blast Desc: SNOG_09961 [Phaeosphaeria nodorum SN15] gi|111061176|gb|EAT82296.1| SNOG_09961 [Phaeosphaeria nodorum SN15]
  misc_feature (139)..(642): NCBI GI: 171691370 Blast Desc: protein product [Podospora anserina] gi|170945633|emb|CAP71746.1| protein product [Podospora anserina]
  misc_feature (122)..(514): NCBI GI: 256723898 Blast Desc: NECHADRAFT_78374 [Nectria haematococca mpVI 77-13-4]
  misc_feature (147)..(572): NCBI GI: 256724255 Blast Desc: NECHADRAFT_87557 [Nectria haematococca mpVI 77-13-4]
  misc_feature (147)..(649): NCBI GI: 164425000 Blast Desc: NCU06583 [Neurospora crassa OR74A] gi|157070747|gb|EAA32707.2| NCU06583 [Neurospora crassa OR74A]
  misc_feature (79)..(507): NCBI GI: 256722820 Blast Desc: NECHADRAFT_87137 [Nectria haematococca mpVI 77-13-4]
  misc_feature (153)..(500): NCBI GI: 171677825 Blast Desc: protein product [Podospora anserina] gi|170936981|emb|CAP61639.1| protein product [Podospora anserina]
  misc_feature (143)..(527): NCBI GI: 256722024 Blast Desc: NECHADRAFT_86169 [Nectria haematococca mpVI 77-13-4]
  misc_feature (131)..(483): NCBI GI: 154302410 Blast Desc: BC1G_09989 [Botryotinia fuckeliana B05.10] gi|150855477|gb|EDN30669.1| BC1G_09989 [Botryotinia fuckeliana B05.10]
MLCPFCALINLDELLSEEGYDHFDDVREIVNSALTCELCRLTLDEALEKPTFIQRTPHSLNDALEDMGFDASQKVGLTLKVEDGLLYCHLKYENNLCGYLGRDPLRIFHRGDGAESEDSIAPFSAALGLPLIGAGIPDLPDLPHISSLVQGWVDECNHKHEICGSQNRKSPDFMPTRTLDVDFGDPGAVRLVNTTGLCHDYVTLSHCWGDSLPLRTTTSNFTAHQNLIDIQNLPQTFRDAVSVTRSIGMKYLWIDALCIIQDDKTDWESEAPRMGDLYSNAFITIAASRCTSSTSGFLGTRERDTLVSIPSDGTGTLCISRRHSFARDIDNAPLATRAWVVQERILSRRTIHFTSAQVYWECWASQVGENLDMLYPGVVKQDAYPQEFAPSGGCENSTELAALRTPRQWWHMVTAYTGCSLTYQKDKLIAIDGLIQRISQRTEHRAIAGIFEDVLHAGLLWSACDKPLEKITEIKAPSWSWASRKGRINYMQLYEWAENDDIQLRESSADSEPTLRGPRRKLRAELCISEMKDSREYQSFPPELDYHATNFRFVYLNSGEGEDDPGWLTLDDDNENTTPEWDMISWVIVAYKINSGTSDSNSLTQQCHSSNVALEEAPYYCMLVRLKPDSTYERIGIGAARSLSWFDDLKEEIVIS

SEQ ID NO: 35919 - DNA, 2050 bp, Muscodor strobelii
  misc_feature: SGI EST ID NO. CUFF.85447.1
  misc_feature: Variant of the nucleotide sequence at SEQ ID NO 35917
atttcctgctgtttcaagccacactgtcactgatagaacaccagatgttgtgtccattttgcgcgttgatcaacctggatgagcttctttctgaggaaggatacgatcacttcgacgatgtcagggagatcgttaactcagcactgacctgcgaactctgccgtttgacgctggacgaagcattggagaagccaacattcatccaacgaacacctcattctctaaatgatgcacttgaggatatgggctttgacgcgtcgcaaaaagtgggactgactctaaaggtcgaagacgggctgctttattgccatttgaaatatgaaaacaacttatgtggctatttgggtcgtgatcccttaaggatctttcatcgcggcgacggagcagaaaggactcaatagcgccattctcggcagctttaggtctacctctcatcggcgctggtatcccggacttacctgaccttccacacatctcatctttggtacaaggctgggttgatgaatgcaaccataagcatgaaatatgtggaagtcaaaaccgcaagagtcctgatttcatgccaactagaactcttgatgtagattttggtgatccaggagcagtccgtctagtcaataccactggactatgccacgactatgtaactctcagccactgttggggtgattcactgcctctgaggacaacaacatccaacttcactgcacaccaaaacttgatagacatccagaacctaccgcaaacgtttcgagatgccgtctcggttacgcgtagcattggcatgaagtacctttggattgacgcgctatgcattatccaggatgataaaacagactgggaaagtgaagcgccaaggatgggcgatctttacagcaacgccttcatcaccattgcggcatcgcgatgcacgagcagcacatcgggcttccttggcacacgcgagagggatactctcgtttcgattccgtcagatggcaccgggactttatgtattagccgtcgtcacagttttgcacgagacatagataatgcgccactagcgacacgagcctgggttgtccaagaacggatcttgtctcggcgtacgatacactttaccagcgcccaagtgtattgggaatgttgggcatcacaggtaggcgagaatcttgatatgctctacccaggcgttgtgaaacaggacgcttatccgcaggaatttgcccctagtggaggatgtgaaaatagtacagagctggcggctctgcgcacacctagacagtggtggcacatggttactgcctatactggctgcagtctgacatatcagaaagacaagctcattgcaattgatgggctcatccagcgcatcagccaaaggactgaacatagagccattgcaggaatcttcgaagacgtgcttcatgctggcctgttgtggtcggcgtgcgataagccgttagagaagatcaccgaaattaaagctccctcgtggagttgggcaagtcgcaaaggacgaatcaattacatgcaactatatgaatgggcggaaaatgacgatatccaactacgggagtcatcagctgattccgaacccacattgcgtggaccacgtcgaaaactgcgtgcagagctatgcattagtgagatgaaagactcaagagagtatcaaagcttcccacccgagctcgactaccatgctacgaacttccgttttgtatacttgaactcaggagaaggcgaagacgatcccggatggttaacactcgatgacgacaacgagaacacaacaccagaatgggatatgatcagctgggtcatcgtggcttataaaattaatagcggaacctcggattctaattccctaactcagcaatgccacagctcgaacgttgccctagaagaagctccttactattgcatgctcgttcgcctgaagcctgactcaacatatgagcggataggtatcggcgccgcaaggtctttaagctggtttgatgatttgaaagaagaaattgtcataagctgaaggctcatctggcgagtaccccgcacatatagacacgag

SEQ ID NO: 35920 - DNA, 990 bp, Muscodor strobelii
  misc_feature: SGI cDNA ID NO. 572444
  misc_feature: Encodes the peptide sequence at SEQ ID NO 35921
atgcctgaacttctaggaaaggaagtcggtcctatcgggctgggcctaatgggattcacatggaggagtaaccctccctcagacgaacaggccttcgagaccatgcgcgctgccattcaaggaggaagcaattgctggaacggtggcgaattttacggcccgccggagcgtaatagcctagtcctcctagaaaagtatttcgagaaataccccgaagatgctgacaaagttgtcttaaacatcaaaggcggcgggaactttgagaagaggaaaatagacgggagtccggaaaatacacgtcggagtattgatacttgtatagcccagcttaaagggagaaagaagatcgatatgtttgaatttgcgcgccgcgacccgagcgtacctttggaggtcacactcggcgtcatcgacagggagtatgttcaaactggaaagatcggaggcatctcgctctcagaagtccgagccgaaacgatccacgaggcagccaagataacgaagatctgcgccgtagagattgaagtttctatgttctctacagatttcttgacaaatggggtggcagaagcctgcgcgcaatacggaatcccaatcatagcgtactcacccatcggaaggggaatgttgacgggagcggttaagaagctcgaggacgtcaacgagttattgcgaacaatggactttcctcgattccgacccggcaatttcgaggctaacatggccctcgttgagaaggttgagagcctagccaagaaaaaaggctgcactcctgcacaactggcgatcaactggactagggagatgggcaaacgtgttgatgtaccagctatcattcctattcctggcgctacaaccatagtccgcgtggaagagaacaacaagatagtaaatctaacggacaatgaggtgggagagatcgatagcattttggctacttttgtgcctgttggagatcgttataataaccctgcgaccatgaacacataa

SEQ ID NO: 35921 - protein, 329 aa, Muscodor strobelii
  misc_feature: SGI Peptide ID NO. 572444
  misc_feature (4)..(312): Pfam Id: PF00248 Pfam Desc: Aldo/keto reductase family
  misc_feature (1)..(329): NCBI GI: 238484713 Blast Desc: aldo/keto reductase, [Aspergillus flavus NRRL3357] gi|220701645|gb|EED57983.1| aldo/keto reductase, [Aspergillus flavus NRRL3357]
  misc_feature (1)..(329): NCBI GI: 115492031 Blast Desc: conserved [Aspergillus terreus NIH2624] gi|114197503|gb|EAU39203.1| conserved [Aspergillus terreus NIH2624]
  misc_feature (1)..(329): NCBI GI: 145257414 Blast Desc: An04g03570 [Aspergillus niger] gi|134058638|emb|CAK38622.1| protein product [Aspergillus niger]
  misc_feature (1)..(293): NCBI GI: 169767802 Blast Desc: [Aspergillus oryzae RIB40] gi|83766227|dbj|BAE56370.1| protein product [Aspergillus oryzae]
  misc_feature (1)..(321): NCBI GI: 67904384 Blast Desc: AN9179.2 [Aspergillus nidulans FGSC A4] gi|40742280|gb|EAA61470.1| AN9179.2 [Aspergillus nidulans FGSC A4] gi|259485392|tpe|CBF82377.1| TPA: pyridoxal reductase (AKR8),
  misc_feature (1)..(321): NCBI GI: 85091461 Blast Desc: NCU09141 [Neurospora crassa OR74A] gi|28920304|gb|EAA29677.1| NCU09141 [Neurospora crassa OR74A]
  misc_feature (1)..(321): NCBI GI: 261357533 Blast Desc: pyridoxal reductase [Verticillium albo-atrum VaMs.102]
  misc_feature (1)..(329): NCBI GI: 256735285 Blast Desc: NECHADRAFT_90163 [Nectria haematococca mpVI 77-13-4]
  misc_feature (1)..(329): NCBI GI: 46106514 Blast Desc: FG00427.1 [Gibberella zeae PH-1]
  misc_feature (1)..(321): NCBI GI: 156062168 Blast Desc: SS1G_01199 [Sclerotinia sclerotiorum 1980] gi|154696536|gb|EDN96274.1| SS1G_01199 [Sclerotinia sclerotiorum 1980]
  misc_feature (1)..(322): SWISSPROT Homolog: EC 1.1.1.65 Pyridoxine 4-dehydrogenase
MPELLGKEVGPIGLGLMGFTWRSNPPSDEQAFETMRAAIQGGSNCWNGGEFYGPPERNSLVLLEKYFEKYPEDADKVVLNIKGGGNFEKRKIDGSPENTRRSIDTCIAQLKGRKKIDMFEFARRDPSVPLEVTLGVIDREYVQTGKIGGISLSEVRAETIHEAAKITKICAVEIEVSMFSTDFLTNGVAEACAQYGIPIIAYSPIGRGMLTGAVKKLEDVNELLRTMDFPRFRPGNFEANMALVEKVESLAKKKGCTPAQLAINWTREMGKRVDVPAIIPIPGATTIVRVEENNKIVNLTDNEVGEIDSILATFVPVGDRYNNPATMNT

SEQ ID NO: 35922 - DNA, 1348 bp, Muscodor strobelii
  misc_feature: SGI EST ID NO. CUFF.85436.0
  misc_feature: Variant of the nucleotide sequence at SEQ ID NO 35920
gtcaaattgaaaacggattttggatatccgttgagtatcttccgtctattgcgaggctcttcctctgttcttatatagagtccaactcagactatgcctgaacttctaggaaaggaagtcggtcctatcgggctgggcctaatgggattcacatggaggagtaaccctccctcagacgaacaggccttcgagaccatgcgcgctgccattcaaggaggaagcaattgctggaacggtggcgaattttacggcccgccggagcgtaatagcctagtcctcctagaaaagtatttcgagaaataccccgaagatgctgacaaagttgtcttaaacatcaaaggcggcgggaactttgagaagaggaaaatagacgggagtccggaaaatacacgtcggagtattgatacttgtatagcccagcttaaagggagaaagaagatcgatatgtttgaatttgcgcgccgcgacccgagcgtacctttggaggtcacactcggcgtcatcgacagggagtatgttcaaactggaaagatcggaggcatctcgctctcagaagtccgagccgaaacgatccacgaggcagccaagataacgaagatctgcgccgtagagattgaagtttctatgttctctacagatttcttgacaaatggggtggcagaagcctgcgcgcaatacggaatcccaatcatagcgtactcacccatcggaaggggaatgttgacgggagcggttaagaagctcgaggacgtcaacgagttattgcgaacaatggactttcctcgattccgacccggcaatttcgaggctaacatggccctcgttgagaaggttgagagcctagccaagaaaaaaggctgcactcctgcacaactggcgatcaactggactagggagatgggcaaacgtgttgatgtaccagctatcattcctattcctggcgctacaaccatagtccgcgtggaagagaacaacaagatagtaaatctaacggacaatgaggtgggagagatcgatagcattttggctacttttgtgcctgttggagatcgttataataaccctgcgaccatgaacacataatgatggatataaaacatagctgagttattgtacgggaaccaaacaaacccccacctaataacacacaaggctgaagacaagctgagtaaattaccaaggaattgcgggatgttttgaaatagtggagagagaaatacggtagccaattcaataataccgctatagagctagaattggtgctatgcaaaacctcgatgcccaaattgggcgacatgaaagctccggggctcatgctcatgtaagcaagaacatcaattcatttcag

SEQ ID NO: 35923 - DNA, 1194 bp, Muscodor strobelii
  misc_feature: SGI cDNA ID NO. 572445
  misc_feature: Elevated expression when VOC is produced
  misc_feature: Encodes the peptide sequence at SEQ ID NO 35924
atggtcattataagctctccgttgatcattcgatcaccaatgtggagtctcgagacccgatccctagcgaaactaagaccccagtcaatctctcacaaaatactgggtatcaggaagaaaatattcatcatcgtcgctcttgcttcagggttgatcgtaatcgctatagtggctggtctggctgctggtttgacaagtgccaaacacggaaatggacatgccatgcgacagaatctggcagcaacaaattggactgtgaaaggcggcgttgaatatcaagtcgtgtttacgcaagatgagcttgattattcgttgctcgcatacttcaagacgaacgattcctggactccggtcaatattagcagttacttcgatgacagcgcattgcctatccgggctcaatcacctcttgccgctgtcgcgatttcagatccaagtgattgggaagatacagagctcaatcaattgcgcgtttatttcgccacctccgcaaacagcgtagtcgagatcgtcactcattcacctgatttcacagattggaaatggggcagtctcggtcctcacatgaacaatactatccaaatcgaagactattctcaattggcagcggcatggcgacgatgctcaaacgagaccgtatgtggtcacgggcaattcttcctgacctacgaactgggaacttcagtgatggtcgcaaattccactgccaattgggatcccagcactgctgttgaacgaattgatcccttttcaggcatcaccgtggtgtcggccctaaccctggagccgcatcaggactccaaaactctatttgacacagactatgtttgggctatgtactcagattcggagacgggggtaaacatcagcttgccgcgacaggagaattcgaccatacaaaccttggccgccgtggcatttaacgaccgtaagtgcgtgcttcttgtctgtctcgcagacaaagatggcacggcctacgcgaatcatttcgatcccataaaatggggttggttcgatgcacaaccgctgagtctcgaggccgctccagataatacaatgttctcaactatagcaatgacacctaacggaaggctctatggcatctcagatggtgtggtgcaagaatatgagatggatctaactaacttatacactttccactttttgagcaacgtttctactgcgtcatcgtag

SEQ ID NO: 35924 - protein, 397 aa, Muscodor strobelii
  misc_feature: SGI Peptide ID NO. 572445
  misc_feature: Useful for introducing or modulating the production of volatile compounds
MVIISSPLIIRSPMWSLETRSLAKLRPQSISHKILGIRKKIFIIVALASGLIVIAIVAGLAAGLTSAKHGNGHAMRQNLAATNWTVKGGVEYQVVFTQDELDYSLLAYFKTNDSWTPVNISSYFDDSALPIRAQSPLAAVAISDPSDWEDTELNQLRVYFATSANSVVEIVTHSPDFTDWKWGSLGPHMNNTIQIEDYSQLAAAWRRCSNETVCGHGQFFLTYELGTSVMVANSTANWDPSTAVERIDPFSGITVVSALTLEPHQDSKTLFDTDYVWAMYSDSETGVNISLPRQENSTIQTLAAVAFNDRKCVLLVCLADKDGTAYANHFDPIKWGWFDAQPLSLEAAPDNTMFSTIAMTPNGRLYGISDGVVQEYEMDLTNLYTFHFLSNVSTASS

SEQ ID NO: 35925 - DNA, 705 bp, Muscodor strobelii
  misc_feature: SGI EST ID NO. CUFF.85439.0
  misc_feature: Variant of the nucleotide sequence at SEQ ID NO 35923
caaaattaccaacaagattggaactggacagaccaaggggtaaacatcagcttgccgcgacaggagaattcgaccatacaaaccttggccgccgtggcatttaacgaccgtaagtgcgtgcttcttgtctgtctcgcagacaaagatggcacggcctacgcgaatcatttcgatcccataaaatggggttggttcgatgcacaaccgctgagtctcgaggccgctccagataatacaatgttctcaactatagcaatgacacctaacggaaggctctatggcatctcagatggtgtggtgcaagaatatgagatggatctaactaacttatacactttccactttttgagcaacgtttctactgcgtcatcgtagcccttctcctattctcgtgttacgatacattcattacccatgttttgttcagacaccggaagtatacgtatgcggtgatcactacaaggccgctagcctcattacgcttgtgactgcaattgtcatgttgttgacacctcagtgatatccgctgaagcacccacgtccgtttgatggaacacttgatctttttacttacatgaggatattgtgagggcatactcagatttggagaatcaactttgggtcatcatcaatatagcaaggcatgatccatattgccagcacatcaatcaccataccgtttaaagtcttaactgtctaaacaaa

SEQ ID NO: 35926 - DNA, 648 bp, Muscodor strobelii
  misc_feature: SGI cDNA ID NO. 572446
  misc_feature: Encodes the peptide sequence at SEQ ID NO 35927
atggaaagtcaaggaagcgcagtacagtctggggacatcatatttggaggtgtcgaccgttggaagtatactgggtatcttgaacccatcgaagtctggccaatcccgtcagatcagatgacgatgtacggacaagttggatactggatcaacttgacatcttttggatacacgcctccgggacaatccgaggtcacaatgacaaacgccaacttcacacgatctatgttgatcgactccggctctacgttcacatatctcgatgctgatcttgtagcggcactggctcaaacgttcaatgcctggatcgatgaaaacggtgtatactatgttgactgcgctctacgctctaaggacggatgggtcaacttcggattcaacaacggcaatatgatcatccgagtcagctactcggactttatcgtcgacttcgttacgcattgcgctctcggtgtacagcctgcggatgtgggtgtcaatacttgggtgcttggaaatagcttcattcgcgcagcatatatcatatttgatcaaatgaacgacgctatctggctagctcagtatataccatgtgccgacaatggcatcagcgacctaacacaggacgctggcaaggagctgtggctggacatgacgggtctctgctga

SEQ ID NO: 35927 - protein, 215 aa, Muscodor strobelii
  misc_feature: SGI Peptide ID NO. 572446
  misc_feature (1)..(188): Pfam Id: PF00026 Pfam Desc: Eukaryotic aspartyl protease
  misc_feature (77)..(188): Pfam Id: PF00026 Pfam Desc: Eukaryotic aspartyl protease
  misc_feature (12)..(193): NCBI GI: 116205756 Blast Desc: CHGG_02171 [Chaetomium globosum CBS 148.51] gi|88182768|gb|EAQ90236.1| CHGG_02171 [Chaetomium globosum CBS 148.51]
  misc_feature (12)..(193): NCBI GI: 171678197 Blast Desc: protein product [Podospora anserina] gi|170937168|emb|CAP61825.1| protein product [Podospora anserina]
  misc_feature (11)..(215): NCBI GI: 171691448 Blast Desc: protein product [Podospora anserina] gi|170945672|emb|CAP71785.1| protein product [Podospora anserina]
  misc_feature (9)..(191): NCBI GI: 171680938 Blast Desc: protein product [Podospora anserina] gi|170940427|emb|CAP65654.1| protein product [Podospora anserina]
  misc_feature (10)..(192): NCBI GI: 256724380 Blast Desc: NECHADRAFT_4173 [Nectria haematococca mpVI 77-13-4]
  misc_feature (8)..(205): NCBI GI: 116191517 Blast Desc: CHGG_05476 [Chaetomium globosum CBS 148.51] gi|88181389|gb|EAQ88857.1| CHGG_05476 [Chaetomium globosum CBS 148.51]
  misc_feature (5)..(191): NCBI GI: 39948622 Blast Desc: MGG_08698 [Magnaporthe grisea 70-15] gi|145009241|gb|EDJ93952.1| MGG_08698 [Magnaporthe grisea 70-15]
  misc_feature (7)..(194): NCBI GI: 39970765 Blast Desc: MGG_02849 [Magnaporthe grisea 70-15] gi|149210259|ref|XP_001522504.1| MGCH7_ch7g607 [Magnaporthe grisea 70-15] gi|86196562|gb|EAQ71200.1| MGCH7_ch7g607 grisea
  misc_feature (9)..(197): NCBI GI: 171678269 Blast Desc: protein product [Podospora anserina] gi|170937204|emb|CAP61861.1| protein product [Podospora anserina]
  misc_feature (11)..(173): NCBI GI: 171695768 Blast Desc: protein product [Podospora anserina] gi|170948126|emb|CAP60290.1| protein product [Podospora anserina]
  misc_feature (11)..(187): SWISSPROT Homolog: EC 3.4.23.41 Yapsin 1
MESQGSAVQSGDIIFGGVDRWKYTGYLEPIEVWPIPSDQMTMYGQVGYWINLTSFGYTPPGQSEVTMTNANFTRSMLIDSGSTFTYLDADLVAALAQTFNAWIDENGVYYVDCALRSKDGWVNFGFNNGNMIIRVSYSDFIVDFVTHCALGVQPADVGVNTWVLGNSFIRAAYIIFDQMNDAIWLAQYIPCADNGISDLTQDAGKELWLDMTGLC

SEQ ID NO: 35928 - DNA, 1050 bp, Muscodor strobelii
  misc_feature: SGI cDNA ID NO. 572447
  misc_feature: Elevated expression when VOC is produced
  misc_feature: Encodes the peptide sequence at SEQ ID NO 35929
atgcaggtgaaatttgctataatatgtttttcgcttttgttgagtggtggtgtcgcatgggactacacaaatgagcgcgattttcgacgcggtatctcaggccacaatcatgctcttgtcgcgtttatagatccctctccaaccgctatccactgccaggcgctggagccggaatggcaaatcgtcgctaactcacaaagctctctgctaactatcgactgttcatccgaaacagctctctgtgaagagttcgacataatctcataccccgcgatacgatatttcgacggccatggtcacacaaggtcttatcgaggaccgaggaaagcttcagctctaaaatcgtttctggcacgagctcatcgacccgtaattactactctcaactcagagaagatcacagcctttcagtccgtagacgagcgagttgtcatcggtcacttaaacccacaagacgaacatataattaccgcattcacgacagtcgcatcgcaataccgggacagagctacatttggatctatagaaaccgacaccgcgtcggtagccgaatgctacaataatgtggatgagcagaagttcacgtcgacggacttctctgccgttgacgagatctctaagttgatcgataactgccttgcgccactcattggagagttcaatcgagtgaatgagatgagttacttacaggccggaaagtcactagtttactattttgcgacgactcaagaagaacgagacgattatgtcaaaaagattcggccggtggcaaagatgtacaaagagtatctaaattttgtgacggtaaatgcattggagtatggagatctggctatgccacttggcttgacgcctagcgtctttcccgcgctcgccgttcagaacccgatgtttgggcaggtcttcccaatgccagcaagtactcaaattacttcagaatctgttggcgcgtttgttatggatatcgtacaagggaaagttcaaccctggaatggccagcgctcttcaggaaacgcccaagggcaagagcaggggcacgatgagctgtga

SEQ ID NO: 35929 - protein, 349 aa, Muscodor strobelii
  misc_feature: SGI Peptide ID NO. 572447
  misc_feature (21)..(120): Pfam Id: PF00085 Pfam Desc: Thioredoxin
  misc_feature (51)..(120): Pfam Id: PF00085 Pfam Desc: Thioredoxin
  misc_feature (51)..(349): NCBI GI: 171678215 Blast Desc: protein product [Podospora anserina] gi|170937177|emb|CAP61834.1| protein product [Podospora anserina]
  misc_feature (19)..(345): NCBI GI: 39955048 Blast Desc: [Magnaporthe grisea 70-15] gi|145021069|gb|EDK05198.1| [Magnaporthe grisea 70-15]
  misc_feature (28)..(329): NCBI GI: 212528798 Blast Desc: protein disulfide isomerase Pdi1, [Penicillium marneffei ATCC 18224] gi|210073954|gb|EEA28041.1| protein disulfide isomerase Pdi1, [Penicillium marneffei ATCC 18224]
  misc_feature (28)..(329): NCBI GI: 242765460 Blast Desc: protein disulfide isomerase Pdi1, [Talaromyces stipitatus ATCC 10500] gi|218724175|gb|EED23592.1| protein disulfide isomerase Pdi1, [Talaromyces stipitatus ATCC 10500]
  misc_feature (1)..(329): NCBI GI: 119184972 Blast Desc: CIMG_07225 [Coccidioides immitis RS]
  misc_feature (1)..(329): NCBI GI: 240110039 Blast Desc: protein disulfide-isomerase precursor, [Coccidioides posadasii C735 delta SOWgp] gi|269204795|gb|ACZ28900.1| protein disulfide isomerase [Coccidioides posadasii]
  misc_feature (28)..(329): NCBI GI: 226282499 Blast Desc: disulfide isomerase Pdi1 [Paracoccidioides brasiliensis Pb01]
  misc_feature (24)..(329): NCBI GI: 226292337 Blast Desc: disulfide-isomerase [Paracoccidioides brasiliensis Pb18]
  misc_feature (28)..(329): NCBI GI: 258568494 Blast Desc: protein disulfide-isomerase [Uncinocarpus reesii 1704] gi|237906437|gb|EEP80838.1| protein disulfide-isomerase [Uncinocarpus reesii 1704]
  misc_feature (3)..(329): NCBI GI: 169618128 Blast Desc: SNOG_12251 [Phaeosphaeria nodorum SN15] gi|111059543|gb|EAT80663.1| SNOG_12251 [Phaeosphaeria nodorum SN15]
  misc_feature (28)..(329): SWISSPROT Homolog: EC 5.3.4.1 Protein disulfide-isomerase
  misc_feature: Useful for introducing or modulating the production of volatile compounds
MQVKFAIICFSLLLSGGVAWDYTNERDFRRGISGHNHALVAFIDPSPTAIHCQALEPEWQIVANSQSSLLTIDCSSETALCEEFDIISYPAIRYFDGHGHTRSYRGPRKASALKSFLARAHRPVITTLNSEKITAFQSVDERVVIGHLNPQDEHIITAFTTVASQYRDRATFGSIETDTASVAECYNNVDEQKFTSTDFSAVDEISKLIDNCLAPLIGEFNRVNEMSYLQAGKSLVYYFATTQEERDDYVKKIRPVAKMYKEYLNFVTVNALEYGDLAMPLGLTPSVFPALAVQNPMFGQVFPMPASTQITSESVGAFVMDIVQGKVQPWNGQRSSGNAQGQEQGHDEL

SEQ ID NO: 35930 - DNA, 2041 bp, Muscodor strobelii
  misc_feature: SGI EST ID NO. CUFF.85504.1
  misc_feature: Variant of the nucleotide sequence at SEQ ID NO 35928
tgaagatgaagctgctcttcgggtttaatgaacccatcaaggtagatgactagcggtgatcttgagagaatatgactttgatacggaggatgttgacatgatccgggcgagacgatgggtttctgctcttgacgatgactgtgggcgcagacgctaccgaccagcgccgtaagtatgaccgattttagtgaatccattccaaggctttgaaaagtgtgacagtacagttgcgatcatacaaatctaggtagagatagattgacaggctagtagatatgaacaccatcgagcttgtcatcttcaaaaatcaaaacgatcatatccgatttcatacacctttcgcgctctgtgcccaacatgacggagtactcgtgcatctttgaaacgtcacaagtctgttgatggcgctgtttcgatgatcctcctagcgccgtgccaccgagccatctcaatcgcttcagcgtgggttactggggtgcttcgtttgatctacagcgcttgtcatatccctgcatgagcccctgagttgctgcacagggtacagttcagctttaccagctatttgaccccgccattgccccgatttcagtaccaaccaaaagaacgacgacgattaactctaattggggagttctcgaactccaaagtctggcaagacattcttaaaaatgcaggtgaaatttgctataatatgtttttcgcttttgttgagtggtggtgtcgcatgggactacacaaatgagcgcgattttcgacgcggtatctcaggccacaatcatgctcttgtcgcgtttatagatgtaggccattgaagttagatacatcttgggatatagttctaactccttacccttcgtgatagccctctccaaccgctatccactgccaggcgctggagccggaatggcaaatcgtcgctaactcacaaagctctctgctaactatcgactgttcatccgaaacagctctctgtgaagagttcgacataatctcataccccgcgatacgatatttcgacggccatggtcacacaaggtcttatcgaggaccgaggaaagcttcagctctaaaatcgtttctggcacgagctcatcgacccgtaattactactctcaactcagagaagatcacagcctttcagtccgtagacgagcgagttgtcatcggtcacttaaacccacaagacgaacatataattaccgcattcacgacagtcgcatcgcaataccgggacagagctacatttggatctatagaaaccgacaccgcgtcggtagccgaatgctacaataatgtggatgagcagaagttcacgtcgacggacttctctgccgttgacgagatctctaagttgatcgataactgccttgcgccactcattggagagttcaatcgagtgaatgagatgagttacttacaggccggaaagtcactagtttactattttgcgacgactcaagaagaacgagacgattatgtcaaaaagattcggccggtggcaaagatgtacaaagagtatctaaattttgtgacggtaaatgcattggagtatggagatctggctatgccacttggcttgacgcctagcgtctttcccgcgctcgccgttcagaacccgatgtttgggcaggtcttcccaatgccagcaagtactcaaattacttcagaatctgttggcgcgtttgttatggatatcgtacaagggaaagttcaaccctggaatggccagcgctcttcaggaaacgcccaagggcaagagcaggggcacgatgagctgtgacgaatgataatgggaagattcaatgatattccctacttatatatctagggagtggcataatctaagaactcataaacctctgggaatatgggctgttattatgattgtaagtggtgagctcttccaccagcgagcatatcccgctcatcagctgctccccatccttcgttcaatcgctcttacggtaaactcataaaaagctccaacagtttcggatagtttggtgttctgtttacaacacgttagcattgatgtatttcg

SEQ ID NO: 35931 - DNA, 2169 bp, Muscodor strobelii
  misc_feature: SGI cDNA ID NO. 572448
  misc_feature: Encodes the peptide sequence at SEQ ID NO 35932
atgaagttcaactctttgctcgtaatactaagcttgggagctcttgaagcgactgcaaatcctcttcatcgccattcaattcagagtatctaccacgagccatccaagcgacatataccacatactcatatcagtcatgagaagcgggatgctatacagaccagagcttgggtgaaagtcgagaaagcaaaacgtgatgctcggctccctgtgcgcgttgggcttaagcagccgaatctaagatcaggacatgatctgttgatagacatatccgatccgacatcagtcaattatgggaagcacctatcggctgagcaagttatcgacctctttgcaccattggaatcgaccgttgaaacagtcaaggaatggctgattgacgctggtgtggcggcgcatactatctcgcagtcgcgaaacaagcagtggatccaattcgatgcgccagtagagcaagtggaggatctattaatgacagattatcatgtatgggaacaccaggtgaccggagtcaaagacattggatgcgacgagtatcatgttccgaaacatattaagcaacatatcgactacattacgcccgggatcaagttgatgggaaactctatttcaccacattcaggttcttctgcaaagcgtagtgagaacaatagcaaattttcgcgtttctccctcccggttgactcggaggaattgagacctatgatgagcaagagaagtcgattgcaatcagcaacagtcgagccgccaacgggttcaaaattcaatggcccgctgcgcttcatggaccctattcgaccggaggatattaattcaggtaatctcagtttgagccaaggttgcgatgtctacgtaactccggattgcttgcgacagctatacagcataccgaagggaacgaaaaagagccctgataataagatgggaatcttccagagtcttgggcagcactatgcacaacaggatctggattactttttctacgcgttcacagacaacattccgaatggcacgcatccagaacttctctcggtcaatggcggtgtagggcctgcgaaaagcctgggcggagcaggctcggaagcgaatcttgactttcaaatggcatacggcttgatctggcctcaggaacccgcgttgttccaagttgacgatgagtggtaccaagagtcgcagcggactgagtcgacgtacgcaggcttcttcaataatctctggaacgctatcgacggtagctactgtacatttgaggcgtttggcgagtccgggaactgcaagcgacccgagtgtcgagaccccgagtatccaaatcagcacgatggcggatacaaaggggagctcaactgcggtgtctataagccgacaaatgtcatcagtatttcatatagcggcgccgaatccgaacttccagcttcgtaccagcaacggcagtgcgcagaaatcatgaagctagggcttcagggctcgacgataatgattgcatcaggcgacgatggcgttgcgggatttgctacgaatgtcaatccgaccgggtgtatgggcccgaatcacgatgtgttcaatccccaattccttgccacatgtccctacattctctctgtcggctcgacattccttcccacaaatatgacagcgggcaaagaccccgaagtcgcgacctcacggttccgctccggcggcgggttctccaatatttacgatacacctgactggcaaaaggacaatgtccaaaagtacttggccagtgcaaatatctcgttcgtgggctatgagggcggcggtacgaactactcgactgcgaagtccggtattggcagattcaacaagattgggcgagcgtatcccgacgtttcagccaatggcgatcgcttcgtcatcgcaagtggtggcgacctcctgcgtatcggcggtacatcagcgtctgctccgctttggggatctatcattacgttgatcaatgaagagaggcttgcggctggcaagaaaccagtcgggtttattcacccgacactatatgcccatcccgaagtgttcaatgatattacagtaggcgataaccgtggatgtcggactaatggattccctgctactgctggatgggatcctgtgacggggatgggaacaccaaactatccgaaactgttggagctttttatgagtttaccgtaa

SEQ ID NO: 35932 - protein, 722 aa, Muscodor strobelii
  misc_feature: SGI Peptide ID NO. 572448
  misc_feature (54)..(198): Pfam Id: PF09286 Pfam Desc: Pro-kumamolisin, activation domain
  misc_feature (40)..(722): NCBI GI: 159124483 Blast Desc: alkaline serine protease AorO, [Aspergillus fumigatus A1163]
  misc_feature (40)..(722): NCBI GI: 70992131 Blast Desc: alkaline serine protease AorO [Aspergillus fumigatus Af293] gi|74628146|sp|Q70DX9.1|SED1_ASPFU RecName: Full=Tripeptidyl-peptidase sed1; AltName: Full=Sedolisin-A; AorO,
  misc_feature (40)..(722): NCBI GI: 119471296 Blast Desc: protease S8 tripeptidyl peptidase I (cln2) [Neosartorya fischeri NRRL 181] gi|119406297|gb|EAW16248.1| protease S8 tripeptidyl peptidase I (cln2) [Neosartorya fischeri
  misc_feature (43)..(719): NCBI GI: 212545945 Blast Desc: alkaline serine protease AorO, [Penicillium marneffei ATCC 18224] gi|210064646|gb|EEA18741.1| alkaline serine protease AorO, [Penicillium marneffei ATCC 18224]
  misc_feature (43)..(721): NCBI GI: 169772733 Blast Desc: [Aspergillus oryzae RIB40] gi|83768696|dbj|BAE58833.1| protein product [Aspergillus oryzae]
  misc_feature (43)..(721): NCBI GI: 238490642 Blast Desc: alkaline serine protease AorO, [Aspergillus flavus NRRL3357] gi|220696971|gb|EED53312.1| alkaline serine protease AorO, [Aspergillus flavus NRRL3357]
  misc_feature (40)..(719): NCBI GI: 145243152 Blast Desc: An11g01110 [Aspergillus niger] gi|134078789|emb|CAK45848.1| protein product [Aspergillus niger]
  misc_feature (42)..(719): NCBI GI: 242824804 Blast Desc: alkaline serine protease AorO, [Talaromyces stipitatus ATCC 10500] gi|218713253|gb|EED12678.1| alkaline serine protease AorO, [Talaromyces stipitatus ATCC 10500]
  misc_feature (41)..(719): NCBI GI: 255946523 Blast Desc: Pc20g15570 [Penicillium chrysogenum Wisconsin 54-1255] gi|211588764|emb|CAP86886.1| Pc20g15570 [Penicillium chrysogenum Wisconsin 54-1255]
  misc_feature (35)..(722): NCBI GI: 255950094 Blast Desc: Pc22g19110 [Penicillium chrysogenum Wisconsin 54-1255] gi|211592831|emb|CAP99199.1| Pc22g19110 [Penicillium chrysogenum Wisconsin 54-1255]
  misc_feature (35)..(716): SWISSPROT Homolog: EC 3.4.14.9 Tripeptidyl-peptidase I
MKFNSLLVILSLGALEATANPLHRHSIQSIYHEPSKRHIPHTHISHEKRDAIQTRAWVKVEKAKRDARLPVRVGLKQPNLRSGHDLLIDISDPTSVNYGKHLSAEQVIDLFAPLESTVETVKEWLIDAGVAAHTISQSRNKQWIQFDAPVEQVEDLLMTDYHVWEHQVTGVKDIGCDEYHVPKHIKQHIDYITPGIKLMGNSISPHSGSSAKRSENNSKFSRFSLPVDSEELRPMMSKRSRLQSATVEPPTGSKFNGPLRFMDPIRPEDINSGNLSLSQGCDVYVTPDCLRQLYSIPKGTKKSPDNKMGIFQSLGQHYAQQDLDYFFYAFTDNIPNGTHPELLSVNGGVGPAKSLGGAGSEANLDFQMAYGLIWPQEPALFQVDDEWYQESQRTESTYAGFFNNLWNAIDGSYCTFEAFGESGNCKRPECRDPEYPNQHDGGYKGELNCGVYKPTNVISISYSGAESELPASYQQRQCAEIMKLGLQGSTIMIASGDDGVAGFATNVNPTGCMGPNHDVFNPQFLATCPYILSVGSTFLPTNMTAGKDPEVATSRFRSGGGFSNIYDTPDWQKDNVQKYLASANISFVGYEGGGTNYSTAKSGIGRFNKIGRAYPDVSANGDRFVIASGGDLLRIGGTSASAPLWGSIITLINEERLAAGKKPVGFIHPTLYAHPEVFNDITVGDNRGCRTNGFPATAGWDPVTGMGTPNYPKLLELFMSLP

SEQ ID NO: 35933 - DNA, 2163 bp, Muscodor strobelii
  misc_feature: SGI cDNA ID NO. 572449
  misc_feature: Encodes the peptide sequence at SEQ ID NO 35934
atgaagttcaactctttgctcgtaatactaagcttgggagctcttgaagcgactgcaaatcctcttcatcgccattcaattcagagtatctaccacgagccatccaagcgacatataccacatactcatatcagtcatgagaagcgggatgctatacagaccagagcttgggtgaaagtcgagaaagcaaaacgtgatgctcggctccctgtgcgcgttgggcttaagcagccgaatctaagatcaggacatgatctgttgatagacatatccgatccgacatcagtcaattatgggaagcacctatcggctgagcaagttatcgacctctttgcaccattggaatcgaccgttgaaacagtcaaggaatggctgattgacgctggtgtggcggcgcatactatctcgcagtcgcgaaacaagcagtggatccaattcgatgcgccagtagagcaagtggaggatctattaatgacagattatcatgtatgggaacaccaggtgaccggagtcaaagacattggatgcgacgagtatcatgttccgaaacatattaagcaacatatcgactacattacgcccgggatcaagttgatgggaaactctatttcaccacattcaggttcttctgcaaagcgtagtgagaacaatagcaaattttcgcgtttctccctcccggttgactcggaggaattgagacctatgatgagcaagagaagtcgattgcaatcagcaacagtcgagccgccaacgggttcaaaattcaatggcccgctgcgcttcatggaccctattcgaccggaggatattaattcaggtaatctcagtttgagccaaggttgcgatgtctacctaacagtggcacaagagctatacagcataccgaagggaacgaaaaagagccctgataataagatgggaatcttccagagtcttgggcagcactatgcacaacaggatctggattactttttctacgcgttcacagacaacattccgaatggcacgcatccagaacttctctcggtcaatggcggtgtagggcctgcgaaaagcctgggcggagcaggctcggaagcgaatcttgactttcaaatggcatacggcttgatctggcctcaggaacccgcgttgttccaagttgacgatgagtggtaccaagagtcgcagcggactgagtcgacgtacgcaggcttcttcaataatctctggaacgctatcgacggtagctactgtacatttgaggcgtttggcgagtccgggaactgcaagcgacccgagtgtcgagaccccgagtatccaaatcagcacgatggcggatacaaaggggagctcaactgcggtgtctataagccgacaaatgtcatcagtatttcatatagcggcgccgaatccgaacttccagcttcgtaccagcaacggcagtgcgcagaaatcatgaagctagggcttcagggctcgacgataatgattgcatcaggcgacgatggcgttgcgggatttgctacgaatgtcaatccgaccgggtgtatgggcccgaatcacgatgtgttcaatccccaattccttgccacatgtccctacattctctctgtcggctcgacattccttcccacaaatatgacagcgggcaaagaccccgaagtcgcgacctcacggttccgctccggcggcgggttctccaatatttacgatacacctgactggcaaaaggacaatgtccaaaagtacttggccagtgcaaatatctcgttcgtgggctatgagggcggcggtacgaactactcgactgcgaagtccggtattggcagattcaacaagattgggcgagcgtatcccgacgtttcagccaatggcgatcgcttcgtcatcgcaagtggtggcgacctcctgcgtatcggcggtacatcagcgtctgctccgctttggggatctatcattacgttgatcaatgaagagaggcttgcggctggcaagaaaccagtcgggtttattcacccgacactatatgcccatcccgaagtgttcaatgatattacagtaggcgataaccgtggatgtcggactaatggattccctgctactgctggatgggatcctgtgacggggatgggaacaccaaactatccgaaactgttggagctttttatgagtttaccgtaa

SEQ ID NO: 35934 - protein, 720 aa, Muscodor strobelii
  misc_feature: SGI Peptide ID NO. 572449
  misc_feature (54)..(198): Pfam Id: PF09286 Pfam Desc: Pro-kumamolisin, activation domain
  misc_feature (40)..(720): NCBI GI: 159124483 Blast Desc: alkaline serine protease AorO, [Aspergillus fumigatus A1163]
  misc_feature (40)..(720): NCBI GI: 70992131 Blast Desc: alkaline serine protease AorO [Aspergillus fumigatus Af293] gi|74628146|sp|Q70DX9.1|SED1_ASPFU RecName: Full=Tripeptidyl-peptidase sed1; AltName: Full=Sedolisin-A; AorO,
  misc_feature (40)..(720): NCBI GI: 119471296 Blast Desc: protease S8 tripeptidyl peptidase I (cln2) [Neosartorya fischeri NRRL 181] gi|119406297|gb|EAW16248.1| protease S8 tripeptidyl peptidase I (cln2) [Neosartorya fischeri
  misc_feature (43)..(717): NCBI GI: 212545945 Blast Desc: alkaline serine protease AorO, [Penicillium marneffei ATCC 18224] gi|210064646|gb|EEA18741.1| alkaline serine protease AorO, [Penicillium marneffei ATCC 18224]
  misc_feature (43)..(719): NCBI GI: 169772733 Blast Desc: [Aspergillus oryzae RIB40] gi|83768696|dbj|BAE58833.1| protein product [Aspergillus oryzae]
  misc_feature (43)..(719): NCBI GI: 238490642 Blast Desc: alkaline serine protease AorO, [Aspergillus flavus NRRL3357] gi|220696971|gb|EED53312.1| alkaline serine protease AorO, [Aspergillus flavus NRRL3357]
  misc_feature (40)..(717): NCBI GI: 145243152 Blast Desc: An11g01110 [Aspergillus niger] gi|134078789|emb|CAK45848.1| protein product [Aspergillus niger]
  misc_feature (42)..(717): NCBI GI: 242824804 Blast Desc: alkaline serine protease AorO, [Talaromyces stipitatus ATCC 10500] gi|218713253|gb|EED12678.1| alkaline serine protease AorO, [Talaromyces stipitatus ATCC 10500]
  misc_feature (41)..(717): NCBI GI: 255946523 Blast Desc: Pc20g15570 [Penicillium chrysogenum Wisconsin 54-1255] gi|211588764|emb|CAP86886.1| Pc20g15570 [Penicillium chrysogenum Wisconsin 54-1255]
  misc_feature (35)..(720): NCBI GI: 255950094 Blast Desc: Pc22g19110 [Penicillium chrysogenum Wisconsin 54-1255] gi|211592831|emb|CAP99199.1| Pc22g19110 [Penicillium chrysogenum Wisconsin 54-1255]
  misc_feature (35)..(714): SWISSPROT Homolog: EC 3.4.14.9 Tripeptidyl-peptidase I
MKFNSLLVILSLGALEATANPLHRHSIQSIYHEPSKRHIPHTHISHEKRDAIQTRAWVKVEKAKRDARLPVRVGLKQPNLRSGHDLLIDISDPTSVNYGKHLSAEQVIDLFAPLESTVETVKEWLIDAGVAAHTISQSRNKQWIQFDAPVEQVEDLLMTDYHVWEHQVTGVKDIGCDEYHVPKHIKQHIDYITPGIKLMGNSISPHSGSSAKRSENNSKFSRFSLPVDSEELRPMMSKRSRLQSATVEPPTGSKFNGPLRFMDPIRPEDINSGNLSLSQGCDVYLTVAQELYSIPKGTKKSPDNKMGIFQSLGQHYAQQDLDYFFYAFTDNIPNGTHPELLSVNGGVGPAKSLGGAGSEANLDFQMAYGLIWPQEPALFQVDDEWYQESQRTESTYAGFFNNLWNAIDGSYCTFEAFGESGNCKRPECRDPEYPNQHDGGYKGELNCGVYKPTNVISISYSGAESELPASYQQRQCAEIMKLGLQGSTIMIASGDDGVAGFATNVNPTGCMGPNHDVFNPQFLATCPYILSVGSTFLPTNMTAGKDPEVATSRFRSGGGFSNIYDTPDWQKDNVQKYLASANISFVGYEGGGTNYSTAKSGIGRFNKIGRAYPDVSANGDRFVIASGGDLLRIGGTSASAPLWGSIITLINEERLAAGKKPVGFIHPTLYAHPEVFNDITVGDNRGCRTNGFPATAGWDPVTGMGTPNYPKLLELFMSLP

SEQ ID NO: 35935 - DNA, 720 bp, Muscodor strobelii
  misc_feature: SGI cDNA ID NO. 572450
  misc_feature: Encodes the peptide sequence at SEQ ID NO 35936
atggcctaccctcccggtaatctaagggctcaacagcgatggccataccagactgttctcgaaagggttccgactggaccacataatttcattccgcatatgttacaacagggcgatataccaaatctagataactgggtatttggcgaattagagccaccgagtatggaaatgagacaccacgcgccgggagaaggagtagaacatcgcatggtgcccgtcttgaagctcatcgattatggccaggcaatcgaataccctgatcctgcgcctggtacctcggaaatcgacgagttcttgctgccggcggacattcacaactttgacgacgtcctagggctcgatgccttgcgagctgctgaacaaaatgcacctactttcgacccgagagcacgtaatgaagggatcgaagaaaatatcaggggtattggagaaacaatgttggaattttttgacgccgatagaaatcaattagccgccttcatcatctatctgcggggccttcccgcagatcagcggattcccgatctcgacttactgacgctggttgctcgttgcgtggcgcgagatcgaagaaatcgaccaaacctagcccatttgcttcacgttgtccagattgcggcggcaacgagaaatgccagtttctataatagggaccgagagacagacttatatatcgcaagcttggtgcaagctcttattctcgaacctgatatatga

SEQ ID NO: 35936 - protein, 239 aa, Muscodor strobelii
  misc_feature: SGI Peptide ID NO. 572450
MAYPPGNLRAQQRWPYQTVLERVPTGPHNFIPHMLQQGDIPNLDNWVFGELEPPSMEMRHHAPGEGVEHRMVPVLKLIDYGQAIEYPDPAPGTSEIDEFLLPADIHNFDDVLGLDALRAAEQNAPTFDPRARNEGIEENIRGIGETMLEFFDADRNQLAAFIIYLRGLPADQRIPDLDLLTLVARCVARDRRNRPNLAHLLHVVQIAAATRNASFYNRDRETDLYIASLVQALILEPDI

SEQ ID NO: 35937 - DNA, 1167 bp, Muscodor strobelii
  misc_feature: SGI cDNA ID NO. 572451
  misc_feature: Elevated expression when VOC is produced
  misc_feature: Encodes the peptide sequence at SEQ ID NO 35938
atgtctgacatcgaagatgagatggaggtggatgccccgtccaacgacatcatcttttcttccgagagcgcaaagggaaagcgaagcgccgccaacctgcctgtcgaggcagaggattctttaccatgggtcgagaagtaccggcctgtaacactttcggacgtctcaggccaccaggatattctggccaccatcaacaaattcgtcgactccaaccgattaccacatcttctcctctacggcccacccggcaccggcaagacctcgaccatacttgctcttgcccgccgcatatacggacaagagaatatgcgacagatggttctcgagctcaatgcctccgatgaccgtggcatcgacgttgtccgcgaacaaatccagactttcgcctccaccaagcagatcttcaccatgaacaacacatccaaatccggtgtcgctggtttcaagctgatcattttggacgaggctgatgccatgacaaacacggctcagatggcattgcgcaggatcatggagaagtacacagccaacacaagattctgcgtcattgccaactacacacacaagctctccccagcactgctgtccagatgtacacggttccgcttcagtcctctcaaagaaggcgatatccgcacaatagtagacaaggtcattgccgaagaaaacatcaagatcaatgctgaggccacagactctcttgtcacactaagcaaaggcgatatgcggcgagcgctgaacgtacttcaggcctgtcatgcgtccagcaccccgatgcaaccgaaagacgcacccaagatccccgagaaggatattgttcgcgagaccatcacgatggaaactatttacaactgcatagcagctccccctcctgctgctatcgcaaagatcgtcaagactctcatggaaacgagcgatgtgacatcatgcttatcgacaatcaacacactcaaagtcgcaaatggtcttgcgcttgccgacatcatcacggcgttgtcggagcagttgtcaagttttcaagcaaagcccgaagttatgataagatggttggatggactggcagagatcgagtatcgtgtttcgggtggagccaacgagacgatacagactggcgctgttgttggtgtggtgagagagggttgtgagctcgcgggcacaaaataa

SEQ ID NO: 35938 - protein, 388 aa, Muscodor strobelii
  misc_feature: SGI Peptide ID NO. 572451
  misc_feature (76)..(256): Pfam Id: PF00004 Pfam Desc: ATPase family associated with various cellular activities (AAA)
  misc_feature (288)..(378): Pfam Id: PF08542 Pfam Desc: Replication factor C
  misc_feature (76)..(98): Pfam Id: PF00004 Pfam Desc: ATPase family associated with various cellular activities (AAA)
  misc_feature (1)..(386): NCBI GI: 116205575 Blast Desc: conserved [Chaetomium globosum CBS 148.51] gi|88176799|gb|EAQ84267.1| conserved [Chaetomium globosum CBS 148.51]
  misc_feature (1)..(386): NCBI GI: 171677049 Blast Desc: protein product [Podospora anserina] gi|170936592|emb|CAP61251.1| protein product [Podospora anserina]
  misc_feature (1)..(384): NCBI GI: 46123299 Blast Desc: FG06027.1 [Gibberella zeae PH-1]
  misc_feature (1)..(384): NCBI GI: 256732999 Blast Desc: [Nectria haematococca mpVI 77-13-4]
  misc_feature (1)..(386): NCBI GI: 85110311 Blast Desc: activator 1 subunit 3 [Neurospora crassa OR74A] gi|28881264|emb|CAD70523.1| related to replication factor C chain Rfc3 [Neurospora crassa] gi|28925076|gb|EAA34161.1| activator 1 3
  misc_feature (1)..(387): NCBI GI: 261357167 Blast Desc: replication factor C subunit 3 [Verticillium albo-atrum VaMs.102]
  misc_feature (1)..(384): NCBI GI: 156062848 Blast Desc: SS1G_01540 [Sclerotinia sclerotiorum 1980] gi|154696876|gb|EDN96614.1| SS1G_01540 [Sclerotinia sclerotiorum 1980]
  misc_feature (1)..(384): NCBI GI: 154313201 Blast Desc: BC1G_05602 [Botryotinia fuckeliana B05.10] gi|150849687|gb|EDN24880.1| BC1G_05602 [Botryotinia fuckeliana B05.10]
  misc_feature (1)..(384): NCBI GI: 189189278 Blast Desc: replication factor C subunit 3 [Pyrenophora tritici-repentis Pt-1C-BFP] gi|187972584|gb|EDU40083.1| replication factor C subunit 3 [Pyrenophora tritici-repentis
  misc_feature (1)..(386): NCBI GI: 67902154 Blast Desc: AN8064.2 [Aspergillus nidulans FGSC A4] gi|40740496|gb|EAA59686.1| AN8064.2 [Aspergillus nidulans FGSC A4] gi|259480821|tpe|CBF73811.1| TPA: subunit of heteropentameric
  misc_feature (45)..(250): SWISSPROT Homolog: EC 2.7.7.7 DNA-directed DNA polymerase
  misc_feature: Useful for introducing or modulating the production of volatile compounds
MSDIEDEMEVDAPSNDIIFSSESAKGKRSAANLPVEAEDSLPWVEKYRPVTLSDVSGHQDILATINKFVDSNRLPHLLLYGPPGTGKTSTILALARRIYGQENMRQMVLELNASDDRGIDVVREQIQTFASTKQIFTMNNTSKSGVAGFKLIILDEADAMTNTAQMALRRIMEKYTANTRFCVIANYTHKLSPALLSRCTRFRFSPLKEGDIRTIVDKVIAEENIKINAEATDSLVTLSKGDMRRALNVLQACHASSTPMQPKDAPKIPEKDIVRETITMETIYNCIAAPPPAAIAKIVKTLMETSDVTSCLSTINTLKVANGLALADIITALSEQLSSFQAKPEVMIRWLDGLAEIEYRVSGGANETIQTGAVVGVVREGCELAGTK

SEQ ID NO: 35939 - DNA, 1620 bp, Muscodor strobelii
  misc_feature: SGI EST ID NO. CUFF.85466.0
  misc_feature: Variant of the nucleotide sequence at SEQ ID NO 35937
gcagaggcaggtctagtgcgactgctgattgcttgtacctgcaatatccgataccgatacatttcacatctcacaactcatatcacattgcgatcttgagtcacactgctaatttttttgcgcgccattggcatctacgactctctaccgccaacatgtctgacatcgaagatgagatggaggtggatgccccgtccaacgacatcatcttttcttccgagagcgcaaagggaaagcgaagcgccgccaacctgcctgtcgaggcagaggattctttaccatgggtcgagaagtaccggcctgtaacactttcggacgtctcaggccaccaggatattctggccaccatcaacaaattcgtcgactccaaccgattaccacatcttctcctctacggcccacccggcaccggcaagacctcgaccatacttgctcttgcccgccgcatatacggacaagagaatatgcgacagatggttctcgagctcaatgcctccgatgaccgtggcatcgacgttgtccgcgaacaaatccagactttcgcctccaccaagcagatcttcaccatgaacaacacatccaaatccggtgtcgctggtttcaagctgatcattttggacgaggctgatgccatgacaaacacggctcagatggcattgcgcaggatcatggagaagtacacagccaacacaagattctgcgtcattgccaactacacacacaagctctccccagcactgctgtccagatgtacacggttccgcttcagtcctctcaaagaaggcgatatccgcacaatagtagacaaggtcattgccgaagaaaacatcaagatcaatgctgaggccacagactctcttgtcacactaagcaaaggcgatatgcggcgagcgctgaacgtacttcaggcctgtcatgcgtccagcaccccgatgcaaccgaaagacgcacccaagatccccgagaaggatattgttcgcgagaccatcacgatggaaactatttacaactgcatagcagctccccctcctgctgctatcgcaaagatcgtcaagactctcatggaaacgagcgatgtgacatcatgcttatcgacaatcaacacactcaaagtcgcaaatggtcttgcgcttgccgacatcatcacggcgttgtcggagcagttgtcaagttttcaagcaaagcccgaagttatgataagatggttggatggactggcagagatcgagtatcgtgtttcgggtggagccaacgagacgatacagactggcgctgttgttggtgtggtgagagagggttgtgagctcgcgggcacaaaataatgattcacgtgaaatgataccaaatgagatgcgtaaatgcgcaggatacggctcaactcagcgcatggtgaagatggattgagcgagaagagcatggcttgttgtgaggtgctaggctgatgttcctgaagtcgcgacttccccgtttctggaagacaactacataggagagcttgcatggcatgcgcaaaatctcatgtcgttgttgagatgtatgaaaacagcaatgtgatatatatcataacatattacggccaagtcatcatggactgagtcggaaaaaaattcttgttgtttc

SEQ ID NO: 35940 - DNA, 1839 bp, Muscodor strobelii
  misc_feature: SGI cDNA ID NO. 572452
  misc_feature: Encodes the peptide sequence at SEQ ID NO 35941
atgttgacctgtcttctgacggcgagtttactcgccagcacggccatggccaatggcctgcatcgcagaaatgaaacggggataccggtgtatctagacgcagacaggtgcatagatgaacgagtggaggatctcctctctagaatgacgcttgagcaaaaagccggtcagatgtaccacgcccgcacaagtctcgtcaacgatacattcgacggtagtatcaagtcatacgttgctgacaagcacataacacattacgtcttcagtggtggtgtaaatgacgcccgtgttgtggctgagtggcagaatgagctccagcagttcgcccttgataacggtgggattcccattactctctcgtcggatcctcagcacggctggacagatgacaccgcggttggaaatgttgcagcagcgttctcgcgatggccagagactatgggtattgcggcgctccgttcacctgaactagcccgtcaatttgctgagatcgcgagagaggaatacgttgctgtcggtcttcgacaggctctccatcctcaagttgatctctcaacagaaccacgatggggtcgaatcggcggtaccatgggtgaagatgctaacctgacgtcctcacttctcgtcgaatacatcaagggttttcaggggcacgaaattggccctcgctcggtcattgccactaccaagcactttcccggtggaggaccgatggaaaacggggaagattctcattttccctggggcaagaatgagacatacccaggcaaaaacatggaataccatctagcaccattcagggctgccatcgtagctggtactaggcaaataatgccatactactctcgtcccatcggcacccagtacgaggaagttggattctccttcgattatggcatcgtcaccgaactactcaaagaagagctcggatttgagggcattgtcgtgactgactggggtatcgttactgataggggctggggtctcgaagacaagactcagctcgatcgtactcggctcatcgtcgaagcgggatgcgacattctcggcggtgagactaatcctgaactcatggtcgagctggtcaagataggcctcgttcctgaagctaggatcgatagttccgtgcgtaagctcatgagggagaaatttgagcttggtctttttgacaaccctttcgtcaatgttgctacagccgagcgcgttgtcggcaatgaatatttcagtcgcgttggtaacgaaacacagcgccgtgctttcactctgctgactaacaacgatgattttcttccactgccggcttctgcccgaaacgccaacttctacgtcgagggcatcagcgtggccgccatgcaagcttacgatctccaggttgttgctacccctgagcaggcggactatgcccttctccgccttaactctcccgccaagtatgttcctcccggatccggcctagcaagtagcatcaacaacggctctctcgaatacaatgcgacggagaagacgcaccatgcgagcatttatacaaagattccgaccgttgttgacatcaaaatgaatcggccaccggctgttcctgagatcgccgaaggtgctgcggcattatttggcagctatggaagcagccatgaggctttcttggatgtcatatttggaacaaatggatggggtcccgagggcaagcttccttttgagatccctcgctcgcaggctgcggctgagaagcaactagaggatgttccttttgactcggaggatgcgcttttcaagttcggacacggactaaggtataaagacaaatgttctggaggggggaagaggagaacgcgtcgtggttag

SEQ ID NO: 35941 - protein, 612 aa, Muscodor strobelii
  misc_feature: SGI Peptide ID NO. 572452
  misc_feature (110)..(351): Pfam Id: PF00933 Pfam Desc: Glycosyl hydrolase family 3 N terminal domain
  misc_feature (420)..(599): Pfam Id: PF01915 Pfam Desc: Glycosyl hydrolase family 3 C terminal domain
  misc_feature (147)..(234): Pfam Id: PF00933 Pfam Desc: Glycosyl hydrolase family 3 N terminal domain
  misc_feature (300)..(322): Pfam Id: PF00933 Pfam Desc: Glycosyl hydrolase family 3 N terminal domain
  misc_feature (31)..(611): NCBI GI: 261359133 Blast Desc: periplasmic beta-glucosidase/beta-xylosidase [Verticillium albo-atrum VaMs.102]
  misc_feature (23)..(605): NCBI GI: 256720846 Blast Desc: glycoside hydrolase family 3 [Nectria haematococca mpVI 77-13-4]
  misc_feature (13)..(601): NCBI GI: 46134039 Blast Desc: FG09159.1 [Gibberella zeae PH-1]
  misc_feature (18)..(607): NCBI GI: 238497181 Blast Desc: conserved [Aspergillus flavus NRRL3357] gi|220694706|gb|EED51050.1| conserved [Aspergillus flavus NRRL3357]
  misc_feature (20)..(607): NCBI GI: 169774303 Blast Desc: [Aspergillus oryzae RIB40] gi|83769482|dbj|BAE59617.1| protein product [Aspergillus oryzae]
  misc_feature (11)..(597): NCBI GI: 39966399 Blast Desc: MGG_10038 [Magnaporthe grisea 70-15] gi|145015330|gb|EDJ99866.1| MGG_10038 [Magnaporthe grisea 70-15]
  misc_feature (2)..(600): NCBI GI: 67522695 Blast Desc: AN1804.2 [Aspergillus nidulans FGSC A4] gi|40745813|gb|EAA64969.1| AN1804.2 [Aspergillus nidulans FGSC A4] gi|259487150|tpe|CBF85593.1| TPA: beta-1,4-glucosidase FGSC
  misc_feature (5)..(597): NCBI GI: 169595502 Blast Desc: SNOG_00490 [Phaeosphaeria nodorum SN15] gi|160701107|gb|EAT91985.2| SNOG_00490 [Phaeosphaeria nodorum SN15]
  misc_feature (31)..(612): NCBI GI: 261359879 Blast Desc: periplasmic beta-glucosidase/beta-xylosidase [Verticillium albo-atrum VaMs.102]
  misc_feature (6)..(598): NCBI GI: 189208602 Blast Desc: periplasmic beta-glucosidase precursor [Pyrenophora tritici-repentis Pt-1C-BFP] gi|187976727|gb|EDU43353.1| periplasmic beta-glucosidase precursor [Pyrenophora Pt-1C-BFP]
  misc_feature (40)..(595): SWISSPROT Homolog: EC 3.2.1.21 Beta-glucosidase
  misc_feature (40)..(595): SWISSPROT Homolog: EC 3.2.1.37 Xylan 1,4-beta-xylosidase
MLTCLLTASLLASTAMANGLHRRNETGIPVYLDADRCIDERVEDLLSRMTLEQKAGQMYHARTSLVNDTFDGSIKSYVADKHITHYVFSGGVNDARVVAEWQNELQQFALDNGGIPITLSSDPQHGWTDDTAVGNVAAAFSRWPETMGIAALRSPELARQFAEIAREEYVAVGLRQALHPQVDLSTEPRWGRIGGTMGEDANLTSSLLVEYIKGFQGHEIGPRSVIATTKHFPGGGPMENGEDSHFPWGKNETYPGKNMEYHLAPFRAAIVAGTRQIMPYYSRPIGTQYEEVGFSFDYGIVTELLKEELGFEGIVVTDWGIVTDRGWGLEDKTQLDRTRLIVEAGCDILGGETNPELMVELVKIGLVPEARIDSSVRKLMREKFELGLFDNPFVNVATAERVVGNEYFSRVGNETQRRAFTLLTNNDDFLPLPASARNANFYVEGISVAAMQAYDLQVVATPEQADYALLRLNSPAKYVPPGSGLASSINNGSLEYNATEKTHHASIYTKIPTVVDIKMNRPPAVPEIAEGAAALFGSYGSSHEAFLDVIFGTNGWGPEGKLPFEIPRSQAAAEKQLEDVPFDSEDALFKFGHGLRYKDKCSGGGKRRTRRG

SEQ ID NO: 35942 - DNA, 783 bp, Muscodor strobelii
  misc_feature: SGI cDNA ID NO. 572453
  misc_feature: Elevated expression when VOC is produced
  misc_feature: Encodes the peptide sequence at SEQ ID NO 35943
atgggtaatgaggcttcagtcccgcgacccggcaccaagttgcaagttatcggagccggactgccacgcactggaacggcttcatttagcgaggcgcttcgcatcctcctcgaaggcccggtctaccacggaggaacgcaggttacgctaggaaaaccggcagagatacgatcctggattgaactgctctcacactggccaccatctaatgcgtcggataagaagctcgtatccaatatcctcctcgacagactagacgggtatgcagcagtcacagattcgccctcatgcggtttagtagaagaacttgtcaaactctacccggacgcgaaggtaatttgtacagtgcgcgacccggatagctgggtgaagtcgatgggtggtgtggccgatgcatctaccaagtggttcttgcgcatagtgcttctccccttgcccggcatgcgacattttgttgattacatcaacggcctgcgcaatcaatgggtgtatctttacggcgaggcagagcctccgacaaggaagacgtacgatcggcaaatcgagtggctacgggaaattgtgcccgaggaccgtctggtcttctttaatgttaaggagggatgggagcccctttgtaaagccctcgggaaggaagtacctaaggatgtgccattcccgatgatgaatgacggcgaagctattgataagttctctaagatgatggtgctgcgcgggatgcagaggtgggcagtaggacttggtgcattaggacttgcatttactctatttcgctttacgtag

SEQ ID NO: 35943 - protein, 260 aa, Muscodor strobelii
  misc_feature: SGI Peptide ID NO. 572453
  misc_feature (1)..(251): NCBI GI: 256728385 Blast Desc: NECHADRAFT_54291 [Nectria haematococca mpVI 77-13-4]
  misc_feature (1)..(253): NCBI GI: 145234771 Blast Desc: An03g01320 [Aspergillus niger] gi|134057707|emb|CAK38105.1| protein product [Aspergillus niger]
  misc_feature (1)..(257): NCBI GI: 145246676 Blast Desc: An12g05170 [Aspergillus niger] gi|134080308|emb|CAK46230.1| protein product [Aspergillus niger]
  misc_feature (1)..(252): NCBI GI: 238497233 Blast Desc: NAD dependent epimerase/dehydratase, [Aspergillus flavus NRRL3357] gi|220694732|gb|EED51076.1| NAD dependent epimerase/dehydratase, [Aspergillus flavus NRRL3357]
  misc_feature (1)..(252): NCBI GI: 169774259 Blast Desc: [Aspergillus oryzae RIB40] gi|83769460|dbj|BAE59595.1| protein product [Aspergillus oryzae]
  misc_feature (1)..(253): NCBI GI: 169620261 Blast Desc: SNOG_13333 [Phaeosphaeria nodorum SN15] gi|111058097|gb|EAT79217.1| SNOG_13333 [Phaeosphaeria nodorum SN15]
  misc_feature (1)..(257): NCBI GI: 169772381 Blast Desc: [Aspergillus oryzae RIB40] gi|83768520|dbj|BAE58657.1| protein product [Aspergillus oryzae]
  misc_feature (1)..(257): NCBI GI: 238490282 Blast Desc: NAD dependent epimerase/dehydratase, [Aspergillus flavus NRRL3357] gi|220696791|gb|EED53132.1| NAD dependent epimerase/dehydratase, [Aspergillus flavus NRRL3357]
  misc_feature (1)..(242): NCBI GI: 145247056 Blast Desc: An12g07240 [Aspergillus niger] gi|134080504|emb|CAK46352.1| protein product [Aspergillus niger]
  misc_feature (1)..(259): NCBI GI: 255941500 Blast Desc: Pc16g12200 [Penicillium chrysogenum Wisconsin 54-1255] gi|211586142|emb|CAP93890.1| Pc16g12200 [Penicillium chrysogenum Wisconsin 54-1255]
  misc_feature: Useful for introducing or modulating the production of volatile compounds
MGNEASVPRPGTKLQVIGAGLPRTGTASFSEALRILLEGPVYHGGTQVTLGKPAEIRSWIELLSHWPPSNASDKKLVSNILLDRLDGYAAVTDSPSCGLVEELVKLYPDAKVICTVRDPDSWVKSMGGVADASTKWFLRIVLLPLPGMRHFVDYINGLRNQWVYLYGEAEPPTRKTYDRQIEWLREIVPEDRLVFFNVKEGWEPLCKALGKEVPKDVPFPMMNDGEAIDKFSKMMVLRGMQRWAVGLGALGLAFTLFRFT

SEQ ID NO: 35944 - DNA, 1189 bp, Muscodor strobelii
  misc_feature: SGI EST ID NO. CUFF.85490.0
  misc_feature: Variant of the nucleotide sequence at SEQ ID NO 35942
gatttttcgtaattccgggcacgcgatgtgatttagtcagaagttaacacaaacatgggtaatgaggcttcagtcccgcgacccggcaccaagttgcaagttatcggagccggactgccacgcactggaacggcttcatttagcgaggcgcttcgcatcctcctcgaaggcccggtctaccacggaggaacgcaggttacgctaggaaaaccggcagagatacgatcctggattgaactgctctcacactggccaccatctaatgcgtcggataagaagctcgtatccaatatcctcctcgacagactagacgggtatgcagcagtcacagattcgccctcatgcggtttagtagaagaacttgtcaaactctacccggacgcgaaggtaatttgtacagtgcgcgacccggatagctgggtgaagtcgatgggtggtgtggccgatgcatctaccaagtggttcttgcgcatagtgcttctccccttgcccggcatgcgacattttgttgattacatcaacggcctgcgcaatcaatgggtgtatctttacggcgaggcagagcctccgacaaggaagacgtacgatcggcaaatcgagtggctacgggaaattgtgcccgaggaccgtctggtcttctttaatgttaaggagggatgggagcccctttgtaaagccctcgggaaggaagtacctaaggatgtgccattcccgatgatgaatgacggcgaagctattgataagttctctaagatgatggtgctgcgcgggatgcagaggtgggcagtaggacttggtgcattaggacttgcatttactctatttcgctttacgtagggcttgccttgttaagtggcgaataactcttgggaacgcgtcaataattttaatgcaagaaacattcttttcctgctttgcgctgatacataggctctggaaagcatgcgacattgatcttctggcctaaccacgacgcgttctcctcttcccccctccagaacatttgtctttataccttagtccgtgtccgaacttgaaaagcgcatcctccgagtcaaaaggaacatcctctagttgcttctcagccgcagcctgcgagcgagggatctcaaaaggaagcttgccctcgggaccccatccatttgttccaaatatgacatccaagaaagcctcatggctgcttccatag

SEQ ID NO: 35945 - DNA, 654 bp, Muscodor strobelii
  misc_feature: SGI cDNA ID NO. 572454
  misc_feature: Encodes the peptide sequence at SEQ ID NO 35946
atgggcgttgagttcccatcagtacaggccgatggcttcagtgttcaggctgtagctttcaacggtaccagaggatatgaagtcgggtgcaactggatgacgcttcctaatgacctccatctcgaaactggaacgatagacacatggaatacaagggaggggaacaccgaccgcatccgcagagagatctacttcagccagagcttcaagtcgccacctaaagtctgtgtctggcttcagttgttcgagtggacgggtgataacttcatgtccatcaaatgctcggcccaggatatcactaacaactgttttgtgttccaagtggaatcatgggcggggagacgtttcggtaacgttcgtgtgcagtatctggcgtacccatcagaggaagacgggaagcgtgtcaagagcggtaccacgggagtcaaccgtggccaggggcgcgttgagcagcattgcccattctatggcgagccgttcaagaccgatcctgcggctttcattgcgatatgcgaaacagacttcaatagaagtcgcaatacgagattccgcaccacggcagtggcggacaggaacacactcaaatgggactgcggtacctggtccgacactgatatggaccatgcagttgtccagtggatcgctttagaataa

SEQ ID NO: 35946 - protein, 217 aa, Muscodor strobelii
  misc_feature: SGI Peptide ID NO. 572454
  misc_feature (56)..(128): Pfam Id: PF09458 Pfam Desc: H-type lectin domain
  misc_feature (1)..(217): NCBI GI: 46102632 Blast Desc: FG00020.1 [Gibberella zeae PH-1]
  misc_feature (40)..(206): NCBI GI: 256724226 Blast Desc: NECHADRAFT_53546 [Nectria haematococca mpVI 77-13-4]
  misc_feature (1)..(181): NCBI GI: 46127649 Blast Desc: FG08202.1 [Gibberella zeae PH-1]
  misc_feature (13)..(216): NCBI GI: 261361037 Blast Desc: metalloprotease [Verticillium albo-atrum VaMs.102]
  misc_feature (26)..(199): NCBI GI: 46133915 Blast Desc: FG09097.1 [Gibberella zeae PH-1]
  misc_feature (13)..(217): NCBI GI: 169864398 Blast Desc: CC1G_08972 [Coprinopsis cinerea okayama7#130] gi|116500140|gb|EAU83035.1| CC1G_08972 [Coprinopsis cinerea okayama7#130]
  misc_feature (8)..(140): NCBI GI: 154320556 Blast Desc: BC1G_01750 [Botryotinia fuckeliana B05.10] gi|150853439|gb|EDN28631.1| BC1G_01750 [Botryotinia fuckeliana B05.10]
  misc_feature (7)..(204): NCBI GI: 242220394 Blast Desc: [Postia placenta Mad-698-R] gi|220724831|gb|EED78849.1| [Postia placenta Mad-698-R]
  misc_feature (26)..(215): NCBI GI: 238502155 Blast Desc: conserved [Aspergillus flavus NRRL3357] gi|220691121|gb|EED47469.1| conserved [Aspergillus flavus NRRL3357]
  misc_feature (8)..(216): NCBI GI: 261354634 Blast Desc: metalloprotease [Verticillium albo-atrum VaMs.102]
MGVEFPSVQADGFSVQAVAFNGTRGYEVGCNWMTLPNDLHLETGTIDTWNTREGNTDRIRREIYFSQSFKSPPKVCVWLQLFEWTGDNFMSIKCSAQDITNNCFVFQVESWAGRRFGNVRVQYLAYPSEEDGKRVKSGTTGVNRGQGRVEQHCPFYGEPFKTDPAAFIAICETDFNRSRNTRFRTTAVADRNTLKWDCGTWSDTDMDHAVVQWIALE

SEQ ID NO: 35947 - DNA, 911 bp, Muscodor strobelii
  misc_feature: SGI EST ID NO. CUFF.85492.0
  misc_feature: Variant of the nucleotide sequence at SEQ ID NO 35945
gccgagccgcccaagcttctctttggcctgagctgtatggacgccgaggccaacaggaaccgttgtatgggcgttgagttcccatcagtacaggccgatggcttcagtgttcaggctgtagctttcaacggtaccagaggatatgaagtcgggtgcaactggatgacgcttcctaatgacctccatctcgaaactggaacgatagacacatggaatacaagggaggggaacaccgaccgcatccgcagagagatctacttcagccagagcttcaagtcgccacctaaagtctgtgtctggcttcagttgttcgagtggacgggtgataacttcatgtccatcaaatgctcggcccaggatatcactaacaactgttttgtgttccaagtggaatcatgggcggggagacgtttcggtaacgttcgtgtgcagtatctggcgtacccatcagaggaagacgggaagcgtgtcaagagcggtaccacgggagtcaaccgtggccaggggcgcgttgagcagcattgcccattctatggcgagccgttcaagaccgatcctgcggctttcattgcgatatgcgaaacagacttcaatagaagtcgcaatacgagattccgcaccacggcagtggcggacaggaacacactcaaatgggactgcggtacctggtccgacactgatatggaccatgcagttgtccagtggatcgctttagaataagtcaatttgcccgggttatcatgtatttacctacttgtatcgtacttaagatctgtatcctgcatcttcatccgaactcttctttttgagaattccaaaatgcttcgattgctctcgtttgttctcggatgctgatcgtgatacctgcagaccgtattggtctcaagctaacctacatcggaatagctaaa

SEQ ID NO: 35948 - DNA, 1110 bp, Muscodor strobelii
  misc_feature: SGI cDNA ID NO. 572455
  misc_feature: Encodes the peptide sequence at SEQ ID NO 35949
atggagataactacaattgctgaaaatgagatttctcagcaggcaaaacagggaatgcccctcattctaccctggggtcgccaacccattcgcctcggtactacataccactcgaagttgcagggcactatgaacccgtggtctgacgaaacaccctttgtactctctgatttacacattataccaaaagagttacatgctgaatacgggactaccacgaccttcaagaaggtgaaaacagctagagaaagtgaaactggtgatcacttatctctgggattcggaattggtgttggattaccattcttagcttccgttagcgtgaagggcacattcgatcaacacatacaggaaaacaaagactcagacaagatatcattgaacgcaacttgtcgggcgggaacgattgaattccagagacaaccacggttgactaaggaagcaattatagagattaagtacggcggggggtatgaaggactttgcgaaagatacggtgactactatgtttctggataccgtctcggtggcgatacggggatcttgatgagtgcttcaggacattcacgagaacagatcgataagtatggaattaccgctacggtcgaggtcctctttgtcgaggtcagcaagcactgggaaaaagacttcaggacctttagcgccggccgtcaagtaaaattacttggctacgatacgctcgacgcaaagacgtggaacagatttcgcgctgctggggatgacgtgaaagagatgatggattgggctgcgaaatcacccttgagaaatgattcacgtgtcgtgaagactgatattaagagtcagcttcaaaaggcaatggatgaagagaaagaaattgatatgcttcgtggagacacaggcgaagacacacttgatgccaacacaaccgccattatgacgcgatcggaaagcttgctggagcggatttacgaggttcttgataagcatgggtataagaatggggagagtctcacatttgttcaatgtgaggaattactagcggaaggcatagtgattgaacttctgcttgagccgatgaggaggttgcgcgatgtcatacaatggcgcgcagaaaagaacattatatag

SEQ ID NO: 35949 - protein, 369 aa, Muscodor strobelii
  misc_feature: SGI Peptide ID NO. 572455
  misc_feature (9)..(369): NCBI GI: 46102634 Blast Desc: FG00021.1 [Gibberella zeae PH-1]
  misc_feature (11)..(362): NCBI GI: 121713550 Blast Desc: ACLA_013970 [Aspergillus clavatus NRRL 1] gi|119402539|gb|EAW12960.1| ACLA_013970 [Aspergillus clavatus NRRL 1]
  misc_feature (11)..(361): NCBI GI: 46127649 Blast Desc: FG08202.1 [Gibberella zeae PH-1]
  misc_feature (68)..(281): NCBI GI: 169766198 Blast Desc: [Aspergillus oryzae RIB40] gi|83765425|dbj|BAE55568.1| protein product [Aspergillus oryzae]
MEITTIAENEISQQAKQGMPLILPWGRQPIRLGTTYHSKLQGTMNPWSDETPFVLSDLHIIPKELHAEYGTTTTFKKVKTARESETGDHLSLGFGIGVGLPFLASVSVKGTFDQHIQENKDSDKISLNATCRAGTIEFQRQPRLTKEAIIEIKYGGGYEGLCERYGDYYVSGYRLGGDTGILMSASGHSREQIDKYGITATVEVLFVEVSKHWEKDFRTFSAGRQVKLLGYDTLDAKTWNRFRAAGDDVKEMMDWAAKSPLRNDSRVVKTDIKSQLQKAMDEEKEIDMLRGDTGEDTLDANTTAIMTRSESLLERIYEVLDKHGYKNGESLTFVQCEELLAEGIVIELLLEPMRRLRDVIQWRAEKNII

SEQ ID NO: 35950 - DNA, 498 bp, Muscodor strobelii
  misc_feature: SGI cDNA ID NO. 572456
  misc_feature: Encodes the peptide sequence at SEQ ID NO 35951
atgcctcctaccgtatccccagaagctgagcagaaagctcgcaaagtcaatgggtatcgccgacaccttgagacgcattttagcatctttgttcccgatgatcacagagaaggtcatggtgtcattgaggacttgaccgctggttaccgttggttcgacaatggaaacaaaccttcagaagaaattagtctcctcgtcccatacttcaacgcgggcaaagatcgcgctaaggcatttaaaatggccgaggccgctctgtcgaatttcaatcaaaagaccacggccattaaagtggattcacttgccctctcggccactcagggcaggccgcagaggcaaatcaaccctctcgtctggttctacaattatctactatcgcctagttttgctcaaaagtacgggagtgagaagggaaaggccttggcagtggacctgaaagagacactcgacggcatgcgccaggcattgacagatctgaagacgctattaagttcttga

SEQ ID NO: 35951 - protein, 165 aa, Muscodor strobelii
  misc_feature: SGI Peptide ID NO. 572456
MPPTVSPEAEQKARKVNGYRRHLETHFSIFVPDDHREGHGVIEDLTAGYRWFDNGNKPSEEISLLVPYFNAGKDRAKAFKMAEAALSNFNQKTTAIKVDSLALSATQGRPQRQINPLVWFYNYLLSPSFAQKYGSEKGKALAVDLKETLDGMRQALTDLKTLLSS

SEQ ID NO: 35952 - DNA, 430 bp, Muscodor strobelii
  misc_feature: SGI EST ID NO. CUFF.85528.0
  misc_feature: Variant of the nucleotide sequence at SEQ ID NO 35950
gctcaataataaatcattcttgcttatacagagacgattaaaaacaattcatacttgaatcattctcgcacggtatgcctcctaccgtatccccagaagctgagcagaaagctcgcaaagtcaatgggtatcgccgacaccttgagacgcattttagcatctttgttcccgatgatcacagagaaggtcatggtgtcattgaggacttgaccgctggttaccgttggttcgacaatggaaacaaaccttcagaagaaattagtctcctcgtcccatacttcaacgcgggcaaagatcgcgctaaggcatttaaaatggccgaggccgctctgtcgaatttcaatcaaaagaccacggccattaaagtggattcacttgccctctcggccactcagggcaggccgcagaggcaaatcaaccctctcgtctg

SEQ ID NO: 35953 - DNA, 2031 bp, Muscodor strobelii
  misc_feature: SGI cDNA ID NO. 572457
  misc_feature: Encodes the peptide sequence at SEQ ID NO 35954
atggcttatggaattccaaccttatcttcgcagcatggtatcggaacatcgttttttaagatgaagtctacactgtttatcaatgctctctcaggctcggccttggccttgatgagttcctttcatgggttgcacaaccacactcagttcgaatatgtggttgttggctcgggagcaggcggaggtgtggtggcggcctctttagcccgcaaaggccattcggtcttcctgatagaggcaggtgaagatcttggtggtgaactcgttgagcagatgccatccagggcaaatgaaattgccgaaggcttgaactcctcgtggcaattttttgtccagcattttgggaacaacgaaacacaagctcgacgagatcccaacttctcttatcttctcggaaatgggtcatactacactggtttagaccccccgacggaggcaacgcccttgggtctaacttatccgcgcggcgcaactgtaggcggtagtacatcggtcaaaaaaagatcccgcgcgagttattgtttaaccgtgcttttaagacatcctgctaacctttttacacatagatcgaaactgaccatatacttacagtgggaatatttggcaaatcttactggagatgcctcttacgggcccgaagtgatgagagaatacttcatacagatggaaaactgcaattatcttccacaaggtacaccaggtcacggttttgacggtttcatcacggtaagtgttgctgatattctatcaaaggcagcgttggaagtagaaggcattgagcccgcgaactccgaggagctcgcagatatgcttctgcgggatccatatcctccaggagagtacatcgaaggcatttttatgcttgtaccagcggtgactaggatgaaacgtcgatcagggtcacgcaactatatcattgacaccattatggaaacaaatgcagacggctctcaaaaatatcctctgacattgagcacgcagtcgctagctacacgtgtcctctttgaggaaagagtaagttcgccaaaggcgtatggcgtcgaatacatggtcggagatgcactgtatgctgcagatcagcgatacaactcttcttcgaccttcgagctgcaccagatcactgcgtcgagagagatcattgtttcgggtggcgctttcaacacacctcaaattctgaagctgagtggtgtcggacctcgagaggagcttgagaagctaggaatcccagtagtcgcagatgtaccagcggtgggtgcatacttgcaggacaactacgaagttggcgttatcgggaactcacccgtcgaattcccaaataatctcgcaaattgtacatatttatatgacagcgccgatccatgctatcaagaatggctgtacagcggcaccggaccatacggcgaggccgcagctcctctttcagtagtctatcgctcaaacgccagcgacgacgagcatcccgacacatggctttatggatttccagggctagcacttgatggcttctttcctggcttttctagggtacctccgtcaccgcactcgtttacttggacgatgctccaaatgcctggccccggaaatgatgccaagggtagcgttaccttacgatcttctaatcctcgggatacgccaataatagacttcaactattttgtcggcgatgctggagaacgcgacatccaggcgctgactggagccggcgaactagcgcttcgtatttttaaccagaccagccgaccttggagtccatttgctatcatcaacagaacggaagatgaggatcttagccaaaggctgaaagatcaggtcttcggccaccatgcttgtgggacatgccgcatgggaccagtgagtgacccagaggcgtgtgtcgatccggaatttcgtgtacacggcgtgcagggtcttcgtgtggttgacgcgtccgtctggccacgtacgccaggtgcatggccgacggttccaacctatatgatgggtctgaaattagctgatattctatcgcaagaagcagcaaggaacaaatga

SEQ ID NO: 35954 - protein, 676 aa, Muscodor strobelii
  misc_feature: SGI Peptide ID NO. 572457
  misc_feature (521)..(664): Pfam Id: PF05199 Pfam Desc: GMC oxidoreductase
  misc_feature (127)..(439): Pfam Id: PF00732 Pfam Desc: GMC oxidoreductase
  misc_feature (608)..(664): Pfam Id: PF05199 Pfam Desc: GMC oxidoreductase
  misc_feature (373)..(423): Pfam Id: PF00732 Pfam Desc: GMC oxidoreductase
  misc_feature (50)..(668): NCBI GI: 256726464 Blast Desc: NECHADRAFT_39574 [Nectria haematococca mpVI 77-13-4]
  misc_feature (46)..(670): NCBI GI: 256727900 Blast Desc: NECHADRAFT_83489 [Nectria haematococca mpVI 77-13-4]
  misc_feature (50)..(671): NCBI GI: 46127809 Blast Desc: FG08282.1 [Gibberella zeae PH-1]
  misc_feature (23)..(668): NCBI GI: 261352468 Blast Desc: alcohol dehydrogenase [Verticillium albo-atrum VaMs.102]
  misc_feature (40)..(668): NCBI GI: 242791737 Blast Desc: choline dehydrogenase, [Talaromyces stipitatus ATCC 10500] gi|218718402|gb|EED17822.1| choline dehydrogenase, [Talaromyces stipitatus ATCC 10500]
  misc_feature (37)..(672): NCBI GI: 240275508 Blast Desc: GMC oxidoreductase [Ajellomyces capsulatus H143]
  misc_feature (37)..(672): NCBI GI: 225561900 Blast Desc: glucose-methanol-choline oxidoreductase [Ajellomyces capsulatus G186AR]
  misc_feature (50)..(673): NCBI GI: 154321511 Blast Desc: BC1G_01630 [Botryotinia fuckeliana B05.10] gi|150852168|gb|EDN27360.1| BC1G_01630 [Botryotinia fuckeliana B05.10]
  misc_feature (48)..(672): NCBI GI: 256732331 Blast Desc: [Nectria haematococca mpVI 77-13-4]
  misc_feature (48)..(670): NCBI GI: 119480809 Blast Desc: GMC oxidoreductase, [Neosartorya fischeri NRRL 181] gi|119408587|gb|EAW18536.1| GMC oxidoreductase, [Neosartorya fischeri NRRL 181]
  misc_feature (283)..(673): SWISSPROT Homolog: EC 1.1.99.1 Choline dehydrogenase
MAYGIPTLSSQHGIGTSFFKMKSTLFINALSGSALALMSSFHGLHNHTQFEYVVVGSGAGGGVVAASLARKGHSVFLIEAGEDLGGELVEQMPSRANEIAEGLNSSWQFFVQHFGNNETQARRDPNFSYLLGNGSYYTGLDPPTEATPLGLTYPRGATVGGSTSVKKRSRASYCLTVLLRHPANLFTHRSKLTIYLQWEYLANLTGDASYGPEVMREYFIQMENCNYLPQGTPGHGFDGFITVSVADILSKAALEVEGIEPANSEELADMLLRDPYPPGEYIEGIFMLVPAVTRMKRRSGSRNYIIDTIMETNADGSQKYPLTLSTQSLATRVLFEERVSSPKAYGVEYMVGDALYAADQRYNSSSTFELHQITASREIIVSGGAFNTPQILKLSGVGPREELEKLGIPVVADVPAVGAYLQDNYEVGVIGNSPVEFPNNLANCTYLYDSADPCYQEWLYSGTGPYGEAAAPLSVVYRSNASDDEHPDTWLYGFPGLALDGFFPGFSRVPPSPHSFTWTMLQMPGPGNDAKGSVTLRSSNPRDTPIIDFNYFVGDAGERDIQALTGAGELALRIFNQTSRPWSPFAIINRTEDEDLSQRLKDQVFGHHACGTCRMGPVSDPEACVDPEFRVHGVQGLRVVDASVWPRTPGAWPTVPTYMMGLKLADILSQEAARNK

SEQ ID NO: 35955 - DNA, 2463 bp, Muscodor strobelii
  misc_feature: SGI cDNA ID NO. 572458
  misc_feature: Encodes the peptide sequence at SEQ ID NO 35956
atggctctaattttctcctgcctcatctcggggttatctctcgcctctttgacgtatggccaatcttgtgaatcaccaagcaacactggcaacgtgtttagccacgttcaggctctgaatactaccatccttggaccatatggcaattcacccgcagtttatccatcacctaacgctacaggcgctggggggtggaaagatgcgttagctaaggcgaagtctttcgtatccgaattgacgctcgaggagaaagcaaacatggtaactgggtacccgggtccatgtgttggtaatatcctagccatccctagactgggtttcaatgggctgtgtttgcaagatgggcccctcgcgattcgcgtggcagactacgccagtgtgttcccagctggtgtatcagctgcaagtacatgggatcgtgacctcctctataagagaggccatgcgatggggaaggagttcaaggcaaaaggcgcccatattgctctaagccctgtcgctggaccactcggacggagtgcgtatgcaggaagaaactgggagggcttcgccgctgacccgtatctcactggtgtcgccatggagcagacaatcacaggcatgcagaacgctggcgtacaagcttgtgccaagcatttcattgcaaatgaacaagagacgcaacgcaatccaacgtttgatacaaacggttcattgactactgtgattcaagagtcagtgtccgccaatgttgacgacaggacaatgcacgaaatctacttgtggcccttccagaacgccgtacatgctggttctgcatctattatgtgctcttataaccggatcaatgggacatacgcgtgcgaaaactctaagactttgaatgggcttctgaaaggggagctcggcttccaaggatacgtcatgtctgactggggcggtacgcacagtggcttgtcgtccattgagggcggcctagatatggacatgcccggaggcatcggcatgtacggtctaggatttgctgccgggtcattcttcggaggaaacgtcacaaacgctgtcaacaatggtactcttgacatctcgcgtttggacgatatgatcacccgcattatgacaccctactactttctgggacaagataaagaataccctactgttgatccatcttctgccgatttgaacacatttactccacgttcatcatggttgacagatttcaaccttactggcgaggtgaaccgtgatgttcgcggcaatcacgatgcattgatccgcgagattggcgccgcttcgacaatccttctcaagaataccaatcaagcgttacctctcaatgcgcccaagtccatcgctgtctttggcaatgacgctggggaacccacgcaaggctcgtatttcacctccaactttgagtatggaacactgcctgttggcggtggctcgggcacaggccgtttcacgaagttggtaacaccactcgatgcgatcaagtcgcgcgctgcgaaggataatacccttgtgcagtattggctgaacaacacactgattgcagacactgatatccgcacactttggatcccaaccgtgccagatgtctgtctcgtatttttgaaaacttgggctgaggaaggcttggatcgtctgagtctcgaatccgactggcgtggaaacgatgtggtaaattcggtggcatcgcagtgcaacaacacggttgtagtaactcattcctcgggtattaatattctaccattcgccgagcaccccaatgtcaccggcatcctcgcagctcattatccaggccaggaatctggaaactccatcgtcgatgtactttacggccacgtcaacccatctggtcatctgccctacaccatcgcgcgaaacgcctccgactacaacgcgccaccaaccacagcggtgaatacgactggacagtacgactggcagagctggtttgacgaagaacttgaaattgactatcggtactttgacgcgcacgatattcctgttcaataccctttcggtcatggtctatcatacacaaccttcgagctgagcggtctcgctgccaagcaacttgtccaggagatacccgctacgccgccagccccatctggtgatatccccccaggtggcaacgaggcgctctgggattctctgttcaatgtgacagtcgaggtcgttaacaagggcaaagtcggcggcgctgctgtaccgcagctttacgtcagcctggcggatagcgctccggctggaacgccctctcgtcagctccgaggcttcaacaaggttacacttgctgtcaatgaaactcggacagtttccttcgagcttgcacggcgggacatcagctactgggacatcatttctcagcaatgggttattccgtctggcggaatcaagcttgaagttgggctcagcagtcgggatcttaaggacagtgtcgacattacacccgttgctaagtctggcgcatga

SEQ ID NO: 35956 - protein, 820 aa, Muscodor strobelii
  misc_feature: SGI Peptide ID NO. 572458
  misc_feature (99)..(324): Pfam Id: PF00933 Pfam Desc: Glycosyl hydrolase family 3 N terminal domain
  misc_feature (427)..(677): Pfam Id: PF01915 Pfam Desc: Glycosyl hydrolase family 3 C terminal domain
  misc_feature (1)..(816): NCBI GI: 255949368 Blast Desc: Pc22g15340 [Penicillium chrysogenum Wisconsin 54-1255] gi|211592468|emb|CAP98822.1| Pc22g15340 [Penicillium chrysogenum Wisconsin 54-1255]
  misc_feature (1)..(815): NCBI GI: 261359936 Blast Desc: beta-glucosidase [Verticillium albo-atrum VaMs.102]
  misc_feature (1)..(818): NCBI GI: 119485921 Blast Desc: glycosyl hydrolase, [Neosartorya fischeri NRRL 181] gi|119410459|gb|EAW20406.1| glycosyl hydrolase, [Neosartorya fischeri NRRL 181]
  misc_feature (1)..(818): NCBI GI: 115388771 Blast Desc: ATEG_02713 [Aspergillus terreus NIH2624] gi|114195975|gb|EAU37675.1| ATEG_02713 [Aspergillus terreus NIH2624]
  misc_feature (27)..(817): NCBI GI: 67539612 Blast Desc: AN5976.2 [Aspergillus nidulans FGSC A4] gi|40738535|gb|EAA57725.1| AN5976.2 [Aspergillus nidulans FGSC A4] gi|259479841|tpe|CBF70434.1| TPA: beta-glucosidase (Eurofung)
  misc_feature (15)..(815): NCBI GI: 256731512 Blast Desc: NECHADRAFT_85035 [Nectria haematococca mpVI 77-13-4]
  misc_feature (1)..(815): NCBI GI: 46121149 Blast Desc: FG04953.1 [Gibberella zeae PH-1]
  misc_feature (1)..(815): NCBI GI: 169620942 Blast Desc: SNOG_13675 [Phaeosphaeria nodorum SN15] gi|111058002|gb|EAT79122.1| SNOG_13675 [Phaeosphaeria nodorum SN15]
  misc_feature (4)..(815): NCBI GI: 189210447 Blast Desc: beta-glucosidase 2 precursor [Pyrenophora tritici-repentis Pt-1C-BFP] gi|187977648|gb|EDU44274.1| beta-glucosidase 2 precursor [Pyrenophora tritici-repentis
  misc_feature (22)..(806): NCBI GI: 145251001 Blast Desc: An15g04800 [Aspergillus niger] gi|134082541|emb|CAK42457.1| protein product [Aspergillus niger]
  misc_feature (50)..(806): SWISSPROT Homolog: EC 3.2.1.21 Beta-glucosidase
MALIFSCLISGLSLASLTYGQSCESPSNTGNVFSHVQALNTTILGPYGNSPAVYPSPNATGAGGWKDALAKAKSFVSELTLEEKANMVTGYPGPCVGNILAIPRLGFNGLCLQDGPLAIRVADYASVFPAGVSAASTWDRDLLYKRGHAMGKEFKAKGAHIALSPVAGPLGRSAYAGRNWEGFAADPYLTGVAMEQTITGMQNAGVQACAKHFIANEQETQRNPTFDTNGSLTTVIQESVSANVDDRTMHEIYLWPFQNAVHAGSASIMCSYNRINGTYACENSKTLNGLLKGELGFQGYVMSDWGGTHSGLSSIEGGLDMDMPGGIGMYGLGFAAGSFFGGNVTNAVNNGTLDISRLDDMITRIMTPYYFLGQDKEYPTVDPSSADLNTFTPRSSWLTDFNLTGEVNRDVRGNHDALIREIGAASTILLKNTNQALPLNAPKSIAVFGNDAGEPTQGSYFTSNFEYGTLPVGGGSGTGRFTKLVTPLDAIKSRAAKDNTLVQYWLNNTLIADTDIRTLWIPTVPDVCLVFLKTWAEEGLDRLSLESDWRGNDVVNSVASQCNNTVVVTHSSGINILPFAEHPNVTGILAAHYPGQESGNSIVDVLYGHVNPSGHLPYTIARNASDYNAPPTTAVNTTGQYDWQSWFDEELEIDYRYFDAHDIPVQYPFGHGLSYTTFELSGLAAKQLVQEIPATPPAPSGDIPPGGNEALWDSLFNVTVEVVNKGKVGGAAVPQLYVSLADSAPAGTPSRQLRGFNKVTLAVNETRTVSFELARRDISYWDIISQQWVIPSGGIKLEVGLSSRDLKDSVDITPVAKSGA

SEQ ID NO: 35957 - DNA, 3461 bp, Muscodor strobelii
  misc_feature: SGI EST ID NO. CUFF.85641.1
  misc_feature: Variant of the nucleotide sequence at SEQ ID NO 35955
gacccgggagcgcctggggaaattggagagaccgccccaggtttaccaggatttggagcactgcggagaagttcacacctggtttcatgacctcattgtctcaataagaccattgtctatcgcatttctctgtacgagtccaaccttctatgcatatgtgcaaacaacgaagatactatccgttgccggtaacagaacgaagagagccatagtcctgtggaggagtcgagggtaatggtcaaatgtcgactgacaagctagaaattggggtgacagattggggcttccccaggaatggtgcaagctcgaacaaacaccacgatccaatgcccatgtctggaatggtatcagccgaacagtgactcccggcgctatccccgaggcgcggcacatctctcgatactcgtgctagatcaaaaagagcctccaaatgccattgcgggaatttgcacagatcgaaggcttattcttggcattaagtggggattaccgctgtcacggatctccatgaatcacaacctcacacgaccgggcatatgcctatggggctccttacctgagtcaggttgcctatgcagacttccatgtatcccgagcacgtaccatactactcacgcagatgcaatgcgcaaatacttacccactcggatagctcgagggtattcgattctgcagtcacgagaccccacagtgctgttcagttcggagaccataccggcattggcatgttgagtcggcgtattaaaggctggggacgggacagattgatgttcgtcgactggtgaagtgatcacacgcatctgtctcgagatggctctaattttctcctgcctcatctcggggttatctctcgcctctttgacgtatggccaatcttgtgaatcaccaagcaacactggcaacgtgtttagccacgttcaggctctgaatactaccatccttggaccatatggcaattcacccgcagtttatccatcacctaacgctacaggcgctggggggtggaaagatgcgttagctaaggcgaagtctttcgtatccgaattgacgctcgaggagaaagcaaacatggtaactgggtacccgggtccatgtgttggtaatatcctagccatccctagactgggtttcaatgggctgtgtttgcaagatgggcccctcgcgattcgcgtggcagactacgccagtgtgttcccagctggtgtatcagctgcaagtacatgggatcgtgacctcctctataagagaggccatgcgatggggaaggagttcaaggcaaaaggcgcccatattgctctaagccctgtcgctggaccactcggacggagtgcgtatgcaggaagaaactgggagggcttcgccgctgacccgtatctcactggtgtcgccatggagcagacaatcacaggcatgcagaacgctggcgtacaagcttgtgccaagcatttcattgcaaatgaacaagaggtgaggattgtacttcctaagcttttttagaggaaatgcgaacactccaactgatatcacgaagacgcaacgcaatccaacgtttgatacaaacggttcattgactactgtgattcaagagtcagtgtccgccaatgttgacgacaggacaatgcacgaaatctacttgtggcccttccagaacgccgtacatgctggttctgcatctattatgtgctcttataaccggatcaatgggacatacgcgtgcgaaaactctaagactttgaatgggcttctgaaaggggagctcggcttccaaggatacgtcatgtctgactggggcggtacgcacagtggcttgtcgtccattgagggcggcctagatatggacatgcccggaggcatcggcatgtacggtctaggatttgctgccgggtcattcttcggaggaaacgtcacaaacgctgtcaacaatggtactcttgacatctcgcgtttggacgatatgatcacccgcattatgacaccctactactttctgggacaagataaagaataccctactgttgatccatcttctgccgatttgaacacatttactccacgttcatcatggttgacagatttcaaccttactggcgaggtgaaccgtgatgttcgcggcaatcacgatgcattgatccgcgagattggcgccgcttcgacaatccttctcaagaataccaatcaagcgttacctctcaatgcgcccaagtccatcgctgtctttggcaatgacgctggggaacccacgcaaggctcgtatttcacctccaactttgagtatggaacactgcctgttggcggtggctcgggcacaggccgtttcacgaagttggtaacaccactcgatgcgatcaagtcgcgcgctgcgaaggataatacccttgtgcagtattggctgaacaacacactgattgcagacactgatatccgcacactttggatcccaaccgtgccagatgtctgtctcgtatttttgaaaacttgggctgaggaaggcttggatcgtctgagtctcgaatccgactggcgtggaaacgatgtggtaaattcggtggcatcgcagtgcaacaacacggttgtagtaactcattcctcgggtattaatattctaccattcgccgagcaccccaatgtcaccggcatcctcgcagctcattatccaggccaggaatctggaaactccatcgtcgatgtactttacggccacgtcaacccatctggtcatctgccctacaccatcgcgcgaaacgcctccgactacaacgcgccaccaaccacagcggtgaatacgactggacagtacgactggcagagctggtttgacgaagaacttgaaattgactatcggtactttgacgcgcacgatattcctgttcaataccctttcggtcatggtctatcatacacaaccttcgagctgagcggtctcgctgccaagcaacttgtccaggagatacccgctacgccgccagccccatctggtgatatccccccaggtggcaacgaggcgctctgggattctctgttcaatgtgacagtcgaggtcgttaacaagggcaaagtcggcggcgctgctgtaccgcagctttacgtcagcctggcggatagcgctccggctggaacgccctctcgtcagctccgaggcttcaacaaggttacacttgctgtcaatgaaactcggacagtttccttcgagcttgcacggcgggacatcagctactgggacatcatttctcagcaatgggttattccgtctggcggaatcaagcttgaagttgggctcagcagtcgggatcttaaggacagtgtcgacattacacccgttgctaagtctggcgcatgatcaggtcagaggatccgactaagggcgaataatcaagatggatagcaatggaactgtacattgtaatgagaaattggaatgactgatttcatgatatgttatagctattatcgctcttagattg

SEQ ID NO: 35958 - DNA, 1605 bp, Muscodor strobelii
  misc_feature: SGI cDNA ID NO. 572459
  misc_feature: Reduced expression when VOC is produced
  misc_feature: Encodes the peptide sequence at SEQ ID NO 35959
atgtcaatgaaacaattttatcttttgggtgaagacccgaccgcagtccgcgatgttgagattccatctcaaatagacctagagagccttcgccaaatagtcgcatcatattttgccattgttgagccgcgtggcgttggctttgcatcggaaactgcatgccttaccaccgtctctgacgtcctctcttccgagggaccaattgcaatcagcatagatgggaagtctgtccgcgagatacccggtcccaaaggcctaccttacgtaggaaactactttgaggtttatccggaccacctcggaaaccatcagcgtctattcgagaaattcgggcctttgatcaagactaccaacttcggcagcaccatctatactaccaacaatcctcagctttccaacattgtctttgccgagagcgatttcttcagcaagaggatggtccccggccacccattgtatccaattaagaacaaatctgcaggtgtatttctcggcgacacagacacagaggaatggcggacggcacataagtttctccctccggcactaggacctaaagccgtgcgccactacgcgccaaccatgcagaggacagtcgaggacagcttcaaggttttcgatgagctggacgagaaagatgaggcatggaacgtgtatcccttcatggtcaagatgggctcgcaagccgtcggaaaattgatgctcggcatggattttcagcatttcaatgctcccgattccccgctggacgaaatggtcatgctcattgcagagtccctcgagcttaacaagaagattacgtccataggaagctggtggatgaccgaactggtcacacggtcagtcgaacaagcagcgaagggctcagagccacttgagcttcaggaagctgccctgaaggctgagaacttggttgactacgtcacccgagctgtagatggcaaaggcaacaaactgcccaaagagcgcattcttgagccgctcgtcgtcgccaccggtgcaggctttaccacaacgtcaagtttgctctcctggctcgtctacggtcttgtcagctatcccggtatgcaagagcgacttctacaggaactcatcgacaacggcttcgatgacaacactcagatggatgcggacctgattagcaagctcacgttcctcaacaagtacatcaaggagacacaacgacgacacaatccctcctatcagcccgcgcgcacatcgaaggtcgacatggtcttaccgggcggctataagctaccgcgtgactcagtcgtgatacctgctattcaccacatccacaacaacactgaactgtgggacaatccggctcgctttgacccagaccgatgggatagcgataaagtcaagaacatgccgaacggatcgtatgtcccttttgcgaccggtccccgaggttgcatcggttttaacttcgccctcatggaggttaaggtgtttctgccgaagctgatctaccgatacaacttcagtctagtaaaggatggtcctgtcgattacgaccccatgttccagcttatcagacccaatgacttgtacgtccgtgctgaacgtcgggtgaagtggccgccacgatctgatgcttga

SEQ ID NO: 35959 - protein, 534 aa, Muscodor strobelii
  misc_feature: SGI Peptide ID NO. 572459
  misc_feature (80)..(521): Pfam Id: PF00067 Pfam Desc: Cytochrome P450
  misc_feature (333)..(521): Pfam Id: PF00067 Pfam Desc: Cytochrome P450
  misc_feature (80)..(113): Pfam Id: PF00067 Pfam Desc: Cytochrome P450
  misc_feature (1)..(533): NCBI GI: 261355025 Blast Desc: cytochrome P450 monooxygenase [Verticillium albo-atrum VaMs.102]
  misc_feature (1)..(518): NCBI GI: 46110513 Blast Desc: FG02138.1 [Gibberella zeae PH-1]
  misc_feature (1)..(518): NCBI GI: 256728806 Blast Desc: [Nectria haematococca mpVI 77-13-4]
  misc_feature (1)..(533): NCBI GI: 145616420 Blast Desc: MGG_10724 [Magnaporthe grisea 70-15] gi|145010159|gb|EDJ94815.1| MGG_10724 [Magnaporthe grisea 70-15]
  misc_feature (2)..(533): NCBI GI: 119474569 Blast Desc: Cytochrome P450 oxidoreductase, [Neosartorya fischeri NRRL 181] gi|119407313|gb|EAW17263.1| Cytochrome P450 oxidoreductase, [Neosartorya fischeri NRRL 181]
  misc_feature (1)..(534): NCBI GI: 238499069 Blast Desc: cytochrome P450 monooxygenase, [Aspergillus flavus NRRL3357] gi|220692522|gb|EED48868.1| cytochrome P450 monooxygenase, [Aspergillus flavus NRRL3357]
  misc_feature (2)..(533): NCBI GI: 70986448 Blast Desc: cytochrome P450 monooxygenase [Aspergillus fumigatus Af293] gi|66846347|gb|EAL86680.1| cytochrome P450 monooxygenase, [Aspergillus fumigatus Af293]
  misc_feature (2)..(533): NCBI GI: 159128111 Blast Desc: cytochrome P450 monooxygenase, [Aspergillus fumigatus A1163]
  misc_feature (1)..(533): NCBI GI: 238496599 Blast Desc: cytochrome P450 monooxygenase, [Aspergillus flavus NRRL3357] gi|220694415|gb|EED50759.1| cytochrome P450 monooxygenase, [Aspergillus flavus NRRL3357]
  misc_feature (1)..(532): NCBI GI: 116182750 Blast Desc: CHGG_02003 [Chaetomium globosum CBS 148.51] gi|88186300|gb|EAQ93768.1| CHGG_02003 [Chaetomium globosum CBS 148.51]
  misc_feature (80)..(504): SWISSPROT Homolog: EC 1.14.14.1 Unspecific monooxygenase
  misc_feature: Useful for introducing or modulating the production of volatile compounds
MSMKQFYLLGEDPTAVRDVEIPSQIDLESLRQIVASYFAIVEPRGVGFASETACLTTVSDVLSSEGPIAISIDGKSVREIPGPKGLPYVGNYFEVYPDHLGNHQRLFEKFGPLIKTTNFGSTIYTTNNPQLSNIVFAESDFFSKRMVPGHPLYPIKNKSAGVFLGDTDTEEWRTAHKFLPPALGPKAVRHYAPTMQRTVEDSFKVFDELDEKDEAWNVYPFMVKMGSQAVGKLMLGMDFQHFNAPDSPLDEMVMLIAESLELNKKITSIGSWWMTELVTRSVEQAAKGSEPLELQEAALKAENLVDYVTRAVDGKGNKLPKERILEPLVVATGAGFTTTSSLLSWLVYGLVSYPGMQERLLQELIDNGFDDNTQMDADLISKLTFLNKYIKETQRRHNPSYQPARTSKVDMVLPGGYKLPRDSVVIPAIHHIHNNTELWDNPARFDPDRWDSDKVKNMPNGSYVPFATGPRGCIGFNFALMEVKVFLPKLIYRYNFSLVKDGPVDYDPMFQLIRPNDLYVRAERRVKWPPRSDA

SEQ ID NO: 35960 - DNA, 2305 bp, Muscodor strobelii
  misc_feature: SGI EST ID NO. CUFF.85553.0
  misc_feature: Variant of the nucleotide sequence at SEQ ID NO 35958
gccaaattacaacaacgaggaattgatagaggtcccgacgcgacggaatatggtcagccaatacggcattggtgaaaatggatccaagctacaaagggcatctgcctcggcaagtcagacagcaaattgatatgacgcagaagcccatcaccgctcgacacgcgcgccacaatagtcgcaatcgcgaaatcgcgacaggctcagaatgggccaagaccatcaatgggccagcaattatacaaatgaaatatataccattgtgccccttcctgcttccctggaatggcttgcgagacacagagtattgtacagcttagcagcataagacaatcacaactatgtcaatgaaacaattttatcttttgggtgaagacccgaccgcagtccgcgatgttgagattccatctcaaatagacctagagagccttcgccaaatagtcgcatcatattttgccattgttgagccgcgtggcgttggctttgcatcggaaactgcatgccttaccaccgtctctgacgtcctctcttccgagggaccaattgcaatcagcatagatgggaagtctgtccgcgagatacccggtcccaaaggcctaccttacgtaggaaactactttgaggtttatccggaccacctcggaaaccatcagcgtctattcgagaaattcgggcctttgatcaagactaccaacttcggcagcaccatctatactaccaacaatcctcagctttccaacattgtctttgccgagagcgatttcttcagcaagaggatggtccccggccacccattgtatccaattaagaacaaatctgcaggtgtatttctcggcgacacagacacagaggaatggcggacggcacataagtttctccctccggcactaggacctaaagccgtgcgccactacgcgccaaccatgcagaggacagtcgaggacagcttcaaggttttcgatgagctggacgagaaagatgaggcatggaacgtgtatcccttcatggtcaagatgggctcgcaagccgtcggaaaattgatgctcggcatggattttcagcatttcaatgctcccgattccccgctggacgaaatggtcatgctcattgcagagtccctcgagcttaacaagaagattacgtccataggaagctggtgtaagtgatcttatctgccaaatatcataaatcagccctctgtattaaacccgcggcccggcgaaaagttgtgaaaagtaactaaccaactacctttccggctatcagacgcgtctatgcctttcggggacccgaagcggctccgggacatacaaaacaggatgaccgaactggtcacacggtcagtcgaacaagcagcgaagggctcagagccacttgagcttcaggaagctgccctgaaggctgagaacttggttgactacgtcacccgagctgtagatggcaaaggcaacaaactgcccaaagagcgcattcttgagccgctcgtcgtcgccaccggtgcaggctttaccacaacgtcaagtttgctctcctggctcgtctacggtcttgtcagctatcccggtatgcaagagcgacttctacaggaactcatcgacaacggcttcgatgacaacactcagatggatgcggacctgattagcaagctcacgttcctcaacaagtacatcaaggagacacaacgacgacacaatccctcctatcagcccgcgcgcacatcgaaggtcgacatggtcttaccgggcggctataagctaccgcgtgactcagtcgtgatacctgctattcaccacatccacaacaacactgaactgtgggacaatccggctcgctttgacccagaccgatgggatagcgataaagtcaagaacatgccgaacggatcgtatgtcccttttgcgaccggtccccgaggttgcatcggttttaacttcgccctcatggaggttaaggtgtttctgccgaagctgatctaccgatacaacttcagtctagtaaaggatggtcctgtcgattacgaccccatgttccagcttatcagacccaatgacttgtacgtccgtgctgaacgtcgggtgaagtggccgccacgatctgatgcttgagtatgggaggaaggatagtaccacgaaatactacgacgaaatgagcataatggcgttgggacttattgatatacatgtacaaccagtggagtaatagattggcttagatggggctcatagatacggtacactagacacgataccctcctcccagagtatatagaataataataatcttttcggtcgacaataactgacacttg

SEQ ID NO: 35961 - DNA, 1410 bp, Muscodor strobelii
  misc_feature: SGI cDNA ID NO. 572460
  misc_feature: Elevated expression when VOC is produced
  misc_feature: Encodes the peptide sequence at SEQ ID NO 35962
atggccaatgcggtgcgaggtgacaacctctttcgaatccaagatgccttgactgctctaataaatgagccggagcaactggacactgcaagaagtcgtttcgaagaaccctcgcctcaagataaatttcaatctggtcatgcagctccatcgttgagccgcaattccaatgacgaccggcttttggagctcaaacttttcagactacgagatgaatggtgcgcctccttgccagggtcacaattcgaagccgagatagaagaccagagagagaggattgaaaaggcgcataaggatcaaatacgccgcttgccacacagaaatactcggctcgttgccaagctacttgtaaaggatcaatggatagagcagggcatctgggacgacaactttgacactcctgggaactggagttggaaacacgaaagaccgctgtccttagaagccccagagaagacgtatcgtaggttcttctccattcccactggtgcacacgaagatgaagagtcacgaacgacgcaattcaagctcgacgcggagcgaagacgggctgtgcgcgagcgggagcgtcaggcatcgcggccctattaccaattcgtgtaccaagtctccaaacaacgtgaacacattcaagaacgaatgataatcgatcgagcgccgacaacgccagatttcgatatcaacacagaagcttacaacgaggtgaagaagatctggattgggcgagggatatggaacacgaagtggggcatattgcctggtatgtcgtggaaacatgaacaacgtttcgaggacatgttgaaggaagagctcggtcaagattttgaacctccgcaatggctgcgcgtatgtccacctagcgacaataaagaacctcaaccacctccgccagggtgcaacccacccgacgaagatgacatacactgggcaaggatggaggggaggccgatattccgatttcgtacagaaccgtcgcagtatgtgcagcagcagctagatgtcgtggaagagcaagaacgcaagaagcaagaaagagagatgcatgagcatttgctcatgcagtattcgacggctgagcctgaagaggcaagccgctcaccattatttggaggcttatttgatcctcctaccttgccagaacagaaggcatcgggcggtggagactcgtcgcagggcgagcgatctgcagcctcaagtcatgccgacgagcgcaacgctgatgatcataatgtttcctcaacctttggcacgaggccaactcctaaagcaactcgaaacgttaaaacgaggcagataataacgcgaaaagtccgtaagtcagttgcagaaaagtcacgaaaaacccatggcttgcaagatgcaaagtctcgtcggaaacagccttcaagagcatgcaaacgaagtgcttaa

SEQ ID NO: 35962 - protein, 469 aa, Muscodor strobelii
  misc_feature: SGI Peptide ID NO. 572460
  misc_feature (5)..(277): NCBI GI: 225563285 Blast Desc: HCBG_01019 [Ajellomyces capsulatus G186AR]
  misc_feature (5)..(310): NCBI GI: 240275874 Blast Desc: conserved [Ajellomyces capsulatus H143]
  misc_feature (1)..(260): NCBI GI: 255940178 Blast Desc: Pc16g05110 [Penicillium chrysogenum Wisconsin 54-1255] gi|211585481|emb|CAP93181.1| Pc16g05110 [Penicillium chrysogenum Wisconsin 54-1255]
  misc_feature (3)..(261): NCBI GI: 225555043 Blast Desc: HCBG_08276 [Ajellomyces capsulatus G186AR]
  misc_feature (3)..(261): NCBI GI: 225557998 Blast Desc: [Ajellomyces capsulatus G186AR]
  misc_feature (3)..(261): NCBI GI: 240273016 Blast Desc: conserved [Ajellomyces capsulatus H143]
  misc_feature (3)..(261): NCBI GI: 240281256 Blast Desc: conserved [Ajellomyces capsulatus H143]
  misc_feature (76)..(269): NCBI GI: 258572890 Blast Desc: [Uncinocarpus reesii 1704] gi|237905477|gb|EEP79878.1| [Uncinocarpus reesii 1704]
  misc_feature (2)..(261): NCBI GI: 261187978 Blast Desc: conserved [Ajellomyces dermatitidis SLH14081] gi|239593417|gb|EEQ75998.1| conserved [Ajellomyces dermatitidis SLH14081]
  misc_feature (3)..(259): NCBI GI: 225561700 Blast Desc: [Ajellomyces capsulatus G186AR]
  misc_feature: Useful for introducing or modulating the production of volatile compounds
MANAVRGDNLFRIQDALTALINEPEQLDTARSRFEEPSPQDKFQSGHAAPSLSRNSNDDRLLELKLFRLRDEWCASLPGSQFEAEIEDQRERIEKAHKDQIRRLPHRNTRLVAKLLVKDQWIEQGIWDDNFDTPGNWSWKHERPLSLEAPEKTYRRFFSIPTGAHEDEESRTTQFKLDAERRRAVRERERQASRPYYQFVYQVSKQREHIQERMIIDRAPTTPDFDINTEAYNEVKKIWIGRGIWNTKWGILPGMSWKHEQRFEDMLKEELGQDFEPPQWLRVCPPSDNKEPQPPPPGCNPPDEDDIHWARMEGRPIFRFRTEPSQYVQQQLDVVEEQERKKQEREMHEHLLMQYSTAEPEEASRSPLFGGLFDPPTLPEQKASGGGDSSQGERSAASSHADERNADDHNVSSTFGTRPTPKATRNVKTRQIITRKVRKSVAEKSRKTHGLQDAKSRRKQPSRACKRSA

SEQ ID NO: 35963 - DNA, 2012 bp, Muscodor strobelii
  misc_feature: SGI EST ID NO. CUFF.85564.0
  misc_feature: Variant of the nucleotide sequence at SEQ ID NO 35961
cgtgccagttccaatggaatgggtcgataggatcctgaagcacagcaggaatgagggtccgatcatcgacccatcacctccaggtcaccgtacaagcccttctcccaaagtctcaagctcctacatcgtatccaaatttccgccttttatgtggttctttccataaaccccttgtacagactgataaacacgcaacagcctgctcaatggccaatgcggtgcgaggtgacaacctctttcgaatccaagatgccttgactgctctaataaatgagccggagcaactggacactgcaagaagtcgtttcgaagaaccctcgcctcaagataaatttcaatctggtcatgcagctccatcgttgagccgcaattccaatgacgaccggcttttggagctcaaacttttcagactacgagatgaatggtgcgcctccttgccagggtcacaattcgaagccgagatagaagaccagagagagaggattgaaaaggcgcataaggatcaaatacgccgcttgccacacagaaatactcggctcgttgccaagctacttgtaaaggatcaatggatagagcagggcatctgggacgacaactttgacactcctgggaactggagttggaaacacgaaagaccgctgtccttagaagccccagagaagacgtatcgtaggttcttctccattcccactggtgcacacgaagatgaagagtcacgaacgacgcaattcaagctcgacgcggagcgaagacgggctgtgcgcgagcgggagcgtcaggcatcgcggccctattaccaattcgtgtaccaagtctccaaacaacgtgaacacattcaagaacgaatgataatcgatcgagcgccgacaacgccagatttcgatatcaacacagaagcttacaacgaggtgaagaagatctggattgggcgagggatatggaacacgaagtggggcatattgcctggtatgtcgtggaaacatgaacaacgtttcgaggacatgttgaaggaagagctcggtcaagattttgaacctccgcaatggctgcgcgtatgtccacctagcgacaataaagaacctcaaccacctccgccagggtgcaacccacccgacgaagatgacatacactgggcaaggatggaggggaggccgatattccgatttcgtacagaaccgtcgcagtatgtgcagcagcagctagatgtcgtggaagagcaagaacgcaagaagcaagaaagagagatgcatgagcatttgctcatgcagtattcgacggctgagcctgaagaggcaagccgctcaccattatttggaggcttatttgatcctcctaccttgccagaacagaaggcatcgggcggtggagactcgtcgcagggcgagcgatctgcagcctcaagtcatgccgacgagcgcaacgctgatgatcataatgtttcctcaacctttggcacgaggccaactcctaaagcaactcgaaacgttaaaacgaggcagataataacgcgaaaagtccgtaagtcagttgcagaaaagtcacgaaaaacccatggcttgcaagatgcaaagtctcgtcggaaacagccttcaagagcatgcaaacgaagtgcttaaaagtgcttaagtcagccgtagataaagttgagcgacgacacgagtgagccgattgggattcttgcggagcatggactggtgccctagtagcaatgatactgatatttgaagtcgatattcgttctctgggtcaattaagaatgcaagctatctcattcatagggcttcgtgatgtaatcgttgacattcaggcgaggggggagggacctttcacacactgtcaatttttaaatacgcatgactgggactcgcattcattggcctttttgattcgatcggccgatgtgaacatcgtagatgtgctgatatgttatctcaaggccagaccaatatttgcatgtaagtcgataaggcactcaatcgtcaaatgatttggttacctttgtcgaaaggtta

SEQ ID NO: 35964 - DNA, 837 bp, Muscodor strobelii
  misc_feature: SGI cDNA ID NO. 572461
  misc_feature: Encodes the peptide sequence at SEQ ID NO 35965
atgacatcggtgcagaagacagatcaggaaggcctccaggtcatccacgcggccctttggcgcatgggaacaatgtccttggctagagcatacacgatactaggttacagcgtcaatcacggagttatcgacgacagtatgaaagcgaactggaacggattagaaaaggcatccgaagcaacatggcccggcattcttggatcaaaaccgcgcgctccatattccagagaagagtgggatgagttatgggggaaccaatatgatgttgtcacagacctggcgtctccgctcgtgccagagctgataaaggcctatcccaatgcaaaggtcgtcatcgttcagcgagactttgataagtggtggcatagcttgcgcacaaacatcattgacaaagtctggtcacctagaggccaaatcacgggcgtcgtgctacccatagtactaggcattcgtcctgtgcaggctctccagaagagcatctgcggcttcttcggcgctagctcaagagctgagatgactgatgcgtgcgcacgacgtgcatacgatgcgtacttcaagcaagtaagagaaatggtccccaaagagcgactactcgagtataagcttggcgatggctgggagccattgtgcaaattcctagaacttcccgttccagatgtcccgtttccacggacaaacgatggcgatgacctggcaaaggcggcgcaacagaagaggcgggcgtatgtcactttcaccgttcaaaggatcaagaacgggctacctatgcaattctttgcaggctgcttcgcaatgtggatggcgttaaccctcgcttcctggtggaggtctgtctaa

SEQ ID NO: 35965 - protein, 278 aa, Muscodor strobelii
  misc_feature: SGI Peptide ID NO. 572461
  misc_feature (12)..(233): NCBI GI: 154304931 Blast Desc: BC1G_09051 [Botryotinia fuckeliana B05.10] gi|150853913|gb|EDN29105.1| BC1G_09051 [Botryotinia fuckeliana B05.10]
  misc_feature (2)..(240): NCBI GI: 46116006 Blast Desc: FG03845.1 [Gibberella zeae PH-1]
  misc_feature (75)..(254): NCBI GI: 116179296 Blast Desc: CHGG_00276 [Chaetomium globosum CBS 148.51] gi|88184573|gb|EAQ92041.1| CHGG_00276 [Chaetomium globosum CBS 148.51]
  misc_feature (12)..(267): NCBI GI: 238837557 Blast Desc: conserved [Microsporum canis CBS 113480]
  misc_feature (12)..(255): NCBI GI: 256728993 Blast Desc: NECHADRAFT_93184 [Nectria haematococca mpVI 77-13-4]
  misc_feature (1)..(238): NCBI GI: 46120546 Blast Desc: FG04920.1 [Gibberella zeae PH-1]
  misc_feature (3)..(274): NCBI GI: 189196286 Blast Desc: conserved [Pyrenophora tritici-repentis Pt-1C-BFP] gi|187980360|gb|EDU46986.1| conserved [Pyrenophora tritici-repentis Pt-1C-BFP]
  misc_feature (2)..(265): NCBI GI: 145607804 Blast Desc: MGG_10067 [Magnaporthe grisea 70-15] gi|145015300|gb|EDJ99836.1| MGG_10067 [Magnaporthe grisea 70-15]
  misc_feature (33)..(265): NCBI GI: 169605543 Blast Desc: SNOG_05797 [Phaeosphaeria nodorum SN15] gi|160706786|gb|EAT86861.2| SNOG_05797 [Phaeosphaeria nodorum SN15]
  misc_feature (21)..(264): NCBI GI: 256728010 Blast Desc: NECHADRAFT_45960 [Nectria haematococca mpVI 77-13-4]
MTSVQKTDQEGLQVIHAALWRMGTMSLARAYTILGYSVNHGVIDDSMKANWNGLEKASEATWPGILGSKPRAPYSREEWDELWGNQYDVVTDLASPLVPELIKAYPNAKVVIVQRDFDKWWHSLRTNIIDKVWSPRGQITGVVLPIVLGIRPVQALQKSICGFFGASSRAEMTDACARRAYDAYFKQVREMVPKERLLEYKLGDGWEPLCKFLELPVPDVPFPRTNDGDDLAKAAQQKRRAYVTFTVQRIKNGLPMQFFAGCFAMWMALTLASWWRSV

SEQ ID NO: 35966 - DNA, 1615 bp, Muscodor strobelii
  misc_feature: SGI EST ID NO. CUFF.85647.0
  misc_feature: Variant of the nucleotide sequence at SEQ ID NO 35964
aatatcctgatcaggatgattcagcccccgtcgattattcgacacagcattcgaatgaatgagatacgagtaagcggtgggattcagtattccaatccatcgtaaagacaccggccaagagcagaatctcactaccatcgagtctgatttaatctccacatattggtgtcaaaccacttttcatccatgccagagattccgttaaccacagcgggcctgcggcgtcgaggcgcgccctgacaataagctgagtgtcaggaaacatcgaatcgcgccgaccatgtcatataacctcgagagccccgcgagatgatgggctcttgctttcgacttgcatgttatgtttctcctgcagcttcgttattacgacttcagactacgttatcttgactaagtatctctgtattgcgatctcctatatacccagcttgatgcgatagtcatcgacgcttaccccaaatatcgcaacatcgaattttccgatcacgccatctgcaaggcaaccgttacacaatgacatcggtgcagaagacagatcaggaaggcctccaggtcatccacgcggccctttggcgcatgggaacaatgtccttggctagagcatacacgatactaggttacagcgtcaatcacggagttatcgacgacagtatgaaagcgaactggaacggattagaaaaggcatccgaagcaacatggcccggcattcttggatcaaaaccgcgcgctccatattccagagaagagtgggatgagttatgggggaaccaatatgatgttgtcacagacctggcgtctccgctcgtgccagagctgataaaggcctatcccaatgcaaaggtcgtcatcgttcagcgagactttgataagtggtggcatagcttgcgcacaaacatcattgacaaagtctggtcacctagaggccaaatcacgggcgtcgtgctacccatagtactaggcattcgtcctgtgcaggctctccagaagagcatctgcggcttcttcggcgctagctcaagagctgagatgactgatgcgtgcgcacgacgtgcatacgatgcgtacttcaagcaagtaagagaaatggtccccaaagagcgactactcgagtataagcttggcgatggctgggagccattgtgcaaattcctagaacttcccgttccagatgtcccgtttccacggacaaacgatggcgatgacctggcaaaggcggcgcaacagaagaggcgggcgtatgtcactttcaccgttcaaaggatcaagaacgggctacctatgcaattctttgcaggctgcttcgcaatgtggatggcgttaaccctcgcttcctggtggaggtctgtctaacgagtatctgtatttcttacacggcgttatgcgattgaggtagagaaaatagggtcataggaaactggatagattcggttcaattgattcatcagcccagtcgacatgggccacagccacctactgtttgatttcatcaatcccttcgacccctagcaaaacgtgattggtgtgcaattcagtcagcccaagtgttatatccggtcctccaagtcttccgataaccacccgatagcacaactgcaagatagcaagcactattttc

SEQ ID NO: 35967 - DNA, 1692 bp, Muscodor strobelii
  misc_feature: SGI cDNA ID NO. 572462
  misc_feature: Elevated expression when VOC is produced
  misc_feature: Encodes the peptide sequence at SEQ ID NO 35968
atgaagtcgtccaggatgagatttctagcaaacttacaagtattattccattttattgtcacgtccgggaaagcgggacccttggccgcctggtacccagacgccgaatcaaccgcgcagatcttcatgtacaatgagaccactggcaagatatactatagtctatgcaacagcaatggcgcgcccgtctacaccgcagatgactctgcaacgctcaatttcgattcaaattttgagcctatcaatgggaccagcttagcaggttgcagctacaagttcaacaatgaggggccactcaaaacatatctatggtatcagcttgcgacgggtcatattgggcaagtgaatctcgactgcgatgaatctagtggtctgtaccagcagccgaccacgtcgaacaactgggatattacgggttcgatcacgaatatggcagtaccaaagatcatgcaccagacccaattggcagcgttcaattttccattgcacgagcccaacgtcgttcagcgtgtgatattccaagacgaattatcgcgtcccgtttcaatgacttacacagtgggaggaacttggacgtatgatggcttcgtgactcaagacgggtttaccggagctgggttggctgctgttgcgaacggagaaagtctaacagtcgttacctcgacaaattggactgggcctcagcggattgatatctcaacgcttcagtcgaacgggacgtggagtataaatcagattccacagagtgtgcatctcaatacaacagctttgagcacctctaacccgtatataacgaacaacactaactggacaacatggaatgattacctaattaccgaagaagagataactccttggactctagatgcctacactgaaacagtcagccttggtctcagtcgaagcggcaataccggcgcactctccattttctatattgggcccgattctcttttacatcaggctcaacagatagacaatggcaaatggataatggccagccaacagaacacaacgatgtggccaaaatctgatgatcccgaagcccatttcggtgtggcgacgctcggagatgatatttcagtttactatctcgtagatggaaaaatgacggaagtctcctacatgaataatgcctggatacccgcaagcgatatttctacgtccaacaacacaattcccaacaccggaggtcagaatgatctgtcaacttcagccaagatcggaataggaataggtgtgagcattggcgcgctacttctcattgccatcgctgcatatttttactcgcgcaacaagcgttcaaaagccgaagcgtcaggagccaccaagacaatatctaataccgtctcgcataccgcctcatcagattcgcaccacgtgtcaggtgcataccaaacggagaactcttacagctacgggcagcgaggttggcagaaccaagaccaacatgattacggcaacagtaatagctggaatcaacgtacagacactcagtggggacttgaagagtatgagctacataataatcggcacgaactaccgagtatagacaagccgcaagagatggaagcaagaatgcccacggtcccactcacagggtctggtcagcatagaggcggacaaaatcaagacgctattttatcaacgtcgtacactaaaagtcacctatggggaacttcgcagagataa

SEQ ID NO: 35968 - protein, 563 aa, Muscodor strobelii
  misc_feature: SGI Peptide ID NO. 572462
  misc_feature (40)..(438): NCBI GI: 171683899 Blast Desc: protein product [Podospora anserina] gi|170941910|emb|CAP67562.1| protein product [Podospora anserina]
  misc_feature (28)..(436): NCBI GI: 116193101 Blast Desc: CHGG_06268 [Chaetomium globosum CBS 148.51] gi|88182181|gb|EAQ89649.1| CHGG_06268 [Chaetomium globosum CBS 148.51]
  misc_feature (36)..(434): NCBI GI: 46105162 Blast Desc: FG00209.1 [Gibberella zeae PH-1]
  misc_feature (2)..(434): NCBI GI: 171694469 Blast Desc: protein product [Podospora anserina] gi|170947183|emb|CAP73988.1| protein product [Podospora anserina]
  misc_feature (34)..(354): NCBI GI: 46122981 Blast Desc: FG05868.1 [Gibberella zeae PH-1]
  misc_feature (9)..(432): NCBI GI: 256723605 Blast Desc: NECHADRAFT_52084 [Nectria haematococca mpVI 77-13-4]
  misc_feature (7)..(437): NCBI GI: 149209797 Blast Desc: MGCH7_ch7g380 [Magnaporthe grisea 70-15] gi|86196335|gb|EAQ70973.1| MGCH7_ch7g380 [Magnaporthe grisea 70-15]
  misc_feature (7)..(435): NCBI GI: 39970375 Blast Desc: MGG_02654 [Magnaporthe grisea 70-15] gi|145017558|gb|EDK01921.1| MGG_02654 [Magnaporthe grisea 70-15]
  misc_feature (38)..(435): NCBI GI: 256730395 Blast Desc: NECHADRAFT_82851 [Nectria haematococca mpVI 77-13-4]
  misc_feature (28)..(380): NCBI GI: 85074805 Blast Desc: NCU00630 [Neurospora crassa OR74A] gi|28927583|gb|EAA36534.1| [Neurospora crassa OR74A]
  misc_feature: Useful for introducing or modulating the production of volatile compounds
MKSSRMRFLANLQVLFHFIVTSGKAGPLAAWYPDAESTAQIFMYNETTGKIYYSLCNSNGAPVYTADDSATLNFDSNFEPINGTSLAGCSYKFNNEGPLKTYLWYQLATGHIGQVNLDCDESSGLYQQPTTSNNWDITGSITNMAVPKIMHQTQLAAFNFPLHEPNVVQRVIFQDELSRPVSMTYTVGGTWTYDGFVTQDGFTGAGLAAVANGESLTVVTSTNWTGPQRIDISTLQSNGTWSINQIPQSVHLNTTALSTSNPYITNNTNWTTWNDYLITEEEITPWTLDAYTETVSLGLSRSGNTGALSIFYIGPDSLLHQAQQIDNGKWIMASQQNTTMWPKSDDPEAHFGVATLGDDISVYYLVDGKMTEVSYMNNAWIPASDISTSNNTIPNTGGQNDLSTSAKIGIGIGVSIGALLLIAIAAYFYSRNKRSKAEASGATKTISNTVSHTASSDSHHVSGAYQTENSYSYGQRGWQNQDQHDYGNSNSWNQRTDTQWGLEEYELHNNRHELPSIDKPQEMEARMPTVPLTGSGQHRGGQNQDAILSTSYTKSHLWGTSQR

SEQ ID NO: 35969 - DNA, 1714 bp, Muscodor strobelii
  misc_feature: SGI EST ID NO. CUFF.85584.0
  misc_feature: Variant of the nucleotide sequence at SEQ ID NO 35967
cgcgcccgtctacaccgcagatgactctgcaacgctcaatttcgattcaaattttgagcctatcaatgggaccagcttagcaggttgcagctacaagttcaacaatgaggggccactcaaaacatatctatggtatcagcttgcgacgggtcatattgggcaagtgaatctcgactgcgatgaatctagtggtctgtaccagcagccgaccacgtcgaacaactgggatattacgggttcgatcacgaatatggcagtaccaaagatcatgcaccagacccaattggcagcgttcaattttccattgcacgagcccaacgtcgttcagcgtgtgatattccaagacgaattatcgcgtcccgtttcaatgacttacacagtgggaggaacttggacgtatgatggcttcgtgactcaagacgggtttaccggagctgggttggctgctgttgcgaacggagaaagtctaacagtcgttacctcgacaaattggactgggcctcagcggattgatatctcaacgcttcagtcgaacgggacgtggagtataaatcagattccacagagtgtgcatctcaatacaacagctttgagcacctctaacccgtatataacgaacaacactaactggacaacatggaatgattacctaattaccgaagaagagataactccttggactctagatgcctacactgaaacagtcagccttggtctcagtcgaagcggcaataccggcgcactctccattttctatattgggcccgattctcttttacatcaggctcaacagatagacaatggcaaatggataatggccagccaacagaacacaacgatgtggccaaaatctgatgatcccgaagcccatttcggtgtggcgacgctcggagatgatatttcagtttactatctcgtagatggaaaaatgacggaagtctcctacatgaataatgcctggatacccgcaagcgatatttctacgtccaacaacacaattcccaacaccggaggtcagaatgatctgtcaacttcagccaagatcggaataggaataggtgtgagcattggcgcgctacttctcattgccatcgctgcatatttttactcgcgcaacaagcgttcaaaagccgaagcgtcaggagccaccaagacaatatctaataccgtctcgcataccgcctcatcagattcgcaccacgtgtcaggtgcataccaaacggagaactcttacagctacgggcagcgaggttggcagaaccaagaccaacatgattacggcaacagtaatagctggaatcaacgtacagacactcagtggggacttgaagagtatgagctacataataatcggcacgaactaccgagtatagacaagccgcaagagatggaagcaagaatgcccacggtcccactcacagggtctggtcagcatagaggcggacaaaatcaagacgctattttatcaacgtcgtacactaaaagtcacctatggggaacttcgcagagataagaacgactaaatacggagtttatagtcattctcattccgtaaaaggagttggttccggaaaagtcttggcctagatataaggaactcaaatatagtcagtaccagcatcagtgtccacttcaattactacagaacctgcatagagtattgcatgtgccaagccaagtgtttatctgtaacttgcatcttaacgaacgtacg

SEQ ID NO: 35970 - DNA, 4818 bp, Muscodor strobelii
  misc_feature: SGI cDNA ID NO. 572463
  misc_feature: Encodes the peptide sequence at SEQ ID NO 35971
atggagctgcaacggaaggatgggcgtgtccagagccaatccatcagtgctcggggcgaagatagatggcatcttgggcgagatgggcgagtgatgcgtgttgtcaaaaagcctgacacgaaactcaatcgagaaactgtgaagaacactaggcgagagcctgaccaaaaatctggacgagatgctagcacggcgcggactggcctctctactctttatggcctgcctgaagatgtggcgattgtcacagatgttataaatcagagtaacactaacggggcatttgcgagggaacctggaaaagatgctagcggaaaatatcgtaaggaacctgacggtctcgttactctttacgttcctgccgaaggcgtaaaagtcgtcgcagacttagtgtttgttcacggactccatggtggcccattcagcgcctggacgaaagacaatgatcaatctaccttctggccaaaggaattcctccctcgtgataaaaactttgcggatatgagaattcacacattcggatggcatcacgcatttttgcagaaatctcgagttgacctccagactgtttcgaggtatctactatcagcaatccaggatgcgcgggaaataccaaaagatagctcgacttctctctatttcgttggccatgacgtgggcgggctcattataaaagccgcctgtattcatgctgcttcgcaggcgctacaaaagagcatatttgagaggatcagaacactcgtattcctcggtgtccctcatgtcaatactcacatggaccaaatactagacaatttgttcctgaattgttacgatggtcgaaccttcgaggacccatcgtcttttgcgaaacaggtcaacgagagttttagacccattgcccggagattcagcctcatatctttttacgaaacaattccaacgtctcttggatcgaaaacactcctcattgtcgacatggaatctgcaattatgggattttccaacgaattgtcggcggagctaaacacagatcactggggcatgacacagcatggatccgcaggcagtccatggtatatcaccatccgggacatcttagccaccacgattgaacgccatagacaggagagaaaatactccagagaggacactgagatgtctccggtgctcttgagtgatgaggcccttgacaacttccatataatccgctcgtacgaaaccttgcaggcccagacccatcttcaacaacagggcacatgtcggtggttcactcggagctcagaaaagtttaaagagtggaaattaggaagtgataactcgacgcagaatactctcttatgggttacagggatcccaggctctggcaagacgatactttgctgccacatgataaaccatctcctcgaggatgcggaaccatccacggctgtgacatactttttctgtgatcgcgcaaatccgaaaactttgaagatagaaaccatgctagtgtctttggcagcacaacttagcaatggcttcgacagcaggtccgaaagtttccagtactatgtggattttctctccaatatgcgtgactcttcgggccaattggaccacgagtactttctcgacttgaccaaaagatataacaaggttttcattgttgtggatgggttggacgagtgcggtcaacacgcagtagagattgtaaaggtcctacgacaatttcaaaataccgccaacataaacattgcatttttcagtcgcaaggagccgctcatcaaggcggctctgggaccacaaggcagctatgtccggcttgaggcttaccccactgaacctgacctaaaactgtatatttgcaacgagttggatcggagacgaggatttgatggactcaaggacaggtttcccgacgtgcataggcaaataattcttgctctcgtgcagaaagcgcagcggtcctttcgttgggttgctcatcaactcgattacctggagaagctcccatctaacgacatacggcaggaagcgttatcaaatttgcccccttctatgtatagcagctacagaaatagcctggaaacaaatctcaatcgctatgacggcaaactacaggatgccattcgtagcgctctgcattggacggccttacagtacgacatgtcagcgaccgtcctgctcgtcgctgttgcactttccggtatgccgagctctttgtacgtcgatgatgagatatttagtactttcaacatttcggaatcttgccgagacttcctttcgttgtctgatggccgggttatgctcagccatttctctgtcaagcaatttcttaaacgtatcgaacacgacgaacgtttgattgccaaatttcgatatgatgaattacgggcttctttatcgctccttaatatcgctttgatattcttatcacagtcgtatcgcggagagctcgtttttaggtttggagcttcggatgaagttattgggatacttgcggacgagacaatcaaggaatttcggatatttgccgcttctttggtgctggagaatgtccatttggcagcagaaatatctctcccagaaggttgtcttgctctggatatggtccgccgatacgccttaacgatttgcccttcaaaatcacttccgacgaatctcattagggaggattttgccgtagatacagacaccgatatcgagagcgtaatctccgcagtgttcactgaagcctcgattagatcatctttatcatcagctcacagcgatgtacaaatattggccatccaacaactggctgatctcctttacaacgacaccgagatggctgcgctgtacccaattgctattgaaaagctcggtagcactcgcttccaacgaaatttcacgagacttctaaagcagtatagcaaacgtcttgaagatgaagccaaaagtgaattacaagtgcaggcttcgcggttcgttcggagatatgcacaacgtatatccctggaagtagtaaatatcgtcgcgccacacaccgagaaatatggactccgtgtcgagacagacgttgcatctaaagagaaagagctgagtaggtggatcgactcgcaaaactcggttcaaattaggaaccaggtccagccttcagtccagaatgcaataccggtactacaaagagacgagacagaagcgggaccgccagaagatgatgaccttctgtccgatgacgccgaatcggttgcgagcgagacggcagatacgtctattcgaagtcttcgtgaggtccaaaactttctggtgtcatcgcaagcgttttccattttacgcgtagatttcagacaatggctaagtcttgacactgacaaggaagcaaatggagaaaacaacattcacgactatggagataagaaattcccagaaatcgaacatgacatcgcgccctcatgtagattgccatcacgcaccatgaacatggccaaaatcatagtagagcgcattgcaggctgcaggttatcctgggcgccactctcgcagcctgaatatgaagtaaaaattggacatacaaggatctactcaaaatctaaggcgggccgatggttttacgacgatatatcaagtcctcttgcattgttattgttccctaaacttgcgacagcatgcacccgtgacgctagtgtacggctatcccatacaacgttagccaccgtcctcgtaacaatgtttggtttcaacacaaggctacgcaaggagatattgcggtctgatgagcgcgattcgctgacaacatgtactaacaaggagaccagcagtcttcaagctgacgagttttcaagagaatattttctgggtcaatgtaagggttcagatcctggaacgcccgccacgatgaccaaggaagcagttaagcctaatatttcttcaactccccatgctgctattgagcggcggaaacttatgcaagagctaaagacaatagaagtctggctcatattgatttcatggtcactgggcatcgcttcctatgttttcggcaagcgcttcatttttcttaccaatcctgttgaaaatctggttgtcggttatccatctgtgtacgcaattacaggttaccactaccaccacatgtttcttaccaaagaccaatggctttggcaagtcatcagacgaacttcgacttcagctcaaacatcgtcgcccaaaacgggacatctcttcgtgagcaccgacgtacaagccaacacgtctagagctcgttcagtagctcttggaaaagacgacttggaaacgttccacaacctacgaaacgcttatcagtgctgcggctctaagaaatggtacggctggaaaagacctatcggaataagattctataggttcgacagctttctctacaagagcccattaaacttgcactacatctcagttcatcgcgataaagagcggtatcccgaaaagaacgatcctgaatatccagagtacgagtaccaacccagaccctggccagagggggcattgtaccctagtaacgaagtttggcattactttgacaacccactagactgtggcacatccacagacctctgtagaatactcccagtcagagttgcgggcggtctcgcatcccgcgcgagggcctttggacttcacgtcgaagaggcgtactccgtctgggttatcttcatccctgcctgcatcgcggtccttggaacactggctgctacggcatggttcgtcccggtatggctcagtgaccacccgggagatctgcagaacgctacagttcccgttcagatcgtgtttactgttgtgggggctattgttcagattctcatatcgctcgtggtattcaggttctcgcaagtataa

SEQ ID NO: 35971 - protein, 1605 aa, Muscodor strobelii
  misc_feature: SGI Peptide ID NO. 572463
  misc_feature (109)..(801): NCBI GI: 255937083 Blast Desc: Pc13g11510 [Penicillium chrysogenum Wisconsin 54-1255] gi|211584188|emb|CAP92220.1| Pc13g11510 [Penicillium chrysogenum Wisconsin 54-1255]
  misc_feature (89)..(748): NCBI GI: 146323333 Blast Desc: NACHT and WD domain protein [Aspergillus fumigatus Af293] gi|129558342|gb|EAL92825.2| NACHT and WD domain protein [Aspergillus fumigatus Af293]
  misc_feature (89)..(748): NCBI GI: 159127877 Blast Desc: AFUB_041630 [Aspergillus fumigatus A1163]
  misc_feature (109)..(799): NCBI GI: 240109219 Blast Desc: CPC735_027240 [Coccidioides posadasii C735 delta SOWgp]
  misc_feature (40)..(799): NCBI GI: 171679241 Blast Desc: protein product [Podospora anserina] gi|170939246|emb|CAP64474.1| protein product [Podospora anserina]
  misc_feature (109)..(766): NCBI GI: 256733681 Blast Desc: NECHADRAFT_36093 [Nectria haematococca mpVI 77-13-4]
  misc_feature (48)..(798): NCBI GI: 46135873 Blast Desc: FG09452.1 [Gibberella zeae PH-1]
  misc_feature (109)..(768): NCBI GI: 261189011 Blast Desc: NACHT and WD domain-containing protein [Ajellomyces dermatitidis SLH14081] gi|239591922|gb|EEQ74503.1| NACHT and WD domain-containing protein [Ajellomyces dermatitidis SLH14081]
  misc_feature (98)..(748): NCBI GI: 116179186 Blast Desc: CHGG_00221 [Chaetomium globosum CBS 148.51] gi|88184518|gb|EAQ91986.1| CHGG_00221 [Chaetomium globosum CBS 148.51]
  misc_feature (109)..(768): NCBI GI: 240281426 Blast Desc: NACHT and WD40 domain-containing protein [Ajellomyces capsulatus H143]
MELQRKDGRVQSQSISARGEDRWHLGRDGRVMRVVKKPDTKLNRETVKNTRREPDQKSGRDASTARTGLSTLYGLPEDVAIVTDVINQSNTNGAFAREPGKDASGKYRKEPDGLVTLYVPAEGVKVVADLVFVHGLHGGPFSAWTKDNDQSTFWPKEFLPRDKNFADMRIHTFGWHHAFLQKSRVDLQTVSRYLLSAIQDAREIPKDSSTSLYFVGHDVGGLIIKAACIHAASQALQKSIFERIRTLVFLGVPHVNTHMDQILDNLFLNCYDGRTFEDPSSFAKQVNESFRPIARRFSLISFYETIPTSLGSKTLLIVDMESAIMGFSNELSAELNTDHWGMTQHGSAGSPWYITIRDILATTIERHRQERKYSREDTEMSPVLLSDEALDNFHIIRSYETLQAQTHLQQQGTCRWFTRSSEKFKEWKLGSDNSTQNTLLWVTGIPGSGKTILCCHMINHLLEDAEPSTAVTYFFCDRANPKTLKIETMLVSLAAQLSNGFDSRSESFQYYVDFLSNMRDSSGQLDHEYFLDLTKRYNKVFIVVDGLDECGQHAVEIVKVLRQFQNTANINIAFFSRKEPLIKAALGPQGSYVRLEAYPTEPDLKLYICNELDRRRGFDGLKDRFPDVHRQIILALVQKAQRSFRWVAHQLDYLEKLPSNDIRQEALSNLPPSMYSSYRNSLETNLNRYDGKLQDAIRSALHWTALQYDMSATVLLVAVALSGMPSSLYVDDEIFSTFNISESCRDFLSLSDGRVMLSHFSVKQFLKRIEHDERLIAKFRYDELRASLSLLNIALIFLSQSYRGELVFRFGASDEVIGILADETIKEFRIFAASLVLENVHLAAEISLPEGCLALDMVRRYALTICPSKSLPTNLIREDFAVDTDTDIESVISAVFTEASIRSSLSSAHSDVQILAIQQLADLLYNDTEMAALYPIAIEKLGSTRFQRNFTRLLKQYSKRLEDEAKSELQVQASRFVRRYAQRISLEVVNIVAPHTEKYGLRVETDVASKEKELSRWIDSQNSVQIRNQVQPSVQNAIPVLQRDETEAGPPEDDDLLSDDAESVASETADTSIRSLREVQNFLVSSQAFSILRVDFRQWLSLDTDKEANGENNIHDYGDKKFPEIEHDIAPSCRLPSRTMNMAKIIVERIAGCRLSWAPLSQPEYEVKIGHTRIYSKSKAGRWFYDDISSPLALLLFPKLATACTRDASVRLSHTTLATVLVTMFGFNTRLRKEILRSDERDSLTTCTNKETSSLQADEFSREYFLGQCKGSDPGTPATMTKEAVKPNISSTPHAAIERRKLMQELKTIEVWLILISWSLGIASYVFGKRFIFLTNPVENLVVGYPSVYAITGYHYHHMFLTKDQWLWQVIRRTSTSAQTSSPKTGHLFVSTDVQANTSRARSVALGKDDLETFHNLRNAYQCCGSKKWYGWKRPIGIRFYRFDSFLYKSPLNLHYISVHRDKERYPEKNDPEYPEYEYQPRPWPEGALYPSNEVWHYFDNPLDCGTSTDLCRILPVRVAGGLASRARAFGLHVEEAYSVWVIFIPACIAVLGTLAATAWFVPVWLSDHPGDLQNATVPVQIVFTVVGAIVQILISLVVFRFSQV

SEQ ID NO: 35972 - DNA, 4015 bp, Muscodor strobelii
  misc_feature: SGI EST ID NO. CUFF.85645.0
  misc_feature: Variant of the nucleotide sequence at SEQ ID NO 35970
tactacccttcttaacccccagtctcatgagtttccaactatgtccgcgaacctctactggcgacgtctaatcctctcaagaagcttccctcctgtctaatgagattacttcgtggtcacggactctcaatttctccttttcgaccctgagtaggcaaaagcctagaccccaaagctcaaacatcgacctgcatctactattcaattacctccttagatgatttcccgagaataagaacaattattgaagccgagccaccctgtgtgtcgaaatttcggccattataccgacaagtttcatgtgcaggaacggaacatatattcgcgtatttgttcgagtgtattgcacctaactttgtataacactccgggtgatcgacgatcatcgattctcgcgacctctagtcagaacaagcacctggacgctcgcagtgtgatttatttctcgatctcacgttaggcataatcaaagtcaggactccggcccgacggctggctgtactccatgatggggtcgagtaatacccgcggcagctattcctcagcagacagttattccgatataggctctgtctattcgtccgaagcaacgatgtcctcctacgccccgtcatcagcttactccttatcatcttatacctcaacgtcagtgaatggggatggattagcccgacagggtcgttcgtcgcttccctgcgaatttattggctatggtagttgtgacgtaactttcgggcttgatgaccccgaaagttggatcgaacatatagtaagcgtccatcttcggaaccaattgcctagaaaggccatctgttggttttgcgatcagtgggttttcgactataaggataagaatgcaaaaggagaccgccgtattaactttgacaaccggatgtaccacatacgggagcatattcttcaagaaggaaaaacgatcgatcaaagcaggcctgaccatcatttgaatgagcatctctacaaggctggattgatctcgacggatgcgtataattatgtgcgtcgaacatccgaggtgcctggaggaacgtggttatatgcccacgatgcagtaccaatggagctgcaacggaaggatgggcgtgtccagagccaatccatcagtgctcggggcgaagatagatggcatcttgggcgagatgggcgagtgatgcgtgttgtcaaaaagcctgacacgaaactcaatcgagaaactgtgaagaacactaggcgagagcctgaccaaaaatctggacgagatgctagcacggcgcggactggcctctctactctttatggcctgcctgaagatgtggcgattgtcacagatgttataaatcagagtaacactaacggggcatttgcgagggaacctggaaaagatgctagcggaaaatatcgtaaggaacctgacggtctcgttactctttacgttcctgccgaaggcgtaaaagtcgtcgcagacttagtgtttgttcacggactccatggtggcccattcagcgcctggacgaaagacaatgatcaatctaccttctggccaaaggaattcctccctcgtgataaaaactttgcggatatgagaattcacacattcggatggcatcacgcatttttgcagaaatctcgagttgacctccagactgtttcgaggtatctactatcagcaatccaggatgcgcgggaaataccaaaagatagctcgacttctctctatttcgttggccatgacgtgggcgggctcattataaaagccgcctgtattcatgctgcttcgcaggcgctacaaaagagcatatttgagaggatcagaacactcgtattcctcggtgtccctcatgtcaatactcacatggaccaaatactagacaatttgttcctgaattgttacgatggtcgaaccttcgaggacccatcgtcttttgcgaaacaggtcaacgagagttttagacccattgcccggagattcagcctcatatctttttacgaaacaattccaacgtctcttggatcgaaaacactcctcattgtcgacatggaatctgcaattatgggattttccaacgaattgtcggcggagctaaacacagatcactggggcatgacacagcatggatccgcaggcagtccatggtatatcaccatccgggacatcttagccaccacgattgaacgccatagacaggagagaaaatactccagagaggacactgagatgtctccggtgctcttgagtgatgaggcccttgacaacttccatataatccgctcgtacgaaaccttgcaggcccagacccatcttcaacaacagggcacatgtcggtggttcactcggagctcagaaaagtttaaagagtggaaattaggaagtgataactcgacgcagaatactctcttatgggttacagggatcccaggctctggcaagacgatactttgctgccacatgataaaccatctcctcgaggatgcggaaccatccacggctgtgacatactttttctgtgatcgcgcaaatccgaaaactttgaagatagaaaccatgctagtgtctttggcagcacaacttagcaatggcttcgacagcaggtccgaaagtttccagtactatgtggattttctctccaatatgcgtgactcttcgggccaattggaccacgagtactttctcgacttgaccaaaagatataacaaggttttcattgttgtggatgggttggacgagtgcggtcaacacgcagtagagattgtaaaggtcctacgacaatttcaaaataccgccaacataaacattgcatttttcagtcgcaaggagccgctcatcaaggcggctctgggaccacaaggcagctatgtccggcttgaggcttaccccactgaacctgacctaaaactgtatatttgcaacgagttggatcggagacgaggatttgatggactcaaggacaggtttcccgacgtgcataggcaaataattcttgctctcgtgcagaaagcgcagcggtcctttcgttgggttgctcatcaactcgattacctggagaagctcccatctaacgacatacggcaggaagcgttatcaaatttgcccccttctatgtatagcagctacagaaatagcctggaaacaaatctcaatcgctatgacggcaaactacaggatgccattcgtagcgctctgcattggacggccttacagtacgacatgtcagcgaccgtcctgctcgtcgctgttgcactttccggtatgccgagctctttgtacgtcgatgatgagatatttagtactttcaacatttcggaatcttgccgagacttcctttcgttgtctgatggccgggttatgctcagccatttctctgtcaagcaatttcttaaacgtatcgaacacgacgaacgtttgattgccaaatttcgatatgatgaattacgggcttctttatcgctccttaatatcgctttgatattcttatcacagtcgtatcgcggagagctcgtttttaggtttggagcttcggatgaagttattgggatacttgcggacgagacaatcaaggaatttcggatatttgccgcttctttggtgctggagaatgtccatttggcagcagaaatatctctcccagaaggttgtcttgctctggatatggtccgccgatacgccttaacgatttgcccttcaaaatcacttccgacgaatctcattagggaggattttgccgtagatacagacaccgatatcgagagcgtaatctccgcagtgttcactgaagcctcgattagatcatctttatcatcagctcacagcgatgtacaaatattggccatccaacaactggctgatctcctttacaacgacaccgagatggctgcgctgtacccaattgctattgaaaagctcggtagcactcgcttccaacgaaatttcacgagacttctaaagcagtatagcaaacgtcttgaagatgaagccaaaagtgaattacaagtgcaggcttcgcggttcgttcggagatat

SEQ ID NO: 35973 - DNA, 792 bp, Muscodor strobelii
  misc_feature: SGI cDNA ID NO. 572464
  misc_feature: Reduced expression when VOC is produced
  misc_feature: Encodes the peptide sequence at SEQ ID NO 35974
atgcctctaggcacttccacaccaccgccccaaatccctcccggcgcaacgccggccgagatcaaaaaatccttctacaacctctcaaaaacgcaccacccagacctacaccccatctcctcccgcgccaccgcatcaaagcgcttcatgcgcatatccgaagcctacgcaatcctctcccaccccacaaagcgtctcaaatacgaccgcgagcacttcccatccccctctcaccgacaccctaccggctcctactcatccacaaacccagcaggcggccgccccgcatcaggcctcagtcgtcgccgcgggacattcacaggacccccaccgtcttttttcagaaacggcacatatgggaattacggtgggaaaagaagggaagctcacgatgaatcgacgggcggtgcagagcacagagatacatcaagtaccggcgaggggacaggaggagcagggggaacatacggaggaatgggaccaggccaatcgcccttccacaacaccaacaccgatgtcccgcatttcgacaagcagtcacacgagcggacggggcataacttaaatagacaacgggccgccagacgagccgcctccgggaccttctccgaacgcgtcacgatcgaacccgagaagggcgtcggaggaatgtttctagtgattggcggcgtcctgttagtcgcagccctaggaccatttatgctattaagtttaagcagtggatcgagaacagaggtgaagagaccgaggccgaaggcgctgaaagagaaggatggcaagggggcggggtga

SEQ ID NO: 35974 - protein, 263 aa, Muscodor strobelii
  misc_feature: SGI Peptide ID NO. 572464
  misc_feature (11)..(69): Pfam Id: PF00226 Pfam Desc: DnaJ domain
  misc_feature (12)..(69): Pfam Id: PF00226 Pfam Desc: DnaJ domain
  misc_feature (16)..(243): NCBI GI: 256731713 Blast Desc: NECHADRAFT_61102 [Nectria haematococca mpVI 77-13-4]
  misc_feature (16)..(240): NCBI GI: 46136833 Blast Desc: FG09932.1 [Gibberella zeae PH-1]
  misc_feature (11)..(237): NCBI GI: 145610689 Blast Desc: MGG_00967 [Magnaporthe grisea 70-15] gi|145018077|gb|EDK02356.1| MGG_00967 [Magnaporthe grisea 70-15]
  misc_feature (11)..(235): NCBI GI: 171693725 Blast Desc: protein product [Podospora anserina] gi|170946811|emb|CAP73615.1| protein product [Podospora anserina]
  misc_feature (11)..(230): NCBI GI: 189196734 Blast Desc: conserved [Pyrenophora tritici-repentis Pt-1C-BFP] gi|187980584|gb|EDU47210.1| conserved [Pyrenophora tritici-repentis Pt-1C-BFP]
  misc_feature (12)..(225): NCBI GI: 169603832 Blast Desc: SNOG_04924 [Phaeosphaeria nodorum SN15] gi|111066195|gb|EAT87315.1| SNOG_04924 [Phaeosphaeria nodorum SN15]
  misc_feature (16)..(236): NCBI GI: 85100392 Blast Desc: NCU04305 [Neurospora crassa OR74A] gi|28922485|gb|EAA31715.1| [Neurospora crassa OR74A] gi|28950166|emb|CAD71034.1| [Neurospora crassa]
  misc_feature (12)..(230): NCBI GI: 212528516 Blast Desc: DnaJ domain protein [Penicillium marneffei ATCC 18224] gi|210073813|gb|EEA27900.1| DnaJ domain protein [Penicillium marneffei ATCC 18224]
  misc_feature (11)..(234): NCBI GI: 242766233 Blast Desc: DnaJ domain protein [Talaromyces stipitatus ATCC 10500] gi|218724327|gb|EED23744.1| DnaJ domain protein [Talaromyces stipitatus ATCC 10500]
  misc_feature (1)..(259): NCBI GI: 67528410 Blast Desc: AN4403.2 [Aspergillus nidulans FGSC A4] gi|40741130|gb|EAA60320.1| AN4403.2 [Aspergillus nidulans FGSC A4] gi|259482786|tpe|CBF77598.1| TPA: DnaJ domain protein FGSC
  misc_feature: Useful for introducing or modulating the production of volatile compounds
MPLGTSTPPPQIPPGATPAEIKKSFYNLSKTHHPDLHPISSRATASKRFMRISEAYAILSHPTKRLKYDREHFPSPSHRHPTGSYSSTNPAGGRPASGLSRRRGTFTGPPPSFFRNGTYGNYGGKRREAHDESTGGAEHRDTSSTGEGTGGAGGTYGGMGPGQSPFHNTNTDVPHFDKQSHERTGHNLNRQRAARRAASGTFSERVTIEPEKGVGGMFLVIGGVLLVAALGPFMLLSLSSGSRTEVKRPRPKALKEKDGKGAG

SEQ ID NO: 35975 - DNA, 3509 bp, Muscodor strobelii
  misc_feature: SGI EST ID NO. CUFF.86200.0
  misc_feature: Variant of the nucleotide sequence at SEQ ID NO 35973
caaccagactggtctctagtacgcaattccacttgcaacaacaagaacaataactttcgtcttttttctaccttgctccctcccccaccgacgtctcattcctcccaatgcagcagatttagaaatgaggaatgtccgtccgtccagctgtgtcattcttgacagcacccgctccgacacatcgccaatgcctcctctttctctatcctccactgctctctcaacgctccctctttcctccaacatctagcccttcgataacctcgccgagaagacgaagcaatgagcacaaccccagaattaggatcaactcccatgcctctaggcacttccacaccaccgccccaaagtacgacgaagcgatagacaatgcgcgcaaccactacgagacgctgaaagtccctcccggcgcaacgccggccgagatcaaaaaatccttctacaacctctcaaaaacgcaccacccagacctacaccccatctcctcccgcgccaccgcatcaaagcgcttcatgcgcatatccgaagcctacgcaatcctctcccaccccacaaagcgtctcaaatacgaccgcgagcacttcccatccccctctcaccgacaccctaccggctcctactcatccacaaacccagcaggcggccgccccgcatcaggcctcagtcgtcgccgcgggacattcacaggacccccaccgtcttttttcagaaacggcacatatgggaattacggtgggaaaagaagggaagctcacgatgaatcgacgggcggtgcagagcacagagatacatcaagtaccggcgaggggacaggaggagcagggggaacatacggaggaatgggaccaggccaatcgcccttccacaacaccaacaccgatgtcccgcatttcgacaagcagtcacacgagcggacggggcataacttaaatagacaacgggccgccagacgagccgcctccgggaccttctccgaacgcgtcacgatcgaacccgagaagggcgtcggaggaatgtttctagtgattggcggcgtcctgttagtcgcagccctaggaccatttatgctattaagtttaagcagtggatcgagaacagaggtgaagagaccgaggccgaaggcgctgaaagagaaggatggcaagggggcggggtgaacaagttacatatgagagcgcctttggatctcagctgcggccatacacacattaagttttcagacattgtatatatctgtacatatgcttgcgtacaaccatacatgaaaatttgtacgacaattttcatcaagacgatgtaagatgagtcgtgcctaatcaaggcacttcaacatcaggcagcatgtcatgggaagcaattatccattgtggtatttgcgtatgtctaaatctacagttcaagagtgggccattcgcaaagcagcaaaccaagcccatcttgtataaggtacacgatacgcctacgggtattagcgcctctttctccctatttttggtttctcatttcgtcacaaaagggacaagtagtctagaactttttatcatttcccacgcctgattattattgagtctttctatacaaactcatgggtgtggatcaagctgcttaagcctcgaaggtaaagctgacaccggccttgtgggcagactggtcgagcttctgggtgtcgaaggcgagaccgaggccgagggtgacgccctggcggaggagcacgttgtaggcaacggcggcgttaccgcggtcgttgatcttggcctatttcggggggtcattgtcagtgatacaggactccaaggtttgtacaaggtggtagagcggggagaagggaagaacaaagagatagcacaaaccttggcgaaggagacgctgtcgaggcgccacttgccggccagctcgaggctgacgttgttaccggccttggagttccagacagccttggtggaggtctcgacggccttgctgaccttctggtggtagctggcggcgaagacggagaggttgtcggtggcggtgatggcggcgctgtacttggcggcctggaagccaacggcggcgctgtagccggtgatggcggccttctggacgttgtagccggctgaggcaccggcgaggaagccgtcgtggccgacgacagcgtcgacggtggcggtggggcccttgagcaggtcgaagaaggcgcggccgtggaaagcggcctgcttgaaggcgaggttgaccttgacgttcttgttctgggtggcaggcaggaaggacagtatgctctcgaccttgagacccttggtgatgttgtcggtcagctcgatcttggtgtcgagggcgttggccgtgttccaggactgggtgagggtgaggcctgcgcggcggtaggacattagcaaccatgtggtatactccccgatattaacgaagaagctgatggtgttcacgccgttgccgccggggagccgaataggtccgatgaaagcactcctcgaaacttttcgagcagaaccatccttggacttcttgggcctgtgccggggccgcggctgtgaacttgactgggaaggctcttctgcagcagcactagtgccgggtgcagcaggcagggcagtagacgaggaagtgtctgattgtgaggttgaagaagattgagcagagcgagaacgcgaggtggttggtttaccatttgccttgtcagcgtacttggcctcggactgcggtgtagggagtacaggttagccatagacttcgagaagtataaggggtgagatttgggtgagagacatacagaggcagatgtggcgccgtcgtggctgctctttccggtgaccttgaagtcgacatcgttgggggtcttgttcttgacctcgatggcaccggcagaaaggtggtagaagtccttgttcaacagctgtacggcgcgatatgtcagtcatcgcaacaaacaacaaacgaaacatgcattggttggttgttggttataattgtcaattggccagctctcgtccgtcaacggacgcatcacagcttcgggcagtaaacctcgatttaccgtcggacaacagcatagaggcagcaagagcaatggcaactcacgtcgttggcacccttggcgatgtcagagaaggccgggatgggcagaggcttggctccgagatcctccttgatctcggccttgaggtccttgaagtcctgagagacagacatgttggatgatgtgatgatgtggtggctgaagaaatgcgccgaaagagaggatgctgatgatgggtatacgggatacggaaaaagcagtggagatgcaaaagagacaagatgagatgcagtcggcgccgtgagaagtcaaatggaaggtgtgtcgtggtcgtggtggatcgggtgagctattgccgcaagtcttgaaatttgtttgggtcaagctgctgtcgccaggccaatcagcgcccgtcgcgattcattgcattgacaatttcatcccggcagagacgtcgttgcttctgtagcgggttatgtcgggtcaagctgtg

SEQ ID NO: 35976 - DNA, 1230 bp, Muscodor strobelii
  misc_feature: SGI cDNA ID NO. 572465
  misc_feature: Encodes the peptide sequence at SEQ ID NO 35977
atgtctgtctctcaggacttcaaggacctcaaggccgagatcaaggaggatctcggagccaagcctctgcccatcccggccttctctgacatcgccaagggtgccaacgacctgttgaacaaggacttctaccacctttctgccggtgccatcgaggtcaagaacaagacccccaacgatgtcgacttcaaggtcaccggaaagagcagccacgacggcgccacatctgcctcttccgaggccaagtacgctgacaaggcaaatggtaaaccaaccacctcgcgttctcgctctgctcaatcttcttcaacctcacaatcagacacttcctcgtctactgccctgcctgctgcacccggcactagtgctgctgcagaagagccttcccagtcaagttcacagccgcggccccggcacaggcccaagaagtccaaggatggttctgctcgaaaagtttcgaggagtgctttcatcggacctattcggctccccggcggcaacggcgtgaacaccatcagcttcttcgttaatatcggggagtataccacatggttgctaatgtcctaccgccgcgcaggcctcaccctcacccagtcctggaacacggccaacgccctcgacaccaagatcgagctgaccgacaacatcaccaagggtctcaaggtcgagagcatactgtccttcctgcctgccacccagaacaagaacgtcaaggtcaacctcgccttcaagcaggccgctttccacggccgcgccttcttcgacctgctcaagggccccaccgccaccgtcgacgctgtcgtcggccacgacggcttcctcgccggtgcctcagccggctacaacgtccagaaggccgccatcaccggctacagcgccgccgttggcttccaggccgccaagtacagcgccgccatcaccgccaccgacaacctctccgtcttcgccgccagctaccaccagaaggtcagcaaggccgtcgagacctccaccaaggctgtctggaactccaaggccggtaacaacgtcagcctcgagctggccggcaagtggcgcctcgacagcgtctccttcgccaaggccaagatcaacgaccgcggtaacgccgccgttgcctacaacgtgctcctccgccagggcgtcaccctcggcctcggtctcgccttcgacacccagaagctcgaccagtctgcccacaaggccggtgtcagctttaccttcgaggcttaa

SEQ ID NO: 35977 - protein, 409 aa, Muscodor strobelii
  misc_feature: SGI Peptide ID NO. 572465
  misc_feature (24)..(402): Pfam Id: PF01459 Pfam Desc: Eukaryotic porin
  misc_feature (192)..(402): Pfam Id: PF01459 Pfam Desc: Eukaryotic porin
  misc_feature (26)..(89): Pfam Id: PF01459 Pfam Desc: Eukaryotic porin
  misc_feature (27)..(409): NCBI GI: 121706640 Blast Desc: outer mitochondrial membrane protein porin [Aspergillus clavatus NRRL 1] gi|119399729|gb|EAW10155.1| outer mitochondrial membrane protein porin [Aspergillus clavatus NRRL
  misc_feature (23)..(408): NCBI GI: 46136835 Blast Desc: FG09933.1 [Gibberella zeae PH-1]
  misc_feature (27)..(409): NCBI GI: 169773851 Blast Desc: [Aspergillus oryzae RIB40] gi|238491872|ref|XP_002377173.1| outer mitochondrial membrane protein porin [Aspergillus flavus NRRL3357] protein product outer
  misc_feature (27)..(409): NCBI GI: 70994716 Blast Desc: outer mitochondrial membrane protein porin [Aspergillus fumigatus Af293] gi|66849769|gb|EAL90097.1| outer mitochondrial membrane protein porin [Aspergillus fumigatus outer
  misc_feature (27)..(409): NCBI GI: 255949874 Blast Desc: Pc22g17950 [Penicillium chrysogenum Wisconsin 54-1255] gi|211592721|emb|CAP99083.1| Pc22g17950 [Penicillium chrysogenum Wisconsin 54-1255]
  misc_feature (193)..(409): NCBI GI: 85100389 Blast Desc: outer mitochondrial membrane protein porin [Neurospora crassa OR74A] gi|130684|sp|P07144.1|VDAC_NEUCR RecName: Full=Mitochondrial outer membrane protein porin protein product
  misc_feature (193)..(409): NCBI GI: 116197779 Blast Desc: outer mitochondrial membrane protein porin [Chaetomium globosum CBS 148.51] gi|88178324|gb|EAQ85792.1| outer mitochondrial membrane protein porin [Chaetomium globosum CBS
  misc_feature (190)..(409): NCBI GI: 156043295 Blast Desc: SS1G_10651 [Sclerotinia sclerotiorum 1980] gi|154695038|gb|EDN94776.1| SS1G_10651 [Sclerotinia sclerotiorum 1980]
  misc_feature (190)..(409): NCBI GI: 154316512 Blast Desc: outer mitochondrial membrane protein porin [Botryotinia fuckeliana B05.10] gi|150845987|gb|EDN21180.1| outer mitochondrial membrane protein porin [Botryotinia fuckeliana
  misc_feature (190)..(408): NCBI GI: 171693723 Blast Desc: protein product [Podospora anserina] gi|170946810|emb|CAP73614.1| protein product [Podospora anserina]
MSVSQDFKDLKAEIKEDLGAKPLPIPAFSDIAKGANDLLNKDFYHLSAGAIEVKNKTPNDVDFKVTGKSSHDGATSASSEAKYADKANGKPTTSRSRSAQSSSTSQSDTSSSTALPAAPGTSAAAEEPSQSSSQPRPRHRPKKSKDGSARKVSRSAFIGPIRLPGGNGVNTISFFVNIGEYTTWLLMSYRRAGLTLTQSWNTANALDTKIELTDNITKGLKVESILSFLPATQNKNVKVNLAFKQAAFHGRAFFDLLKGPTATVDAVVGHDGFLAGASAGYNVQKAAITGYSAAVGFQAAKYSAAITATDNLSVFAASYHQKVSKAVETSTKAVWNSKAGNNVSLELAGKWRLDSVSFAKAKINDRGNAAVAYNVLLRQGVTLGLGLAFDTQKLDQSAHKAGVSFTFEA

SEQ ID NO: 35978 - DNA, 2904 bp, Muscodor strobelii
  misc_feature: SGI EST ID NO. CUFF.86201.1
  misc_feature: Variant of the nucleotide sequence at SEQ ID NO 35976
atgaaattgtcaatgcaatgaatcgcgacgggcgctgattggcctggcgacagcagcttgacccaaacaaatttcaagacttgcggcaatagctcacccgatccaccacgaccacgacacaccttccatttgacttctcacggcgccgactgcatctcatcttgtctcttttgcatctccactgctttttccgtatcccgtatacccatcatcagcatcctctctttcggcgcatttcttcagccaccacatcatcacatcatccaacatgtctgtctctcaggacttcaaggacctcaaggccgagatcaaggaggatctcggagccaagcctctgcccatcccggccttctctgacatcgccaagggtgccaacgacctgttgaacaaggacttctaccacctttctgccggtgccatcgaggtcaagaacaagacccccaacgatgtcgacttcaaggtcaccggaaagagcagccacgacggcgccacatctgcctcttccgaggccaagtacgctgacaaggcaaatggcctcaccctcacccagtcctggaacacggccaacgccctcgacaccaagatcgagctgaccgacaacatcaccaagggtctcaaggtcgagagcatactgtccttcctgcctgccacccagaacaagaacgtcaaggtcaacctcgccttcaagcaggccgctttccacggccgcgccttcttcgacctgctcaagggccccaccgccaccgtcgacgctgtcgtcggccacgacggcttcctcgccggtgcctcagccggctacaacgtccagaaggccgccatcaccggctacagcgccgccgttggcttccaggccgccaagtacagcgccgccatcaccgccaccgacaacctctccgtcttcgccgccagctaccaccagaaggtcagcaaggccgtcgagacctccaccaaggctgtctggaactccaaggccggtaacaacgtcagcctcgagctggccggcaagtggcgcctcgacagcgtctccttcgccaaggccaagatcaacgaccgcggtaacgccgccgttgcctacaacgtgctcctccgccagggcgtcaccctcggcctcggtctcgccttcgacacccagaagctcgaccagtctgcccacaaggccggtgtcagctttaccttcgaggcttaagcagcttgatccacacccatgagtttgtatagaaagactcaataataatcaggcgtgggaaatgataaaaagttctagactacttgtcccttttgtgacgaaatgagaaaccaaaaatagggagaaagaggcgctaatacccgtaggcgtatcgtgtaccttatacaagatgggcttggtttgctgctttgcgaatggcccactcttgaactgtagatttagacatacgcaaataccacaatggataattgcttcccatgacatgctgcctgatgttgaagtgccttgattaggcacgactcatcttacatcgtcttgatgaaaattgtcgtacaaattttcatgtatggttgtacgcaagcatatgtacagatatatacaatgtctgaaaacttaatgtgtgtatggccgcagctgagatccaaaggcgctctcatatgtaacttgttcaccccgcccccttgccatccttctctttcagcgccttcggcctcggtctcttcacctctgttctcgatccactgcttaaacttaatagcataaatggtcctagggctgcgactaacaggacgccgccaatcactagaaacattcctccgacgcccttctcgggttcgatcgtgacgcgttcggagaaggtcccggaggcggctcgtctggcggcccgttgtctatttaagttatgccccgtccgctcgtgtgactgcttgtcgaaatgcgggacatcggtgttggtgttgtggaagggcgattggcctggtcccattcctccgtatgttccccctgctcctcctgtcccctcgccggtacttgatgtatctctgtgctctgcaccgcccgtcgattcatcgtgagcttcccttcttttcccaccgtaattcccatatgtgccgtttctgaaaaaagacggtgggggtcctgtgaatgtcccgcggcgacgactgaggcctgatgcggggcggccgcctgctgggtttgtggatgagtaggagccggtagggtgtcggtgagagggggatgggaagtgctcgcggtcgtatttgagacgctttgtggggtgggagaggattgcgtaggcttcggatatgcgcatgaagcgctttgatgcggtggcgcgggaggagatggggtgtaggtctgggtggtgcgtttttgagaggttgtagaaggatcttttggtttgttagctttgggttcggtatttacgtgatttgggaatggttgggaggtgtggtggttggagtatgggtttgagattgagacttgagtagggagattgtcgtactttttgatctcggccggcgttgcgccgggagggactttcagcgtctcgtagtggttgcgcgcattgtctatcgcttcgtcgtactttggggcggtggtgtggaagtgcctagaggcatgggagttgatcctaattctggggttgtgctcattgcttcgtcttctcggcgaggttatcgaagggctagatgttggaggaaagagggagcgttgagagagcagtggaggatagagaaagaggaggcattggcgatgtgtcggagcgggtgctgtcaagaatgacacagctggacggacggacattcctcatttctaaatctgctgcattgggaggaatgagacgtcggtgggggagggagcaaggtagaaaaaagacgaaagttattgttcttgttgttgcaagtggaattgcgtactagagaccagtctggttg

SEQ ID NO: 35979 - DNA, 1740 bp, Muscodor strobelii
  misc_feature: SGI cDNA ID NO. 572466
  misc_feature: Reduced expression when VOC is produced
  misc_feature: Encodes the peptide sequence at SEQ ID NO 35980
atgtgtggcatatttgcttgtcactgtcatcccgacgtccagaaattcaagccaacggctttgaagttagccaagcaaattcggcacagaggtcccgattggagtggcagcgttatctccaaaaacacgatcttgtgccatgaaagattgagtattgtgggcgtcgaatcgggtgcccaacctctcaccaaccaagatgataccattatcctcgccgtcaatggcgaaatctacaaccacagactgatcagaaaaaacttgaagaagccttaccacttcaagactgcatcagattgcgaggtcattattcccttgtatctggagtatggactcgatgcccctaagtacctcgatggcatgttctctttcgtgctgtacgacaagaacctcgaccgaaccatcgcagcccgcgaccccatcggtatcaccactctctatcagggatggtcgtctaaagaggatggagctacttacttcgcttcggagttgaagtgcctgcactccgtttgcgacgagattcgagcattccctccaggtcacatatatgacacaaagacgaaagagactaaacggtatttcgaaccgacatggtgggagaactcgagaattcctgagacacccttggatttgaagcttgttcgcgagactctggagaagtcggtcagaaagcgactcatggctgaagttccttacggagtgttgctttccggtggattagactcgagtctagtagcatccatcgcccagagagaaacgttgagactcaagaaggctgctttggctgctaaccccaacgccgaggtgacggaagatcctgacaagggcgagggtctcgtgggcatcgatgacgagaacgaactatcgaccgtcacctatctcccccaactcaactctttctctattggtttgcctggatcccctgacaacgaggccgcactcaaggtcgccaagttcctaggcacgaagcatcacgtcatgaccttcactattgaggacggtctcaacgcgctgtccgacgtcatcttccaccttgagaccttcgatgtcactactattcgagcctccaccccgatgtacttgttatcgaggaagatcaaggcaatgggtatcaagatggtactcagcggcgagggaagtgatgagatttttggaggctacctctacttccatgctgctcctgacaagaaggccttccacgaggagacggtccgccgtgtcaagaacttgcatcttgccgactgcttacgagccaacaagtcgacatctgcctggggtctcgaggcccgtgtaccattcttggataagcagtttctcgaggcctgcatgaacatcgaccctcaggagaagatgatcactcctgagcgcattgagaagtggctattgagaaaagcattcgatacctcggacgaccctagcgccgagccctacctaccagacgagattctgtggagacaaaaggagcagttctcggacggtgtcggttacggttggatcgatgcgctcaaagacaacgccgaaatgcacgtcacggacgagatgatgaagaaccccaagcctgagtggggcagcgatatcccagataccaaagaagcctactggtaccgaacgatgttcgacgagcatttccctcctcactgcgcatcaacagtggagcggtggacgccgacgtggtcgaagcaaactgaccccagtggtagagcgatctccacccataaccagaaatacaaagagactgcttag

SEQ ID NO: 35980 - protein, 579 aa, Muscodor strobelii
  misc_feature: SGI Peptide ID NO. 572466
  misc_feature (212)..(486): Pfam Id: PF00733 Pfam Desc: Asparagine synthase
  misc_feature (2)..(163): Pfam Id: PF00310 Pfam Desc: Glutamine amidotransferases class-II
  misc_feature (59)..(81): Pfam Id: PF00310 Pfam Desc: Glutamine amidotransferases class-II
  misc_feature (1)..(577): NCBI GI: 116197777 Blast Desc: conserved [Chaetomium globosum CBS 148.51] gi|88178323|gb|EAQ85791.1| conserved [Chaetomium globosum CBS 148.51]
  misc_feature (1)..(579): NCBI GI: 261352121 Blast Desc: asparagine synthetase [Verticillium albo-atrum VaMs.102]
  misc_feature (1)..(579): NCBI GI: 256732095 Blast Desc: [Nectria haematococca mpVI 77-13-4]
  misc_feature (1)..(575): NCBI GI: 39973769 Blast Desc: conserved [Magnaporthe grisea 70-15] gi|145018075|gb|EDK02354.1| conserved [Magnaporthe grisea 70-15]
  misc_feature (1)..(577): NCBI GI: 171693721 Blast Desc: protein product [Podospora anserina] gi|170946809|emb|CAP73613.1| protein product [Podospora anserina]
  misc_feature (1)..(579): NCBI GI: 46136837 Blast Desc: FG09934.1 [Gibberella zeae PH-1]
  misc_feature (1)..(577): NCBI GI: 154316510 Blast Desc: asparagine synthetase [Botryotinia fuckeliana B05.10] gi|150845986|gb|EDN21179.1| asparagine synthetase [Botryotinia fuckeliana B05.10]
  misc_feature (1)..(577): NCBI GI: 156043291 Blast Desc: SS1G_10649 [Sclerotinia sclerotiorum 1980] gi|154695036|gb|EDN94774.1| SS1G_10649 [Sclerotinia sclerotiorum 1980]
  misc_feature (1)..(575): NCBI GI: 85100385 Blast Desc: asparagine synthetase 2 [Neurospora crassa OR74A] gi|28922483|gb|EAA31713.1| asparagine synthetase 2 [Neurospora crassa OR74A] gi|28950164|emb|CAD71032.1| asparagine synthase
  misc_feature (1)..(579): NCBI GI: 242766221 Blast Desc: asparagine synthetase Asn2, [Talaromyces stipitatus ATCC 10500] gi|218724325|gb|EED23742.1| asparagine synthetase Asn2, [Talaromyces stipitatus ATCC 10500]
  misc_feature (1)..(571): SWISSPROT Homolog: EC 6.3.5.4 Asparagine synthase (glutamine-hydrolyzing)
  misc_feature: Useful for introducing or modulating the production of volatile compounds
MCGIFACHCHPDVQKFKPTALKLAKQIRHRGPDWSGSVISKNTILCHERLSIVGVESGAQPLTNQDDTIILAVNGEIYNHRLIRKNLKKPYHFKTASDCEVIIPLYLEYGLDAPKYLDGMFSFVLYDKNLDRTIAARDPIGITTLYQGWSSKEDGATYFASELKCLHSVCDEIRAFPPGHIYDTKTKETKRYFEPTWWENSRIPETPLDLKLVRETLEKSVRKRLMAEVPYGVLLSGGLDSSLVASIAQRETLRLKKAALAANPNAEVTEDPDKGEGLVGIDDENELSTVTYLPQLNSFSIGLPGSPDNEAALKVAKFLGTKHHVMTFTIEDGLNALSDVIFHLETFDVTTIRASTPMYLLSRKIKAMGIKMVLSGEGSDEIFGGYLYFHAAPDKKAFHEETVRRVKNLHLADCLRANKSTSAWGLEARVPFLDKQFLEACMNIDPQEKMITPERIEKWLLRKAFDTSDDPSAEPYLPDEILWRQKEQFSDGVGYGWIDALKDNAEMHVTDEMMKNPKPEWGSDIPDTKEAYWYRTMFDEHFPPHCASTVERWTPTWSKQTDPSGRAISTHNQKYKETA

SEQ ID NO: 35981 - DNA, 2412 bp, Muscodor strobelii
  misc_feature: SGI EST ID NO. CUFF.86216.3
  misc_feature: Variant of the nucleotide sequence at SEQ ID NO 35979
gcgcggtatagccaggacgaatatttcctgcgaaatttgactcgtgtcggtttctcttcttcatatttgtgttgccacgttaagattcgctcgcatcacacggacacacgactagctcttcctagtagacacgagtgccttcggaaaatcctctacgcccgtttaaaacgtctacatcttgcccttacgagccataagtgaaggcaaacagacaagatgtgtggcatatttgcttgtcactgtcatcccgacgtccagaaattcaagccaacggctttgaagttagccaagcaaattcggcacagaggtcccgattggagtggcagcgttatctccaaaaacacgatcttgtgccatgaaagattgagtattgtgggcgtcgaatcgggtgcccaacctctcaccaaccaagatgataccattatcctcgccgtcaatggcgaaatctacaaccacagactgatcagaaaaaacttgaagaagccttaccacttcaagactgcatcagattgcgaggtcattattcccttgtatctggagtatggactcgatgcccctaagtacctcgatggcatgttctctttcgtgctgtacgacaagaacctcgaccgaaccatcgcagcccgcgaccccatcggtatcaccactctctatcagggatggtcgtctaaagaggatggagctacttacttcgcttcggagttgaagtgcctgcactccgtttgcgacgagattcgagcattccctccaggtcacatatatgacacaaagacgaaagagactaaacggtatttcgaaccgacatggtgggagaactcgagaattcctgagacacccttggatttgaagcttgttcgcgagactctggagaagtcggtcagaaagcgactcatggctgaagttccttacggagtgttgctttccggtggattagactcgagtctagtagcatccatcgcccagagagaaacgttgagactcaagaaggctgctttggctgctaaccccaacgccgaggtgacggaagatcctgacaagggcgagggtctcgtgggcatcgatgacgagaacgaactatcgaccgtcacctatctcccccaactcaactctttctctattggtttgcctggatcccctgacaacgaggccgcactcaaggtcgccaagttcctaggcacgaagcatcacgtcatgaccttcactattgaggacggtctcaacgcgctgtccgacgtcatcttccaccttgagaccttcgatgtcactactattcgagcctccaccccgatgtacttgttatcgaggaagatcaaggcaatgggtatcaagatggtactcagcggcgagggaagtgatgagatttttggaggctacctctacttccatgctgctcctgacaagaaggccttccacgaggagacggtccgccgtgtcaagaacttgcatcttgccgactgcttacgagccaacaagtcgacatctgcctggggtctcgaggcccgtgtaccattcttggataagcagtttctcgaggcctgcatgaacatcgaccctcaggagaagatgatcactcctgagcgcattgagaagtggctattgagaaaagcattcgatacctcggacgaccctagcgccgagccctacctaccagacgagattctgtggagacaaaaggagcagttctcggacggtgtcggttacggttggatcgatgcgctcaaagacaacgccgaaatgcacgtcacggacgagatgatgaagaaccccaagcctgagtggggcagcgatatcccagataccaaagaagcctactggtaccgaacgatgttcgacgagcatttccctcctcactgcgcatcaacagtggagcggtggacgccgacgtggtcgaagcaaactgaccccagtggtagagcgatctccacccataaccagaaatacaaagagactgcttagactaaccagcatatgtctatgctcgagttagacattttgaggcatttccaaattgagactttatcatgataaaagataaaagttgatatccatgttggcgtctttccggtgctggagtggactggtgggatacggatagagatggaaaataccaacgaaaaatgtttaaagctccctcataggcaaaacaattgaacttttcaactatatgaatgatgactacccagtgatccatgtataatacaacagacaactttctaggtgcttaaccggtatagttttacttgaattccaactttacgtttgtatttgctgcatggaaataaactttgccattctgttagaattcagagttcccaaatagtccgccactttcaccatacttagttcaactctctgcgcgaagctttctaaacaaatgctgagatattatcaccatagacaaagagatattgg

SEQ ID NO: 35982 - DNA, 474 bp, Muscodor strobelii
  misc_feature: SGI cDNA ID NO. 572467
  misc_feature: Reduced expression when VOC is produced
  misc_feature: Encodes the peptide sequence at SEQ ID NO 35983
atgtcgctgtgcacgttgcgcctcggtgaggagagaaagcactggcgcaaagaccaccccttcggattctgggccagacctgtcaagaatgcccagggagtgctcgacctgaagacgtgggagtgtggcattcccggcaaggacaagaccatctgggagggcggtctgttcaagatgaccatgacattccccgacgagtaccctacgaaacctcctaagtgcaagtttacgcctccgctgttccaccccaatgtctacccctcaggcactgtctgcctctccatcctgaacgaggacgagggctggcgaccggccatcaccatcaagcagatcgccctcggcgtccaggatctgcttgacacccccaaccccgactctcccgcccaagccgaggcatacaatctgttcaagaaggacagagctgagtacgagaaacgcgtgcgacgtgaggttcgaaataacccatcaacctaa

SEQ ID NO: 35983 - protein, 157 aa, Muscodor strobelii
  misc_feature: SGI Peptide ID NO. 572467
  misc_feature (7)..(151): Pfam Id: PF00179 Pfam Desc: Ubiquitin-conjugating enzyme
  misc_feature (1)..(156): NCBI GI: 85101100 Blast Desc: ubiquitin-conjugating enzyme E2-18 kDa [Neurospora crassa OR74A] gi|28922630|gb|EAA31856.1| ubiquitin-conjugating enzyme E2-18 kDa [Neurospora crassa OR74A] ubiquitin--protein
  misc_feature (1)..(156): NCBI GI: 116197775 Blast Desc: conserved [Chaetomium globosum CBS 148.51] gi|88178322|gb|EAQ85790.1| conserved [Chaetomium globosum CBS 148.51]
  misc_feature (1)..(156): NCBI GI: 256732096 Blast Desc: [Nectria haematococca mpVI 77-13-4]
  misc_feature (1)..(156): NCBI GI: 212528522 Blast Desc: SUMO conjugating enzyme (UbcI), [Penicillium marneffei ATCC 18224] gi|210073816|gb|EEA27903.1| SUMO conjugating enzyme (UbcI), [Penicillium marneffei ATCC 18224]
  misc_feature (1)..(156): NCBI GI: 242766196 Blast Desc: SUMO conjugating enzyme (UbcI), [Talaromyces stipitatus ATCC 10500] gi|218724320|gb|EED23737.1| SUMO conjugating enzyme (UbcI), [Talaromyces stipitatus ATCC 10500]
  misc_feature (1)..(156): NCBI GI: 46136839 Blast Desc: FG09935.1 [Gibberella zeae PH-1]
  misc_feature (1)..(156): NCBI GI: 115398261 Blast Desc: ubiquitin-conjugating enzyme E2-18 kDa [Aspergillus terreus NIH2624] gi|114192913|gb|EAU34613.1| ubiquitin-conjugating enzyme E2-18 kDa [Aspergillus terreus
  misc_feature (1)..(156): NCBI GI: 261352120 Blast Desc: SUMO-conjugating enzyme ubc9 [Verticillium albo-atrum VaMs.102]
  misc_feature (1)..(156): NCBI GI: 62632239 Blast Desc: SUMO conjugating enzyme [Emericella nidulans] gi|259482790|tpe|CBF77606.1| TPA: Ubiquitin carrier protein (EC 6.3.2.-) [Source:UniProtKB/TrEMBL;Acc:Q52RL5] [Aspergillus FGSC
  misc_feature (1)..(156): NCBI GI: 145610685 Blast Desc: conserved [Magnaporthe grisea 70-15] gi|145018074|gb|EDK02353.1| conserved [Magnaporthe grisea 70-15]
  misc_feature (7)..(151): SWISSPROT Homolog: EC 6.3.2.19 Ubiquitin--protein ligase
  misc_feature: Useful for introducing or modulating the production of volatile compounds
MSLCTLRLGEERKHWRKDHPFGFWARPVKNAQGVLDLKTWECGIPGKDKTIWEGGLFKMTMTFPDEYPTKPPKCKFTPPLFHPNVYPSGTVCLSILNEDEGWRPAITIKQIALGVQDLLDTPNPDSPAQAEAYNLFKKDRAEYEKRVRREVRNNPST

SEQ ID NO: 35984 - DNA, 1768 bp, Muscodor strobelii
  misc_feature: SGI EST ID NO. CUFF.85782.0
  misc_feature: Variant of the nucleotide sequence at SEQ ID NO 35982
caagcctcaagcggagagcccatgtgaacgagggcattcgagagaaagcaagatcgctaacaactttgctttgattgcatgctcatgaactgggtgatgagtatccagaaagcttatgaggatacgtctctgcatggaaatgctaagctcaaagcaaaattccgatcattaaagcaagttataagcaagctctctcgcatctctctaagtcctttccttgttgctgagcactggggactgccagtgttatttcagctgctgtgcacaagttgaaacgccaactctttcatacttcactgtagtactcatttgttgccactcccaccattctccagcaggtgatcgggaagatttaagtcgcgtctcaacgctgacacctcattctttctctcttgctgatttgcaacctttcctgcggttgtgactgacttgcccgtcttcggcccaacgcacgccgcctctgcgcagcctcactttctagattcagcagcacctttctgcactgagcatccgcgccactgcagcatcgcagtcccatcaacatcccacgcgcgacaggtcgtactgtctacgttcgattatccagtcatcaccatgtcgctgtgcacgttgcgcctcggtgaggagagaaagcactggcgcaaagaccaccccttcggattctgggccagacctgtcaagaatgcccagggagtgctcgacctgaagacgtgggagtgtggcattcccggcaaggacaagaccatctgggagggcggtctgttcaagatgaccatgacattccccgacgagtaccctacgaaacctcctaagtgtccgtcgagcccaacgcttccccgtctacctcacgagagccagcgcaactaacttgagtctgcttataggcaagtttacgcctccgctgttccaccccaatgtctacccctcaggcactgtctgcctctccatcctgaacgaggacgagggctggcgaccggccatcaccatcaagcagatcgccctcggcgtccaggatctgcttgacacccccaaccccgactctcccgcccaagccgaggcatacaatctgttcaagaaggacagagctgagtacgagaaacgcgtgcgacgtgaggttcgaaataacccatcaacctaaagtcgcccaaccaaggcagtacgatgcgcactggggaacgatacaattgcacaagcagaaagcaggtctggagttcaggttttagaggataccaaggcgttactacacacggtcgtgctatgtccttgacgacatagcataatggcatttgagagtgagtcacgtcagattcgggctctactcgttcggtgatgatgtgtcagagattcaaggagacaagatgagcatcagtgatcctgatgacggtggatagcaactgtgtttactcattgcatcggcgaatgacgatactgcgttagtagctgcaaatgagaatgcgtgcgatctatgatgttcacatgctgccgagactgtttgtggttgtatagaaatgactgaattgctgtaacctgggacatgataataacctatgaagatcctacaagataaagatatagcggagatctgcatgatgcaagagtcccagtcccagtcccttcacgtgcatgtgcccacatggaatacttgcatataatcgtttctagtgaaccatgccaagacgctgcttcagtccacggtcccttacctcctgatttcgagcggctggaaagtaatgcgtattatgtgtggtgagttccgaaagcgagtcca

SEQ ID NO: 35985 - DNA, 546 bp, Muscodor strobelii
  misc_feature: SGI cDNA ID NO. 572468
  misc_feature: Encodes the peptide sequence at SEQ ID NO 35986
atgtcgctgtgcacgttgcgcctcggtgaggagagaaagcactggcgcaaagaccaccccttcggattctgggccagacctgtcaagaatgcccagggagtgctcgacctgaagacgtgggagtgtggcattcccggcaaggacaagaccatctgggagggcggtctgttcaagatgaccatgacattccccgacggcaataccctacgaaacctcctaagtgtccgtcgagcccaacgcttccccgtctacctcacgagagccagcgcaactaacttgagtctgcttataggcaagtttacgcctccgctgttccaccccaatgtctacccctcaggcactgtctgcctctccatcctgaacgaggacgagggctggcgaccggccatcaccatcaagcagatcgccctcggcgtccaggatctgcttgacacccccaaccccgactctcccgcccaagccgaggcatacaatctgttcaagaaggacagagctgagtacgagaaacgcgtgcgacgtgaggttcgaaataacccatcaacctaa

SEQ ID NO: 35986 - protein, 181 aa, Muscodor strobelii
  misc_feature: SGI Peptide ID NO. 572468
  misc_feature (7)..(175): Pfam Id: PF00179 Pfam Desc: Ubiquitin-conjugating enzyme
  misc_feature (99)..(175): Pfam Id: PF00179 Pfam Desc: Ubiquitin-conjugating enzyme
  misc_feature (7)..(65): Pfam Id: PF00179 Pfam Desc: Ubiquitin-conjugating enzyme
  misc_feature (1)..(178): NCBI GI: 85101100 Blast Desc: ubiquitin-conjugating enzyme E2-18 kDa [Neurospora crassa OR74A] gi|28922630|gb|EAA31856.1| ubiquitin-conjugating enzyme E2-18 kDa [Neurospora crassa OR74A] ubiquitin--protein
  misc_feature (1)..(178): NCBI GI: 116197775 Blast Desc: conserved [Chaetomium globosum CBS 148.51] gi|88178322|gb|EAQ85790.1| conserved [Chaetomium globosum CBS 148.51]
  misc_feature (1)..(180): NCBI GI: 256732096 Blast Desc: [Nectria haematococca mpVI 77-13-4]
  misc_feature (1)..(180): NCBI GI: 212528522 Blast Desc: SUMO conjugating enzyme (UbcI), [Penicillium marneffei ATCC 18224] gi|210073816|gb|EEA27903.1| SUMO conjugating enzyme (UbcI), [Penicillium marneffei ATCC 18224]
  misc_feature (1)..(180): NCBI GI: 242766196 Blast Desc: SUMO conjugating enzyme (UbcI), [Talaromyces stipitatus ATCC 10500] gi|218724320|gb|EED23737.1| SUMO conjugating enzyme (UbcI), [Talaromyces stipitatus ATCC 10500]
  misc_feature (1)..(180): NCBI GI: 115398261 Blast Desc: ubiquitin-conjugating enzyme E2-18 kDa [Aspergillus terreus NIH2624] gi|114192913|gb|EAU34613.1| ubiquitin-conjugating enzyme E2-18 kDa [Aspergillus terreus
  misc_feature (1)..(180): NCBI GI: 261352120 Blast Desc: SUMO-conjugating enzyme ubc9 [Verticillium albo-atrum VaMs.102]
  misc_feature (1)..(181): NCBI GI: 238838772 Blast Desc: SUMO conjugating enzyme [Microsporum canis CBS 113480]
  misc_feature (1)..(180): NCBI GI: 46136839 Blast Desc: FG09935.1 [Gibberella zeae PH-1]
  misc_feature (1)..(180): NCBI GI: 62632239 Blast Desc: SUMO conjugating enzyme [Emericella nidulans] gi|259482790|tpe|CBF77606.1| TPA: Ubiquitin carrier protein (EC 6.3.2.-) [Source:UniProtKB/TrEMBL;Acc:Q52RL5] [Aspergillus FGSC
  misc_feature (7)..(181): SWISSPROT Homolog: EC 6.3.2.19 Ubiquitin--protein ligase
MSLCTLRLGEERKHWRKDHPFGFWARPVKNAQGVLDLKTWECGIPGKDKTIWEGGLFKMTMTFPDGNTLRNLLSVRRAQRFPVYLTRASATNLSLLIGKFTPPLFHPNVYPSGTVCLSILNEDEGWRPAITIKQIALGVQDLLDTPNPDSPAQAEAYNLFKKDRAEYEKRVRREVRNNPST

SEQ ID NO: 35987 - DNA, 1768 bp, Muscodor strobelii; identical to SEQ ID NO: 35984
  misc_feature: SGI EST ID NO. CUFF.85782.0
  misc_feature: Variant of the nucleotide sequence at SEQ ID NO 35985

SEQ ID NO: 35988 - DNA, 1008 bp, Muscodor strobelii
  misc_feature: SGI cDNA ID NO. 572469
  misc_feature: Encodes the peptide sequence at SEQ ID NO 35989
atggagggcgaaaaggccgcagcagctggcgacgctgttaagcccacaactgatgtcccgcatccagagcctccggcaaaagcccacatcgctgaggtcgacgatgcagctgacccagacgaggatgatctggatgacttagacgacatgctcgacgatttctcttcagtcaagatacaaccgggcacaaaatctactactactcagaaaagctctgcagatacaactgctgcagctactagctctactagccctccagtaccgcaagctcaaccaaccgatgaagagttttccgaggaggacttccagaaacaactacaggccggcatggcagaactgatgggcgacttggaggggtcgccagatctgcaggcccaatttgagaacatattcaaaggactcggcgcatcatctgcaccggacgcaaatgagccagctgcgacatcttcaaaatccaaatctgttgccggcatggcagaagagctcagccaagacgccactttccaagaaaccatcaagcggacaatggaacggatgcaaaactcaggcgatcaggcaaccgcggctgcagctgctgagggctccgaagacgactttattgcagagatgatgaaggctatgaaagacatacctggtggcgaaggaggcgaggaggatttctccaagctcttgatgggcatgatggaacagctcactaataaagaaatcctatatgagccgatgaaggagctgcatgagaaattcccggcatggatggagaagaacaaggagacgttgtcgaaagacgacctgaagcgataccaggaacaacaatctctagtcaaggaaatcgttaccaagttcgaagagcccaaatactctgattcgaacgcgcaggaccgggaatatgtcgtggagaggatgcagaagatgcaagctgctggttcgccaccccatgacctagtcggtgacatgccatcggccaaagaagtacttgatgcacccgacgaatcttgtgcaccgcaataa

SEQ ID NO: 35989 - protein, 335 aa, Muscodor strobelii
  misc_feature: SGI Peptide ID NO. 572469
  misc_feature (94)..(335): Pfam Id: PF04614 Pfam Desc: Pex19 protein family
  misc_feature (214)..(319): Pfam Id: PF04614 Pfam Desc: Pex19 protein family
  misc_feature (77)..(335): NCBI GI: 156043287 Blast Desc: SS1G_10647 [Sclerotinia sclerotiorum 1980] gi|154695034|gb|EDN94772.1| SS1G_10647 [Sclerotinia sclerotiorum 1980]
  misc_feature (102)..(335): NCBI GI: 116197773 Blast Desc: CHGG_07042 [Chaetomium globosum CBS 148.51] gi|88178321|gb|EAQ85789.1| CHGG_07042 [Chaetomium globosum CBS 148.51]
  misc_feature (75)..(335): NCBI GI: 154316506 Blast Desc: BC1G_04184 [Botryotinia fuckeliana B05.10] gi|150845984|gb|EDN21177.1| BC1G_04184 [Botryotinia fuckeliana B05.10]
  misc_feature (49)..(334): NCBI GI: 39973765 Blast Desc: MGG_00971 [Magnaporthe grisea 70-15] gi|145018073|gb|EDK02352.1| MGG_00971 [Magnaporthe grisea 70-15]
  misc_feature (54)..(335): NCBI GI: 256731714 Blast Desc: NECHADRAFT_40805 [Nectria haematococca mpVI 77-13-4]
  misc_feature (97)..(335): NCBI GI: 46136841 Blast Desc: FG09936.1 [Gibberella zeae PH-1]
  misc_feature (90)..(335): NCBI GI: 85101095 Blast Desc: NCU04301 [Neurospora crassa OR74A] gi|28922629|gb|EAA31855.1| conserved [Neurospora crassa OR74A] gi|28950162|emb|CAD71030.1| related to PEX19 protein [Neurospora
  misc_feature (50)..(335): NCBI GI: 261352119 Blast Desc: Pex19 family protein [Verticillium albo-atrum VaMs.102]
  misc_feature (97)..(335): NCBI GI: 171693789 Blast Desc: protein product [Podospora anserina] gi|170946843|emb|CAP73647.1| protein product [Podospora anserina]
  misc_feature (54)..(335): NCBI GI: 189195650 Blast Desc: peroxin [Pyrenophora tritici-repentis Pt-1C-BFP] gi|187980042|gb|EDU46668.1| peroxin [Pyrenophora tritici-repentis Pt-1C-BFP]
MEGEKAAAAGDAVKPTTDVPHPEPPAKAHIAEVDDAADPDEDDLDDLDDMLDDFSSVKIQPGTKSTTTQKSSADTTAAATSSTSPPVPQAQPTDEEFSEEDFQKQLQAGMAELMGDLEGSPDLQAQFENIFKGLGASSAPDANEPAATSSKSKSVAGMAEELSQDATFQETIKRTMERMQNSGDQATAAAAAEGSEDDFIAEMMKAMKDIPGGEGGEEDFSKLLMGMMEQLTNKEILYEPMKELHEKFPAWMEKNKETLSKDDLKRYQEQQSLVKEIVTKFEEPKYSDSNAQDREYVVERMQKMQAAGSPPHDLVGDMPSAKEVLDAPDESCAPQ

SEQ ID NO: 35990 - DNA, 2560 bp, Muscodor strobelii
  misc_feature: SGI EST ID NO. CUFF.85875.0
  misc_feature: Variant of the nucleotide sequence at SEQ ID NO 35988
cttttttcttacatttggatattctgaatcctgattgtctatgactattgctctgtcataatcactcgctatatcagtattgattgcgctacatatttgaaactggtagacaacacatttgaccgaaccccaggcttaccctagcgtctctataaccttcctgcggctgacgatataccgcaacgcggggacagtggggatcacggtatctcctggttggtagaagatcacggcgtacctttaaagcctctcattgtgctgtgatcttgccagcatctagttatctacagacttgtgagacaaatggagggcgaaaaggccgcagcagctggcgacgctgttaagcccacaactgatgtcccgcatccagagcctccggcaaaagcccacatcgctgaggtcgacgatgcagctgacccagacgaggatgatctggatgacttagacgacatgctcgacgatttctcttcagtcaagatacaaccgggcacaaaatctactactactcagaaaagctctgcagatacaactgctgcagctactagctctactagccctccagtaccgcaagctcaaccaaccgatgaagagttttccgaggaggacttccagaaacaactacaggccggcatggcagaactgatgggcgacttggaggggtcgccagatctgcaggcccaatttgagaacatattcaaaggactcggcgcatcatctgcaccggacgcaaatgagccagctgcgacatcttcaaaatccaaatctgttgccggcatggcagaagagctcagccaagacgccactttccaagaaaccatcaagcggacaatggaacggatgcaaaactcaggcgatcaggcaaccgcggctgcagctgctgagggctccgaagacgactttattgcagagatgatgaaggctatgaaagacatacctggtggcgaaggaggcgaggaggatttctccaagctcttgatgggcatgatggaacagctcactaataaagaaatcctatatgagccgatgaaggagctgcatgagaaattcccggcatggatggagaagaacaaggagacgttgtcgaaagacgacctgaagcgataccaggaacaacaatctctagtcaaggaaatcgttaccaagttcgaagagcccaaatactctgattcgaacgcgcaggaccgggaatatgtcgtggagaggatgcagaagatgcaagctgctggttcgccaccccatgacctagtcggtgacatgccatcggccaaagaagtacttgatgcacccgacgaatcttgtgcaccgcaataaaccaacatagacgcaaattcgtgggcgaaatatatacgcatttgcattgagaatcttctaccactgatttgtgatcagaaagtatatacgaagtgccaatcatagaacgccatggatatcaacaaagtgtaccaacgcctgtaacaacatcttgaccctagcctggccagtaaaccaaatgaacgccatcaaatgcacacaccctgatactgggtctataaaacacgtatgcagtcctacgataagtccatgtcatcctatgacatgtccatatcactacaggggtgaaaccctccatgcccgccttccatgcccatcatgtccataaagagggcatcgtagtcttcatcatccgacccatagaacgaccctggccttgacggttgttgcggctgtgattgtggctgtgaagtggaattagactgaagcatggataccatagcatccatctcagcctcttcatccttggctatggagtcaaccatcatgtcgtcaggctcctcgttcacctcctcgggaatgtcctctagatcgtcttcatagacaattccgttgatgtctgcgtcattgtcttgtcgccgttgcttgtttgtcatattccattctcgcattagtgactgttatggctgttcagtaaatgtgagatggtagaaaggcgattggtggttaatacctcttgatcaccgcccctgtgctcccacttcctctggtctgatctttgtcggacgttcttgaggaatagtgatcgccgcccttcttgtgctttttcgcgattcacgcgtaaggggtttggtttggtgtcgcgcgttgcgtactttgattttgttggaggaccccggattggtgatgagagtgtgtcgcgtcttggaagcgtgttcatgtcgcgtggcgacagcggagatgactgtgaggcgcggatgggggaagaggacagtggtgaggagactgtcggccggtgtggcgtggtgaagtcgaagttgaagattgggggcgccatcgtggatagcattgcgcttggtggtggactaatgacgggagctgatggtgggggaagtggcgacaggaaggaaggaggaaggtaactgtcaatcctagagtggtgcttggtggctctgcaggatcgtctgattaacgtttgagcagacacgagcacgcggatttcgatgtagttgttgcagaaagacatagacaaaagagtaagacagatgatggcgaagagggctgcttctaaagagacgcgctctgccac

SEQ ID NO: 35991 - DNA, 684 bp, Muscodor strobelii
  misc_feature: SGI cDNA ID NO. 572470
  misc_feature: Reduced expression when VOC is produced
  misc_feature: Encodes the peptide sequence at SEQ ID NO 35992
atggcgcccccaatcttcaacttcgacttcaccacgccacaccggccgacagtctcctcaccactgtcctcttcccccatccgcgcctcacagtcatctccgctgtcgccacgcgacatgaacacgcttccaagacgcgacacactctcatcaccaatccggggtcctccaacaaaatcaaagtacgcaacgcgcgacaccaaaccaaaccccttacgcgtgaatcgcgaaaaagcacaagaagggcggcgatcactattcctcaagaacgtccgacaaagatcagaccagaggaagtgggagcacaggggcggtgatcaagagtcactaatgcgagaatggaatatgacaaacaagcaacggcgacaagacaatgacgcagacatcaacggaattgtctatgaagacgatctagaggacattcccgaggaggtgaacgaggagcctgacgacatgatggttgactccatagccaaggatgaagaggctgagatggatgctatggtatccatgcttcagtctaattccacttcacagccacaatcacagccgcaacaaccgtcaaggccagggtcgttctatgggtcggatgatgaagactacgatgccctctttatggacatgatgggcatggaaggcgggcatggagggtttcacccctgtagtgatatggacatgtcatag

SEQ ID NO: 35992 - protein, 227 aa, Muscodor strobelii
  misc_feature: SGI Peptide ID NO. 572470
  misc_feature (10)..(210): NCBI GI: 261352118 Blast Desc: conserved [Verticillium albo-atrum VaMs.102]
  misc_feature (3)..(209): NCBI GI: 116197771 Blast Desc: [Chaetomium globosum CBS 148.51] gi|88178320|gb|EAQ85788.1| [Chaetomium globosum CBS 148.51]
  misc_feature (25)..(207): NCBI GI: 169604240 Blast Desc: SNOG_05131 [Phaeosphaeria nodorum SN15] gi|111066402|gb|EAT87522.1| SNOG_05131 [Phaeosphaeria nodorum SN15]
  misc_feature (8)..(178): NCBI GI: 171693787 Blast Desc: protein product [Podospora anserina] gi|170946842|emb|CAP73646.1| protein product [Podospora anserina]
  misc_feature (61)..(127): NCBI GI: 28950161 Blast Desc: [Neurospora crassa]
  misc_feature (61)..(127): NCBI GI: 85101091 Blast Desc: NCU04300 [Neurospora crassa OR74A] gi|28922628|gb|EAA31854.1| [Neurospora crassa OR74A]
  misc_feature (49)..(114): NCBI GI: 156043285 Blast Desc: [Sclerotinia sclerotiorum 1980] gi|154695033|gb|EDN94771.1| [Sclerotinia sclerotiorum 1980]
  misc_feature (49)..(104): NCBI GI: 189195652 Blast Desc: conserved [Pyrenophora tritici-repentis Pt-1C-BFP] gi|187980043|gb|EDU46669.1| conserved [Pyrenophora tritici-repentis Pt-1C-BFP]
  misc_feature (56)..(141): NCBI GI: 154316504 Blast Desc: [Botryotinia fuckeliana B05.10] gi|150845983|gb|EDN21176.1| [Botryotinia fuckeliana B05.10]
  misc_feature: Useful for introducing or modulating the production of volatile compounds
MAPPIFNFDFTTPHRPTVSSPLSSSPIRASQSSPLSPRDMNTLPRRDTLSSPIRGPPTKSKYATRDTKPNPLRVNREKAQEGRRSLFLKNVRQRSDQRKWEHRGGDQESLMREWNMTNKQRRQDNDADINGIVYEDDLEDIPEEVNEEPDDMMVDSIAKDEEAEMDAMVSMLQSNSTSQPQSQPQQPSRPGSFYGSDDEDYDALFMDMMGMEGGHGGFHPCSDMDMS

SEQ ID NO: 35993 - DNA, 2568 bp, Muscodor strobelii
  misc_feature: SGI EST ID NO. CUFF.85876.1
  misc_feature: Variant of the nucleotide sequence at SEQ ID NO 35991
gtggcagagcgcgtctctttagaagcagccctcttcgccatcatctgtcttactcttttgtctatgtctttctgcaacaactacatcgaaatccgcgtgctcgtgtctgctcaaacgttaatcagacgatcctgcagagccaccaagcaccactctaggattgacagttaccttcctccttccttcctgtcgccacttcccccaccatcagctcccgtcattagtccaccaccaagcgcaatgctatccacgatggcgcccccaatcttcaacttcgacttcaccacgccacaccggccgacagtctcctcaccactgtcctcttcccccatccgcgcctcacagtcatctccgctgtcgccacgcgacatgaacacgcttccaagacgcgacacactctcatcaccaatccggggtcctccaacaaaatcaaagtacgcaacgcgcgacaccaaaccaaaccccttacgcgtgaatcgcgaaaaagcacaagaagggcggcgatcactattcctcaagaacgtccgacaaagatcagaccagaggaagtgggagcacaggggcggtgatcaagagtcactaatgcgagaatggaatatgacaaacaagcaacggcgacaagacaatgacgcagacatcaacggaattgtctatgaagacgatctagaggacattcccgaggaggtgaacgaggagcctgacgacatgatggttgactccatagccaaggatgaagaggctgagatggatgctatggtatccatgcttcagtctaattccacttcacagccacaatcacagccgcaacaaccgtcaaggccagggtcgttctatgggtcggatgatgaagactacgatgccctctttatggacatgatgggcatggaaggcgggcatggagggtttcacccctgtagtgatatggacatgtcataggatgacatggacttatcgtaggactgcatacgtgttttatagacccagtatcagggtgtgtgcatttgatggcgttcatttggtttactggccaggctagggtcaagatgttgttacaggcgttggtacactttgttgatatccatggcgttctatgattggcacttcgtatatactttctgatcacaaatcagtggtagaagattctcaatgcaaatgcgtatatatttcgcccacgaatttgcgtctatgttggtttattgcggtgcacaagattcgtcgggtgcatcaagtacttctttggccgatggcatgtcaccgactaggtcatggggtggcgaaccagcagcttgcatctgtactcaaatgttaacatcaacgctttctctccatttcgaaataaaaccggtctaagcttaccttctgcatcctctccacgacatattcccggtcctgcgcgttcgaatcagagtatttgggctcttcgaacttggtaacgatttccttgactagagattgttgttcctggtatcgcttcaggtcgtctttcgacaacgtctccttgttcttctccatccatgccgggaatttctcatgcagctccttcatcggctcatataggatttctttattagtgagctgttccatcatgcccatcaagagcttggagaaatcctcctcgcctccttcgccaccaggtatgtctttcatagccttcatcatctctgcaataaagtcgtcttcggagccctcagcagctgcagccgcggttgcctgatcgcctgagttttgcatccgttccattgtccgcttgatggtttcttggaaagtggcgtcttggctgagctcttctgccatgccggcaacagatttggattttgaagatgtcgcagctggctcatttgcgtccggtgcagatgatgcgccgagtcctttgaatatgttctcaaattgggcctgcagatctggcgacccctccaagtcgcccatcagttctgccatgccggcctgtagttgtttctggaagtcctcctcggaaaactcttcatcggttggttgagcttgcggtactggagggctagtagagctagtagctgcagcagttgtatctgcagagcttttctgagtagtagtagattttgtgcccggttgtatcttgactgaagagaaatcgtcgagcatgtcgtctaagtcatccagatcatcctcgtctgggtcagctgcatcgtcgacctcagcgatgtgggcttttgccggaggctctggatgcgggacatcagttgtgggcttaacagcgtcgccagctgctgcggccttttcgccctccatttgtctcacaagtctgtagataactagatgctggcaagatcacagcacaatgagaggctttaaaggtacgccgtgatcttctaccaaccaggagataccgtgatccccactgtccccgcgttgcggtatatcgtcagccgcaggaaggttatagagacgctagggtaagcctggggttcggtcaaatgtgttgtctaccagtttcaaatatgtagcgcaatcaatactgatatagcgagtgattatgacagagcaatagtcatagacaatcaggattcagaatatccaaatgtaagaaaaaag

SEQ ID NO: 35994 - DNA, 1818 bp, Muscodor strobelii
  misc_feature: SGI cDNA ID NO. 572471
  misc_feature: Reduced expression when VOC is produced
  misc_feature: Encodes the peptide sequence at SEQ ID NO 35995
atgaagtctctgtctttcgcctccctgggccgatttgctagcaaaaatccctggacgtgtacgaattgccgcacatcactcataaaacatcccaaactaccacgatcctacccccgacagtattcctctaatgcctcgagccactccaacaaacgaacatccagatcaacgaagtcgagagtcaccattcttgccgcatctgccactggcgctactggcgttggtcttctagcctttacagatgatattaagtacggatacgatgcgaccgaacgagcgggacgagtagccggggctctgttcttatgcatcaacgactatcgaacttccttgaaccagcgcgagaagattgaagataccgaggaacaagaaacgatactcaaacaatgtcacaagagatgtgctcttcgaacattggaagtgttggagaagaatggcggcattttcattaagctggggcaacatctcagtgccatgacctaccttctcccgcacgaatggacgagcaccttcatccccttacaggacaaatgtcctgtgtcctcatacgaatcgatcgaagaaatgttccgaagagacactggcgaagagcttagtgcatacttctccgagtttgctcacgaaccgataggagcagcgtcgcttgctcaagtccatctagcgactgtgaaggaaagcggtcaaaaggtcgctgtcaaggtccaacatccaggcttggctcagtgggcacccctggacttggccctgaccaaatacacattctccgtgctaaagcgattcttcccggaatacgacttggagtggttgtcgtcggaaatggaggtctcgttaccgcaagaactggattttcaattggaggcggcgaacgcaatccgaacgaagcaacatttcgagcaaaagatgcctaacctacccctcgtcatacctgatgtgatctgggcaaagaagagaattctggtcatggctaatgaatcaggaaaccgtatggacgacctcgactatttggactcaaacggcatcgatcgtgacgaagtctcagctacactagcacatatatttaatgagatgatcttcggcaaaaacgcgccactacactgcgatccacacggaggaaacattgcgatccgaaaacgagcagagaagaccaaggcgggatacaacttcgagatcataatgtacgaccacggcctctatcgagacattcccgagcacctccagcgctcctacgctaagatgtggctcgcagtcatagacggcgacatggacgccatgaaacagcatgcacacgatgtagcaggagtgacagagcaacaattcccgctattcgcttccgccatcacaggacgcgattacaccgtcgtcagctcttcaataatgaaagaccgctcggaggaagaaaagaaaacaatgggcgacgcgttacaagaaggacttctctccgaccttgtaacgatgctgggtcaagttccgcgaatcatattgctgatcctcaaaacgaacgaccttacacgaagtctggacgagagtctacatacacgacaaggacctatgaggacgtttcttattctcgcgcattattgcgcgagaacggtgctgagggagcagattgaagagatcaggaatagaccggggagtttactcgcccctgggaatgcggtcaggtttgtcgccgcgtggatgggatacttgagggtggagttgaagctggaggttttcgagctttggctgagtgttagacgggtgctgggccttaatacggcgcagaattttgggggtgcgcagcagagcttgggtggtgctgggattgttgagagctga

SEQ ID NO: 35995 - protein, 605 aa, Muscodor strobelii
  misc_feature: SGI Peptide ID NO. 572471
  misc_feature (192)..(312): Pfam Id: PF03109 Pfam Desc: ABC1 family
  misc_feature (192)..(298): Pfam Id: PF03109 Pfam Desc: ABC1 family
  misc_feature (18)..(592): NCBI GI: 116197793 Blast Desc: CHGG_07052 [Chaetomium globosum CBS 148.51] gi|88178331|gb|EAQ85799.1| CHGG_07052 [Chaetomium globosum CBS 148.51]
  misc_feature (1)..(593): NCBI GI: 256731715 Blast Desc: [Nectria haematococca mpVI 77-13-4]
  misc_feature (32)..(595): NCBI GI: 46136845 Blast Desc: FG09938.1 [Gibberella zeae PH-1]
  misc_feature (81)..(591): NCBI GI: 164426442 Blast Desc: NCU04259 [Neurospora crassa OR74A] gi|157071337|gb|EAA32014.2| NCU04259 [Neurospora crassa OR74A]
  misc_feature (17)..(584): NCBI GI: 240107958 Blast Desc: ABC1 family protein [Coccidioides posadasii C735 delta SOWgp]
  misc_feature (63)..(582): NCBI GI: 145610701 Blast Desc: MGG_00957 [Magnaporthe grisea 70-15] gi|145018087|gb|EDK02366.1| MGG_00957 [Magnaporthe grisea 70-15]
  misc_feature (17)..(584): NCBI GI: 119188113 Blast Desc: CIMG_04104 [Coccidioides immitis RS]
  misc_feature (81)..(591): NCBI GI: 16944619 Blast Desc: conserved [Neurospora crassa]
  misc_feature (63)..(584): NCBI GI: 242765870 Blast Desc: ubiquinone biosynthesis protein, [Talaromyces stipitatus ATCC 10500] gi|218724257|gb|EED23674.1| ubiquinone biosynthesis protein, [Talaromyces stipitatus ATCC 10500]
  misc_feature (18)..(586): NCBI GI: 226281827 Blast Desc: ABC1 family protein [Paracoccidioides brasiliensis Pb01]
  misc_feature: Useful for introducing or modulating the production of volatile compounds
MKSLSFASLGRFASKNPWTCTNCRTSLIKHPKLPRSYPRQYSSNASSHSNKRTSRSTKSRVTILAASATGATGVGLLAFTDDIKYGYDATERAGRVAGALFLCINDYRTSLNQREKIEDTEEQETILKQCHKRCALRTLEVLEKNGGIFIKLGQHLSAMTYLLPHEWTSTFIPLQDKCPVSSYESIEEMFRRDTGEELSAYFSEFAHEPIGAASLAQVHLATVKESGQKVAVKVQHPGLAQWAPLDLALTKYTFSVLKRFFPEYDLEWLSSEMEVSLPQELDFQLEAANAIRTKQHFEQKMPNLPLVIPDVIWAKKRILVMANESGNRMDDLDYLDSNGIDRDEVSATLAHIFNEMIFGKNAPLHCDPHGGNIAIRKRAEKTKAGYNFEIIMYDHGLYRDIPEHLQRSYAKMWLAVIDGDMDAMKQHAHDVAGVTEQQFPLFASAITGRDYTVVSSSIMKDRSEEEKKTMGDALQEGLLSDLVTMLGQVPRIILLILKTNDLTRSLDESLHTRQGPMRTFLILAHYCARTVLREQIEEIRNRPGSLLAPGNAVRFVAAWMGYLRVELKLEVFELWLSVRRVLGLNTAQNFGGAQQSLGGAGIVES

SEQ ID NO: 35996 - DNA, 2403 bp, Muscodor strobelii
  misc_feature: SGI EST ID NO. CUFF.85650.0
  misc_feature: Variant of the nucleotide sequence at SEQ ID NO 35994
cctgggccaaggccagaattagtacagacgttgcgacttttttctgattaggactggttcatctcaacagtttcgatatcgacccataatctctcctatgcccatcgacaaacgcaccaacagtcaatgcaagacgccctctcttcctttttgacgtgataaagagtgtggttacatgaaaattaatgatctccttttatccatgctgtactataatattcgcaactgcatatcccttggatttaaaccattactgtaatccaatccctaataactcaattctctcgatgcgccacttggtgctctcgtgatgaagtctctgtctttcgcctccctgggccgatttgctagcaaaaatccctggacgtgtacgaattgccgcacatcactcataaaacatcccaaactaccacgatcctacccccgacagtattcctctaatgcctcgagccactccaacaaacgaacatccagatcaacgaagtcgagagtcaccattcttgccgcatctgccactggcgctactggcgttggtcttctagcctttacagatgatattaagtacggatacgatgcgaccgaacgagcgggacgagtagccggggctctgttcttatgcatcaacgactatcgaacttccttgaaccagcgcgagaagattgaagataccgaggaacaagaaacgatactcaaacaatgtcacaagagatgtgctcttcgaacattggaagtgttggagaagaatggcggcattttcattaagctggggcaacatctcagtgccatgacctaccttctcccgcacgaatggacgagcaccttcatccccttacaggacaaatgtcctgtgtcctcatacgaatcgatcgaagaaatgttccgaagagacactggcgaagagcttagtgcatacttctccgagtttgctcacgaaccgataggagcagcgtcgcttgctcaagtccatctagcgactgtgaaggaaagcggtcaaaaggtcgctgtcaaggtccaacatccaggcttggctcagtgggcacccctggacttggccctgaccaaatacacattctccgtgctaaagcgattcttcccggaatacgacttggagtggttgtcgtcggaaatggaggtctcgttaccgcaagaactggattttcaattggaggcggcgaacgcaatccgaacgaagcaacatttcgagcaaaagatgcctaacctacccctcgtcatacctgatgtgatctgggcaaagaagagaattctggtcatggctaatgaatcaggaaaccgtatggacgacctcgactatttggactcaaacggcatcgatcgtgacgaagtctcagctacactagcacatatatttaatgagatgatcttcggcaaaaacgcgccactacactgcgatccacacggaggaaacattgcgatccgaaaacgagcagagaagaccaaggcgggatacaacttcgagatcataatgtacgaccacggcctctatcgagacattcccgagcacctccagcgctcctacgctaagatgtggctcgcagtcatagacggcgacatggacgccatgaaacagcatgcacacgatgtagcaggagtgacagagcaacaattcccgctattcgcttccgccatcacaggacgcgattacaccgtcgtcagctcttcaataatgaaagaccgctcggaggaagaaaagaaaacaatgggcgacgcgttacaagaaggacttctctccgaccttgtaacgatgctgggtcaagttccgcgaatcatattgctgatcctcaaaacgaacgaccttacacgaagtctggacgagagtctacatacacgacaaggacctatgaggacgtttcttattctcgcgcattattgcgcgagaacggtgctgagggagcagattgaagagatcaggaatagaccggggagtttactcgcccctgggaatgcggtcaggtttgtcgccgcgtggatgggatacttgagggtggagttgaagctggaggttttcgagctttggctgagtgttagacgggtgctgggccttaatacggcgcagaattttgggggtgcgcagcagagcttgggtggtgctgggattgttgagagctgagatggaggagagggaaaataggggtgaagctacaaatgggcggatgcatcagtatgcagtacatatgagcgcatacatagatggttgtcttggtttagcattttatgtgctgccggcgtggattcttgttcttagacaggtgcattaggtgctattgcgttatcatacctagagttctgtacatggtgataaacggggttgaagtgggagtcaatgatgagctggtgtttattagaataaaagtctttattcgttcctgttgttctatagtgacg

SEQ ID NO: 35997 - DNA, 720 bp, Muscodor strobelii
  misc_feature: SGI cDNA ID NO. 572472
  misc_feature: Encodes the peptide sequence at SEQ ID NO 35998
atgtcgcgcattgccgatatttttagtctgttgacatttgttgcgttcttggtcgctttctgttatgctcgatacaaaaatctcaaagatggcgaggaagaaaggaaaacgatcatagtgtctctccagagcagcttctacgatgcaacgagaatccccctgatcatgttccctggaaacccggtcgcaactactgagttcaaagaccttgtaaaagagctgaaccgaatagagagagaggcaaacgacattatgtatgatgtgctgaaacggtcgggtgatcctgataccctttgctggttcgggttcttcgcgtacttatggggcgctgtgacgcatcttctaggatccaatgtgtcatggcgttggtatagaaagagagacgaggtcctggagctcatggggaagagggatgtccttaaatcaaagcaatacttctacatgctcctagctttgaacataaagcaggataaagctcgagggtcgctagaacatgtattcgaagaactgtttaccgcgaatgcaagaatccaacggtgtttacggaacctggagaggttggaagagcggtctggccggatgtctcagtggggcctgtcttccgatcttgaggagcatcaacgccgtcacagtctcgacgaaactctgatacctagcgcggaagaatcgagggtggaggattggaccccgtcaaatcgggaaacaggcatgcagctctag

SEQ ID NO: 35998 - protein, 239 aa, Muscodor strobelii
  misc_feature: SGI Peptide ID NO. 572472
MSRIADIFSLLTFVAFLVAFCYARYKNLKDGEEERKTIIVSLQSSFYDATRIPLIMFPGNPVATTEFKDLVKELNRIEREANDIMYDVLKRSGDPDTLCWFGFFAYLWGAVTHLLGSNVSWRWYRKRDEVLELMGKRDVLKSKQYFYMLLALNIKQDKARGSLEHVFEELFTANARIQRCLRNLERLEERSGRMSQWGLSSDLEEHQRRHSLDETLIPSAEESRVEDWTPSNRETGMQL

SEQ ID NO: 35999 - DNA, 837 bp, Muscodor strobelii
  misc_feature: SGI cDNA ID NO. 572473
  misc_feature: Encodes the peptide sequence at SEQ ID NO 36000
atgatgaaaagcgtcaaagcagatcacaacgcattcaaggatcgatatgttggcgttggtggcttatggtacccaggcccaccaccaccatcatcatcagaaattgagaacgagaaagttgtgctgcactttccaggtggcgcatttgtcttggggttcggatcaaatatgttcggccagggcgttgcggatgccgagttgaaatacgtaaaagctgatcgggtattctatgcgcaatatcgaccggcgcaagatgactcgacacggtttccggcttcgcttcaagatgtggtaacgtgctacaactatatcctatctctaggattcagcccccggaatattatcgtctccggcgactcgtgcgccggtaacttggtactgggtttattgcgatatctcgagacatcacctcttgcaaaacccagcggcgcgattgtttggtcaccctgggtacatgtggttgctgatgctggcactctctacaacaaaggcaagaacgcggccaatgataacttgcctggtgagctactaaactggggtgtcgataattactatcccaagcacgaaccaaccgccgaagagctagcctatatctctcctctacaccatccattcaagacgagcgtccccttagtcatacatggcggcgaaattgaaggcctctatgatactattgcggagtttgcgcaggagatgaaagcattggaaggtaaccgagtgttggttacctcaacccgattatccacgcacaatctcataatgtcatatggcgggaatggactggagccggaagttgagagaatacacaccgatgccctaaaattattttccttttga

SEQ ID NO: 36000 - protein, 278 aa, Muscodor strobelii
  misc_feature: SGI Peptide ID NO. 572473
  misc_feature (19)..(264): NCBI GI: 154299871 Blast Desc: BC1G_10826 [Botryotinia fuckeliana B05.10] gi|150857106|gb|EDN32298.1| BC1G_10826 [Botryotinia fuckeliana B05.10]
  misc_feature (19)..(264): NCBI GI: 156042101 Blast Desc: SS1G_11601 [Sclerotinia sclerotiorum 1980] gi|154695984|gb|EDN95722.1| SS1G_11601 [Sclerotinia sclerotiorum 1980]
  misc_feature (15)..(275): NCBI GI: 156040848 Blast Desc: SS1G_11402 [Sclerotinia sclerotiorum 1980] gi|154695786|gb|EDN95524.1| SS1G_11402 [Sclerotinia sclerotiorum 1980]
  misc_feature (17)..(253): NCBI GI: 189201383 Blast Desc: alpha/beta hydrolase fold-3 domain containing protein [Pyrenophora tritici-repentis Pt-1C-BFP] gi|187984127|gb|EDU49615.1| alpha/beta hydrolase fold-3 domain
  misc_feature (19)..(255): NCBI GI: 67537732 Blast Desc: AN5036.2 [Aspergillus nidulans FGSC A4] gi|40741924|gb|EAA61114.1| AN5036.2 [Aspergillus nidulans FGSC A4] gi|259482088|tpe|CBF76233.1| TPA: conserved [Aspergillus FGSC
  misc_feature (17)..(257): NCBI GI: 169619948 Blast Desc: SNOG_13174 [Phaeosphaeria nodorum SN15] gi|111058381|gb|EAT79501.1| SNOG_13174 [Phaeosphaeria nodorum SN15]
  misc_feature (17)..(255): NCBI GI: 145257068 Blast Desc: An04g02360 [Aspergillus niger] gi|134058514|emb|CAL00723.1| protein product [Aspergillus niger]
  misc_feature (9)..(254): NCBI GI: 154299472 Blast Desc: BC1G_10998 [Botryotinia fuckeliana B05.10] gi|150857340|gb|EDN32532.1| BC1G_10998 [Botryotinia fuckeliana B05.10]
  misc_feature (19)..(238): NCBI GI: 255946570 Blast Desc: Pc22g00020 [Penicillium chrysogenum Wisconsin 54-1255] gi|211591069|emb|CAP97290.1| Pc22g00020 [Penicillium chrysogenum Wisconsin 54-1255]
  misc_feature (18)..(254): NCBI GI: 116200945 Blast Desc: CHGG_08357 [Chaetomium globosum CBS 148.51] gi|88176875|gb|EAQ84343.1| CHGG_08357 [Chaetomium globosum CBS 148.51]
MMKSVKADHNAFKDRYVGVGGLWYPGPPPPSSSEIENEKVVLHFPGGAFVLGFGSNMFGQGVADAELKYVKADRVFYAQYRPAQDDSTRFPASLQDVVTCYNYILSLGFSPRNIIVSGDSCAGNLVLGLLRYLETSPLAKPSGAIVWSPWVHVVADAGTLYNKGKNAANDNLPGELLNWGVDNYYPKHEPTAEELAYISPLHHPFKTSVPLVIHGGEIEGLYDTIAEFAQEMKALEGNRVLVTSTRLSTHNLIMSYGGNGLEPEVERIHTDALKLFSF

SEQ ID NO: 36001 - DNA, 468 bp, Muscodor strobelii
  misc_feature: SGI cDNA ID NO. 572474
  misc_feature: Encodes the peptide sequence at SEQ ID NO 36002
atgatcgggatcggatacactccgtataaggcaaactttgacttcccattagcgatacttgagcgattcctactccctactgagcctttcgtgcagttccgcgtgcatgccaaggtgaaagatctcatatcaaatccagtaactgaggtcgctattatacctcttcacgtcgcagatcaagccgaaagagacaggattatggctgatgcggatgcattcggagctgcaattttggctgcttccgctcctggtgactacggtccaggaaccatggctctggcatatcaaacaagttgggcgattggctctacttcagaggaacttgtaatgctcattggttggcgtgaaagagaaacccacttaaaagcgacggagaccactgtcttcaaggacaagctcaagcccattattgagacacagtctggcaagcttgatgtcaagcattatcgatttcaatacctacattga

SEQ ID NO: 36002 - protein, 155 aa, Muscodor strobelii
  misc_feature: SGI Peptide ID NO. 572474
MIGIGYTPYKANFDFPLAILERFLLPTEPFVQFRVHAKVKDLISNPVTEVAIIPLHVADQAERDRIMADADAFGAAILAASAPGDYGPGTMALAYQTSWAIGSTSEELVMLIGWRERETHLKATETTVFKDKLKPIIETQSGKLDVKHYRFQYLH

SEQ ID NO: 36003 - DNA, 498 bp, Muscodor strobelii
  misc_feature: SGI cDNA ID NO. 572475
  misc_feature: Encodes the peptide sequence at SEQ ID NO 36004
atggcatcatttacccccgagcaatggtcttcggccaagaatattattgacattctcgcccagaatgaaggtgtcagcgagaatggcttttcggctgagcaatggggaactatcagatccattgttgagggcaagaagtctatccaagctgtgaaggacgattccaaggtctacttttctcctgcacaatggtctgttgtgaaagacatggttgagggaaagactgaggtgcaaaacactgtgaaggaggagagtaaggtaggattgggctctctaagattggtcgcgtcttggctgacccagtactcgaaacaggtcttcttcaacccgactcagtggtccgtcgtgaaggacatggttgatggcactcgctctatccagagcgttaaggatgattccaaagttttcttctccccagctcagtgggctgtcgttaaagatgccgtggatggcaagacccagttgcagattccccagggaatttcgacctctgcttaa

SEQ ID NO: 36004 - protein, 165 aa, Muscodor strobelii
  misc_feature: SGI Peptide ID NO. 572475
MASFTPEQWSSAKNIIDILAQNEGVSENGFSAEQWGTIRSIVEGKKSIQAVKDDSKVYFSPAQWSVVKDMVEGKTEVQNTVKEESKVGLGSLRLVASWLTQYSKQVFFNPTQWSVVKDMVDGTRSIQSVKDDSKVFFSPAQWAVVKDAVDGKTQLQIPQGISTSA

SEQ ID NO: 36005 - DNA, 1272 bp, Muscodor strobelii
  misc_feature: SGI cDNA ID NO. 572476
  misc_feature: Encodes the peptide sequence at SEQ ID NO 36006
atggacaaatcaaatggtctcgtctgtctccctcgcgcacctaggacaaggtcagatttgaagtatgccgagagttttattcttgatctgcgacatgatgatggtggttcaggtactcaaaggctggtcgatacaatcaagcgatctgccactacaggcatcttccatatcgtgaatcatggtatttcgatggacttgatggagcttcagagggatgtagcatacacttacttcaccacgacttcactcgatcagaaagatcgtgatacaacgaggaacgatagtggggtctttgagggttacaagctaaggtcagatgaagagaaagaaggcggtcttactccgaccattgaagaatacaactacgattattatgcgacaggcaaggtcgttcggcccccgattatggagaagtacgagcgtgagatatctaaagtctatcagcactaccataatgtcttgataccacaaatcatgcgcctgctctcccttgcttgcgacatgggacccgaccacttttacagaatgcacgatgctagtcagacaaattctgaaattggacactacctgagatatcatacaaactgggagagggataacgacaagaagcgagcatcgtatgctggccatacggacatcgggtctgtgacgtttctgtactgtaatcctgtcgcttgtctacaggtttacactgctgaaggatggcgatatattccatacatcgaagatagtctaatcgtaaacatcggagattgtctggaatccctgacagggggcaaatttcccgcagcgcttcatcgactcgtcaaattcgagccggatcaacaagattttgagcgtctcgcacttgtatactttgtgcacccgcatgatagtgcagacaacgaagacccatacgccaagattatcgacggtgacacatttcttcgctcaaagaccgggcaactagtacctgcacccgaggagcttagtttcgattacgaagcgcgaactatacggcgacggggtgacgccgaaaatgactttacgcgtgtgttagtgacacccaatgcggatggcggacgtagggacttctccgacgaacagtggcgtgcgattcagtcactcgcgcgaaatatcagcaagaataagatcacctttagtccttcggaatggcagaatgcgttggatgtgatcaacaagagagtggacgtggagtctagtgagttgaatggtttgagtgagttacaaacagatgtccttcgccagactgtcgtcgatctccaagcgtaa

SEQ ID NO: 36006 - protein, 423 aa, Muscodor strobelii
  misc_feature: SGI Peptide ID NO. 572476
  misc_feature (184)..(289): Pfam Id: PF03171 Pfam Desc: 2OG-Fe(II) oxygenase superfamily
  misc_feature (206)..(289): Pfam Id: PF03171 Pfam Desc: 2OG-Fe(II) oxygenase superfamily
  misc_feature (14)..(359): NCBI GI: 119473631 Blast Desc: 2OG-Fe(II) oxygenase family oxidoreductase, [Neosartorya fischeri NRRL 181] gi|119406844|gb|EAW16794.1| 2OG-Fe(II) oxygenase family oxidoreductase, [Neosartorya fischeri
  misc_feature (14)..(355): NCBI GI: 156060887 Blast Desc: SS1G_02586 [Sclerotinia sclerotiorum 1980] gi|154699990|gb|EDN99728.1| SS1G_02586 [Sclerotinia sclerotiorum 1980]
  misc_feature (14)..(321): NCBI GI: 238507415 Blast Desc: oxidoreductase, 2OG-Fe(II) oxygenase family, [Aspergillus flavus NRRL3357] gi|220689622|gb|EED45973.1| oxidoreductase, 2OG-Fe(II) oxygenase family, [Aspergillus flavus
  misc_feature (2)..(289): NCBI GI: 255949626 Blast Desc: Pc22g16660 [Penicillium chrysogenum Wisconsin 54-1255] gi|211592597|emb|CAP98954.1| Pc22g16660 [Penicillium chrysogenum Wisconsin 54-1255]
  misc_feature (14)..(291): NCBI GI: 154322108 Blast Desc: BC1G_01201 [Botryotinia fuckeliana B05.10] gi|150850448|gb|EDN25641.1| BC1G_01201 [Botryotinia fuckeliana B05.10]
  misc_feature (8)..(289): NCBI GI: 39946304 Blast Desc: MGG_08359 [Magnaporthe grisea 70-15] gi|145019989|gb|EDK04217.1| MGG_08359 [Magnaporthe grisea 70-15]
  misc_feature (22)..(294): NCBI GI: 255948042 Blast Desc: Pc22g07720 [Penicillium chrysogenum Wisconsin 54-1255] gi|211591805|emb|CAP98060.1| Pc22g07720 [Penicillium chrysogenum Wisconsin 54-1255]
  misc_feature (40)..(294): NCBI GI: 150865963 Blast Desc: PICST_36557 [Pichia stipitis CBS 6054] gi|149387219|gb|ABN67364.2| [Pichia stipitis CBS 6054]
  misc_feature (54)..(321): NCBI GI: 169786403 Blast Desc: [Aspergillus oryzae RIB40] gi|83776410|dbj|BAE66529.1| protein product [Aspergillus oryzae]
  misc_feature (16)..(291): NCBI GI: 256728228 Blast Desc: NECHADRAFT_53870 [Nectria haematococca mpVI 77-13-4]
  misc_feature (45)..(267): SWISSPROT Homolog: EC 1.14.11.23 Flavonol synthase
  misc_feature (45)..(267): SWISSPROT Homolog: EC 1.14.11.9 Flavanone 3-dioxygenase
MDKSNGLVCLPRAPRTRSDLKYAESFILDLRHDDGGSGTQRLVDTIKRSATTGIFHIVNHGISMDLMELQRDVAYTYFTTTSLDQKDRDTTRNDSGVFEGYKLRSDEEKEGGLTPTIEEYNYDYYATGKVVRPPIMEKYEREISKVYQHYHNVLIPQIMRLLSLACDMGPDHFYRMHDASQTNSEIGHYLRYHTNWERDNDKKRASYAGHTDIGSVTFLYCNPVACLQVYTAEGWRYIPYIEDSLIVNIGDCLESLTGGKFPAALHRLVKFEPDQQDFERLALVYFVHPHDSADNEDPYAKIIDGDTFLRSKTGQLVPAPEELSFDYEARTIRRRGDAENDFTRVLVTPNADGGRRDFSDEQWRAIQSLARNISKNKITFSPSEWQNALDVINKRVDVESSELNGLSELQTDVLRQTVVDLQA

SEQ ID NO: 36007 - DNA, 208 bp, Muscodor strobelii
  misc_feature: SGI EST ID NO. CUFF.85678.0
  misc_feature: Variant of the nucleotide sequence at SEQ ID NO 36005
atcagaacacaagacacctttaactaccttctgttccacgttttggtagcttcgaagacctccttcagttccaaagacaagtaaatctcacgcctgaccacacgcgcaaaaagctatggacaaatcaaatggtctcgtctgtctccctcgcgcacctaggacaaggtcagatttgaagtatgccgagagttttattcttgatctgcga

SEQ ID NO: 36008 - DNA, 2490 bp, Muscodor strobelii
  misc_feature: SGI cDNA ID NO. 572477
  misc_feature: Encodes the peptide sequence at SEQ ID NO 36009
atgtccttccaccgagcgccagtgagtcggaaacggtctcgaacttcatctgatgacaatgccagctcctcaagctctgaatcagacaatgacctaggcgcggggagttcccaccatctggaccctcgcaagccgattgtttggagagctaaggtgcttggagcctacggcgctgaccgggtctacaagagcacgtgcccatttgacttcagtaccaacagggagcatcacgtcgctgccccgactacttcagagtcagacgccaagcaagagaaaggcaatgatattataccccctaaatggcaggatcatgtcttcgagattgggttcgatgtcaagacatcaaatttgccagacaagggtgttgggccggagaaaatcgaagcggaagcagtgctcaacgaacatatcgtgattttgtcgccatttctgaacgagagattgacaattttagcggcttattacccagggttctgcgagcgactctcggagactggacgtggaacccgagaagccgcgctcccctacacttatggcttcttgctacaccgctttgaagctatcgaaaagttcgtgcaaaacgaaacagataagtcaaaagaagattcggtggcccttcaacgcgaacacacgcggatactctacgagttcctaaaaccacattatgaaagcaaggttctgccatgcttgaaactacttgacgatctagtaccacgggtctcttttgacaacctttggtacatctttcagccgggagtcgatacatactgcagaaatggcgcagactcatacttggctgtcgttcacaaagtgacttcgagtcaggatcctttcggcggacgggtgaaacgacgaagatatgatacaggtcttgctccgggtcataacacgggtgagagattctggctgattcacgtgtggtacctcggtacggatggtcgcacgatcgggagattagaggcagttttcaagattcagtggttcgaaggcctaagggaagttactcagctttctctgtgtccagctagcttttgggacaagaaagatggcggcgagcgacgaagaaatctcgtacgacgcaatcaggtgcttaacaagtcattgcgacaaggtcacctgctggctgattacactggaccatgcatttccggcgaaatatcaagttactcaggaaggcttgtcgtcgacgaaaggcgtggccatgctctctccaagcgcacgatgaaaaatccgtcacagctgaaatggttacgtgatccgtgccaatgggctttcaaggactatgacgacttgttagtctacgatgccgcagataagactgctgagacagtaaacggcgaaataagaggacaaaaggatgaggaaagtgttaactatgattatcgcggcaccgttgaccagaaagtgagcgaaatctgtgaacttagtgagcatcaggtgtcgcttctcggaccatatgtctgggcttttgctctgaaaacaaaacaatgggtgcttgtttcaacggggtatttgacggaagtagaacagtctactgaaagcatggacaatctggtactggatgaagttgcgatccagacaattcgcgctctcgccacccgccaaaatagcaagaggggagtctgggctgcagactacatagaaggcaagggaaccggtcagatactgctacttcatggccccccgggtgtgggcaaaacgtacacggttgaagccatcgctcagtttttacatagaccgctgttagctcttacgatcgctgatattgggacacaagagaccaaggtagagagtgaacttttcaaatggttctcactggctgaaggttggaacgccgtactcctggtcgacgaggccgacattttcctcgaacgaaggcagaatcgtgatctggctaggaatggcctggtttctggtaagactcggagactcaaattgcttgatcagagctcacaattgaataaagctttcttgcgtcgaatggaatacttcaagggacttctctttctcacgacaaatcgggtgggccaaatagatgatgcctttatctctcgggtccatgctgccataggctaccggtcgttcacgccccaagaccgcatgaggatatggcaaggcttcttccgcaaactggaaaaggagaaagctggcaagatccagatcgcgagaggggcaaagaagtgggttctggagaaggaggaatcaggagggactcaactcaacggaagagacatccgcaacgccctgcagactgcaatcactctcgccgaagccgagtacgaagaagaccccgacttcgatccagaacagacgactatagtagtcgaacagtcacactttgaaagggttcttgccatcagcgacaagtttcattcgtacttgaagagtatcaggaaggaagacgagaagaagcgagcggcggcccgacttgacaggaatgatttccatgaaggtcttactagcgacattaacgcttatccagatgattag

SEQ ID NO: 36009 - protein, 829 aa, Muscodor strobelii
  misc_feature: SGI Peptide ID NO. 572477
  misc_feature (555)..(758): Pfam Id: PF00004 Pfam Desc: ATPase family associated with various cellular activities (AAA)
  misc_feature (41)..(815): NCBI GI: 212528958 Blast Desc: conserved [Penicillium marneffei ATCC 18224] gi|210074034|gb|EEA28121.1| conserved [Penicillium marneffei ATCC 18224]
  misc_feature (137)..(814): NCBI GI: 156033037 Blast Desc: SS1G_13594 [Sclerotinia sclerotiorum 1980] gi|154698997|gb|EDN98735.1| SS1G_13594 [Sclerotinia sclerotiorum 1980]
  misc_feature (239)..(823): NCBI GI: 145244845 Blast Desc: An11g07150 [Aspergillus niger] gi|134079383|emb|CAK40765.1| protein product [Aspergillus niger]
  misc_feature (245)..(814): NCBI GI: 154301437 Blast Desc: BC1G_10388 [Botryotinia fuckeliana B05.10] gi|150856128|gb|EDN31320.1| BC1G_10388 [Botryotinia fuckeliana B05.10]
  misc_feature (132)..(806): NCBI GI: 46111087 Blast Desc: FG02425.1 [Gibberella zeae PH-1]
  misc_feature (132)..(797): NCBI GI: 189192951 Blast Desc: conserved [Pyrenophora tritici-repentis Pt-1C-BFP] gi|187978378|gb|EDU45004.1| conserved [Pyrenophora tritici-repentis Pt-1C-BFP]
  misc_feature (134)..(814): NCBI GI: 169617698 Blast Desc: SNOG_12031 [Phaeosphaeria nodorum SN15] gi|160703459|gb|EAT80443.2| SNOG_12031 [Phaeosphaeria nodorum SN15]
  misc_feature (482)..(818): NCBI GI: 145604080 Blast Desc: MGG_14098 [Magnaporthe grisea 70-15] gi|145012164|gb|EDJ96820.1| MGG_14098 [Magnaporthe grisea 70-15]
  misc_feature (542)..(802): NCBI GI: 85094287 Blast Desc: NCU05863 [Neurospora crassa OR74A] gi|28921310|gb|EAA30618.1| [Neurospora crassa OR74A]
  misc_feature (137)..(795): NCBI GI: 256733807 Blast Desc: NECHADRAFT_77327 [Nectria haematococca mpVI 77-13-4]
MSFHRAPVSRKRSRTSSDDNASSSSSESDNDLGAGSSHHLDPRKPIVWRAKVLGAYGADRVYKSTCPFDFSTNREHHVAAPTTSESDAKQEKGNDIIPPKWQDHVFEIGFDVKTSNLPDKGVGPEKIEAEAVLNEHIVILSPFLNERLTILAAYYPGFCERLSETGRGTREAALPYTYGFLLHRFEAIEKFVQNETDKSKEDSVALQREHTRILYEFLKPHYESKVLPCLKLLDDLVPRVSFDNLWYIFQPGVDTYCRNGADSYLAVVHKVTSSQDPFGGRVKRRRYDTGLAPGHNTGERFWLIHVWYLGTDGRTIGRLEAVFKIQWFEGLREVTQLSLCPASFWDKKDGGERRRNLVRRNQVLNKSLRQGHLLADYTGPCISGEISSYSGRLVVDERRGHALSKRTMKNPSQLKWLRDPCQWAFKDYDDLLVYDAADKTAETVNGEIRGQKDEESVNYDYRGTVDQKVSEICELSEHQVSLLGPYVWAFALKTKQWVLVSTGYLTEVEQSTESMDNLVLDEVAIQTIRALATRQNSKRGVWAADYIEGKGTGQILLLHGPPGVGKTYTVEAIAQFLHRPLLALTIADIGTQETKVESELFKWFSLAEGWNAVLLVDEADIFLERRQNRDLARNGLVSGKTRRLKLLDQSSQLNKAFLRRMEYFKGLLFLTTNRVGQIDDAFISRVHAAIGYRSFTPQDRMRIWQGFFRKLEKEKAGKIQIARGAKKWVLEKEESGGTQLNGRDIRNALQTAITLAEAEYEEDPDFDPEQTTIVVEQSHFERVLAISDKFHSYLKSIRKEDEKKRAAARLDRNDFHEGLTSDINAYPDD

SEQ ID NO: 36010 - DNA, 1950 bp, Muscodor strobelii
  misc_feature: SGI cDNA ID NO. 572478
  misc_feature: Encodes the peptide sequence at SEQ ID NO 36011
atggtccagctaaacaatagcatggaaccaactcttgacggccagcttgttcgatccttcagtgacgatttacaacggcagcccaataacagcgacacactcatgcgagggcttgcagctaatgtctcactagaacgacagcgggagaacacagcacttcggaacgaatgggacgcgtttctactagaaggtcgtgatgtagcagaaagtattgttcccgacgaagaggtcctgctgcgagaacagagtcgcaagctatataaagcttggagcaacttttgcaagaaattacccgatgagcaacgagagaaggcccgcggtgaggtaccgagcctgagattattgcatgcaaccgtctctaaggccactgcaacatggaaagaaaagcgcgaagactcaaaagctgggcgtgctaaacgaatctttgctcgattattcgagacgttcaattcccacaagaatctcatctccttgttgccgactaacaacatatacgtcacactcttaaccggctcattgactgctatcgcacaggcctcgatcaatcaccaagaactcgcagagggggtgtcttccaccatggaggatctcagtcaggatatggcttattggaacgagcttatcaaagagtatccggacagtaaggtgcttcaccgctacatcagagatctatacgttgttgtcttcgagttcttgacggaaatattcactgaatggtcgagatcatcatggacaagattcatcacaagctttgatgagaaagccttcaagaagattttcacggaaaggagggatcgcattaaggcaatcgaacagagaatgaaaaagcatgcggagctcgagttcgaacgcaatactacacgaagactagagaggaataccgacacacaagatcgtatacgtctagagcagatgcagatggtcaaggagattcaagagatgaggtctggcatgacccgtcaaaacgagctgatctatcaactcggggctagtgtcttccgctttctggccgagcgacccgctctcaacttcccagatatacaggaacagcctcaactggagcacgaagacatcgaacttcagaccaagccccagttgttaggagcacttgaattatctgtctcgtcaacggaagcagaccctcgaaactcgctgacgagcgacccggaagcacatgcttaccggcaaagaagtcccacagttgatgttcccgcaccatcaccaattcaggtcctaaacaaaaaggatattcttgaactgctcgtcccactgacgaggaagtttggtcgcgatattcagatcatcattgatgctgtcacgcaagcctcccatacacagatatctgagtcagttcgccaacgtgccgaagaatggacaagaagtaaaggaacggataggctatgggtccaaggcccttacgaacgaacccacccgagcaatactacctacgccgctgtttctttagtcgcattagcacacaacagcaacattccttgtatctcatacttctgctccctgggcgtgcacgggacggcggaagggcagaacatgacctgccaagcgatgctcgcagaccttgtcaagtcactcatagtacaagctctcctacttataccagacgaattccagacttcatctggtctctctcgctcaagatttgaggcactactccaacctcgaatggatctggatgaagccatgcgactttttcgcgatctgcgcggtctgggacccccaattctcaatatcccatcaagatcagacagctatgaggcccctcgcgaggatgtgctaaaactttgtatcacgagcgacggatatgccgaagttcttgcggtcttagcagagcgtggtcacatcagcaagttagaggtcgacgattcaatgcccgaggaaggcccgggtttgatctcaggatgggtcgagggtaacgtgaatacttgtacctag

SEQ ID NO: 36011 - protein, 649 aa, Muscodor strobelii
  misc_feature: SGI Peptide ID NO. 572478
  misc_feature (16)..(624): NCBI GI: 212528960 Blast Desc: PMAA_029400 [Penicillium marneffei ATCC 18224] gi|210074035|gb|EEA28122.1| PMAA_029400 [Penicillium marneffei ATCC 18224]
  misc_feature (96)..(583): NCBI GI: 169617696 Blast Desc: SNOG_12030 [Phaeosphaeria nodorum SN15] gi|111059322|gb|EAT80442.1| SNOG_12030 [Phaeosphaeria nodorum SN15]
  misc_feature (15)..(251): NCBI GI: 145604078 Blast Desc: MGG_14097 [Magnaporthe grisea 70-15] gi|145012163|gb|EDJ96819.1| MGG_14097 [Magnaporthe grisea 70-15]
  misc_feature (16)..(278): NCBI GI: 145244847 Blast Desc: An11g07160 [Aspergillus niger] gi|134079384|emb|CAK40766.1| protein product [Aspergillus niger]
  misc_feature (148)..(587): NCBI GI: 145252718 Blast Desc: An16g05640 [Aspergillus niger] gi|134083426|emb|CAK46904.1| protein product [Aspergillus niger]
  misc_feature (79)..(306): NCBI GI: 46111085 Blast Desc: FG02424.1 [Gibberella zeae PH-1]
  misc_feature (133)..(274): NCBI GI: 189192949 Blast Desc: [Pyrenophora tritici-repentis Pt-1C-BFP] gi|187978377|gb|EDU45003.1| [Pyrenophora tritici-repentis Pt-1C-BFP]
  misc_feature (147)..(268): NCBI GI: 171681317 Blast Desc: protein product [Podospora anserina] gi|170940617|emb|CAP65845.1| protein product [Podospora anserina]
  misc_feature (79)..(581): NCBI GI: 242795208 Blast Desc: conserved [Talaromyces stipitatus ATCC 10500] gi|218719122|gb|EED18542.1| conserved [Talaromyces stipitatus ATCC 10500]
  misc_feature (79)..(581): NCBI GI: 212536228 Blast Desc: conserved [Penicillium marneffei ATCC 18224] gi|210070669|gb|EEA24759.1| conserved [Penicillium marneffei ATCC 18224]
MVQLNNSMEPTLDGQLVRSFSDDLQRQPNNSDTLMRGLAANVSLERQRENTALRNEWDAFLLEGRDVAESIVPDEEVLLREQSRKLYKAWSNFCKKLPDEQREKARGEVPSLRLLHATVSKATATWKEKREDSKAGRAKRIFARLFETFNSHKNLISLLPTNNIYVTLLTGSLTAIAQASINHQELAEGVSSTMEDLSQDMAYWNELIKEYPDSKVLHRYIRDLYVVVFEFLTEIFTEWSRSSWTRFITSFDEKAFKKIFTERRDRIKAIEQRMKKHAELEFERNTTRRLERNTDTQDRIRLEQMQMVKEIQEMRSGMTRQNELIYQLGASVFRFLAERPALNFPDIQEQPQLEHEDIELQTKPQLLGALELSVSSTEADPRNSLTSDPEAHAYRQRSPTVDVPAPSPIQVLNKKDILELLVPLTRKFGRDIQIIIDAVTQASHTQISESVRQRAEEWTRSKGTDRLWVQGPYERTHPSNTTYAAVSLVALAHNSNIPCISYFCSLGVHGTAEGQNMTCQAMLADLVKSLIVQALLLIPDEFQTSSGLSRSRFEALLQPRMDLDEAMRLFRDLRGLGPPILNIPSRSDSYEAPREDVLKLCITSDGYAEVLAVLAERGHISKLEVDDSMPEEGPGLISGWVEGNVNTCT

SEQ ID NO: 36012 - DNA, 1118 bp, Muscodor strobelii
  misc_feature: SGI EST ID NO. CUFF.85702.0
  misc_feature: Variant of the nucleotide sequence at SEQ ID NO 36010
tggaaggacattgtgatgtagggtgtgccggtaggcgtagagacgatcgcattcgatatcttgactcgttcggtgcctcaaagaaacaatcggagatgattgcttgagaagcatgccatagcggttatcgggaacgagcaaagattgagaaaagaaaagggggtccccaaagaaacagtttccatcgagcaacagagagtaggagagcaaagaaatatgtgcgaaaacacccaattacgaacacgcaagtaggtacctagtgggcaatcatgcaggtcgcgaggatccaaggtccaatgggaacctcaaaacgcatcaaatgaggggttagtgatcagtgaaccatcgtcagctgcatgcacgtgatgctgtgacaggagtttcaaatctacgtatcataatataacagtcatcttcttggaaagagcacatagaacaaacgagaatgctcaattgaggacgatggtccagctaaacaatagcatggaaccaactcttgacggccagcttgttcgatccttcagtgacgatttacaacggcagcccaataacagcgacacactcatgcgagggcttgcagctaatgtctcactagaacgacagcgggagaacacagcacttcggaacgaatgggacgcgtttctactagaaggtcgtgatgtagcagaaagtattgttcccgacgaagaggtcctgctgcgagaacagagtcgcaagctatataaagcttggagcaacttttgcaagaaattacccgatgagcaacgagagaaggcccgcggtgaggtaccgagcctgagattattgcatgcaaccgtctctaaggccactgcaacatggaaagaaaagcgcgaagactcaaaagctgggcgtgctaaacgaatctttgctcgattattcgagacgttcaattcccacaagaatctcatctccttgttgccgactaacaacatatacgtcacactcttaaccggctcattgactgctatcgcacaggcctcgatcaatcaccaagaactcgcagagggggtgtcttccaccatggaggatctcagtcaggatatggcttattggaacgagcttatcaaagagtatccggacagtaaggtgcttcaccg

SEQ ID NO: 36013 - DNA, 1581 bp, Muscodor strobelii
  misc_feature: SGI cDNA ID NO. 572479
  misc_feature: Encodes the peptide sequence at SEQ ID NO 36014
atggcgaccgtttcttcgctcattttgccgttgggcataggtatcattgtcacatatacagtggccaaactactccatttcctagcgcgaggagaccagccgcctctacctcccggtccaagaggattaccacttgtcggtaatctcaatgatctgcctaagcctggagactttgaacctcgacactggataaaacacaaggagcttttcggccctctcagctctgtgactatcctaggaaagtcaatcattatcatcaatgatgcaaagcttgcgtttgaactattcgaaaagcgctctgttaaacactcatctcgcccgaacttagtatttgcttgcgaaatggttggctggaagaattcactagggatgtctccgtataataaacgattccgtgcgatgcgcaagaatttgagccgcatcattggatcaaacgcagcagcagcaagtttccataagcttcagcatgaagaagttgcgcacttcctactacacatgcttcagagtcctgaaaacatgctcgagcatatcagaaaatcggttggtgccatagtcttaaagcttacttacaactacacagccgagccgcacggagacgatactttagtagacatggttggcgattgcatggaaaaatttggacgtgccgcagtccctggagcgttcatggtcgatgtattacccattttaaaacatttacctagttggctaccaggagctggtttcggaaaaaccggccgccaatggggagctgagctattgaatgtcactgacgtaccatatgcatttgttcaacatcaaatgaaccagagcaaagacgacacatcgtttatgtctagactcattgatacacaaagcacagacccagaggagattcatgtgaacaagtggtccgccatgtctctatatgccgccggagctgataccactgtttcggctatcgcatgtttcttcttagcaatgacgctctacccacaggttcagatccgagcgcaggaagagatcgatcaagtaattggcagtaggaaattaccaacgatggctgatcgtcacaatcttccttatatcgatgcccttgtcaaagaaactcttcggtggcacccggtagctccgatgggtcttccgcatgaatcaacagaggacgacatatgcgaaggatatttgattcccaaaggatcaacgctgctggccaacatttggcattttactcacgatcctgagcgttaccgcaaccctgacacgtttgatccggagcgctttctccaacaggaaccagaattggatcctgccaaatttgtctttggatttggacgacgaatctgtccgggtagtattctggccgataacagcttgtttctcgccatcgcacaatcattggccgtattttctatcgaaaaggacccacacatgacggccaatcccaaagagatgtttcagggaggcattgtcagccatcctgcgccgtataaatgcgtggtcaagccaagatctgcccatcacaagacgataatccagtcccttgaacagagctatccttggcagccaagcgatagcgccacactgagggatttgtcaaagtaa

SEQ ID NO: 36014 - protein, 526 aa, Muscodor strobelii
  misc_feature: SGI Peptide ID NO. 572479
  misc_feature (37)..(493): Pfam Id: PF00067 Pfam Desc: Cytochrome P450
  misc_feature (300)..(493): Pfam Id: PF00067 Pfam Desc: Cytochrome P450
  misc_feature (37)..(120): Pfam Id: PF00067 Pfam Desc: Cytochrome P450
  misc_feature (1)..(501): NCBI GI: 256724264 Blast Desc: NECHADRAFT_53484 [Nectria haematococca mpVI 77-13-4]
  misc_feature (45)..(524): NCBI GI: 242817323 Blast Desc: cytochrome P450 oxidoreductase OrdA-like, [Talaromyces stipitatus ATCC 10500] gi|218713397|gb|EED12821.1| cytochrome P450 oxidoreductase OrdA-like, [Talaromyces stipitatus ATCC
  misc_feature (45)..(524): NCBI GI: 212530868 Blast Desc: cytochrome P450 oxidoreductase OrdA-like, [Penicillium marneffei ATCC 18224] gi|210074989|gb|EEA29076.1| cytochrome P450 oxidoreductase OrdA-like, [Penicillium marneffei ATCC 18224]
  misc_feature (45)..(524): NCBI GI: 115401660 Blast Desc: conserved [Aspergillus terreus NIH2624] gi|114190359|gb|EAU32059.1| conserved [Aspergillus terreus NIH2624]
  misc_feature (48)..(525): NCBI GI: 169765434 Blast Desc: [Aspergillus oryzae RIB40] gi|83765043|dbj|BAE55186.1| protein product [Aspergillus oryzae]
  misc_feature (4)..(524): NCBI GI: 121716160 Blast Desc: Cytochrome P450 oxidoreductase, [Aspergillus clavatus NRRL 1] gi|119403846|gb|EAW14263.1| Cytochrome P450 oxidoreductase, [Aspergillus clavatus NRRL 1]
  misc_feature (3)..(524): NCBI GI: 169599354 Blast Desc: SNOG_02494 [Phaeosphaeria nodorum SN15] gi|111069586|gb|EAT90706.1| SNOG_02494 [Phaeosphaeria nodorum SN15]
  misc_feature (16)..(524): NCBI GI: 189195692 Blast Desc: O-methylsterigmatocystin oxidoreductase [Pyrenophora tritici-repentis Pt-1C-BFP] gi|187980063|gb|EDU46689.1| O-methylsterigmatocystin oxidoreductase [Pyrenophora Pt-1C-BFP]
  misc_feature (1)..(524): NCBI GI: 169617413 Blast Desc: SNOG_11884 [Phaeosphaeria nodorum SN15] gi|111059808|gb|EAT80928.1| SNOG_11884 [Phaeosphaeria nodorum SN15]
  misc_feature (11)..(524): NCBI GI: 238494768 Blast Desc: cytochrome P450, [Aspergillus flavus NRRL3357] gi|220695270|gb|EED51613.1| cytochrome P450, [Aspergillus flavus NRRL3357]
  misc_feature (49)..(498): SWISSPROT Homolog: EC 1.14.13.21 Flavonoid 3'-monooxygenase
MATVSSLILPLGIGIIVTYTVAKLLHFLARGDQPPLPPGPRGLPLVGNLNDLPKPGDFEPRHWIKHKELFGPLSSVTILGKSIIIINDAKLAFELFEKRSVKHSSRPNLVFACEMVGWKNSLGMSPYNKRFRAMRKNLSRIIGSNAAAASFHKLQHEEVAHFLLHMLQSPENMLEHIRKSVGAIVLKLTYNYTAEPHGDDTLVDMVGDCMEKFGRAAVPGAFMVDVLPILKHLPSWLPGAGFGKTGRQWGAELLNVTDVPYAFVQHQMNQSKDDTSFMSRLIDTQSTDPEEIHVNKWSAMSLYAAGADTTVSAIACFFLAMTLYPQVQIRAQEEIDQVIGSRKLPTMADRHNLPYIDALVKETLRWHPVAPMGLPHESTEDDICEGYLIPKGSTLLANIWHFTHDPERYRNPDTFDPERFLQQEPELDPAKFVFGFGRRICPGSILADNSLFLAIAQSLAVFSIEKDPHMTANPKEMFQGGIVSHPAPYKCVVKPRSAHHKTIIQSLEQSYPWQPSDSATLRDLSK

SEQ ID NO: 36015 - DNA, 2809 bp, Muscodor strobelii
  misc_feature: SGI EST ID NO. CUFF.85712.0
  misc_feature: Variant of the nucleotide sequence at SEQ ID NO 36013
caagtttccataagcttcagcatgaagaagttgcgcacttcctactacacatgcttcagagtcctgaaaacatgctcgagcatatcagaaaatcggttggtgccatagtcttaaagcttacttacaactacacagccgagccgcacggagacgatactttagtagacatggttggcgattgcatggaaaaatttggacgtgccgcagtccctggagcgttcatggtcgatgtattacccattttaaaacatttacctagttggctaccaggagctggtttcggaaaaaccggccgccaatggggagctgagctattgaatgtcactgacgtaccatatgcatttgttcaacatcaaatgaaccagagcaaagacgacacatcgtttatgtctagactcattgatacacaaagcacagacccagaggagattcatgtgaacaagtggtccgccatgtctctatatgccgccggagctgataccgtaagtgcgcgatccctcacaaaagagaagtaaagacaggcaactgacatagtcacacagactgtttcggctatcgcatgtttcttcttagcaatgacgctctacccacaggttcagatccgagcgcaggaagagatcgatcaagtaattggcagtaggaaattaccaacgatggctgatcgtcacaatcttccttatatcgatgcccttgtcaaagaaactcttcggtggcacccggtagctccgatgggtcttccgcatgaatcaacagaggacgacatatgcgaaggatatttgattcccaaaggatcaacgctgctggccaacatttggcattttactcacgatcctgagcgttaccgcaaccctgacacgtttgatccggagcgctttctccaacaggaaccagaattggatcctgccaaatttgtctttggatttggacgacgaatctgtccgggtagtattctggccgataacagcttgtttctcgccatcgcacaatcattggccgtattttctatcgaaaaggacccacacatgacggccaatcccaaagagatgtttcagggaggcattgtcagccatcctgcgccgtataaatgcgtggtcaagccaagatctgcccatcacaagacgataatccagtcccttgaacagagctatccttggcagccaagcgatagcgccacactgagggatttgtcaaagtaaaccaggatctgtgtatgagttagtaggggcagaggcccagttagttgcagcttcatcttagtacaggaggtcaatcgaagcatcagctaatacaggtcgtcgaagagcgaatcgggaagtccgcaccttgttccttacctagtgcaagccaagaccgcataattgccaatgtgaaccgtgccgttttacttcattcccggacctcgccgcccggacccggagcggggccggagattgactatctatgcgtacaaatgtggaagtattacgatagaggcgtccaagactagaggttccggcatcagaaatcagagtcccctataccacatctgccccactaggtacaagtattcacgttaccctcgacccatcctgagatcaaacccgggccttcctcgggcattgaatcgtcgacctctaacttgctgatgtgaccacgctctgctaagaccgcaagaacttcggcatatccgtcgctcgtgatacaaagttttagcacatcctcgcgaggggcctcatagctgtctgatcttgatgggatattgagaattctgagtaacgttttgtacaagcccgcagtatgcttcaggtccgaacggtcctcaagttcttgtgcagagtcgatcacacagtgaatttacgggggtcccagaccgcgcagatcgcgaaaaagtcgcatggcttcatccagatccattcgaggttggagtagtgcctcaaatcttgagcgagagagaccagatgaagtctggaattcgtctggtataagtaggagagcttgtactatgagtgacttgacaaggtctgcgagcatcgcttggcaggtcatgttctgcccttccgccgtcccgtgcacgcccagggagcagaagtatgagatacaaggaatgttgctgttgtgtgctaatgcgactaaagaaacagcggcgtaggtagtattgctcgggtgggttcgttcgtaagggccttggacccatagcctatccgttcctttacttcttgtccattcttcggcacgttggcgaactgactcagatatctgtgtatgggaggcttgcgtgacagcatcaatgatgatctgaatatcgcgaccaaacttcctcgtcagtgggacgagcagttcaagaatatcctttttgtttaggacctgaattggtgatggtgcgggaacatcaactgtgggacttctttgccggtaagcatgtgcttccgggtcgctcgtcagcgagtttcgagggtctgcttccgttgacgagacagataattcaagtgctcctaacaactggggcttggtctgaagttcgatgtcttcgtgctccagttgaggctgttcctgtatatctgggaagttgagagcgggtcgctcggccagaaagcggaagacactagccccgagttgatagatcagctcgttttgacgggtcatgccagacctcatctcttgaatctccttgaccatctgcatctgctctagacgtatacgatcttgtgtgtcggtattcctctctagtcttcgtgtagtattgcgttcgaactcgagctccgcatgctttttcattctctgttcgattgccttaatgcgatccctcctttccgtgaaaatcttcttgaag

SEQ ID NO: 36016 - DNA, 1182 bp, Muscodor strobelii
  misc_feature: SGI cDNA ID NO. 572480
  misc_feature: Encodes the peptide sequence at SEQ ID NO 36017
atgcgcaagaatttgagccgcatcattggatcaaacgcagcagcagcaagtttccataagcttcagcatgaagaagttgcgcacttcctactacacatgcttcagagtcctgaaaacatgctcgagcatatcagaaaatcggttggtgccatagtcttaaagcttacttacaactacacagccgagccgcacggagacgatactttagtagacatggttggcgattgcatggaaaaatttggacgtgccgcagtccctggagcgttcatggtcgatgtattacccattttaaaacatttacctagttggctaccaggagctggtttcggaaaaaccggccgccaatggggagctgagctattgaatgtcactgacgtaccatatgcatttgttcaacatcaaatgaaccagagcaaagacgacacatcgtttatgtctagactcattgatacacaaagcacagacccagaggagattcatgtgaacaagtggtccgccatgtctctatatgccgccggagctgataccactgtttcggctatcgcatgtttcttcttagcaatgacgctctacccacaggttcagatccgagcgcaggaagagatcgatcaagtaattggcagtaggaaattaccaacgatggctgatcgtcacaatcttccttatatcgatgcccttgtcaaagaaactcttcggtggcacccggtagctccgatgggtcttccgcatgaatcaacagaggacgacatatgcgaaggatatttgattcccaaaggatcaacgctgctggccaacatttggcattttactcacgatcctgagcgttaccgcaaccctgacacgtttgatccggagcgctttctccaacaggaaccagaattggatcctgccaaatttgtctttggatttggacgacgaatctgtccgggtagtattctggccgataacagcttgtttctcgccatcgcacaatcattggccgtattttctatcgaaaaggacccacacatgacggccaatcccaaagagatgtttcagggaggcattgtcagccatcctgcgccgtataaatgcgtggtcaagccaagatctgcccatcacaagacgataatccagtcccttgaacagagctatccttggcagccaagcgatagcgccacactgagggatttgtcaaagtaa

SEQ ID NO: 36017 - protein, 393 aa, Muscodor strobelii
  misc_feature: SGI Peptide ID NO. 572480
  misc_feature (1)..(360): Pfam Id: PF00067 Pfam Desc: Cytochrome P450
  misc_feature (167)..(360): Pfam Id: PF00067 Pfam Desc: Cytochrome P450
  misc_feature (2)..(368): NCBI GI: 256724264 Blast Desc: NECHADRAFT_53484 [Nectria haematococca mpVI 77-13-4]
  misc_feature (1)..(391): NCBI GI: 242817323 Blast Desc: cytochrome P450 oxidoreductase OrdA-like, [Talaromyces stipitatus ATCC 10500] gi|218713397|gb|EED12821.1| cytochrome P450 oxidoreductase OrdA-like, [Talaromyces stipitatus ATCC
  misc_feature (1)..(391): NCBI GI: 212530868 Blast Desc: cytochrome P450 oxidoreductase OrdA-like, [Penicillium marneffei ATCC 18224] gi|210074989|gb|EEA29076.1| cytochrome P450 oxidoreductase OrdA-like, [Penicillium marneffei ATCC 18224]
  misc_feature (1)..(391): NCBI GI: 212530870 Blast Desc: cytochrome P450 oxidoreductase OrdA-like, [Penicillium marneffei ATCC 18224] gi|210074990|gb|EEA29077.1| cytochrome P450 oxidoreductase OrdA-like, [Penicillium marneffei ATCC 18224]
  misc_feature (2)..(391): NCBI GI: 115401660 Blast Desc: conserved [Aspergillus terreus NIH2624] gi|114190359|gb|EAU32059.1| conserved [Aspergillus terreus NIH2624]
  misc_feature (2)..(392): NCBI GI: 238481985 Blast Desc: cytochrome P450 oxidoreductase OrdA-like, [Aspergillus flavus NRRL3357] gi|220700281|gb|EED56619.1| cytochrome P450 oxidoreductase OrdA-like, [Aspergillus flavus NRRL3357]
  misc_feature (2)..(391): NCBI GI: 169765434 Blast Desc: [Aspergillus oryzae RIB40] gi|83765043|dbj|BAE55186.1| protein product [Aspergillus oryzae]
  misc_feature (2)..(391): NCBI GI: 121716160 Blast Desc: Cytochrome P450 oxidoreductase, [Aspergillus clavatus NRRL 1] gi|119403846|gb|EAW14263.1| Cytochrome P450 oxidoreductase, [Aspergillus clavatus NRRL 1]
  misc_feature (2)..(391): NCBI GI: 169617413 Blast Desc: SNOG_11884 [Phaeosphaeria nodorum SN15] gi|111059808|gb|EAT80928.1| SNOG_11884 [Phaeosphaeria nodorum SN15]
  misc_feature (2)..(391): NCBI GI: 145254277 Blast Desc: An18g01200 [Aspergillus niger] gi|134084162|emb|CAK47195.1| protein product [Aspergillus niger]
  misc_feature (165)..(357): SWISSPROT Homolog: EC 1.14.14.1 Unspecific monooxygenase
MRKNLSRIIGSNAAAASFHKLQHEEVAHFLLHMLQSPENMLEHIRKSVGAIVLKLTYNYTAEPHGDDTLVDMVGDCMEKFGRAAVPGAFMVDVLPILKHLPSWLPGAGFGKTGRQWGAELLNVTDVPYAFVQHQMNQSKDDTSFMSRLIDTQSTDPEEIHVNKWSAMSLYAAGADTTVSAIACFFLAMTLYPQVQIRAQEEIDQVIGSRKLPTMADRHNLPYIDALVKETLRWHPVAPMGLPHESTEDDICEGYLIPKGSTLLANIWHFTHDPERYRNPDTFDPERFLQQEPELDPAKFVFGFGRRICPGSILADNSLFLAIAQSLAVFSIEKDPHMTANPKEMFQGGIVSHPAPYKCVVKPRSAHHKTIIQSLEQSYPWQPSDSATLRDLSK

SEQ ID NO: 36018 - DNA, 2809 bp, Muscodor strobelii; identical to SEQ ID NO: 36015
  misc_feature: SGI EST ID NO. CUFF.85712.0
  misc_feature: Variant of the nucleotide sequence at SEQ ID NO 36016

SEQ ID NO: 36019 - DNA, 4851 bp, Muscodor strobelii
  misc_feature: SGI cDNA ID NO. 572481
  misc_feature: Encodes the peptide sequence at SEQ ID NO 36020
atgtggaaacgcttgaaagcaacgaagagtcgaccaccgccgaaagtaaatgacgacgacaaatcccagacactccctaccatatctgtaaaggatgactcggtctattctcgcgcggactcttccgactcgaagactctccgaggtctagaaattcggcgcaaagggtccgagcaaagtgcgatatctgatctcaacggccaactgtttgcgacccaatctcatcaacggcgtcgctccgaagatagacgagatgatccactcggtcttcacgtcttatactcaccaagtgtcgagaagcggaccgtagacataattttgatacatgggcttggtggatcgagcctgcgtacctggtgccacggtcgcgatctcgataacctctggcctagtctctggctaccaaacgaggatagtttgtcgtcggcaaggattttgacatatggctacaatgcgcatttctcttcgaagaaagagcaggcatctcttgccatcggagactttgccaatgacctcctattccgaatgaaatatagcgaaaatgggaaagagcgactgggccaagttccaatcatcatcatcgcgcactccatgggtgggcttgtttttaaaaaggcatttattcacggcttgctcaacgacgaatttcaagatatagtagctatgatcagatcagttctattccttgccacgcctcaccgtggaacagatctagccgagaccctgaacaaaatactagtaagctcaatttttagacacacttcgaaagactatgtattggagttggcgcgcaggagcccgaccattgatgaacttaacgaatcattcaggcaccatgcctccaagcttcatattttctccttctacgaaactttatctactacgataggtcccctatcgactatgttgctggacaagaataccgccgtgcttggttatccgggggagacgccgcagcccttgtcggccaatcatcatgatgtttgcaagttccaaagtagacaagacccaaactatctatccgtactaggtgccttgagaagtatcattcagccagaatcttcgagtcgtgcagatgaagggagtgaattttcggaggacaacctagccatggtcaagaccctcgtcggcatatctacgccacccgaagaagatcttgccgctggtcgtgcggtgagaaaaccaggaacttgcgagcaatttttcacgagcagcgagtttaatgactggcggagtgctgccacaagccagatattgtgggcacacgcgccaccaggcaccggcaaatcgactctttgcacacttgtcatcgaacgcttgctcgaggagagcgaatcatgtgcctatttcttcttcaagtatgacaaccaccagaagagatctatcagtcacatgttacgatccatagcgtaccaggtgtctgtcctggaaccgagagttggcagtgagcttgcaaacttagccgaaacaggagaacgtcttcacaacgcagacgcaatgaccatctggaaaaagatttatctctccgtgatgtccaaactgcatgcacggcaaccttactattgggtaattgatggaatcgacgaatcggaatctagtagacagattgtcgacttcttgtccggcactcaaaagtttgaaagcacagtcaaggtgctcatccttagtcgccctcattttactattaatcaggctttacagaaagctgcgctaaaagttcctatcgtggaattccagttgggcgataacaaagaggacattcgcttagctgtaacagaagagatcgtataccttgcatctgacgaaggattcaagactgacattatcaacgagattacacgacgctctcacggcaatttcctttgggctagcttagtggtcaagcttgtggcttcgtgccatcgtcaagaccaagtcacaagactccttgagactacaccagatggaatggataaactctacgacagaatgttttcagcagttacgagtctccatttgccagaagacatgaatttggctaggatacttttatcatgggcgatctattcacgaaccccgcttaccgtcgaagagctttcagagccatatgcaatggagtttaagcccgtcatggacatcaagcatactgttaaccagatttgcggtcagttcgttacaataaatgcatctagccaaattatactcgttcaccattcggcgcgagagtacctcagaagacactcacctcctggcttctccctcaaagcacatcactcacacgaagaattattcggaaggtgtctagtgactatatgtgacaaagacttacgtggaaagatccagatgcttagggtgccacaatttttgcgatacgcagctacgtcttgggcattccacctcgagaactgtagcgtgcaatctgataggattctcaatggcctcacgcgctttttcaagggaccttttccacttgcctggattcagtatatggcaatgagtggacacctatctgacctgccaggtgtttcccgaaggttaacaaattacgtcaggaagagacgcaagattgatgccgagaaaccgcccatgttgcatcggatcaccgacttatctcttattgatgcttgggcaatcgacattatgaagataccggcaaaatttggacgaaatttgacaagtgatccgtcactgatatataaatgtgttcccccgctcagcccgatcaattcggcgatataccagaagtttgcgacaagccccgcagctacgctttccgtcagcggaatcccgaatgaagattggaatgactgcattgctcgtgtttctagtagcactggaaaagcagttcgtcttgccgcatctgcggtatatctggctgttgcgtccgatctgccacgaggattggtcactgtttgggacacagtcttgtatcaggtccacaacacgtttaatatcagagaacgaatattgcatttggtcttcaatcaggccgactcccttctcgcatgctatggtatcaagcatacttatgtgtggaaacctggcgacggcttgcaggttctacatgtcctaaatccgcgtcaagagcgtgcaatcgagctacgattcgacgagcatgattgtctactgatcgtgaccgatttgaagagagtttatcgcttagcgactcagactggctctgaccatgcattctcctgggtaaggatggaccctgctattcttgaggaaccaagtcttccagaaggcgtatggttaggcacacccacctcagttgcgtttaaccatgactgcagtcaagttgcagtcgcataccgaaacttcccgttgacagtgtggagtatcgactccgcttgtgttgtcacacgtttgactagaagacgaaattccggtcaagggtcaatgaattccttcactggagataacaaagtcgtatggcacccctcaggcagtcatgtgctgggaatcttcggagacatattcaaatggagcccctcggaagacacctacgaagtcgccaacaatgaaagcggcatcatccctcatgacattgagtgcacccccaatggccttgcctttattactggagatgtggaaggatcaatcaagatatacgaaatatcctctatgacaatgatttacagactcacgtctgaggatggtatcagccgtatctgtgttagccctgatagtagtcgcttctacgatcttcggggatcttattgcaatgtttgggagccaaattgtcttatgagacttgcagatatgtcatctgagaggtttaatgatgcctcaagtacaactgatagcttctggtcagacacagaggacacaatgagcacctcagtttcatttcctgcatcggaaagtcgggcggataatacgccaggcatcgtggcagttgcaccacagcataatgcacttcatccaattgcttactcgaccgacgatggcttcatccacgtatcacatcatgacaacatagttctcgtcgggaaatctatgtcgggaattggtgtggaacaccttgcgtgggacgaattacactgtcagctcgccttttctgatataagtggcactgtgatggtcaaatctattacgactagcccagcatccgagggtagtattcgcgtccaggatatatacaatgaatcaaaatcacctcgcaatcgagggaacacccgacagcttttgttccaaaagaatggagccagtctcatcgtttatggggagaaatgtactcagatgctttcaattccagatggtgctatcatcgccgaaaatcccacgtcaggtgtcgaacatggtacctggtttcaacatcctggccggcaagacgaagttgtatttctatctggcaccgaagccaagatatttgattggaactttgaatcaaagcgtagtgttcacataccaataacgagagatccggacattgacactgcgattgcgtctgtcttgcctagccatcatcctaaagtgttacccatgcggacatttctggttgagagtaaccggcgccgttctagtctcgtagttttaccgagcactatactatctaccgacactcccaattcaaatattccggaggacattcctctacctattcctctacctagagcggtgctcgagactatcatgcattctgtaggtgtcttaccagatggacggcttgtctttctcgacagaagcttgtgggtttgcacagcacccctcaacgaaagtgccaatattacaaggcatttcttcataccctatgactgggttacaactactggcgctcagctttgtcaattgcttactgatggaacatttctctgccctactaagggcagagtcgctatcatgaggagttctcttatggctgcgtggtga

SEQ ID NO: 36020 - protein, 1616 aa, Muscodor strobelii
  misc_feature: SGI Peptide ID NO. 572481
  misc_feature (54)..(1564): NCBI GI: 116206072 Blast Desc: CHGG_02329 [Chaetomium globosum CBS 148.51] gi|88182926|gb|EAQ90394.1| CHGG_02329 [Chaetomium globosum CBS 148.51]
  misc_feature (88)..(1612): NCBI GI: 259483375 Blast Desc: TPA: NACHT and WD domain protein (AFU_orthologue; AFUA_3G07460) [Aspergillus nidulans FGSC A4]
  misc_feature (88)..(1594): NCBI GI: 67900580 Blast Desc: AN7277.2 [Aspergillus nidulans FGSC A4] gi|40741958|gb|EAA61148.1| AN7277.2 [Aspergillus nidulans FGSC A4]
  misc_feature (86)..(1612): NCBI GI: 258565149 Blast Desc: [Uncinocarpus reesii 1704] gi|237907020|gb|EEP81421.1| [Uncinocarpus reesii 1704]
  misc_feature (68)..(1609): NCBI GI: 171679052 Blast Desc: protein product [Podospora anserina] gi|170937597|emb|CAP62256.1| protein product [Podospora anserina]
  misc_feature (85)..(1612): NCBI GI: 145603982 Blast Desc: MGG_10481 [Magnaporthe grisea 70-15] gi|145012093|gb|EDJ96749.1| MGG_10481 [Magnaporthe grisea 70-15]
  misc_feature (89)..(1608): NCBI GI: 119180469 Blast Desc: CIMG_08863 [Coccidioides immitis RS]
  misc_feature (181)..(1608): NCBI GI: 240110346 Blast Desc: WD domain, G-beta repeat containing protein [Coccidioides posadasii C735 delta SOWgp]
  misc_feature (87)..(1612): NCBI GI: 46135873 Blast Desc: FG09452.1 [Gibberella zeae PH-1]
  misc_feature (87)..(1612): NCBI GI: 256733681 Blast Desc: NECHADRAFT_36093 [Nectria haematococca mpVI 77-13-4]
MWKRLKATKSRPPPKVNDDDKSQTLPTISVKDDSVYSRADSSDSKTLRGLEIRRKGSEQSAISDLNGQLFATQSHQRRRSEDRRDDPLGLHVLYSPSVEKRTVDIILIHGLGGSSLRTWCHGRDLDNLWPSLWLPNEDSLSSARILTYGYNAHFSSKKEQASLAIGDFANDLLFRMKYSENGKERLGQVPIIIIAHSMGGLVFKKAFIHGLLNDEFQDIVAMIRSVLFLATPHRGTDLAETLNKILVSSIFRHTSKDYVLELARRSPTIDELNESFRHHASKLHIFSFYETLSTTIGPLSTMLLDKNTAVLGYPGETPQPLSANHHDVCKFQSRQDPNYLSVLGALRSIIQPESSSRADEGSEFSEDNLAMVKTLVGISTPPEEDLAAGRAVRKPGTCEQFFTSSEFNDWRSAATSQILWAHAPPGTGKSTLCTLVIERLLEESESCAYFFFKYDNHQKRSISHMLRSIAYQVSVLEPRVGSELANLAETGERLHNADAMTIWKKIYLSVMSKLHARQPYYWVIDGIDESESSRQIVDFLSGTQKFESTVKVLILSRPHFTINQALQKAALKVPIVEFQLGDNKEDIRLAVTEEIVYLASDEGFKTDIINEITRRSHGNFLWASLVVKLVASCHRQDQVTRLLETTPDGMDKLYDRMFSAVTSLHLPEDMNLARILLSWAIYSRTPLTVEELSEPYAMEFKPVMDIKHTVNQICGQFVTINASSQIILVHHSAREYLRRHSPPGFSLKAHHSHEELFGRCLVTICDKDLRGKIQMLRVPQFLRYAATSWAFHLENCSVQSDRILNGLTRFFKGPFPLAWIQYMAMSGHLSDLPGVSRRLTNYVRKRRKIDAEKPPMLHRITDLSLIDAWAIDIMKIPAKFGRNLTSDPSLIYKCVPPLSPINSAIYQKFATSPAATLSVSGIPNEDWNDCIARVSSSTGKAVRLAASAVYLAVASDLPRGLVTVWDTVLYQVHNTFNIRERILHLVFNQADSLLACYGIKHTYVWKPGDGLQVLHVLNPRQERAIELRFDEHDCLLIVTDLKRVYRLATQTGSDHAFSWVRMDPAILEEPSLPEGVWLGTPTSVAFNHDCSQVAVAYRNFPLTVWSIDSACVVTRLTRRRNSGQGSMNSFTGDNKVVWHPSGSHVLGIFGDIFKWSPSEDTYEVANNESGIIPHDIECTPNGLAFITGDVEGSIKIYEISSMTMIYRLTSEDGISRICVSPDSSRFYDLRGSYCNVWEPNCLMRLADMSSERFNDASSTTDSFWSDTEDTMSTSVSFPASESRADNTPGIVAVAPQHNALHPIAYSTDDGFIHVSHHDNIVLVGKSMSGIGVEHLAWDELHCQLAFSDISGTVMVKSITTSPASEGSIRVQDIYNESKSPRNRGNTRQLLFQKNGASLIVYGEKCTQMLSIPDGAIIAENPTSGVEHGTWFQHPGRQDEVVFLSGTEAKIFDWNFESKRSVHIPITRDPDIDTAIASVLPSHHPKVLPMRTFLVESNRRRSSLVVLPSTILSTDTPNSNIPEDIPLPIPLPRAVLETIMHSVGVLPDGRLVFLDRSLWVCTAPLNESANITRHFFIPYDWVTTTGAQLCQLLTDGTFLCPTKGRVAIMRSSLMAAW

SEQ ID NO: 36021 - DNA, 5592 bp, Muscodor strobelii
  misc_feature: SGI EST ID NO. CUFF.85721.0
  misc_feature: Variant of the nucleotide sequence at SEQ ID NO 36019
gagaacaacacgaagatgactggctgaggagactcgagggccaaaaaaagatagctaggggacagcgctcacgacacccctgccttgctgaacgatgtgatccgagcaaccctggcggagagggctaggcttggtgggaattggcttgtgggcggggaggctcttcaggaggagttcatttcaaaatcaacatgcgattgttgatttttgcaaagagacgtcatatcatgaataacatgcctcggatacctggcaaacatgtggaaacgcttgaaagcaacgaagagtcgaccaccgccgaaagtaaatgacgacgacaaatcccagacactccctaccatatctgtaaaggatgactcggtctattctcgcgcggactcttccgactcgaagactctccgaggtctagaaattcggcgcaaagggtccgagcaaagtgcgatatctgatctcaacggccaactgtttgcgacccaatctcatcaacggcgtcgctccgaagatagacgagatgatccactcggtcttcacgtcttatactcaccaagtgtcgagaagcggaccgtagacataattttgatacatgggcttggtggatcgagcctgcgtacctggtgccacggtcgcgatctcgataacctctggcctagtctctggctaccaaacgaggatagtttgtcgtcggcaaggattttgacatatggctacaatgcgcatttctcttcgaagaaagagcaggcatctcttgccatcggagactttgccaatgacctcctattccgaatgaaatatagcgaaaatgggaaagagcgactgggccaagttccaatcatcatcatcgcgcactccatgggtgggcttgtttttaaaaaggcatttattcacggcttgctcaacgacgaatttcaagatatagtagctatgatcagatcagttctattccttgccacgcctcaccgtggaacagatctagccgagaccctgaacaaaatactagtaagctcaatttttagacacacttcgaaagactatgtattggagttggcgcgcaggagcccgaccattgatgaacttaacgaatcattcaggcaccatgcctccaagcttcatattttctccttctacgaaactttatctactacgataggtcccctatcgactatgttgctggacaagaataccgccgtgcttggttatccgggggagacgccgcagcccttgtcggccaatcatcatgatgtttgcaagttccaaagtagacaagacccaaactatctatccgtactaggtgccttgagaagtatcattcagccagaatcttcgagtcgtgcagatgaagggagtgaattttcggaggacaacctagccatggtcaagaccctcgtcggcatatctacgccacccgaagaagatcttgccgctggtcgtgcggtgagaaaaccaggaacttgcgagcaatttttcacgagcagcgagtttaatgactggcggagtgctgccacaagccagatattgtgggcacacgcgccaccaggcaccggcaaatcgactctttgcacacttgtcatcgaacgcttgctcgaggagagcgaatcatgtgcctatttcttcttcaagtatgacaaccaccagaagagatctatcagtcacatgttacgatccatagcgtaccaggtgtctgtcctggaaccgagagttggcagtgagcttgcaaacttagccgaaacaggagaacgtcttcacaacgcagacgcaatgaccatctggaaaaagatttatctctccgtgatgtccaaactgcatgcacggcaaccttactattgggtaattgatggaatcgacgaatcggaatctagtagacagattgtcgacttcttgtccggcactcaaaagtttgaaagcacagtcaaggtgctcatccttagtcgccctcattttactattaatcaggctttacagaaagctgcgctaaaagttcctatcgtggaattccagttgggcgataacaaagaggacattcgcttagctgtaacagaagagatcgtataccttgcatctgacgaaggattcaagactgacattatcaacgagattacacgacgctctcacggcaatttcctttgggctagcttagtggtcaagcttgtggcttcgtgccatcgtcaagaccaagtcacaagactccttgagactacaccagatggaatggataaactctacgacagaatgttttcagcagttacgagtctccatttgccagaagacatgaatttggctaggatacttttatcatgggcgatctattcacgaaccccgcttaccgtcgaagagctttcagagccatatgcaatggagtttaagcccgtcatggacatcaagcatactgttaaccagatttgcggtcagttcgttacaataaatgcatctagccaaattatactcgttcaccattcggcgcgagagtacctcagaagacactcacctcctggcttctccctcaaagcacatcactcacacgaagaattattcggaaggtgtctagtgactatatgtgacaaagacttacgtggaaagatccagatgcttagggtgccacaatttttgcgatacgcagctacgtcttgggcattccacctcgagaactgtagcgtgcaatctgataggattctcaatggcctcacgcgctttttcaagggaccttttccacttgcctggattcagtatatggcaatgagtggacacctatctgacctgccaggtgtttcccgaaggttaacaaattacgtcaggaagagacgcaagattgatgccgagaaaccgcccatgttgcatcggatcaccgacttatctcttattgatgcttgggcaatcgacattatgaagataccggcaaaatttggacgaaatttgacaagtgatccgtcactgatatataaatgtgttcccccgctcagcccgatcaattcggcgatataccagaagtttgcgacaagccccgcagctacgctttccgtcagcggaatcccgaatgaagattggaatgactgcattgctcgtgtttctagtagcactggaaaagcagttcgtcttgccgcatctgcggtatatctggctgttgcgtccgatctgccacgaggattggtcactgtttgggacacagtcttgtatcaggtccacaacacgtttaatatcagagaacgaatattgcatttggtcttcaatcaggccgactcccttctcgcatgctatggtatcaagcatacttatgtgtggaaacctggcgacggcttgcaggttctacatgtcctaaatccgcgtcaagagcgtgcaatcgagctacgattcgacgagcatgattgtctactgatcgtgaccgatttgaagagagtttatcgcttagcgactcagactggctctgaccatgcattctcctgggtaaggatggaccctgctattcttgaggaaccaagtcttccagaaggcgtatggttaggcacacccacctcagttgcgtttaaccatgactgcagtcaagttgcagtcgcataccgaaacttcccgttgacagtgtggagtatcgactccgcttgtgttgtcacacgtttgactagaagacgaaattccggtcaagggtcaatgaattccttcactggagataacaaagtcgtatggcacccctcaggcagtcatgtgctgggaatcttcggagacatattcaaatggagcccctcggaagacacctacgaagtcgccaacaatgaaagcggcatcatccctcatgacattgagtgcacccccaatggccttgcctttattactggagatgtggaaggatcaatcaagatatacgaaatatcctctatgacaatgatttacagactcacgtctgaggatggtatcagccgtatctgtgttagccctgatagtagtcgcttctacgatcttcggggatcttattgcaatgtttgggagccaaattgtcttatgagacttgcagatatgtcatctgagaggtttaatgatgcctcaagtacaactgatagcttctggtcagacacagaggacacaatgagcacctcagtttcatttcctgcatcggaaagtcgggcggataatacgccaggcatcgtggcagttgcaccacagcataatgcacttcatccaattgcttactcgaccgacgatggcttcatccacgtatcacatcatgacaacatagttctcgtcgggaaatctatgtcgggaattggtgtggaacaccttgcgtgggacgaattacactgtcagctcgccttttctgatataagtggcactgtgatggtcaaatctattacgactagcccagcatccgagggtagtattcgcgtccaggatatatacaatgaatcaaaatcacctcgcaatcgagggaacacccgacagcttttgttccaaaagaatggagccagtctcatcgtttatggggagaaatgtactcagatgctttcaattccagatggtgctatcatcgccgaaaatcccacgtcaggtgtcgaacatggtacctggtttcaacatcctggccggcaagacgaagttgtatttctatctggcaccgaagccaagatatttgattggaactttgaatcaaagcgtagtgttcacataccaataacgagagatccggacattgacactgcgattgcgtctgtcttgcctagccatcatcctaaagtgttacccatgcggacatttctggttgagagtaaccggcgccgttctagtctcgtagttttaccgagcactatactatctaccgacactcccaattcaaatattccggaggacattcctctacctattcctctacctagagcggtgctcgagactatcatgcattctgtaggtgtcttaccagatggacggcttgtctttctcgacagaagcttgtgggtttgcacagcacccctcaacgaaagtgccaatattacaaggcatttcttcataccctatgactgggttacaactactggcgctcagctttgtcaattgcttactgatggaacatttctctgccctactaagggcagagtcgctatcatgaggagttctcttatggctgcgtggtgaaggcccgctatcaactgcaactagagggaattaagttgttcatttgtaaattaatgacacccttagctttacttcatagatatcccgcgaggattgaacgtctgccagtgaatcaatgacaccaccgctcagcaatccactcatggggtacgttcatagactcagacttagatagccagtcgatcacaagtggttggaatagatagatatgagtcgatcgtgatgctttaaatgaagtgctagattatttctattcggttgaattaccatacattcatggtatctgtcgatttgcgcgaatgacttaaggggctggtgtctatcgatcggtgttcaatcatgccttttgatcagtcaatatgcctctgtgaaactgctttcatgccaatagaacgagtttctctctgctaaacttttggacctgcttgagacttttccaaggtctctctgcccaagagcgcaatgtattgtgagccagcatcg

SEQ ID NO: 36022 - DNA, 1098 bp, Muscodor strobelii
  misc_feature: SGI cDNA ID NO. 572482
  misc_feature: Elevated expression when VOC is produced
  misc_feature: Encodes the peptide sequence at SEQ ID NO 36023
atggcttcttcgggtgtaataaaagggaagcggcgagacagcgcaggcggcattgaacaacccgatgccaaccgcggagctatcgaacaagcgatcctcgatccagcaatagcagcagtcttggagaaaggcgataccatatccggaattcacaaatatggcacctcaacttgggcggaaacaatggcaagtactaggcccttcgaacgttgctcagactttcgaactggctatcagagaatcgacgcggacacagcagagggagagcctcgttcctatttcctgaagaccctgagcgtggacaatgcagccgaaagagtttatggggagttcaaagcgatgtccgagatttataacacaatgccttctattgcaccactgcctcgtgggtacggtgaatgcaaggacaagaagaacacgcatttcttcgtttgcgattttctcaacatcactcatgatcttcctgaccctgaacgcttgggtaagacgctggctgaactgcatcacaaaagccaatctcctaatggtcttttcggttttcactgcacaacattcgatggcgaaaaacctctgaacactacgtgggacagtagttggactcggttttttactcgcctgatcaacgatgtttatgaacaggaaaaggaagtcaatggtcattggcagccgctggaagatgcaatggcaatcacatcgagccaattgatcccccggcttctcgacccactcgtagccgaagggcgagtgatcaagccatgtcttattcacggcgatttatgggaatcaaacattggaacggatgaggaaaccgatgatatctacatatatgatgcttgtgcatattacgcccatcacgagaaagaggtcgcgatttggagagttgcacatcatcaaatgacagatgagaaatatcgacgagaatacttcaagaattacccacccagcgagcctgtagaggaggcagatgatcgaaacaggctatatgccgtagagactcttttgatcaactcgttgtcatttcctggcgccaagacacgacagctggcgtatgaagagctcaaatttctaatcggcaagtatttaccagcgagcttgtaa

SEQ ID NO: 36023 - protein, 365 aa, Muscodor strobelii
  misc_feature: SGI Peptide ID NO. 572482
  misc_feature (31)..(360): NCBI GI: 116206070 Blast Desc: CHGG_02328 [Chaetomium globosum CBS 148.51] gi|88182925|gb|EAQ90393.1| CHGG_02328 [Chaetomium globosum CBS 148.51]
  misc_feature (33)..(360): NCBI GI: 145228563 Blast Desc: An01g01490 [Aspergillus niger] gi|134054681|emb|CAK43522.1| protein product [Aspergillus niger]
  misc_feature (33)..(362): NCBI GI: 261356147 Blast Desc: conserved [Verticillium albo-atrum VaMs.102]
  misc_feature (27)..(348): NCBI GI: 258563734 Blast Desc: [Uncinocarpus reesii 1704] gi|237908119|gb|EEP82520.1| [Uncinocarpus reesii 1704]
  misc_feature (28)..(363): NCBI GI: 116214451 Blast Desc: CHGG_11066 [Chaetomium globosum CBS 148.51] gi|88175421|gb|EAQ82890.1| CHGG_11066 [Chaetomium globosum CBS 148.51]
  misc_feature (34)..(365): NCBI GI: 240110347 Blast Desc: CPC735_063790 [Coccidioides posadasii C735 delta SOWgp]
  misc_feature (31)..(330): NCBI GI: 255946231 Blast Desc: Pc20g14050 [Penicillium chrysogenum Wisconsin 54-1255] gi|211588618|emb|CAP86734.1| Pc20g14050 [Penicillium chrysogenum Wisconsin 54-1255]
  misc_feature (33)..(330): NCBI GI: 169765035 Blast Desc: [Aspergillus oryzae RIB40] gi|83764843|dbj|BAE54987.1| protein product [Aspergillus oryzae]
  misc_feature (33)..(330): NCBI GI: 145256231 Blast Desc: An10g00710 [Aspergillus niger CBS 513.88] gi|134078637|emb|CAK40510.1| protein product [Aspergillus niger]
  misc_feature (33)..(296): NCBI GI: 46135869 Blast Desc: FG09450.1 [Gibberella zeae PH-1]
  misc_feature: Useful for introducing or modulating the production of volatile compounds
MASSGVIKGKRRDSAGGIEQPDANRGAIEQAILDPAIAAVLEKGDTISGIHKYGTSTWAETMASTRPFERCSDFRTGYQRIDADTAEGEPRSYFLKTLSVDNAAERVYGEFKAMSEIYNTMPSIAPLPRGYGECKDKKNTHFFVCDFLNITHDLPDPERLGKTLAELHHKSQSPNGLFGFHCTTFDGEKPLNTTWDSSWTRFFTRLINDVYEQEKEVNGHWQPLEDAMAITSSQLIPRLLDPLVAEGRVIKPCLIHGDLWESNIGTDEETDDIYIYDACAYYAHHEKEVAIWRVAHHQMTDEKYRREYFKNYPPSEPVEEADDRNRLYAVETLLINSLSFPGAKTRQLAYEELKFLIGKYLPASL

SEQ ID NO: 36024 - DNA, 1801 bp, Muscodor strobelii
  misc_feature: SGI EST ID NO. CUFF.85766.0
  misc_feature: Variant of the nucleotide sequence at SEQ ID NO 36022
tgtataatgtgtagccgagcaatgttgaacggctaactcaaccttgtgtaggagaatcgacgcggacacagcagagggagagcctcgttcctatttcctgaagaccctgagcgtggacaatgcagccgaaagagtttatggggagttcaaagcgatgtccgagatttataacacaatgccttctattgcaccactgcctcgtgggtacggtgaatgcaaggacaagaagaacacgcatttcttcgtttgcgattttctcaacatcactcatgatcttcctgaccctgaacgcttgggtaagacgctggctgaactgcatcacaaaagccaatctcctaatggtcttttcggttttcactgcacaacattcgatggcgaaaaacctctgaacactacgtgggacagtagttggactcggttttttactcgcctgatcaacgatgtttatgaacaggaaaaggaagtcaatggtcattggcagccgctggaagatgcaatggcaatcacatcgagccaattgatcccccggcttctcgacccactcgtagccgaagggcgagtgatcaagccatgtcttattcacggcgatttatgggaatcaaacattggaacggatgaggaaaccgatgatatctacatatatgatgcttgtgcatattacgcccatcacgagaaagaggtcgcgatttggagagttgcacatcatcaaatgacagatgagaaatatcgacgagaatacttcaagaattacccacccagcgagcctgtagaggaggcagatgatcgaaacaggctatatgccgtagagactcttttgatcaactcgttgtcatttcctggcgccaagacacgacagctggcgtatgaagagctcaaatttctaatcggcaagtatttaccagcgagcttgtaattttgcaatagacagcacgaggacttcaaaatgcctactcagttggaagggtccgcaagttcttttcaaatttcaatacatctctacctatgcataaaagagatgagtagcctactgctcatgcagccgtagcgcaaagtcaagtacctagtaacaaagttaatacggtatttttttcaagctccccaccgtattaaagtaacatcgtctacctattcatgtaggttgcttcaatatcattctgctttcttctcggtacaaagatttgctcgtggaataccggacacctgattcaagttagctcgaacaagtcccagataatgatacatcgattggagctgttatgaattatcgaaagaatttgtccttgttctaccacgcagtaccccggttctgaaatttaaagcgattcgcactttgtattatctgtcaatctgaagctgccactagtagaattgtagaattatccttaagcccgcctcagatatgtatgactacagtttataacctccgtttaaacagcgtcggcgctatgagcttggcaagggtctcgttgtgatttggattgtcgccaatgaagaccttttgagcgtaacatcatcagaagtggtactatgaaagcttcgactcctgcaagcaagacgaaacaccaccctgggcctaatcttccaataagagcatcaagtgctgcaagatagccggcagctagctcgcagcgaacaaaattgcaggtagcttgagcagttgatggacaatcgggatgtacatcaacaagtagagtgttcaaagaggtgaatagcgtctgtaatgccaagccaataaagaattgggtgacaagtggtcctgcaattgaagcatggacttgtaactgccaaccgtagcctatca

SEQ ID NO: 36025 - DNA, 1536 bp, Muscodor strobelii
  misc_feature: SGI cDNA ID NO. 572483
  misc_feature: Encodes the peptide sequence at SEQ ID NO 36026
atgtctcatgaagtcaccacgacgaacgaagataaagctgaagcagcggattgcttatctccgaacaatgctcaagaagtactttgcgactactctgcattttcacgcaagcaaaagaatatcatcataggccttgcggcgtgcgcgggttggttctcttccatcagtagcttcatatactttccggctatcccaattttggctgaggacctgggtcagagtattgggaaaatcaatctcactgtcacatcttatctgattgtttcaggtgtgtccccggtaattatcggtgacatggcagatcgcttcgggaggagaccaacttttatagtttgcctcactgtctatttagctgcaaatatcgggcttgcgacgcagtcatcctttggccttcttcttttcctccgaatggttcaaagcgcgggtatctcaggcacctttgcgataacctatggcgttcttggcgatttattcactcccgcagagcgaggtggttactcgggcatcgtctcattgcttctaaacacgccaccaagtctcggtcctataataagcggcctattactgcttcgatggtcttggcgatcgatattctggtttttatccgtatccacgtctctatgccttatcccaatgattgttgtattccccgaaacagggagaaatattgtgggtgatggcagcattccggtgaaggcttcaaataagcctttgctaggagttcttcaacccaaggagagtagccgtgagccacaaggagagcttggcgcagtgatcgagaagccgcggagaagtatccgagttccaaacccaatcgcatctcttaggcttattcgaaacccagaaacgtctatcatcctaatctcatatggcataaactactcgacatacagttgtctccaggcttctttgtctagcctgttcttggatacttatcagatcgaaggagtagcttcggggctcatttacatcccgtttggcatcgcttgtgctgctgctgcttatggtacagggttccttctagactttaattatcgtcggtctgccgccaaggtcggtatgagtgtcgaaaaatgtaagaacaatgacctcgcgcagttccccatcgaaaagtcaaggttgcgtttcgttccagcttccgtggcgatcggtgttggacttgtgataggctacggttggcagttacaagtccatgcttcaattgcaggaccacttgtcacccaattctttattggcttggcattacagacgctattcacctctttgaacactctacttgttgatgtacatcccgattgtccatcaactgctcaagctacctgcaattttgttcgctgcgagctagctgccggctatcttgcagcacttgatgctcttattggaagattaggcccagggtggtgtttcgtcttgcttgcaggagtcgaagctttcatagtaccacttctgatgatgttacgctcaaaaggtcttcattggcgacaatccaaatcacaacgagacccttgccaagctcatagcgccgacgctgtttaa

SEQ ID NO: 36026 - protein, 511 aa, Muscodor strobelii
  misc_feature: SGI Peptide ID NO. 572483
  misc_feature (46)..(450): Pfam Id: PF07690 Pfam Desc: Major Facilitator Superfamily
  misc_feature (46)..(429): Pfam Id: PF07690 Pfam Desc: Major Facilitator Superfamily
  misc_feature (3)..(501): NCBI GI: 212543579 Blast Desc: conserved [Penicillium marneffei ATCC 18224] gi|210066851|gb|EEA20944.1| conserved [Penicillium marneffei ATCC 18224]
  misc_feature (30)..(504): NCBI GI: 255950382 Blast Desc: Pc22g20580 [Penicillium chrysogenum Wisconsin 54-1255] gi|211592975|emb|CAP99346.1| Pc22g20580 [Penicillium chrysogenum Wisconsin 54-1255]
  misc_feature (2)..(493): NCBI GI: 242787158 Blast Desc: florfenicol exporter, [Talaromyces stipitatus ATCC 10500] gi|218721094|gb|EED20513.1| florfenicol exporter, [Talaromyces stipitatus ATCC 10500]
  misc_feature (2)..(500): NCBI GI: 238489581 Blast Desc: MFS transporter, [Aspergillus flavus NRRL3357] gi|220698416|gb|EED54756.1| MFS transporter, [Aspergillus flavus NRRL3357]
  misc_feature (31)..(505): NCBI GI: 256727508 Blast Desc: NECHADRAFT_76423 [Nectria haematococca mpVI 77-13-4]
  misc_feature (17)..(500): NCBI GI: 259480685 Blast Desc: TPA: MFS transporter, (AFU_orthologue; AFUA_5G01520) [Aspergillus nidulans FGSC A4]
  misc_feature (31)..(501): NCBI GI: 39944284 Blast Desc: MGG_04153 [Magnaporthe grisea 70-15] gi|145014887|gb|EDJ99455.1| MGG_04153 [Magnaporthe grisea 70-15]
  misc_feature (2)..(496): NCBI GI: 169763636 Blast Desc: [Aspergillus oryzae RIB40] gi|83770746|dbj|BAE60879.1| protein product [Aspergillus oryzae]
  misc_feature (31)..(505): NCBI GI: 156031347 Blast Desc: SS1G_14095 [Sclerotinia sclerotiorum 1980] gi|154699497|gb|EDN99235.1| SS1G_14095 [Sclerotinia sclerotiorum 1980]
  misc_feature (31)..(511): NCBI GI: 171676988 Blast Desc: protein product [Podospora anserina] gi|170936561|emb|CAP61221.1| protein product [Podospora anserina]
MSHEVTTTNEDKAEAADCLSPNNAQEVLCDYSAFSRKQKNIIIGLAACAGWFSSISSFIYFPAIPILAEDLGQSIGKINLTVTSYLIVSGVSPVIIGDMADRFGRRPTFIVCLTVYLAANIGLATQSSFGLLLFLRMVQSAGISGTFAITYGVLGDLFTPAERGGYSGIVSLLLNTPPSLGPIISGLLLLRWSWRSIFWFLSVSTSLCLIPMIVVFPETGRNIVGDGSIPVKASNKPLLGVLQPKESSREPQGELGAVIEKPRRSIRVPNPIASLRLIRNPETSIILISYGINYSTYSCLQASLSSLFLDTYQIEGVASGLIYIPFGIACAAAAYGTGFLLDFNYRRSAAKVGMSVEKCKNNDLAQFPIEKSRLRFVPASVAIGVGLVIGYGWQLQVHASIAGPLVTQFFIGLALQTLFTSLNTLLVDVHPDCPSTAQATCNFVRCELAAGYLAALDALIGRLGPGWCFVLLAGVEAFIVPLLMMLRSKGLHWRQSKSQRDPCQAHSADAV

SEQ ID NO: 36027 - DNA, 1160 bp, Muscodor strobelii
  misc_feature: SGI EST ID NO. CUFF.85724.0
  misc_feature: Variant of the nucleotide sequence at SEQ ID NO 36025
aacgagaccgaagctcttgctcatttgtaacgtgcgtcatgaagattacgtgtgatcatgtctcatgaagtcaccacgacgaacgaagataaagctgaagcagcggattgcttatctccgaacaatgctcaagaagtactttgcgactactctgcattttcacgcaagcaaaagaatatcatcataggccttgcggcgtgcgcgggttggttctcttccatcagtagcttcatatactttccggctatcccaattttggctgaggacctgggtcagagtattgggaaaatcaatctcactgtcacatcttatctgattgtttcaggtgtgtccccggtaattatcggtgacatggcagatcgcttcgggaggagaccaacttttatagtttgcctcactgtctatttagctgcaaatatcgggcttgcgacgcagtcatcctttggccttcttcttttcctccgaatggttcaaagcgcgggtatctcaggcacctttgcgataacctatggcgttcttggcgatttattcactcccgcagagcgaggtggttactcgggcatcgtctcattgcttctaaacacgccaccaagtctcggtcctataataagcggcctattactgcttcgatggtcttggcgatcgatattctggtttttatccgtatccacgtctctatgccttatcccaatgattgttgtattccccgaaacagggagaaatattgtgggtgatggcagcattccggtgaaggcttcaaataagcctttgctaggagttcttcaacccaaggagagtagccgtgagccacaaggagagcttggcgcagtgatcgagaagccgcggagaagtatccgagttccaaacccaatcgcatctcttaggcttattcgaaacccagaaacgtctatcatcctaatctcatatggcataaactactcgacatacagttgtctccaggcttctttgtctagcctgttcttggatacttatcagatcgaaggagtagcttcggggctcatttacatcccgtttggcatcgcttgtgctgctgctgcttatggtacagggttccttctagactttaattatcgtcggtctgccgccaaggtcggtatgagtgtcgaaaaatgtaagaacaatgacctcgcgcagttccc

SEQ ID NO: 36028 - DNA, 1635 bp, Muscodor strobelii
  misc_feature: SGI cDNA ID NO. 572484
  misc_feature: Encodes the peptide sequence at SEQ ID NO 36029
atggatgagccgcaattgcggctaggcgtcgcggaacctgatgtcatctctagtgttgcgccagcgcatctcaatggaaaacccactgaatcgcccacagaccttccccacgagtcgccaatagtcgaaaaggcagaatcatcgactccgcaacgcaatgtgtccaaggcagccggaatcactgttatcgtgacgctagcgggaataagcttcctcaacacaatgggatccggcattcttatcgctgcactaccaacaatggcccgcgatgttggcttgcctcgggggctaatgctttggccggcttcagtgtatgcactcgcagctggcgcattactcctcatcttcggcgcggccgccgatgttgtgggtgccaagctcatgtgggtgacgggaagctttctcttcatcgcgttcacactgggcatcgggtttgctcagactggcatccagcttattctatttcgcacgttccaaggggtcgccatagcaatgtgcttgccaactgccgtgagcctaatcacgaacacatttccaagaggatcttggaggaacatcgcttttgccatgaatggtatgggccaacccttggggtactcactcggacttgtgctaggtggtattttcaccgacacaattggttggagatgggcgtattacctgatggctatcatcaacttttttctctctgtcgcgtctgtgtggtcgctaccaactgtgcatcaccgttcggagaaacgatggactactagattagcgcaggacatcgactgggtaggggccatcgttatgagtgttggacttgctttgctcttttatgtcttagctgccgtgtcaacttcttacataagtctcggatatgcccagaatattgcacttttagttgtcgcactggtgctcattctctctttccccctgtggatgcactggcagactatccacgacagaccagctcttatccctaacaagctctggcgaaatgcaagctttacgacaatctgcacgtcggtcttcttctgttgggcttcgttgaatgcaattgaatattacatcacactatacttccaagaagttgaggacatctcgccgttgcaaagctctctccgattcttgccgcatccaattgcaggcacggcaactaatatcgcaaccgcatatctgatctccagagtcgatgtccgtactcttggcgtcgggtcagggctcattacaatggtcgcgcccgtcttgatggcaacggtacggattggtgaaaattgtgatttgaactatcaaatatcaaaatccaattggacggcgccgttctttgctcttctactctcacctctgagtcccgacgtactattcacagcgtcaaatctagtaatatcagatgcctttccctcagatgtgcaatctgtcgctggtggggtttttaacgaggtggcccaattcggcaatgctgttgggcttgctgtgactgcagcaattgcgtcatctgtgacggagcactcgcatagatcggactccaaagtcgcgttaatggatggctacagagcagccttctggactgtgtttgctgcaacagctatcgttgtgattttaagctttctcgggttgaaaactggcggcaaggttgggaagaagaatgactag

SEQ ID NO: 36029 - protein, 544 aa, Muscodor strobelii
  misc_feature: SGI Peptide ID NO. 572484
  misc_feature (66)..(484): Pfam Id: PF07690 Pfam Desc: Major Facilitator Superfamily
  misc_feature (25)..(544): NCBI GI: 238841379 Blast Desc: integral membrane protein [Microsporum canis CBS 113480]
  misc_feature (2)..(544): NCBI GI: 189206201 Blast Desc: efflux pump protein [Pyrenophora tritici-repentis Pt-1C-BFP] gi|187975528|gb|EDU42154.1| efflux pump protein [Pyrenophora tritici-repentis Pt-1C-BFP]
  misc_feature (12)..(544): NCBI GI: 46126509 Blast Desc: FG07632.1 [Gibberella zeae PH-1]
  misc_feature (48)..(543): NCBI GI: 261353130 Blast Desc: integral membrane protein [Verticillium albo-atrum VaMs.102]
  misc_feature (23)..(544): NCBI GI: 256724457 Blast Desc: [Nectria haematococca mpVI 77-13-4]
  misc_feature (75)..(544): NCBI GI: 258563360 Blast Desc: conserved [Uncinocarpus reesii 1704] gi|237907932|gb|EEP82333.1| conserved [Uncinocarpus reesii 1704]
  misc_feature (17)..(544): NCBI GI: 145229937 Blast Desc: An01g08550 [Aspergillus niger] gi|134055390|emb|CAK43944.1| protein product [Aspergillus niger]
  misc_feature (33)..(529): NCBI GI: 240105226 Blast Desc: Major Facilitator Superfamily protein [Coccidioides posadasii C735 delta SOWgp]
  misc_feature (46)..(544): NCBI GI: 259480547 Blast Desc: TPA: MFS transporter, (AFU_orthologue; AFUA_8G06760) [Aspergillus nidulans FGSC A4]
  misc_feature (17)..(540): NCBI GI: 145602512 Blast Desc: MGG_04850 [Magnaporthe grisea 70-15] gi|145010926|gb|EDJ95582.1| MGG_04850 [Magnaporthe grisea 70-15]
MDEPQLRLGVAEPDVISSVAPAHLNGKPTESPTDLPHESPIVEKAESSTPQRNVSKAAGITVIVTLAGISFLNTMGSGILIAALPTMARDVGLPRGLMLWPASVYALAAGALLLIFGAAADVVGAKLMWVTGSFLFIAFTLGIGFAQTGIQLILFRTFQGVAIAMCLPTAVSLITNTFPRGSWRNIAFAMNGMGQPLGYSLGLVLGGIFTDTIGWRWAYYLMAIINFFLSVASVWSLPTVHHRSEKRWTTRLAQDIDWVGAIVMSVGLALLFYVLAAVSTSYISLGYAQNIALLVVALVLILSFPLWMHWQTIHDRPALIPNKLWRNASFTTICTSVFFCWASLNAIEYYITLYFQEVEDISPLQSSLRFLPHPIAGTATNIATAYLISRVDVRTLGVGSGLITMVAPVLMATVRIGENCDLNYQISKSNWTAPFFALLLSPLSPDVLFTASNLVISDAFPSDVQSVAGGVFNEVAQFGNAVGLAVTAAIASSVTEHSHRSDSKVALMDGYRAAFWTVFAATAIVVILSFLGLKTGGKVGKKND

SEQ ID NO: 36030 - DNA, 1489 bp, Muscodor strobelii
  misc_feature: SGI EST ID NO. CUFF.85730.1
  misc_feature: Variant of the nucleotide sequence at SEQ ID NO 36028
aaaaggtgaaagaagaggtgcattgacaccagatcatttgcatctggctgaagttcgctcccacaagtctatgtcgccgagcaccatggatgagccgcaattgcggctaggcgtcgcggaacctgatgtcatctctagtgttgcgccagcgcatctcaatggaaaacccactgaatcgcccacagaccttccccacgagtcgccaatagtcgaaaaggcagaatcatcgactccgcaacgcaatgtgtccaaggcagccggaatcactgttatcgtgacgctagcgggaataagcttcctcaacacaatgggatccggcattcttatcgctgcactaccaacaatggcccgcgatgttggcttgcctcgggggctaatgctttggccggcttcagtgtatgcactcgcagctggcgcattactcctcatcttcggcgcggccgccgatgttgtgggtgccaagctcatgtgggtgacgggaagctttctcttcatcgcgttcacactgggcatcgggtttgctcagactggcatccagcttattctatttcgcacgttccaaggggtcgccatagcaatgtgcttgccaactgccgtgagcctaatcacgaacacatttccaagaggatcttggaggaacatcgcttttgccatgaatggtatgggccaacccttggggtactcactcggacttgtgctaggtggtattttcaccgacacaattggttggagatgggcgtattacctgatggctatcatcaacttttttctctctgtcgcgtctgtgtggtcgctaccaactgtgcatcaccgttcggagaaacgatggactactagattagcgcaggacatcgactgggtaggggccatcgttatgagtgttggacttgctttgctcttttatgtcttagctgccgtgtcaacttcttacataagtctcggatatgcccagaatattgcacttttagttgtcgcactggtgctcattctctctttccccctgtggatgcactggcagactatccacgacagaccagctcttatccctaacaagctctggcgaaatgcaagctttacgacaatctgcacgtcggtcttcttctgttgggcttcgttgaatgcaattgaatattacatcacactatacttccaagaagttgaggacatctcgccgttgcaaagctctctccgattcttgccgcatccaattgcaggcacggcaactaatatcgcaaccgcatatctgatctccagagtcgatgtccgtactcttggcgtcgggtcagggctcattacaatggtcgcgcccgtcttgatggcaacggtacggattggtgaaaattggtacgtgttgaaagatccacgcgagtcatttctgaccgcattcctaagacattgtactaatattcttatagtaagtgatttgaactatcaaatatcaaaatccagtcctttgtctaaaactatcggggcccgcttgggaacattg

SEQ ID NO: 36031 - DNA, 1539 bp, Muscodor strobelii
  misc_feature: SGI cDNA ID NO. 572485
  misc_feature: Encodes the peptide sequence at SEQ ID NO 36032
atgacggagacttcaacggttgtcgttgttggtggcggccctgttggcgcactggccgctctctatgctgcacgaagaggctatgacacggaactatatgaattgagagacgaccccaaccatggtgatccaacattaagacctgattttgcagtgattcctctcgcattgtctgagcgggggatccgggcaatcaagggtgcgaaggtccctggcctgttagatgatattcttcgagattcccggcctatatacacacgcatgatacacacccgcaataagtttggtcaaatgaaggaaatacccatgtcgtatggacctcaaggccagtgtctgcacacaatccagagggaaaaggtaacgaaacactgtttattggccttggagaaagagccaaaagcaaaactttttttcaatcataagatgacgaatctcgattttgacaacaaaaccgccacatttgaatccgtcctctggaaggatacatcctacaacttagatcaggctggtacgaagggcagagatgatcaggatcttcaaccagtcgggcaagtcgaagagtcatatcatgattctgcagcggaagccgtggacactttgcgattcaagactgtgaagtttgacttcctcatcggtgcagacggaacgtactcaactgttagacagcatctaatgcgaaagactgagatcgacttctctcagatttatgcgaatcttctctggtgcgatttgatcattcccggatctcagaatggcgattaccgcatgaattccaaatgtctccacgtatggcctgctgatgaagacatcgtgatggcccaacccgactttgacggctcttttcgcgccggcatggtctgtcgcgccgatcttgtcaggtatcatgagtcacacccacacgagtttgcagacttttttcaaaagcagttccctggcatagtgccgcagttactctcagccgaagaagtaacagcgcagtttgtggcccaccagaagatccctttgaagtctatcaagctcaacaaatttggctttaacgatgatgtaattttgctaggcgatagttcacatactatgaccccttttcatgcaatggggatgatcacagggcttgaagacgtacgggttttctatgagaatttcagagacagagccccaagctcaaatcttgaagttgccacagacaaaagtggcgctggtccattctgcccaaaaggtacaattgccgcatataccgcacatcgtgtacaagatgtgagtgtcatggtcgacatggcgaacgaacattattatgaacttcgtcatggggtccgatctccactcgcacgtgctcgaaagacatgtgatgccatgatcagtcgttgggcaccatttttaggctggacacccctttatgccagaatccagttcactcatgagcgtgtcagtgtcattcgcaagaaggagatgtggcagaggaatactatgaacattttgatggtgctagcgatggccgcgattatccgtgcggtgtttcttgggtttcagtctatcacatag

SEQ ID NO: 36032 - protein, 512 aa, Muscodor strobelii
  misc_feature: SGI Peptide ID NO. 572485
  misc_feature (4)..(410): Pfam Id: PF01494 Pfam Desc: FAD binding domain
  misc_feature (27)..(493): NCBI GI: 238841380 Blast Desc: kynurenine 3-monooxygenase [Microsporum canis CBS 113480]
  misc_feature (17)..(454): NCBI GI: 189206199 Blast Desc: kynurenine 3-monooxygenase [Pyrenophora tritici-repentis Pt-1C-BFP] gi|187975527|gb|EDU42153.1| kynurenine 3-monooxygenase [Pyrenophora tritici-repentis
  misc_feature (1)..(511): NCBI GI: 226279783 Blast Desc: kynurenine 3-monooxygenase [Paracoccidioides brasiliensis Pb01]
  misc_feature (7)..(505): NCBI GI: 70991557 Blast Desc: kynurenine 3-monooxygenase [Aspergillus fumigatus Af293] gi|74670972|sp|Q4WN75.1|KMO_ASPFU RecName: Full=Kynurenine 3-monooxygenase; AltName: Full=Kynurenine 3-hydroxylase; AltName:
  misc_feature (7)..(505): NCBI GI: 119468328 Blast Desc: kynurenine 3-monooxygenase, [Neosartorya fischeri NRRL 181] gi|223635242|sp|A1DMD5.1|KMO_NEOFI RecName: Full=Kynurenine 3-monooxygenase; AltName: Full=Kynurenine 3-hydroxylase; AltName:
  misc_feature (7)..(508): NCBI GI: 238839973 Blast Desc: kynurenine 3-monooxygenase [Microsporum canis CBS 113480]
  misc_feature (1)..(511): NCBI GI: 261187683 Blast Desc: kynurenine 3-monooxygenase [Ajellomyces dermatitidis SLH14081] gi|239594067|gb|EEQ76648.1| kynurenine 3-monooxygenase [Ajellomyces dermatitidis SLH14081]
  misc_feature (1)..(511): NCBI GI: 239608501 Blast Desc: kynurenine 3-monooxygenase [Ajellomyces dermatitidis ER-3]
  misc_feature (1)..(511): NCBI GI: 225682282 Blast Desc: kynurenine 3-monooxygenase [Paracoccidioides brasiliensis Pb03]
  misc_feature (7)..(480): NCBI GI: 238484951 Blast Desc: kynurenine 3-monooxygenase, [Aspergillus flavus NRRL3357] gi|220701764|gb|EED58102.1| kynurenine 3-monooxygenase, [Aspergillus flavus NRRL3357]
  misc_feature (29)..(505): SWISSPROT Homolog: EC 1.14.13.9 Kynurenine 3-monooxygenase
MTETSTVVVVGGGPVGALAALYAARRGYDTELYELRDDPNHGDPTLRPDFAVIPLALSERGIRAIKGAKVPGLLDDILRDSRPIYTRMIHTRNKFGQMKEIPMSYGPQGQCLHTIQREKVTKHCLLALEKEPKAKLFFNHKMTNLDFDNKTATFESVLWKDTSYNLDQAGTKGRDDQDLQPVGQVEESYHDSAAEAVDTLRFKTVKFDFLIGADGTYSTVRQHLMRKTEIDFSQIYANLLWCDLIIPGSQNGDYRMNSKCLHVWPADEDIVMAQPDFDGSFRAGMVCRADLVRYHESHPHEFADFFQKQFPGIVPQLLSAEEVTAQFVAHQKIPLKSIKLNKFGFNDDVILLGDSSHTMTPFHAMGMITGLEDVRVFYENFRDRAPSSNLEVATDKSGAGPFCPKGTIAAYTAHRVQDVSVMVDMANEHYYELRHGVRSPLARARKTCDAMISRWAPFLGWTPLYARIQFTHERVSVIRKKEMWQRNTMNILMVLAMAAIIRAVFLGFQSIT

SEQ ID NO: 36033 - DNA, 3147 bp, Muscodor strobelii
  misc_feature: SGI cDNA ID NO. 572486
  misc_feature: Encodes the peptide sequence at SEQ ID NO 36034
atgcgcctccttcatcgacaagatgacggaggcataacactgactgacgacctccatgataacatcccaccatacgcgattctttcgcatttgtggggtgccgatgaggaggaagtggtcttcaaagacatgaacaacagtaccggtaacgactcgaagcgcagctacgaaaagaaggtcgggtataataaagttgagctatgtgcaagatgggctgctgccgaccgtcttgatcatttctggattgattcttgctgtatagacaagtctaatagcactgagcttcaagaggcgattacttccatgttccgatggtaccgagatgcaacaaaatgctatgtatatttgccggacgtaaggactgacgaagacctggaaaactatcgaggaacattgccgcgttcagtctgggatactgccttccgtgaaagcaggtggttcacgagaggatggacactccaggagctcatcgctccaagacacgttgaattcttttccagagaaggctgtaagctgggtaaccgccaagaactagatcaagttctgcttgaggtgaccgggataccaatcagcgctctaaatggaaagtcgctttccactttcagcatcagcgagcgcatgtcatggtcgcggggtcgcgagacgaaacgcaaagaggacaaggcatactcgctgcttgggatcttcgacgtttcgatatttatcaactatggcgaaggagaaggacgagcaatggatcgacttcgcgctgagattgaacagcaccagggttcacaacgcacgcaagagtcgcacttcatggtgccttttggacgcaatgaaaactttgttgggcgtggcgcaatcttgaaacaacttattgcgaagatccctccagctgccaatcgcgatgattgtcagcgcaccgcggttgagggtcttggtggtattgggaagacgcaagtcgcgttggaagcggcctttcgagtccgtgatggtttaccagattgctctgtcttttgggtcccagcaatcgacttaaccacttttgagaacgcatatcgcaaaattggacaactactcgggttacaaggcatcaacgacgaggaagctgatgtgaaattgctcgtcaaaacgggcttaagccggtcgattgcggggacttggcttttaatcattgacaatgtcgatgacttagacgtgctgagcgaaatactcaaacatctccctttcaatactaaaggatcgattcttttcacaactcgaagtcatcaaataatcgcctacttagatatatcacaaaccaacagtattcttatgacgcagatgggcgacgccgaagctatggccttgttaagacacggcctcagagaaaggcagatcgacgacgcagcaaatgtcaagcgtttgctcgatcttctaactaatcttcccttagcgatcaaacaggcctcagcattcatggcttccaatatgaatgttacagtatcgcaatatctagaatcatgcgagtcaagcgatgcggatctgattgacttgctaagtcgccgtttcgaagaccgccaccgttaccaaggtcatgccgtgactcaaaatccagtcgccacgacgtggctaatatcattccagcatatctcccagttacagccacatgcagcaagctctctaaaattcatgtgctttcttgctgaaaagaacattcctttatccctcctgccaatttcctctaggattaagacgatggaagcgattggcatcctccaagcgtacgcgtttctctacgaatgtgatgacccagacacgttcaacatgcatcgacttgttcgactggccatgcgaaattggctgaagcagaaggaagaatggacccagtgtatagccacagtcgttcatcgactcgaggaagtttaccccttctccatgcatgagaataaagaaacatggataaagtacttcccgcatgcacagcagctgttagaaatcgatggcgctatcactgccaggcaaggaagtcaccttcttttcaagattgctcgaagctaccacgcctctggaaggtacgctgaggctgagtacttatttcggcgaacgctaggaatgtgggaagaagtgctaggtagggagcatccaaccacactccagtgcatgaatacccttgccgtgacgctttatcgccagggcaaatacagtcaagccgaaaggatgcagcaagagacgctcacattaagggaaaaggtgttaggcacagagcatcctggcacgctttccaccatgaacaacattgctctcaccttcgatcgccaagggaagtatgaccaggctgaagagatgcatcgaaggacattgagaatcagggagaaggtgcttggcagagagtcgcccgacacccttgctacaatgaataatatcgccttggcgctatatagtcaaggaaaatatgatgaagctgaggagatacaccggcagatactcgaatcaaggcagcgtgttcagggcagagaacatcccttcacgctttcaactatgaataatcttgcggaaactttagaaaggcaaggtaaatatcaggaagctgaaagtctatgccgcgaaacagtggagctaaagaagaaggtgctgggagagcagcatctttctactctaattagtatgaacactcttgcagtagtctatgagaaacaaggagactacggaactgcagaagggttacatcggaagacattacagctaagagagaaactgctaggaaaggaacatccggatacactgaccactatgagcgatctggcggaggctcttagtaagcaaaaggagtgcgaaggcgaggctataaagttgcaccgagaggcactacgcctgagagaagcagtactaacgaaagaccatcccgatactctagccagcatgtataatctagctcaagccctcagcaagcagggtgaattcgtacaagacgccgggagattatatcgggagtcgttgagaatgaggcaaatcgtgctgggggaagatcatccagacactattcagagtgtgaacgctcttgccgagctgctcagtgaccagggcaaatttgaagaggtcaagaagccaaacgggagcgcgtcaagtaatgaacatgtcgaggatcgacaactcgagcagtcacaggagcatgactcgaaatga

SEQ ID NO: 36034 - protein, 1048 aa, Muscodor strobelii
  misc_feature: SGI Peptide ID NO. 572486
  misc_feature (25)..(155): Pfam Id: PF06985 Pfam Desc: Heterokaryon incompatibility protein (HET)
  misc_feature (80)..(155): Pfam Id: PF06985 Pfam Desc: Heterokaryon incompatibility protein (HET)
  misc_feature (265)..(1023): NCBI GI: 171693841 Blast Desc: protein product [Podospora anserina] gi|170946869|emb|CAP73673.1| protein product [Podospora anserina]
  misc_feature (1)..(1022): NCBI GI: 39971019 Blast Desc: MGG_02976 [Magnaporthe grisea 70-15] gi|149210559|ref|XP_001522654.1| MGCH7_ch7g754 [Magnaporthe grisea 70-15] gi|86196709|gb|EAQ71347.1| MGCH7_ch7g754 grisea
  misc_feature (1)..(931): NCBI GI: 189197887 Blast Desc: kinesin light chain 1 [Pyrenophora tritici-repentis Pt-1C-BFP] gi|187981229|gb|EDU47855.1| kinesin light chain 1 [Pyrenophora tritici-repentis Pt-1C-BFP]
  misc_feature (1)..(1023): NCBI GI: 189210760 Blast Desc: kinesin light chain 3 [Pyrenophora tritici-repentis Pt-1C-BFP] gi|187977804|gb|EDU44430.1| kinesin light chain 3 [Pyrenophora tritici-repentis Pt-1C-BFP]
  misc_feature (1)..(854): NCBI GI: 156034877 Blast Desc: SS1G_13374 [Sclerotinia sclerotiorum 1980] gi|154698777|gb|EDN98515.1| SS1G_13374 [Sclerotinia sclerotiorum 1980]
  misc_feature (1)..(969): NCBI GI: 189204674 Blast Desc: kinesin light chain [Pyrenophora tritici-repentis Pt-1C-BFP] gi|187985771|gb|EDU51259.1| kinesin light chain [Pyrenophora tritici-repentis Pt-1C-BFP]
  misc_feature (266)..(926): NCBI GI: 116206052 Blast Desc: CHGG_02319 [Chaetomium globosum CBS 148.51] gi|88182916|gb|EAQ90384.1| CHGG_02319 [Chaetomium globosum CBS 148.51]
  misc_feature (1)..(937): NCBI GI: 189201033 Blast Desc: kinesin light chain 1 [Pyrenophora tritici-repentis Pt-1C-BFP] gi|187983952|gb|EDU49440.1| kinesin light chain 1 [Pyrenophora tritici-repentis Pt-1C-BFP]
  misc_feature (261)..(1022): NCBI GI: 154285076 Blast Desc: conserved [Ajellomyces capsulatus NAm1] gi|150406974|gb|EDN02515.1| conserved [Ajellomyces capsulatus NAm1]
  misc_feature (1)..(647): NCBI GI: 156053556 Blast Desc: SS1G_05625 [Sclerotinia sclerotiorum 1980] gi|154703406|gb|EDO03145.1| SS1G_05625 [Sclerotinia sclerotiorum 1980]
MRLLHRQDDGGITLTDDLHDNIPPYAILSHLWGADEEEVVFKDMNNSTGNDSKRSYEKKVGYNKVELCARWAAADRLDHFWIDSCCIDKSNSTELQEAITSMFRWYRDATKCYVYLPDVRTDEDLENYRGTLPRSVWDTAFRESRWFTRGWTLQELIAPRHVEFFSREGCKLGNRQELDQVLLEVTGIPISALNGKSLSTFSISERMSWSRGRETKRKEDKAYSLLGIFDVSIFINYGEGEGRAMDRLRAEIEQHQGSQRTQESHFMVPFGRNENFVGRGAILKQLIAKIPPAANRDDCQRTAVEGLGGIGKTQVALEAAFRVRDGLPDCSVFWVPAIDLTTFENAYRKIGQLLGLQGINDEEADVKLLVKTGLSRSIAGTWLLIIDNVDDLDVLSEILKHLPFNTKGSILFTTRSHQIIAYLDISQTNSILMTQMGDAEAMALLRHGLRERQIDDAANVKRLLDLLTNLPLAIKQASAFMASNMNVTVSQYLESCESSDADLIDLLSRRFEDRHRYQGHAVTQNPVATTWLISFQHISQLQPHAASSLKFMCFLAEKNIPLSLLPISSRIKTMEAIGILQAYAFLYECDDPDTFNMHRLVRLAMRNWLKQKEEWTQCIATVVHRLEEVYPFSMHENKETWIKYFPHAQQLLEIDGAITARQGSHLLFKIARSYHASGRYAEAEYLFRRTLGMWEEVLGREHPTTLQCMNTLAVTLYRQGKYSQAERMQQETLTLREKVLGTEHPGTLSTMNNIALTFDRQGKYDQAEEMHRRTLRIREKVLGRESPDTLATMNNIALALYSQGKYDEAEEIHRQILESRQRVQGREHPFTLSTMNNLAETLERQGKYQEAESLCRETVELKKKVLGEQHLSTLISMNTLAVVYEKQGDYGTAEGLHRKTLQLREKLLGKEHPDTLTTMSDLAEALSKQKECEGEAIKLHREALRLREAVLTKDHPDTLASMYNLAQALSKQGEFVQDAGRLYRESLRMRQIVLGEDHPDTIQSVNALAELLSDQGKFEEVKKPNGSASSNEHVEDRQLEQSQEHDSK

SEQ ID NO: 36035 - DNA, 3555 bp, Muscodor strobelii
  misc_feature: SGI EST ID NO. CUFF.85743.0
  misc_feature: Variant of the nucleotide sequence at SEQ ID NO 36033
cacggtcaagcgccccaaatctagatcagcaagctgatgcattagatctagcatatgtcgcgaattaggatggggaccattggttgcgaacccacagtcctaagacagcccatgctcagcccctcatcttgcgccgagttttgggtcctacctactgagatggcgacctttcatggcgactcttcgattgaggaatcatttatctacaccgaacggcaggacctgccatcatgcgcctccttcatcgacaagatgacggaggcataacactgactgacgacctccatgataacatcccaccatacgcgattctttcgcatttgtggggtgccgatgaggaggaagtggtcttcaaagacatgaacaacagtaccggtaacgactcgaagcgcagctacgaaaagaaggtcgggtataataaagttgagctatgtgcaagatgggctgctgccgaccgtcttgatcatttctggattgattcttgctgtatagacaagtctaatagcactgagcttcaagaggcgattacttccatgttccgatggtaccgagatgcaacaaaatgctatgtatatttgccggacgtaaggactgacgaagacctggaaaactatcgaggaacattgccgcgttcagtctgggatactgccttccgtgaaagcaggtggttcacgagaggatggacactccaggagctcatcgctccaagacacgttgaattcttttccagagaaggctgtaagctgggtaaccgccaagaactagatcaagttctgcttgaggtgaccgggataccaatcagcgctctaaatggaaagtcgctttccactttcagcatcagcgagcgcatgtcatggtcgcggggtcgcgagacgaaacgcaaagaggacaaggcatactcgctgcttgggatcttcgacgtttcgatatttatcaactatggcgaaggagaaggacgagcaatggatcgacttcgcgctgagattgaacagcaccagggttcacaacgcacgcaagagtcgcacttcatggtgccttttggacgcaatgaaaactttgttgggcgtggcgcaatcttgaaacaacttattgcgaagatccctccagctgccaatcgcgatgattgtcagcgcaccgcggttgagggtcttggtggtattgggaagacgcaagtcgcgttggaagcggcctttcgagtccgtgatggtttaccagattgctctgtcttttgggtcccagcaatcgacttaaccacttttgagaacgcatatcgcaaaattggacaactactcgggttacaaggcatcaacgacgaggaagctgatgtgaaattgctcgtcaaaacgggcttaagccggtcgattgcggggacttggcttttaatcattgacaatgtcgatgacttagacgtgctgagcgaaatactcaaacatctccctttcaatactaaaggatcgattcttttcacaactcgaagtcatcaaataatcgcctacttagatatatcacaaaccaacagtattcttatgacgcagatgggcgacgccgaagctatggccttgttaagacacggcctcagagaaaggcagatcgacgacgcagcaaatgtcaagcgtttgctcgatcttctaactaatcttcccttagcgatcaaacaggcctcagcattcatggcttccaatatgaatgttacagtatcgcaatatctagaatcatgcgagtcaagcgatgcggatctgattgacttgctaagtcgccgtttcgaagaccgccaccgttaccaaggtcatgccgtgactcaaaatccagtcgccacgacgtggctaatatcattccagcatatctcccagttacagccacatgcagcaagctctctaaaattcatgtgctttcttgctgaaaagaacattcctttatccctcctgccaatttcctctaggattaagacgatggaagcgattggcatcctccaagcgtacgcgtttctctacgaatgtgatgacccagacacgttcaacatgcatcgacttgttcgactggccatgcgaaattggctgaagcagaaggaagaatggacccagtgtatagccacagtcgttcatcgactcgaggaagtttaccccttctccatgcatgagaataaagaaacatggataaagtacttcccgcatgcacagcagctgttagaaatcgatggcgctatcactgccaggcaaggaagtcaccttcttttcaagattgctcgaagctaccacgcctctggaaggtacgctgaggctgagtacttatttcggcgaacgctaggaatgtgggaagaagtgctaggtagggagcatccaaccacactccagtgcatgaatacccttgccgtgacgctttatcgccagggcaaatacagtcaagccgaaaggatgcagcaagagacgctcacattaagggaaaaggtgttaggcacagagcatcctggcacgctttccaccatgaacaacattgctctcaccttcgatcgccaagggaagtatgaccaggctgaagagatgcatcgaaggacattgagaatcagggagaaggtgcttggcagagagtcgcccgacacccttgctacaatgaataatatcgccttggcgctatatagtcaaggaaaatatgatgaagctgaggagatacaccggcagatactcgaatcaaggcagcgtgttcagggcagagaacatcccttcacgctttcaactatgaataatcttgcggaaactttagaaaggcaaggtaaatatcaggaagctgaaagtctatgccgcgaaacagtggagctaaagaagaaggtgctgggagagcagcatctttctactctaattagtatgaacactcttgcagtagtctatgagaaacaaggagactacggaactgcagaagggttacatcggaagacattacagctaagagagaaactgctaggaaaggaacatccggatacactgaccactatgagcgatctggcggaggctcttagtaagcaaaaggagtgcgaaggcgaggctataaagttgcaccgagaggcactacgcctgagagaagcagtactaacgaaagaccatcccgatactctagccagcatgtataatctagctcaagccctcagcaagcagggtgaattcgtacaagacgccgggagattatatcgggagtcgttgagaatgaggcaaatcgtgctgggggaagatcatccagacactattcagagtgtgaacgctcttgccgagctgctcagtgaccagggcaaatttgaagaggtcaagaagccaaacgggagcgcgtcaagtaatgaacatgtcgaggatcgacaactcgagcagtcacaggagcatgactcgaaatgacctagatcacaaaaatgaatgacagcggaagcagccttatacctgttacgcacgtacgtagtcgttgatatttaatattccatcatcaaatttcgccatattattgcagctagtctagtgctggcacaaagcctgaggttgatattggttcttaaatggcattttcattcgatggcgc

SEQ ID NO: 36036 - DNA, 528 bp, Muscodor strobelii
  misc_feature: SGI cDNA ID NO. 572487
  misc_feature: Elevated expression when VOC is produced
  misc_feature: Encodes the peptide sequence at SEQ ID NO 36037
atgaacgcgaacgtttcacttgttggtgggaactttttcctgtgcgggccggctggcagaaacatgggtggcgccacgaaccccaggttccgagaggcactgcgccatgggcctcacgtgtatcatactttggttgtgttggggctggacgataatcgctttgctaagtacattgaccggaggactgggcaaacttactgggattactcgttaccggaccatcctggtctcagtaccgcactacgatccaatagccaagacgagcctatcttcgtttccttgggaaccaatgggtactacttcatgcgtacagcaagtggccgcacagtctggaacctgcccgacgacgcagacagctttgtaaacagtactagcaatgatgatcccgtcgagagagtgtggtttggggcgaacggaagttatattgtccagactcgatcaggaggccagctccgggaccttcgtggctgttacggttccttgaatcagacgttgaggtcctcggtgtcatcagcacggaaggcatag

SEQ ID NO: 36037 - protein, 175 aa, Muscodor strobelii
  misc_feature: SGI Peptide ID NO. 572487
  misc_feature (3)..(168): NCBI GI: 256726027 Blast Desc: NECHADRAFT_44229 [Nectria haematococca mpVI 77-13-4]
  misc_feature (5)..(168): NCBI GI: 46116640 Blast Desc: FG04162.1 [Gibberella zeae PH-1]
  misc_feature: Useful for introducing or modulating the production of volatile compounds
MNANVSLVGGNFFLCGPAGRNMGGATNPRFREALRHGPHVYHTLVVLGLDDNRFAKYIDRRTGQTYWDYSLPDHPGLSTALRSNSQDEPIFVSLGTNGYYFMRTASGRTVWNLPDDADSFVNSTSNDDPVERVWFGANGSYIVQTRSGGQLRDLRGCYGSLNQTLRSSVSSARKA

SEQ ID NO: 36038 - DNA, 1105 bp, Muscodor strobelii
  misc_feature: SGI EST ID NO. CUFF.85749.0
  misc_feature: Variant of the nucleotide sequence at SEQ ID NO 36036
tggcaatcaatcatagtgtgaattgtgattataaatgggagagttgcgctccagcttgagtgtttctccaacgcttaacctcagagtcttcactccagctctccctggcagctaattaacatgaacgcgaacgtttcacttgttggtgggaactttttcctgtgcgggccggctggcagaaacatggggtatgttgtcttgtgggtggcctgggctaatcgctactaataccataatagtggcgccacgaaccccaggttccgagaggcactgcgccatgggcctcacgtgtatcatactttggttgtgttggggctggacgataatcgctttgctaagtacattgaccggaggactgggcaaacttactgggattactcgttaccggaccatcctggtctcagtaccgcactacgatccaatagccaagacgagcctatcttcgtttccttgggaaccaatgggtactacttcatgcgtacagcaagtggccgcacagtctggaacctgcccgacgacgcagacagctttgtaaacagtactagcaatgatgatcccgtcgagagagtgtggtttggggcgaacggaagttatattgtccagactcgatcaggaggccagctccgggaccttcgtggctgttacggttccttgaatcagacgttgaggtatgccgggtcaagtcgcatcggcgtactgggcttgaatttaagcagtgagagatcgtatttcttgatgcttagggatggcagagttcagtgcaatacggctggaagccctttcaccgaagcagctttcagggaatggagtagggggttataacctaaccaaaccttgccaggtcctcggtgtcatcagcacggaaggcatagagtcgaatcagtcccttttcaacattcagttttgtcaccattgtcgcatattaggcaggatgggtaggacgggcaacaattagagacccgtcaatgaaacgttgtcacaaagttggtcgctcattcgggttaccacctaaactaacgtggcacgctcttagaagcatgatatagggtttaggtatatatacgcgtgctattaccggtttattcggaagatagttaaaaagtca

SEQ ID NO: 36039 - DNA, 1953 bp, Muscodor strobelii
  misc_feature: SGI cDNA ID NO. 572488
  misc_feature: Encodes the peptide sequence at SEQ ID NO 36040
atgtttcgaaaagcttatcgtaaattattcttgggggaaattgaccttttttggctcgacaccctctgcattccgatcagagagttctctgtggtagccggacagaccgccgatcagcgtggagagaccgatgccagtaaaaagctccgtggtgatgcgatagaccgcatgacacagatttatgctggatcgcattctgtttgtgttttagatccagaattgaggagtctacctaatacgctccttcaaactaacccggccaggttgtttgggcacatccttcggtgtgactggatgcggagatgctggacttatcaggaggcggccatggcgaaacgaatctttgtgatgctgggctctggtcctatccttatgaatcgcgagcggtacaacctcctctcgcagcagcagcgagcgaccgggactgaatctcatatgataccacggttattagacctgacccgatggctttctgacctgccggcaccacgcctttctctcgagtacgagtcacgccagctcatcgacggaaacaacccgaaaatttttgccacggtttggaattctctcatctcgagaaccacatcacggcctggcgatcgctttttgatcttcgcactcatgactaatctagtgcccagccctctcttagacaaagagaaaatagctgagcatagaagactgcgcgtcgtcttcaattcctataacgttctgccgatggactttctctttagaggtgatatcatttgtcgggattattggctccctgacgacggcatcgaaggtaggctttctggtacttgcggccggatggttcgagcgagttcccgaggggatgaaatctgctttgataagaatgatgctgaagctggggacgaccgaccgggtctatggctaatagaacggctgtcgtggatctccggggtcctttcgatcaccgtggatggtatcgacagattcatgaagctggagttccacgaaacacggcatcaatcactgattgatagtgggaacatggtgcttgttctaaaggaccaaagacacatcataaaagaagctaatgaaggggatattgagacgccaggagcactactccaggttgttggtcgagatgcccattctgatggcacggtatcgtggcgactagagcgtgtttgtggcatgcggtgcatttcattcgaaccatactcatctcaagaagctgtccacattggtaaaaatctcatagcagatggccatcacaggttctcagtaacatgcgtttttggggatgaggagccactcagtcagcaccgtgacctatcggactcaccttatccaggtgccacgattgctttgcctcagcatatgcacctaggcgcccatattggcattttctatgtggtttacactgccctgctagccataattgccctaactcccaattctgccagcttcgactggggctacttatttttcatattccaattttgggcttggcaattcgcttttgaagccgtcatcggctggcaccgaagttccaagtatggcgataagattacctatatgggctggcttaacgacctgacggccgattggccagaggctttacctcgacagctgcgtggactattacgtattaactacagcccccgtcaaacaacggtccgccttttactaggcctaatcctaaccgtcatcggcattgcatatcgaagaaagagaaatattaggtggcttacggcatgggggctcttgattgtattggaggtcgccctgcggtgggtgatggaactagtttataaccatgtttggatcgtaaacaacccagagagtcacgtgctggtgaaggagttcttacaagactcacggatgacgaagtggtgtaagaggatgtttggatggcctcgcgaaccagctgaggcgcagatggtcagaagccaagacgctcaaccatactacactcacagttaa

SEQ ID NO: 36040 - protein, 650 aa, Muscodor strobelii
  misc_feature: SGI Peptide ID NO. 572488
  misc_feature (16)..(256): NCBI GI: 212530058 Blast Desc: conserved [Penicillium marneffei ATCC 18224] gi|210074584|gb|EEA28671.1| conserved [Penicillium marneffei ATCC 18224]
  misc_feature (16)..(245): NCBI GI: 242819676 Blast Desc: conserved [Talaromyces stipitatus ATCC 10500] gi|218713831|gb|EED13255.1| conserved [Talaromyces stipitatus ATCC 10500]
  misc_feature (16)..(245): NCBI GI: 212539073 Blast Desc: conserved [Penicillium marneffei ATCC 18224] gi|210069434|gb|EEA23525.1| conserved [Penicillium marneffei ATCC 18224]
  misc_feature (2)..(244): NCBI GI: 67523905 Blast Desc: AN2408.2 [Aspergillus nidulans FGSC A4] gi|40745363|gb|EAA64519.1| [Aspergillus nidulans FGSC A4] gi|259487814|tpe|CBF86785.1| TPA: HET domain protein [Aspergillus
  misc_feature (16)..(253): NCBI GI: 255954757 Blast Desc: Pc21g10990 [Penicillium chrysogenum Wisconsin 54-1255] gi|211589842|emb|CAP95996.1| Pc21g10990 [Penicillium chrysogenum Wisconsin 54-1255]
  misc_feature (16)..(244): NCBI GI: 67522366 Blast Desc: AN1640.2 [Aspergillus nidulans FGSC A4] gi|40745604|gb|EAA64760.1| [Aspergillus nidulans FGSC A4] gi|259486976|tpe|CBF85275.1| TPA: conserved [Aspergillus nidulans
  misc_feature (4)..(402): NCBI GI: 261357088 Blast Desc: HET domain-containing protein [Verticillium albo-atrum VaMs.102]
  misc_feature (17)..(140): NCBI GI: 212544440 Blast Desc: HET domain protein [Penicillium marneffei ATCC 18224] gi|210065343|gb|EEA19437.1| HET domain protein [Penicillium marneffei ATCC 18224]
  misc_feature (16)..(247): NCBI GI: 119483226 Blast Desc: NFIA_028180 [Neosartorya fischeri NRRL 181] gi|119409796|gb|EAW19744.1| conserved [Neosartorya fischeri NRRL 181]
  misc_feature (2)..(244): NCBI GI: 255931377 Blast Desc: Pc12g03620 [Penicillium chrysogenum Wisconsin 54-1255] gi|211581864|emb|CAP79989.1| Pc12g03620 [Penicillium chrysogenum Wisconsin 54-1255]
MFRKAYRKLFLGEIDLFWLDTLCIPIREFSVVAGQTADQRGETDASKKLRGDAIDRMTQIYAGSHSVCVLDPELRSLPNTLLQTNPARLFGHILRCDWMRRCWTYQEAAMAKRIFVMLGSGPILMNRERYNLLSQQQRATGTESHMIPRLLDLTRWLSDLPAPRLSLEYESRQLIDGNNPKIFATVWNSLISRTTSRPGDRFLIFALMTNLVPSPLLDKEKIAEHRRLRVVFNSYNVLPMDFLFRGDIICRDYWLPDDGIEGRLSGTCGRMVRASSRGDEICFDKNDAEAGDDRPGLWLIERLSWISGVLSITVDGIDRFMKLEFHETRHQSLIDSGNMVLVLKDQRHIIKEANEGDIETPGALLQVVGRDAHSDGTVSWRLERVCGMRCISFEPYSSQEAVHIGKNLIADGHHRFSVTCVFGDEEPLSQHRDLSDSPYPGATIALPQHMHLGAHIGIFYVVYTALLAIIALTPNSASFDWGYLFFIFQFWAWQFAFEAVIGWHRSSKYGDKITYMGWLNDLTADWPEALPRQLRGLLRINYSPRQTTVRLLLGLILTVIGIAYRRKRNIRWLTAWGLLIVLEVALRWVMELVYNHVWIVNNPESHVLVKEFLQDSRMTKWCKRMFGWPREPAEAQMVRSQDAQPYYTHS

SEQ ID NO: 36041 - DNA, 1960 bp, Muscodor strobelii
  misc_feature: SGI EST ID NO. CUFF.85754.0
  misc_feature: Variant of the nucleotide sequence at SEQ ID NO 36039
gccaaatgcgcgtaactggtgtcctgcttttcgcgatcatatcaccaacacatatacggacgatacatgttcttttctcgcaggccttgaggcttctctcgaaagcgcgcattatagatgcactcaatccacttgcaatgcagtagtcagttggcgcgattatgttcccaggcatatcaagccgaactgcgactgtgttatggttggccccaacatggaagatgtcaagctgctaattggccaaaaaaagatacctctgctaaagctcagaagagacgttcatggaaacttaaacattcacgtcgtggaaccaacctttgatagccgatacatcgcagtttcgcacgtctggtcaggggggctcggcaacccaaccgcaaacgaggtccattattgccagctcgaaatgatagcaggactgggtaaacagattcgccagaatatcgaaggatcaagagatcccacgttgcccaacatgtttcgaaaagcttatcgtaaattattcttgggggaaattgaccttttttggctcgacaccctctgcattccgatcagagagttctctgtggtagccggacagaccgccgatcagcgtggagagaccgatgccagtaaaaagctccgtggtgatgcgatagaccgcatgacacagatttatgctggatcgcattctgtttgtgttttagatccagaattgaggagtctacctaatacgctccttcaaactaacccggccaggttgtttgggcacatccttcggtgtgactggatgcggagatgctggacttatcaggaggcggccatggcgaaacgaatctttgtgatgctgggctctggtcctatccttatgaatcgcgagcggtacaacctcctctcgcagcagcagcgagcgaccgggactgaatctcatatgataccacggttattagacctgacccgatggctttctgacctgccggcaccacgcctttctctcgagtacgagtcacgccagctcatcgacggaaacaacccgaaaatttttgccacggtttggaattctctcatctcgagaaccacatcacggcctggcgatcgctttttgatcttcgcactcatgactaatctagtgcccagccctctcttagacaaagagaaaatagctgagcatagaagactgcgcgtcgtcttcaattcctataacgttctgccgatggactttctctttagaggtgatatcatttgtcgggattattggctccctgacgacggcatcgaaggtaggctttctggtacttgcggccggatggttcgagcgagttcccgaggggatgaaatctgctttgataagaatgatgctgaagctggggacgaccgaccgggtctatggctaatagaacggctgtcgtggatctccggggtcctttcgatcaccgtggatggtatcgacagattcatgaagctggagttccacgaaacacggcatcaatcactgattgatagtgggaacatggtgcttgttctaaaggaccaaagacacatcataaaagaagctaatgaaggggatattgagacgccaggagcactactccaggttgttggtcgagatgcccattctgatggcacggtatcgtggcgactagagcgtgtttgtggcatgcggtgcatttcattcgaaccatactcatctcaagaagctgtccacattggtaaaaatctcatagcagatggccatcacaggttctcagtaacatgcgtttttggggatgaggagccactcagtcagcaccgtgacctatcggactcaccttatccaggtgccacgattgctttgcctcagcatatgcacctaggcgcccatattggcattttctatgtggtttacactgccctgctagccataattgccctaactcccaattctgccagcttcgactggggctacttatttttcatattccaattttgggcttggcaattc

SEQ ID NO: 36042 - DNA, 1518 bp, Muscodor strobelii
  misc_feature: SGI cDNA ID NO. 572489
  misc_feature: Encodes the peptide sequence at SEQ ID NO 36043
atgaaaagcaaacgaaagcttcgactccgtcttcaaaggtggaaaatagctaaaaaggttaaagaaagtgaggcaattgccgctctacgcttgctcgttgatacggggacgtcgtgggaagaacttaatactgacttctgctttggaaatgacctcaaaactgtgagctcaaagagaattaaacagtactttcgccggaaaaatatacaagacccattcacttggttggccactcaaccgctgagccatgtccagcttgtgccagatgttgcctttattcctggttctgggactcgacctcacctcaaagaagtaatccaagacgaggaacacgggtcatcggatatcacccaagagaacccaattagctcagactatctcacaccttttgccgctacagagataaatgctttctggtggccatttattcttggcataaggccggtaccacctccgccttcgtccccggagttgcgatttagagagtgggtcatcacgaatgctgcagactactgccgaaattatgcggaacaaccgcgccccggctctgacagggagcctatcgtccattcagtcacaaaccatggccgatttggcgccctgatgcaggacggcatatttcgggccaggcgacgcgacaatgcgtcaatctacgacttcaaggcggctttcgttatcttagaggaccttcttgagcatgagaccccgatgaaggtcgctcaaatctttgctattattgctgagttgctcgcttctacgtgcttaggttctaacgacgacggagcacagacagcattgaatggtcatgcagaaaagctcctagatcagctttgggggatgtcaattatccgactaggagagtctcacgcgttgaccaatatctttcagaccttggtcttggattctgcccagagagcccacctagtccccctagtgatggagagaatggtagatagctttggcgctgcgacagccctacgcgactggaggcggctctatatgatggagcgatacgcggactgtctttaccacgctggcctcactaccaaacggtacacactgcgttcccaactgcttgagatgcagagggcctattacggcaaatggaaaagcagcgtcttgtggacactcactaatgtcgcagatgattgtctcgatcggaatcagaccgaagaggcacggaggttattcgaagaggggttatcgctagcgaaacaatatctcaagggttatgctaaggccaagataaggtttgcctgctttgagggccttgggaaagccaccctcttcgaattggacgttgctacaaaaaaggcaagaacggcaccctgtgtgagcggtgcaacatcgaggctggcggagctgaccaaagcacacgattcatttagctctgcgcaaaacgaggccatggcttggttcccccgagacaggcgctttgcacgggtctgtcaagtaaaggaagctttggaagacgagatacgcgccctatgtagagaaaaaggagatgatctaaactag

SEQ ID NO: 36043 - protein, 505 aa, Muscodor strobelii
  misc_feature: SGI Peptide ID NO. 572489
MKSKRKLRLRLQRWKIAKKVKESEAIAALRLLVDTGTSWEELNTDFCFGNDLKTVSSKRIKQYFRRKNIQDPFTWLATQPLSHVQLVPDVAFIPGSGTRPHLKEVIQDEEHGSSDITQENPISSDYLTPFAATEINAFWWPFILGIRPVPPPPSSPELRFREWVITNAADYCRNYAEQPRPGSDREPIVHSVTNHGRFGALMQDGIFRARRRDNASIYDFKAAFVILEDLLEHETPMKVAQIFAIIAELLASTCLGSNDDGAQTALNGHAEKLLDQLWGMSIIRLGESHALTNIFQTLVLDSAQRAHLVPLVMERMVDSFGAATALRDWRRLYMMERYADCLYHAGLTTKRYTLRSQLLEMQRAYYGKWKSSVLWTLTNVADDCLDRNQTEEARRLFEEGLSLAKQYLKGYAKAKIRFACFEGLGKATLFELDVATKKARTAPCVSGATSRLAELTKAHDSFSSAQNEAMAWFPRDRRFARVCQVKEALEDEIRALCREKGDDLN

SEQ ID NO: 36044 - DNA, 2237 bp, Muscodor strobelii
  misc_feature: SGI EST ID NO. CUFF.85760.1
  misc_feature: Variant of the nucleotide sequence at SEQ ID NO 36042
gtaaaaagtaggtgaagtttctacactatactctcgccaagtctttttcttttttcaaaacgagggcctctcagataggtacagcacctacctgaggattcacttagtggcgcatataggagcggggtagcgttccggagcctacaaatattaataagtcccaatgaacaaattaccgttcgttacttcttcatttgttggaagactcgtagagattatataccccatatcagcagttttacagtgagcataaatcgccctagaccgactcttcatacctatctcaacgaggggcatacctacctagctatagaagtatgtatattgaaccccactcgaggtgtactaacgaacacataatacctaggtacactttcgcattagatgcgtcagcgaaaagacaaacgcagtgcccagtgggaaccccacaaggacctaatcaagaaactttttgtggcagaagaccagacgcttgacgaggtatgcgactatctaagaattcacacagacattcacgatgtaaacaaacgaaagcttcgactccgtcttcaaaggtggaaaatagctaaaaaggttaaagaaagtgaggcaattgccgctctacgcttgctcgttgatacggggacgtcgtgggaagaacttaatactgacttctgctttggaaatgacctcaaaactgtgagctcaaagagaattaaacagtactttcgccggaaaaatatacaagacccattcacttggttggccactcaaccgctgagccatgtccagcttgtgccagatgttgcctttattcctggttctgggactcgacctcacctcaaagaagtaatccaagacgaggaacacgggtcatcggatatcacccaagagaacccaattagctcagactatctcacaccttttgccgctacagagataaatgctttctggtggccatttattcttggcataaggccggtaccacctccgccttcgtccccggagttgcgatttagagagtgggtcatcacgaatgctgcagactactgccgaaattatgcggaacaaccgcgccccggctctgacagggagcctatcgtccattcagtcacaaaccatggccgatttggcgccctgatgcaggacggcatatttcgggccaggcgacgcgacaatgcgtcaatctacgacttcaaggcggctttcgttatcttagaggaccttcttgagcatgagaccccgatgaaggtcgctcaaatctttgctattattgctgagttgctcgcttctacgtgcttaggttctaacgacgacggagcacagacagcattgaatggtcatgcagaaaagctcctagatcagctttgggggatgtcaattatccgactaggagagtctcacgcgttgaccaatatctttcagaccttggtcttggattctgcccagagagcccacctagtccccctagtgatggagagaatggtagatagctttggcgctgcgacagccctacgcgactggaggcggctctatatgatggagcgatacgcggactgtctttaccacgctggcctcactaccaaacggtacacactgcgttcccaactgcttgagatgcagagggcctattacggcaaatggaaaagcagcgtcttgtggacactcactaatgtcgcagatgattgtctcgatcggaatcagaccgaagaggcacggaggttattcgaagaggggttatcgctagcgaaacaatatctcaagggttatgctaaggccaagataaggtttgcctgctttgagggccttgggaaagccaccctcttcgaattggacgttgctacaaaaaagctctgcgcaaaacgaggccatggcttggttcccccgagacaggcgctttgcacgggtctgtcaagtaaaggaagctttggaagacgagatacgcgccctatgtagagaaaaaggagatgatctaaactaggttgttaccaacaacttagggggaaagaggagggggagagatcaacaacagtccatgttggtatattctccttttagcagacggtatcagatccaagcatagcttactgagccgtagcagtctggcggttatttgcaaatgtggaaagtctttgtaaagggataatcccttgggatgcaaacaaatagacgagtttagactttttgaacaaactttacttctgatcaggcatctatgcagaattgaaactcaccaattttatcatctaacacttggc

SEQ ID NO: 36045 - DNA, 402 bp, Muscodor strobelii
  misc_feature: SGI cDNA ID NO. 572490
  misc_feature: Encodes the peptide sequence at SEQ ID NO 36046
atggagaaaagacgccagaatcccgtctccaaaggctctctcccatttcgctacagtgaaaccgagcccaacaccatcatagttcaggtcgaggatggtgttgagcacaagatccaacttcccaaagaccccgtccctggtatgcctcccaacgtcatgggatatgtagacaaatatggtgtcgaacacgaagtctgggttcctattggaagtatcgaggatgcctgcgatcatatgctcaatgatcgatgggaggaactagcgaaatttgagcctttaaaagatcaaaagtggacagaacaagactataaggactatcgagaaattcgaaagaaacaggccgaagcgcgagagcgtcttaagccgggagaaccactaccgaaaacagtgccgagatactag

SEQ ID NO: 36046 - protein, 133 aa, Muscodor strobelii
  misc_feature: SGI Peptide ID NO. 572490
  misc_feature (44)..(115): NCBI GI: 164426416 Blast Desc: NCU04283 [Neurospora crassa OR74A] gi|157071328|gb|EAA31837.2| [Neurospora crassa OR74A]
  misc_feature (21)..(106): NCBI GI: 85088838 Blast Desc: NCU09761 [Neurospora crassa OR74A] gi|28919123|gb|EAA28634.1| [Neurospora crassa OR74A]
  misc_feature (53)..(115): NCBI GI: 16944602 Blast Desc: [Neurospora crassa]
MEKRRQNPVSKGSLPFRYSETEPNTIIVQVEDGVEHKIQLPKDPVPGMPPNVMGYVDKYGVEHEVWVPIGSIEDACDHMLNDRWEELAKFEPLKDQKWTEQDYKDYREIRKKQAEARERLKPGEPLPKTVPRY

SEQ ID NO: 36047 - DNA, 896 bp, Muscodor strobelii
  misc_feature: SGI EST ID NO. CUFF.85763.0
  misc_feature: Variant of the nucleotide sequence at SEQ ID NO 36045
tttctcttgacatcggaatctacataattctttgatcctgcgcctaagctctacgttctagtcaagcccctcatggagaaaagacgccagaatcccgtctccaaaggctctctcccatttcgctacagtgaaaccgagcccaacaccatcatagttcaggtcgaggatggtgttgagcacaagatccaacttcccaaagaccccgtccctggtatgcctcccaacgtcatgggatatgtagacaaatatggtgtcgaacacgaagtctgggttcctattggaagtatcgaggatgcctgcgatcatatgctcaatgatcgatgggaggaactagcgaaatttgagcctttaaaagatcaaaagtggacagaacaagactataaggactatcgagaaattcgaaagaaacaggccgaagcgcgagagcgtcttaagccgggagaaccactaccgaaaacagtgccgagatactagtcgaggatatatcgatcagaaaatgttttagagtgtcttcttcagtcttgaatttcacgagatctttaggaaaggtgccgggcgggacggctttatatgacggaaggatgtctcgtcgctgtcaccaaatgcgtagagttgcgtttcagcatcgcatgcttgacgactgtatattcggtatgctgccaacataaagagataatcgagggacatattgtgagctcatttgaattgcttgcctccaccggcttgtacatcaagctacgtctgacttccgtatatcacttcgctcaagttgtttcctttatctactttgaagatatcaatttccactgaaatatgttttgtactctgtttatcgctatgctgttttgcccgtagactcgcctatatcaagcaatggacgtacataagaaagaaat

SEQ ID NO: 36048 - DNA, 1227 bp, Muscodor strobelii
  misc_feature: SGI cDNA ID NO. 572491
  misc_feature: Reduced expression when VOC is produced
  misc_feature: Encodes the peptide sequence at SEQ ID NO 36049
atgtccatcgacaaaaaggaagagtctcaagagcgttcggaagaatccgtggcctcgactcctgagacaggtaacggtcccgaaccttcagcggctcaacaagatgcccagcccgtgaaacgcaaaggagggcgcaaacccatatacgcgacctcggaagagcgcaagcagaggaaccgtcaggctcaagcagcattcagagagaggcgaactgaatatatcaagcagctcgaggacactattagagtacacgagcaaaatttgacgaaccttcaatctgcccatcgcaatgctgcagatgagtgtttgatgctgcgttacaagaattcactgctagaacgtattcttctcgagaaaggcattgatgtccaagctgagctccaggcaaagactgggagcccgaatcttggaccaacacatattcctcctagcatgatgcagccaccgcccatgcagcggacacttctaagcagacagcataacgcacgcaggtctgcatctggcctggcaccaaagctcgagcctggagccacatcggtgccacaagaggctgcccaacagtctgtgacttcgcctaagactcgaccaacacctccatcccacgcagcttcacctactaattcattaccgccatacaatggccacatctcgactgcctcgcctacgggcacggtgacggatcatggtagtctacggaacatcatggcaccttccatgaaacagccaatggcagcgatgcccggaccagcacagggtgcacgtcatccaatgatgcagcagcagcaacagcagcacccacaacagcaacaacatcatcaacaccattcgcagccgcccccggggccccgaccacctgcgctttatccgacagcgtcgttccagaatcattaccagcagctcgaacaggaatacgatgcgccgaccgatatgatggacgacaccgaacacgatgggcatagtcagcccgcatttccctcgggctattcaaatgcgccaggccctggtatgtcgatgccaccaccgacgagtgctccctcggcacacccgcccacgagctcggcagagcatccagggcagcagcagcagcaacaacaacaccacggtcagtttccaagcatgacccaacaacttctcgatcccactttggactgggacccgttcggtctcaacgccagtatggccttcccgcaacaatttagcggtttcgacacatcgaacacgcggtaa

SEQ ID NO: 36049 - protein, 408 aa, Muscodor strobelii
  misc_feature: SGI Peptide ID NO. 572491
  misc_feature (1)..(408): NCBI GI: 261360264 Blast Desc: MeaB protein [Verticillium albo-atrum VaMs.102]
  misc_feature (1)..(408): NCBI GI: 116208188 Blast Desc: CHGG_03387 [Chaetomium globosum CBS 148.51] gi|88183984|gb|EAQ91452.1| CHGG_03387 [Chaetomium globosum CBS 148.51]
  misc_feature (10)..(408): NCBI GI: 256732833 Blast Desc: NECHADRAFT_60448 [Nectria haematococca mpVI 77-13-4]
  misc_feature (1)..(408): NCBI GI: 164428949 Blast Desc: NCU00223 [Neurospora crassa OR74A] gi|157072348|gb|EAA28458.2| conserved [Neurospora crassa OR74A]
  misc_feature (1)..(408): NCBI GI: 39939868 Blast Desc: MGG_05306 [Magnaporthe grisea 70-15] gi|145010408|gb|EDJ95064.1| MGG_05306 [Magnaporthe grisea 70-15]
  misc_feature (1)..(408): NCBI GI: 46124573 Blast Desc: FG06664.1 [Gibberella zeae PH-1]
  misc_feature (1)..(408): NCBI GI: 171685594 Blast Desc: protein product [Podospora anserina] gi|170942758|emb|CAP68411.1| protein product [Podospora anserina]
  misc_feature (1)..(408): NCBI GI: 156051874 Blast Desc: SS1G_07344 [Sclerotinia sclerotiorum 1980] gi|154705122|gb|EDO04861.1| SS1G_07344 [Sclerotinia sclerotiorum 1980]
  misc_feature (1)..(213): NCBI GI: 154290759 Blast Desc: BC1G_15578 [Botryotinia fuckeliana B05.10] gi|150847415|gb|EDN22608.1| BC1G_15578 [Botryotinia fuckeliana B05.10]
  misc_feature (1)..(408): NCBI GI: 2196462 Blast Desc: MEAB protein [Emericella nidulans] gi|259482234|tpe|CBF76521.1| TPA: MEAB protein [Source:UniProtKB/TrEMBL;Acc:P87205] [Aspergillus nidulans FGSC
  misc_feature: Useful for introducing or modulating the production of volatile compounds
MSIDKKEESQERSEESVASTPETGNGPEPSAAQQDAQPVKRKGGRKPIYATSEERKQRNRQAQAAFRERRTEYIKQLEDTIRVHEQNLTNLQSAHRNAADECLMLRYKNSLLERILLEKGIDVQAELQAKTGSPNLGPTHIPPSMMQPPPMQRTLLSRQHNARRSASGLAPKLEPGATSVPQEAAQQSVTSPKTRPTPPSHAASPTNSLPPYNGHISTASPTGTVTDHGSLRNIMAPSMKQPMAAMPGPAQGARHPMMQQQQQQHPQQQQHHQHHSQPPPGPRPPALYPTASFQNHYQQLEQEYDAPTDMMDDTEHDGHSQPAFPSGYSNAPGPGMSMPPPTSAPSAHPPTSSAEHPGQQQQQQQHHGQFPSMTQQLLDPTLDWDPFGLNASMAFPQQFSGFDTSNTR

SEQ ID NO: 36050 - DNA, 5153 bp, Muscodor strobelii
  misc_feature: SGI EST ID NO. CUFF.86068.1
  misc_feature: Variant of the nucleotide sequence at SEQ ID NO 36048
ctggactatttcaattacataaacctttgctgcagtttttccatctcttacttcacacaaacctagcaacaccagccgccatctgcctctattcaacgtccaaccctgacgtatgaactgtgagcctctccttatctctctgcgagatcagcgtcgattcacctcccgctgtgagcctgcgacccagcctgttggatcccgcttccccggattatgtggtgtcttagcgctgcacccgtgcctgagtaccgagagacacctttctcgctgctcaagcctcactcaccataactaataccaacaaacattgatctggcaagctcgtcacacatcggcataagtttaccatcattctgactggatcaccgcctattctcccatcaaaccgcagcacaccttgctgaaagtgggaagtagccgagcaaaggggcgacggtcgtgcgagagaagtcaagcaacgggtgttgttgttcgtccctcccccaccttccagtgcggtttgactcgcctacaaaatcccaccaccccaaggcatttgccacctttcggcaattgcctttattaccgatttttgggatgtcagacaaaatgtccatcgacaaaaaggaagagtctcaagagcgttcggaagaatccgtggcctcgactcctgagacaggtaacggtcccgaaccttcagcggctcaacaagatgcccagcccgtgaaacgcaaaggagggcgcaaacccatatacgcgacctcggaagagcgcaagcagaggaaccgtcaggctcaagcagcattcagagagaggcgaactgaatatatcaagcagctcgaggacactattagagtacacgagcaaaatttgacgaaccttcaatctgcccatcgcaatgctgcagatgagtgtttgatgctgcgttacaagaattcactgctagaacgtattcttctcgagaaaggcattgatgtccaagctgagctccaggcaaagactgggagcccgaatcttggaccaacacatattcctcctagcatgatgcagccaccgcccatgcagcggacacttctaagcagacagcataacgcacgcaggtctgcatctggcctggcaccaaagctcgagcctggagccacatcggtgccacaagaggctgcccaacagtctgtgacttcgcctaagactcgaccaacacctccatcccacgcagcttcacctactaattcattaccgccatacaatggccacatctcgactgcctcgcctacgggcacggtgacggatcatggtagtctacggaacatcatggcaccttccatgaaacagccaatggcagcgatgcccggaccagcacagggtgcacgtcatccaatgatgcagcagcagcaacagcagcacccacaacagcaacaacatcatcaacaccattcgcagccgcccccggggccccgaccacctgcgctttatccgacagcgtcgttccagaatcattaccagcagctcgaacaggaatacgatgcgccgaccgatatgatggacgacaccgaacacgatgggcatagtcagcccgcatttccctcgggctattcaaatgcgccaggccctggtatgtcgatgccaccaccgacgagtgctccctcggcacacccgcccacgagctcggcagagcatccagggcagcagcagcagcaacaacaacaccacggtcagtttccaagcatgacccaacaacttctcgatcccactttggactgggacccgttcggtctcaacgccagtatggccttcccgcaacaatttagcggtttcgacacatcgaacacgcggtaatagacaaggtggagcgatgagagagtgaatcagcaagattgcaaagcggttcaaaaaactggaatttacttgacggcgttcggcatttggagagctacccagcttacgggagttttcaacagcgaggcgaagggacctcgcactattatacccaggacggcgggaactctgcaattttgatcaggtttttcgatcaaattggacaaaaaaagtcaaaaagcaattggttcgaattaggcgttggggttatgacaccaaaagtttgctggattttgaaagatagctattcacgaacagcgaacgaccttagaggcgccgaatagtcagccaggaggaaaatttcgtgggttgattgccgaataaatctctactcatccaatatcgacaaccagagagacacgctctggttccttatatacagcaacgagaacgccaacaacacctatcttaggtaggtaggaattgtacatagcgagaatctggatgaaagaattactggccggcgacgcgaaggattttctatttctcgtctgtctcgtttatgtgtctttgttctttacctattctatttgtatatttcttgaacgtcgtaatgattgatgaatcaagtacgactttatcatgatattggcttccggcggttgaggtagatgagtggcactaactggggaatgaaccgaatgagacgctggaggctttttgatagagatagtccagatagcagtaaattcaaggaacaggtagtatatactctattcagcactgcaagtcttgtcgtctaccaggtggttgtactatcttagattataatggccagtaccctatcgagctcgatgtacgagacttcgtaacgagaaagtaaaggccagtgcgcgtcatatcaagatctccgacacgtggatatagtctcgagctgatcagccttagattagactgtaagtagagctaccgatctacctggtccactgcctagtattctcacattcgttcggcgccggcatatgaagctcgagtcatttatcccactcaatttacttgaaacggcagttatacccagacgccaaccaagatggtacctgggtctatactagaaaacaaggccgagattaaagcctgtagattcttcacactgttcggcttacattgaattttacgggttgtggtgcaacttctgggctgataaagtctcgtccgatccagtggccgacggaggaggctggcttcaacatgtgtgcgctaaaattaacacaaggaccctggcggtctgtaaaccttggaactcaaagcaagggatttacgcgtgccgccccggctgcatccggggcgagttgtttgctggccctgcggcagatccatgcatcgcatgttcgtacgtgtttgtctgccagatgaggaattgaatgggcttgcaatgcaattgggaggaaaatgatatccatagcttcgctcgggttttggatctcggtgaaatttccctgggcttgttcgtgttgtggccatagctccaaattgggccgcgaagtcccctgatagagtccacaaggaagttgagacgaaacaagctcaagtcatctgctcaagtctcgcacaatgccaattctctgcgttagctctgtttggattctgatgaccaccggttcaacaccacaaagcagcattgcgaatatcgtcgagtgctcggttagcggcggaaggggactggtcaaaacaggtcatgccacctcgaatggctcataatcactcgctcgtgctacactccttgttgacgtgtctctttcgtagtcggtagttttacccctcctataatctcacgatggcctcccagccatcccaacaaacacgcacgcgctacgctgcgaagctccggcccgagcattgaactagaaccgatcagctacaagctgcaaagcgggttccggtaccgtgtcagttcagctcatttaagtaagcacacataacgcatttcgacgggtatcggtggatttgagcgagttcgtgttggtggtaggacgtgttaatgtattcccgatgtacctcaattgtaccgtgaaccgtttcgcgaaccgttttatgagaaccccgcttttgaggtggcttcctccatctgtcgtggtggtgggacctactgaatcgaggcattccatccgacgtcggggtggaggcttggcaggcggagcttcctcttgctctcttgcgagtgcctattcctccaagaatcgttaactgctgttgccttccatacgtgagatgatctcctgaatttgccaaggcactcattcttggaataaatctctgtcttcgtccttcatcatctcaaattgattatcgatccagtttctcgaggtttggtcaacagcttgacagcttgacagcttgttgaactgcggggcatgacttgctgggcgtgctctggaccctcaaactcccccaccttcaataccatgcagcctcctgcactgtgcatgaaggccttcgatcacgaggaggttggcgagttgttcctatgagcgaatatgcgagtaggattccctgccggatacccgtgcctctcttgtgcatccatgggaagagttgcctcatcctactttaacaagacaacacctgccaagattgaaagctggagtgaccatcacttgagggcaccctcgaagtggaagccatcaaaccgacatggagctccatcctactaatcatgcaacaaggaaatagtaggtgatagtaataaatatgaaaaagcgcaaccgaaatcgaaggcccgccaggcgggtggcttcggctgcctgacagagaacaagaaagtggtactacctttcgaggctggggtaaatgtccaagatcagtcatcagggttggagtgcgaaatgcatcttcagcccctgacaatacttgtcaccagcaaaaatgccatatatcacaacggacaatagacatgatagaaaggaaggaccaaaagatcaaaagaaagatggcccaccaacgtagacgagggcgagggttgggcctgttatttgtattcagcgcgcttatctctggcgcctgcgaaacattattatgtgatcagagataagcaatacccattatcaacggaaaccaaatcaaaatccctcgcgcacgtcacatcaccccacgaaacatcggcttgcagtgctcgcgaagtttctcgtacctcatccgtgcattctcgtacgtcatctgcgaaacgctgtcgctggaggacggggggtcgttgcagttgcgggtgctcccttagccgttggtgggctgcaagtcatttcgagggttcctgcatgccgttatttttttcatgggatgagagatagaggataggctgagaggca

SEQ ID NO: 36051 - DNA, 1857 bp, Muscodor strobelii
  misc_feature: SGI cDNA ID NO. 572492
  misc_feature: Encodes the peptide sequence at SEQ ID NO 36052
atgcgattgctcaacacagagactaaggaactccacgagttctggggagatgatgcgccgccctatgcaattttatcacacacctggcaatcccatcaagaggtgacattcgaggatctcaagcaagatgcgcagaggtacaaacacaaaagtggctgggcaaagatagtaggcagctgtaatcaagctttgcaggatggacttgaatttatatggattgacacttgttgcatcgacaaatctagcagctcggagcttcaggaagcgataaactccatgttccgatggtacgagatgtcagaagtctgttttgtctacctctcggatgttactccaggtcagaagtgtgaaatcgaaggatcggatttcacgaaagccaaatggttcacgcggggctggactttgcaggagctcattgcgcctggttgggtcaaattttatgaccaagcatggcaagaactcggaaccaaactttccctagcttcagtcatctcgcgtatcacaggaattgatgcagaagctgttcgcggctcagccttcaatgcgcgacaggtattgcgacaaagcagtgttgctcagaagatgtcatgggcctcaactcgcgagacatctcggatcgaggatattgcttacagcttattgggaatttttgacgtcaacatgccaatgctatatggagaaggcccaagagccttttctcgtctccaggaagaaatcatgaaaatctctgacgaccaaacgctgttagcatggggtttcaagcaacgtactcaaaagatttggggagtgtgttccgctctcgcagaatcaccagtttcttttcgctcctgctcgatgcttacttcgtccggcgcaggaaagcccggagatctgttctccgatacccatgttcctccagggcgcgtacccgccgtggcgtttcttcagactgacgacaacaatcacgacgacgattttactcgcttaggtctttctataccattactcataccggatgttttgctgaaagctgccaaacgaagatctgttcatgtcccacgaactaaagtacgccaaatgggtaagcattggcggcttggatttagtcttagcagagtccaaatctcgcctttttttctcgccggcacttatccaccaactttagactccctatccctcttacagatgtactcaatgccttccttcgattacaagtatgcttttattcatcttgcaagaatagaggcacccggctgtgtgctgataattcgatacaactgccgattgatggagctatctaagaataaagagggtacggaggagccactacgaagccagtattatccgagcgaaaggaatagcgcaattatgaatactgttagaaccacagtagcagaggcgctgggcataccaactcataacctcaaagaagatttgactctttcggagcatggcatggactcattgcacagcctttcgatcagttacgatttggaagagaaattccaacttccgcataactacgacgtgcttgtcggttgcgagaagcttcgagacattgatcgagttctaatgcgtctcgtccgcatggtctcagctccccgaccctatgtcgctggagagtttccgccaagagctaatcagatccaaccgaagaacatcacattcggtcttcttcatgttcacacttacgagtcgttgatcagcttcgcttgtggacaagtcaagctagatggcgtagactttcatccgccagaagaactctgcggcgaagatgttggaggccgaattgagtttccctgtgggacggacatgacgttgaccgtcactatgccggacgtgacttctctacgcgacatggaactacgcgtcgattaa

SEQ ID NO: 36052 - protein, 618 aa, Muscodor strobelii
  misc_feature: SGI Peptide ID NO. 572492
  misc_feature (22)..(137): Pfam Id: PF06985 Pfam Desc: Heterokaryon incompatibility protein (HET)
  misc_feature (22)..(114): Pfam Id: PF06985 Pfam Desc: Heterokaryon incompatibility protein (HET)
  misc_feature (122)..(137): Pfam Id: PF06985 Pfam Desc: Heterokaryon incompatibility protein (HET)
  misc_feature (1)..(274): NCBI GI: 256722255 Blast Desc: NECHADRAFT_52327 [Nectria haematococca mpVI 77-13-4]
  misc_feature (1)..(491): NCBI GI: 46105150 Blast Desc: FG00203.1 [Gibberella zeae PH-1]
  misc_feature (1)..(291): NCBI GI: 169776259 Blast Desc: [Aspergillus oryzae RIB40] gi|83771331|dbj|BAE61463.1| protein product [Aspergillus oryzae]
  misc_feature (1)..(277): NCBI GI: 256720502 Blast Desc: NECHADRAFT_55867 [Nectria haematococca mpVI 77-13-4]
  misc_feature (1)..(284): NCBI GI: 261354085 Blast Desc: HET domain-containing protein [Verticillium albo-atrum VaMs.102]
  misc_feature (1)..(251): NCBI GI: 85092369 Blast Desc: NCU04912 [Neurospora crassa OR74A] gi|28920765|gb|EAA30124.1| [Neurospora crassa OR74A]
  misc_feature (1)..(283): NCBI GI: 121715886 Blast Desc: HET domain protein [Aspergillus clavatus NRRL 1] gi|119403709|gb|EAW14126.1| HET domain protein [Aspergillus clavatus NRRL 1]
  misc_feature (1)..(284): NCBI GI: 261358772 Blast Desc: HET domain-containing protein [Verticillium albo-atrum VaMs.102]
  misc_feature (1)..(261): NCBI GI: 256732223 Blast Desc: NECHADRAFT_93752 [Nectria haematococca mpVI 77-13-4]
  misc_feature (1)..(296): NCBI GI: 145228631 Blast Desc: An01g01850 [Aspergillus niger] gi|134054715|emb|CAK43556.1| protein product [Aspergillus niger]
MRLLNTETKELHEFWGDDAPPYAILSHTWQSHQEVTFEDLKQDAQRYKHKSGWAKIVGSCNQALQDGLEFIWIDTCCIDKSSSSELQEAINSMFRWYEMSEVCFVYLSDVTPGQKCEIEGSDFTKAKWFTRGWTLQELIAPGWVKFYDQAWQELGTKLSLASVISRITGIDAEAVRGSAFNARQVLRQSSVAQKMSWASTRETSRIEDIAYSLLGIFDVNMPMLYGEGPRAFSRLQEEIMKISDDQTLLAWGFKQRTQKIWGVCSALAESPVSFRSCSMLTSSGAGKPGDLFSDTHVPPGRVPAVAFLQTDDNNHDDDFTRLGLSIPLLIPDVLLKAAKRRSVHVPRTKVRQMGKHWRLGFSLSRVQISPFFLAGTYPPTLDSLSLLQMYSMPSFDYKYAFIHLARIEAPGCVLIIRYNCRLMELSKNKEGTEEPLRSQYYPSERNSAIMNTVRTTVAEALGIPTHNLKEDLTLSEHGMDSLHSLSISYDLEEKFQLPHNYDVLVGCEKLRDIDRVLMRLVRMVSAPRPYVAGEFPPRANQIQPKNITFGLLHVHTYESLISFACGQVKLDGVDFHPPEELCGEDVGGRIEFPCGTDMTLTVTMPDVTSLRDMELRVD

SEQ ID NO: 36053 - DNA, 1101 bp, Muscodor strobelii
  misc_feature: SGI cDNA ID NO. 572493
  misc_feature: Encodes the peptide sequence at SEQ ID NO 36054
atgagagagagtcttctcgacgagtgcgtgctgcattcaatattatctacgggtgcgctggctctagcccttgaggaagatggcagcggagaatcacccccgagacatatggcttcgagtgttgcggtgaagcagcactacatggacgcccttcgtcatcatggcaaggcattgtctatgtttacgaagattatcgacaatcacaatgaacttccaaccccgcgatctgtttttcttgcaactatggctctcacgggatttgaacttctacacggcagtggatcatcagttggaacccttgtagcttccggccagcgtcttattctcgatcatatcattgaaaattcagctactgcctgctcttccgcctcggaacttacgacaatcgacacagatctcggcagcagtgccagcataaaatccctgataccacggatgactatgttttacagtcttatcctgcatctgcccatactacagcgacttgagcttctgcaggattcggtactctatagttcaccaccagaagcagatgcagatttagaaactgcgcttgtgtcgtggcgagacttttgcgcgcatgttgcgttactcgatactcgttatgcgtatgcgaaacagaatgatgttccagcaaatgtcgacgaggctcactatgcactattcctgaaatctttcgaccataatatatggggtaaattattcgagcatcatcgtggccaatgctacaagtacactcctgatcacatgctgcgtttggaacagacaatttttgagcacttgtttctgtcaatatttgtattttcttcagtcttagacgatgcagatgtgtatgaagcatcgcggaatatgctcttgctcatcgaaaccattttgaccaaggtgcacacggcttgggttgtgaggatcgctcgcgatgctgttatccccgttcttctgggtctctctgctcaaagccggtttgtcgacatccagaaggatgcggatgcgattctaaagggaatgggcaagatagagaactatcgacatgccatgaaattaacatgcgaagcagcacagagcagttatttacacggagcctatgtccaggccatgctgtga

SEQ ID NO: 36054 - protein, 366 aa, Muscodor strobelii
  misc_feature: SGI Peptide ID NO. 572493
  misc_feature (2)..(198): NCBI GI: 46139683 Blast Desc: FG11356.1 [Gibberella zeae PH-1]
  misc_feature (4)..(112): NCBI GI: 261353862 Blast Desc: C6 zinc finger domain-containing protein [Verticillium albo-atrum VaMs.102]
  misc_feature (3)..(112): NCBI GI: 171683673 Blast Desc: protein product [Podospora anserina] gi|170941796|emb|CAP67450.1| protein product [Podospora anserina]
MRESLLDECVLHSILSTGALALALEEDGSGESPPRHMASSVAVKQHYMDALRHHGKALSMFTKIIDNHNELPTPRSVFLATMALTGFELLHGSGSSVGTLVASGQRLILDHIIENSATACSSASELTTIDTDLGSSASIKSLIPRMTMFYSLILHLPILQRLELLQDSVLYSSPPEADADLETALVSWRDFCAHVALLDTRYAYAKQNDVPANVDEAHYALFLKSFDHNIWGKLFEHHRGQCYKYTPDHMLRLEQTIFEHLFLSIFVFSSVLDDADVYEASRNMLLLIETILTKVHTAWVVRIARDAVIPVLLGLSAQSRFVDIQKDADAILKGMGKIENYRHAMKLTCEAAQSSYLHGAYVQAML

SEQ ID NO: 36055 - DNA, 1907 bp, Muscodor strobelii
  misc_feature: SGI EST ID NO. CUFF.85797.2
  misc_feature: Variant of the nucleotide sequence at SEQ ID NO 36053
caatgtcatgccatggggacatcaacacagtcccgagccagcggccccagatcgaaaaatggttgcataacttgcagaaagcggcacgtccgatgcgatgagcagcacccgctatgctcaaggtgtgaaaggcaaggtgtgatatgtagatggcggaagcagacgcatcatatggtgagccgtagtcaacgcctactgccggcatccataattaccagcagcgcgacaacgctggtgccttatcctacagttcaagcattgaggggcgccgatgtcgtgtacttcgatctataccgccatcgagtagtgcacgatgtcgccggtagtgcatatagagaaatttggactcgcaccctcatgagagagagtcttctcgacgagtgcgtgctgcattcaatattatctacgggtgcgctggctctagcccttgaggaagatggcagcggagaatcacccccgagacatatggcttcgagtgttgcggtgaagcagcactacatggacgcccttcgtcatcatggcaaggcattgtctatgtttacgaagattatcgacaatcacaatgaacttccaaccccgcgatctgtttttcttgcaactatggctctcacgggatttgaacttctacacggcagtggatcatcagttggaacccttgtagcttccggccagcgtcttattctcgatcatatcattgaaaattcagctactgcctgctcttccgcctcggaacttacgacaatcgacacagatctcggcagcagtgccagcataaaatccctgataccacggatgactatgttttacagtcttatcctgcatctgcccatactacagcgacttgagcttctgcaggattcggtactctatagttcaccaccagaagcagatgcagatttagaaactgcgcttgtgtcgtggcgagacttttgcgcgcatgttgcgttactcgatactcgttatgcgtatgcgaaacagaatgatgttccagcaaatgtcgacgaggctcactatgcactattcctgaaatctttcgaccataatatatggggtaaattattcgagcatcatcgtggccaatgctacaagtacactcctgatcacatgctgcgtttggaacagacaatttttgagcacttgtttctgtcaatatttgtattttcttcagtcttagacgatgcagatgtgtatgaagcatcgcggaatatgctcttgctcatcgaaaccattttgaccaaggtgcacacggcttgggttgtgaggatcgctcgcgatgctgttatccccgttcttctgggtctctctgctcaaagccggtttgtcgacatccagaaggatgcggatgcgattctaaagggaatgggcaagatagagaactatcgacatgccatgaaattaacatgcgaagcagcacagagcagttatttacacggagcctatgtccaggccatgctgtgaaaacgatgtactgaaatgagcaatgaaatgctatactctacccttgtgcgagtggagacttgttgtaccagcatttaggccatagtgacatgtctattgccaaaacggattcaatcccacaaaccgattcccttgcagaaaaggcggtggtggatatcccaactccatttctgcatcatgctggcgttcgtcagttggcagcccgtgtagatcgtgtaatttttccgaactattccaatctaccgccgtgaaaaggagctgtttggtgcgggtaggatgatgtcgcaaatcatcgaggaaagcccacgccttacgccgaaatatatagcgttgcatcgatgttgaagatcctagatcatagagcatcttgtacatacctggtccctcggtatagtggttgtccttttcgctaagtagatcaatcccgagtatacaatttttgtaattcc

SEQ ID NO: 36056 - DNA, 1065 bp, Muscodor strobelii
  misc_feature: SGI cDNA ID NO. 572494
  misc_feature: Encodes the peptide sequence at SEQ ID NO 36057
atggcgtctcgtatcgctcctgccattcaaaagggtctcgacgccaccaaggtcaactatgttagactcggctcatctgggcttcgggtttcagtacccatattggggggtatgtccttgggttcgagtgaatgggctccttgggtaaaagatgaaaaagaatctctagagatcctgaaagcagcatatgatcgtgggatcaatacttgggacaccgccaatgcctattcaaacggatccagcgaggaagtgatcggcaaggctttgaaagagtttaacatcccgcgagaaaaggtcgtaatcatgaccaaatgcttcctcgttgtatccgaagaaataggctctcacgtgcatggccctgttggcaaccagagcaaagactacgtcaataaaggcggcttgtcacgagctgctattttcaatgcagtagatgcgtccttgaagcggttcggcacatcgtacattgatgttctacagatccaccgatttgaccccgagacgcccattgaagaaaccatgaaagccctacatgatgtcgtacaatctggaaaggcgcgttatattggcgcaagttccatgtgggcgacgcagttcgcccagatgcaattcgtcgctgaacgcaacgggtggactaagttcacgagtatgcagaactattataatctttgttaccgtgaagaagagcgtgaaatgatccgtttctgccaggagaccggagttggtgtcattccgtggggacccttattctcagggcgacttgcgagaccattggaatcagattcgacgacgaggtctcccatgcctaatcctcttgacccaaagatgactgaagtcgacaaggcgattatcaaaagggtagaagaggtagctacgaacaagggttggaaaatgagccatgttggattgctttgggttaggagcaagggcgcaataccgatcacaggatttggctccgttgcgagactggaggaagcatgcgagcttcgtgataaatcattgacggaggaagaagtcaaatatctggaggagttgtacgaaccgaagaatgtccgcggccacttctag

SEQ ID NO: 36057 - protein, 354 aa, Muscodor strobelii
  misc_feature: SGI Peptide ID NO. 572494
  misc_feature (24)..(346): Pfam Id: PF00248 Pfam Desc: Aldo/keto reductase family
  misc_feature (127)..(346): Pfam Id: PF00248 Pfam Desc: Aldo/keto reductase family
  misc_feature (24)..(104): Pfam Id: PF00248 Pfam Desc: Aldo/keto reductase family
  misc_feature (1)..(354): NCBI GI: 242762113 Blast Desc: aldo-keto reductase, [Talaromyces stipitatus ATCC 10500] gi|218723509|gb|EED22926.1| aldo-keto reductase, [Talaromyces stipitatus ATCC 10500]
  misc_feature (1)..(354): NCBI GI: 256720809 Blast Desc: NECHADRAFT_85497 [Nectria haematococca mpVI 77-13-4]
  misc_feature (4)..(354): NCBI GI: 239610116 Blast Desc: aldo-keto reductase [Ajellomyces dermatitidis ER-3]
  misc_feature (5)..(354): NCBI GI: 261198417 Blast Desc: aldo-keto reductase [Ajellomyces dermatitidis SLH14081] gi|239594762|gb|EEQ77343.1| aldo-keto reductase [Ajellomyces dermatitidis SLH14081]
  misc_feature (1)..(353): NCBI GI: 46127375 Blast Desc: FG08065.1 [Gibberella zeae PH-1]
  misc_feature (5)..(353): NCBI GI: 256722534 Blast Desc: [Nectria haematococca mpVI 77-13-4]
  misc_feature (1)..(353): NCBI GI: 159123205 Blast Desc: aldo-keto reductase, [Aspergillus fumigatus A1163]
  misc_feature (1)..(353): NCBI GI: 70987087 Blast Desc: aldo-keto reductase [Aspergillus fumigatus Af293] gi|66846655|gb|EAL86987.1| aldo-keto reductase, [Aspergillus fumigatus Af293]
  misc_feature (2)..(353): NCBI GI: 256722456 Blast Desc: NECHADRAFT_66997 [Nectria haematococca mpVI 77-13-4]
  misc_feature (4)..(353): NCBI GI: 256725360 Blast Desc: NECHADRAFT_45914 [Nectria haematococca mpVI 77-13-4]
  misc_feature (27)..(334): SWISSPROT Homolog: EC 1.1.1.91 Aryl-alcohol dehydrogenase (NADP(+))
MASRIAPAIQKGLDATKVNYVRLGSSGLRVSVPILGGMSLGSSEWAPWVKDEKESLEILKAAYDRGINTWDTANAYSNGSSEEVIGKALKEFNIPREKVVIMTKCFLVVSEEIGSHVHGPVGNQSKDYVNKGGLSRAAIFNAVDASLKRFGTSYIDVLQIHRFDPETPIEETMKALHDVVQSGKARYIGASSMWATQFAQMQFVAERNGWTKFTSMQNYYNLCYREEEREMIRFCQETGVGVIPWGPLFSGRLARPLESDSTTRSPMPNPLDPKMTEVDKAIIKRVEEVATNKGWKMSHVGLLWVRSKGAIPITGFGSVARLEEACELRDKSLTEEEVKYLEELYEPKNVRGHF

SEQ ID NO: 36058 - DNA, 1368 bp, Muscodor strobelii
  misc_feature: SGI cDNA ID NO. 572495
  misc_feature: Encodes the peptide sequence at SEQ ID NO 36059
atggcggaccacagcgcaatcaatggcgaacttttcgtcgatacccaccatggcaaaccagacatgaaaccactcccgtaccgtgatacaaaagacatcgacaatggacacgaaaactcgccttgggcgaggaaaactgtcctttcattcgatgggggtgggattcggggttactcaagcctcctcatccttagagaagtcatgatcgccgtcaagaaaatcgaagtagagctatcagagggcagctttcgatctagtcatgactatccttggatgagcccgcagccgatattaaacggatctagagatactaatgcagctaacttagatgatttgcttccatgtcattatttcgactacattgctgggacatcgactggaggaaaaacaagaaaagctttcgtggacatcatatatcggaagcaaaaaaagagcaacagcgattacacgctagagaacgctaatacagaactatttgggtccagagaggatcgcactagaacgatcgctttttcgtttgcgattgacaagcgagctggtattgactgcgagtatctctggagaagttatacctgtcagccaccagaaaaggggggctggagacccttaaactatacacaagcgggaatcccagtaccgatatggaacgttgcacgtgcaacgtctgctgctccccggtacttcgagtctatcagtattgggcacagagagcatcttgacggtggaatgcaccgaccagccgtgtttctaagcattggtactggaaagaagattgaaaatcaaagtaccaagctagaggaggagacttctcttcgagacttcatgttggcaataagaccagatgagcatgttaggaaacagctgttcaaaaaatatctcgagatcggtcgagcgtggaaaaatttcatggttaacactgagggcgaatcgggcacaaacggttggttagatgcctgccgagacaagaacgtggatcagtattgtagactcaacgtggagggtactctcgcagccgtacctttagacgactggcgacccccaatctccggaagactgacgttagaacgaatccgaaccgaaacacagaagtaccttgatagagacagtatcaaggcagatatagagagaatagctacagagctagtcatcatccgacaaaggcgggcacagaccgagcggtgggagagatttgcaactgatgtgacgtaccgttgtcccgctgattgctgccgcacgtacaatgggatcaattttgcgacacgaagcagatttcgaaatcatgtcacgggcgacgtcataggtcacggcgaaatgacaagcgtggagtgtgagaactttctcaatagcggaagacaaagtcatatttga

SEQ ID NO: 36059 - protein, 455 aa, Muscodor strobelii
  misc_feature: SGI Peptide ID NO. 572495
  misc_feature (39)..(128): NCBI GI: 171681986 Blast Desc: protein product [Podospora anserina] gi|170940952|emb|CAP66602.1| protein product [Podospora anserina]
  misc_feature (47)..(386): NCBI GI: 189210862 Blast Desc: conserved [Pyrenophora tritici-repentis Pt-1C-BFP] gi|187977855|gb|EDU44481.1| conserved [Pyrenophora tritici-repentis Pt-1C-BFP]
  misc_feature (47)..(128): NCBI GI: 169613052 Blast Desc: SNOG_09655 [Phaeosphaeria nodorum SN15] gi|160702639|gb|EAT82920.2| SNOG_09655 [Phaeosphaeria nodorum SN15]
  misc_feature (44)..(128): NCBI GI: 116202555 Blast Desc: CHGG_09162 [Chaetomium globosum CBS 148.51] gi|88177680|gb|EAQ85148.1| CHGG_09162 [Chaetomium globosum CBS 148.51]
  misc_feature (38)..(128): NCBI GI: 145238204 Blast Desc: An07g06720 [Aspergillus niger] gi|134076231|emb|CAK39517.1| protein product [Aspergillus niger]
  misc_feature (20)..(279): NCBI GI: 85857482 Blast Desc: RE23733p [Drosophila melanogaster]
  misc_feature (40)..(128): NCBI GI: 85096874 Blast Desc: NCU07074 [Neurospora crassa OR74A] gi|28921827|gb|EAA31103.1| [Neurospora crassa OR74A]
  misc_feature (20)..(279): NCBI GI: 45550585 Blast Desc: calcium-independent phospholipase A2 VIA, isoform A [Drosophila melanogaster] gi|45445976|gb|AAF50194.3| calcium-independent phospholipase A2 VIA, isoform A [Drosophila
  misc_feature (20)..(279): NCBI GI: 195589185 Blast Desc: GD12885 [Drosophila simulans] gi|194196345|gb|EDX09921.1| GD12885 [Drosophila simulans]
  misc_feature (20)..(279): NCBI GI: 195326473 Blast Desc: GM24833 [Drosophila sechellia] gi|194118896|gb|EDW40939.1| GM24833 [Drosophila sechellia]
MADHSAINGELFVDTHHGKPDMKPLPYRDTKDIDNGHENSPWARKTVLSFDGGGIRGYSSLLILREVMIAVKKIEVELSEGSFRSSHDYPWMSPQPILNGSRDTNAANLDDLLPCHYFDYIAGTSTGGKTRKAFVDIIYRKQKKSNSDYTLENANTELFGSREDRTRTIAFSFAIDKRAGIDCEYLWRSYTCQPPEKGGWRPLNYTQAGIPVPIWNVARATSAAPRYFESISIGHREHLDGGMHRPAVFLSIGTGKKIENQSTKLEEETSLRDFMLAIRPDEHVRKQLFKKYLEIGRAWKNFMVNTEGESGTNGWLDACRDKNVDQYCRLNVEGTLAAVPLDDWRPPISGRLTLERIRTETQKYLDRDSIKADIERIATELVIIRQRRAQTERWERFATDVTYRCPADCCRTYNGINFATRSRFRNHVTGDVIGHGEMTSVECENFLNSGRQSHI

SEQ ID NO: 36060 - DNA, 309 bp, Muscodor strobelii
  misc_feature: SGI cDNA ID NO. 572496
  misc_feature: Encodes the peptide sequence at SEQ ID NO 36061
atgaagctttcgggcgtgcctgatgacggaggccactcgtactcaaagcgacgtctcagccccgatgctagtgtctccatcgaaaacccagctgccacctatatggtgggtgtcaattcgtctaacctcactataaacatcaagggaactggtgcaaacatggcgctaatacctcctgatgagcgcaccgccagcgcctacgtcgacacgggcaacaacgatgacatccagtacaccgcacatttcgccgactacatcactatgagaactgaacgcatcagtaattattcctcccgcattggaaagtga

SEQ ID NO: 36061 - protein, 102 aa, Muscodor strobelii
  misc_feature: SGI Peptide ID NO. 572496
MKLSGVPDDGGHSYSKRRLSPDASVSIENPAATYMVGVNSSNLTINIKGTGANMALIPPDERTASAYVDTGNNDDIQYTAHFADYITMRTERISNYSSRIGK

SEQ ID NO: 36062 - DNA, 1545 bp, Muscodor strobelii
  misc_feature: SGI cDNA ID NO. 572497
  misc_feature: Encodes the peptide sequence at SEQ ID NO 36063
atgcttcttctttcagaaatcttgaaaacaccatgcatcaagcttaccaatctcgatcttgatccatcctcgttttcaagcacttatgctggactcacgccaaagcaaggaggaaatggcaatctttggaacgtcaatctcattgttcgcgccgctaaggggggcgtcaccggagatgtgacgattgaaggccagactggaacgttcaagatttcgttggcggatgcttatgttttccttcaggcccacgccgacagaagtctgcagactgacccaatagtcacggcgctgcagtgctctatcggcgactggaagattgatggaactatcattgatatcctcgcgggcctcttcccggtatttgcggagataatcaaactgggactcaatggctatcgcgctgccggtgccatcaacacttatttcaaccaggacattatcaacgcgatcaataacgtaatcaataacattttacaccccagcaaaagtctcatataccgtaaacagccaattactcggcagcctgaggtgtccctgttgcctccggatatcgacttcagcagatggatgtcggacgagcgcgtcccaaccaagacgctcgcggagatccacctccctggtacacatgatagcggtacttacgacctaagctcagttctcagcacaatcaagtatcccgaaatcgagtgcttgtgggctctgagcgatcaatcagctcctgtcaatgcttcttggccagtgaccttcccacccaccgaggagaaccccctatatctaggtgaaacgctctatcaatttgtcatggggtctgcggtgaatgctatctctcgagcacaagatctcactatcctgcagcaactccagagcggcatccgctacttcgatttccgtgtgtactacgatacgcgggatgatgaattttaccttcagcacgcgctgcgaggccccttgttccgggacgtgctgttacagctgaagcaattcgtcgaggccgataaagatgcgaaagaacttgtcttcgccgaagtctcgcataccaactttgcgcacatctactaccaggctgcgagctccggcgagacgcgattcaactttcagactcctgctaaaacggaactgggcgccattactagcgaccccggcacgaagatcatgtttctcaacacggacaacaccctcacgttcaaacagcccgtgacaaatacggacggcattgcgggcgttccgtgggcaggtgagctctacacggtcgacatgctggagcagcgggaaggcccgccgctcaagacgcacacggaacccctgtgggccatctcgtgggtgctcggggctagcacacctaccatcgtggcgacggtgctgtcgtggctacgcggcacgccggactgggcgctcgaagcgatcgccgctgaggctaacaacaacctaccagggttcttgcaacagtatgcgggcgcggcctggaacctggtgacgcttgattggttcgatcatgggccacagccgagtcttgttgagcttgttgtagggatgaatttcatttag

SEQ ID NO: 36063 - protein, 514 aa, Muscodor strobelii
  misc_feature: SGI Peptide ID NO. 572497
  misc_feature (187)..(343): NCBI GI: 189345991 Blast Desc: conserved [Chlorobium limicola DSM 245] gi|189340138|gb|ACD89541.1| conserved [Chlorobium limicola DSM 245]
  misc_feature (185)..(345): NCBI GI: 67473297 Blast Desc: [Entamoeba histolytica HM-1:IMSS] gi|56469267|gb|EAL47029.1| , conserved [Entamoeba histolytica HM-1:IMSS]
  misc_feature (185)..(345): NCBI GI: 167376198 Blast Desc: phosphatidylinositol-specific phospholipase C X domain-containing protein [Entamoeba dispar SAW760] gi|165904818|gb|EDR29964.1| phosphatidylinositol-specific C X
  misc_feature (186)..(345): NCBI GI: 260804983 Blast Desc: BRAFLDRAFT_260977 [Branchiostoma floridae] gi|229282630|gb|EEN53379.1| BRAFLDRAFT_260977 [Branchiostoma floridae]
  misc_feature (175)..(405): NCBI GI: 119358148 Blast Desc: Cpha266_2380 [Chlorobium phaeobacteroides DSM 266] gi|119355497|gb|ABL66368.1| Cpha266_2380 [Chlorobium phaeobacteroides DSM 266]
  misc_feature (178)..(512): NCBI GI: 91088447 Blast Desc: : similar to glycosylphosphatidylinositol-specific phospholipase C [Tribolium castaneum] gi|270012211|gb|EFA08659.1| TcasGA2_TC006324 [Tribolium castaneum]
  misc_feature (190)..(345): NCBI GI: 116061035 Blast Desc: Glycosylphosphatidylinositol-specific phospholipase C (ISS) [Ostreococcus tauri]
  misc_feature (180)..(371): NCBI GI: 260821436 Blast Desc: BRAFLDRAFT_100947 [Branchiostoma floridae] gi|229291376|gb|EEN62049.1| BRAFLDRAFT_100947 [Branchiostoma floridae]
  misc_feature (200)..(514): NCBI GI: 156390880 Blast Desc: [Nematostella vectensis] gi|156222592|gb|EDO43434.1| [Nematostella vectensis]
  misc_feature (159)..(375): NCBI GI: 284092057 Blast Desc: [Naegleria gruberi]
MLLLSEILKTPCIKLTNLDLDPSSFSSTYAGLTPKQGGNGNLWNVNLIVRAAKGGVTGDVTIEGQTGTFKISLADAYVFLQAHADRSLQTDPIVTALQCSIGDWKIDGTIIDILAGLFPVFAEIIKLGLNGYRAAGAINTYFNQDIINAINNVINNILHPSKSLIYRKQPITRQPEVSLLPPDIDFSRWMSDERVPTKTLAEIHLPGTHDSGTYDLSSVLSTIKYPEIECLWALSDQSAPVNASWPVTFPPTEENPLYLGETLYQFVMGSAVNAISRAQDLTILQQLQSGIRYFDFRVYYDTRDDEFYLQHALRGPLFRDVLLQLKQFVEADKDAKELVFAEVSHTNFAHIYYQAASSGETRFNFQTPAKTELGAITSDPGTKIMFLNTDNTLTFKQPVTNTDGIAGVPWAGELYTVDMLEQREGPPLKTHTEPLWAISWVLGASTPTIVATVLSWLRGTPDWALEAIAAEANNNLPGFLQQYAGAAWNLVTLDWFDHGPQPSLVELVVGMNFI

SEQ ID NO: 36064 - DNA, 5103 bp, Muscodor strobelii
  misc_feature: SGI cDNA ID NO. 572498
  misc_feature: Encodes the peptide sequence at SEQ ID NO 36065
atggctgacccgttatcaattgcggcaagtatcgccggcgtcatatccctagcagacattgtgtttgttcgcatcacgaaatacacaagagaagtgaaaaatgcagacaagcaaattggagatcttgcgaaagaagtcaatctactcggcggtgcattgaatagtctttccagtctctcagatctggctcgccacaaacagagtattgatctcgcgctctctgcggactcaacagagaatctccttcgcttgctgtctcgtgccgaagacctacagagcacaactgcagatattttgacaactttgaaagaggcgcgagaggtcacaaaccggatatactcaaattccgagcgaaaaaaggttttaggctatttcttaaagtacaatccccaacaaaactacgagactagtgtccgtcttaggcaccccagaacaggattgtggttattacatctcccacagttccaaacctggctctcgacaacggactcgaggctttggcttcgtgggatccccggtgctggtaaaactgttctcgcgggatcaattatagaggtagcattgtcatcaagcactgaggagatcgctacgtctttcttcttttgtgactacaactcgcaagtaacgcaatccccagtgaacatcgtgagctctattttatatcaacttgccatccaaaaagaggaggcatttgcaattttagagcaattcttcaacgacttacatcctccacgaggactccctaggacgccagagttgggagatttgaagaagaaactgcgagaaatggcaagtcagtttcggagggtgtttctcattgttgacggccttgacgagtgtcgcggaacgacagacgaggtggtgaggacgcttctcgacgtggcaaatgattccgataccctatcagttgctcttctaagccgtgatgagattgaaattcgaagatacttggaggacgaatttgaaggcattgaaatcgctgcgcacactgaggatattacggaatttgtgactgcagagattgaagaacgcatacgaactcgacgattgcgagttaatgacttgtcactaaagggcgaaattcttcaaggattgatcgaaggcgcaaagggcatgtttcgttgggttgcgtgtcaactcgaccacctgggaacatgcttatcagattcagaatgccgtgacgcattaaaaaagcttccccctaccctgtacaagtcgtacgagagaattttggaaagagtaccgcgttatcaaatacctcggactcaaatgatactgcatttcatcgcctatgcgcagcctgcgcttacaattcagcagctaagggaagcggcttcagtgccccacgatccaaatagccgtgcaatcgactggaaagacattattcatgaagaatccattgccagtctttgcagcagccttgtccgcaaatctaacaatggcgaactcttcgaattcgcacacgcgtctgttagagagttcctcgaacacgatgaactcgcacctcaaccatttcagctgtctaaagtccattgtccttggcctgtcaaactacccatcaccgatgactcacgacgtactaccggacttgacgagctcattatatctgccatagtcgacgaagactttacccctcttcatttggcttcaatgatatctctgacaactgtttgcgctactttaattaaaactgggctggaagtcaatgctaagagcaagttcggaactccattagaatgcatattcttggaagtcatagcttacccagatggcattgacgaggagtactatgaagactgtgcgccagtggaggagaaaatcaatacaatcaattatctcgttcgtgctggagcagacgtctctcgcacatttccatcggaatcttcatcaatgttgagcttggtgggagttgatatgatcaactccatggaaacggatatgaagcagcttggagagccctccttacgcattgccgaatgtctcctgggccatggtgtgatggttacccccgacgatcttcaagaatttgactccttattagaactctggtttgaggatggcaacagcgaagatggcaaatatgaaaactctttaaagtcatttgttgaattcacgtcccgaatgatagatcagtcacctctacatttccagttgtgcgaaaaagcatggcagaagtacaaacattgggctttggatgacgcccttgcaaattcagctattgatacaaggatatcgttatcagcgggatcgttgacagagtgccttttcagagcgatttatcagggcaatctaaatgtcgtggagagactattgcgtgaccaaagattgcagattaccaacttgataagctcagagggagaaacccctttgcacgcagcgctacaaaacgggggatctcagtcctctggtagctacacagaaaatcgattgagaattttcgaaatcttgactcgagccggttgtgatatttgcaaaaggaatggaacaggagctttgcctcaccatgtgtggaactggtggatggacgaatccctagaggaaagcaacagtaactatgaggatgcaagtgctattattgcagcgcacttccaaaaagcaggtatcacttgcgtcacccaagagagtcacgggcgcaatgcgctgcatatacattccgataatctataccgcttgaaaagtttcctactcaccaatacggctgaggccattgcaattgcactggagacggtcgataatgatggtaacacgcccattggtcacgcacttgcgcacggtcacgtaccatgtatgctactactcatggaacaagttgaactaaagcttgcgcacttgcaaagtcgaacaccaattgtacagcttgtggtgatgcgcaatgtggagactgtcttcaatcgcttggtgcaagaagagagcctgagattactatcagaggatgacattgcgaagtcgatcttccatttgacaccgcaagcaacccctggactcgtcgagaggctcattgacatatgtcccactgcctgtagtgtacgagtttcggacctactacccctagattactacttgcagcggtgcctagaaggtggctctctacccaatttcgacatcatgacgctcctccgcacccttgaagctgtcgaacaggaaacacaagcatctgccattctcccgcttctcaaaccctttggtgtgtttactacaatggatcagatttggccggtgtcaaccttcatgatcactgcagtccttctccaaacaaagctgtggcatagtatccgcgattcttcaatcatctcatttcttctgaacgcgtcagtcgctgcggacgatgtcgaaatcgttgagcttctcattgcgaatggagcaaatgtccaccatcgcgtcaatggtatatcagcacttgacctcgtgtgcatacaaggttttgacaaagagaaccccgaagagaaactgttcaagctgcttcttgatgcgactgacaggtcacgattaaatgacacagcccaggaacacgaaggcttgggactgctacatcgtctcagtgaacccaacgagggatgggcgatagaagcgctggtaaaatatggagccgaccctgacatctgcactggagtatatccgtaccaaccagcattagtctatcatctgtggcgtcgtaatattgaatctgcaatggtccttcttagaaacggagcagatccaaaaaaaactgacatacacggcttcgatgcagtcctggctgctagcatcacaggagcaaacatatttctcgttgagatgtttcgaaccaaatatcacgactggaagccgaacgcccaaagatcttgcagctgggtttcaggagagctcgacgtttctggctgcaccgcacttcatgctgctgctgaaggtggttctgtagactgcattgccttttttctggatcgcgggcttctatcagacatcgaagtccggtccaatgagctctatactccgattcatctagcagccaatgacggaagcgcagatgttgtccgatatcttctgcttcgcggagcggatgcgaacgctcaatcgtcagacggaagtacacctttacatctggctgtgagaaatcgcgagctggaaaccgtgagagtattgattgaacaaggggcagaactcttacctgactctcgaggcatgacgccgcttctttatgcttacgagatacaagatacagctctcattcattgcctatcccgagaaacacaccgtagtgttttgaccggaacacaagggtgtagcaccgatattgaagagcccccgcaaacgaaaaatcgtggtctcgcgcacgcattctcagcagcaattcgatgcggtgatctgtccctttgcaaagagttacaagctagaggctgtagtttggagcttggtctccctccctgtgggaaatgctcaccattggtcgaagcactcaaaatgaagaacgtcgatatactgatttggcttctcgagaacagcgctcttacgaccgtgcgcagctgtaaggaatttggttcgctctcagcaatcaccatgttgatcgaacggccagatctaaaatctgccgttcccctctttctcgacacatatttaggtcaaggaggctcatttttatcggagtatccaagcttgatctctaccgccgtgttctggaagagtcccgccactaagtcactcctagatcacttgaaagataatcagcgtcactattgtcaattagtcggtgagcctccagaaaggacaatggctctggccacaggttcacagaactctgcaatcacggggcagtcagccctacatattgccgcaaaagaagggcaatacgcagaggaatcgctacttagcgagaatggagctgatatcaacgctgtggataacagcttcctaactcctctgcacctggcatctgaccctaaaatggtgcaaagtctaatcctgcacggcgcaaacgtggacgctagagattattgggggaggacacctttgctgatcgcggcacaagttggcaaccttgagctgcactccatttgtgtgccaattacagcgatcaaccaggtcatttcgcgcagcaccctcggattttcgccgaacttctgcgtctag

SEQ ID NO: 36065 - protein, 1700 aa, Muscodor strobelii
  misc_feature: SGI Peptide ID NO. 572498
  misc_feature (1320)..(1352): Pfam Id: PF00023 Pfam Desc: Ankyrin repeat
  misc_feature (1353)..(1385): Pfam Id: PF00023 Pfam Desc: Ankyrin repeat
  misc_feature (1594)..(1626): Pfam Id: PF00023 Pfam Desc: Ankyrin repeat
  misc_feature (785)..(828): Pfam Id: PF00023 Pfam Desc: Ankyrin repeat
  misc_feature (1353)..(1380): Pfam Id: PF00023 Pfam Desc: Ankyrin repeat
  misc_feature (541)..(573): Pfam Id: PF00023 Pfam Desc: Ankyrin repeat
  misc_feature (1285)..(1309): Pfam Id: PF00023 Pfam Desc: Ankyrin repeat
  misc_feature (1)..(504): NCBI GI: 256733205 Blast Desc: NECHADRAFT_37523 [Nectria haematococca mpVI 77-13-4]
  misc_feature (5)..(509): NCBI GI: 46127675 Blast Desc: FG08215.1 [Gibberella zeae PH-1]
  misc_feature (1)..(448): NCBI GI: 256733666 Blast Desc: NECHADRAFT_36266 [Nectria haematococca mpVI 77-13-4]
  misc_feature (3)..(496): NCBI GI: 256725010 Blast Desc: NECHADRAFT_77073 [Nectria haematococca mpVI 77-13-4]
  misc_feature (1)..(446): NCBI GI: 46117298 Blast Desc: FG04491.1 [Gibberella zeae PH-1]
  misc_feature (86)..(498): NCBI GI: 255951228 Blast Desc: Pc22g24930 [Penicillium chrysogenum Wisconsin 54-1255] gi|211593398|emb|CAP99781.1| Pc22g24930 [Penicillium chrysogenum Wisconsin 54-1255]
  misc_feature (1071)..(1684): NCBI GI: 256725010 Blast Desc: NECHADRAFT_77073 [Nectria haematococca mpVI 77-13-4]
  misc_feature (38)..(495): NCBI GI: 67902626 Blast Desc: AN8300.2 [Aspergillus nidulans FGSC A4] gi|40747709|gb|EAA66865.1| AN8300.2 [Aspergillus nidulans FGSC A4] gi|259484224|tpe|CBF80262.1| TPA: conserved [Aspergillus FGSC
  misc_feature (103)..(500): NCBI GI: 171679183 Blast Desc: protein product [Podospora anserina] gi|170937663|emb|CAP62321.1| protein product [Podospora anserina]
  misc_feature (539)..(1637): NCBI GI: 256733205 Blast Desc: NECHADRAFT_37523 [Nectria haematococca mpVI 77-13-4]
MADPLSIAASIAGVISLADIVFVRITKYTREVKNADKQIGDLAKEVNLLGGALNSLSSLSDLARHKQSIDLALSADSTENLLRLLSRAEDLQSTTADILTTLKEAREVTNRIYSNSERKKVLGYFLKYNPQQNYETSVRLRHPRTGLWLLHLPQFQTWLSTTDSRLWLRGIPGAGKTVLAGSIIEVALSSSTEEIATSFFFCDYNSQVTQSPVNIVSSILYQLAIQKEEAFAILEQFFNDLHPPRGLPRTPELGDLKKKLREMASQFRRVFLIVDGLDECRGTTDEVVRTLLDVANDSDTLSVALLSRDEIEIRRYLEDEFEGIEIAAHTEDITEFVTAEIEERIRTRRLRVNDLSLKGEILQGLIEGAKGMFRWVACQLDHLGTCLSDSECRDALKKLPPTLYKSYERILERVPRYQIPRTQMILHFIAYAQPALTIQQLREAASVPHDPNSRAIDWKDIIHEESIASLCSSLVRKSNNGELFEFAHASVREFLEHDELAPQPFQLSKVHCPWPVKLPITDDSRRTTGLDELIISAIVDEDFTPLHLASMISLTTVCATLIKTGLEVNAKSKFGTPLECIFLEVIAYPDGIDEEYYEDCAPVEEKINTINYLVRAGADVSRTFPSESSSMLSLVGVDMINSMETDMKQLGEPSLRIAECLLGHGVMVTPDDLQEFDSLLELWFEDGNSEDGKYENSLKSFVEFTSRMIDQSPLHFQLCEKAWQKYKHWALDDALANSAIDTRISLSAGSLTECLFRAIYQGNLNVVERLLRDQRLQITNLISSEGETPLHAALQNGGSQSSGSYTENRLRIFEILTRAGCDICKRNGTGALPHHVWNWWMDESLEESNSNYEDASAIIAAHFQKAGITCVTQESHGRNALHIHSDNLYRLKSFLLTNTAEAIAIALETVDNDGNTPIGHALAHGHVPCMLLLMEQVELKLAHLQSRTPIVQLVVMRNVETVFNRLVQEESLRLLSEDDIAKSIFHLTPQATPGLVERLIDICPTACSVRVSDLLPLDYYLQRCLEGGSLPNFDIMTLLRTLEAVEQETQASAILPLLKPFGVFTTMDQIWPVSTFMITAVLLQTKLWHSIRDSSIISFLLNASVAADDVEIVELLIANGANVHHRVNGISALDLVCIQGFDKENPEEKLFKLLLDATDRSRLNDTAQEHEGLGLLHRLSEPNEGWAIEALVKYGADPDICTGVYPYQPALVYHLWRRNIESAMVLLRNGADPKKTDIHGFDAVLAASITGANIFLVEMFRTKYHDWKPNAQRSCSWVSGELDVSGCTALHAAAEGGSVDCIAFFLDRGLLSDIEVRSNELYTPIHLAANDGSADVVRYLLLRGADANAQSSDGSTPLHLAVRNRELETVRVLIEQGAELLPDSRGMTPLLYAYEIQDTALIHCLSRETHRSVLTGTQGCSTDIEEPPQTKNRGLAHAFSAAIRCGDLSLCKELQARGCSLELGLPPCGKCSPLVEALKMKNVDILIWLLENSALTTVRSCKEFGSLSAITMLIERPDLKSAVPLFLDTYLGQGGSFLSEYPSLISTAVFWKSPATKSLLDHLKDNQRHYCQLVGEPPERTMALATGSQNSAITGQSALHIAAKEGQYAEESLLSENGADINAVDNSFLTPLHLASDPKMVQSLILHGANVDARDYWGRTPLLIAAQVGNLELHSICVPITAINQVISRSTLGFSPNFCV

SEQ ID NO: 36066 - DNA, 801 bp, Muscodor strobelii
  misc_feature: SGI EST ID NO. CUFF.85827.0
  misc_feature: Variant of the nucleotide sequence at SEQ ID NO 36064
cttcaacgacttacatcctccacgaggactccctaggacgccagagttgggagatttgaagaagaaactgcgagaaatggcaagtcagtttcggagggtgtttctcattgttgacggccttgacgagtgtcgcggaacgacagacgaggtggtgaggacgcttctcgacgtggcaaatgattccgataccctatcagttgctcttctaagccgtgatgagattgaaattcgaagatacttggaggacgaatttgaaggcattgaaatcgctgcgcacactgaggatattacggaatttgtgactgcagagattgaagaacgcatacgaactcgacgattgcgagttaatgacttgtcactaaagggcgaaattcttcaaggattgatcgaaggcgcaaagggcatgtttcgttgggttgcgtgtcaactcgaccacctgggaacatgcttatcagattcagaatgccgtgacgcattaaaaaagcttccccctaccctgtacaagtcgtacgagagaattttggaaagagtaccgcgttatcaaatacctcggactcaaatgatactgcatttcatcgcctatgcgcagcctgcgcttacaattcagcagctaagggaagcggcttcagtgccccacgatccaaatagccgtgcaatcgactggaaagacattattcatgaagaatccattgccagtctttgcagcagccttgtccgcaaatctaacaatggcgaactcttcgaattcgcacacgcgtctgttagagagttcctcgaacacgatgaactcgcacctcaacc

SEQ ID NO: 36067 - DNA, 1098 bp, Muscodor strobelii
  misc_feature: SGI cDNA ID NO. 572499
  misc_feature: Elevated expression when VOC is produced
  misc_feature: Encodes the peptide sequence at SEQ ID NO 36068
atgaccgtatttgaccgcaagagagccccgccctatgtcgctatatcctacacctggggcgacgagaatgaaatgctcaaattgcgactcaatgggcgacaattttccgtcagacgtaatctctggctctgtctcactcacttcgacctccatgcgcagcattccgaggcgagatatctttgggtggacgcaatatgtatcaaccaggccaacatcccagaacgtaacgcccaagtccaggtaatggacgaaatctacaagaacgctgcctatgtctctatttggcttggcctccatccgaggctagagttttacacggattacatcaaagagcccattgcgggcttcaacatggatgatcccgacccattagaagtgaagaagctagcagacgacgaatactggtctcgatactgggtcatacaggaatgtctgctcgcacgtaacatccagattcattgcggcgacaatatattatcctggacggactttcaagagcgcttaagcaacgggataggcgatgttaatttgttagccccggcggaagacagcttcgtcaaggaaattcttgacacgaagaagcacggtgccctgcctctactgctggcgaggaaccctgtagatggttttcatcaacgaccgcttgaagaacttcttattcaccaccgtcattcgcgatgtaaggatccaagggatcgtgtttttgcgctcttgggattgttggaaaattatgagcggaagtctttagagcgatatttccctaattactccctgagtcatgacggtgtcgtggttattacgttggcacatctgagagagttgagcggggagtcagtgacgattgagaaccagaaactgttccaaggtcttggtgtggtgtcgaaagacaggcaacgcaggctcattgcggctgcagaagatgtagcctattatgttggatatgatgacgagatcgatttttctgatgatgcgaggcaagaccgggctaggtttatttgttggggagatgggatggatatcgatcggtatgaggaatcgtttggggtgcaagggggcgaggatgcatggtctagtgtgagtcgttgtattgtctcatga

SEQ ID NO: 36068 - protein, 365 aa, Muscodor strobelii
  misc_feature: SGI Peptide ID NO. 572499
  misc_feature (12)..(143): Pfam Id: PF06985 Pfam Desc: Heterokaryon incompatibility protein (HET)
  misc_feature (12)..(105): Pfam Id: PF06985 Pfam Desc: Heterokaryon incompatibility protein (HET)
  misc_feature (1)..(264): NCBI GI: 256727241 Blast Desc: NECHADRAFT_75911 [Nectria haematococca mpVI 77-13-4]
  misc_feature (10)..(263): NCBI GI: 154305655 Blast Desc: BC1G_07642 [Botryotinia fuckeliana B05.10] gi|150853161|gb|EDN28353.1| BC1G_07642 [Botryotinia fuckeliana B05.10]
  misc_feature (12)..(240): NCBI GI: 242799835 Blast Desc: Ankyrin and HET domain protein [Talaromyces stipitatus ATCC 10500] gi|218716807|gb|EED16228.1| Ankyrin and HET domain protein [Talaromyces stipitatus ATCC 10500]
  misc_feature (1)..(271): NCBI GI: 256731898 Blast Desc: NECHADRAFT_80737 [Nectria haematococca mpVI 77-13-4]
  misc_feature (10)..(259): NCBI GI: 46135655 Blast Desc: FG09350.1 [Gibberella zeae PH-1]
  misc_feature (10)..(243): NCBI GI: 256721799 Blast Desc: NECHADRAFT_53281 [Nectria haematococca mpVI 77-13-4]
  misc_feature (3)..(240): NCBI GI: 169626186 Blast Desc: SNOG_16372 [Phaeosphaeria nodorum SN15] gi|111055077|gb|EAT76197.1| SNOG_16372 [Phaeosphaeria nodorum SN15]
  misc_feature (1)..(271): NCBI GI: 238504460 Blast Desc: conserved [Aspergillus flavus NRRL3357] gi|220690932|gb|EED47281.1| conserved [Aspergillus flavus NRRL3357]
  misc_feature (10)..(240): NCBI GI: 256731573 Blast Desc: NECHADRAFT_85152 [Nectria haematococca mpVI 77-13-4]
  misc_feature (1)..(271): NCBI GI: 169764315 Blast Desc: [Aspergillus oryzae RIB40] gi|83764483|dbj|BAE54627.1| protein product [Aspergillus oryzae]
  misc_feature: Useful for introducing or modulating the production of volatile compounds
MTVFDRKRAPPYVAISYTWGDENEMLKLRLNGRQFSVRRNLWLCLTHFDLHAQHSEARYLWVDAICINQANIPERNAQVQVMDEIYKNAAYVSIWLGLHPRLEFYTDYIKEPIAGFNMDDPDPLEVKKLADDEYWSRYWVIQECLLARNIQIHCGDNILSWTDFQERLSNGIGDVNLLAPAEDSFVKEILDTKKHGALPLLLARNPVDGFHQRPLEELLIHHRHSRCKDPRDRVFALLGLLENYERKSLERYFPNYSLSHDGVVVITLAHLRELSGESVTIENQKLFQGLGVVSKDRQRRLIAAAEDVAYYVGYDDEIDFSDDARQDRARFICWGDGMDIDRYEESFGVQGGEDAWSSVSRCIVS

SEQ ID NO: 36069 - DNA, 2174 bp, Muscodor strobelii
  misc_feature: SGI EST ID NO. CUFF.85842.0
  misc_feature: Variant of the nucleotide sequence at SEQ ID NO 36067
aggagaagggtgttgtggatagctgggcgcagttgatggggtatcgaagtgcgttttggacgtgctttgctgcggcggtcgcgagtacggttgttagttctattggattgaggaatattggcaaggtggggatgaagaaggatgtttgattgggggttggcaggatgatatagtattggagtaatgttgataagactataatcatttgacgccgctgcctgcattcatccaacgtaagccgggcctcacattgctatcgcccaactcaaagaaaataagaaacaccattctagctgagattatacaaaaaactggactaaattgaattaaactctaattgagaactaatggcatttgcttattcggatctcaaacccgggcagatacgcctgttgcggccggtgtcgatcagccaagcgagtttcgcgtcattggagatgaccgtatttgaccgcaagagagccccgccctatgtcgctatatcctacacctggggcgacgagaatgaaatgctcaaattgcgactcaatgggcgacaattttccgtcagacgtaatctctggctctgtctcactcacttcgacctccatgcgcagcattccgaggcgagatatctttgggtggacgcaatatgtatcaaccaggccaacatcccagaacgtaacgcccaagtccaggtaatggacgaaatctacaagaacgctgcctatgtctctatttggcttggcctccatccgaggctagagttttacacggattacatcaaagagcccattgcgggcttcaacatggatgatcccgacccattagaagtgaagaagctagcagacgacgaatactggtctcgatactgggtcatacaggaatgtctgctcgcacgtaacatccagattcattgcggcgacaatatattatcctggacggactttcaagagcgcttaagcaacgggataggcgatgttaatttgttagccccggcggaagacagcttcgtcaaggaaattcttgacacgaagaagcacggtgccctgcctctactgctggcgaggaaccctgtagatggttttcatcaacgaccgcttgaagaacttcttattcaccaccgtcattcgcgatgtaaggatccaagggatcgtgtttttgcgctcttgggattgttggaaaattatgagcggaagtctttagagcgatatttccctaattactccctgagtcatgacggtgtcgtggttattacgttggcacatctgagagagttgagcggggagtcagtgacgattgagaaccagaaactgttccaaggtcttggtgtggtgtcgaaagacaggcaacgcaggctcattgcggctgcagaagatgtagcctattatgttggatatgatgacgagatcgatttttctgatgatgcgaggcaagaccgggctaggtttatttgttggggagatgggatggatatcgatcggtatgaggaatcgtttggggtgcaagggggcgaggatgcatggtctagtgtgagtcgttgtattgtctcatgacttattaaagactggctcctgcatgtagacatggctttgacactcctttcattattgaaagtagatgatatattgaaagagagaagcaatatatactgcaactggtatacctcctatcgtttatgttgcagttgtctccatcttagcccttcgtcgccttgactcttgcgagtcattatatcctcctgggtgtatccgtaccttctctatagggactaacctagaccgttgactggtacggcgtccactactcaatggcaaaaccttacctctcaacttcttcttgatacgcataagtcgaatccaataatccttagatgattcatttgctcgtctctccatatctccattaatgacaagccctatcgttgaaggcccgctccatggcgtaaagtcatcctcagtgaacaccgactcagtctctggacatatctttgcttgatctgagaatcgatcgacgagcagccacttgagaacgagtccgtgcttcccggcggcttcaaaggcagagtggaagccagtgttgctccaataggttagtttcgcttgatgtcgtaccaaaaatttgacggactcgagtcgtccggcttcacaagccaccattaacgcggagcctaaaggggacccttcgaaatctag

SEQ ID NO: 36070 - DNA, 1593 bp, Muscodor strobelii
  misc_feature: SGI cDNA ID NO. 572500
  misc_feature: Encodes the peptide sequence at SEQ ID NO 36071
atgtcatcaaccacgacgtctcaaattgagcttcaaacgctcacaccacacaatgccacacctctcacttccgccaaaatgccaggggacactgccgacccgatcacaacctcaagtgcagtatccagttccccagcagcaccaagcatggcgcggtccgcggcattgctaacgacaatggcccttatttcattcctcaacacattctcctccggtctgctgaccgtcgcattacccaccatcgcgatcgagctctcactgcctcaaaaccttctcctctggcccgcagctgtctacgccctcgcactgagcaccacgcttctcctcctaggcgcaatcgcagacctagtcggcagtcgcccaatcttcttaatcgggaccgtgctcttcaccgtctggactctagcggtttcgttgtcgcagagtacttatcaattgatcgtattcaggacgttgcagggtatctcgatgagtttttgtctgcctacggccgtaagtaccattaccgcgacgtttcctagcggcaagccgcgaaacatcgcgttcgccgtctttggcggaggaagtcccatcggtttcgccgccggactagtgctcggtggactcctagtccaagtcagcagctggcgaacagcatattacctcgtaacagcactctgcgccttaacattcgtactcggctggttcacgctccccatctccaaaccagtgcccaacgtgcgtcacagactcctccacgaattcgactgggtcggcgtactaaccgccatcatctccctcgcactactctcttacatattcgccgaactcgcctactccggcacaatgctcagccggggatataatatcgccatcctcctgattggcgtgttgttggttccattcttcatcttctgggtaggccgccaggagagattgggcagaccggcaatcctgccgaatagtatttggagatctaaggaattcaccacgatatgtataaccgttttcctagtctggtcctggttcaacgccttcgggtactggagcacattattcttccaagagacacagggtctatcaccccttcaaacagctttgcgctttcttccactcgtggtgataggcttcgcgactaatgtcgtggcgggcttgatcatggataaagtgtccgccagcactctagtcctagtcgggggactgatcagtggtgccggcccgttgctgtttgcgctcatggacccggagtggatatactgggctgctggattcccagccatggctctttgtgttgtgagcacggatttgttgtttaatattagtaatcttgttattacgtcgagttttcctggtaaagaccaggcgctggcgggcagtgtgtttaatacggtggcgcagctggggaatagtattgggttggcgattacggctattattgcgagcgcggttcagacggcgcatgaggaggagaagggtgttgtggatagctgggcgcagttgatggggtatcgaagtgcgttttggacgtgctttgctgcggcggtcgcgagtacggttgttagttctattggattgaggaatattggcaaggtggggatgaagaaggatgtttga

SEQ ID NO: 36071 - protein, 530 aa, Muscodor strobelii
  misc_feature: SGI Peptide ID NO. 572500
  misc_feature (60)..(466): Pfam Id: PF07690 Pfam Desc: Major Facilitator Superfamily
  misc_feature (60)..(276): Pfam Id: PF07690 Pfam Desc: Major Facilitator Superfamily
  misc_feature (282)..(466): Pfam Id: PF07690 Pfam Desc: Major Facilitator Superfamily
  misc_feature (7)..(529): NCBI GI: 145229937 Blast Desc: An01g08550 [Aspergillus niger] gi|134055390|emb|CAK43944.1| protein product [Aspergillus niger]
  misc_feature (1)..(529): NCBI GI: 46126509 Blast Desc: FG07632.1 [Gibberella zeae PH-1]
  misc_feature (16)..(529): NCBI GI: 256724457 Blast Desc: [Nectria haematococca mpVI 77-13-4]
  misc_feature (1)..(529): NCBI GI: 259480547 Blast Desc: TPA: MFS transporter, (AFU_orthologue; AFUA_8G06760) [Aspergillus nidulans FGSC A4]
  misc_feature (16)..(530): NCBI GI: 154281281 Blast Desc: [Ajellomyces capsulatus NAm1] gi|150411632|gb|EDN07020.1| [Ajellomyces capsulatus NAm1]
  misc_feature (16)..(530): NCBI GI: 225554870 Blast Desc: integral membrane protein [Ajellomyces capsulatus G186AR]
  misc_feature (12)..(530): NCBI GI: 261353130 Blast Desc: integral membrane protein [Verticillium albo-atrum VaMs.102]
  misc_feature (49)..(529): NCBI GI: 212543215 Blast Desc: MFS transporter, [Penicillium marneffei ATCC 18224] gi|210066669|gb|EEA20762.1| MFS transporter, [Penicillium marneffei ATCC 18224]
  misc_feature (1)..(529): NCBI GI: 239614411 Blast Desc: MFS transporter [Ajellomyces dermatitidis ER-3]
  misc_feature (11)..(529): NCBI GI: 238845863 Blast Desc: integral membrane protein [Microsporum canis CBS 113480]
MSSTTTSQIELQTLTPHNATPLTSAKMPGDTADPITTSSAVSSSPAAPSMARSAALLTTMALISFLNTFSSGLLTVALPTIAIELSLPQNLLLWPAAVYALALSTTLLLLGAIADLVGSRPIFLIGTVLFTVWTLAVSLSQSTYQLIVFRTLQGISMSFCLPTAVSTITATFPSGKPRNIAFAVFGGGSPIGFAAGLVLGGLLVQVSSWRTAYYLVTALCALTFVLGWFTLPISKPVPNVRHRLLHEFDWVGVLTAIISLALLSYIFAELAYSGTMLSRGYNIAILLIGVLLVPFFIFWVGRQERLGRPAILPNSIWRSKEFTTICITVFLVWSWFNAFGYWSTLFFQETQGLSPLQTALRFLPLVVIGFATNVVAGLIMDKVSASTLVLVGGLISGAGPLLFALMDPEWIYWAAGFPAMALCVVSTDLLFNISNLVITSSFPGKDQALAGSVFNTVAQLGNSIGLAITAIIASAVQTAHEEEKGVVDSWAQLMGYRSAFWTCFAAAVASTVVSSIGLRNIGKVGMKKDV

SEQ ID NO: 36072 - DNA, 778 bp, Muscodor strobelii
  misc_feature: SGI EST ID NO. CUFF.85848.0
  misc_feature: Variant of the nucleotide sequence at SEQ ID NO 36070
ggtttcgccgccggactagtgctcggtggactcctagtccaagtcagcagctggcgaacagcatattacctcgtaacagcactctgcgccttaacattcgtactcggctggttcacgctccccatctccaaaccagtgcccaacgtgcgtcacagactcctccacgaattcgactgggtcggcgtactaaccgccatcatctccctcgcactactctcttacatattcgccgaactcgcctactccggcacaatgctcagccggggatataatatcgccatcctcctgattggcgtgttgttggttccattcttcatcttctgggtaggccgccaggagagattgggcagaccggcaatcctgccgaatagtatttggagatctaaggaattcaccacgatatgtataaccgttttcctagtctggtcctggttcaacgccttcgggtactggagcacattattcttccaagagacacagggtctatcaccccttcaaacagctttgcgctttcttccactcgtggtgataggcttcgcgactaatgtcgtggcgggcttgatcatggataaagtgtccgccagcactctagtcctagtcgggggactgatcagtggtgccggcccgttgctgtttgcgctcatggacccggagtggatatactgggctgctggattcccagccatggctctttgtgttgtgagcacggatttgttgtttaatattagtaatcttgttattacgtcgagttttcctggtaaagaccaggcgctggcgg

SEQ ID NO: 36073 - DNA, 2136 bp, Muscodor strobelii
  misc_feature: SGI cDNA ID NO. 572501
  misc_feature: Encodes the peptide sequence at SEQ ID NO 36074
atggctgcagcagtttcggaggctgaggccatcgcccaggacttccgcgaggcgctcgaggacatccagaccatcggccgcgccgagatctccaacctgaccatcgtcgcccgcgagaacctcgagcacgccctgagcatctcgagtgccctcatcgaccacatcaagaaagctcccccacacaaaaagctaccgcccctctacgtcctcgattccatcgctaagaatgtcggcactccctacaccctcttcttcagtaagaagctctaccagaccttcatggatgcctacgccatggtcgaccctgcgacgaggaggaagctggaggagatcttgaagacgtggaaggagcccgtccccggttccatcgacacccgccccgtcttccctcccgactcggtgcgacctatcgagaatgccctcatcaaagtccgcaccaccgccctgcaacaggaccagcagcgcgccagagaacacgctcagctgtacggtaaccgaagcagaccgccccagggtgtgccccagggtgttccctaccgtgagacgcctacgcctcctcatggccgcaccccttcacaaaactcaggatatgctccccctccccagcaaggcatgccacctcacgccaacggagtgcctcccttcggccatccaccccaacaacaaccgccagtaacctaccccccacacaatgtgagaaggagtcttgaccacttccctagctactctgtattgacagttgctcaggcaaacatatatccctcgaggtcaacacctcagccccccatgtcgggtgctttccagccgccgcagaacggaggctatgggcagcccccgcgcggaatcagcgtagatgcattgagggatgatatcctgagactaacggcggtgttcaaggccaagattgcccagaacccccatgattcagtaatgcagactcagttgaaggcgttgatggatttgcaaactgttctccagacccagaacctgccgcaggatcagttagtgcttgtgaagaaccaaatctctgctcttgacgtaaacataggggccctccaagcccacaatcctgtccagactcctgttcagacctctactcctgtaccgccccgcaatgtcgtagcagtagctcctcctccgcctgtagcggcggccgcacccaaggtatctctagattccttgtttggctcgggggccctggcggccataatggctcgcaattctgctgctcctactcccacaccccaaccccgtcccgtagacaattctatacggtcacctgcgcctcagaaggcggagccgcacaagccggcagcaccctcagtcccaactgatcctatggcgctcatgaacatgttgcggcaggctggcatgctgccacaggccacgcccgtgtctgctcccacccctgttcctagtgctacaccgttggtctcattgccgttcccccttcctctgcctggtatggagaaactcatacggccaccgcctcatatgaccacagagagtctcacaagtgatattgtattgaaagcatcatcactcaaacaattccgccctcacttactgcccttcctcttcgaggctcagggaccccagtgcactcaatgcggacgccgattcccgacgacggacgaaggcaagaagaagaagactgctcatatggattggcattttcgtgtcaatcagcgtagcgctgagacggacaaaagggggcttcatcgcagctggctcgtcgatgagatggactggatcaagactagagaaaccatcgatgaagatcacgttgtgcagaacagcgatgcgaatgcaggctcgggcagtgccgcggcaaaggctcctaagatccagtacataccggtccctgatgaccccgtcttggccgcaagcgtttgcccaatctgccaagacaagttcgagacacggtggctcgatgatgcacaagaattcgtctggacagatgccattaaggttggcgaccgaattttccatgcaagctgtcaccgagaggccttcagagatggtggaggcaccccgatgcactcacgtagtacgcctgagccgatactagggaagcgcaaagccgaggatgaactggtttctagtctccgaggcaagataaaggtggatgcttga

SEQ ID NO: 36074 - protein, 711 aa, Muscodor strobelii
  misc_feature: SGI Peptide ID NO. 572501
  misc_feature (5)..(711): NCBI GI: 256729461 Blast Desc: NECHADRAFT_84055 [Nectria haematococca mpVI 77-13-4]
  misc_feature (11)..(708): NCBI GI: 261358589 Blast Desc: conserved [Verticillium albo-atrum VaMs.102]
  misc_feature (1)..(710): NCBI GI: 67537908 Blast Desc: AN5124.2 [Aspergillus nidulans FGSC A4] gi|40743115|gb|EAA62305.1| AN5124.2 [Aspergillus nidulans FGSC A4] gi|259484569|tpe|CBF80905.1| TPA: mRNA cleavage factor Pcf11,
  misc_feature (8)..(704): NCBI GI: 238490055 Blast Desc: mRNA cleavage factor complex component Pcf11, [Aspergillus flavus NRRL3357] gi|220698653|gb|EED54993.1| mRNA cleavage factor complex component Pcf11, [Aspergillus flavus
  misc_feature (1)..(708): NCBI GI: 121702299 Blast Desc: mRNA cleavage factor complex component Pcf11, [Aspergillus clavatus NRRL 1] gi|119397557|gb|EAW07988.1| mRNA cleavage factor complex component Pcf11, [Aspergillus clavatus 1]
  misc_feature (8)..(710): NCBI GI: 169764064 Blast Desc: [Aspergillus oryzae RIB40] gi|83770960|dbj|BAE61093.1| protein product [Aspergillus oryzae]
  misc_feature (8)..(696): NCBI GI: 115385915 Blast Desc: conserved [Aspergillus terreus NIH2624] gi|114187951|gb|EAU29651.1| conserved [Aspergillus terreus NIH2624]
  misc_feature (8)..(697): NCBI GI: 145604432 Blast Desc: MGG_08573 [Magnaporthe grisea 70-15] gi|145012431|gb|EDJ97087.1| MGG_08573 [Magnaporthe grisea 70-15]
  misc_feature (8)..(710): NCBI GI: 212538053 Blast Desc: mRNA cleavage factor complex component Pcf11, [Penicillium marneffei ATCC 18224] gi|210068924|gb|EEA23015.1| mRNA cleavage factor complex component Pcf11, [Penicillium ATCC
  misc_feature (8)..(708): NCBI GI: 70991296 Blast Desc: mRNA cleavage factor complex component Pcf11 [Aspergillus fumigatus Af293] gi|66848129|gb|EAL88459.1| mRNA cleavage factor complex component Pcf11, [Aspergillus fumigatus
MAAAVSEAEAIAQDFREALEDIQTIGRAEISNLTIVARENLEHALSISSALIDHIKKAPPHKKLPPLYVLDSIAKNVGTPYTLFFSKKLYQTFMDAYAMVDPATRRKLEEILKTWKEPVPGSIDTRPVFPPDSVRPIENALIKVRTTALQQDQQRAREHAQLYGNRSRPPQGVPQGVPYRETPTPPHGRTPSQNSGYAPPPQQGMPPHANGVPPFGHPPQQQPPVTYPPHNVRRSLDHFPSYSVLTVAQANIYPSRSTPQPPMSGAFQPPQNGGYGQPPRGISVDALRDDILRLTAVFKAKIAQNPHDSVMQTQLKALMDLQTVLQTQNLPQDQLVLVKNQISALDVNIGALQAHNPVQTPVQTSTPVPPRNVVAVAPPPPVAAAAPKVSLDSLFGSGALAAIMARNSAAPTPTPQPRPVDNSIRSPAPQKAEPHKPAAPSVPTDPMALMNMLRQAGMLPQATPVSAPTPVPSATPLVSLPFPLPLPGMEKLIRPPPHMTTESLTSDIVLKASSLKQFRPHLLPFLFEAQGPQCTQCGRRFPTTDEGKKKKTAHMDWHFRVNQRSAETDKRGLHRSWLVDEMDWIKTRETIDEDHVVQNSDANAGSGSAAAKAPKIQYIPVPDDPVLAASVCPICQDKFETRWLDDAQEFVWTDAIKVGDRIFHASCHREAFRDGGGTPMHSRSTPEPILGKRKAEDELVSSLRGKIKVDA

SEQ ID NO: 36075 - DNA, 3127 bp, Muscodor strobelii
  misc_feature: SGI EST ID NO. CUFF.86007.1
  misc_feature: Variant of the nucleotide sequence at SEQ ID NO 36073
ttttcatacctggtgatattattcttgcgaaaacagatggtattgatacaacccagtgaattcaagtgccttcacaaatggaataggtacatatcgtggctgcaagaggttgcgcgcaccgggtagagcacgtgaccctggttgactgactggctgctgagttttagggcagctttctccgactgccggcagctgggggcgttgaaaccagaggcccattgatgagtcttgattcaagccgcggcttcctttgggactgacttcatccattcaaccattttcgcaacgtccacctcccaccttcctctactcacatccaattgcctgcgggttcctagccacgcagtaatagacataagggggcgccatcccctcctcgccgcctttgtctggtacccacatgtagatacctatagtttaattgccgcgacatctcgttgccgcgacatctcgttttctcgcttctccatcatcgatcaaccatcgcctttgtgcctttgtctcatccttggtcgtccgcaagcagatgtctgttgcggctgcatccggacaccatggctgcagcagtttcggaggctgaggccatcgcccaggacttccgcgaggcgctcgaggacatccagaccatcggccgcgccgagatctccaacctgaccatcgtcgcccgcgagaacctcgagcacgccctgagcatctcgagtgccctcatcgaccacatcaagaaagtacgtcgcacctgtctccctgtcccccctctgtgtttccgtcaacctcatgaagaaggacggcgcgtttgacgggcgatgggcactgttgcaatactgacaggaccactgctaggctcccccacacaaaaagctaccgcccctctacgtcctcgattccatcgctaagaatgtcggcactccctacaccctcttcttcagtaagaagctctaccagaccttcatggatgcctacgccatggtcgaccctgcgacgaggaggaagctggaggagatcttgaagacgtggaaggagcccgtccccggttccatcgacacccgccccgtcttccctcccgactcggtgcgacctatcgagaatgccctcatcaaagtccgcaccaccgccctgcaacaggaccagcagcgcgccagagaacacgctcagctgtacggtaaccgaagcagaccgccccagggtgtgccccagggtgttccctaccgtgagacgcctacgcctcctcatggccgcaccccttcacaaaactcaggatatgctccccctccccagcaaggcatgccacctcacgccaacggagtgcctcccttcggccatccaccccaacaacaaccgccagtaacctaccccccacacaatgcaaacatatatccctcgaggtcaacacctcagccccccatgtcgggtgctttccagccgccgcagaacggaggctatgggcagcccccgcgcggaatcagcgtagatgcattgagggatgatatcctgagactaacggcggtgttcaaggccaagattgcccagaacccccatgattcagtaatgcagactcagttgaaggcgttgatggatttgcaaactgttctccagacccagaacctgccgcaggatcagttagtgcttgtgaagaaccaaatctctgctcttgacgtaaacataggggccctccaagcccacaatcctgtccagactcctgttcagacctctactcctgtaccgccccgcaatgtcgtagcagtagctcctcctccgcctgtagcggcggccgcacccaaggtatctctagattccttgtttggctcgggggccctggcggccataatggctcgcaattctgctgctcctactcccacaccccaaccccgtcccgtagacaattctatacggtcacctgcgcctcagaaggcggagccgcacaagccggcagcaccctcagtcccaactgatcctatggcgctcatgaacatgttgcggcaggctggcatgctgccacaggccacgcccgtgtctgctcccacccctgttcctagtgctacaccgttggtctcattgccgttcccccttcctctgcctggtatggagaaactcatacggccaccgcctcatatgaccacagagagtctcacaagtgatattgtattgaaagcatcatcactcaaacaattccgccctcacttactgcccttcctcttcgaggctcagggaccccagtgcactcaatgcggacgccgattcccgacgacggacgaaggcaagaagaagaagactgctcatatggattggcattttcgtgtcaatcagcgtagcgctgagacggacaaaagggggcttcatcgcagctggctcgtcgatgagatggactggatcaagactagagaaaccatcgatgaagatcacgttgtgcagaacagcgatgcgaatgcaggctcgggcagtgccgcggcaaaggctcctaagatccagtacataccggtccctgatgaccccgtcttggccgcaagcgtttgcccaatctgccaagacaagttcgagacacggtggctcgatgatgcacaagaattcgtctggacagatgccattaaggttggcgaccgaattttccatgcaagctgtcaccgagaggccttcagagatggtggaggcaccccgatgcactcacgtagtacgcctgagccgatactagggaagcgcaaagccgaggatgaactggtttctagtctccgaggcaagataaaggtggatgcttgagccgacagaagctccacgacgacagttgagccttgaatggaacgtaatacaggctgtgcaaatgaactcagcatacaagtcgcacccgattgatggcgaagggtttgtttcaaatgcattatccggcgtttggcatgcattggagaagcggcatcatattcagaacaagattttgcgagaattcggaggcgaactggttagaagttgtgaggctcctatgacgaccttggagggacgataagtgatcgcaatgaaattcacatatgcgatgcttcggtagtaatgagacactacgaggcacgagatcatctgcgcgtaggtagaccaacataatgccgtctccagatatagtaaatgccgatggattaaaagcaat

SEQ ID NO: 36076 - DNA, 2193 bp, Muscodor strobelii
  misc_feature: SGI cDNA ID NO. 572502
  misc_feature: Encodes the peptide sequence at SEQ ID NO 36077
atggctgcagcagtttcggaggctgaggccatcgcccaggacttccgcgaggcgctcgaggacatccagaccatcggccgcgccgagatctccaacctgaccatcgtcgcccgcgagaacctcgagcacgccctgagcatctcgagtgccctcatcgaccacatcaagaaagctcccccacacaaaaagctaccgcccctctacgtcctcgattccatcgctaagaatgtcggcactccctacaccctcttcttcagtaagaagctctaccagaccttcatggatgcctacgccatggtcgaccctgcgacgaggaggaagctggaggagatcttgaagacgtggaaggagcccgtccccggttccatcgacacccgccccgtcttccctcccgactcggtgcgacctatcgagaatgccctcatcaaagtccgcaccaccgccctgcaacaggaccagcagcgcgccagagaacacgctcagctgtacggtaaccgaagcagaccgccccagggtgtgccccagggtgttccctaccgtgagacgcctacgcctcctcatggccgcaccccttcacaaaactcaggatatgctccccctccccagcaaggcatgccacctcacgccaacggagtgcctcccttcggccatccaccccaacaacaaccgccagtaacctaccccccacacaatgtgagaaggagtcttgaccacttccctagctactctgtattgacagttgctcaggcaaacatatatccctcgaggtcaacacctcagccccccatgtcgggtgctttccagccgccgcagaacggaggctatgggcagcccccgcgcggaatcagcgtagatgcattgagggatgatatcctgagactaacggcggtgttcaaggccaagattgcccagaacccccatgattcagtaatgcagactcagttgaaggcgttgatggatttgcaaactgttctccagacccagaacctgccgcaggatcagttagtgcttgtgaagaaccaaatctctgctcttgacgtaaacataggggccctccaagcccacaatcctgtccagactcctgttcagacctctactcctgtaccgccccgcaatgtcgtagcagtagctcctcctccgcctgtagcggcggccgcacccaaggtatctctagattccttgtttggctcgggggccctggcggccataatggctcgcaattctgctgctcctactcccacaccccaaccccgtcccgtagacaattctatacggtcacctgcgcctcagaaggcggagccgcacaagccggcagcaccctcagtcccaactgatcctatggcgctcatgaacatgttgcggcaggctggcatgctgccacaggccacgcccgtgtctgctcccacccctgttcctagtgctacaccgttggtctcattgccgttcccccttcctctgcctggtatggagaaactcatacggccaccgcctcatatgaccacagagagtctcacaagtgatattgtattgaaagcatcatcactcaaacaattccgccctcacttactgcccttcctcttcgaggctcagggaccccagtgcactcaatgcggacgccgattcccgacgacggacgaaggcaagaagaagaagactgctcatatggattggcattttcgtgtcaatcagcgtagcgctgagacggacaaaagggggcttcatcgcagctggctcgtcgatgagatggactggatcaagactagagaaaccatcgatgaagatcacgttgtgcagaacagcgatgcgaatgcaggctcgggcagtgccgcggcaaaggctcctaagatccagtacataccggtccctgatgaccccgtcttggccgcaagcgtttgcccaatctgccaagacaagttcgagacacggtggctcgatgatgcacaagaattcgtctggacagatgccattaaggttggcgaccgaattttccatgcaagctgtcaccgagaggccttcagagatggtggaggcaccccgatgcactcacgtagtacgcctgagccgatactagggaagcgcaaagccgaggtgagtttctacgagatcgtatatttatgtgagtttttgctaacgtgcgccaagcaggatgaactggtttctagtctccgaggcaagataaaggtggatgcttga

SEQ ID NO: 36077 - protein, 730 aa, Muscodor strobelii
  misc_feature: SGI Peptide ID NO. 572502
  misc_feature (5)..(699): NCBI GI: 256729461 Blast Desc: NECHADRAFT_84055 [Nectria haematococca mpVI 77-13-4]
  misc_feature (11)..(696): NCBI GI: 261358589 Blast Desc: conserved [Verticillium albo-atrum VaMs.102]
  misc_feature (1)..(696): NCBI GI: 67537908 Blast Desc: AN5124.2 [Aspergillus nidulans FGSC A4] gi|40743115|gb|EAA62305.1| AN5124.2 [Aspergillus nidulans FGSC A4] gi|259484569|tpe|CBF80905.1| TPA: mRNA cleavage factor Pcf11,
  misc_feature (8)..(702): NCBI GI: 238490055 Blast Desc: mRNA cleavage factor complex component Pcf11, [Aspergillus flavus NRRL3357] gi|220698653|gb|EED54993.1| mRNA cleavage factor complex component Pcf11, [Aspergillus flavus
  misc_feature (1)..(696): NCBI GI: 121702299 Blast Desc: mRNA cleavage factor complex component Pcf11, [Aspergillus clavatus NRRL 1] gi|119397557|gb|EAW07988.1| mRNA cleavage factor complex component Pcf11, [Aspergillus clavatus 1]
  misc_feature (8)..(696): NCBI GI: 115385915 Blast Desc: conserved [Aspergillus terreus NIH2624] gi|114187951|gb|EAU29651.1| conserved [Aspergillus terreus NIH2624]
  misc_feature (8)..(696): NCBI GI: 169764064 Blast Desc: [Aspergillus oryzae RIB40] gi|83770960|dbj|BAE61093.1| protein product [Aspergillus oryzae]
  misc_feature (8)..(696): NCBI GI: 70991296 Blast Desc: mRNA cleavage factor complex component Pcf11 [Aspergillus fumigatus Af293] gi|66848129|gb|EAL88459.1| mRNA cleavage factor complex component Pcf11, [Aspergillus fumigatus
  misc_feature (8)..(696): NCBI GI: 159130968 Blast Desc: mRNA cleavage factor complex component Pcf11, [Aspergillus fumigatus A1163]
  misc_feature (8)..(696): NCBI GI: 212538053 Blast Desc: mRNA cleavage factor complex component Pcf11, [Penicillium marneffei ATCC 18224] gi|210068924|gb|EEA23015.1| mRNA cleavage factor complex component Pcf11, [Penicillium ATCC
MAAAVSEAEAIAQDFREALEDIQTIGRAEISNLTIVARENLEHALSISSALIDHIKKAPPHKKLPPLYVLDSIAKNVGTPYTLFFSKKLYQTFMDAYAMVDPATRRKLEEILKTWKEPVPGSIDTRPVFPPDSVRPIENALIKVRTTALQQDQQRAREHAQLYGNRSRPPQGVPQGVPYRETPTPPHGRTPSQNSGYAPPPQQGMPPHANGVPPFGHPPQQQPPVTYPPHNVRRSLDHFPSYSVLTVAQANIYPSRSTPQPPMSGAFQPPQNGGYGQPPRGISVDALRDDILRLTAVFKAKIAQNPHDSVMQTQLKALMDLQTVLQTQNLPQDQLVLVKNQISALDVNIGALQAHNPVQTPVQTSTPVPPRNVVAVAPPPPVAAAAPKVSLDSLFGSGALAAIMARNSAAPTPTPQPRPVDNSIRSPAPQKAEPHKPAAPSVPTDPMALMNMLRQAGMLPQATPVSAPTPVPSATPLVSLPFPLPLPGMEKLIRPPPHMTTESLTSDIVLKASSLKQFRPHLLPFLFEAQGPQCTQCGRRFPTTDEGKKKKTAHMDWHFRVNQRSAETDKRGLHRSWLVDEMDWIKTRETIDEDHVVQNSDANAGSGSAAAKAPKIQYIPVPDDPVLAASVCPICQDKFETRWLDDAQEFVWTDAIKVGDRIFHASCHREAFRDGGGTPMHSRSTPEPILGKRKAEVSFYEIVYLCEFLLTCAKQDELVSSLRGKIKVDA

SEQ ID NO: 36078 - DNA, 3127 bp, Muscodor strobelii; identical to SEQ ID NO: 36075
  misc_feature: SGI EST ID NO. CUFF.86007.1
  misc_feature: Variant of the nucleotide sequence at SEQ ID NO 36076

SEQ ID NO: 36079 - DNA, 2082 bp, Muscodor strobelii
  misc_feature: SGI cDNA ID NO. 572503
  misc_feature: Reduced expression when VOC is produced
  misc_feature: Encodes the peptide sequence at SEQ ID NO 36080
atggctgcagcagtttcggaggctgaggccatcgcccaggacttccgcgaggcgctcgaggacatccagaccatcggccgcgccgagatctccaacctgaccatcgtcgcccgcgagaacctcgagcacgccctgagcatctcgagtgccctcatcgaccacatcaagaaagctcccccacacaaaaagctaccgcccctctacgtcctcgattccatcgctaagaatgtcggcactccctacaccctcttcttcagtaagaagctctaccagaccttcatggatgcctacgccatggtcgaccctgcgacgaggaggaagctggaggagatcttgaagacgtggaaggagcccgtccccggttccatcgacacccgccccgtcttccctcccgactcggtgcgacctatcgagaatgccctcatcaaagtccgcaccaccgccctgcaacaggaccagcagcgcgccagagaacacgctcagctgtacggtaaccgaagcagaccgccccagggtgtgccccagggtgttccctaccgtgagacgcctacgcctcctcatggccgcaccccttcacaaaactcaggatatgctccccctccccagcaaggcatgccacctcacgccaacggagtgcctcccttcggccatccaccccaacaacaaccgccagtaacctaccccccacacaatgcaaacatatatccctcgaggtcaacacctcagccccccatgtcgggtgctttccagccgccgcagaacggaggctatgggcagcccccgcgcggaatcagcgtagatgcattgagggatgatatcctgagactaacggcggtgttcaaggccaagattgcccagaacccccatgattcagtaatgcagactcagttgaaggcgttgatggatttgcaaactgttctccagacccagaacctgccgcaggatcagttagtgcttgtgaagaaccaaatctctgctcttgacgtaaacataggggccctccaagcccacaatcctgtccagactcctgttcagacctctactcctgtaccgccccgcaatgtcgtagcagtagctcctcctccgcctgtagcggcggccgcacccaaggtatctctagattccttgtttggctcgggggccctggcggccataatggctcgcaattctgctgctcctactcccacaccccaaccccgtcccgtagacaattctatacggtcacctgcgcctcagaaggcggagccgcacaagccggcagcaccctcagtcccaactgatcctatggcgctcatgaacatgttgcggcaggctggcatgctgccacaggccacgcccgtgtctgctcccacccctgttcctagtgctacaccgttggtctcattgccgttcccccttcctctgcctggtatggagaaactcatacggccaccgcctcatatgaccacagagagtctcacaagtgatattgtattgaaagcatcatcactcaaacaattccgccctcacttactgcccttcctcttcgaggctcagggaccccagtgcactcaatgcggacgccgattcccgacgacggacgaaggcaagaagaagaagactgctcatatggattggcattttcgtgtcaatcagcgtagcgctgagacggacaaaagggggcttcatcgcagctggctcgtcgatgagatggactggatcaagactagagaaaccatcgatgaagatcacgttgtgcagaacagcgatgcgaatgcaggctcgggcagtgccgcggcaaaggctcctaagatccagtacataccggtccctgatgaccccgtcttggccgcaagcgtttgcccaatctgccaagacaagttcgagacacggtggctcgatgatgcacaagaattcgtctggacagatgccattaaggttggcgaccgaattttccatgcaagctgtcaccgagaggccttcagagatggtggaggcaccccgatgcactcacgtagtacgcctgagccgatactagggaagcgcaaagccgaggatgaactggtttctagtctccgaggcaagataaaggtggatgcttga

SEQ ID NO: 36080 - protein, 693 aa, Muscodor strobelii
  misc_feature: SGI Peptide ID NO. 572503
  misc_feature (5)..(693): NCBI GI: 256729461 Blast Desc: NECHADRAFT_84055 [Nectria haematococca mpVI 77-13-4]
  misc_feature (11)..(690): NCBI GI: 261358589 Blast Desc: conserved [Verticillium albo-atrum VaMs.102]
  misc_feature (1)..(692): NCBI GI: 67537908 Blast Desc: AN5124.2 [Aspergillus nidulans FGSC A4] gi|40743115|gb|EAA62305.1| AN5124.2 [Aspergillus nidulans FGSC A4] gi|259484569|tpe|CBF80905.1| TPA: mRNA cleavage factor Pcf11,
  misc_feature (8)..(679): NCBI GI: 145604432 Blast Desc: MGG_08573 [Magnaporthe grisea 70-15] gi|145012431|gb|EDJ97087.1| MGG_08573 [Magnaporthe grisea 70-15]
  misc_feature (1)..(678): NCBI GI: 115385915 Blast Desc: conserved [Aspergillus terreus NIH2624] gi|114187951|gb|EAU29651.1| conserved [Aspergillus terreus NIH2624]
  misc_feature (1)..(690): NCBI GI: 121702299 Blast Desc: mRNA cleavage factor complex component Pcf11, [Aspergillus clavatus NRRL 1] gi|119397557|gb|EAW07988.1| mRNA cleavage factor complex component Pcf11, [Aspergillus clavatus 1]
  misc_feature (8)..(686): NCBI GI: 238490055 Blast Desc: mRNA cleavage factor complex component Pcf11, [Aspergillus flavus NRRL3357] gi|220698653|gb|EED54993.1| mRNA cleavage factor complex component Pcf11, [Aspergillus flavus
  misc_feature (8)..(692): NCBI GI: 212538053 Blast Desc: mRNA cleavage factor complex component Pcf11, [Penicillium marneffei ATCC 18224] gi|210068924|gb|EEA23015.1| mRNA cleavage factor complex component Pcf11, [Penicillium ATCC
  misc_feature (8)..(692): NCBI GI: 169764064 Blast Desc: [Aspergillus oryzae RIB40] gi|83770960|dbj|BAE61093.1| protein product [Aspergillus oryzae]
  misc_feature (8)..(692): NCBI GI: 242807659 Blast Desc: mRNA cleavage factor complex component Pcf11, [Talaromyces stipitatus ATCC 10500] gi|218715626|gb|EED15048.1| mRNA cleavage factor complex component Pcf11, [Talaromyces ATCC
  misc_feature: Useful for introducing or modulating the production of volatile compounds
MAAAVSEAEAIAQDFREALEDIQTIGRAEISNLTIVARENLEHALSISSALIDHIKKAPPHKKLPPLYVLDSIAKNVGTPYTLFFSKKLYQTFMDAYAMVDPATRRKLEEILKTWKEPVPGSIDTRPVFPPDSVRPIENALIKVRTTALQQDQQRAREHAQLYGNRSRPPQGVPQGVPYRETPTPPHGRTPSQNSGYAPPPQQGMPPHANGVPPFGHPPQQQPPVTYPPHNANIYPSRSTPQPPMSGAFQPPQNGGYGQPPRGISVDALRDDILRLTAVFKAKIAQNPHDSVMQTQLKALMDLQTVLQTQNLPQDQLVLVKNQISALDVNIGALQAHNPVQTPVQTSTPVPPRNVVAVAPPPPVAAAAPKVSLDSLFGSGALAAIMARNSAAPTPTPQPRPVDNSIRSPAPQKAEPHKPAAPSVPTDPMALMNMLRQAGMLPQATPVSAPTPVPSATPLVSLPFPLPLPGMEKLIRPPPHMTTESLTSDIVLKASSLKQFRPHLLPFLFEAQGPQCTQCGRRFPTTDEGKKKKTAHMDWHFRVNQRSAETDKRGLHRSWLVDEMDWIKTRETIDEDHVVQNSDANAGSGSAAAKAPKIQYIPVPDDPVLAASVCPICQDKFETRWLDDAQEFVWTDAIKVGDRIFHASCHREAFRDGGGTPMHSRSTPEPILGKRKAEDELVSSLRGKIKVDA

SEQ ID NO: 36081 - DNA, 3127 bp, Muscodor strobelii; identical to SEQ ID NO: 36075
  misc_feature: SGI EST ID NO. CUFF.86007.1
  misc_feature: Variant of the nucleotide sequence at SEQ ID NO 36079

SEQ ID NO: 36082 - DNA, 2163 bp, Muscodor strobelii
  misc_feature: SGI cDNA ID NO. 572504
  misc_feature: Encodes the peptide sequence at SEQ ID NO 36083
atggctgcagcagtttcggaggctgaggccatcgcccaggacttccgcgaggcgctcgaggacatccagaccatcggccgcgccgagatctccaacctgaccatcgtcgcccgcgagaacctcgagcacgccctgagcatctcgagtgccctcatcgaccacatcaagaaagctcccccacacaaaaagctaccgcccctctacgtcctcgattccatcgctaagaatgtcggcactccctacaccctcttcttcagtaagaagctctaccagaccttcatggatgcctacgccatggtcgaccctgcgacgaggaggaagctggaggagatcttgaagacgtggaaggagcccgtccccggttccatcgacacccgccccgtcttccctcccgactcggtgcgacctatcgagaatgccctcatcaaagtccgcaccaccgccctgcaacaggaccagcagcgcgccagagaacacgctcagctgtacggtaaccgaagcagaccgccccagggtgtgccccagggtgttccctaccgtgagacgcctacgcctcctcatggccgcaccccttcacaaaactcaggatatgctccccctccccagcaaggcatgccacctcacgccaacggagtgcctcccttcggccatccaccccaacaacaaccgccagtaacctaccccccacacaatgtgagaaggagtcttgaccacttccctagctactctgtattgacagttgctcaggcaaacatatatccctcgaggtcaacacctcagccccccatgtcgggtgctttccagccgccgcagaacggaggctatgggcagcccccgcgcggaatcagcgtagatgcattgagggatgatatcctgagactaacggcggtgttcaaggccaagattgcccagaacccccatgattcagtaatgcagactcagttgaaggcgttgatggatttgcaaactgttctccagacccagaacctgccgcaggatcagttagtgcttgtgaagaaccaaatctctgctcttgacgtaaacataggggccctccaagcccacaatcctgtccagactcctgttcagacctctactcctgtaccgccccgcaatgtcgtagcagtagctcctcctccgcctgtagcggcggccgcacccaaggtatctctagattccttgtttggctcgggggccctggcggccataatggctcgcaattctgctgctcctactcccacaccccaaccccgtcccgtagacaattctatacggtcacctgcgcctcagaaggcggagccgcacaagccggcagcaccctcagtcccaactgatcctatggcgctcatgaacatgttgcggcaggctggcatgctgccacaggccacgcccgtgtctgctcccacccctgttcctagtgctacaccgttggtctcattgccgttcccccttcctctgcctggtatggagaaactcatacggccaccgcctcatatgaccacagagagtctcacaagtgatattgtattgaaagcatcatcactcaaacaattccgccctcacttactgcccttcctcttcgaggctcagggaccccagtgcactcaatgcggacgccgattcccgacgacggacgaaggcaagaagaagaagactgctcatatggattggcattttcgtgtcaatcagcgtagcgctgagacggacaaaagggggcttcatcgcagctggctcgtcgatgagatggactggatcaagactagagaaaccatcgatgaagatcacgttgtgcagaacagcgatgcgaatgcaggctcgggcagtgccgcggcaaaggctcctaagatccagtacataccggtccctgatgaccccgtcttggccgcaagcgtttgcccaatctgccaagacaagttcgagacacggtggctcgatgatgcacaagaattcgtctggacagatgccattaaggttggcgaccgaattttccatgcaagctgtcaccgagaggccttcagagatggtggaggcaccccgatgcactcacgtagtacgcctgagccgatactagggaagcgcaaagccgaggtgagtttctacgagatcgtatatttatataaaggtggatgcttgagccgacagaagctccacgacgacagttga

SEQ ID NO: 36083 - protein, 720 aa, Muscodor strobelii
  misc_feature: SGI Peptide ID NO. 572504
  misc_feature (5)..(699): NCBI GI: 256729461 Blast Desc: NECHADRAFT_84055 [Nectria haematococca mpVI 77-13-4]
  misc_feature (11)..(696): NCBI GI: 261358589 Blast Desc: conserved [Verticillium albo-atrum VaMs.102]
  misc_feature (1)..(696): NCBI GI: 67537908 Blast Desc: AN5124.2 [Aspergillus nidulans FGSC A4] gi|40743115|gb|EAA62305.1| AN5124.2 [Aspergillus nidulans FGSC A4] gi|259484569|tpe|CBF80905.1| TPA: mRNA cleavage factor Pcf11,
  misc_feature (8)..(702): NCBI GI: 238490055 Blast Desc: mRNA cleavage factor complex component Pcf11, [Aspergillus flavus NRRL3357] gi|220698653|gb|EED54993.1| mRNA cleavage factor complex component Pcf11, [Aspergillus flavus
  misc_feature (8)..(696): NCBI GI: 115385915 Blast Desc: conserved [Aspergillus terreus NIH2624] gi|114187951|gb|EAU29651.1| conserved [Aspergillus terreus NIH2624]
  misc_feature (8)..(696): NCBI GI: 121702299 Blast Desc: mRNA cleavage factor complex component Pcf11, [Aspergillus clavatus NRRL 1] gi|119397557|gb|EAW07988.1| mRNA cleavage factor complex component Pcf11, [Aspergillus clavatus 1]
  misc_feature (8)..(696): NCBI GI: 169764064 Blast Desc: [Aspergillus oryzae RIB40] gi|83770960|dbj|BAE61093.1| protein product [Aspergillus oryzae]
  misc_feature (8)..(696): NCBI GI: 70991296 Blast Desc: mRNA cleavage factor complex component Pcf11 [Aspergillus fumigatus Af293] gi|66848129|gb|EAL88459.1| mRNA cleavage factor complex component Pcf11, [Aspergillus fumigatus
  misc_feature (8)..(696): NCBI GI: 159130968 Blast Desc: mRNA cleavage factor complex component Pcf11, [Aspergillus fumigatus A1163]
  misc_feature (8)..(696): NCBI GI: 212538053 Blast Desc: mRNA cleavage factor complex component Pcf11, [Penicillium marneffei ATCC 18224] gi|210068924|gb|EEA23015.1| mRNA cleavage factor complex component Pcf11, [Penicillium ATCC
MAAAVSEAEAIAQDFREALEDIQTIGRAEISNLTIVARENLEHALSISSALIDHIKKAPPHKKLPPLYVLDSIAKNVGTPYTLFFSKKLYQTFMDAYAMVDPATRRKLEEILKTWKEPVPGSIDTRPVFPPDSVRPIENALIKVRTTALQQDQQRAREHAQLYGNRSRPPQGVPQGVPYRETPTPPHGRTPSQNSGYAPPPQQGMPPHANGVPPFGHPPQQQPPVTYPPHNVRRSLDHFPSYSVLTVAQANIYPSRSTPQPPMSGAFQPPQNGGYGQPPRGISVDALRDDILRLTAVFKAKIAQNPHDSVMQTQLKALMDLQTVLQTQNLPQDQLVLVKNQISALDVNIGALQAHNPVQTPVQTSTPVPPRNVVAVAPPPPVAAAAPKVSLDSLFGSGALAAIMARNSAAPTPTPQPRPVDNSIRSPAPQKAEPHKPAAPSVPTDPMALMNMLRQAGMLPQATPVSAPTPVPSATPLVSLPFPLPLPGMEKLIRPPPHMTTESLTSDIVLKASSLKQFRPHLLPFLFEAQGPQCTQCGRRFPTTDEGKKKKTAHMDWHFRVNQRSAETDKRGLHRSWLVDEMDWIKTRETIDEDHVVQNSDANAGSGSAAAKAPKIQYIPVPDDPVLAASVCPICQDKFETRWLDDAQEFVWTDAIKVGDRIFHASCHREAFRDGGGTPMHSRSTPEPILGKRKAEVSFYEIVYLYKGGCLSRQKLHDDS

SEQ ID NO: 36084 - DNA, 3127 bp, Muscodor strobelii; identical to SEQ ID NO: 36075
  misc_feature: SGI EST ID NO. CUFF.86007.1
  misc_feature: Variant of the nucleotide sequence at SEQ ID NO 36082

SEQ ID NO: 36085 - DNA, 1074 bp, Muscodor strobelii
  misc_feature: SGI cDNA ID NO. 572505
  misc_feature: Encodes the peptide sequence at SEQ ID NO 36086
atgacgtcttcggcgcttgtcctgcgctcaggccccatcaaccaactgcctgtcgagatgcacgtagagatattcaaacagctctccgacctgcactctgtccacgcccttgccgcgactgccaagcacttccaagccatcctcaaggaagccaaagtcaccatctggacatctgtcggttacaacgttgcatacaagatcaccaaggacgcgttcgacgtcgcgtctcttgaggtcgccacgttcagtctggccctgtgggcttacatgcacctacgcaacagcgatgacgttatggcccagctctctcgtctcacgggaaagcgtactttcactgaaatggaagtggccgtgatggatcggatccttacttcgcgtttacttaatttcgatgctcgcactgagtacattcggcctagacctgaacagcctgacctcgttcccaaaccactctggtccaattatcctgcggccgctccagccggcgacaacaaccacctcaacatggtcaaactcatgatgtatgccgtgcttgtcaagcttatgggtggcaaccgtccagccaacctaccacgtgttagcacacattaccgttttggtacactttctctatccgtgggatcacccaactactacaaaaagcatcatggctaccgtagacttcccatcggcaatacagaggaacaacttcgtgctgaggttacacctgattaccactgcctgctcagagtctctggagcggcgctggaagacttcctcctattccaaagtgacaacagacagcaagaactatcattttcagagcgtatctgcgcggcattgatgtcccgtgatattcgtctagccgagttcgctcctagagagccgcagcagtcggagtacgtgtcaaagcgcagtggctcacctaaggagaaagaaattctcgcaagcaacggcaaaggattggtaccgtggcttcctgcattcttgcagtcacctggggagggtcatacagcaacgcacaacatgactcaagacgagattgcacaatcgttgtggggattttggccagcccatgggacgatgtggctttga

SEQ ID NO: 36086 - protein, 357 aa, Muscodor strobelii
  misc_feature: SGI Peptide ID NO. 572505
MTSSALVLRSGPINQLPVEMHVEIFKQLSDLHSVHALAATAKHFQAILKEAKVTIWTSVGYNVAYKITKDAFDVASLEVATFSLALWAYMHLRNSDDVMAQLSRLTGKRTFTEMEVAVMDRILTSRLLNFDARTEYIRPRPEQPDLVPKPLWSNYPAAAPAGDNNHLNMVKLMMYAVLVKLMGGNRPANLPRVSTHYRFGTLSLSVGSPNYYKKHHGYRRLPIGNTEEQLRAEVTPDYHCLLRVSGAALEDFLLFQSDNRQQELSFSERICAALMSRDIRLAEFAPREPQQSEYVSKRSGSPKEKEILASNGKGLVPWLPAFLQSPGEGHTATHNMTQDEIAQSLWGFWPAHGTMWL

SEQ ID NO: 36087 - DNA, 993 bp, Muscodor strobelii
  misc_feature: SGI cDNA ID NO. 572506
  misc_feature: Encodes the peptide sequence at SEQ ID NO 36088
atggcatctctgccagcattgaccacgacattctcaccaccagccccatgtaggactccgtttctcgaggatgacggattgtactggcttgccccacggatcacactatctggcacctcgttgatacaatgtcttccatactcaaaagtcgactttgatgcgggtggcaatgtcttcacttactcgccaggactgtactgcccgtcaggctggtcaacagcagggacggcagcagcaccagacacagctcctgcttatgcctgctgcccaagtaaattcgactatgactcaattgcagctctctgcacgcagtcaataagtagcgggagtgtatacgtcggagaagcctcaaacttgagtggtgtcctggtaacagtcagcgtcacggacacgacgacagtgacgagcgaaggggttgtcacgtttggggctattgtcttgatgggtcagagtgaaaagccgtcgagcagttcatcaaccgaaagttcaacctcatcctcacggacgacttcgtcaacaacttctatcgagacttctacgtcgactagcagtcaatctgcatcaatgtcaagccctgcagcagatgcgggtaccggatcaaagtccttgactcccggcgcgaaggcaggtatcggagttggggtcgctgcaggcgccattctgattcttgttgtcgcattttgtttctttcggagctatcggagaaagaagcttcctcaggccacggcgcaacatcaaggtggtgacgacgccgtcagccagggacaacaagaagacaaaggccagggcgcgtatggctatggctttaagccagaattagatgcgaccagtccgccgcgctttgaacttgatgtgacaccagttaccaagaggagcgaattggaagatacaagaagcgaaagagcggaactgagtgctgagcagagggccagagagttggagggccagaatgggtcaaatgaattggatgctggccgtgatgccaggcggtag

SEQ ID NO: 36088 - protein, 330 aa, Muscodor strobelii
  misc_feature: SGI Peptide ID NO. 572506
  misc_feature (59)..(242): NCBI GI: 240106314 Blast Desc: CPC735_058770 [Coccidioides posadasii C735 delta SOWgp]
  misc_feature (136)..(307): NCBI GI: 242806800 Blast Desc: conserved [Talaromyces stipitatus ATCC 10500] gi|218715445|gb|EED14867.1| conserved [Talaromyces stipitatus ATCC 10500]
  misc_feature (61)..(274): NCBI GI: 116198575 Blast Desc: CHGG_07443 [Chaetomium globosum CBS 148.51] gi|88178722|gb|EAQ86190.1| CHGG_07443 [Chaetomium globosum CBS 148.51]
  misc_feature (59)..(240): NCBI GI: 119191874 Blast Desc: [Coccidioides immitis RS]
  misc_feature (7)..(285): NCBI GI: 212530452 Blast Desc: kinesin light chain, [Penicillium marneffei ATCC 18224] gi|210074781|gb|EEA28868.1| kinesin light chain, [Penicillium marneffei ATCC 18224]
  misc_feature (7)..(236): NCBI GI: 156060363 Blast Desc: [Sclerotinia sclerotiorum 1980] gi|154699728|gb|EDN99466.1| [Sclerotinia sclerotiorum 1980]
  misc_feature (182)..(234): NCBI GI: 67526049 Blast Desc: AN3482.2 [Aspergillus nidulans FGSC A4] gi|40739853|gb|EAA59043.1| AN3482.2 [Aspergillus nidulans FGSC A4] gi|259482006|tpe|CBF76064.1| TPA: [Aspergillus nidulans FGSC
MASLPALTTTFSPPAPCRTPFLEDDGLYWLAPRITLSGTSLIQCLPYSKVDFDAGGNVFTYSPGLYCPSGWSTAGTAAAPDTAPAYACCPSKFDYDSIAALCTQSISSGSVYVGEASNLSGVLVTVSVTDTTTVTSEGVVTFGAIVLMGQSEKPSSSSSTESSTSSSRTTSSTTSIETSTSTSSQSASMSSPAADAGTGSKSLTPGAKAGIGVGVAAGAILILVVAFCFFRSYRRKKLPQATAQHQGGDDAVSQGQQEDKGQGAYGYGFKPELDATSPPRFELDVTPVTKRSELEDTRSERAELSAEQRARELEGQNGSNELDAGRDARR

SEQ ID NO: 36089 - DNA, 1340 bp, Muscodor strobelii
  misc_feature: SGI EST ID NO. CUFF.85861.0
  misc_feature: Variant of the nucleotide sequence at SEQ ID NO 36087
cccaaaccaacaaaaaattcaattggactcgatgcgcatccaaaatctagtcaccactacaaatgtcttttaaaacagtgtcctagtcgggtcagtgatatgtcacaatcatggcatctctgccagcattgaccacgacattctcaccaccagccccatgtaggactccgtttctcgaggatgacggattgtactggcttgccccacggatcacactatctggcacctcgttgatacaatgtcttccatactcaaaagtcgactttgatgcgggtggcaatgtcttcacttactcgccaggactgtactgcccgtcaggctggtcaacagcagggacggcagcagcaccagacacagctcctgcttatgcctgctgcccaagtaaattcgactatgactcaattgcagctctctgcacgcagtcaataagtagcgggagtgtatacgtcggagaagcctcaaacttgagtggtgtcctggtaacagtcagcgtcacggacacgacgacagtgacgagcgaaggggttgtcacgtttggggctattgtcttgatgggtcagagtgaaaagccgtcgagcagttcatcaaccgaaagttcaacctcatcctcacggacgacttcgtcaacaacttctatcgagacttctacgtcgactagcagtcaatctgcatcaatgtcaagccctgcagcagatgcgggtaccggatcaaagtccttgactcccggcgcgaaggcaggtatcggagttggggtcgctgcaggcgccattctgattcttgttgtcgcattttgtttctttcggagctatcggagaaagaagcttcctcaggccacggcgcaacatcaaggtggtgacgacgccgtcagccagggacaacaagaagacaaaggccagggcgcgtatggctatggctttaagccagaattagatgcgaccagtccgccgcgctttgaacttgatgtgacaccagttaccaagaggagcgaattggaagatacaagaagcgaaagagcggaactgagtgctgagcagagggccagagagttggagggccagaatgggtcaaatgaattggatgctggccgtgatgccaggcggtagacctgagtgttggatatgagaagacaatggtttaatgatactaatgataccccttttactcttctggtcttcgtttttgacagtagtgattcttgataatgaccagaaatcacacaccggtgcctctcacagcctacacaacactctctatctttggcaaggttgccatgggcgtgacttccggcagataagccacaaagacctcgtgcctgccttgtgtgcatcagacgataaata

SEQ ID NO: 36090 - DNA, 921 bp, Muscodor strobelii
  misc_feature: SGI cDNA ID NO. 572507
  misc_feature: Encodes the peptide sequence at SEQ ID NO 36091
atgaaggagccggaagccgcacagttggcgctcccgaatattacgaggcatgggctttccatgctactcgaaattctgggactttgccggcccatctcgaaatcaccagccctagatgatactgtcatcgtcgctatcgattttgagggtatcgagaccattaaaagcgggtttgcccagaaggcgaatagccaagctggatttgcgattctcgatactaaggagctccgccaggtctcactagaaaagctcatctcgacctttaactttgccgcgggaactccatcatacgtcacaagagcttccaataaatttctctttggaaagacagtcgccattcagtcatcttctatggtgcaaatcatccaatcacgcattccccgggaccgcaatgtggtgattgtcggtcacgggatcctgaacgagctccaggcactacgagctctaggagtcgagtttgatcgtcccccttctgggattctagatacatcgcgcgttgccaacgaagtgcttcaaatctggagcggctctctcggtgacctactggtcctgctagggtgtcctttcaacaaactccacatcgctggaaacgatgctaacttcactctaagggctcttctccttttagcagtaaagtggtgcatcagccaacgccaagaaaatgacgagatgttgaatatcttgcggcaaatctcaacctgtccgattccttcttacactgaccctgaaattaaagcggcggaaaagcgggaaaggaggcaggcaagaagtcggaagcatcagtcaaagctatggagtaaggagaagcaggatcaaatccgtgccgctcgagaaagaaagaggctcgaacacgaaacaacggagctctgcgggtctggtgttcaggataggcttagccgagacccgagatgtgatagctga

SEQ ID NO: 36091 - protein, 306 aa, Muscodor strobelii
  misc_feature: SGI Peptide ID NO. 572507
  misc_feature (42)..(289): NCBI GI: 256726459 Blast Desc: NECHADRAFT_79694 [Nectria haematococca mpVI 77-13-4]
  misc_feature (38)..(236): NCBI GI: 115385809 Blast Desc: [Aspergillus terreus NIH2624] gi|114187898|gb|EAU29598.1| [Aspergillus terreus NIH2624]
  misc_feature (19)..(222): NCBI GI: 256733267 Blast Desc: NECHADRAFT_79381 [Nectria haematococca mpVI 77-13-4]
  misc_feature (84)..(256): NCBI GI: 46107192 Blast Desc: FG00479.1 [Gibberella zeae PH-1]
  misc_feature (34)..(267): NCBI GI: 46111395 Blast Desc: FG02579.1 [Gibberella zeae PH-1]
  misc_feature (38)..(212): NCBI GI: 256732305 Blast Desc: NECHADRAFT_80765 [Nectria haematococca mpVI 77-13-4]
  misc_feature (16)..(226): NCBI GI: 46124689 Blast Desc: FG06722.1 [Gibberella zeae PH-1]
  misc_feature (37)..(211): NCBI GI: 256724225 Blast Desc: NECHADRAFT_102134 [Nectria haematococca mpVI 77-13-4]
  misc_feature (36)..(212): NCBI GI: 238486668 Blast Desc: conserved [Aspergillus flavus NRRL3357] gi|220699451|gb|EED55790.1| conserved [Aspergillus flavus NRRL3357]
  misc_feature (38)..(283): NCBI GI: 45199231 Blast Desc: AFR712Cp [Ashbya gossypii ATCC 10895] gi|44985371|gb|AAS54084.1| AFR712Cp [Ashbya gossypii ATCC 10895]
MKEPEAAQLALPNITRHGLSMLLEILGLCRPISKSPALDDTVIVAIDFEGIETIKSGFAQKANSQAGFAILDTKELRQVSLEKLISTFNFAAGTPSYVTRASNKFLFGKTVAIQSSSMVQIIQSRIPRDRNVVIVGHGILNELQALRALGVEFDRPPSGILDTSRVANEVLQIWSGSLGDLLVLLGCPFNKLHIAGNDANFTLRALLLLAVKWCISQRQENDEMLNILRQISTCPIPSYTDPEIKAAEKRERRQARSRKHQSKLWSKEKQDQIRAARERKRLEHETTELCGSGVQDRLSRDPRCDS

SEQ ID NO: 36092 - DNA, 579 bp, Muscodor strobelii
  misc_feature: SGI cDNA ID NO. 572508
  misc_feature: Encodes the peptide sequence at SEQ ID NO 36093
atgaaccccgacgtgaggcgcatcgtctcattctggttcgaacgcaaccctatcgaatggatcatcgctccagacggtcttgatgaccaactgaagtcagagtatacagatcttgtcaacaaagctcgtcgacatgaacttgacgactgggcagcacggccagagggtagtctcgccctcgtagtgcttcttgatcaattctcaaggaacatcttccgcggcactgcagatgccttcagcggggacagaaaggcgtgggatacggttacaaaagctgttgcacgagattttgataagcgcgtaaccgtcatacaagcatcagcattctacatgccgctattgcagaatgaaagcttgatctcggtcatcgctgcgcgctctcttttcgaggcgctgaagtcgcgatgcgagaccacgcaggagcatgattgggtggatatgggaattgcggcttccaagcgacatttacagcaattagaaaagttcggaagatatcctactaggaacgccttacttggtcgtgagaacacgaaagtggaggaagagtttctgaaagagcacaaaccgagtcttaaatag

SEQ ID NO: 36093 - protein, 192 aa, Muscodor strobelii
  misc_feature: SGI Peptide ID NO. 572508
  misc_feature (4)..(190): Pfam Id: PF06041 Pfam Desc: Bacterial protein of function (DUF924)
  misc_feature (4)..(98): Pfam Id: PF06041 Pfam Desc: Bacterial protein of function (DUF924)
  misc_feature (160)..(187): Pfam Id: PF06041 Pfam Desc: Bacterial protein of function (DUF924)
  misc_feature (1)..(191): NCBI GI: 238841484 Blast Desc: conserved [Microsporum canis CBS 113480]
  misc_feature (6)..(184): NCBI GI: 163676363 Blast Desc: conserved [Vibrio tapetis]
  misc_feature (8)..(185): NCBI GI: 196157293 Blast Desc: MADE_02492 [Alteromonas macleodii 'Deep ecotype'] gi|196113072|gb|ACG66788.1| MADE_02492 [Alteromonas macleodii 'Deep ecotype']
  misc_feature (1)..(187): NCBI GI: 153009335 Blast Desc: Oant_2005 [Ochrobactrum anthropi ATCC 49188] gi|151561223|gb|ABS14721.1| protein of function DUF924 [Ochrobactrum anthropi ATCC 49188]
  misc_feature (1)..(191): NCBI GI: 167618496 Blast Desc: BthaB_19468 [Burkholderia thailandensis Bt4] gi|257139721|ref|ZP_05587983.1| BthaA_11046 [Burkholderia thailandensis E264]
  misc_feature (1)..(191): NCBI GI: 115352366 Blast Desc: Bamb_2315 [Burkholderia ambifaria AMMD] gi|115282354|gb|ABI87871.1| protein of function DUF924 [Burkholderia ambifaria AMMD]
  misc_feature (8)..(187): NCBI GI: 239832074 Blast Desc: , conserved [Ochrobactrum intermedium LMG 3301] gi|239824341|gb|EEQ95909.1| , conserved [Ochrobactrum intermedium LMG 3301]
  misc_feature (8)..(186): NCBI GI: 223999309 Blast Desc: [Thalassiosira pseudonana CCMP1335] gi|220974535|gb|EED92864.1| [Thalassiosira pseudonana CCMP1335]
  misc_feature (1)..(191): NCBI GI: 171321068 Blast Desc: protein of function DUF924 [Burkholderia ambifaria MEX-5] gi|171093660|gb|EDT38812.1| protein of function DUF924 [Burkholderia ambifaria MEX-5]
  misc_feature (1)..(186): NCBI GI: 83719480 Blast Desc: BTH_I1031 [Burkholderia thailandensis E264] gi|83653305|gb|ABC37368.1| Bacterial protein of function (DUF924) family [Burkholderia thailandensis E264]
MNPDVRRIVSFWFERNPIEWIIAPDGLDDQLKSEYTDLVNKARRHELDDWAARPEGSLALVVLLDQFSRNIFRGTADAFSGDRKAWDTVTKAVARDFDKRVTVIQASAFYMPLLQNESLISVIAARSLFEALKSRCETTQEHDWVDMGIAASKRHLQQLEKFGRYPTRNALLGRENTKVEEEFLKEHKPSLK

SEQ ID NO: 36094 - DNA, 2832 bp, Muscodor strobelii
  misc_feature: SGI EST ID NO. CUFF.85943.1
  misc_feature: Variant of the nucleotide sequence at SEQ ID NO 36092
ttaggactccgattgaggcatctgtcaattgatttcatctgaggagatcatgatattcgccttggagctcaggcttcttcatctactatcatctttgtgggctcattctgacacgaccatgtctatcgaattagaaaacgcgccgtctcgtctccccgagcttacagaggatgacggcaattctcgagtgcttgatgctggtgtggcaccgccggatcgaggcctcagagctatgcgatttctcgcgggctgtttcttaatcgaagccgtcgtttggggtttcaatatcacttttggagtttttcaacaatactacgggcacttgccgcagttccaggatagtgccaatatctctattattgggacactcggcacgagtatcatgtttcttggcacaccctttgcaacacctgttgttaaaaactacccggcacggcgtcaacacattgtaatcgccggctgtatcatatgcgtcgttgcactggtttgggcttcgttcgcaaagtccattccggaactcatcgcgagtcaaggagcactctatggctttggcgttcttgttgtgtatacgcctcttgtcagcatgatcaatgaatggttcatcgagcggcgagggttcgcctacggtgtcgtcttcgctggtggtggtgccagtggtgtgggtttgccttttctcgtagagtggcttttagcaacatacggctatcgtactacccttcgagtgattggtgtcagccaggtagtcctactagctcctattctgccgctgatcagaaatcgactgccctcgagctgccgtgttgaagaaggcattcagctggacttcatgcgaaacccccagttttgggttctcgcagcttccaacatctttctcggtttcgctgtctacgtgccttctatctatcttccaacattcgcgacgctcgttggcctttcgcctcgagtaggagcactacttctagcagcactcaatcttgcgtctacgcttggacaagtgcttttcggacacttatcagaccgagtaaacaacgtatatatactcatcttcaccacaacgtttgtccctgctgtggcatctttctctgcgtggggtttcgctcagtcccttgccccactccttattttctcgatcatattcggtctcttcggcggatcgtacgttgtattctggccaaagttcgcgcgactatcaggaaaagatccgctgtttttgtacggtctcatggccttcggaaagggtattggaaatgttgcaaccggtccaatcagctccagactgataggtctatctctatcatcaggctatgggttaggggcgtacagaaatatcatcatttacacaggaactcttctactggcgtcttcccttggcgtccttgggtggccaatgaagtgccgcaggaaccaggaacgatcgcccgtagtcattgaactataggctgacgatctatcggatcactctctggcccattcgataaagggattctccgattgtttctagcttcacaccggagcaactaattaccaagccaatgatttcaaaacctgtcacctggacgtgatacttgaagcggcaattgacgaaacttgcacggcgcgccttccgaccagttataaatgttatacacccgaattgacgtaagaaatcgaatgaacgccttacatcacgtaagggccttgttgttttcttgtggccactcagtacggtacaccccacaatcaggcaatttaggaagtgtgccagtacattaggtgtacgttgtcatttaactgtccaattgacatatatcccaattactcgaggtccatgtaaggaagtgaatgaaataatcattgaatgagtgtgagagccgggcgcaagggaggggaaccgtataccattgtgcaccataacattaggcagagtgcaatttgctgctgtgtaccccgctcctctttaggtcaacccaaacctgcaattcagcatctgagttgaagaatgcagtgtaaatttcaatttatcaaagtgagtccaacgcaaacgatacagcgcagatttcagggattcatagtaactagcatcttaaattacattcacgtcctacatcaatcaagcgtcacttgcctttctccactctggccaccatgaaccccgacgtgaggcgcatcgtctcattctggttcgaacgcaaccctatcgaatggatcatcgctccagacggtcttgatgaccaactgaagtcagagtatacagatcttgtcaacaaagctcgtcgacatgaacttgacgactgggcagcacggccagagggtagtctcgccctcgtagtgcttcttgatcaattctcaaggaacatcttccgcggcactgcagatgccttcagcggggacagaaaggcgtgggatacggttacaaaagctgttgcacgagattttgataagcgcgtaaccgtcatacaagcatcagcattctacatgccgctattgcagaatgaaagcttgatctcggtcatcgctgcgcgctctcttttcgaggcgctgaagtcgcgatgcgagaccacgcaggagcatgattgggtggatatgggaattgcggcttccaagcgacatttacagcaattagaaaagttcggaagatatcctactaggaacgccttacttggtcgtgagaacacgaaagtggaggaagagtttctgaaagagcacaaaccgagtcttaaatagctgattgcaaagcccacacgatatattaacttccagtgtcttacttgcggagccattcagtgtatgacattcgaccatgaagtccccaaaagaattttgatatgcttacagtatttttaagagctggtg

SEQ ID NO: 36095 - DNA, 1320 bp, Muscodor strobelii
  misc_feature: SGI cDNA ID NO. 572509
  misc_feature: Reduced expression when VOC is produced
  misc_feature: Encodes the peptide sequence at SEQ ID NO 36096
atgtctatcgaattagaaaacgcgccgtctcgtctccccgagcttacagaggatgacggcaattctcgagtgcttgatgctggtgtggcaccgccggatcgaggcctcagagctatgcgatttctcgcgggctgtttcttaatcgaagccgtcgtttggggtttcaatatcacttttggagtttttcaacaatactacgggcacttgccgcagttccaggatagtgccaatatctctattattgggacactcggcacgagtatcatgtttcttggcacaccctttgcaacacctgttgttaaaaactacccggcacggcgtcaacacattgtaatcgccggctgtatcatatgcgtcgttgcactggtttgggcttcgttcgcaaagtccattccggaactcatcgcgagtcaaggagcactctatggctttggcgttcttgttgtgtatacgcctcttgtcagcatgatcaatgaatggttcatcgagcggcgagggttcgcctacggtgtcgtcttcgctggtggtggtgccagtggtgtgggtttgccttttctcgtagagtggcttttagcaacatacggctatcgtactacccttcgagtgattggtgtcagccaggtagtcctactagctcctattctgccgctgatcagaaatcgactgccctcgagctgccgtgttgaagaaggcattcagctggacttcatgcgaaacccccagttttgggttctcgcagcttccaacatctttctcggtttcgctgtctacgtgccttctatctatcttccaacattcgcgacgctcgttggcctttcgcctcgagtaggagcactacttctagcagcactcaatcttgcgtctacgcttggacaagtgcttttcggacacttatcagaccgagtaaacaacgtatatatactcatcttcaccacaacgtttgtccctgctgtggcatctttctctgcgtggggtttcgctcagtcccttgccccactccttattttctcgatcatattcggtctcttcggcggatcgtacgttgtattctggccaaagttcgcgcgactatcaggaaaagatccgctgtttttgtacggtctcatggccttcggaaagggtattggaaatgttgcaaccggtccaatcagctccagactgataggtctatctctatcatcaggctatgggttaggggcgtacagaaatatcatcatttacacaggaactcttctactggcgtcttcccttggcgtccttgggtggccaatgaagtgccgcaggaaccaggaacgatcgcccgtagtcattgaactatag

SEQ ID NO: 36096 - protein, 439 aa, Muscodor strobelii
  misc_feature: SGI Peptide ID NO. 572509
  misc_feature (41)..(381): Pfam Id: PF07690 Pfam Desc: Major Facilitator Superfamily
  misc_feature (1)..(425): NCBI GI: 256723642 Blast Desc: NECHADRAFT_52270 [Nectria haematococca mpVI 77-13-4]
  misc_feature (1)..(427): NCBI GI: 261358315 Blast Desc: conserved [Verticillium albo-atrum VaMs.102]
  misc_feature (15)..(424): NCBI GI: 256731602 Blast Desc: NECHADRAFT_85217 [Nectria haematococca mpVI 77-13-4]
  misc_feature (2)..(420): NCBI GI: 169619561 Blast Desc: SNOG_12979 [Phaeosphaeria nodorum SN15] gi|160703852|gb|EAT79779.2| SNOG_12979 [Phaeosphaeria nodorum SN15]
  misc_feature (3)..(425): NCBI GI: 169778464 Blast Desc: [Aspergillus oryzae RIB40] gi|83772435|dbj|BAE62564.1| protein product [Aspergillus oryzae]
  misc_feature (6)..(425): NCBI GI: 238499151 Blast Desc: MFS monocarboxylate transporter, [Aspergillus flavus NRRL3357] gi|220692563|gb|EED48909.1| MFS monocarboxylate transporter, [Aspergillus flavus NRRL3357]
  misc_feature (7)..(425): NCBI GI: 242767190 Blast Desc: MFS monocarboxylate transporter, [Talaromyces stipitatus ATCC 10500] gi|218724517|gb|EED23934.1| MFS monocarboxylate transporter, [Talaromyces stipitatus ATCC 10500]
  misc_feature (14)..(409): NCBI GI: 189194439 Blast Desc: conserved [Pyrenophora tritici-repentis Pt-1C-BFP] gi|187979122|gb|EDU45748.1| conserved [Pyrenophora tritici-repentis Pt-1C-BFP]
  misc_feature (18)..(388): NCBI GI: 255948384 Blast Desc: Pc22g09470 [Penicillium chrysogenum Wisconsin 54-1255] gi|211591976|emb|CAP98235.1| Pc22g09470 [Penicillium chrysogenum Wisconsin 54-1255]
  misc_feature (33)..(425): NCBI GI: 119471201 Blast Desc: MFS monocarboxylate transporter, [Neosartorya fischeri NRRL 181] gi|119406289|gb|EAW16240.1| MFS monocarboxylate transporter, [Neosartorya fischeri NRRL 181]
  misc_feature: Useful for introducing or modulating the production of volatile compounds
MSIELENAPSRLPELTEDDGNSRVLDAGVAPPDRGLRAMRFLAGCFLIEAVVWGFNITFGVFQQYYGHLPQFQDSANISIIGTLGTSIMFLGTPFATPVVKNYPARRQHIVIAGCIICVVALVWASFAKSIPELIASQGALYGFGVLVVYTPLVSMINEWFIERRGFAYGVVFAGGGASGVGLPFLVEWLLATYGYRTTLRVIGVSQVVLLAPILPLIRNRLPSSCRVEEGIQLDFMRNPQFWVLAASNIFLGFAVYVPSIYLPTFATLVGLSPRVGALLLAALNLASTLGQVLFGHLSDRVNNVYILIFTTTFVPAVASFSAWGFAQSLAPLLIFSIIFGLFGGSYVVFWPKFARLSGKDPLFLYGLMAFGKGIGNVATGPISSRLIGLSLSSGYGLGAYRNIIIYTGTLLLASSLGVLGWPMKCRRNQERSPVVIEL

SEQ ID NO: 36097 - DNA, 2832 bp, Muscodor strobelii; identical to SEQ ID NO: 36094
  misc_feature: SGI EST ID NO. CUFF.85943.1
  misc_feature: Variant of the nucleotide sequence at SEQ ID NO 36095

SEQ ID NO: 36098 - DNA, 699 bp, Muscodor strobelii
  misc_feature: SGI cDNA ID NO. 572510
  misc_feature: Encodes the peptide sequence at SEQ ID NO 36099
atgcattcctttacatcattcgctattgtcgctcttgctggccttgctactgcggctcctcatcctaagcgcaccaacgttgatgcctataacacttacacgggagacggaagcaccggcgctggctggcccgccatcgaggcttggggcagtttcgacgagctctggaatgccaactacccattgatgcagcagtcttgcggctggaacggctggggtgccgacaattcggaccaagaaatctccgacatccagtctgccattcagcaagtttccagcgcccagggaatggacaaccgattcgtcctcgctgtcatgatgcaggagagcaagggttgtgtccgtgttcctaccaccaacaacggtgtcgtcaaccctggtttgttccaatcgcacaacggtgctggtacctgcgccggtgtcaacccttgccctgcctccacgattcttcagatggttcaggatggtgttgccggtacctctgctggtgacggtcttacgcagacctttcagaaggcatcgtctgccatgggtgacagcgcggctcgtgcctactacggcgccgcccgtctctacaacagtggctctctcgatatcaccaatctcggcaatggcttcagcagtgttgcttgctactcttcggatgttgccaaccgtctgactggctggactcttgctgccagcagctgcaacctttaa

SEQ ID NO: 36099 - protein, 232 aa, Muscodor strobelii
  misc_feature: SGI Peptide ID NO. 572510
  misc_feature (1)..(231): NCBI GI: 145254134 Blast Desc: An18g00630 [Aspergillus niger] gi|134084110|emb|CAK43138.1| [Aspergillus niger]
  misc_feature (18)..(230): NCBI GI: 67524249 Blast Desc: AN2582.2 [Aspergillus nidulans FGSC A4] gi|40745531|gb|EAA64687.1| AN2582.2 [Aspergillus nidulans FGSC A4] gi|259488019|tpe|CBF87144.1| TPA: [Aspergillus nidulans FGSC
  misc_feature (29)..(224): NCBI GI: 212540184 Blast Desc: conserved [Penicillium marneffei ATCC 18224] gi|210067546|gb|EEA21638.1| conserved [Penicillium marneffei ATCC 18224]
  misc_feature (27)..(232): NCBI GI: 212545234 Blast Desc: PMAA_006020 [Penicillium marneffei ATCC 18224] gi|210065740|gb|EEA19834.1| PMAA_006020 [Penicillium marneffei ATCC 18224]
  misc_feature (29)..(231): NCBI GI: 242802658 Blast Desc: muramidase, [Talaromyces stipitatus ATCC 10500] gi|218717360|gb|EED16781.1| muramidase, [Talaromyces stipitatus ATCC 10500]
  misc_feature (4)..(230): NCBI GI: 255944881 Blast Desc: Pc20g06830 [Penicillium chrysogenum Wisconsin 54-1255] gi|211587943|emb|CAP86012.1| Pc20g06830 [Penicillium chrysogenum Wisconsin 54-1255]
  misc_feature (4)..(231): NCBI GI: 156048352 Blast Desc: SS1G_08907 [Sclerotinia sclerotiorum 1980] gi|154693304|gb|EDN93042.1| SS1G_08907 [Sclerotinia sclerotiorum 1980]
  misc_feature (28)..(232): NCBI GI: 212545887 Blast Desc: PMAA_009950 [Penicillium marneffei ATCC 18224] gi|210064617|gb|EEA18712.1| PMAA_009950 [Penicillium marneffei ATCC 18224]
  misc_feature (12)..(223): NCBI GI: 154300181 Blast Desc: BC1G_10466 [Botryotinia fuckeliana B05.10] gi|150856755|gb|EDN31947.1| BC1G_10466 [Botryotinia fuckeliana B05.10]
  misc_feature (1)..(232): NCBI GI: 154321475 Blast Desc: BC1G_01612 [Botryotinia fuckeliana B05.10] gi|150852150|gb|EDN27342.1| BC1G_01612 [Botryotinia fuckeliana B05.10]
MHSFTSFAIVALAGLATAAPHPKRTNVDAYNTYTGDGSTGAGWPAIEAWGSFDELWNANYPLMQQSCGWNGWGADNSDQEISDIQSAIQQVSSAQGMDNRFVLAVMMQESKGCVRVPTTNNGVVNPGLFQSHNGAGTCAGVNPCPASTILQMVQDGVAGTSAGDGLTQTFQKASSAMGDSAARAYYGAARLYNSGSLDITNLGNGFSSVACYSSDVANRLTGWTLAASSCNL

SEQ ID NO: 36100 - DNA, 1203 bp, Muscodor strobelii
  misc_feature: SGI EST ID NO. CUFF.85882.0
  misc_feature: Variant of the nucleotide sequence at SEQ ID NO 36098
ggcggactagtgtcgtcgggcttctcgatgtataaagatcacgagaagcgccttcaccatggctggaattcgttcatcaccacgcatcaagcacagcagccagagcaagcctcggtcaacaatccttataacagacattcttttctctatcgctccttgaacaaaagtcactttttgacatacctctaccattccttttctagatacccaatccatttcttcaacaaaatgcattcctttacatcattcgctattgtcgctcttgctggccttgctactgcggctcctcatcctaagcgcaccaacgttgatgcctataacacttacacgggagacggaagcaccggcgctggctggcccgccatcgaggcttggggcagtttcgacgagctctggaatgccaactacccattgatgcagcagtcttgcggctggaacggctggggtgccgacaattcggaccaagaaatctccgacatccagtctgccattcagcaagtttccagcgcccagggaatggacaaccgattcgtcctcgctgtcatgatgcaggagagcaagggttgtgtccgtgttcctaccaccaacaacggtgtcgtcaaccctggtttgttccaatcgcacaacggtgctggtacctgcgccggtgtcaacccttgccctgcctccacgattcttcagatggttcaggatggtgttgccggtacctctgctggtgacggtcttacgcagacctttcagaaggcatcgtctgccatgggtgacagcgcggctcgtgcctactacggcgccgcccgtctctacaacagtggctctctcgatatcaccaatctcggcaatggcttcagcagtgttgcttgctactcttcggatgttgccaaccgtctgactggctggactcttgctgccagcagctgcaacctttaaatatgctgatcttccattgtggggtgaggcaacttacggaaatgacttggaacgcgatatgcgcatccttcgtcaggagttaacggaatgggatttgatgaaaaatggcgtgcttcattctttcttgaacatacttttcggcatttgcatattttgtgtggggcgcaaaatgccagccatgatctgtacatatatatggtctcttcttgttattggagtctaccggcacttgaatgtaaatatcagcgttcccgttctgcgaactatcatattttg

SEQ ID NO: 36101 - DNA, 687 bp, Muscodor strobelii
  misc_feature: SGI cDNA ID NO. 572511
  misc_feature: Encodes the peptide sequence at SEQ ID NO 36102
atggtggtagccgttcgggattcttggattctcggaagccgccaagatacaaaagtgccggccccagtaacagttactgctacaatggcacccgaaagcacaagtgctatcgctgtcgcccgtgacagcgcatcaagcgtgctcaaagtgggagaggagggcagtgagaagataagaaccaacggcgtatttggatcccctaatggggtccgaggcggatttgttttccagaaacttatcatgccgtccaatacggcaggcggaatcgagcccgagtacaacagcagcgttgcgaatacgatcacagtcgtccccaagctggcgaccttaccaccaccagctggaatgatatatattgaccctctctccttcgtgatatctacggcgacccctccaattaatggagacaccatgaaagtggactacatattcacgcaggcattggcaatagcaatggacacctcgaaaggcgtaattggaaagctggacacaggaacaaaccagtttgtaacagagggcctgggagagtttgagtttgagaaagatgagaacgagtggtcgctaacagtggccgatatgaatggtgaatgggccgtgtttgtgccagaagatgcggtcctactagagacggccgaaggtggagaagatgctgttggagattctgatagtgatagcgacgatgaatga

SEQ ID NO: 36102 - protein, 228 aa, Muscodor strobelii
  misc_feature: SGI Peptide ID NO. 572511
  misc_feature (62)..(202): NCBI GI: 85109529 Blast Desc: NCU07581 [Neurospora crassa OR74A] gi|28924607|gb|EAA33725.1| [Neurospora crassa OR74A]
  misc_feature (51)..(201): NCBI GI: 261361625 Blast Desc: conserved [Verticillium albo-atrum VaMs.102]
  misc_feature (62)..(205): NCBI GI: 39968039 Blast Desc: MGG_02112 [Magnaporthe grisea 70-15] gi|145012994|gb|EDJ97635.1| MGG_02112 [Magnaporthe grisea 70-15]
  misc_feature (24)..(213): NCBI GI: 256728247 Blast Desc: NECHADRAFT_87842 [Nectria haematococca mpVI 77-13-4]
  misc_feature (57)..(203): NCBI GI: 116192891 Blast Desc: CHGG_06163 [Chaetomium globosum CBS 148.51] gi|88182076|gb|EAQ89544.1| CHGG_06163 [Chaetomium globosum CBS 148.51]
  misc_feature (80)..(201): NCBI GI: 261360006 Blast Desc: [Verticillium albo-atrum VaMs.102]
  misc_feature (64)..(202): NCBI GI: 171684105 Blast Desc: protein product [Podospora anserina] gi|170942013|emb|CAP67665.1| protein product [Podospora anserina]
  misc_feature (78)..(202): NCBI GI: 39960141 Blast Desc: [Magnaporthe grisea 70-15] gi|145014337|gb|EDJ98905.1| [Magnaporthe grisea 70-15]
  misc_feature (58)..(202): NCBI GI: 169603391 Blast Desc: SNOG_04705 [Phaeosphaeria nodorum SN15] gi|111067345|gb|EAT88465.1| SNOG_04705 [Phaeosphaeria nodorum SN15]
MVVAVRDSWILGSRQDTKVPAPVTVTATMAPESTSAIAVARDSASSVLKVGEEGSEKIRTNGVFGSPNGVRGGFVFQKLIMPSNTAGGIEPEYNSSVANTITVVPKLATLPPPAGMIYIDPLSFVISTATPPINGDTMKVDYIFTQALAIAMDTSKGVIGKLDTGTNQFVTEGLGEFEFEKDENEWSLTVADMNGEWAVFVPEDAVLLETAEGGEDAVGDSDSDSDDE

SEQ ID NO: 36103 - DNA, 3807 bp, Muscodor strobelii
  misc_feature: SGI cDNA ID NO. 572512
  misc_feature: Encodes the peptide sequence at SEQ ID NO 36104
atggacgccaccggctatactgtgttcatggccaatctgccactgaatttgacagagctaggttttaagactcagcttgcaccccacatggtacagctcaaaattagtgactacaactgccagaaatcaaggggaaagacatttggccagcttacttttcttcataaaacagacggagaaaattttctgaatcgacatggctctttactaattcccggcgttcaccgcaatggtcggtctacttcgagagcacgactctatatactcaatcagcccgttcactgcagattgagtgatagacctccggatccaatgctccttcgtgttttactgaaagaagcggaagacaaggcgcaccctgatgaagaaagtagggagttgacgagccatgagtccgttgtctttgacatcttaggactttcatgtggtcactacgaatacccaaacaacgcaatcgcctacacagctgacgtggaatggagcgagcagggcatcgcaaaattcgctagagactgcgtgatcctcaaatttccatctggctctaagcgaatacgaatagagatacagtacagagcaatcgttgaaatcgttatttctatgcgtcctacgtgtctattcttgacgctttgggaggcaccgaagatctttgacgatggtggcgtactttcggaaataggagctctgcgcatatcagattcttcgaactctgtccggactgcggcaagaactcgaatcagtagcattcctcacgctcataccgaccatagtcgagtcattggacagtctctaatttactgcatcaaactctccccacaagacattgagcacaagacaggacgactacgggagaaggatttcctgacattctcttttcacaacattccaagccccattgccggccaatcatacatgtcacagggcttagccgagtttgaaggacgtgttactcggtacgggcaaaaggtgccgtttgacttacttttccagttccaatcgctggtacagaatggataccttttgccacaaacagtcgatcgacttcttcaacggctattagactcgacagtaagggatggcaatcaagatttacgtactatagcaaaaaagcatgacgctgatggcatgcctcgtcgactaccgttctcggcacatgccgtgaagaggctcttcaaagatattccgtttcccgggccaaatactgaggccagcaactttgacaccgacgaactatgggactggctcgtgaaaattgagacagaaattagccagggtttgacgaaagagctgttttccgagcgagcgcgacagaatctcacgttggtatacaaggtacaagtcaccccgagcagggtaatgatcaatggccctgagcctgaagcaaagaatcgaattctccggaagttatgtgaaaggtttccacgccacactgagtactttgcccgagtacaattctgcgatgaggatggccaagatttccgtttcaactacaaagtgtccctagatgctatctacacaaggttcaacacgatccttcgacatggctttcccattgccggacgtctttacaaatttctggggttctctcattcttcactccgatcccatgcagtctggttcatggctactttcatcgatgacagtaaacaattacaaagttatgtatctgtcatcagagaactcggacagttcagtgaaatacgctctccagcccggtgcgctgcaagaatcggacaagctttctcggaaacaccaaatgcggttgatttaaatgctcttagaactcaaattgaaatagttccagacgtcaaatccaaggatggcacccgcgtcttcagcgacggcgttgggaccatatcgagagaactcatggaagcaatccatgagaatcttcctccaaaggccgctaatgctacttgttttcagatcaggtgggccggcgcgaaaggaatgttgagcctcgatgatacgcttgatggcttggttatgagaatccgtcccagtatgaacaagttcgatagcgatgctaagcagaatcttgagatttgcgacactgcgaacaaaccaattccactggttttgaatcgacaaatgataaagattcttgaagacatgggagttccaaactcatggtttatcgaattgcagagcaaggagttgaatcggcttcggaagatcacagcaagcaccgacaacacaatcattttcctccggagacagaagatcgcagagcagatgcgatttcacatgttcattcgtcgcctacaaaaactcgaacttgactatagaaaggacgcctttctttgctcggtcgtggaaaccgctgtgctgcgcgaggttcgactcctcaagcacaaagcccgcatcccggtcgggaaaggcgtcactctgttcggcgtgatggacgagtttggcttcttaggagaggaggaagtattcgtcacttatgacacgcgtccaaaagaaacataccccgatttgcataatcgttggcttatcatcaccagatcaccggccttgcacccaggagatatacaaattcgtaaggcgattgagcctcccgaatatcacccccttcgcagtctgagcaattgcatcgttttcagtcaaaaaggcaaacgtgatattcctagtcaactcagcggaggagatctcgatggtgacatctacaacgtgatatgggatgacgttcccgttcacgaatgtcgtcgcgaattcgatccagccgagtaccccagagtggcgcaggtcgatatcggcagaccagtcacacccgacgatattaccgaattcttcgttagtttcatggcaactgaccagcttggtctgattgccgtcaagcacatcatactcgcggatatgcacgctgcaggaactgttcatgaggaatgcaagatgctggcagagatgcactccactgctgtcgattattctaagaccggaatccctgtcgatatgacaaagctttccgcaatgaagagaacgaattatcgtcctgattttttggctcctgcacctcccgcgaatctcgtcgataagacagaaatacagtttgagcttccggcgctgttagaggacgccgagcaagacgaagatgaagatacaggtccgagacacaaattctataggtcggataaaattttaggagctctgtacaaccttatcgacgagaagcgaatctggcaagaagatattcatgtcaccatcaattgctctggcacttccatttggaacgagctctgggttcacatccacaaggaatgcaaggaactcggcaaggtagattggagatcagctctagatgaagccagaagtatccgatatgcttacgaagatgaagtctgggcagccactaacactttctctgatcacgcaaccaaggcactgcaagagattgaggtctttactggtgcggtcttcaacaagacaggggttcaaacccggcgtcagcgtgatgcgtcccttcaattaaaggacgaattcgatcgtattacgaaatgttccgagagtctgatgagaaggcaaaatgccgacactctggactataactatgatggtgatggtcagatcgacgaaaatgagcacgaccaacgtactaagacgacgggattggagctcagcatcgcatgctactgggttggaatgaatgaaggaggtaatgggtccgcttctagaaagcgaagcagagatgactttgagagcttcaagattgtcgcagcacattgcgcccttcgtgagctagagaaggctaccaaggagaaagagatacgcgctggaattgctgatttgagtgctgggtatgtaggataa

SEQ ID NO: 36104 - protein, 1268 aa, Muscodor strobelii
  misc_feature: SGI Peptide ID NO. 572512
  misc_feature (598)..(981): Pfam Id: PF05183 Pfam Desc: RNA dependent RNA polymerase
  misc_feature (8)..(1252): NCBI GI: 121716158 Blast Desc: rna-dependent rna polymerase [Aspergillus clavatus NRRL 1] gi|119403845|gb|EAW14262.1| rna-dependent rna polymerase [Aspergillus clavatus NRRL 1]
  misc_feature (8)..(1251): NCBI GI: 169784528 Blast Desc: [Aspergillus oryzae RIB40] gi|83775472|dbj|BAE65592.1| protein product [Aspergillus oryzae]
  misc_feature (8)..(1172): NCBI GI: 67524519 Blast Desc: AN2717.2 [Aspergillus nidulans FGSC A4] gi|40743829|gb|EAA63015.1| AN2717.2 [Aspergillus nidulans FGSC A4] gi|259486372|tpe|CBF84157.1| TPA: RNA-directed RNA polymerase
  misc_feature (8)..(1252): NCBI GI: 256730553 Blast Desc: NECHADRAFT_123067 [Nectria haematococca mpVI 77-13-4]
  misc_feature (8)..(1268): NCBI GI: 85110327 Blast Desc: NCU08435 [Neurospora crassa OR74A] gi|28881256|emb|CAD70515.1| related to RNA-directed RNA polymerase [Neurospora crassa] gi|28925084|gb|EAA34169.1| crassa
  misc_feature (8)..(1257): NCBI GI: 46109400 Blast Desc: FG01582.1 [Gibberella zeae PH-1]
  misc_feature (3)..(1246): NCBI GI: 171683804 Blast Desc: protein product [Podospora anserina] gi|170941862|emb|CAP67515.1| protein product [Podospora anserina]
  misc_feature (255)..(1255): NCBI GI: 145603196 Blast Desc: MGG_06205 [Magnaporthe grisea 70-15] gi|145011478|gb|EDJ96134.1| MGG_06205 [Magnaporthe grisea 70-15]
  misc_feature (8)..(1018): NCBI GI: 238508311 Blast Desc: RNA-dependent RNA polymerase, [Aspergillus flavus NRRL3357] gi|220688871|gb|EED45223.1| RNA-dependent RNA polymerase, [Aspergillus flavus NRRL3357]
  misc_feature (8)..(1253): NCBI GI: 116200327 Blast Desc: CHGG_08319 [Chaetomium globosum CBS 148.51] gi|88179598|gb|EAQ87066.1| CHGG_08319 [Chaetomium globosum CBS 148.51]
MDATGYTVFMANLPLNLTELGFKTQLAPHMVQLKISDYNCQKSRGKTFGQLTFLHKTDGENFLNRHGSLLIPGVHRNGRSTSRARLYILNQPVHCRLSDRPPDPMLLRVLLKEAEDKAHPDEESRELTSHESVVFDILGLSCGHYEYPNNAIAYTADVEWSEQGIAKFARDCVILKFPSGSKRIRIEIQYRAIVEIVISMRPTCLFLTLWEAPKIFDDGGVLSEIGALRISDSSNSVRTAARTRISSIPHAHTDHSRVIGQSLIYCIKLSPQDIEHKTGRLREKDFLTFSFHNIPSPIAGQSYMSQGLAEFEGRVTRYGQKVPFDLLFQFQSLVQNGYLLPQTVDRLLQRLLDSTVRDGNQDLRTIAKKHDADGMPRRLPFSAHAVKRLFKDIPFPGPNTEASNFDTDELWDWLVKIETEISQGLTKELFSERARQNLTLVYKVQVTPSRVMINGPEPEAKNRILRKLCERFPRHTEYFARVQFCDEDGQDFRFNYKVSLDAIYTRFNTILRHGFPIAGRLYKFLGFSHSSLRSHAVWFMATFIDDSKQLQSYVSVIRELGQFSEIRSPARCAARIGQAFSETPNAVDLNALRTQIEIVPDVKSKDGTRVFSDGVGTISRELMEAIHENLPPKAANATCFQIRWAGAKGMLSLDDTLDGLVMRIRPSMNKFDSDAKQNLEICDTANKPIPLVLNRQMIKILEDMGVPNSWFIELQSKELNRLRKITASTDNTIIFLRRQKIAEQMRFHMFIRRLQKLELDYRKDAFLCSVVETAVLREVRLLKHKARIPVGKGVTLFGVMDEFGFLGEEEVFVTYDTRPKETYPDLHNRWLIITRSPALHPGDIQIRKAIEPPEYHPLRSLSNCIVFSQKGKRDIPSQLSGGDLDGDIYNVIWDDVPVHECRREFDPAEYPRVAQVDIGRPVTPDDITEFFVSFMATDQLGLIAVKHIILADMHAAGTVHEECKMLAEMHSTAVDYSKTGIPVDMTKLSAMKRTNYRPDFLAPAPPANLVDKTEIQFELPALLEDAEQDEDEDTGPRHKFYRSDKILGALYNLIDEKRIWQEDIHVTINCSGTSIWNELWVHIHKECKELGKVDWRSALDEARSIRYAYEDEVWAATNTFSDHATKALQEIEVFTGAVFNKTGVQTRRQRDASLQLKDEFDRITKCSESLMRRQNADTLDYNYDGDGQIDENEHDQRTKTTGLELSIACYWVGMNEGGNGSASRKRSRDDFESFKIVAAHCALRELEKATKEKEIRAGIADLSAGYVG

SEQ ID NO: 36105 - DNA, 1815 bp, Muscodor strobelii
  misc_feature: SGI EST ID NO. CUFF.85913.0
  misc_feature: Variant of the nucleotide sequence at SEQ ID NO 36103
gagcaaggagttgaatcggcttcggaagatcacagcaagcaccgacaacacaatcattttcctccggagacagaagatcgcagagcagatgcgatttcacatgttcattcgtcgcctacaaaaactcgaacttgactatagaaaggacgcctttctttgctcggtcgtggaaaccgctgtgctgcgcgaggttcgactcctcaagcacaaagcccgcatcccggtcgggaaaggcgtcactctgttcggcgtgatggacgagtttggcttcttaggagaggaggaagtattcgtcacttatgacacgcgtccaaaagaaacataccccgatttgcataatcgttggcttatcatcaccagatcaccggccttgcacccaggagatatacaaattcgtaaggcgattgagcctcccgaatatcacccccttcgcagtctgagcaattgcatcgttttcagtcaaaaaggcaaacgtgatattcctagtcaactcagcggaggagatctcgatggtgacatctacaacgtgatatgggatgacgttcccgttcacgaatgtcgtcgcgaattcgatccagccgagtaccccagagtggcgcaggtcgatatcggcagaccagtcacacccgacgatattaccgaattcttcgttagtttcatggcaactgaccagcttggtctgattgccgtcaagcacatcatactcgcggatatgcacgctgcaggaactgttcatgaggaatgcaagatgctggcagagatgcactccactgctgtcgattattctaagaccggaatccctgtcgatatgacaaagctttccgcaatgaagagaacgaattatcgtcctgattttttggctcctgcacctcccgcgaatctcgtcgataagacagaaatacagtttgagcttccggcgctgttagaggacgccgagcaagacgaagatgaagatacaggtccgagacacaaattctataggtcggataaaattttaggagctctgtacaaccttatcgacgagaagcgaatctggcaagaagatattcatgtcaccatcaattgctctggcacttccatttggaacgagctctgggttcacatccacaaggaatgcaaggaactcggcaaggtagattggagatcagctctagatgaagccagaagtatccgatatgcttacgaagatgaagtctgggcagccactaacactttctctgatcacgcaaccaaggcactgcaagagattgaggtctttactggtgcggtcttcaacaagacaggggttcaaacccggcgtcagcgtgatgcgtcccttcaattaaaggacgaattcgatcgtattacgaaatgttccgagagtctgatgagaaggcaaaatgccgacactctggactataactatgatggtgatggtcagatcgacgaaaatgagcacgaccaacgtactaagacgacgggattggagctcagcatcgcatgctactgggttggaatgaatgaaggaggtaatgggtccgcttctagaaagcgaagcagagatgactttgagagcttcaagattgtcgcagcacattgcgcccttcgtgagctagagaaggctaccaaggagaaagagatacgcgctggaattgctgatttgagtgctgggtatgtaggataaggatggcaaacaaagtcgagactccgtgcaagttgctactggctccgggtggctagtatcttctcgtagttatactgcaattcggtctatgttgattgtctaagtacaagcgtaagaatatggtagcacagttaatcagcagatcaagctca

SEQ ID NO: 36106 - DNA, 840 bp, Muscodor strobelii
  misc_feature: SGI cDNA ID NO. 572513
  misc_feature: Encodes the peptide sequence at SEQ ID NO 36107
atggccatggcatcagataaggcattcgacttaaccggcgaagttgcgattgttaccggagcaggatcacgtctatcaggagaaataggaaatggtcgtgcggctgctattcttctggctagacagggcgccaaagttgctcttgttgacctgaaacccgaatgggcagaggagacaaagaggatgatagacgaagcaggcggcatatctgaagtcgttcaagcagatgtaacaaaagaagattcttgcaagaatgtcgtagcgagaactgtcgagttatttggcactgtcaatatgctcgtcaatattgttggtgttggaggggcaacgggagacgcgaccaacgtggacctcgacgcatgggaccgtgactttcgtattaacgtgacaagcatgcttttgatgtctcgctatacgatacccgagatgcgtaagaacggacgtggtgtcattattaacatgggctcagtgagtggtatgcttggcggcaatccttcactactctacactacgtcgaagggtgccatcattcaaatgacacgaaatatggcagcacaacatggacctgagaacattcgcgtcaactgcgtatgtccgggaatggtgtatacgccgatggtacgaggggatgggatgcccgacgaactcagacaggctaggaaggaacaaaatatgttgaaacaagaagggactgcttgggatgtcggatacggaattgtcttcctatgcagcaaagaagcgaagtggataacggggctcatcatgcccattgatggaggtacaactgcgggtctgggaactggatcggctttgatggcagaaggttgcgtcaagaaatag

SEQ ID NO: 36107 - protein, 279 aa, Muscodor strobelii
  misc_feature: SGI Peptide ID NO. 572513
  misc_feature (14)..(188): Pfam Id: PF00106 Pfam Desc: short chain dehydrogenase
  misc_feature (3)..(262): NCBI GI: 259483258 Blast Desc: TPA: conserved [Aspergillus nidulans FGSC A4]
  misc_feature (3)..(262): NCBI GI: 67900788 Blast Desc: AN7381.2 [Aspergillus nidulans FGSC A4] gi|40742562|gb|EAA61752.1| AN7381.2 [Aspergillus nidulans FGSC A4]
  misc_feature (3)..(274): NCBI GI: 46109824 Blast Desc: FG01794.1 [Gibberella zeae PH-1]
  misc_feature (26)..(274): NCBI GI: 115386804 Blast Desc: conserved [Aspergillus terreus NIH2624] gi|114190941|gb|EAU32641.1| conserved [Aspergillus terreus NIH2624]
  misc_feature (11)..(264): NCBI GI: 94313870 Blast Desc: short-chain dehydrogenase/reductase SDR [Ralstonia metallidurans CH34] gi|93357722|gb|ABF11810.1| short-chain dehydrogenase/reductase SDR [Ralstonia metallidurans CH34]
  misc_feature (4)..(264): NCBI GI: 121607121 Blast Desc: short-chain dehydrogenase/reductase SDR [Verminephrobacter eiseniae EF01-2] gi|121551761|gb|ABM55910.1| short-chain dehydrogenase/reductase SDR [Verminephrobacter
  misc_feature (4)..(264): NCBI GI: 121611583 Blast Desc: short-chain dehydrogenase/reductase SDR [Verminephrobacter eiseniae EF01-2] gi|121556223|gb|ABM60372.1| short-chain dehydrogenase/reductase SDR [Verminephrobacter
  misc_feature (3)..(267): NCBI GI: 258577741 Blast Desc: conserved [Uncinocarpus reesii 1704] gi|237903318|gb|EEP77719.1| conserved [Uncinocarpus reesii 1704]
  misc_feature (11)..(267): NCBI GI: 240110129 Blast Desc: short-chain type dehydrogenase, [Coccidioides posadasii C735 delta SOWgp]
  misc_feature (11)..(267): NCBI GI: 119179502 Blast Desc: CIMG_08496 [Coccidioides immitis RS]
  misc_feature (15)..(258): SWISSPROT Homolog: EC 1.1.1.268 2-(R)-hydroxypropyl-CoM dehydrogenase
MAMASDKAFDLTGEVAIVTGAGSRLSGEIGNGRAAAILLARQGAKVALVDLKPEWAEETKRMIDEAGGISEVVQADVTKEDSCKNVVARTVELFGTVNMLVNIVGVGGATGDATNVDLDAWDRDFRINVTSMLLMSRYTIPEMRKNGRGVIINMGSVSGMLGGNPSLLYTTSKGAIIQMTRNMAAQHGPENIRVNCVCPGMVYTPMVRGDGMPDELRQARKEQNMLKQEGTAWDVGYGIVFLCSKEAKWITGLIMPIDGGTTAGLGTGSALMAEGCVKK

SEQ ID NO: 36108 - DNA, 1071 bp, Muscodor strobelii
  misc_feature: SGI EST ID NO. CUFF.85930.0
  misc_feature: Variant of the nucleotide sequence at SEQ ID NO 36106
gcggcatatctgaagtcgttcaagcagatgtaacaaaagaagattcttgcaagaatgtcgtagcgagaactgtcgagttatttggcactgtcaatatgctcgtcaatattggtaagtgcgaacgtgctaatttgatttgcgttcttgaagaatatctggatacagtctctagatgcagagagttgatgtcggagagacatttgcggataaataagtcaagcaacttcgaaaaatgctgacgtttttaaagttggtgttggaggggcaacgggagacgcgaccaacgtggacctcgacgcatgggaccgtgactttcgtattaacgtgacaagcatgcttttgatgtctcgctatacgatacccgagatgcgtaagaacggacgtggtgtcattattaacatgggctcagtgagtggtatgcttggcggcaatccttcactactctacactacgtcgaagggtgccatcattcaaatgacacgaaatatggcagcacaacatggacctgagaacattcgcgtcaactgcgtatgtccgggaatggtgtatacgccgatggtacgaggggatgggatgcccgacgaactcagacaggctaggaaggaacaaaatatgttgaaacaagaagggactgcttgggatgtcggatacggaattgtcttcctatgcagcaaagaagcgaagtggataacggggctcatcatgcccattgatggaggtacaactgcgggtctgggaactggatcggctttgatggcagaaggttgcgtcaagaaatagaacgtgtccctctaacagtgtctgtatcagattatctgatagaaaagtcgacaactcgagcaagaataaggcaacgattaaagggttacaaaggtcttggcgaggttggaaagaatttgggtagtggatgaaacataacccgcagaccctatcttgcgtctccaacttgatcgagtataccactgcgcgtcctacgccgtagccaatatcagaccatctacctggtctagactcctgaatactgcttcatcgctgcctcgatcacttcagttatctgattctcaatgtcat

SEQ ID NO: 36109 - DNA, 1995 bp, Muscodor strobelii
  misc_feature: SGI cDNA ID NO. 572514
  misc_feature: Encodes the peptide sequence at SEQ ID NO 36110
atgaaccaagaaacccctttccgtggtagcagcggcaagaatgtccagttgctccggagtcacgaggctctacgcgctgcggccctcgccatcggcatcataacagcgcgacatctcttcgtcgacggcttccattacccatctcttatgcttctcgcccacgcctcgatcgcattgctggtacggagtatttaccctttcgaagacgaaaaaaaaaacaccatacagcgcggtacatgcccgaggacgacgtggcaatatcaggctgcatttgctgtgtccttcggactctgcatatttttctcataccaatcattactagacaaccaaaacaccaccttatggttcatgttgcttgccttcaactggtccgctccaatcagctcgtgtgttatatggtactcgtcacggccgctgcgacgagattacgacgcaccactatccgccctcactactttaatctgtctcctggtaatcgtgtggaaagagaactggctcgttgaaaaagccatcattctgaatctcctagctgtagcctttgcagcgatagccagacacctctgggcaagcggccggatcgaaaacccagttgcgatcagatcagcgataactggtcgtatttatatggatgcttacactgtaggcctttgctgttgtcagatcctgaacatcatagcggtgatttgccaaggctcttggtaccgtcgagatttccatgttagaggtcgcatcgcatggatcattgtgaacgctcttgcaagcgttatcgccttccaaagcaacgcagtccttaagcgattggtttcgtctttccagcggagtgctacatatgtggagacaaaaaatacacatgctgcctcagcgaatcaagagttcagccgtattacactaaatctttgcgttattttgttaattgaggttgacaattgctttgttcaacgccgaccttcaacaacatcaattgcccaatggatggcgtttgccatcgcgcatcttgcaatcatacacacacttgcaagtcaaacagatagtggacaatcctacgcccaccttcacaaacaactagcgccagacgacaccgaagcttgtagccatgaggatgggcagcgtgagattggaaacttgatatcgcgccgagtctctatggcttggcaagccactctgagcggcctcacatttcttcttgtcgtatactgcgcaatcggtgccggtgctgagcctagggaacctgaccaatccgcgtgggatttggatattgtgatagcctggtatcacgagcccatcgagacagtcatacacacagtacagcaagtacttgctgtgtccagcaccgacagccgcacggtccgaaccatcgtataccataaaggcacggaaaacgaaaaggagctcgaacaggcagcatcttcccatgctattggcgacaactttagcatacgacgactagagaacttagggcgagaggccagcacttatttaacacatgtcatcaatcaggatcaagactgggcacgccacaccttattcattcaagcagaagcccatcattcggcatatctaccaacacgcttacgggactacttcgttcacaatacgggctttctatctctttcatatacagatagtgtctgcgcgaactgcgatgaatgcaacgaccctacgggctggagtaatggcagcctagtacgggacgttttcgaacgcgcaaatccgggtcaagtgtgccaagatatcagcatgacgtttagaggacagttcgtggtctcggcccagaggatgagagcggcaaacttggatctcttgaaagatctcagaaatcaagtcgataccgacctcgatttcggattcccgctagagagactgtatgggatcatgttcggatgcccaacaatatccgagagatgcccgacgatcttgagtggatacttgggaaatgtaagggatgtggcggattgccagtgcttggatgctgagcacaacgtgctgcagatgtga

SEQ ID NO: 36110 - protein, 664 aa, Muscodor strobelii
  misc_feature: SGI Peptide ID NO. 572514
  misc_feature (417)..(641): NCBI GI: 156037330 Blast Desc: SS1G_12376 [Sclerotinia sclerotiorum 1980] gi|154697787|gb|EDN97525.1| SS1G_12376 [Sclerotinia sclerotiorum 1980]
  misc_feature (301)..(656): NCBI GI: 189200639 Blast Desc: [Pyrenophora tritici-repentis Pt-1C-BFP] gi|187983755|gb|EDU49243.1| [Pyrenophora tritici-repentis Pt-1C-BFP]
  misc_feature (417)..(658): NCBI GI: 169622655 Blast Desc: SNOG_14554 [Phaeosphaeria nodorum SN15] gi|160704822|gb|EAT78094.2| SNOG_14554 [Phaeosphaeria nodorum SN15]
  misc_feature (479)..(604): NCBI GI: 154321427 Blast Desc: BC1G_01588 [Botryotinia fuckeliana B05.10] gi|150852126|gb|EDN27318.1| BC1G_01588 [Botryotinia fuckeliana B05.10]
  misc_feature (508)..(658): NCBI GI: 154293153 Blast Desc: BC1G_14562 [Botryotinia fuckeliana B05.10] gi|150845602|gb|EDN20795.1| BC1G_14562 [Botryotinia fuckeliana B05.10]
  misc_feature (416)..(656): NCBI GI: 134114473 Blast Desc: CNBG4650 [Cryptococcus neoformans var. neoformans B-3501A] gi|50256798|gb|EAL19518.1| CNBG4650 [Cryptococcus neoformans var. neoformans B-3501A]
  misc_feature (416)..(635): NCBI GI: 170084617 Blast Desc: [Laccaria bicolor S238N-H82] gi|164651084|gb|EDR15324.1| [Laccaria bicolor S238N-H82]
MNQETPFRGSSGKNVQLLRSHEALRAAALAIGIITARHLFVDGFHYPSLMLLAHASIALLVRSIYPFEDEKKNTIQRGTCPRTTWQYQAAFAVSFGLCIFFSYQSLLDNQNTTLWFMLLAFNWSAPISSCVIWYSSRPLRRDYDAPLSALTTLICLLVIVWKENWLVEKAIILNLLAVAFAAIARHLWASGRIENPVAIRSAITGRIYMDAYTVGLCCCQILNIIAVICQGSWYRRDFHVRGRIAWIIVNALASVIAFQSNAVLKRLVSSFQRSATYVETKNTHAASANQEFSRITLNLCVILLIEVDNCFVQRRPSTTSIAQWMAFAIAHLAIIHTLASQTDSGQSYAHLHKQLAPDDTEACSHEDGQREIGNLISRRVSMAWQATLSGLTFLLVVYCAIGAGAEPREPDQSAWDLDIVIAWYHEPIETVIHTVQQVLAVSSTDSRTVRTIVYHKGTENEKELEQAASSHAIGDNFSIRRLENLGREASTYLTHVINQDQDWARHTLFIQAEAHHSAYLPTRLRDYFVHNTGFLSLSYTDSVCANCDECNDPTGWSNGSLVRDVFERANPGQVCQDISMTFRGQFVVSAQRMRAANLDLLKDLRNQVDTDLDFGFPLERLYGIMFGCPTISERCPTILSGYLGNVRDVADCQCLDAEHNVLQM

SEQ ID NO: 36111 - DNA, 1917 bp, Muscodor strobelii
  misc_feature: SGI cDNA ID NO. 572515
  misc_feature: Encodes the peptide sequence at SEQ ID NO 36112
atgtccgattcacctcgtcgtttcacatacgaggctcttagccccggccagattcgattactcttttcggatgtccagaacgacagggtaatatggacgctcaaagcagtacagctgcgtagcaacacgtcacaagtgtccatagccttcgatgcattatcatatacatggggagatcagagtcacacctttcctttcatctgcaaccgccaagagctccgcatccaccagcacttgagggatgccctcccctacctcgctaggcggcaatccgccttgcctatatggattgatgccgtctgtatcgaccagtcgaacaatgtcgagaagttcgatcagatccgaatgatgcatagcatctatcgccaggcgacacagacatggatttggttgggctgcggtgccgaacatggcagagaagccgccaaactattacccaaggtaggtagagttgggaaagagcttgaaatgcgcaagagaagatcggatgacacattgcctcgagattatacgactctaccagacgcgtcgtctccagtctggaaatctataaaggagcttacacagaatgaatggttcaaccggttatggatagtacaggaggccgcgctagcgaaacgcatccgcgtcctatatgaggatcaggagatcgactgggacgtcctccaaaaagcggtgtaccacgggtggaatatagaagagatcagacgccgagatctaaatttagagagagacgccgttttcaataacgacacggtcttccttgtccgcgaacaagtgcaaaactctgatgaggctccgtggccgaatcgtcttctcgccattcttaggctcacgacggatatgaaccggtgctttgatcctcgcgaccgggttttcggccatcttggcctcatcgctgaagatcagcttcaacagctagggctcgggaatgacatgcctatagaagaactctacttgagacttacgcgttttcttctgagtaacgggtcccagtcataccagaattggtgggatatactgcagcttgccactgctacagataagatgcctgggttgcccagttggtgtccggactaccatagctggagccagataccgcctcgaatcaggaacaccgaagagccggtgtacttggagggctgggtaaataattaccgtgcaagtagagcaatgtcctccgcccaacagactgccaacttccgtgagctaaaagtacgaggcaagatcttcgactcggtcaaacgaacgtaccccgtcattccagatatcgcgatagcgatgggcgagctaggttctcttgaagaactccaacaattatatctcatattccgtgattgggagctggctattgcaaccgatgtcctgggctcggactcgtctaaccttcccaacgacccgtcttccgaactcgaatatcttggagaacgccacttacatgtaccagtagataagtactggcgtacactgatcgggaacatcactgaaaggggaggatatgccctgaattacgagacgtttctctcccttcggtcggctcttgatcaatggtttcaacaagggcccggaggaggcagcgacgtagagccggagaaagcgagtagtgatctttggaaagacctccttgaccgtgatacgcctacttttcaattcctcaaggctatcctatccgtcctccgcggtatgcgattattccgcaccctcgccggcgggtttggttttggccggaaggagattcaagttaacgaccaaatctgcgtgctaaataacgcaggcacaacacatgtggtgcggcgatggtcgaaaacgaaaaggaggaagacattcaggatagtcggtgatgcttattatcacggcatgatgaatggtgagatagagtcaatggggttcccggaacaggatatcgtacttgtctga

SEQ ID NO: 36112 - protein, 638 aa, Muscodor strobelii
  misc_feature: SGI Peptide ID NO. 572515
  misc_feature (50)..(201): Pfam Id: PF06985 Pfam Desc: Heterokaryon incompatibility protein (HET)
  misc_feature (8)..(638): NCBI GI: 169599709 Blast Desc: SNOG_02678 [Phaeosphaeria nodorum SN15] gi|111068289|gb|EAT89409.1| SNOG_02678 [Phaeosphaeria nodorum SN15]
  misc_feature (8)..(637): NCBI GI: 189197041 Blast Desc: conserved [Pyrenophora tritici-repentis Pt-1C-BFP] gi|187980806|gb|EDU47432.1| conserved [Pyrenophora tritici-repentis Pt-1C-BFP]
  misc_feature (9)..(623): NCBI GI: 256724019 Blast Desc: NECHADRAFT_86353 [Nectria haematococca mpVI 77-13-4]
  misc_feature (37)..(625): NCBI GI: 225683598 Blast Desc: [Paracoccidioides brasiliensis Pb03]
  misc_feature (37)..(625): NCBI GI: 226287224 Blast Desc: conserved [Paracoccidioides brasiliensis Pb18]
  misc_feature (8)..(637): NCBI GI: 119179507 Blast Desc: CIMG_08498 [Coccidioides immitis RS]
  misc_feature (48)..(417): NCBI GI: 238498684 Blast Desc: conserved [Aspergillus flavus NRRL3357] gi|220693851|gb|EED50196.1| conserved [Aspergillus flavus NRRL3357]
  misc_feature (50)..(638): NCBI GI: 39976177 Blast Desc: MGG_05985 [Magnaporthe grisea 70-15] gi|145011741|gb|EDJ96397.1| MGG_05985 [Magnaporthe grisea 70-15]
  misc_feature (8)..(637): NCBI GI: 240110131 Blast Desc: Heterokaryon incompatibility protein, [Coccidioides posadasii C735 delta SOWgp]
  misc_feature (9)..(360): NCBI GI: 46127485 Blast Desc: FG08120.1 [Gibberella zeae PH-1]
MSDSPRRFTYEALSPGQIRLLFSDVQNDRVIWTLKAVQLRSNTSQVSIAFDALSYTWGDQSHTFPFICNRQELRIHQHLRDALPYLARRQSALPIWIDAVCIDQSNNVEKFDQIRMMHSIYRQATQTWIWLGCGAEHGREAAKLLPKVGRVGKELEMRKRRSDDTLPRDYTTLPDASSPVWKSIKELTQNEWFNRLWIVQEAALAKRIRVLYEDQEIDWDVLQKAVYHGWNIEEIRRRDLNLERDAVFNNDTVFLVREQVQNSDEAPWPNRLLAILRLTTDMNRCFDPRDRVFGHLGLIAEDQLQQLGLGNDMPIEELYLRLTRFLLSNGSQSYQNWWDILQLATATDKMPGLPSWCPDYHSWSQIPPRIRNTEEPVYLEGWVNNYRASRAMSSAQQTANFRELKVRGKIFDSVKRTYPVIPDIAIAMGELGSLEELQQLYLIFRDWELAIATDVLGSDSSNLPNDPSSELEYLGERHLHVPVDKYWRTLIGNITERGGYALNYETFLSLRSALDQWFQQGPGGGSDVEPEKASSDLWKDLLDRDTPTFQFLKAILSVLRGMRLFRTLAGGFGFGRKEIQVNDQICVLNNAGTTHVVRRWSKTKRRKTFRIVGDAYYHGMMNGEIESMGFPEQDIVLV

SEQ ID NO: 36113 - DNA, 2190 bp, Muscodor strobelii
  misc_feature: SGI cDNA ID NO. 572516
  misc_feature: Encodes the peptide sequence at SEQ ID NO 36114
atgcggtgggcagacatcattctcgacgtagccgctgtggctaaggcttcgagatctgtggccgtgaagcatctggagctgcgtgctgggcagatcgagagatatggacggacgtcgagtattatcaggtctctaagagatgcgactgcgcagactcaaactcagagcaagagacctgatgaggcaacaaaagctccagacaatgcgaccacggaggctcgaacatcgtatgaaacttcacgccctgaagcttcccgaaacttgttccagcatgatcaatctgcggtccataaaaatacgattcagccacctgagcaaagcgaaatcctgtcacgcataagagacaaagctcaagcaagtcatgatgtcgacccagttcaacaggaagatgtcccttcggatgtgaatatcaacatctttcacacgaaccgcggatcgtcaatggtagatggtgctaagggattgggtctgaaaccaaagccgaaggtgccgtcgtcgacgcctagctggttcaaggactttgggcacgataagccaaaggaggaacgtcagcctgcgaagccactgccgtctatctcgaaagtgggccgatcgcctcttgagcagagcgctgtagaggctgatgttgcgattgcgagcccggtaatgggcaacttacctacgttagatccaaaggccgagacagaaacacggaaggcacctcagactacagatgtgaaggaacgcgcaagcgaaaagatagaggaagagaacacgaaagctgtgaaggaaatattgagcagagaagaagcaaaagaagccaaaatcgcaaaggaagagcccgtctctgcatcaggagtggaaccagaagtaccagcatacgtgctccgagaatcaaaagtcccagcaactcgactcagtaggatatggaactactctggtctcgcagccggtatgctaggtggcgctctcaccgaaggtctcagtagaggattcggcggaggtggcgaaggctccgtcatgttcagtgcagggaacatggagaggcttgtcgcgaaactctcacgtatgcgcggcgcagcgctgaaactcggccagatgatgagtttccaagattcgaagatgctacccgcgcccatccgagaggtcctacagcgagtccaggacagagcagattacatgcccgcatggcaacgggaccgcgtgctgaccgaaagtcttggaccggagtggagagatgtatttggagagttcgaggaaacgcccatagccgctgcgtcgatcggacaagtccaccgcgcgacgctcaaaaccggcgaaaaagtggctgtcaaaattcaattccccggcgtcgcagactcgataaactccgatctagataacctctccatgctcctcaccgcttcaaagatgttgcctaagggtctatatctcaacaaaacaatcgacaacgctcgtactgaactcggctgggaatgcgactacgcgcgtgaattagagtgtggaaagagatacaaagctctgctcgaagacgaagggagtgtttttgtgatcccggagatctatgcacatgcctcggggaaacatgtactcaccatgcagttcatggagggagttggtgttacgagagtcaagtccttcacccaggaacagagggactggattggcacacagattctgaggttgtgtctgagggagattgcggagtttaggttcatgcagactgatcctaattggacgaatttcctgtataacgccaatacgaacaagcttgagctcctagactttggcgcttcgagagaattccccgaggaattcgtagcgcagtatctatctctcctcgcagctgccgcgcgcagagacagagaagcagtcatcgacttctcgcaacgactgggttatctaacgggccacgaaagccgcacgatgttggatgcgcatgtggcgagtatacttacgctcgctgagccgttcttacagtctgctcctgaggtgtatgattttgcggaccagacgattactgagagggttagggatctgatacccgtcatggttagggaaagactgagcccgccgcctgaggagacgtatagtcttcatcggaagctgagcggtgcgtttttgctttgtgctaggttggggagtagggttgcttgtaggggtttgtttgaggatgcgctgaagaagacggagttggatgttgttcgatag

SEQ ID NO: 36114 - protein, 729 aa, Muscodor strobelii
  misc_feature: SGI Peptide ID NO. 572516
  misc_feature (398)..(515): Pfam Id: PF03109 Pfam Desc: ABC1 family
  misc_feature (1)..(722): NCBI GI: 256731295 Blast Desc: NECHADRAFT_84626 [Nectria haematococca mpVI 77-13-4]
  misc_feature (1)..(722): NCBI GI: 46126039 Blast Desc: FG07397.1 [Gibberella zeae PH-1]
  misc_feature (267)..(725): NCBI GI: 156034551 Blast Desc: SS1G_13210 [Sclerotinia sclerotiorum 1980] gi|154698614|gb|EDN98352.1| SS1G_13210 [Sclerotinia sclerotiorum 1980]
  misc_feature (1)..(723): NCBI GI: 171693689 Blast Desc: protein product [Podospora anserina] gi|170946793|emb|CAP73597.1| protein product [Podospora anserina]
  misc_feature (250)..(724): NCBI GI: 85101761 Blast Desc: NCU03823 [Neurospora crassa OR74A] gi|11595643|emb|CAC18263.1| abc1 protein precursor [Neurospora crassa] gi|28922753|gb|EAA31976.1| NCU03823 [Neurospora crassa
  misc_feature (1)..(725): NCBI GI: 39978109 Blast Desc: MGG_06939 [Magnaporthe grisea 70-15] gi|145013487|gb|EDJ98128.1| MGG_06939 [Magnaporthe grisea 70-15]
  misc_feature (1)..(725): NCBI GI: 16304010 Blast Desc: AF420471_1 ABC1 protein [Magnaporthe grisea]
  misc_feature (7)..(722): NCBI GI: 67540804 Blast Desc: AN6572.2 [Aspergillus nidulans FGSC A4] gi|40738722|gb|EAA57912.1| AN6572.2 [Aspergillus nidulans FGSC A4] gi|259480145|tpe|CBF71009.1| TPA: molecular chaperone (ABC1),
  misc_feature (7)..(725): NCBI GI: 145250239 Blast Desc: An15g00930 [Aspergillus niger] gi|134082149|emb|CAK42263.1| protein product [Aspergillus niger]
  misc_feature (7)..(722): NCBI GI: 242823783 Blast Desc: molecular chaperone (ABC1), [Talaromyces stipitatus ATCC 10500] gi|218713050|gb|EED12475.1| molecular chaperone (ABC1), [Talaromyces stipitatus ATCC 10500]
MRWADIILDVAAVAKASRSVAVKHLELRAGQIERYGRTSSIIRSLRDATAQTQTQSKRPDEATKAPDNATTEARTSYETSRPEASRNLFQHDQSAVHKNTIQPPEQSEILSRIRDKAQASHDVDPVQQEDVPSDVNINIFHTNRGSSMVDGAKGLGLKPKPKVPSSTPSWFKDFGHDKPKEERQPAKPLPSISKVGRSPLEQSAVEADVAIASPVMGNLPTLDPKAETETRKAPQTTDVKERASEKIEEENTKAVKEILSREEAKEAKIAKEEPVSASGVEPEVPAYVLRESKVPATRLSRIWNYSGLAAGMLGGALTEGLSRGFGGGGEGSVMFSAGNMERLVAKLSRMRGAALKLGQMMSFQDSKMLPAPIREVLQRVQDRADYMPAWQRDRVLTESLGPEWRDVFGEFEETPIAAASIGQVHRATLKTGEKVAVKIQFPGVADSINSDLDNLSMLLTASKMLPKGLYLNKTIDNARTELGWECDYARELECGKRYKALLEDEGSVFVIPEIYAHASGKHVLTMQFMEGVGVTRVKSFTQEQRDWIGTQILRLCLREIAEFRFMQTDPNWTNFLYNANTNKLELLDFGASREFPEEFVAQYLSLLAAAARRDREAVIDFSQRLGYLTGHESRTMLDAHVASILTLAEPFLQSAPEVYDFADQTITERVRDLIPVMVRERLSPPPEETYSLHRKLSGAFLLCARLGSRVACRGLFEDALKKTELDVVR

SEQ ID NO: 36115 - DNA, 2482 bp, Muscodor strobelii
  misc_feature: SGI EST ID NO. CUFF.85985.0
  misc_feature: Variant of the nucleotide sequence at SEQ ID NO 36113
tgacgctcttcaacatccattcattccatggtaaacctgcctggagtcttccaattccctgaatggaggttgtgaaacttgtacgatcgtataagatgagatgagataaacgtgcaaatgcggtgggcagacatcattctcgacgtagccgctgtggctaaggcttcgagatctgtggccgtgaagcatctggagctgcgtgctgggcagatcgagagatatggacggacgtcgagtattatcaggtctctaagagatgcgactgcgcagactcaaactcagagcaagagacctgatgaggcaacaaaagctccagacaatgcgaccacggaggctcgaacatcgtatgaaacttcacgccctgaagcttcccgaaacttgttccagcatgatcaatctgcggtccataaaaatacgattcagccacctgagcaaagcgaaatcctgtcacgcataagagacaaagctcaagcaagtcatgatgtcgacccagttcaacaggaagatgtcccttcggatgtgaatatcaacatctttcacacgaaccgcggatcgtcaatggtagatggtgctaagggattgggtctgaaaccaaagccgaaggtgccgtcgtcgacgcctagctggttcaaggactttgggcacgataagccaaaggaggaacgtcagcctgcgaagccactgccgtctatctcgaaagtgggccgatcgcctcttgagcagagcgctgtagaggctgatgttgcgattgcgagcccggtaatgggcaacttacctacgttagatccaaaggccgagacagaaacacggaaggcacctcagactacagatgtgaaggaacgcgcaagcgaaaagatagaggaagagaacacgaaagctgtgaaggaaatattgagcagagaagaagcaaaagaagccaaaatcgcaaaggaagagcccgtctctgcatcaggagtggaaccagaagtaccagcatacgtgctccgagaatcaaaagtcccagcaactcgactcagtaggatatggaactactctggtctcgcagccggtatgctaggtggcgctctcaccgaaggtctcagtagaggattcggcggaggtggcgaaggctccgtcatgttcagtgcagggaacatggagaggcttgtcgcgaaactctcacgtatgcgcggcgcagcgctgaaactcggccagatgatgagtttccaagattcgaagatgctacccgcgcccatccgagaggtcctacagcgagtccaggacagagcagattacatgcccgcatggcaacgggaccgcgtgctgaccgaaagtcttggaccggagtggagagatgtatttggagagttcgaggaaacgcccatagccgctgcgtcgatcggacaagtccaccgcgcgacgctcaaaaccggcgaaaaagtggctgtcaaaattcaattccccggcgtcgcagactcgataaactccgatctagataacctctccatgctcctcaccgcttcaaagatgttgcctaagggtctatatctcaacaaaacaatcgacaacgctcgtactgaactcggctgggaatgcgactacgcgcgtgaattagagtgtggaaagagatacaaagctctgctcgaagacgaagggagtgtttttgtgatcccggagatctatgcacatgcctcggggaaacatgtactcaccatgcagttcatggagggagttggtgttacgagagtcaagtccttcacccaggaacagagggactggattggcacacagattctgaggttgtgtctgagggagattgcggagtttaggttcatgcagactgatcctaattggacgaatttcctgtataacgccaatacgaacaagcttgagctcctagactttggcgcttcgagagaattccccgaggaattcgtagcgcagtatctatctctcctcgcagctgccgcgcgcagagacagagaagcagtcatcgacttctcgcaacgactgggttatctaacgggccacgaaagccgcacgatgttggatgcgcatgtggcgagtatacttacgctcgctgagccgttcttacagtctgctcctgaggtgtatgattttgcggaccagacgattactgagagggttagggatctgatacccgtcatggttagggaaagactgagcccgccgcctgaggagacgtatagtcttcatcggaagctgagcggtgcgtttttgctttgtgctaggttggggagtagggttgcttgtaggggtttgtttgaggatgcgctgaagaagacggagttggatgttgttcgatagatggtggtgaatggaagaggattgtatgactgtgtataggggcttgtaaagtaatcactgcttagactgtattgtatgtattatacgatgaaaataatatatcgctatatatagatggtgtgaaaggatattgtaatacctagaataatacctagaatctgtactatgtgacccc

SEQ ID NO: 36116 - DNA, 2721 bp, Muscodor strobelii
  misc_feature: SGI cDNA ID NO. 572517
  misc_feature: Reduced expression when VOC is produced
  misc_feature: Encodes the peptide sequence at SEQ ID NO 36117
atggccaacaaggcgccgttcaagacaacgttcgaagcgaccgaggtcattcggccggtgttcacgggaggagcagtggccattgagaacggcgcccgcatcctggccactaccctcggagaagatgcgattctcaccgatctgaagacggggaaacacgtagccaaaatcgaaggggatggagaatctatatctaccctgactttgacgccgtccggctcccacctcataatatgctcccgctccttgtccatgcgcatattctccctgcagaccacgcccggcgccgaatcgatagagccacagctcgtgcgcaccgtccgacctcaccccacccccgtcgtcgtcctcgccgtcgaccacacgagcacgctgctcgcaactggcggcaccgacggctccatcaaagtctgggacatccgcggaggctacgtcacccacaccttccgtggtccgagcgtgcttgtatccgccctcctcttcttcgagctggcagcagacgcgaacaagcacagcagtgccaaagactctgacaagagaaaaagacggaactccaaatctacccagaacaacaacgatgacgacgacgaagctgcggcgacggcaaggttcagattggcttcaggaagccaagacggcaaagtccgcgtatgggacttgcacaagagaagcgtcatagccaacctggactcccacgtctcggatgttcagggcctcgacttctccccggcacaaaatgcattggtatcagcttcaagagacaagacgattcgatggtgggatgcaaagtcttggaagccccgaaaagtcatcccgtgtttcgagctggtcgaggccgtgggcttcattggcaacggcgacttgacttacacagccggctcaaatggatgcttgcggatatggcagaccgacaccggccgtgagctgaccaaggagcaaaagcccaagcccgaagccgaagcttttgttgctgccgtgtacagacctggttttccatttatcgcctgcgtccaagtcgaccacaccttagctttcttcaatacccctgaagacgatacagcctctgcgatcaccccgcctgaaccatttcggcgtatctcaggaacacatgatgatataatcgatctccgatatctactgcctgaccattctctcatggccttagccacgaactccgaggatatcaggatagtatcggtatcggaaccaaacactgtatcagatacacaagcatctccagaatgttttggacaagatatggctttgcttaaaggccacgatgatatcatcatcacactcgatgtcgactggtctggtcactgggtcgccacaggcgcgaaagataacatggcaagagtatggcggatagatcctaagaaccactcttacacatgttgggcaacgttccagggacacgctgagtctgtaagcgccgtggctttaccacgagcacggcccgtcgagggttccaaagctcatgcagatcccttgagctatccaccgcaatacctgatcacaggatcttcggatcagaccatcaagcgatgggacataccgaaggaacaacaggccaacgcgaaatcaggacttcgcgcctcatacacgcgaaaagctcatgataaggacatcaacgcaattgatgtgagcaataacgcgcaactatttgcttctgcttcacaagataaactggtcaagatctggtcaattgaagaaggcgaggttcaagggattctccgtggacatcgtcgaggtgtctggtccgtgtgctttgctccgcttaacacaccggtactacaaggtgaacagggttctgtagctggcaaaggtgtcgcgatcactgggagcggtgataagactatcaaattatggagtctcactgattacacttgcttgaggactttcgagggccactccaacagtgtgctaaaggtagcgtggttaaatattccaccacccgaggagcgatctaagaaacctatcctcattaccagtgccggtggtgacggtttggtcaaagtgtgggatgttaactcgggagaaaacgaatgcactctcgataatcatgaggatagggtgtgggctgttgctgttcatccagatacgaacatgatcgtatctggaagtggagattctactgtcacgttttggaaagacacgtcggcagagacgcagaccgcttcgaacgaggcagctctcaaagtcatcgagcaagagcaagagcttgagaactacgaatttgcaggagcttatcgtgaggccatcactttagccttgcaactcaaccaccctcgcaaactccagaatctttttgaaaaggttgtaaattccacaactaccgatgccggcagtctgtcaggtctcaaggctgtcgacgaagtcattgctagcctctcagacgagcaactcttcctactattactacgactacgagactggaacacaaatgcgagaacagcgccaatggcgcagcgtatcttgtggacggtagtgaaaagctaccctgtcagccgattgtctggcctctctgtaaaagggatgaagggtcaaaagagcgtcaaggaagtgttgaatgctctaaaagtctacacggaaagacattacaagcgtatggaggaattagttgacgaaagttatttggtcgaatataccctgagagagataagcagtctaggaaacttgacgttggttgaggagaaagatggagatgttattatgacatag

SEQ ID NO: 36117 - protein, 906 aa, Muscodor strobelii
  misc_feature: SGI Peptide ID NO. 572517
  misc_feature (572)..(624): Pfam Id: PF00400 Pfam Desc: WD domain, G-beta repeat
  misc_feature (679)..(717): Pfam Id: PF00400 Pfam Desc: WD domain, G-beta repeat
  misc_feature (223)..(261): Pfam Id: PF00400 Pfam Desc: WD domain, G-beta repeat
  misc_feature (628)..(675): Pfam Id: PF00400 Pfam Desc: WD domain, G-beta repeat
  misc_feature (101)..(139): Pfam Id: PF00400 Pfam Desc: WD domain, G-beta repeat
  misc_feature (530)..(568): Pfam Id: PF00400 Pfam Desc: WD domain, G-beta repeat
  misc_feature (463)..(517): Pfam Id: PF00400 Pfam Desc: WD domain, G-beta repeat
  misc_feature (143)..(219): Pfam Id: PF00400 Pfam Desc: WD domain, G-beta repeat
  misc_feature (417)..(455): Pfam Id: PF00400 Pfam Desc: WD domain, G-beta repeat
  misc_feature (738)..(888): Pfam Id: PF08625 Pfam Desc: Utp13 specific WD40 associated domain
  misc_feature (85)..(854): NCBI GI: 169601424 Blast Desc: SNOG_03577 [Phaeosphaeria nodorum SN15] gi|160705928|gb|EAT88782.2| SNOG_03577 [Phaeosphaeria nodorum SN15]
  misc_feature (3)..(892): NCBI GI: 238844707 Blast Desc: U3 small nucleolar RNA-associated protein 13 [Microsporum canis CBS 113480]
  misc_feature (3)..(887): NCBI GI: 145256911 Blast Desc: An04g01900 [Aspergillus niger] gi|134058468|emb|CAL00677.1| protein product [Aspergillus niger]
  misc_feature (3)..(888): NCBI GI: 261201498 Blast Desc: small nucleolar ribonucleoprotein complex subunit [Ajellomyces dermatitidis SLH14081] gi|239592208|gb|EEQ74789.1| small nucleolar ribonucleoprotein complex subunit [Ajellomyces
  misc_feature (3)..(888): NCBI GI: 239611634 Blast Desc: small nucleolar ribonucleoprotein complex subunit [Ajellomyces dermatitidis ER-3]
  misc_feature (8)..(902): NCBI GI: 242808692 Blast Desc: small nucleolar ribonucleoprotein complex subunit, [Talaromyces stipitatus ATCC 10500] gi|218715844|gb|EED15266.1| small nucleolar ribonucleoprotein complex subunit, [Talaromyces
  misc_feature (1)..(905): NCBI GI: 256731396 Blast Desc: NECHADRAFT_96240 [Nectria haematococca mpVI 77-13-4]
  misc_feature (1)..(905): NCBI GI: 46124821 Blast Desc: FG06788.1 [Gibberella zeae PH-1]
  misc_feature (1)..(905): NCBI GI: 261355570 Blast Desc: U3 small nucleolar RNA-associated protein [Verticillium albo-atrum VaMs.102]
  misc_feature (1)..(901): NCBI GI: 156061887 Blast Desc: SS1G_03089 [Sclerotinia sclerotiorum 1980] gi|154700490|gb|EDO00229.1| SS1G_03089 [Sclerotinia sclerotiorum 1980]
  misc_feature: Useful for introducing or modulating the production of volatile compounds
MANKAPFKTTFEATEVIRPVFTGGAVAIENGARILATTLGEDAILTDLKTGKHVAKIEGDGESISTLTLTPSGSHLIICSRSLSMRIFSLQTTPGAESIEPQLVRTVRPHPTPVVVLAVDHTSTLLATGGTDGSIKVWDIRGGYVTHTFRGPSVLVSALLFFELAADANKHSSAKDSDKRKRRNSKSTQNNNDDDDEAAATARFRLASGSQDGKVRVWDLHKRSVIANLDSHVSDVQGLDFSPAQNALVSASRDKTIRWWDAKSWKPRKVIPCFELVEAVGFIGNGDLTYTAGSNGCLRIWQTDTGRELTKEQKPKPEAEAFVAAVYRPGFPFIACVQVDHTLAFFNTPEDDTASAITPPEPFRRISGTHDDIIDLRYLLPDHSLMALATNSEDIRIVSVSEPNTVSDTQASPECFGQDMALLKGHDDIIITLDVDWSGHWVATGAKDNMARVWRIDPKNHSYTCWATFQGHAESVSAVALPRARPVEGSKAHADPLSYPPQYLITGSSDQTIKRWDIPKEQQANAKSGLRASYTRKAHDKDINAIDVSNNAQLFASASQDKLVKIWSIEEGEVQGILRGHRRGVWSVCFAPLNTPVLQGEQGSVAGKGVAITGSGDKTIKLWSLTDYTCLRTFEGHSNSVLKVAWLNIPPPEERSKKPILITSAGGDGLVKVWDVNSGENECTLDNHEDRVWAVAVHPDTNMIVSGSGDSTVTFWKDTSAETQTASNEAALKVIEQEQELENYEFAGAYREAITLALQLNHPRKLQNLFEKVVNSTTTDAGSLSGLKAVDEVIASLSDEQLFLLLLRLRDWNTNARTAPMAQRILWTVVKSYPVSRLSGLSVKGMKGQKSVKEVLNALKVYTERHYKRMEELVDESYLVEYTLREISSLGNLTLVEEKDGDVIMT

SEQ ID NO: 36118 - DNA, 3182 bp, Muscodor strobelii
  misc_feature: SGI EST ID NO. CUFF.85989.0
  misc_feature: Variant of the nucleotide sequence at SEQ ID NO 36116
atcgcaatcgctatcctgcccaaaaatttcccgaacatcccactctgcctgcttaagacttggatctcatgaatgagccctgtctactccaaagctaagaacggtattgtatacgatgtcgactgcgcgttgagtgtgccgccactcgacatctcaccatggccaacaaggcgccgttcaagacaacgttcgaagcgaccgaggtcattcggccggtgttcacgggaggagcagtggccattgagaacggcgcccgcatcctggccactaccctcggagaagatgcgattctcaccgatctgaagacggggaaacacgtagccaaaatcgaaggggatggagaatctatatctaccctgactttgacgccgtccggctcccacctcataatatgctcccgctccttgtccatgcgcatattctccctgcagaccacgcccggcgccgaatcgatagagccacagctcgtgcgcaccgtccgacctcaccccacccccgtcgtcgtcctcgccgtcgaccacacgagcacgctgctcgcaactggcggcaccgacggctccatcaaagtctgggacatccgcggaggctacgtcacccacaccttccgtggtccgagcgtgcttgtatccgccctcctcttcttcgagctggcagcagacgcgaacaagcacagcagtgccaaagactctgacaagagaaaaagacggaactccaaatctacccagaacaacaacgatgacgacgacgaagctgcggcgacggcaaggttcagattggcttcaggaagccaagacggcaaagtccgcgtatgggacttgcacaagagaagcgtcatagccaacctggactcccacgtctcggatgttcagggcctcgacttctccccggcacaaaatgcattggtatcagcttcaagagacaagacgattcgatggtgggatgcaaagtcttggaagccccgaaaagtcatcccgtgtttcgagctggtcgaggccgtgggcttcattggcaacggcgacttgacttacacagccggctcaaatggatgcttgcggatatggcagaccgacaccggccgtgagctgaccaaggagcaaaagcccaagcccgaagccgaagcttttgttgctgccgtgtacagacctggttttccatttatcgcctgcgtccaagtcgaccacaccttagctttcttcaatacccctgaagacgatacagcctctgcgatcaccccgcctgaaccatttcggcgtatctcaggaacacatgatgatataatcgatctccgatatctactgcctgaccattctctcatggccttagccacgaactccgaggatatcaggatagtatcggtatcggaaccaaacactgtatcagatacacaagcatctccagaatgttttggacaagatatggctttgcttaaaggccacgatgatatcatcatcacactcgatgtcgactggtctggtcactgggtcgccacaggcgcgaaagataacatggcaagagtatggcggatagatcctaagaaccactcttacacatgttgggcaacgttccagggacacgctgagtctgtaagcgccgtggctttaccacgagcacggcccgtcgagggttccaaagctcatgcagatcccttgagctatccaccgcaatacctgatcacaggatcttcggatcagaccatcaagcgatgggacataccgaaggaacaacaggccaacgcgaaatcaggacttcgcgcctcatacacgcgaaaagctcatgataaggacatcaacgcaattgatgtgagcaataacgcgcaactatttgcttctgcttcacaagataaactggtcaagatctggtcaattgaagaaggcgaggttcaagggattctccgtggacatcgtcgaggtgtctggtccgtgtgctttgctccgcttaacacaccggtactacaaggtgaacagggttctgtagctggcaaaggtgtcgcgatcactgggagcggtgataagactatcaaattatggagtctcactgattacacttgcttgaggactttcgagggccactccaacagtgtgctaaaggtagcgtggttaaatattccaccacccgaggagcgatctaagaaacctatcctcattaccagtgccggtggtgacggtttggtcaaagtgtgggatgttaactcgggagaaaacgaatgcactctcgataatcatgaggatagggtgtgggctgttgctgttcatccagatacgaacatgatcgtatctggaagtggagattctactgtcacgttttggaaagacacgtcggcagagacgcagaccgcttcgaacgaggcagctctcaaagtcatcgagcaagagcaagagcttgagaactacgaatttgcaggagcttatcgtgaggccatcactttagccttgcaactcaaccaccctcgcaaactccagaatctttttgaaaaggttgtaaattccacaactaccgatgccggcagtctgtcaggtctcaaggctgtcgacgaagtcattgctagcctctcagacgagcaactcttcctactattactacgactacgagactggaacacaaatgcgagaacagcgccaatggcgcagcgtatcttgtggacggtagtgaaaagctaccctgtcagccgattgtctggcctctctgtaaaagggatgaagggtcaaaagagcgtcaaggaagtgttgaatgctctaaaagtctacacggaaagacattacaagcgtatggaggaattagttgacgaaagttatttggtcgaatataccctgagagagataagcagtctaggaaacttgacgttggttgaggagaaagatggagatgttattatgacataggtctccggatgaatcgaatatgtggcagtcaggcgggagtcgaaataaaaggcaccaccgaataccacaatattcaaattggcgaataatacattgaagaatattttagtgatgacccgactaataatatttgcagcgacatatcagacgaccctcgaacatgatagatgattaccatatgaagggatgatgtgctgatgcaatctaacgaggcaaataagagtgccttatcgttcgtccagttaacggcaggatagtgcacgactcaaaccatgcctaagtatcacttgatttcaattcgag

SEQ ID NO: 36119 - DNA, 1737 bp, Muscodor strobelii
  misc_feature: SGI cDNA ID NO. 572518
  misc_feature: Encodes the peptide sequence at SEQ ID NO 36120
atgggtcgcctggagtccctggtgtctctggctttgggacgatcgccttacgacgatgatgttgtagagggcgaaggtgaggatgatcctcacgagccgccgaaacagtacaacgaaaaagggcgcgttacaaatccagatactagacacatcaacagagagctgattcgcgcccacaatgaggtcatgcacgtcattggcgtggccgagcccgagaaccatcacctcactgctcttcagaatacatccgcaaagctgcactatcagtatgagacggatacgggaagacagctgcgccagactgccaacgccatgctcaatgtcggtatgtggggtctctacggtatacggcagcgcaatctggtgtacagagagaccgcgcgtctcccattctatgagatgatgaaacgagaagtcaaaacacattcgccactgcagttatttctaggcggcatgcctgcctctttcaccgcttggtcattacagtacaccactagaagctcagatttgatcaagagcagcaggattctacgagcaataatctcctatgtgcggtttcatctccacatatatgctgctctgcaacagctggatctaattcctagcatccacatctttcccgctctcggatggttcattcctttctcggactcatcgccgttcatggctccgccgccgttatattctgctgaagcacaaagcttatctgaatgggtcggcaagttcgtcataaatctggctccctatgcggcattctacctggctggtcgtattacagatgccatgaggcgtattacgtggcgacacgtccacagatatatcccacagccctggccgggtctggccatgagctctgttcccaattatccacaacatagaccatatgttcctgaatcacccacattaggggcaacggatcatgaaataagacacagagcatctgcggaggtgattccgccggagccattagccgtgaatggggacgacggcgacgatcttgttcccattgatgcaatcagaagacaagggacattctcatctcgggctggagaagactatgccaccgacgatgaagacaccgagatggtaaatcccacgctgataagtttcgatgtagacacgagtgagtcgactgaagcccccgcgggtgtttggtcggctgaactgcgtccaagtgtcaatggcgatcctcgatcacagccaagagagcaacgcacatatctcgttaatgccttgacatgcttaccttcttctcttgctaccagcatcctttctaacaccttgacggggatcctcgtcacaccactcagcatgcttatatggcgcgccatggcgcgtgtcttctcgttgaagtttggactgcccctcgcgaacatatgggaacccagtttaacgagtggtctatcgactcgcatgattctcaacgtcttccagacccaggcgtttatgtttatcacaacctgtgaagtctgggcaatcatcacgctcatggcgcagtactatcatattaccgctgaagagtggaaagaatggcagaaggatattgaacgcgacatcgaacgcgaaatcgaggaggaacttgctgctgaagagcgagctgaggcagagcaaaataatgcagagtctctcgaagacggagagctcaccactataaggaaccacgaggaagccagtgctgaaacaaaccacactcaatctcggcagaccgaggacatgaacgcagagcattctccctag

SEQ ID NO: 36120 - protein, 578 aa, Muscodor strobelii
  misc_feature: SGI Peptide ID NO. 572518
  misc_feature (1)..(504): NCBI GI: 261355571 Blast Desc: conserved [Verticillium albo-atrum VaMs.102]
  misc_feature (1)..(499): NCBI GI: 145612235 Blast Desc: MGG_08177 [Magnaporthe grisea 70-15] gi|145019433|gb|EDK03661.1| MGG_08177 [Magnaporthe grisea 70-15]
  misc_feature (1)..(509): NCBI GI: 116206420 Blast Desc: CHGG_02503 [Chaetomium globosum CBS 148.51] gi|88183100|gb|EAQ90568.1| CHGG_02503 [Chaetomium globosum CBS 148.51]
  misc_feature (1)..(498): NCBI GI: 171693611 Blast Desc: protein product [Podospora anserina] gi|170946754|emb|CAP73558.1| protein product [Podospora anserina]
  misc_feature (1)..(500): NCBI GI: 154311732 Blast Desc: [Botryotinia fuckeliana B05.10] gi|150850836|gb|EDN26029.1| [Botryotinia fuckeliana B05.10]
  misc_feature (3)..(277): NCBI GI: 85102552 Blast Desc: NCU03627 [Neurospora crassa OR74A] gi|12718390|emb|CAC28698.1| [Neurospora crassa] gi|28922898|gb|EAA32118.1| [Neurospora crassa OR74A]
  misc_feature (324)..(510): NCBI GI: 256731010 Blast Desc: NECHADRAFT_48505 [Nectria haematococca mpVI 77-13-4]
  misc_feature (325)..(505): NCBI GI: 46124819 Blast Desc: FG06787.1 [Gibberella zeae PH-1]
  misc_feature (1)..(151): NCBI GI: 46124819 Blast Desc: FG06787.1 [Gibberella zeae PH-1]
  misc_feature (1)..(166): NCBI GI: 256731010 Blast Desc: NECHADRAFT_48505 [Nectria haematococca mpVI 77-13-4]
MGRLESLVSLALGRSPYDDDVVEGEGEDDPHEPPKQYNEKGRVTNPDTRHINRELIRAHNEVMHVIGVAEPENHHLTALQNTSAKLHYQYETDTGRQLRQTANAMLNVGMWGLYGIRQRNLVYRETARLPFYEMMKREVKTHSPLQLFLGGMPASFTAWSLQYTTRSSDLIKSSRILRAIISYVRFHLHIYAALQQLDLIPSIHIFPALGWFIPFSDSSPFMAPPPLYSAEAQSLSEWVGKFVINLAPYAAFYLAGRITDAMRRITWRHVHRYIPQPWPGLAMSSVPNYPQHRPYVPESPTLGATDHEIRHRASAEVIPPEPLAVNGDDGDDLVPIDAIRRQGTFSSRAGEDYATDDEDTEMVNPTLISFDVDTSESTEAPAGVWSAELRPSVNGDPRSQPREQRTYLVNALTCLPSSLATSILSNTLTGILVTPLSMLIWRAMARVFSLKFGLPLANIWEPSLTSGLSTRMILNVFQTQAFMFITTCEVWAIITLMAQYYHITAEEWKEWQKDIERDIEREIEEELAAEERAEAEQNNAESLEDGELTTIRNHEEASAETNHTQSRQTEDMNAEHSP

SEQ ID NO: 36121 - DNA, 3101 bp, Muscodor strobelii
  misc_feature: SGI EST ID NO. CUFF.85991.0
  misc_feature: Variant of the nucleotide sequence at SEQ ID NO 36119
cttagatcgtgattgtttactctgataagacctttgagaagtattggtcggtgaatcacttgctcaaaatcagctagaaatagggggctcgttgatgttcactgtcaacttaacgccaaaagcagctcttccattttgtagaaagaatgtgactcttgcaccccctcaaataacaataacaacacatacgcatataatttccagatcctggattgcatgaatgggactatgacctgcctcgctcaaactgcggctctttgacgcgagctgtcgttgtccgaactacaacgtctttcccgaagaattctgtatccaggcactggccaaccctacgtctcaacggtcaacccaccctttagctgatcgcacacttggatgagtaccataccttggtacggctaggctttctcgcgtcatgggtcgcctggagtccctggtgtctctggctttgggacgatcgccttacgacgatgatgttgtagagggcgaaggtgaggatgatcctcacgagccgccgaaacagtacaacgaaaaagggcgcgttacaaatccagatactagacacatcaacagagagctgattcgcgcccacaatgaggtcatgcacgtcattggcgtggccgagcccgagaaccatcacctcactgctcttcagaatacatccgcaaagctgcactatcagtatgagacggatacgggaagacagctgcgccagactgccaacgccatgctcaatgtcggtatgtggggtctctacggtatacggcagcgcaatctggtgtacagagagaccgcgcgtctcccattctatgagatgatgaaacgagaagtcaaaacacattcgccactgcagttatttctaggcggcatgcctgcctctttcaccgcttggtcattacagtacaccactagaagctcagatttgatcaagagcagcaggattctacgagcaataatctcctatgtgcggtttcatctccacatatatgctgctctgcaacagctggatctaattcctagcatccacatctttcccgctctcggatggttcattcctttctcggactcatcgccgttcatggctccgccgccgttatattctgctgaagcacaaagcttatctgaatgggtcggcaagttcgtcataaatctggctccctatgcggcattctacctggctggtcgtattacagatgccatgaggcgtattacgtggcgacacgtccacagatatatcccacagccctggccgggtctggccatgagctctgttcccaattatccacaacatagaccatatgttcctgaatcacccacattaggggcaacggatcatgaaataagacacagagcatctgcggaggtgattccgccggagccattagccgtgaatggggacgacggcgacgatcttgttcccattgatgcaatcagaagacaagggacattctcatctcgggctggagaagactatgccaccgacgatgaagacaccgagatggtaaatcccacgctgataagtttcgatgtagacacgagtgagtcgactgaagcccccgcgggtgtttggtcggctgaactgcgtccaagtgtcaatggcgatcctcgatcacagccaagagagcaacgcacatatctcgttaatgccttgacatgcttaccttcttctcttgctaccagcatcctttctaacaccttgacggggatcctcgtcacaccactcagcatgcttatatggcgcgccatggcgcgtgtcttctcgttgaagtttggactgcccctcgcgaacatatgggaacccagtttaacgagtggtctatcgactcgcatgattctcaacgtcttccagacccaggcgtttatgtttatcacaacctgtgaagtctgggcaatcatcacgctcatggcgcagtactatcatattaccgctgaagagtggaaagaatggcagaaggatattgaacgcgacatcgaacgcgaaatcgaggaggaacttgctgctgaagagcgagctgaggcagagcaaaataatgcagagtctctcgaagacggagagctcaccactataaggaaccacgaggaagccagtgctgaaacaaaccacactcaatctcggcagaccgaggacatgaacgcagagcattctccctagtatgagttgcctgcaactgtctttgatttacggtcaacggcgatagaagcgatagaggcgtcagaggcgccgtaccacctgcatccattggatgcgtctacgcgcgggagattgcaggcgaatgaggctttcgtatatccgatgccaccacgaggcttcccgatccggcaccctgatggcgaatttcatgcattcaaccgcgtgtttgcaagaaatcgtttgcgggcatacattgattcacatcgggcagagacatctgcgactgatgccgaaaatgaagacatggaatatatcgatggcttgaggctctttcaagcttggagccgtcaaccatagcaattgagcggcttgctcatcacagctagagttgctcctgtatgctatatttgtacaatagtctagactggctgcatgtacttctagaagatgtgtcctgtgacccagtagtatggaatgcctttctcaatcgcgatctcctaaactgggtaatgatctagcccatgtcttagggctgacttgatgagcgagagtcagggtccagaatgaaaccgaatttgatgtgttcactttctacatatcagacgggggcataaggagtagaaggaagcactagagaagaactaagtatttgctacaaggtcgcacctagggtaatgcaataaaaggtgccccaccagtcgtaaaagggaagtcctaggacttttcgtagggctgatacgaagcattcctcgatgtcttccatccctattctatgtgccacctgaaacttggggcgaaggaatggcggccatttccgtttgccgctggaggaacaacgtggcagaaacactaaactgcgaccagcgggaaccataaatctagctagacttgctagaattaaagaccaacattgaagcaaaaaaccagccttcatcgcacttggcgacatcgcacagtttatgaggcgaat

SEQ ID NO: 36122 - DNA, 1593 bp, Muscodor strobelii
  misc_feature: SGI cDNA ID NO. 572519
  misc_feature: Encodes the peptide sequence at SEQ ID NO 36123
atgagttcacaagaagagtctcaatacaccaattacccagaggtcgccacccacgctcatttacacagatatggcgacgcgccggaggtagtccctgatcagggactgatgcaatattacgatccgtcgaaaccaggctcggctggaggcataccgcccgtcgggagcccacaacagacggtttactctgccgatggatcacaatatggctatcaacattcagcatatccaccatcagcttatcccgcggatgcggccggctctcaatatcccgaggtagtagaagagaagaaaccggcagcggcggcaacgatatgcggcatcaagaggacattatttttcatcatattagccgcggccataatcataatcggggtcgccgtcggcgttggagtaggcgtatcacaagggtcgaagaataattccaagggcacaagtaacggaggaagcggagatggcgataatggaagcggaagcgggaacgggaacggcgggaatggtaccagctcatctaacgacaccgcgacttcgccagtatcattgctgccacaaacgcagctcgctaccgcgaatttcaccgacatgtacaacaacgagaactacatggtaatatatcagacgaatgacctatcgatcgtgatgtcgtctttcaactcttcgaacgataaatgggtcgtttcgaccatcgccaatggcacagacggtggcatactacacggcaccgccttgtcgatgagcactttctggactggcgataccaccagccccgtagtgaatgtcttctaccagactgatggatcaacgacgaacgtcaaagcattgagctatgcctcagacaacaacatctcgaccacctcggtagtacccgaggaacagtgggcgagcgtcgacactaccgatgtccagtcaacccctggctccaaactagcgtcgtacggaaaacaatgctctgcttgcaaccaatatgcatacatatactggcaggaatctgacggtctctatggcatttccgaccagggatcggggttcgttgatgcatcaaacgtagacaatggcacggcaccatcagcaaacacatccatggcgatgacattctcaggtactacagacggcgacagcgaagcaatcttccgccgtagcttggaacttttctaccgctcgacgacaagctccctcgtgcagctgcgcatcggtaacggaatgaacatccccattgccatcggccgagatatcggcccacagacgatgatcacagctttctcaacgggattcaaccagaccgagtctgataaccccagcactatcggattccacgtcctcacgatcgatcccgagggcgacaacggagtacagttgacatattacaaggatgccgaatggtcgcaatcaagctcagaagtacaggacttggaggactgcctcgacaaagcgatgtttgcatcgaacacgggccggagagtatactgcgtgcaaggcgatggcaccgataatggtgttgagatcgtagagtatgcttggcagggcgatccgagcgacacgacgagttacttggattatgagaaaattggggttgttcatactactgtatcataa

SEQ ID NO: 36123 - protein, 530 aa, Muscodor strobelii
  misc_feature: SGI Peptide ID NO. 572519
MSSQEESQYTNYPEVATHAHLHRYGDAPEVVPDQGLMQYYDPSKPGSAGGIPPVGSPQQTVYSADGSQYGYQHSAYPPSAYPADAAGSQYPEVVEEKKPAAAATICGIKRTLFFIILAAAIIIIGVAVGVGVGVSQGSKNNSKGTSNGGSGDGDNGSGSGNGNGGNGTSSSNDTATSPVSLLPQTQLATANFTDMYNNENYMVIYQTNDLSIVMSSFNSSNDKWVVSTIANGTDGGILHGTALSMSTFWTGDTTSPVVNVFYQTDGSTTNVKALSYASDNNISTTSVVPEEQWASVDTTDVQSTPGSKLASYGKQCSACNQYAYIYWQESDGLYGISDQGSGFVDASNVDNGTAPSANTSMAMTFSGTTDGDSEAIFRRSLELFYRSTTSSLVQLRIGNGMNIPIAIGRDIGPQTMITAFSTGFNQTESDNPSTIGFHVLTIDPEGDNGVQLTYYKDAEWSQSSSEVQDLEDCLDKAMFASNTGRRVYCVQGDGTDNGVEIVEYAWQGDPSDTTSYLDYEKIGVVHTTVS

SEQ ID NO: 36124 - DNA, 2126 bp, Muscodor strobelii
  misc_feature: SGI EST ID NO. CUFF.85997.0
  misc_feature: Variant of the nucleotide sequence at SEQ ID NO 36122
ccgagccacccatctttgtctattcgcactgattggaactgcccagcgatttgcttcaacacgcgcgctgaaagacgggttgaacaagacgaagccagcaagggtgagaaggattgtgtcagtgctgcgcaggcaaatgcgacgtgctgcatgtccgatgtggcccaggcaaatcgttcgagaagccgaacagaccggcgaagtatgaggaaaacggaacatagcgaggctctggcgagggtcttgagtggaggcaactacctaggtatcgtgcaagactgtgccgcagaaaaataaaccctgggcagaacctgggcatttcgttatcgaatgtcgatctccagtttcgtctttacgctggtagagactcctctctctcttctcccctctttcttcggttcgtgatgttgtattcccttcatttgtgacgaaaagaggtgtaaccacttgccggcaagatgagttcacaagaagagtctcaatacaccaattacccagaggtcgccacccacgctcatttacacagatatggcgacgcgccggaggtagtccctgatcagggactgatgcaatattacgatccgtcgaaaccaggctcggctggaggcataccgcccgtcgggagcccacaacagacggtttactctgccgatggatcacaatatggctatcaacattcagcatatccaccatcagcttatcccgcggatgcggccggctctcaatatcccgaggtagtagaagagaagaaaccggcagcggcggcaacgatatgcggcatcaagaggacattatttttcatcatattagccgcggccataatcataatcggggtcgccgtcggcgttggagtaggcgtatcacaagggtcgaagaataattccaagggcacaagtaacggaggaagcggagatggcgataatggaagcggaagcgggaacgggaacggcgggaatggtaccagctcatctaacgacaccgcgacttcgccagtatcattgctgccacaaacgcagctcgctaccgcgaatttcaccgacatgtacaacaacgagaactacatggtaatatatcagacgaatgacctatcgatcgtgatgtcgtctttcaactcttcgaacgataaatgggtcgtttcgaccatcgccaatggcacagacggtggcatactacacggcaccgccttgtcgatgagcactttctggactggcgataccaccagccccgtagtgaatgtcttctaccagactgatggatcaacgacgaacgtcaaagcattgagctatgcctcagacaacaacatctcgaccacctcggtagtacccgaggaacagtgggcgagcgtcgacactaccgatgtccagtcaacccctggctccaaactagcgtcgtacggaaaacaatgctctgcttgcaaccaatatgcatacatatactggcaggaatctgacggtctctatggcatttccgaccagggatcggggttcgttgatgcatcaaacgtagacaatggcacggcaccatcagcaaacacatccatggcgatgacattctcaggtactacagacggcgacagcgaagcaatcttccgccgtagcttggaacttttctaccgctcgacgacaagctccctcgtgcagctgcgcatcggtaacggaatgaacatccccattgccatcggccgagatatcggcccacagacgatgatcacagctttctcaacgggattcaaccagaccgagtctgataaccccagcactatcggattccacgtcctcacgatcgatcccgagggcgacaacggagtacagttgacatattacaaggatgccgaatggtcgcaatcaagctcagaagtacaggacttggaggactgcctcgacaaagcgatgtttgcatcgaacacgggccggagagtatactgcgtgcaaggcgatggcaccgataatggtgttgagatcgtagagtatgcttggcagggcgatccgagcgacacgacgagttacttggattatgagaaaattggggttgttcatactactgtatcataatttgctgcgttgatataagcgacaatcactagcgttagactattctttaaatcaaaatacccagttctataaagc

SEQ ID NO: 36125 - DNA, 1683 bp, Muscodor strobelii
  misc_feature: SGI cDNA ID NO. 572520
  misc_feature: Encodes the peptide sequence at SEQ ID NO 36126
atggagaatttccttcgcgaatggaggcaggatgcgttgaataaggcgcaatatgagtcggcagtcttcattggtgataaattattggccctgaccaatgaagacaatgatgccttttggttggcgcaagtgcattttgctacgggcaattacacgagagcacaatcattcctttcgaaacaggatctcatcactcgtaacccttcatgccagtacttagctgcccactgcttcattaaacagtcccgatacgatgaagctctggctgtgcttggggagcgcaaccccacgcatctcatatcaaatccaaccgctaagcgaaaagcacagcacaccaatggccggtctgccgcaacctcaaatcgaggcatatctaaaatccaggaacggcgtgatgatccttccgaggaagatatagcgaatcgtcgctttgaagcagcaatgtgctatttacgaggcatctgctacgctaaacagaatgcattcgatcgagccaaagaatgctacaaagatgctgtccggatcgacgtgcagtgttttgaagctttccagcaactcatgaaaaactcgctcatgtcacctgatgaagagtggcaattccttgaatcactggatttcgacgccatatcagtccctggagactcgtcttcgtcgcaagaagcggctgaattcactaaaatgctttatactacccgcctttcaaaatatcgaaaccctgactctttcatgtccgcctgcgagaccttatccactcactacaatctctcggcgaatcccgaccttctgctagctcgagcagatcttctctacacccaatgtaggtacaaggatgccttagcgatcacagattccgtccttcaagaagacaagtacaacttcagcatataccctctgcatctcgcctgcttgtttgagctgaaaatgaaaaatgttctgttcctgattgcgcatgatctcgccgacaatcatcctgaagaaccatgtacgtggctcgccgtaggagtttattacttcgccatcgacaaagtcgctgaagcgcgacgctactttagtaaagctagcatgatggatgcgcacttcggtccggcttggatagggtttgctcacacatttgcggctgagggtgagcatgaccaagcaatctcagcatattcaactgcagctcgcttgttcatgggcacacatcttcctcaagttttcttgggcatgcagaatcatgctctgaacaacatgactctcgctgatgaattcctcaagacggcgtatggactttgcaagacagatccattactattaaatgagatgggcatcgtgtactaccatcaagatcggccccaagatgctgtgacgctctttcaaaggtcattgatggttgcagaagacatcgatgccgagccccaggcatggttgtctgcacgcacaaatctcgcacacgctttcagacgactgaaaaaatacgatgacgcgctagatgaatttgatgaggtcctgcggttgggtggtaaagatgcttcaatatttgcagcgaagggcttaatatacatggagcaagggggcaaatgggatttagcagtggaagtcttgcatcaagcgcttgcgatccatcctcaagatcctattgcaactgagttattaaacaaagcgttagaagagacgacaagtcttctaattgaggaactctag

SEQ ID NO: 36126 - protein, 560 aa, Muscodor strobelii
  misc_feature: SGI Peptide ID NO. 572520
  misc_feature (146)..(179): Pfam Id: PF00515 Pfam Desc: Tetratricopeptide repeat
  misc_feature (146)..(179): Pfam Id: PF07719 Pfam Desc: Tetratricopeptide repeat
  misc_feature (470)..(503): Pfam Id: PF00515 Pfam Desc: Tetratricopeptide repeat
  misc_feature (429)..(462): Pfam Id: PF00515 Pfam Desc: Tetratricopeptide repeat
  misc_feature (1)..(552): NCBI GI: 46123429 Blast Desc: FG06092.1 [Gibberella zeae PH-1]
  misc_feature (1)..(552): NCBI GI: 261355567 Blast Desc: anaphase-promoting complex subunit cut9 [Verticillium albo-atrum VaMs.102]
  misc_feature (1)..(552): NCBI GI: 11595659 Blast Desc: related to anaphase control protein cut9 [Neurospora crassa]
  misc_feature (1)..(554): NCBI GI: 39972277 Blast Desc: MGG_07440 [Magnaporthe grisea 70-15] gi|145016626|gb|EDK01056.1| MGG_07440 [Magnaporthe grisea 70-15]
  misc_feature (1)..(552): NCBI GI: 154318674 Blast Desc: BC1G_02726 [Botryotinia fuckeliana B05.10] gi|150857856|gb|EDN33048.1| BC1G_02726 [Botryotinia fuckeliana B05.10]
  misc_feature (1)..(552): NCBI GI: 116206314 Blast Desc: CHGG_02450 [Chaetomium globosum CBS 148.51] gi|88183047|gb|EAQ90515.1| CHGG_02450 [Chaetomium globosum CBS 148.51]
  misc_feature (1)..(559): NCBI GI: 169615473 Blast Desc: SNOG_10894 [Phaeosphaeria nodorum SN15] gi|111060273|gb|EAT81393.1| SNOG_10894 [Phaeosphaeria nodorum SN15]
  misc_feature (1)..(558): NCBI GI: 189207060 Blast Desc: anaphase-promoting complex subunit Cut9 [Pyrenophora tritici-repentis Pt-1C-BFP] gi|187975957|gb|EDU42583.1| anaphase-promoting complex subunit Cut9 [Pyrenophora Pt-1C-BFP]
  misc_feature (1)..(534): NCBI GI: 145233547 Blast Desc: An02g10180 [Aspergillus niger] gi|134057078|emb|CAK44366.1| protein product [Aspergillus niger]
  misc_feature (1)..(534): NCBI GI: 121719045 Blast Desc: cell division cycle [Aspergillus clavatus NRRL 1] gi|119404470|gb|EAW14846.1| cell division cycle [Aspergillus clavatus NRRL 1]
MENFLREWRQDALNKAQYESAVFIGDKLLALTNEDNDAFWLAQVHFATGNYTRAQSFLSKQDLITRNPSCQYLAAHCFIKQSRYDEALAVLGERNPTHLISNPTAKRKAQHTNGRSAATSNRGISKIQERRDDPSEEDIANRRFEAAMCYLRGICYAKQNAFDRAKECYKDAVRIDVQCFEAFQQLMKNSLMSPDEEWQFLESLDFDAISVPGDSSSSQEAAEFTKMLYTTRLSKYRNPDSFMSACETLSTHYNLSANPDLLLARADLLYTQCRYKDALAITDSVLQEDKYNFSIYPLHLACLFELKMKNVLFLIAHDLADNHPEEPCTWLAVGVYYFAIDKVAEARRYFSKASMMDAHFGPAWIGFAHTFAAEGEHDQAISAYSTAARLFMGTHLPQVFLGMQNHALNNMTLADEFLKTAYGLCKTDPLLLNEMGIVYYHQDRPQDAVTLFQRSLMVAEDIDAEPQAWLSARTNLAHAFRRLKKYDDALDEFDEVLRLGGKDASIFAAKGLIYMEQGGKWDLAVEVLHQALAIHPQDPIATELLNKALEETTSLLIEEL

SEQ ID NO: 36127 - DNA, 4277 bp, Muscodor strobelii
  misc_feature: SGI EST ID NO. CUFF.86054.0
  misc_feature: Variant of the nucleotide sequence at SEQ ID NO 36125
caataacctcattccactggacagaagctgcgtctgttgtgtcctctctggatagcttcgtaatgactgggcatcgttgagctcaaacaatcagtacaagattccagtcacccgcccgcgcttccagaacgcgtcttgagccccacctcacacaaccataaccgaccctcgctcaatccgtcactgataacacttcacatgttgatgtctgcgacgagatggagaatttccttcgcgaatggaggcaggatgcgttgaataaggcgcaatatgagtcggcagtcttcattggtgataaattattggccctgaccaatgaagacaatgatgccttttggttggcgcaagtgcattttgctacgggcaattacacgagagcacaatcattcctttcgaaacaggatctcatcactcgtaacccttcatgccagtacttagctgcccactgcttcattaaacagtcccgatacgatgaagctctggctgtgcttggggagcgcaaccccacgcatctcatatcaaatccaaccgctaagcgaaaagcacagcacaccaatggccggtctgccgcaacctcaaatcgaggcatatctaaaatccaggaacggcgtgatgatccttccgaggaagatatagcgaatcgtcgctttgaagcagcaatgtgctatttacgaggcatctgctacgctaaacagaatgcattcgatcgagccaaagaatgctacaaagatgctgtccggatcgacgtgcagtgttttgaagctttccagcaactcatgaaaaactcgctcatgtcacctgatgaagagtggcaattccttgaatcactggatttcgacgccatatcagtccctggagactcgtcttcgtcgcaagaagcggctgaattcactaaaatgctttatactacccgcctttcaaaatatcgaaaccctgactctttcatgtccgcctgcgagaccttatccactcactacaatctctcggcgaatcccgaccttctgctagctcgagcagatcttctctacacccaatgtaggtacaaggatgccttagcgatcacagattccgtccttcaagaagacaagtacaacttcagcatataccctctgcatctcgcctgcttgtttgagctgaaaatgaaaaatgttctgttcctgattgcgcatgatctcgccgacaatcatcctgaagaaccatgtacgtggctcgccgtaggagtttattacttcgccatcgacaaagtcgctgaagcgcgacgctactttagtaaagctagcatgatggatgcgcacttcggtccggcttggatagggtttgctcacacatttgcggctgagggtgagcatgaccaagcaatctcagcatattcaactgcagctcgcttgttcatgggcacacatcttcctcaagttttcttgggcatgcagaatcatgctctgaacaacatgactctcgctgatgaattcctcaagacggcgtatggactttgcaagacagatccattactattaaatgagatgggcatcgtgtactaccatcaagatcggccccaagatgctgtgacgctctttcaaaggtcattgatggttgcagaagacatcgatgccgagccccaggcatggttgtctgcacgcacaaatctcgcacacgctttcagacgactgaaaaaatacgatgacgcgctagatgaatttgatgaggtcctgcggttgggtggtaaagatgcttcaatatttgcagcgaagggcttaatatacatggagcaagggggcaaatgggatttagcagtggaagtcttgcatcaagcgcttgcgatccatcctcaagatcctattgcaactgagttattaaacaaagcgttagaagagacgacaagtcttctaattgaggaactctagatctcgactatatgcaggctcttgtgataatgttccaatacacaaatttcatcgccttttccaccggacgggtttctgttcgttttgtcgcatgaagcagtgtgatacaattatggcagaatttcgctctcagatctactcgccgcgcgatgaagttgactgtggcgaaagttccattactacctagttgacggtacaaggtcaataactgtttttgccctggcgactttttggacggcagaacaagtctgtgatcttctcgactcccgtgttctttgcttcctctgaagcagtcaggccactcttgttgcgtattcgctgatcagctcctctcgaaatcaagtcggataccacagcatagtgaccttgagttacggcgcgatgaagagcggtgcaggcctggcggtcttttgcgttgatattcgcgttgttttccaataacaactttataattggctgatagcccattgaagctgcatcgtggagcaccgatcgactttcgttgtccacctcgtttactagagagggcgccttacgtattaactgtcggatgactgactcgtggttattgatgactgcttcatgtaaaggggtgtggcctacgctatccttaaccatcggatttgcgcccttctcaagcaaaagccagacgacagctgcatagcctttagaggcggctatatgtaagggagtgagctcatgtcttgtccttgcgttgatatttgcaccactttcaatcagaagccagatcaagcttttatcgcttgacgtgtcatacaattcaactgcgatgtgcagtggcgtatatgatcttcgatcagccagctctaagttagcttttgcttgaagtaaaaggtacgcggcagttcctcgaccatacttgaccgccccgtataatgcagtttcgccttctggattcagtttgtcgagattgattcctttaccaatcatcgactgtacgaaagcgtcgcgtccttcacgagctgaccacgtcagaagagtccatccctgcttacatctttgaggttcatcgagcgatgcacctttctctattagcagatccacaactctcttgtgccctcgatatgccgcccatctcagtgctgtgaaaccgtccttgtcttcagcgttgacatctgctttgccaccgatcagaagtttcacaatttgtcttagcccacttgctgccgcataacgaagtggtgtccagcccctcaaatcctccacatccatcttgacacgattcttcgattgcaagattgccttgacggcgtctgcatcttcaatctctacggctagatgtaatgcagtgctaccccggttgtcttgtacattaacgtccgccctctctgccaacagcagtttgaggacgcggttctgtctgtagatcgtggccaagtgcatggcagtcttcccgctagcggtctgggtgttgatgtcacacatatccctattgatgagtcttcgcgcaagattggcaaccccaaagtatgcgcatatatgcagggaagtcggttcttcttttgcaagctgcgtgtctgtcattgcatttaatgcatttgccctctgactaccatcagcaagaaagctacacgctagcttatgcactgaaccaagaacgggctgagatacgtgatcgccccctgcctcggtttgttagctactggcccagtcacctccagtcccttatgcctatgctagaagccaactttcctaagcataacagctcgcattgaaaccaatgtgtttgaggaactaagtatcgtagtgttcgaatagacacgtggataaccaaagttgctgaaaggcacatacatatttatggaaagatttggatacatagatgatgattgagagttgcttacagtggtttgcagcatagttcagtaaaggctgctcttttgacttcccttgtggatcctgcactaagtcatcaaaccgcagataggtcagacacgactccgccatcacagaatgaaagttcttgaagcgagaaaactgtctcttttcaagataccgtctcaccgtgtaatgtgctaggcgtacaattttggtctttgagtcaatgacgacaatacccgcgcacgctgaactgagaatctctttcgacacaatatccagactagcatgattttgcaatttgggctggattgcaacagcgcacagaagttccgagatggttaatggtcgttcagcaaatatgagccaccccagactacgggtggcgagtgtcttcttgaagccgtctcttatttggaagattctctcaatcgtcctctcataaacaccatcaagtgtttgtggaagataccttaggccatcggtaaattctccgacggtatttcgtaagttgagaaaatccatatgaagctgcgc

SEQ ID NO: 36128 - DNA, 2943 bp, Muscodor strobelii
  misc_feature: SGI cDNA ID NO. 572521
  misc_feature: Elevated expression when VOC is produced
  misc_feature: Encodes the peptide sequence at SEQ ID NO 36129
atgagccctacgaagagaccgcagagtaaacagacggcggatgtggaagaggcttctgaccacgaaacagggtttggggctcgacgaagcatagtgcgagctcacaatccccagcagactgtacttgctcataccttcaccagcaatggaggtattagttttgcgtccgaaggaggaccgccacctgcaggggaacaggcgacatatcagtcgatccacgccaagtccgtcagtgttgaagggagcatcacatacttcggtggtagtagccagacggtttcgcaatggctctcttcatcctcgccactgaatttcgagaggaagcacagagatacggttgagatattcaggaaaacaccaggcacaggacagtggtttttgggggatccgaaatttcaagaatggaaacgaaattctttcaacagactgctcggctccggaattgctggtgctggcaaaacagttcttgcatcaatcgtgattgaacatctgaagaccagcaataagaaggacaacaaagataatacgcaactggtccaagaccgcgatcatttttcaatagagctaaagacggcattccggcactacaagaccaaagccatatttccgtcaccacttgaaatcttagacattctgatcgccgaaatgagcacattttctagaattgacatggtcattgatgctctagacgaatgctcgtccgaaaatgggaacgtgagggccgagtttatgtcgaccattcgtgatttcccatccaacgtctttgttctggtcacatcaagacctgatgagcaggttagagacgaagtcaaagccagcgaggagttgataattgctgctcaagacgaagacttgagaaaatatctcgatgggtacaagaatgatcgatcacaaggtaaactgcaagcccttattgcaagtacaaatgacagtttttggcccgaggcagtcgcttcgataattgagaaatctcaggggatgtttctacttgcgcagcttcatatggattttctcaacttacgaaataccgtcggagaatttaccgatggcctaaggtatcttccacaaacacttgatggtgtttatgagaggacgattgagagaatcttccaaataagagacggcttcaagaagacactcgccacccgtagtctggggtggctcatatttgctgaacgaccattaaccatctcggaacttctgtgcgctgttgcaatccagcccaaattgcaaaatcatgctagtctggatattgtgtcgaaagagattctcagttcagcgtgcgcgggtattgtcgtcattgactcaaagaccaaaattgtacgcctagcacattacacggtgagacggtatcttgaaaagagacagttttctcgcttcaagaactttcattctgtgatggcggagtcgtgtctgacctatctgcggtttgatgacttagtgcaggatccacaagggaagtcaaaagagcagcctttactgaactatgctgcaaaccactggggcgatcacgtatctcagcccgttcttggttcagtgcataagctagcgtgtagctttcttgctgatggtagtcagagggcaaatgcattaaatgcaatgacagacacgcagcttgcaaaagaagaaccgacttccctgcatatatgcgcatactttggggttgccaatcttgcgcgaagactcatcaatagggatatgtgtgacatcaacacccagaccgctagcgggaagactgccatgcacttggccacgatctacagacagaaccgcgtcctcaaactgctgttggcagagagggcggacgttaatgtacaagacaaccggggtagcactgcattacatctagccgtagagattgaagatgcagacgccgtcaaggcaatcttgcaatcgaagaatcgtgtcaagatggatgtggaggatttgaggggctggacaccacttcgttatgcggcagcaagtgggctaagacaaattgtgaaacttctgatcggtggcaaagcagatgtcaacgctgaagacaaggacggtttcacagcactgagatgggcggcatatcgagggcacaagagagttgtggatctgctaatagagaaaggtgcatcgctcgatgaacctcaaagatgtaagcagggatggactcttctgacgtggtcagctcgtgaaggacgcgacgctttcgtacagtcgatgattggtaaaggaatcaatctcgacaaactgaatccagaaggcgaaactgcattatacggggcggtcaagtatggtcgaggaactgccgcgtaccttttacttcaagcaaaagctaacttagagctggctgatcgaagatcatatacgccactgcacatcgcagttgaattgtatgacacgtcaagcgataaaagcttgatctggcttctgattgaaagtggtgcaaatatcaacgcaaggacaagacatgagctcactcccttacatatagccgcctctaaaggctatgcagctgtcgtctggcttttgcttgagaagggcgcaaatccgatggttaaggatagcgtaggccacacccctttacatgaagcagtcatcaataaccacgagtcagtcatccgacagttaatacgtaaggcgccctctctagtaaacgaggtggacaacgaaagtcgatcggtgctccacgatgcagcttcaatgggctatcagccaattataaagttgttattggaaaacaacgcgaatatcaacgcaaaagaccgccaggcctgcaccgctcttcatcgcgccgtaactcaaggtcactatgctgtggtatccgacttgatttcgagaggagctgatcagcgaatacgcaacaagagtggcctgactgcttcagaggaagcaaagaacacgggagtcgagaagatcacagacttgttctgccgtccaaaaagtcgccagggcaaaaacagttattga

SEQ ID NO: 36129 - protein, 980 aa, Muscodor strobelii
  misc_feature: SGI Peptide ID NO. 572521
  misc_feature (815)..(847): Pfam Id: PF00023 Pfam Desc: Ankyrin repeat
  misc_feature (644)..(676): Pfam Id: PF00023 Pfam Desc: Ankyrin repeat
  misc_feature (677)..(709): Pfam Id: PF00023 Pfam Desc: Ankyrin repeat
  misc_feature (915)..(947): Pfam Id: PF00023 Pfam Desc: Ankyrin repeat
  misc_feature (882)..(914): Pfam Id: PF00023 Pfam Desc: Ankyrin repeat
  misc_feature (576)..(608): Pfam Id: PF00023 Pfam Desc: Ankyrin repeat
  misc_feature (848)..(881): Pfam Id: PF00023 Pfam Desc: Ankyrin repeat
  misc_feature (778)..(814): Pfam Id: PF00023 Pfam Desc: Ankyrin repeat
  misc_feature (91)..(968): NCBI GI: 242821429 Blast Desc: ankyrin repeat-containing protein, [Talaromyces stipitatus ATCC 10500] gi|218712600|gb|EED12025.1| ankyrin repeat-containing protein, [Talaromyces stipitatus ATCC 10500]
  misc_feature (96)..(947): NCBI GI: 238508580 Blast Desc: Pfs, NACHT and Ankyrin domain protein [Aspergillus flavus NRRL3357] gi|220688371|gb|EED44724.1| Pfs, NACHT and Ankyrin domain protein [Aspergillus flavus NRRL3357]
  misc_feature (88)..(946): NCBI GI: 169782465 Blast Desc: [Aspergillus oryzae RIB40] gi|83774438|dbj|BAE64562.1| protein product [Aspergillus oryzae]
  misc_feature (91)..(968): NCBI GI: 225557065 Blast Desc: ankyrin repeat protein [Ajellomyces capsulatus G186AR]
  misc_feature (71)..(940): NCBI GI: 212528994 Blast Desc: Pfs, NACHT and Ankyrin domain protein [Penicillium marneffei ATCC 18224] gi|210074052|gb|EEA28139.1| Pfs, NACHT and Ankyrin domain protein [Penicillium marneffei ATCC 18224]
  misc_feature (89)..(970): NCBI GI: 145251379 Blast Desc: An15g06750 [Aspergillus niger] gi|134082735|emb|CAK42627.1| protein product [Aspergillus niger]
  misc_feature (91)..(910): NCBI GI: 212541358 Blast Desc: serine/threonine-protein kinase ripk4, [Penicillium marneffei ATCC 18224] gi|210068133|gb|EEA22225.1| serine/threonine-protein kinase ripk4, [Penicillium marneffei
  misc_feature (197)..(946): NCBI GI: 238500846 Blast Desc: Pfs, NACHT and Ankyrin domain protein [Aspergillus flavus NRRL3357] gi|220691894|gb|EED48241.1| Pfs, NACHT and Ankyrin domain protein [Aspergillus flavus NRRL3357]
  misc_feature (91)..(875): NCBI GI: 169784486 Blast Desc: [Aspergillus oryzae RIB40] gi|83775451|dbj|BAE65571.1| protein product [Aspergillus oryzae]
  misc_feature (96)..(872): NCBI GI: 255957133 Blast Desc: Pc21g23520 [Penicillium chrysogenum Wisconsin 54-1255] gi|211591030|emb|CAP97249.1| Pc21g23520 [Penicillium chrysogenum Wisconsin 54-1255]
  misc_feature: Useful for introducing or modulating the production of volatile compounds
MSPTKRPQSKQTADVEEASDHETGFGARRSIVRAHNPQQTVLAHTFTSNGGISFASEGGPPPAGEQATYQSIHAKSVSVEGSITYFGGSSQTVSQWLSSSSPLNFERKHRDTVEIFRKTPGTGQWFLGDPKFQEWKRNSFNRLLGSGIAGAGKTVLASIVIEHLKTSNKKDNKDNTQLVQDRDHFSIELKTAFRHYKTKAIFPSPLEILDILIAEMSTFSRIDMVIDALDECSSENGNVRAEFMSTIRDFPSNVFVLVTSRPDEQVRDEVKASEELIIAAQDEDLRKYLDGYKNDRSQGKLQALIASTNDSFWPEAVASIIEKSQGMFLLAQLHMDFLNLRNTVGEFTDGLRYLPQTLDGVYERTIERIFQIRDGFKKTLATRSLGWLIFAERPLTISELLCAVAIQPKLQNHASLDIVSKEILSSACAGIVVIDSKTKIVRLAHYTVRRYLEKRQFSRFKNFHSVMAESCLTYLRFDDLVQDPQGKSKEQPLLNYAANHWGDHVSQPVLGSVHKLACSFLADGSQRANALNAMTDTQLAKEEPTSLHICAYFGVANLARRLINRDMCDINTQTASGKTAMHLATIYRQNRVLKLLLAERADVNVQDNRGSTALHLAVEIEDADAVKAILQSKNRVKMDVEDLRGWTPLRYAAASGLRQIVKLLIGGKADVNAEDKDGFTALRWAAYRGHKRVVDLLIEKGASLDEPQRCKQGWTLLTWSAREGRDAFVQSMIGKGINLDKLNPEGETALYGAVKYGRGTAAYLLLQAKANLELADRRSYTPLHIAVELYDTSSDKSLIWLLIESGANINARTRHELTPLHIAASKGYAAVVWLLLEKGANPMVKDSVGHTPLHEAVINNHESVIRQLIRKAPSLVNEVDNESRSVLHDAASMGYQPIIKLLLENNANINAKDRQACTALHRAVTQGHYAVVSDLISRGADQRIRNKSGLTASEEAKNTGVEKITDLFCRPKSRQGKNSY

SEQ ID NO: 36130 - DNA, 4637 bp, Muscodor strobelii
  misc_feature: SGI EST ID NO. CUFF.86055.1
  misc_feature: Variant of the nucleotide sequence at SEQ ID NO 36128
tatacttcgaccacaacaaccaggagcaatatactctcctgaacttacatctctgtctcttagcgcaactggtccaagaccgcgatcatttttcaatagagctaaagacggcattccggcactacaagaccaaagccatatttccgtcaccacttgaaatcttagacattctgatcgccgaaatgagcacattttctagaattgacatggtcattgatgctctagacgaatgctcgtccgaaaatgggaacgtgagggccgagtttatgtcgaccattcgtgatttcccatccaacgtctttgttctggtcacatcaagacctgatgagcaggttagagacgaagtcaaagccagcgaggagttgataattgctgctcaagacgaagacttgagaaaatatctcgatgggtacaagaatgatcgatcacaaggtaaactgcaagcccttattgcaagtacaaatgacagtttttggcccgaggcagtcgcttcgataattgagaaatctcaggggatgtttctacttgcgcagcttcatatggattttctcaacttacgaaataccgtcggagaatttaccgatggcctaaggtatcttccacaaacacttgatggtgtttatgagaggacgattgagagaatcttccaaataagagacggcttcaagaagacactcgccacccgtagtctggggtggctcatatttgctgaacgaccattaaccatctcggaacttctgtgcgctgttgcaatccagcccaaattgcaaaatcatgctagtctggatattgtgtcgaaagagattctcagttcagcgtgcgcgggtattgtcgtcattgactcaaagaccaaaattgtacgcctagcacattacacggtgagacggtatcttgaaaagagacagttttctcgcttcaagaactttcattctgtgatggcggagtcgtgtctgacctatctgcggtttgatgacttagtgcaggatccacaagggaagtcaaaagagcagcctttactgaactatgctgcaaaccactggggcgatcacgtatctcagcccgttcttggttcagtgcataagctagcgtgtagctttcttgctgatggtagtcagagggcaaatgcattaaatgcaatgacagacacgcagcttgcaaaagaagaaccgacttccctgcatatatgcgcatactttggggttgccaatcttgcgcgaagactcatcaatagggatatgtgtgacatcaacacccagaccgctagcgggaagactgccatgcacttggccacgatctacagacagaaccgcgtcctcaaactgctgttggcagagagggcggacgttaatgtacaagacaaccggggtagcactgcattacatctagccgtagagattgaagatgcagacgccgtcaaggcaatcttgcaatcgaagaatcgtgtcaagatggatgtggaggatttgaggggctggacaccacttcgttatgcggcagcaagtgggctaagacaaattgtgaaacttctgatcggtggcaaagcagatgtcaacgctgaagacaaggacggtttcacagcactgagatgggcggcatatcgagggcacaagagagttgtggatctgctaatagagaaaggtgcatcgctcgatgaacctcaaagatgtaagcagggatggactcttctgacgtggtcagctcgtgaaggacgcgacgctttcgtacagtcgatgattggtaaaggaatcaatctcgacaaactgaatccagaaggcgaaactgcattatacggggcggtcaagtatggtcgaggaactgccgcgtaccttttacttcaagcaaaagctaacttagagctggctgatcgaagatcatatacgccactgcacatcgcagttgaattgtatgacacgtcaagcgataaaagcttgatctggcttctgattgaaagtggtgcaaatatcaacgcaaggacaagacatgagctcactcccttacatatagccgcctctaaaggctatgcagctgtcgtctggcttttgcttgagaagggcgcaaatccgatggttaaggatagcgtaggccacacccctttacatgaagcagtcatcaataaccacgagtcagtcatccgacagttaatacgtaaggcgccctctctagtaaacgaggtggacaacgaaagtcgatcggtgctccacgatgcagcttcaatgggctatcagccaattataaagttgttattggaaaacaacgcgaatatcaacgcaaaagaccgccaggcctgcaccgctcttcatcgcgccgtaactcaaggtcactatgctgtggtatccgacttgatttcgagaggagctgatcagcgaatacgcaacaagagtggcctgactgcttcagaggaagcaaagaacacgggagtcgagaagatcacagacttgttctgccgtccaaaaagtcgccagggcaaaaacagttattgaccttgtaccgtcaactaggtagtaatggaactttcgccacagtcaacttcatcgcgcggcgagtagatctgagagcgaaattctgccataattgtatcacactgcttcatgcgacaaaacgaacagaaacccgtccggtggaaaaggcgatgaaatttgtgtattggaacattatcacaagagcctgcatatagtcgagatctagagttcctcaattagaagacttgtcgtctcttctaacgctttgtttaataactcagttgcaataggatcttgaggatggatcgcaagcgcttgatgcaagacttccactgctaaatcccatttgcccccttgctccatgtatattaagcccttcgctgcaaatattgaagcatctttaccacccaaccgcaggacctcatcaaattcatctagcgcgtcatcgtattttttcagtcgtctgaaagcgtgtgcgagatttgtgcgtgcagacaaccatgcctggggctcggcatcgatgtcttctgcaaccatcaatgacctttgaaagagcgtcacagcatcttggggccgatcttgatggtagtacacgatgcccatctcatttaatagtaatggatctgtcttgcaaagtccatacgccgtcttgaggaattcatcagcgagagtcatgttgttcagagcatgattctgcatgcccaagaaaacttgaggaagatgtgtgcccatgaacaagcgagctgcagttgaatatgctgagattgcttggtcatgctcaccctcagccgcaaatgtgtgagcaaaccctatccaagccggaccgaagtgcgcatccatcatgctagctttactaaagtagcgtcgcgcttcagcgactttgtcgatggcgaagtaataaactcctacggcgagccacgtacatggttcttcaggatgattgtcggcgagatcatgcgcaatcaggaacagaacatttttcattttcagctcaaacaagcaggcgagatgcagagggtatatgctgaagttgtacttgtcttcttgaaggacggaatctgtgatcgctaaggcatccttgtacctacattgggtgtagagaagatctgctcgagctagcagaaggtcgggattcgccgagagattgtagtgagtggataaggtctcgcaggcggacatgaaagagtcagggtttcgatattttgaaaggcgggtagtataaagcattttagtgaattcagccgcttcttgcgacgaagacgagtctccagggactgatatggcgtcgaaatccagtgattcaaggaattgccactcttcatcaggtgacatgagcgagtttttcatgagttgctggaaagcttcaaaacactgcacgtcgatccggacagcatctttgtagcattctttggctcgatcgaatgcattctgtttagcgtagcagatgcctcgtaaatagcacattgctgcttcaaagcgacgattcgctatatcttcctcggaaggatcatcacgccgttcctggattttagatatgcctcgatttgaggttgcggcagaccggccattggtgtgctgtgcttttcgcttagcggttggatttgatatgagatgcgtggggttgcgctccccaagcacagccagagcttcatcgtatcgggactgtttaatgaagcagtgggcagctaagtactggcatgaagggttacgagtgatgagatcctgtttcgaaaggaatgattgtgctctcgtgtaattgcccgtagcaaaatgcacttgcgccaaccaaaaggcatcattgtcttcatctagcccattgtttagcaccaggagatttgtttagtaaggagaggggcaacgcactggtcagggccaataatttatcaccaatgaagactgccgactcatattgcgccttattcaacgcatcctgcctccattcgcgaaggaaattctccatctcgtcgcagacatcaacatgtgaagtgttatcagtgacggattgagcgagggtcggttatggttgtgtgaggtggggctcaagacgcgttctggaagcgcgggcgggtgactggaatcttgtactgattgtttgagctcaacgatgcccagtcattacgaagctatccagagaggacacaacagacgcagcttctgtccagtggaatgaggttattg

SEQ ID NO: 36131 - DNA, 300 bp, Muscodor strobelii
  misc_feature: SGI cDNA ID NO. 572522
  misc_feature: Elevated expression when VOC is produced
  misc_feature: Encodes the peptide sequence at SEQ ID NO 36132
atggtgcggttcgcgacacctaatgaaccgggttatataagcattgttggcgaactgcagcgatggatcaagagaatacggttcgcagccagtgagcaggggcaaaactctccagattgggccggctacggcaacgacgagtccagcaaggtggtcatctggggaaacgtttctaagtccgtcgttctagacctgacgcgccacagctgtgtgctacttaacacagcctttgttgacatgacacagcaggtgacggtagcaggttacaaagtttccattggtatcgcgaagcaagattga

SEQ ID NO: 36132 - protein, 99 aa, Muscodor strobelii
  misc_feature: SGI Peptide ID NO. 572522
  misc_feature: Useful for introducing or modulating the production of volatile compounds
MVRFATPNEPGYISIVGELQRWIKRIRFAASEQGQNSPDWAGYGNDESSKVVIWGNVSKSVVLDLTRHSCVLLNTAFVDMTQQVTVAGYKVSIGIAKQD

SEQ ID NO: 36133 - DNA, 417 bp, Muscodor strobelii
  misc_feature: SGI cDNA ID NO. 572523
  misc_feature: Elevated expression when VOC is produced
  misc_feature: Encodes the peptide sequence at SEQ ID NO 36134
atgatgaactctccacgtattggaaatggttccactactatgctagagaagtttcgaggcggaacgggctcgcatggagcgactctgaaagacggtgtattgccgaaaccgcgaattgacaagaaggcttccccggctgtcattacagcaacacccgagcgagttgacatcaaggctgagatggtagaagagtcgacgatcgctcatgaaatcaagatcaatggaattatagaacacgaggactatggcgcagacagccctgatagctcagacgttgacagtcttgacggtgccaccgtcatcaatcccaatgggcccgttgacgatacggcaaaaagtgggatggtcacaatgatcgtggcgagcagtaagttggaagtggaagggatcaaattcatcagacgccgcaagcactga

SEQ ID NO: 36134 - protein, 138 aa, Muscodor strobelii
  misc_feature: SGI Peptide ID NO. 572523
  misc_feature: Useful for introducing or modulating the production of volatile compounds
MMNSPRIGNGSTTMLEKFRGGTGSHGATLKDGVLPKPRIDKKASPAVITATPERVDIKAEMVEESTIAHEIKINGIIEHEDYGADSPDSSDVDSLDGATVINPNGPVDDTAKSGMVTMIVASSKLEVEGIKFIRRRKH

SEQ ID NO: 36135 - DNA, 766 bp, Muscodor strobelii
  misc_feature: SGI EST ID NO. CUFF.86015.0
  misc_feature: Variant of the nucleotide sequence at SEQ ID NO 36133
gttgtcatcgcaaatcgttccacggaattagtatatagattcactagtctgcgcaacacagcctatgataaggttgactcccaaaccgccatttcgttcctcacactatctacacacctttcatcatgatgaactctccacgtattggaaatggttccactactatgctagagaagtttcgaggcggaacgggctcgcatggagcgactctgaaagacggtgtattgccgaaaccgcgaattgacaagaaggcttccccggctgtcattacagcaacacccgagcgagttgacatcaaggctgagatggtagaagagtcgacgatcgctcatgaaatcaagatcaatggaattatagaacacgaggactatggcgcagacagccctgatagctcagacgttgacagtcttgacggtgccaccgtcatcaatcccaatgggcccgttgacgatacggcaaaaagtgggatggtcacaatgatcgtggcgagcagtaagttggaagtggaagggatcaaattcatcagacgccgcaagcactgatatagcatcaatttacgaaaattcttggtggttgtaatcatgattgagatgtaaaatagctgggtagaactctgatttatacatgagctgccttttttcttttcccccatcgtgctgatcagcaagccttcggttgaatctcatcttgacgaagcaagcttttacattctatcagtgttgggcccataccggccgggtagacatgtggaaatactacactagag

SEQ ID NO: 36136 - DNA, 1821 bp, Muscodor strobelii
  misc_feature: SGI cDNA ID NO. 572524
  misc_feature: Encodes the peptide sequence at SEQ ID NO 36137
atggagggtatcctgctcgtgcccccagatcggggtacgatacttgggcgagctgtgtggaagccgcgatacgtcgtcattggtcctttatctcagaaagatgggtatcagtcaaattcctcgttgtctcaagtgttgtccgctgctcggattagagatggtggcgcctggtcttccaagcaacagcagaaaggctccacggacatggtttacttatccgtgttcaaatccaaggatgatctagagcccattcaccaacatccgatgcattcgataacagaatgtcaagtacagcaattggctcatcgtaagcagggccatgttcttcctacacttacagtccaaatatctcccgacccggcaaccgataagctgcgcaagcgacgatcgagtcgaacaggtggcttaacatcatccaaggatccaggacccacgatgttatactttcgccctgctgaagcgtcgcgatacggcttgggagattgggcacgatatattcacgcgcttatccagccagacgtaccaggacgagaaccgatgagcccaataagcccgctctcgacctctttcatgaatccatttgcgccgatcgcagatgcctcaaatgagctaccgtcagcgactacagctacgaagggaaaactacggtcgaaattgcagcctagatcatctggtcgcggacatccgtccacgcgcgatccagggtcagcgtacacctcagaatcacctagtctccgctcacggagaagtgatctctcttctcatgccagctccttgttaccagctgcgatgacattcgtgcagcagcattataccactttgcagcactctgatctcccttcccccgcctcaaccatcggcgaccaccaggagcagcaattgattgaaggatggacttcggcacaagggcgttcttcagctctcagctctcctataagaggcaggggtagtatcagctcatcccaagggcataacaaggctagcgcagattctgcctcaccccaaatgtctcacaaacctcgcgaaactatcttagatcgagcgttccagatgcgatgcattcccgggtctgaccggcctgttttgggggaggaaaaactgacgtcgcttgcgaagttcgaagccttgatgcgggaagcagaagacagaagaagacctatggaaaaggaacgattagacgaaattcaggagcctgtaaagagcacctgggaggaagatgatgaggacgaatccgacgatgataattctgacagagaagtcgaggacgatgatagtgatgacgacgtatttgaccagggcgagaactacgacgagatgaattcctccacggtcaaagcgttacagttcatcgtcaaccgccacagcgctatcagtggatctagagcttcacattatagtgattcgggggggcttgacgcacgaccgcacaccgcacactctagaacgagacccgcagcagctcagcgggcaataagtcaaccatatattccaaatccaccactctacctgccgtcttctcctcccagcagaccaatagatgaattctctcatcgacgaaatcatgaaaaaagacattcgacttccgatgtcaagaatatgaacttcaacgaatttgcgaagaggctaagcggaacgagtagtcttctcatcctgcaaacaaacactagtactggcagcagtcggggaagtggggattttgacactgctacacatacccctcgaggttctttatctccccttacacctagtgagcgagaagaacgctgccgatggcgcggtagcattggtgtttttggaggcaacgaaggcggattcttatga

SEQ ID NO: 36137 - protein, 606 aa, Muscodor strobelii
  misc_feature: SGI Peptide ID NO. 572524
  misc_feature (1)..(606): NCBI GI: 171694051 Blast Desc: protein product [Podospora anserina] gi|170946974|emb|CAP73778.1| protein product [Podospora anserina]
  misc_feature (1)..(606): NCBI GI: 261355491 Blast Desc: conserved [Verticillium albo-atrum VaMs.102]
  misc_feature (1)..(606): NCBI GI: 85099886 Blast Desc: NCU04102 [Neurospora crassa OR74A] gi|28922393|gb|EAA31628.1| [Neurospora crassa OR74A] gi|28950363|emb|CAD71018.1| conserved [Neurospora crassa]
  misc_feature (1)..(390): NCBI GI: 39943972 Blast Desc: MGG_03997 [Magnaporthe grisea 70-15] gi|145014717|gb|EDJ99285.1| MGG_03997 [Magnaporthe grisea 70-15]
  misc_feature (23)..(606): NCBI GI: 116198047 Blast Desc: CHGG_07179 [Chaetomium globosum CBS 148.51] gi|88178458|gb|EAQ85926.1| CHGG_07179 [Chaetomium globosum CBS 148.51]
  misc_feature (78)..(530): NCBI GI: 256731334 Blast Desc: NECHADRAFT_49140 [Nectria haematococca mpVI 77-13-4]
  misc_feature (86)..(528): NCBI GI: 46125585 Blast Desc: FG07170.1 [Gibberella zeae PH-1]
  misc_feature (1)..(383): NCBI GI: 156048530 Blast Desc: SS1G_08996 [Sclerotinia sclerotiorum 1980] gi|154693393|gb|EDN93131.1| SS1G_08996 [Sclerotinia sclerotiorum 1980]
  misc_feature (505)..(606): NCBI GI: 39943972 Blast Desc: MGG_03997 [Magnaporthe grisea 70-15] gi|145014717|gb|EDJ99285.1| MGG_03997 [Magnaporthe grisea 70-15]
MEGILLVPPDRGTILGRAVWKPRYVVIGPLSQKDGYQSNSSLSQVLSAARIRDGGAWSSKQQQKGSTDMVYLSVFKSKDDLEPIHQHPMHSITECQVQQLAHRKQGHVLPTLTVQISPDPATDKLRKRRSSRTGGLTSSKDPGPTMLYFRPAEASRYGLGDWARYIHALIQPDVPGREPMSPISPLSTSFMNPFAPIADASNELPSATTATKGKLRSKLQPRSSGRGHPSTRDPGSAYTSESPSLRSRRSDLSSHASSLLPAAMTFVQQHYTTLQHSDLPSPASTIGDHQEQQLIEGWTSAQGRSSALSSPIRGRGSISSSQGHNKASADSASPQMSHKPRETILDRAFQMRCIPGSDRPVLGEEKLTSLAKFEALMREAEDRRRPMEKERLDEIQEPVKSTWEEDDEDESDDDNSDREVEDDDSDDDVFDQGENYDEMNSSTVKALQFIVNRHSAISGSRASHYSDSGGLDARPHTAHSRTRPAAAQRAISQPYIPNPPLYLPSSPPSRPIDEFSHRRNHEKRHSTSDVKNMNFNEFAKRLSGTSSLLILQTNTSTGSSRGSGDFDTATHTPRGSLSPLTPSEREERCRWRGSIGVFGGNEGGFL

SEQ ID NO: 36138 - DNA, 7402 bp, Muscodor strobelii
  misc_feature: SGI EST ID NO. CUFF.86208.0
  misc_feature: Variant of the nucleotide sequence at SEQ ID NO 36136
ctggtgtcggttcattcgcaataggcccaatagaccctgcccgtttttattattaatgggggaggcaaggtccaaagtggaggggcctatcatgtatgtatccaacagcgcggctttcctattacttgtatacatgggacactcttttgtccattcctccttttgactatccatctctggcggatcacctttcttttcttgttggctggcgactgggtggtttcttcatattggacctcgtagcctggccgagcgttgtgtgttaccaaatccatggggtatacgaataattccccgggaagttcacagaacctcaattcttcgttgtcctcgtgattctgccccttcgtcaacacctggcgcatagcatgtgcagtactcgggagaaacgtctctgcacacttttcctttctcccctaccagtgtcttgcttcggagtgagagcagatgaaccgacgaactcaatcttgagacgttagtcacttatgcgcagtgacccttcacgcttcgagcaccaggcaaaacttgcgcaaccttcgctgtaacggtcaccaatttcgggcacacaaaaccctgggccagcccggatggagggtatcctgctcgtgcccccagatcggggtacgatacttgggcgagctgtgtggaagccgcgatacgtcgtcattggtcctttatctcagaaagatgggtatcagtcaaattcctcgttgtctcaagtgttgtccgctgctcggattagagatggtggcgcctggtcttccaagcaacagcagaaaggctccacggacatggtttacttatccgtgttcaaatccaaggatgatctagagcccattcaccaacatccgatgcattcgataacagaatgtcaagtacagcaattggctcatcgtaagcagggccatgttcttcctacacttacagtccaaatatctcccgacccggcaaccgataagctgcgcaagcgacgatcgagtcgaacaggtggcttaacatcatccaaggatccaggacccacgatgttatactttcgccctgctgaagcgtcgcgatacggcttgggagattgggcacgatatattcacgcgcttatccagccagacgtaccaggacgagaaccgatgagcccaataagcccgctctcgacctctttcatgaatccatttgcgccgatcgcagatgcctcaaatgagctaccgtcagcgactacagctacgaagggaaaactacggtcgaaattgcagcctagatcatctggtcgcggacatccgtccacgcgcgatccagggtcagcgtacacctcagaatcacctagtctccgctcacggagaagtgatctctcttctcatgccagctccttgttaccagctgcgatgacattcgtgcagcagcattataccactttgcagcactctgatctcccttcccccgcctcaaccatcggcgaccaccaggagcagcaattgattgaaggatggacttcggcacaagggcgttcttcagctctcagctctcctataagaggcaggggtagtatcagctcatcccaagggcataacaaggctagcgcagattctgcctcaccccaaatgtctcacaaacctcgcgaaactatcttagatcgagcgttccagatgcgatgcattcccgggtctgaccggcctgttttgggggaggaaaaactgacgtcgcttgcgaagttcgaagccttgatgcgggaagcagaagacagaagaagacctatggaaaaggaacgattagacgaaattcaggagcctgtaaagagcacctgggaggaagatgatgaggacgaatccgacgatgataattctgacagagaagtcgaggacgatgatagtgatgacgacgtatttgaccagggcgagaactacgacgagatgaattcctccacggtcaaagcgttacagttcatcgtcaaccgccacagcgctatcagtggatctagagcttcacattatagtgattcgggggggcttgacgcacgaccgcacaccgcacactctagaacgagacccgcagcagctcagcgggcaataagtcaaccatatattccaaatccaccactctacctgccgtcttctcctcccagcagaccaatagatgaattctctcatcgacgaaatcatgaaaaaagacattcgacttccgatgtcaagaatatgaacttcaacgaatttgcgaagaggctaagcggaacgagtagtcttctcatcctgcaaacaaacactagtactggcagcagtcggggaagtggggattttgacactgctacacatacccctcgaggttctttatctccccttacacctagtgagcgagaagaacgctgccgatggcgcggtagcattggtgtttttggaggcaacgaaggcggattcttatgatgataatgccgttcagcccaaatgaattacttcgattcctgccctctggtctttgcacagctgcgagctagggctgtattacttacgacttgtcgatgatattcattgttacgattgatgaaggctgatttcaggcatcctgctacacgataacagacgatctcatatgcgccccacgtcgtgccgttgccgatatggcgtagggcctgagaattaaaaaaaatatcgctttgttgatggagatgcgttattctagatacgcggaagacaactcaaacaacagcaacaatagaatgctcccttgtcgcatcacgagtgtgttttccgtgtttcattcgaatacaactgcaaggccatgacacacggattcttcattcgaccagattggcattcaaactcctcacttttcttggtactaaatttcacctaattcaaggtggaagcttattagagtagcagcgcaccatggttgggaacgctcctcggaagttttacgcaaagatatgatagatacccttagctagcgccatatgcatagtatgaagaacaatcattcctatgtaattctctcacctgtctagtcaacccgaccttagtattcgaaacgggtgaacctggttaatggtccgaaggtgacgcgcacgcggctggaatataggtggggcgtgatacatagtgatctttagggtacaaagtcgattttatgagcctctgtcaaactcggatggtgctcagatcttcgatcactgctaccagtgagagcgcatggaagttgctgcggtgcatgcagtgtgtgtataccgacagtggcccattgatagaaccatataagtcggctccaggtttgggtaagtaacagaccttgtgctcaacaaacctataatatctcgtctcctaccagttgagtctatgtgacataattaacttatcatacgtcaaacaggccattagtgcacaacttctagtctaggtcaatgataactatccatctcgccatgacggtgacgggaggcggttggactgattgggtatctctatgccctgttcgtcagggcatgttcgagcatttctacacaagtactctacgcaacaatggtagacatgtgaatgacgatgtgacagtaggcgctatatcacgaactcattctcgccgagcaaaataaacttgtttaaaattgataattgcgtcgtttacgggttgacacatcagttatacctaaaacaaatgttgggtcgacgtaatcatgttggggggctagaagcgactatcccgtttggaccatggtgaacaaaatttatggattgaaagggccaatattaactcgctagccccaagattctaacctctcctatattgccgctgtcgaagaagttgatactcatcagtcgcactgaaaagactcagctcggtcaagccgactatggccaattctcgttactcacattctattaaagccaggaagtgtgtgctggcatcgttaaaccaggatgggaccagtttgaatgcttggcacctgcttctgctaccaaagttccaataagataccatacccacggcgccctaaagcaacaggggttgcgacggattcgaatagtccgcagatagtaaaacgccatgaacacacggacttgatctatcaaaatgttttgtcaagagtcacctgagattccctcaatatcaactaaaatcgacattgaagctttgatgagtgattttgcctcatttccctctccgagatcgcttcacgcgtaacgataatgtccacaagcctatgccgaggggccattggcttgaatcgaatgattcgtcgccgatctaatcgctctacaccgagctggcactgacctcgacacttcttgcccctttattgccacggctaaccgagagcatgagcgattggtctctgcggaaacgcgtagtatgacagcaagcgatcgtcagggcccaacaggcactttgggcattgtcagtgcttgcattcgtcttggccctgtgttctcgtccgaccactagaccctttcgctgcagcgtttagaccttgcgagaacccctgcgcttctccgcatcacgacgaatcgcgtcggtacagaactgcgtacatgatgaaattgcacatagcagatgaggggggctagagatgcatgctatgactgcaatatatgtcgcttgaggacggcacttatgagatgtgcagctttcggtattttgagaggggtatgtcgtatgggtgccatccgcttcaaaatatgcccaatgtattcctgcatggtccttttcaccgtgactacgattcaacgacagatgacatcaacggaataacgaaaagcgtgacaagattttggtgaaaaggtcgactgtctgccacatgtgaggatgataggccaagaaagtacacctatgcaatcgttacgagctttgacttcaaattcctcctacgtccatttcttaccaccactgttgggtattttgcgccacaagatgtgtcaagcctggcgctggtggtggtgtgtattaaacaatccggtttctttttctaaatcgtaaatttctggaaggatcttgctaatactattgctattcatgtggccgtggccctctcaatggggagggtgtctactgctggaggacgacttgttaagtagcttttgggagtttttttcttccgtgtttagctggtgactttgctcatgcaagctcctgagatggcccgggagcaaaattctggctgaaagaatcattactgactcccaatgcgtaggtgactctgattacgttcaaacgccttactgccctaatttgcaatgtgaggaacatgattcccacggcgccgactgttctgaatatgggatgtatcataaacgatattgatggagcacatatacgacgcaagaaggaacaatgacagagaggctgtttgttcaatacacattcgtcacggcttgttcttcctctccagattctcagggttagtgcaaccaggaacactagatagggctgtaacttagtcaacgagctggctttcgagttttcagttctaaacatgtcacttgacaacagtatcgcatttcactctatagcgacagataaatccagagctggtcatatacttaagctactcagtttcctcctaacatgtcgctgacagagctagaatattgttgaaaatacggtcgtcaatcataacgggacctaatcgcaatatccgacacgcaatatacaggactcggatgaaaattgactattttgtttgatttgttcgagtctcgcatatcagagcactcaattgtgtgagtttcaattccttcaatctcgcaaggtcttgaaactgtgttaaacgtaatgcaggccgattatcgtttcccgactccggcctatatgtttacttggatcgtgcaacccaggtttaaagaaacgtgatatgttccaacaagcttgagctccccatagtcgacaaggcttaatggttgctgtccagcaactagtaacgactacgtcctcgatagctgtattctggcttgtccagccaatcctcaactttatcccccgagttgatattgcttcggttgcctctaacttcttgactccgacttctatgatggcgatgatggtgatgatgctgactacgatgtcgcttttcgtcatgtcgggagtcgtgatgggcctcgtcacgatcgctacgaaggccgttcgacgtcttagactgcctcatcgtcttgctttcgcgtcgcgcttgcttctctccatttttgtccgtgcttttcgttgattgtacgatggcatgtgcaatattgtggctcttctcgaggtatggcaggtgatatactcctgcttgctcagggtggtattccgccgagtaattggcggtcgtgttggtgtatggtagctgtgccatatgatcttcgggatagggagaggggtaatgaggtattgttccagagcccgaaactttccattgaaacttgcctaaaactcgttagatgaatataacgatgactcatggaacaaactctttagttaccatctgatgcgagacgcgtttggtacatgaaacgaccatctgggtctagcataggctcagaccaagtgtagactacaggcaccacgtgaatagtggcttcatccaatgcatccgttattgcttcagacctagacgaaatactcgatgcatcatcgtcttcatgaccatggtggtggtggtggtgatggtgatgatgctcagagggtcttgattttgagcgatagctgtatgatcttagtggcggcgccatgaccgtcgcaaaacacaggccaacgttctacgaaagtgccggtagatacataccatggaatacaatttttttacgatgatgcaggggccggaatgatttttaagctttcatgaaccgcttcacagcctctgcgcactgcccaacttggcaatttcggtcgagtcatggaaaaaaccaaaaggcttcacgaaatccggattgcgcgtacatgccaacattgaacaacccctaaaatctaacgacatatgagccacaaagacagttacacaaaatcgcaaagctgacatgtcatttccgtctggaagtccaaattgccttgccagtcatacgacgaggcagtgctggaaattgccaaatatttgcacattgccacacttaaatatgtacgatgtcgtttcctcatatcaaacgattgcatccactaatactttatgaatcatgcggaatgtctagcttggcactaccgctggaagtcggtaggtctttcccaacagaaaaattccatttgcctgagtctgggactcccatcctacaagttttgggaatttcgcaaatgcaagattatgcagtgatcattagaccgagcgagtgacaaggtctagggagtaccttacatgacggcttccccaagagtgaggctgacaagtgaacgatgattcgtcgctgggattaggcggcacaaccgttgcctaaaaggtcaatatttgcagtcggcgtgctttgga

SEQ ID NO: 36139 - DNA, 597 bp, Muscodor strobelii
  misc_feature: SGI cDNA ID NO. 572525
  misc_feature: Reduced expression when VOC is produced
  misc_feature: Encodes the peptide sequence at SEQ ID NO 36140
atggtcatgaagacgatgatgcatcgagtatttcgtctagtctacacttggtctgagcctatgctagacccagatggtcgtttcatgtaccaaacgcgtctcgcatcagatggcaagtttcaatggaaagtttcgggctctggaacaatacctcattacccctctccctatcccgaagatcatatggcacagctaccatacaccaacacgaccgccaattactcggcggaataccaccctgagcaagcaggagtatatcacctgccatacctcgagaagagccacaatattgcacatgccatcgtacaatcaacgaaaagcacggacaaaaatggagagaagcaagcgcgacgcgaaagcaagacgatgaggcagtctaagacgtcgaacggccttcgtagcgatcgtgacgaggcccatcacgactcccgacatgacgaaaagcgacatcgtagtcagcatcatcaccatcatcgccatcatagaagtcggagtcaagaagttagaggcaaccgaagcaatatcaactcgggggataaagttgaggattggctggacaagccagaatacagctatcgaggacgtagtcgttactag

SEQ ID NO: 36140 - protein, 198 aa, Muscodor strobelii
  misc_feature: SGI Peptide ID NO. 572525
  misc_feature: Useful for introducing or modulating the production of volatile compounds
MVMKTMMHRVFRLVYTWSEPMLDPDGRFMYQTRLASDGKFQWKVSGSGTIPHYPSPYPEDHMAQLPYTNTTANYSAEYHPEQAGVYHLPYLEKSHNIAHAIVQSTKSTDKNGEKQARRESKTMRQSKTSNGLRSDRDEAHHDSRHDEKRHRSQHHHHHRHHRSRSQEVRGNRSNINSGDKVEDWLDKPEYSYRGRSRY

SEQ ID NO: 36141 - DNA, 7658 bp, Muscodor strobelii
  misc_feature: SGI EST ID NO. CUFF.86209.1
  misc_feature: Variant of the nucleotide sequence at SEQ ID NO 36139
tccaaagcacgccgactgcaaatattgaccttttaggcaacggttgtgccgcctaatcccagcgacgaatcatcgttcacttgtcagcctcactcttggggaagccgtcatgtaaggtactccctagaccttgtcactcgctcggtctaatgatcactgcataatcttgcatttgcgaaattcccaaaacttgtaggatgggagtcccagactcaggcaaatggaatttttctgttgggaaagacctaccgacttccagcggtagtgccaagctagacattccgcatgattcataaagtattagtggatgcaatcgtttgatatgaggaaacgacatcgtacatatttaagtgtggcaatgtgcaaatatttggcaatttccagcactgcctcgtcgtatgactggcaaggcaatttggacttccagacggaaatgacatgtcagctttgcgattttgtgtaactgtctttgtggctcatatgtcgttagattttaggggttgttcaatgttggcatgtacgcgcaatccggatttcgtgaagccttttggttttttccatgactcgaccgaaattgccaagttgggcagtgcgcagaggctgtgaagcggttcatgaaagcttaaaaatcattccggcccctgcatcatcgtaaaaaaattgtattccatggtatgtatctaccggcactttcgtagaacgttggcctgtgttttgcgacggtcatggcgccgccactaagatcatacagctatcgctcaaaatcaagaccctctgagcatcatcaccatcaccaccaccaccaccatggtcatgaagacgatgatgcatcgagtatttcgtctaggtctgaagcaataacggatgcattggatgaagccactattcacgtggtgcctgtagtctacacttggtctgagcctatgctagacccagatggtcgtttcatgtaccaaacgcgtctcgcatcagatggcaagtttcaatggaaagtttcgggctctggaacaatacctcattacccctctccctatcccgaagatcatatggcacagctaccatacaccaacacgaccgccaattactcggcggaataccaccctgagcaagcaggagtatatcacctgccatacctcgagaagagccacaatattgcacatgccatcgtacaatcaacgaaaagcacggacaaaaatggagagaagcaagcgcgacgcgaaagcaagacgatgaggcagtctaagacgtcgaacggccttcgtagcgatcgtgacgaggcccatcacgactcccgacatgacgaaaagcgacatcgtagtcagcatcatcaccatcatcgccatcatagaagtcggagtcaagaagttagaggcaaccgaagcaatatcaactcgggggataaagttgaggattggctggacaagccagaatacagctatcgaggacgtagtcgttactagttgctggacagcaaccattaagccttgtcgactatggggagctcaagcttgttggaacatatcacgtttctttaaacctgggttgcacgatccaagtaaacatataggccggagtcgggaaacgataatcggcctgcattacgtttaacacagtttcaagaccttgcgagattgaaggaattgaaactcacacaattgagtgctctgatatgcgagactcgaacaaatcaaacaaaatagtcaattttcatccgagtcctgtatattgcgtgtcggatattgcgattaggtcccgttatgattgacgaccgtattttcaacaatattctagctctgtcagcgacatgttaggaggaaactgagtagcttaagtatatgaccagctctggatttatctgtcgctatagagtgaaatgcgatactgttgtcaagtgacatgtttagaactgaaaactcgaaagccagctcgttgactaagttacagccctatctagtgttcctggttgcactaaccctgagaatctggagaggaagaacaagccgtgacgaatgtgtattgaacaaacagcctctctgtcattgttccttcttgcgtcgtatatgtgctccatcaatatcgtttatgatacatcccatattcagaacagtcggcgccgtgggaatcatgttcctcacattgcaaattagggcagtaaggcgtttgaacgtaatcagagtcacctacgcattgggagtcagtaatgattctttcagccagaattttgctcccgggccatctcaggagcttgcatgagcaaagtcaccagctaaacacggaagaaaaaaactcccaaaagctacttaacaagtcgtcctccagcagtagacaccctccccattgagagggccacggccacatgaatagcaatagtctagtgtaccaaaacatgttagtccgttttcctattcgtggtattctataatggcattgttatgttctagattttcccggtcgttgccaggttctgtgatcgaatcaaataatacttactattacgtacattagcaagatccttccagaaatttacgatttagaaaaagaaaccggattgtttaatacacaccaccaccagcgccaggcttgacacatcttgtggcgcaaaatacccaacagtggtggtaagaaatggacgtaggaggaatttgaagtcaaagctcgtaacgattgcataggtgtactttcttggcctggttatctggtcagtatcctgccataagggctcgccggtcatagcctacctatcatcctcacatgtggcagacagtcgaccttttcaccaaaatcttgtcacgcttttcgttattccgttgatgtcatctgtcgttgaatcgtagtcacggtgaaaaggaccatgcaggaatacattgggcatattttgaagcggatggcacccatacgacatacccctctcaaaataccgaaagctgcacatctcataagtgccgtcctcaagcgacatatattgcagtcatagcatgcatctctagcccccctcatctgctatgtgcaatttcatcatgtacgcagttctgtaccgacgcgattcgtcgtgatgcggagaagcgcaggggttctcgcaaggtctaaacgctgcagcgaaagggtctagtggtcggacgagaacacagggccaagacgaatgcaagcactgacaatgcccaaagtgcctgttgggccctgacgatcgcttgctgtcatactacgcgtttccgcagagaccaatcgctcatgctctcggttagccgtggcaataaaggggcaagaagtgtcgaggtcagtgccagctcggtgtagagcgattagatcggcgacgaatcattcgattcaagccaatggcccctcggcataggcttgtggacattatcgttacgcgtgaagcgatctcggagagggaaatgaggcaaaatcactcatcaaagcttcaatgtcgattttagttgatattgagggaatctcaggtgactcttgacaaaacattttgatagatcaagtccgtgtgttcatggcgttttactatctgcggactattcgaatccgtcgcaacccctgttgctttagggcgccgtgggtatggtatcttattggaactttggtagcagaagcaggtgccaagcattcaaactggtcccatcctggtttaacgatgccagcacacacttcctggctttaatagaattgcgactgatgagtatcaacttcttcgacagcggcaatataggagaggttagaatcttggggctagcgagttaatattggccctttcaatccataaattttgttcaccatggtccaaacgggatagtcgcttctagccccccaacatgattacgtcgacccaacatttgttttaggtataactgatgtgtcaacccgtaaacgacgcaattatcaattttaaacaagtttattttgctcggcgagaatgagttcgtgatatagcgcctactgtcacatcgtcattcacatgtctaccattgttgcgtagagtacttgtgtagaaatgctcgaacatgccctgacgaacagggcatagagatacccaatcagtccaaccgcctcccgtcaccgtcatggcgagatggatagttatcattgacctagactagaagttgtgcactaatggcctgtttgacgtatgataagttaattatgtcacatagactcaactggtaggagacgagatattataggtttgttgagcacaaggtctgttacttacccaaacctggagccgacttatatggttctatcaatgggccactgtcggtatacacacactgcatgcaccgcagcaacttccatgcgctctcactggtagcagtgatcgaagatctgagcaccatccgagtttgacagaggctcataaaatcgactttgtaccctaaagatcactatgtatcacgccccacctatattccagccgcgtgcgcgtcaccttcggaccattaaccaggttcacccgtttcgaatactaaggtcgggttgactagatctctgttctgttagtctgaaaacagctcgggacctcaagcaagcactgctcagagtaactagtacctagacaggtgagagaattacataggaatgattgttcttcatactatgcatatggcgctagctaagggtatctatcatatctttgcgtaaaacttccgaggagcgttcccaaccatggtgcgctgctactctaataagcttccaccttgaattaggtgaaatttagtaccaagaaaagtgaggagtttgaatgccaatctggtcgaatgaagaatccgtgtgtcatggccttgcagttgtattcgaatgaaacacggaaaacacactcgtgatgcgacaagggagcattctattgttgctgttgtttgagttgtcttccgcgtatctagaataacgcatctccatcaacaaagcgatattttttttaattctcaggccctacgccatatcggcaacggcacgacgtggggcgcatatgagatcgtctgttatcgtgtagcaggatgcctgaaatcagccttcatcaatcgtaacaatgaatatcatcgacaagtcgtaagtaatacagccctagctcgcagctgtgcaaagaccagagggcaggaatcgaagtaattcatttgggctgaacggcattatcatcataagaatccgccttcgttgcctccaaaaacaccaatgctaccgcgccatcggcagcgttcttctcgctcactaggtgtaaggggagataaagaacctcgaggggtatgtgtagcagtgtcaaaatccccacttccccgactgctgccagtactagtgtttgtttgcaggatgagaagactactcgttccgcttagcctcttcgcaaattcgttgaagttcatattcttgacatcggaagtcgaatgtcttttttcatgatttcgtcgatgagagaattcatctattggtctgctgggaggagaagacggcaggtagagtggtggatttggaatatatggttgacttattgcccgctgagctgctgcgggtctcgttctagagtgtgcggtgtgcggtcgtgcgtcaagcccccccgaatcactataatgtgaagctctagatccactgatagcgctgtggcggttgacgatgaactgtaacgctttgaccgtggaggaattcatctcgtcgtagttctcgccctggtcaaatacgtcgtcatcactatcatcgtcctcgacttctctgtcagaattatcatcgtcggattcgtcctcatcatcttcctcccaggtgctctttacaggctcctgaatttcgtctaatcgttccttttccataggtcttcttctgtcttctgcttcccgcatcaaggcttcgaacttcgcaagcgacgtcagtttttcctcccccaaaacaggccggtcagacccgggaatgcatcgcatctggaacgctcgatctaagatagtttcgcgaggtttgtgagacatttggggtgaggcagaatctgcgctagccttgttatgcccttgggatgagctgatactacccctgcctcttataggagagctgagagctgaagaacgcccttgtgccgaagtccatccttcaatcaattgctgctcctggtggtcgccgatggttgaggcgggggaagggagatcagagtgctgcaaagtggtataatgctgctgcacgaatgtcatcgcagctggtaacaaggagctggcatgagaagagagatcacttctccgtgagcggagactaggtgattctgaggtgtacgctgaccctggatcgcgcgtggacggatgtccgcgaccagatgatctaggctgcaatttcgaccgtagttttcccttcgtagctgtagtcgctgacggtagctcatttgaggcatctgcgatcggcgcaaatggattcatgaaagaggtcgagagcgggcttattgggctcatcggttctcgtcctggtacgtctggctggataagcgcgtgaatatatcgtgcccaatctcccaagccgtatcgcgacgcttcagcagggcgaaagtataacatcgtgggtcctggatccttggatgatgttaagccacctgttcgactcgatcgtcgcttgcgcagcttatcggttgccgggtcgggagatatttggactgtaagtgtaggaagaacatggccctgcttacgatgagccaattgctgtacttgacattctgttatcgaatgcatcggatgttggtgaatgggctctagatcatcctgtaaaacaatcagtccaatcgatcaagattatcccacacactgctagcaagcacaccttggatttgaacacggataagtaaaccatgtccgtggagcctttctgctgttgcttggaagaccaggcgccaccatctctaatccgagcagcggacaacacttgagacaacgaggaatttgactgatacccatctttctgagataaaggaccaatgacgacgtatcgcggctaaagacaattagactgtgaccgaagctatgagagcaaaggggcaatgactaccttccacacagctcgcccaagtatcgtaccccgatctgggggcacgagcaggataccctccatccgggctggcccagggttttgtgtgcccgaaattggtgaccgttacagcgaaggttgcgcaagttttgcctggtgctcgaagcgtgaagggtcactgcgcataagtgactaacgtctcaagattgagttcgtcggttcatctgctctcactccgaagcaagacactggtaggggagaaaggaaaagtgtgcagagacgtttctcccgagtactgcacatgctatgcgccaggtgttgacgaaggggcagaatcacgaggacaacgaagaattgaggttctgtgaacttcccggggaattattcgtataccccatggatttggtaacacacaacgctcggccaggctacgaggtccaatatgaagaaaccacccagtcgccagccaacaagaaaagaaaggtgatccgccagagatggatagtcaaaaggaggaatggacaaaagagtgtcccatgtatacaagtaataggaaagccgcgctgttggatacatacatgataggcccctccactttggaccttgcctcccccattaataataaaaacgggcagggtctattgggcctattgcgaatgaaccgacaccag

SEQ ID NO: 36142 - DNA, 1344 bp, Muscodor strobelii
  misc_feature: SGI cDNA ID NO. 572526
  misc_feature: Reduced expression when VOC is produced
  misc_feature: Encodes the peptide sequence at SEQ ID NO 36143
atggccggcctcactaagctgcgggttgttcgaaaccctaactatcaacgacacggattgaaaagctacgtatcattgatgaacaagtttggtttcgattcaacgaaagaaggaccgtattgccatatcaaccggatcactcaaagaggcctcgcccgtaatgagcacaaagcaggtggccgtgctcgcacggagcatcttctcgtcaagaaggctacttcaggcagtgaaagtcaaacaggacaggtcactgcagaggatcaacagaacgatactgagtacctagttgaagtcgagatcggaacaccggcgcaaaagcttcttttagactttgacacaggctcctcagacctctgggtcttctctaccagcctgagcaagtccatacagtcaggtcataacgtcttcgacccatcgaagagttctacttggaaagctttgtcaggcgagagctggaatatttcatacggtgacggaagctcagcatctggtacctgcggaagtgacgtgctgaacataggtggagttaaggtacagtcgcagacagtcgagctcgccgataagttgtcggaccagtttgcacagagtactggcgatggtcttctgggtcttgcattcagcagcatcaataccgtcacgcccgatcaggctgaaacacccgtagcgaacatgatatcgcagggcgatattcctgctgattctcagttatttaccagcgccttctacagcgagagagatgacggggcagaatcgttttatacctttgggtttatcgatcaagatctcgtctcccaatctggttcagacatcatctacaccgacattgataattcacaaggcttttggatgttcgactcggcatcgtactcactgaacggcaaaacttccaccattagcggaaacaaggcgattgcggacacgggtaccactttgatgctagtaagtgacgaagtcgtagaggctttatacaagcaaattccgggcgccacatatgattcaacccaacaaggatacatcttcccgacgagcgtaactgcagatacgctacctgacttcaccgtcgccgtcggtgatacccaatttactatccagaaagaagcccttgcctttgccttggctgacgagagtcactggtatgggggcgttcagtcacgtggcacaaatcctttcgacattctcggagacgtattcctccgcaatatctatgccatctgggaccagggtaacactcgtttcggcgcagtccccaaattgcaggccacgcagaatctgacgccgccttctgacactgcgcaaagtagtagcgagaagaagacaagcgaggcacttttggctcgtatgtag

SEQ ID NO: 36143 - protein, 447 aa, Muscodor strobelii
  misc_feature: SGI Peptide ID NO. 572526
  misc_feature (93)..(415): Pfam Id: PF00026 Pfam Desc: Eukaryotic aspartyl protease
  misc_feature (3)..(424): NCBI GI: 145583125 Blast Desc: aspartic endopeptidase [Hypocrea lixii]
  misc_feature (3)..(424): NCBI GI: 118161440 Blast Desc: aspartyl proteinase [Hypocrea lixii]
  misc_feature (3)..(429): NCBI GI: 51860175 Blast Desc: aspartyl proteinase [Trichoderma asperellum]
  misc_feature (1)..(427): NCBI GI: 12002205 Blast Desc: AF121229_1 aspartic proteinase precursor [Botryotinia fuckeliana]
  misc_feature (5)..(417): NCBI GI: 242791151 Blast Desc: aspartic endopeptidase (AP1), [Talaromyces stipitatus ATCC 10500] gi|218718289|gb|EED17709.1| aspartic endopeptidase (AP1), [Talaromyces stipitatus ATCC 10500]
  misc_feature (1)..(428): NCBI GI: 156055954 Blast Desc: SS1G_05329 [Sclerotinia sclerotiorum 1980] gi|154703113|gb|EDO02852.1| SS1G_05329 [Sclerotinia sclerotiorum 1980]
  misc_feature (5)..(424): NCBI GI: 119887992 Blast Desc: PEPAb [Aspergillus niger]
  misc_feature (6)..(427): NCBI GI: 119467426 Blast Desc: aspartic endopeptidase (AP1), [Neosartorya fischeri NRRL 181] gi|119405671|gb|EAW15622.1| aspartic endopeptidase (AP1), [Neosartorya fischeri NRRL 181]
  misc_feature (4)..(426): NCBI GI: 116197829 Blast Desc: CHGG_07070 [Chaetomium globosum CBS 148.51] gi|88178349|gb|EAQ85817.1| CHGG_07070 [Chaetomium globosum CBS 148.51]
  misc_feature (3)..(427): NCBI GI: 85102020 Blast Desc: NCU04269 [Neurospora crassa OR74A] gi|16944483|emb|CAC28744.2| related to pepsin precursor [Neurospora crassa] gi|28922802|gb|EAA32024.1| NCU04269 crassa
  misc_feature (13)..(413): SWISSPROT Homolog: EC 3.4.23.18 Aspergillopepsin I
  misc_feature: Useful for introducing or modulating the production of volatile compounds
MAGLTKLRVVRNPNYQRHGLKSYVSLMNKFGFDSTKEGPYCHINRITQRGLARNEHKAGGRARTEHLLVKKATSGSESQTGQVTAEDQQNDTEYLVEVEIGTPAQKLLLDFDTGSSDLWVFSTSLSKSIQSGHNVFDPSKSSTWKALSGESWNISYGDGSSASGTCGSDVLNIGGVKVQSQTVELADKLSDQFAQSTGDGLLGLAFSSINTVTPDQAETPVANMISQGDIPADSQLFTSAFYSERDDGAESFYTFGFIDQDLVSQSGSDIIYTDIDNSQGFWMFDSASYSLNGKTSTISGNKAIADTGTTLMLVSDEVVEALYKQIPGATYDSTQQGYIFPTSVTADTLPDFTVAVGDTQFTIQKEALAFALADESHWYGGVQSRGTNPFDILGDVFLRNIYAIWDQGNTRFGAVPKLQATQNLTPPSDTAQSSSEKKTSEALLARM

SEQ ID NO: 36144 - DNA, 2374 bp, Muscodor strobelii
  misc_feature: SGI EST ID NO. CUFF.86220.2
  misc_feature: Variant of the nucleotide sequence at SEQ ID NO 36142
gtgacatctgtctcttctcctagcttagcattctataaatataggaaagtttacgcgtttatcttctactgtattccaaactttgtcaatctagcttcgaagcagaaacagatatccttttatgtcccatatcagatcagctgcaatggccggcctcactaagctgcgggttgttcgaaaccctaactatcaacgacacggattgaaaagctacgtatcattgatgaacaagtttggtttcgattcaacgaaagaaggaccgtattgccatatcaaccggatcactcaaagaggcctcgcccgtaatgagcacaaagcaggtggccgtgctcgcacggagcatcttctcgtcaagaaggctacttcaggcagtgaaagtcaaacaggacaggtcactgcagaggatcaacagaacgatactgagtacctagttgaagtcgagatcggaacaccggcgcaaaagcttcttttagactttgacacaggcgtaagcagtctctagaatcatccatttcctgcctcataggatttcgtgagctagtttctttcatatcttgagcctgtgctctgagaatactgttgaaccacactaaaccctcatataacatataataagaagttgaaactaaatcatcgaaaatgttacagtcctcagacctctgggtcttctctaccagcctgagcaagtccatacagtcaggtcataacgtcttcgacccatcgaagagttctacttggaaagctttgtcaggcgagagctggaagtatgtaaatgagggtgcatataccaacccggagtttgggatcgttcacaatttcttccaatttcagagaaaatgcacatcctcctctttggaggccgaatgctaacttaacaatagtatttcatacggtgacggaagctcagcatctggtacctgcggaagtgacgtgctgaacataggtggagttaaggtacagtcgcagacagtcgagctcgccgataagttgtcggaccagtttgcacagagtactggcgatggtcttctgggtcttgcattcagcagcatcaataccgtcacgcccgatcaggctgaaacacccgtagcgaacatgatatcgcagggcgatattcctgctgattctcagttatttaccagcgccttctacagcgagagagatgacggggcagaatcgttttatacctttgggtttatcgatcaagatctcgtctcccaatctggttcagacatcatctacaccgacattgataattcacaaggcttttggatgttcgactcggcatcgtactcactgaacggcaaaacttccaccattagcggaaacaaggcgattgcggacacgggtaccactttgatgctagtaagtgacgaagtcgtagaggctttatacaagcaaattccgggcgccacatatgattcaacccaacaaggatacatcttcccgacgagcgtaactgcagatacgctacctgacttcaccgtcgccgtcggtgatacccaatttactatccagaaagaagcccttgcctttgccttggctgacgagagtcactggtatgggggcgttcagtcacgtggcacaaatcctttcgacattctcggagacgtattcctccgcaatatctatgccatctgggaccagggtaacactcgtttcggcgcagtccccaaattgcaggccacgcagaatctgacgccgccttctgacactgcgcaaagtagtagcgagaagaagacaagcgaggcacttttggctcgtatgtagtcatgagatacgttctaggaggttataggaaagaacgtaagagaatgaagcggaggcacgaataggagggtatagctctttgttgttaagtacaacgttttagtctctgttacaaatcactttgcttaatacttgagtatcttaccatatgcgttatatcaattgtgatgctagcctcacggaaaagctcacattggtatcgtgcaatctatggtatagcctatagggcaggagttatagctgcgtctcggattacatgtgatactcatgttagactgccaaaatgcaactttgggagaaagcgagccaaactcgtagagacttagtggcaggggcacatagcttctgcaattattgtgacagcaacccaccctactgcagtagttcgcgatcttagtgtctcatatctcgaggcacaagatcgctgttgatatgatagtcttagtgtattatgaggtgaagttgtcaactacccaatcctctcaacagccttcccctgtcttgatggctcaacattggctgtagacctggaagagaaaagcttcaaggtgcgggtaagctcatgagtagttgagcactcgtcaacatattctcggctacgtaaatg

SEQ ID NO: 36145 - DNA, 1419 bp, Muscodor strobelii
  misc_feature: SGI cDNA ID NO. 572527
  misc_feature: Encodes the peptide sequence at SEQ ID NO 36146
atgtcccatatcagatcagctgcaatggccggcctcactaagctgcgggttgttcgaaaccctaactatcaacgacacggattgaaaagctacgtatcattgatgaacaagtttggtttcgattcaacgaaagaaggaccgtattgccatatcaaccggatcactcaaagaggcctcgcccgtaatgagcacaaagcaggtggccgtgctcgcacggagcatcttctcgtcaagaaggctacttcaggcagtgaaagtcaaacaggacaggtcactgcagaggatcaacagaacgatactgagtacctagttgaagtcgagatcggaacaccggcgcaaaagcttcttttagactttgacacaggctcctcagacctctgggtaagttcccgtatatcaagtcatagatcatcgctaatgaatcgtttgaaggtcttctctaccagcctgagcaagtccatacagtcaggtcataacgtcttcgacccatcgaagagttctacttggaaagctttgtcaggcgagagctggaatatttcatacggtgacggaagctcagcatctggtacctgcggaagtgacgtgctgaacataggtggagttaaggtacagtcgcagacagtcgagctcgccgataagttgtcggaccagtttgcacagagtactggcgatggtcttctgggtcttgcattcagcagcatcaataccgtcacgcccgatcaggctgaaacacccgtagcgaacatgatatcgcagggcgatattcctgctgattctcagttatttaccagcgccttctacagcgagagagatgacggggcagaatcgttttatacctttgggtttatcgatcaagatctcgtctcccaatctggttcagacatcatctacaccgacattgataattcacaaggcttttggatgttcgactcggcatcgtactcactgaacggcaaaacttccaccattagcggaaacaaggcgattgcggacacgggtaccactttgatgctagtaagtgacgaagtcgtagaggctttatacaagcaaattccgggcgccacatatgattcaacccaacaaggatacatcttcccgacgagcgtaactgcagatacgctacctgacttcaccgtcgccgtcggtgatacccaatttactatccagaaagaagcccttgcctttgccttggctgacgagagtcactggtatgggggcgttcagtcacgtggcacaaatcctttcgacattctcggagacgtattcctccgcaatatctatgccatctgggaccagggtaacactcgtttcggcgcagtccccaaattgcaggccacgcagaatctgacgccgccttctgacactgcgcaaagtagtagcgagaagaagacaagcgaggcacttttggctcgtatgtag

SEQ ID NO: 36146 - protein, 472 aa, Muscodor strobelii
  misc_feature: SGI Peptide ID NO. 572527
  misc_feature (101)..(440): Pfam Id: PF00026 Pfam Desc: Eukaryotic aspartyl protease
  misc_feature (11)..(449): NCBI GI: 145583125 Blast Desc: aspartic endopeptidase [Hypocrea lixii]
  misc_feature (11)..(449): NCBI GI: 118161440 Blast Desc: aspartyl proteinase [Hypocrea lixii]
  misc_feature (11)..(454): NCBI GI: 51860175 Blast Desc: aspartyl proteinase [Trichoderma asperellum]
  misc_feature (7)..(452): NCBI GI: 12002205 Blast Desc: AF121229_1 aspartic proteinase precursor [Botryotinia fuckeliana]
  misc_feature (13)..(442): NCBI GI: 242791151 Blast Desc: aspartic endopeptidase (AP1), [Talaromyces stipitatus ATCC 10500] gi|218718289|gb|EED17709.1| aspartic endopeptidase (AP1), [Talaromyces stipitatus ATCC 10500]
  misc_feature (7)..(453): NCBI GI: 156055954 Blast Desc: SS1G_05329 [Sclerotinia sclerotiorum 1980] gi|154703113|gb|EDO02852.1| SS1G_05329 [Sclerotinia sclerotiorum 1980]
  misc_feature (13)..(449): NCBI GI: 119887992 Blast Desc: PEPAb [Aspergillus niger]
  misc_feature (14)..(452): NCBI GI: 119467426 Blast Desc: aspartic endopeptidase (AP1), [Neosartorya fischeri NRRL 181] gi|119405671|gb|EAW15622.1| aspartic endopeptidase (AP1), [Neosartorya fischeri NRRL 181]
  misc_feature (12)..(451): NCBI GI: 116197829 Blast Desc: CHGG_07070 [Chaetomium globosum CBS 148.51] gi|88178349|gb|EAQ85817.1| CHGG_07070 [Chaetomium globosum CBS 148.51]
  misc_feature (11)..(452): NCBI GI: 85102020 Blast Desc: NCU04269 [Neurospora crassa OR74A] gi|16944483|emb|CAC28744.2| related to pepsin precursor [Neurospora crassa] gi|28922802|gb|EAA32024.1| NCU04269 crassa
  misc_feature (21)..(438): SWISSPROT Homolog: EC 3.4.23.18 Aspergillopepsin I
MSHIRSAAMAGLTKLRVVRNPNYQRHGLKSYVSLMNKFGFDSTKEGPYCHINRITQRGLARNEHKAGGRARTEHLLVKKATSGSESQTGQVTAEDQQNDTEYLVEVEIGTPAQKLLLDFDTGSSDLWVSSRISSHRSSLMNRLKVFSTSLSKSIQSGHNVFDPSKSSTWKALSGESWNISYGDGSSASGTCGSDVLNIGGVKVQSQTVELADKLSDQFAQSTGDGLLGLAFSSINTVTPDQAETPVANMISQGDIPADSQLFTSAFYSERDDGAESFYTFGFIDQDLVSQSGSDIIYTDIDNSQGFWMFDSASYSLNGKTSTISGNKAIADTGTTLMLVSDEVVEALYKQIPGATYDSTQQGYIFPTSVTADTLPDFTVAVGDTQFTIQKEALAFALADESHWYGGVQSRGTNPFDILGDVFLRNIYAIWDQGNTRFGAVPKLQATQNLTPPSDTAQSSSEKKTSEALLARM

SEQ ID NO: 36147 - DNA, 2374 bp, Muscodor strobelii; identical to SEQ ID NO: 36144
  misc_feature: SGI EST ID NO. CUFF.86220.2
  misc_feature: Variant of the nucleotide sequence at SEQ ID NO 36145

SEQ ID NO: 36148 - DNA, 1395 bp, Muscodor strobelii
  misc_feature: SGI cDNA ID NO. 572528
  misc_feature: Encodes the peptide sequence at SEQ ID NO 36149
atggccggcctcactaagctgcgggttgttcgaaaccctaactatcaacgacacggattgaaaagctacgtatcattgatgaacaagtttggtttcgattcaacgaaagaaggaccgtattgccatatcaaccggatcactcaaagaggcctcgcccgtaatgagcacaaagcaggtggccgtgctcgcacggagcatcttctcgtcaagaaggctacttcaggcagtgaaagtcaaacaggacaggtcactgcagaggatcaacagaacgatactgagtacctagttgaagtcgagatcggaacaccggcgcaaaagcttcttttagactttgacacaggctcctcagacctctgggtaagttcccgtatatcaagtcatagatcatcgctaatgaatcgtttgaaggtcttctctaccagcctgagcaagtccatacagtcaggtcataacgtcttcgacccatcgaagagttctacttggaaagctttgtcaggcgagagctggaatatttcatacggtgacggaagctcagcatctggtacctgcggaagtgacgtgctgaacataggtggagttaaggtacagtcgcagacagtcgagctcgccgataagttgtcggaccagtttgcacagagtactggcgatggtcttctgggtcttgcattcagcagcatcaataccgtcacgcccgatcaggctgaaacacccgtagcgaacatgatatcgcagggcgatattcctgctgattctcagttatttaccagcgccttctacagcgagagagatgacggggcagaatcgttttatacctttgggtttatcgatcaagatctcgtctcccaatctggttcagacatcatctacaccgacattgataattcacaaggcttttggatgttcgactcggcatcgtactcactgaacggcaaaacttccaccattagcggaaacaaggcgattgcggacacgggtaccactttgatgctagtaagtgacgaagtcgtagaggctttatacaagcaaattccgggcgccacatatgattcaacccaacaaggatacatcttcccgacgagcgtaactgcagatacgctacctgacttcaccgtcgccgtcggtgatacccaatttactatccagaaagaagcccttgcctttgccttggctgacgagagtcactggtatgggggcgttcagtcacgtggcacaaatcctttcgacattctcggagacgtattcctccgcaatatctatgccatctgggaccagggtaacactcgtttcggcgcagtccccaaattgcaggccacgcagaatctgacgccgccttctgacactgcgcaaagtagtagcgagaagaagacaagcgaggcacttttggctcgtatgtag

SEQ ID NO: 36149 - protein, 464 aa, Muscodor strobelii
  misc_feature: SGI Peptide ID NO. 572528
  misc_feature (93)..(432): Pfam Id: PF00026 Pfam Desc: Eukaryotic aspartyl protease
  misc_feature (3)..(441): NCBI GI: 145583125 Blast Desc: aspartic endopeptidase [Hypocrea lixii]
  misc_feature (3)..(441): NCBI GI: 118161440 Blast Desc: aspartyl proteinase [Hypocrea lixii]
  misc_feature (3)..(446): NCBI GI: 51860175 Blast Desc: aspartyl proteinase [Trichoderma asperellum]
  misc_feature (1)..(444): NCBI GI: 12002205 Blast Desc: AF121229_1 aspartic proteinase precursor [Botryotinia fuckeliana]
  misc_feature (5)..(434): NCBI GI: 242791151 Blast Desc: aspartic endopeptidase (AP1), [Talaromyces stipitatus ATCC 10500] gi|218718289|gb|EED17709.1| aspartic endopeptidase (AP1), [Talaromyces stipitatus ATCC 10500]
  misc_feature (1)..(445): NCBI GI: 156055954 Blast Desc: SS1G_05329 [Sclerotinia sclerotiorum 1980] gi|154703113|gb|EDO02852.1| SS1G_05329 [Sclerotinia sclerotiorum 1980]
  misc_feature (5)..(441): NCBI GI: 119887992 Blast Desc: PEPAb [Aspergillus niger]
  misc_feature (6)..(444): NCBI GI: 119467426 Blast Desc: aspartic endopeptidase (AP1), [Neosartorya fischeri NRRL 181] gi|119405671|gb|EAW15622.1| aspartic endopeptidase (AP1), [Neosartorya fischeri NRRL 181]
  misc_feature (4)..(443): NCBI GI: 116197829 Blast Desc: CHGG_07070 [Chaetomium globosum CBS 148.51] gi|88178349|gb|EAQ85817.1| CHGG_07070 [Chaetomium globosum CBS 148.51]
  misc_feature (3)..(444): NCBI GI: 85102020 Blast Desc: NCU04269 [Neurospora crassa OR74A] gi|16944483|emb|CAC28744.2| related to pepsin precursor [Neurospora crassa] gi|28922802|gb|EAA32024.1| NCU04269 crassa
  misc_feature (13)..(430): SWISSPROT Homolog: EC 3.4.23.18 Aspergillopepsin I
MAGLTKLRVVRNPNYQRHGLKSYVSLMNKFGFDSTKEGPYCHINRITQRGLARNEHKAGGRARTEHLLVKKATSGSESQTGQVTAEDQQNDTEYLVEVEIGTPAQKLLLDFDTGSSDLWVSSRISSHRSSLMNRLKVFSTSLSKSIQSGHNVFDPSKSSTWKALSGESWNISYGDGSSASGTCGSDVLNIGGVKVQSQTVELADKLSDQFAQSTGDGLLGLAFSSINTVTPDQAETPVANMISQGDIPADSQLFTSAFYSERDDGAESFYTFGFIDQDLVSQSGSDIIYTDIDNSQGFWMFDSASYSLNGKTSTISGNKAIADTGTTLMLVSDEVVEALYKQIPGATYDSTQQGYIFPTSVTADTLPDFTVAVGDTQFTIQKEALAFALADESHWYGGVQSRGTNPFDILGDVFLRNIYAIWDQGNTRFGAVPKLQATQNLTPPSDTAQSSSEKKTSEALLARM

SEQ ID NO: 36150 - DNA, 2374 bp, Muscodor strobelii; identical to SEQ ID NO: 36144
  misc_feature: SGI EST ID NO. CUFF.86220.2
  misc_feature: Variant of the nucleotide sequence at SEQ ID NO 36148

SEQ ID NO: 36151 - DNA, 1368 bp, Muscodor strobelii
  misc_feature: SGI cDNA ID NO. 572529
  misc_feature: Encodes the peptide sequence at SEQ ID NO 36152
atgtcccatatcagatcagctgcaatggccggcctcactaagctgcgggttgttcgaaaccctaactatcaacgacacggattgaaaagctacgtatcattgatgaacaagtttggtttcgattcaacgaaagaaggaccgtattgccatatcaaccggatcactcaaagaggcctcgcccgtaatgagcacaaagcaggtggccgtgctcgcacggagcatcttctcgtcaagaaggctacttcaggcagtgaaagtcaaacaggacaggtcactgcagaggatcaacagaacgatactgagtacctagttgaagtcgagatcggaacaccggcgcaaaagcttcttttagactttgacacaggctcctcagacctctgggtcttctctaccagcctgagcaagtccatacagtcaggtcataacgtcttcgacccatcgaagagttctacttggaaagctttgtcaggcgagagctggaatatttcatacggtgacggaagctcagcatctggtacctgcggaagtgacgtgctgaacataggtggagttaaggtacagtcgcagacagtcgagctcgccgataagttgtcggaccagtttgcacagagtactggcgatggtcttctgggtcttgcattcagcagcatcaataccgtcacgcccgatcaggctgaaacacccgtagcgaacatgatatcgcagggcgatattcctgctgattctcagttatttaccagcgccttctacagcgagagagatgacggggcagaatcgttttatacctttgggtttatcgatcaagatctcgtctcccaatctggttcagacatcatctacaccgacattgataattcacaaggcttttggatgttcgactcggcatcgtactcactgaacggcaaaacttccaccattagcggaaacaaggcgattgcggacacgggtaccactttgatgctagtaagtgacgaagtcgtagaggctttatacaagcaaattccgggcgccacatatgattcaacccaacaaggatacatcttcccgacgagcgtaactgcagatacgctacctgacttcaccgtcgccgtcggtgatacccaatttactatccagaaagaagcccttgcctttgccttggctgacgagagtcactggtatgggggcgttcagtcacgtggcacaaatcctttcgacattctcggagacgtattcctccgcaatatctatgccatctgggaccagggtaacactcgtttcggcgcagtccccaaattgcaggccacgcagaatctgacgccgccttctgacactgcgcaaagtagtagcgagaagaagacaagcgaggcacttttggctcgtatgtag

SEQ ID NO: 36152 - protein, 455 aa, Muscodor strobelii
  misc_feature: SGI Peptide ID NO. 572529
  misc_feature (101)..(423): Pfam Id: PF00026 Pfam Desc: Eukaryotic aspartyl protease
  misc_feature (11)..(432): NCBI GI: 145583125 Blast Desc: aspartic endopeptidase [Hypocrea lixii]
  misc_feature (11)..(432): NCBI GI: 118161440 Blast Desc: aspartyl proteinase [Hypocrea lixii]
  misc_feature (11)..(437): NCBI GI: 51860175 Blast Desc: aspartyl proteinase [Trichoderma asperellum]
  misc_feature (7)..(435): NCBI GI: 12002205 Blast Desc: AF121229_1 aspartic proteinase precursor [Botryotinia fuckeliana]
  misc_feature (13)..(425): NCBI GI: 242791151 Blast Desc: aspartic endopeptidase (AP1), [Talaromyces stipitatus ATCC 10500] gi|218718289|gb|EED17709.1| aspartic endopeptidase (AP1), [Talaromyces stipitatus ATCC 10500]
  misc_feature (7)..(436): NCBI GI: 156055954 Blast Desc: SS1G_05329 [Sclerotinia sclerotiorum 1980] gi|154703113|gb|EDO02852.1| SS1G_05329 [Sclerotinia sclerotiorum 1980]
  misc_feature (13)..(432): NCBI GI: 119887992 Blast Desc: PEPAb [Aspergillus niger]
  misc_feature (14)..(435): NCBI GI: 119467426 Blast Desc: aspartic endopeptidase (AP1), [Neosartorya fischeri NRRL 181] gi|119405671|gb|EAW15622.1| aspartic endopeptidase (AP1), [Neosartorya fischeri NRRL 181]
  misc_feature (12)..(434): NCBI GI: 116197829 Blast Desc: CHGG_07070 [Chaetomium globosum CBS 148.51] gi|88178349|gb|EAQ85817.1| CHGG_07070 [Chaetomium globosum CBS 148.51]
  misc_feature (11)..(435): NCBI GI: 85102020 Blast Desc: NCU04269 [Neurospora crassa OR74A] gi|16944483|emb|CAC28744.2| related to pepsin precursor [Neurospora crassa] gi|28922802|gb|EAA32024.1| NCU04269 crassa
  misc_feature (21)..(421): SWISSPROT Homolog: EC 3.4.23.18 Aspergillopepsin I
MSHIRSAAMAGLTKLRVVRNPNYQRHGLKSYVSLMNKFGFDSTKEGPYCHINRITQRGLARNEHKAGGRARTEHLLVKKATSGSESQTGQVTAEDQQNDTEYLVEVEIGTPAQKLLLDFDTGSSDLWVFSTSLSKSIQSGHNVFDPSKSSTWKALSGESWNISYGDGSSASGTCGSDVLNIGGVKVQSQTVELADKLSDQFAQSTGDGLLGLAFSSINTVTPDQAETPVANMISQGDIPADSQLFTSAFYSERDDGAESFYTFGFIDQDLVSQSGSDIIYTDIDNSQGFWMFDSASYSLNGKTSTISGNKAIADTGTTLMLVSDEVVEALYKQIPGATYDSTQQGYIFPTSVTADTLPDFTVAVGDTQFTIQKEALAFALADESHWYGGVQSRGTNPFDILGDVFLRNIYAIWDQGNTRFGAVPKLQATQNLTPPSDTAQSSSEKKTSEALLARM

SEQ ID NO: 36153 - DNA, 2374 bp, Muscodor strobelii; identical to SEQ ID NO: 36144
  misc_feature: SGI EST ID NO. CUFF.86220.2
  misc_feature: Variant of the nucleotide sequence at SEQ ID NO 36151

SEQ ID NO: 36154 - DNA, 2199 bp, Muscodor strobelii
  misc_feature: SGI cDNA ID NO. 572530
  misc_feature: Encodes the peptide sequence at SEQ ID NO 36155
atgcattctttctcttatttggcgcttctcagcgctgctacgtccttcgtagaggctcagtcttcagattttgtctcatacgtcaacgcaagcggtgtccacgtacttacccctcggattcaagagcaactttattttcctcagaccagctctgctgtcctttcggccgaagaaccacaacagaaagaatatgagtacatcgtcgtgggatcggggcctggtggtgctccactcgccgttcgtctcgccaaggccgggcatagtgttctcttgattgatgctggtgatgattatggtcacctccgacaagttgaggcaccggccttggctaatcccagctctgagcaaaatgaagtaagctggggtttcttcacgaatcactatgccgacgacgagatggcaaaaagggataggaaagtgagttgggtatcaccagatggccagacatactataccgggcagaatccacctgaaggttatacacttgcaggtaacttctatcctcgatacggaggtctaggcgggtgctcagaacacaatgcccaagtcatgatgctgcccagtaagaacgattttgacaatatcgccaagcttgttggtgacgactcgtggaacaacgataacatgcgtcaatacttcgagcttattgaaaacaacgaataccaagcgcctatatttaacaagacgggccatggatttgacggatatatcgacgtcgcttgggatccactaggcatcgctgctcaggacgtcaaatttgtctcggctcttatgggtgctgctaaagcatggggcctagacgtggatgttctcaacactgcccttgctcagacaatggacactgtcattgcggcaaaggaggctgatcctcactcggaacttcttccgctagacgtcacacaacccattgttcaggcattgaacgaccttctgttgcccgatctcaacctggatagccctgatcgtgacacaatcaaggcattcggtcgccttcctctcgccatggacaatgtgaattacagacgttcatcgcctcgtgacctcgtttacgacacagtcactgctaaaaacgcggatggctcgaagaagtataaactcgaagtcgctctcgaaactctcgttacaaaggttaccttcgaagaatacacttgtaagaccaagaagcccaaagccaacggtatcgaatatcttttcggccagtcgctttatcgagcggacccccgtgccagcctcaccgagaacacgggcaagcctggttcggtgaaggctacgaaggaagttatcgtggctggtggcgctttcaactccccgcagattcttaaactttcgggtgtaggcccgaaagccgagcttcaaaaatttggcattccggttgtcaaagatatacccggtgtgggaaccggtctgcaagatcgcctcgaagttagtatgaacgcaaactatccaacgaacttcacccgtattttggactgcacctatcttcacaccgaggaagatccctgctgggaccagtacgcaaatccgaacaatcatggctctcaaaaaggtacatacgcatcaggtctcgtctacactgcatcattctgggcctcaagcttttccgaagacggcgaacaagatctatggattggtgggtttcccgcaatgttcaacggtttctggcccggttatagttcatgggccgcaactgccgatgacaagacacactggagctggcttgtgctcaaggctcacactcgcaacaacgccggaactgtccaattgctctctaccaaccccagagacatgcctaacatcactttccactctatgtatgagggcatgacaaaggaggaggccgataaggatgtgtacgcattagttgagggcatgcgcatggcgcaggctttctatggaaacacgaccgatatcgacggattgcctgtccagtactggccgcctgtagatgtgcagaccgatgacgagcttgcagagtggattaccgaggaagcctggggccatcacgcttcatgctcgaaccccatcggagctgacaatgacaccatggcagttctggataagaatttcaaggtgcgaggaatcgatggccttcgagtcgtcgacgcttcttcttggcctttcattcctggcacattcatctatctcccaacaatgatgatatccgagaaggctgcgcacgcgattcttagtggcaactag

SEQ ID NO: 36155 - protein, 732 aa, Muscodor strobelii
  misc_feature: SGI Peptide ID NO. 572530
  misc_feature (570)..(724): Pfam Id: PF05199 Pfam Desc: GMC oxidoreductase
  misc_feature (64)..(487): Pfam Id: PF00732 Pfam Desc: GMC oxidoreductase
  misc_feature (65)..(100): Pfam Id: PF01266 Pfam Desc: FAD dependent oxidoreductase
  misc_feature (65)..(95): Pfam Id: PF00890 Pfam Desc: FAD binding domain
  misc_feature (676)..(724): Pfam Id: PF05199 Pfam Desc: GMC oxidoreductase
  misc_feature (421)..(487): Pfam Id: PF00732 Pfam Desc: GMC oxidoreductase
  misc_feature (65)..(102): Pfam Id: PF07992 Pfam Desc: Pyridine nucleotide-disulphide oxidoreductase
  misc_feature (62)..(729): NCBI GI: 240275508 Blast Desc: GMC oxidoreductase [Ajellomyces capsulatus H143]
  misc_feature (62)..(729): NCBI GI: 225561900 Blast Desc: glucose-methanol-choline oxidoreductase [Ajellomyces capsulatus G186AR]
  misc_feature (64)..(730): NCBI GI: 154321511 Blast Desc: BC1G_01630 [Botryotinia fuckeliana B05.10] gi|150852168|gb|EDN27360.1| BC1G_01630 [Botryotinia fuckeliana B05.10]
  misc_feature (63)..(729): NCBI GI: 261197980 Blast Desc: choline dehydrogenase [Ajellomyces dermatitidis SLH14081] gi|239595355|gb|EEQ77936.1| choline dehydrogenase [Ajellomyces dermatitidis SLH14081]
  misc_feature (63)..(729): NCBI GI: 239607795 Blast Desc: choline dehydrogenase [Ajellomyces dermatitidis ER-3]
  misc_feature (62)..(729): NCBI GI: 169609841 Blast Desc: SNOG_08012 [Phaeosphaeria nodorum SN15] gi|111063168|gb|EAT84288.1| SNOG_08012 [Phaeosphaeria nodorum SN15]
  misc_feature (50)..(730): NCBI GI: 238488078 Blast Desc: choline dehydrogenase, [Aspergillus flavus NRRL3357] gi|220700156|gb|EED56495.1| choline dehydrogenase, [Aspergillus flavus NRRL3357]
  misc_feature (63)..(730): NCBI GI: 169769607 Blast Desc: [Aspergillus oryzae RIB40] gi|83767132|dbj|BAE57271.1| protein product [Aspergillus oryzae]
  misc_feature (63)..(730): NCBI GI: 242791737 Blast Desc: choline dehydrogenase, [Talaromyces stipitatus ATCC 10500] gi|218718402|gb|EED17822.1| choline dehydrogenase, [Talaromyces stipitatus ATCC 10500]
  misc_feature (79)..(731): NCBI GI: 226290978 Blast Desc: choline dehydrogenase [Paracoccidioides brasiliensis Pb18]
  misc_feature (339)..(728): SWISSPROT Homolog: EC 1.1.99.1 Choline dehydrogenase
MHSFSYLALLSAATSFVEAQSSDFVSYVNASGVHVLTPRIQEQLYFPQTSSAVLSAEEPQQKEYEYIVVGSGPGGAPLAVRLAKAGHSVLLIDAGDDYGHLRQVEAPALANPSSEQNEVSWGFFTNHYADDEMAKRDRKVSWVSPDGQTYYTGQNPPEGYTLAGNFYPRYGGLGGCSEHNAQVMMLPSKNDFDNIAKLVGDDSWNNDNMRQYFELIENNEYQAPIFNKTGHGFDGYIDVAWDPLGIAAQDVKFVSALMGAAKAWGLDVDVLNTALAQTMDTVIAAKEADPHSELLPLDVTQPIVQALNDLLLPDLNLDSPDRDTIKAFGRLPLAMDNVNYRRSSPRDLVYDTVTAKNADGSKKYKLEVALETLVTKVTFEEYTCKTKKPKANGIEYLFGQSLYRADPRASLTENTGKPGSVKATKEVIVAGGAFNSPQILKLSGVGPKAELQKFGIPVVKDIPGVGTGLQDRLEVSMNANYPTNFTRILDCTYLHTEEDPCWDQYANPNNHGSQKGTYASGLVYTASFWASSFSEDGEQDLWIGGFPAMFNGFWPGYSSWAATADDKTHWSWLVLKAHTRNNAGTVQLLSTNPRDMPNITFHSMYEGMTKEEADKDVYALVEGMRMAQAFYGNTTDIDGLPVQYWPPVDVQTDDELAEWITEEAWGHHASCSNPIGADNDTMAVLDKNFKVRGIDGLRVVDASSWPFIPGTFIYLPTMMISEKAAHAILSGN

SEQ ID NO: 36156 - DNA, 3547 bp, Muscodor strobelii
  misc_feature: SGI EST ID NO. CUFF.86105.0
  misc_feature: Variant of the nucleotide sequence at SEQ ID NO 36154
cccaatttaactttatcgtgccaccagtagaccttttgcttctagataacgacttgttagaggtgaataggaaggtaggatatgacctttttgctaagggactccaaacgattgttgcaatgcggtcccatcagatgtcgaatatgcttcattcaaacacgggtcggcgtttataggtccctgtttaagaatatccatctcaataacaatatttgctcaacttgcactgcgcgaaggagatgcacatattgttaaggcatcttgagctgagttcttggcaggagttcatgttgagtaagatgctggtattagctgtggggctatatcgtatgttcaagaatccggaaggtttctgaatacacgctcgaccttcgataattcaagccatgagcttcccgtgccgtcttctctcgacgaaacaatactgtacatcacactagaattacttactaacgaagtgctatgctttgttgatacaagtgtcccctggtcacacgccacactgcggccgcagtgctgcacgacgtacgacagccgtagcacgcggctctcggtggaagaatccctaggatcatgtcttatacgcttcgagcgaacttgccctttgggactggcttcttcaatcttggctgaagaaagcaccgtaagcatcataccacaacgactgagcctcctgtaatcagattatgggttttccacttttagaggaaacatgtcgagcacgcagcatggaccagaaggatccgcgcagatttgaagatatgaaagagactccgtggtttggtataaaactctcgagtatggcatctatccagaatagatgtttggagtcttcaccgacgttctctttctcttcctcaacagacggcataacagtgcctctgtcggctatatttattctcttactcgccgataattttttttgatatgcattctttctcttatttggcgcttctcagcgctgctacgtccttcgtagaggctcagtcttcagattttgtctcatacgtcaacgcaagcggtgtccacgtacttacccctcggattcaagagcaactttattttcctcagaccagctctgctgtcctttcggccgaagaaccacaacagaaagaatatgagtacatcgtcgtgggatcggggcctggtggtgctccactcgccgttcgtctcgccaaggccgggcatagtgttctcttgattgatgctggtgatgattatggtcacctccgacaagttgaggcaccggccttggctaatcccagctctgagcaaaatgaagtaagctggggtttcttcacgaatcactatgccgacgacgagatggcaaaaagggataggaaagtgagttgggtatcaccagatggccagacatactataccgggcagaatccacctgaaggttatacacttgcaggtaacttctatcctcgatacggaggtctaggcgggtgctcagaacacaatgcccaagtcatgatgctgcccagtaagaacgattttgacaatatcgccaagcttgttggtgacgactcgtggaacaacgataacatgcgtcaatacttcgagcttattgaaaacaacgaataccaagcgcctatatttaacaagacgggccatggatttgacggatatatcgacgtcgcttgggatccactaggcatcgctgctcaggacgtcaaatttgtctcggctcttatgggtgctgctaaagcatggggcctagacgtggatgttctcaacactgcccttgctcagacaatggacactgtcattgcggcaaaggaggctgatcctcactcggaacttcttccgctagacgtcacacaacccattgttcaggcattgaacgaccttctgttgcccgatctcaacctggatagccctgatcgtgacacaatcaaggcattcggtcgccttcctctcgccatggacaatgtgaattacagacgttcatcgcctcgtgacctcgtttacgacacagtcactgctaaaaacgcggatggctcgaagaagtataaactcgaagtcgctctcgaaactctcgttacaaaggttaccttcgaagaatacacttgtaagaccaagaagcccaaagccaacggtatcgaatatcttttcggccagtcgctttatcgagcggacccccgtgccagcctcaccgagaacacgggcaagcctggttcggtgaaggctacgaaggaagttatcgtggctggtggcgctttcaactccccgcagattcttaaactttcgggtgtaggcccgaaagccgagcttcaaaaatttggcattccggttgtcaaagatatacccggtgtgggaaccggtctgcaagatcgcctcgaagttagtatgaacgcaaactatccaacgaacttcacccgtattttggactgcacctatcttcacaccgaggaagatccctgctgggaccagtacgcaaatccgaacaatcatggctctcaaaaaggtacatacgcatcaggtctcgtctacactgcatcattctgggcctcaagcttttccgaagacggcgaacaagatctatggattggtgggtttcccgcaatgttcaacggtttctggcccggttatagttcatgggccgcaactgccgatgacaagacacactggagctggcttgtgctcaaggctcacactcgcaacaacgccggaactgtccaattgctctctaccaaccccagagacatgcctaacatcactttccactctatgtatgagggcatgacaaaggaggaggccgataaggatgtgtacgcattagttgagggcatgcgcatggcgcaggctttctatggaaacacgaccgatatcgacggattgcctgtccagtactggccgcctgtagatgtgcagaccgatgacgagcttgcagagtggattaccgaggaagcctggggccatcacgcttcatgctcgaaccccatcggagctgacaatgacaccatggcagttctggataagaatttcaaggtgcgaggaatcgatggccttcgagtcgtcgacgcttcttcttggcctttcattcctggcacattcatctatctcccaacaatgatgatatccgagaaggctgcgcacgcgattcttagtggcaactagatgtattaactaatatttcatgacctacatgaggacctagtcgtgttcaaaaataattagggctgggattggcttcagtagtatctaggtctttttctccatttcttctgtatatattcaatccggcaacctgttcaatagatattctcctctgcttcgcatgagctgtatgtacaacacattcttcgaacgtgtgatttcaatcaaatcgccttgggtgtaaagtgtgcagatgaaatgtcgagttccttgctgataagtgccgatgtttggttgttccaaagaaaagtgtaaagcagatttacgtatgtagtggacggtctctactaaacatggcgctatactccttgaactacgttcaatcaactgcagcatacctaacttctatgttaaaaccatcttactcatagtgtgcttttcc

SEQ ID NO: 36157 - DNA, 828 bp, Muscodor strobelii
  misc_feature: SGI cDNA ID NO. 572531
  misc_feature: Elevated expression when VOC is produced
  misc_feature: Encodes the peptide sequence at SEQ ID NO 36158
atggatgttaacgctccagatgggaagacactaggcgacaacgaaacttacgtgccttgtaataagctcggaatatatcagaatggcgtccactcgagttgttgtcggctagatggcgacatggacaaaagggacaggtgcacagcaactggtctgtgtcagaacggcgatggacaaactcgaagagaatattgcacagacccgacatggcagagcgctgcctgtataagtatttgcactgacccgaataatggcggatcacaaaccggccctgctgtattacattcctgtgacgatgggtcgaacacatattgttgcggagaaggcaatctatcatgctgtggcaccgatgctgccattacactaccaacacaagctagtgtcatcgctgatggcaacccttccgatgtatcaaaagcatacaaagatgcgacgatcgctctcgctgtcattgtcggcgtgctctttcttgcttcagggtccgcgattgcgtggctaatgaagaagctcaagtccattaagcagcagctagtcgaaaagaataacgaggttcagtcgcaaccaacccccatggtccaagagccctaccaagatacgcacccagagtcaaattatgccgggactcctcagtttaagaacaactctgtccctgcgtcgcctgggttccctacatatgagatgcaaaataatatggcacgatactcggaactcgacgccgcatcggctgcgcgaagcgagatggggtcgccggtacagcatagcgaccgtggtttaggctctcctcgcagcatgagcagtttcccacattcacctcaccagacttcataa

SEQ ID NO: 36158 - protein, 275 aa, Muscodor strobelii
  misc_feature: SGI Peptide ID NO. 572531
  misc_feature (6)..(191): NCBI GI: 238506685 Blast Desc: conserved [Aspergillus flavus NRRL3357] gi|220689257|gb|EED45608.1| conserved [Aspergillus flavus NRRL3357]
  misc_feature (5)..(122): NCBI GI: 145252816 Blast Desc: An16g06170 [Aspergillus niger] gi|134083476|emb|CAK46953.1| [Aspergillus niger]
  misc_feature (17)..(126): NCBI GI: 119494271 Blast Desc: NFIA_008110 [Neosartorya fischeri NRRL 181] gi|119412193|gb|EAW22134.1| NFIA_008110 [Neosartorya fischeri NRRL 181]
  misc_feature (17)..(126): NCBI GI: 70996678 Blast Desc: AFUA_1G17260 [Aspergillus fumigatus Af293] gi|66850729|gb|EAL91056.1| AFUA_1G17260 [Aspergillus fumigatus Af293]
  misc_feature (17)..(126): NCBI GI: 159131830 Blast Desc: AFUB_016650 [Aspergillus fumigatus A1163]
  misc_feature (6)..(125): NCBI GI: 255938239 Blast Desc: Pc13g14850 [Penicillium chrysogenum Wisconsin 54-1255] gi|211584510|emb|CAP92554.1| Pc13g14850 [Penicillium chrysogenum Wisconsin 54-1255]
  misc_feature (19)..(130): NCBI GI: 116203965 Blast Desc: CHGG_09866 [Chaetomium globosum CBS 148.51] gi|88175994|gb|EAQ83462.1| CHGG_09866 [Chaetomium globosum CBS 148.51]
  misc_feature (14)..(114): NCBI GI: 154322216 Blast Desc: [Botryotinia fuckeliana B05.10] gi|150850502|gb|EDN25695.1| [Botryotinia fuckeliana B05.10]
  misc_feature (14)..(114): NCBI GI: 156060799 Blast Desc: [Sclerotinia sclerotiorum 1980] gi|154699946|gb|EDN99684.1| [Sclerotinia sclerotiorum 1980]
  misc_feature (5)..(114): NCBI GI: 116179258 Blast Desc: CHGG_00257 [Chaetomium globosum CBS 148.51] gi|88184554|gb|EAQ92022.1| CHGG_00257 [Chaetomium globosum CBS 148.51]
  misc_feature: Useful for introducing or modulating the production of volatile compounds
MDVNAPDGKTLGDNETYVPCNKLGIYQNGVHSSCCRLDGDMDKRDRCTATGLCQNGDGQTRREYCTDPTWQSAACISICTDPNNGGSQTGPAVLHSCDDGSNTYCCGEGNLSCCGTDAAITLPTQASVIADGNPSDVSKAYKDATIALAVIVGVLFLASGSAIAWLMKKLKSIKQQLVEKNNEVQSQPTPMVQEPYQDTHPESNYAGTPQFKNNSVPASPGFPTYEMQNNMARYSELDAASAARSEMGSPVQHSDRGLGSPRSMSSFPHSPHQTS

SEQ ID NO: 36159 - DNA, 1562 bp, Muscodor strobelii
  misc_feature: SGI EST ID NO. CUFF.86062.0
  misc_feature: Variant of the nucleotide sequence at SEQ ID NO 36157
gtcgatggcaggttgggaggcgagattccctgcagcaagggctcacgggaatgcgacattctgcaagccgtagattctgcatacctaacaaggcattctggccgatatgcacatttgcttttgctaccttcgtcggacacccagatcgatctcagtggcttgatacaaacagttgggtaacacgaagggcagccaagattacgttattcggcttcttcctttatcccttccggacttgggccgaatgtattttccccttgctccatttcctttccctctcttatcctctagcctttggccgtgagaacttgcgagtactgatttcgcagatcgagaacaatgttgtccattcggacccttttgtttgccgtcatcttcagtcaatctgtgctagcggagtacaatggatgttaacgctccagatgggaagacactaggcgacaacgaaacttacgtgccttgtaataagctcggaatatatcagaatggcgtccactcgagttgttgtcggctagatggcgacatggacaaaagggacaggtgcacagcaactggtctgtgtcagaacggcgatggacaaactcgaagagaatattgcacagacccgacatggcagagcgctgcctgtataagtatttgcactgacccgaataatggcggatcacaaaccggccctgctgtattacattcctgtgacgatgggtcgaacacatattgttgcggagaaggcaatctatcatgctgtggcaccgatgctgccattacactaccaacacaagctagtgtcatcgctgatggcaacccttccgatgtatcaaaagcatacaaagatgcgacgatcgctctcgctgtcattgtcggcgtgctctttcttgcttcagggtccgcgattgcgtggctaatgaagaagctcaagtccattaagcagcagctagtcgaaaagaataacgaggttcagtcgcaaccaacccccatggtccaagagccctaccaagatacgcacccagagtcaaattatgccgggactcctcagtttaagaacaactctgtccctgcgtcgcctgggttccctacatatgagatgcaaaataatatggcacgatactcggaactcgacgccgcatcggctgcgcgaagcgagatggggtcgccggtacagcatagcgaccgtggtttaggctctcctcgcagcatgagcagtttcccacattcacctcaccagacttcataatactccagcggccattccattgttaggaagatttcacgttgagaaagcagagtaggacttgaggaatgacaatcattatgtgtcatacaccggatgttggacttcgtgttcttcgtaccagatgtcgggtggaaacctgggagtctttaaagatcggatgcgataggatctctcgttcttgcgctcaaggaaagtctgaattagcaatgtatataccctgtaaataatgagtcgttccttatataataattatacaagtagaccaactacacgtcggttagattagggcgatctgaattacgaaggatatagtatcatcgtttgtcccgag

SEQ ID NO: 36160 - DNA, 3168 bp, Muscodor strobelii
  misc_feature: SGI cDNA ID NO. 572532
  misc_feature: Encodes the peptide sequence at SEQ ID NO 36161
atgggctcccgaggttcgggcgtgcgctttcgcaagatccagagtttcgagacagattacgcgcctaccaccattacacaatatgaatcagaaaggagcggaatgcaggtcattgtggccgaccggcagggccctaaggtaaacggctatttcactctggccactgaaatattcgacgattcaggtgcgcctcatacgcttgagcacttggtctttatgggctctaagagctatcgctataagggcttgttggacaagctagcctcgagggcgtatgggtcgaccaacgcttggactgccactgaccatactgcttacactctggaaactgcgggatgggcaggctttgctcagacattgcctgtgtacctcgagcacttgattgtacctaccatgactgatgctgcctgctcaaccgaggttcatcacatcgacggcgaagggaacgatgctggtgttgtttattcagagatgcaagcagtgcaaaatacaggcacagagctcatggacatcaagtctcgccgtttactctacccacaaaacgttgggtttcgttatgagactggcggtatgatggaagctctccgtgtcttgaccccggaaaggatccgagacttccatcgcacgatgtatcaacctcgcaatatgtgcgttatcatcgttggtgaggtcgatcatgaagatcttttgcagatcctagacatttttgaagaaagtgtaattgaggatattccaccagtggatgcccctttccaacggccgtggatagaatctgcccagccgcccccactcacgaagacggttgtggaaaccgttgaattccccgaggaagacgaatcagttggggatataacggttgcttactttggtcctgattgcaccaacctagtcgaaacaaccgctctgaatatccttctcacatacctctgcgggtcgtctgtcgccgtcctcgagaacgtattagttgagaaggaggcgctggcaagttcggtctcatattggtgggattcacgtccgaactctgtcatttggttttcgccgacaggtgtggctactgagcaacttgagttcgttgaacagcgactcatctctctgctccaagaagtagcgtcaaagcctctggatatgaaatatatgaacgaatgcattcagcgagaacggcgtcaagtcaaggcgcaagctgaagaatccgagtcattctattccacgaacatcatcacggattatctctttggtgcaagagacggctctacactcagggaattagaaaatctgaacgagtatgacgccgtggagaagtggacagacgagcaatggcgagactttctgcgtaaatggatatctgatgctcatcatgtctctatcttggggaaaccctcgcttgatcttgctaataagcaaaaagctgacgaaatagctcgggtcgggaaacggcgacaggaacttggtcctgagggtctcgagaaactgaaacaaaaactcgaagatgcgaaaaagcaaaacgacatcgagatcccagcttctttacttgagaaatggccggtccctgctacagactcgatccacttcatcaagtcgcagaccgcacgttcagggttggctcagaagttgggcactcatgacaactcagctcagaagcacatcgaccatgcgttgcctggatcgcctctatttgttcaatttgaagacgtgccaaccaattttgtccacataacagtccacattggcacgtctaacgtccccgtaaagcacaagccgctgctcactctcttcagtgacaacttcttcaatacccctatcaaccgcgggggtcaagtgattgactttgagaaggttgttatggagctcgaaaaggagacagtcagctattcactagactcgggaacgaaagttggtgattctgagagctttttgatcaggatgcaggtcgaacccaataagtatgctactgctgtcgagtggatccggacgatgatgtttgatagcatatttgatgtcacacgcttgaaagctaccgtggccaagcaacttgccgacatcccggaggctaaacgcgatggcagagttatggctaatgaagtagagatggcgctccataacgaggcgtcgtctctgctttgcgccaaaaggacgctagtcaaagcgacatatttgcgccgcttaaaaaagattctcgagaaaaccccagatgtggcgatcgagtggctggaggaagtgcgcaagtcgctctttacgtcagataacatgcgaatcgttgtcacagccgacatatctcaatcaaaacttcccgagcccgtgaaaacctgggatattttaaccagatctctaagctcggtgcccaaggacgtccagccaattgtcaaaccttacactcttctcaacgacgagggtcgcaatcccggatctattggagccaccatcattcccatgaccactcttgatagctcctattctgtgagttcgggcaaaggtctctcctcgttcaacgacccagctgtcccagctttgctcgttgcgatgcaatacttagagaccgtggagggcactctctggaatgctgtgcgaggcaatgggctcgcgtacggtgtttattttgccaaagagctggacggtggatatctccatttcaaagtgtatcgctcgcctttagcatcgaaggcaattgttgctgcacgagacgctatcacagcattagttaacggtactgtggcatttgagaagccaatgatagaaggcgcaatcagccagctcgtcatgaccatggctgacgaacaagccacactctccactgcagctacacagaactatatcatcggcgtcgtccgtggtctcgaaccagatcacagtgcaaagatactcgcccaggtccgttcagtgagtgtggaggacatcaaaaaagccatggaaacctggctgcttcctattttcgaacctggttcgagcaatattgttgtttgctgcgctcacgtcatggttgagaaaatggagaaagaacttcaggacattggctataagaccactgtcagtcagctatcagatttctacgatgattatggtttagaatctccagatggcgaagaagacgatgaatccgacgaagacgaagacatggaatctggatccgaggagtctgaaggttccgacggatcgcaggaggatgatgcatag

SEQ ID NO: 36161 - protein, 1055 aa, Muscodor strobelii
  misc_feature: SGI Peptide ID NO. 572532
  misc_feature (197)..(386): Pfam Id: PF05193 Pfam Desc: Peptidase M16 inactive domain
  misc_feature (1)..(1022): NCBI GI: 145606244 Blast Desc: MGG_02442 [Magnaporthe grisea 70-15] gi|145013955|gb|EDJ98596.1| MGG_02442 [Magnaporthe grisea 70-15]
  misc_feature (1)..(1022): NCBI GI: 171692183 Blast Desc: protein product [Podospora anserina] gi|170946040|emb|CAP72841.1| protein product [Podospora anserina]
  misc_feature (9)..(1022): NCBI GI: 116206588 Blast Desc: CHGG_02587 [Chaetomium globosum CBS 148.51] gi|88183184|gb|EAQ90652.1| CHGG_02587 [Chaetomium globosum CBS 148.51]
  misc_feature (9)..(1022): NCBI GI: 164426343 Blast Desc: NCU11027 [Neurospora crassa OR74A] gi|38566807|emb|CAE76115.1| conserved [Neurospora crassa] gi|157071297|gb|EDO65230.1| NCU11027 [Neurospora crassa OR74A]
  misc_feature (10)..(1052): NCBI GI: 46123045 Blast Desc: FG05900.1 [Gibberella zeae PH-1]
  misc_feature (1)..(1021): NCBI GI: 256731137 Blast Desc: [Nectria haematococca mpVI 77-13-4]
  misc_feature (9)..(1021): NCBI GI: 261354819 Blast Desc: cytoplasm protein [Verticillium albo-atrum VaMs.102]
  misc_feature (1)..(1023): NCBI GI: 154311698 Blast Desc: BC1G_06308 [Botryotinia fuckeliana B05.10] gi|150850819|gb|EDN26012.1| BC1G_06308 [Botryotinia fuckeliana B05.10]
  misc_feature (10)..(1021): NCBI GI: 115398057 Blast Desc: conserved [Aspergillus terreus NIH2624] gi|114192811|gb|EAU34511.1| conserved [Aspergillus terreus NIH2624]
  misc_feature (1)..(1021): NCBI GI: 242808644 Blast Desc: zinc metalloprotease, [Talaromyces stipitatus ATCC 10500] gi|218715834|gb|EED15256.1| zinc metalloprotease, [Talaromyces stipitatus ATCC 10500]
MGSRGSGVRFRKIQSFETDYAPTTITQYESERSGMQVIVADRQGPKVNGYFTLATEIFDDSGAPHTLEHLVFMGSKSYRYKGLLDKLASRAYGSTNAWTATDHTAYTLETAGWAGFAQTLPVYLEHLIVPTMTDAACSTEVHHIDGEGNDAGVVYSEMQAVQNTGTELMDIKSRRLLYPQNVGFRYETGGMMEALRVLTPERIRDFHRTMYQPRNMCVIIVGEVDHEDLLQILDIFEESVIEDIPPVDAPFQRPWIESAQPPPLTKTVVETVEFPEEDESVGDITVAYFGPDCTNLVETTALNILLTYLCGSSVAVLENVLVEKEALASSVSYWWDSRPNSVIWFSPTGVATEQLEFVEQRLISLLQEVASKPLDMKYMNECIQRERRQVKAQAEESESFYSTNIITDYLFGARDGSTLRELENLNEYDAVEKWTDEQWRDFLRKWISDAHHVSILGKPSLDLANKQKADEIARVGKRRQELGPEGLEKLKQKLEDAKKQNDIEIPASLLEKWPVPATDSIHFIKSQTARSGLAQKLGTHDNSAQKHIDHALPGSPLFVQFEDVPTNFVHITVHIGTSNVPVKHKPLLTLFSDNFFNTPINRGGQVIDFEKVVMELEKETVSYSLDSGTKVGDSESFLIRMQVEPNKYATAVEWIRTMMFDSIFDVTRLKATVAKQLADIPEAKRDGRVMANEVEMALHNEASSLLCAKRTLVKATYLRRLKKILEKTPDVAIEWLEEVRKSLFTSDNMRIVVTADISQSKLPEPVKTWDILTRSLSSVPKDVQPIVKPYTLLNDEGRNPGSIGATIIPMTTLDSSYSVSSGKGLSSFNDPAVPALLVAMQYLETVEGTLWNAVRGNGLAYGVYFAKELDGGYLHFKVYRSPLASKAIVAARDAITALVNGTVAFEKPMIEGAISQLVMTMADEQATLSTAATQNYIIGVVRGLEPDHSAKILAQVRSVSVEDIKKAMETWLLPIFEPGSSNIVVCCAHVMVEKMEKELQDIGYKTTVSQLSDFYDDYGLESPDGEEDDESDEDEDMESGSEESEGSDGSQEDDA

SEQ ID NO: 36162 - DNA, 4155 bp, Muscodor strobelii
  misc_feature: SGI EST ID NO. CUFF.86138.0
  misc_feature: Variant of the nucleotide sequence at SEQ ID NO 36160
ctcaaatttcgtctcttatttaagtgaagatcgaaccagaagatatatcatttcaaattccaagacaatccattttgtgaggccttatatcgcgacataaacctccccgcctttcgattctcaatccatcgtcttttgctcgtgtcttgcgtgctcgcgatcgtgccgactacagatacacatccaccgtggggtcgtcccaatgaagtccgagactctcaccctctgcagtctcccacacagctcccggtcttctaactacgcctaataagcagcacatcttcaagctgtctttattctccagccccgtgagattatcgactattacctgcataacggccatcggttcccgtttttcttcttcctcccataggccccctgttgtatcactgcatccgcttccgagatctgggttctctcctttgcaaaagtcttacacaatgggctcccgaggttcgggcgtgcgctttcgcaagatccagagtttcgagacagattacgcgcctaccaccattacacaatatgaatcagaaaggagcggaatgcaggtcattgtggccgaccggcagggccctaaggtaaacggctatttcactctggccactgaaatattcgacgattcaggtgcgcctcatacgcttgagcacttggtctttatgggctctaagagctatcgctataagggcttgttggacaagctagcctcgagggcgtatgggtcgaccaacgcttggactgccactgaccatactgcttacactctggaaactgcgggatgggcaggctttgctcagacattgcctgtgtacctcgagcacttgattgtacctaccatgactgatgctgcctgctcaaccgaggttcatcacatcgacggcgaagggaacgatgctggtgttgtttattcagagatgcaagcagtgcaaaatacaggcacagagctcatggacatcaagtctcgccgtttactctacccacaaaacgttgggtttcgttatgagactggcggtatgatggaagctctccgtgtcttgaccccggaaaggatccgagacttccatcgcacgatgtatcaacctcgcaatatgtgcgttatcatcgttggtgaggtcgatcatgaagatcttttgcagatcctagacatttttgaagaaagtgtaattgaggatattccaccagtggatgcccctttccaacggccgtggatagaatctgcccagccgcccccactcacgaagacggttgtggaaaccgttgaattccccgaggaagacgaatcagttggggatataacggttgcttactttggtcctgattgcaccaacctagtcgaaacaaccgctctgaatatccttctcacatacctctgcgggtcgtctgtcgccgtcctcgagaacgtattagttgagaaggaggcgctggcaagttcggtctcatattggtgggattcacgtccgaactctgtcatttggttttcgccgacaggtgtggctactgagcaacttgagttcgttgaacagcgactcatctctctgctccaagaagtagcgtcaaagcctctggatatgaaatatatgaacgaatgcattcagcgagaacggcgtcaagtcaaggcgcaagctgaagaatccgagtcattctattccacgaacatcatcacggattatctctttggtgcaagagacggctctacactcagggaattagaaaatctgaacgagtatgacgccgtggagaagtggacagacgagcaatggcgagactttctgcgtaaatggatatctgatgctcatcatgtctctatcttggggaaaccctcgcttgatcttgctaataagcaaaaagctgacgaaatagctcgggtcgggaaacggcgacaggaacttggtcctgagggtctcgagaaactgaaacaaaaactcgaagatgcgaaaaagcaaaacgacatcgagatcccagcttctttacttgagaaatggccggtccctgctacagactcgatccacttcatcaagtcgcagaccgcacgttcagggttggctcagaagttgggcactcatgacaactcagctcagaagcacatcgaccatgcgttgcctggatcgcctctatttgttcaatttgaagacgtgccaaccaattttgtccacataacagtccacattggcacgtctaacgtccccgtaaagcacaagccgctgctcactctcttcagtgacaacttcttcaatacccctatcaaccgcgggggtcaagtgattgactttgagaaggttgttatggagctcgaaaaggagacagtcagctattcactagactcgggaacgaaagttggtgattctgagagctttttgatcaggatgcaggtcgaacccaataagtatgctactgctgtcgagtggatccggacgatgatgtttgatagcatatttgatgtcacacgcttgaaagctaccgtggccaagcaacttgccgacatcccggaggctaaacgcgatggcagagttatggctaatgaagtagagatggcgctccataacgaggcgtcgtctctgctttgcgccaaaaggacgctagtcaaagcgacatatttgcgccgcttaaaaaagattctcgagaaaaccccagatgtggcgatcgagtggctggaggaagtgcgcaagtcgctctttacgtcagataacatgcgaatcgttgtcacagccgacatatctcaatcaaaacttcccgagcccgtgaaaacctgggatattttaaccagatctctaagctcggtgcccaaggacgtccagccaattgtcaaaccttacactcttctcaacgacgagggtcgcaatcccggatctattggagccaccatcattcccatgaccactcttgatagctcctattctgtgagttcgggcaaaggtctctcctcgttcaacgacccagctgtcccagctttgctcgttgcgatgcaatacttagagaccgtggagggcactctctggaatgctgtgcgaggcaatgggctcgcgtacggtgtttattttgccaaagagctggacggtggatatctccatttcaaagtgtatcgctcgcctttagcatcgaaggcaattgttgctgcacgagacgctatcacagcattagttaacggtactgtggcatttgagaagccaatgatagaaggcgcaatcagccagctcgtcatgaccatggctgacgaacaagccacactctccactgcagctacacagaactatatcatcggcgtcgtccgtggtctcgaaccagatcacagtgcaaagatactcgcccaggtccgttcagtgagtgtggaggacatcaaaaaagccatggaaacctggctgcttcctattttcgaacctggttcgagcaatattgttgtttgctgcgctcacgtcatggttgagaaaatggagaaagaacttcaggacattggctataagaccactgtcagtcagctatcagatttctacgatgattatggtttagaatctccagatggcgaagaagacgatgaatccgacgaagacgaagacatggaatctggatccgaggagtctgaaggttccgacggatcgcaggaggatgatgcatagagcgcgacgattatacaggacgtaaaggatcatataggtatactagatctcccttgccttatagatcttttatcttcgcgatctaaagggccaacccgctagactctcttctataaaaaacgtcccgtcagacttgcattttgggctatttcgtggcaacaaagcgtggagatggcgaaagaataccttaacatgcatttacgataagggcttagaagctaaaatctgacgggaaggaaagtgtcgtgcagtatcatagggcttggttaagacagaatacacggacagtctagcctgatgggtctactaagctgacaggttgaacaagacatgttcaaaaatagcattgccgagactcatgttttcttcagatttaacaactgaaagtctgagacattgtcttgcagaacggacggggatagttgtagttcatggtgtgaatcaccaagccaaaaagctcttctataatacaaattctatgtctgtagtgtgtaaaccctcaaagagtttggtgtcttacacattacttatctactctcgaaataag

SEQ ID NO: 36163 - DNA, 1716 bp, Muscodor strobelii
  misc_feature: SGI cDNA ID NO. 572533
  misc_feature: Encodes the peptide sequence at SEQ ID NO 36164
atggcccaatcgcagaatgcagcgattggtcgggccctggtggaattctcgcttgagggtgtatttccagaagatgatgtttcctcgcagcgtatccaagctcgacacctggcgcccgctctccagtcgctagctaccgcaaaatccaggcttgaggccgaaatacatgagatcaacgaagagacggctacggacgtgagccaatgggtcgccaatgccaagtctcttgaggacgacatcacccgcactcgaacgtgggccaacgagatcgtgaggaggtctgatgcgccagatgtttccggcagaatcatacaagaagcggaggagaaggtagaattccttcagcgcgaatctgcatataatcaacagctggatcataccttgaagagcatcaagcaagtcggtcagctcctagaccaggtcgagttggcacgagatgagagaagaatcctagattcgttgtatttgctcgagaaatcatggacagctctggacgatgtccccgtgagcaagtcttgtcgcgtcatgaggcttctcgacattcgagcctttgagcttaagtctgccgttcatgacgttttcaaccacgtttggggttctctcgtgaccgtagacagggacattggacaggtgactattatgcaatctcggccagatgagcagatgagcttagctgatgctgtcattggattgaaagcctacaaagaggtcgatcaaaaaatggcagaactctggcacaacctcgatgaaactatcgtccgtccaaggactgatctgcaacttgcagaattgtccacgtttcaagctgatagttcgactttcagcctagctggagaggcggacagaaccgtcccctctctctttcaggacctagacttgtttttgtcatacctcgctgcccatctgcctgaagatctgatcaactctctgtcaaacattatgatacctgagcttgtgtctcgtattgtcacaatttggctagactccgcggtaccgacgtctttgagcgatatgactgaatttcataaaatcaccgatgccactaaaagcttttgtgctcgtctcaaaagcctgaaattctccgggtttgaagaactgcaagaatgggtccagaatgtgcctcgagtttggcttgcaaaatgcagagaaactgcacttgactcagtgaggctgaaaatatcccaaggactgggtgatcctcaggaggttgagcatgctgagactcaaacagtcacacgggaagaaggccaaaaactcgcaacgaatggtgctaatacaactaacgatgaggattgggggaaggcatgggaagacgggccagctgacaatgatgagcatatgatggacaccactgacgatggtgctgaggcgtggggcttgggcgatgaagataccaacgattcgatatctcaaagtacgaaggtccccgctatcgatgatgaagtgaaagctgatgtggaagatgatggcgcagacgcctggggttgggacgacgaggacgtaacagctgcagaacctgtgaccatgaccccaaaggcacacggggagcattcaacacgagaactgactctcaaggagacatacaacatttcatcaatgccacaacccgtgctggcgcttattctgacaatcctggaagatggagcatcattgataaggtcagtttacaacgtcatgccactttatgacatttacttaacacagtcattggtatag

SEQ ID NO: 36164 - protein, 571 aa, Muscodor strobelii
  misc_feature: SGI Peptide ID NO. 572533
  misc_feature (4)..(561): NCBI GI: 256731540 Blast Desc: NECHADRAFT_96404 [Nectria haematococca mpVI 77-13-4]
  misc_feature (9)..(561): NCBI GI: 38566806 Blast Desc: [Neurospora crassa]
  misc_feature (7)..(561): NCBI GI: 116206584 Blast Desc: CHGG_02585 [Chaetomium globosum CBS 148.51] gi|88183182|gb|EAQ90650.1| CHGG_02585 [Chaetomium globosum CBS 148.51]
  misc_feature (12)..(561): NCBI GI: 46123043 Blast Desc: FG05899.1 [Gibberella zeae PH-1]
  misc_feature (9)..(536): NCBI GI: 261354818 Blast Desc: conserved [Verticillium albo-atrum VaMs.102]
  misc_feature (9)..(499): NCBI GI: 171692117 Blast Desc: protein product [Podospora anserina] gi|170946007|emb|CAP72808.1| protein product [Podospora anserina]
  misc_feature (9)..(553): NCBI GI: 154311700 Blast Desc: BC1G_06309 [Botryotinia fuckeliana B05.10] gi|150850820|gb|EDN26013.1| BC1G_06309 [Botryotinia fuckeliana B05.10]
  misc_feature (6)..(561): NCBI GI: 156061845 Blast Desc: SS1G_03068 [Sclerotinia sclerotiorum 1980] gi|154700469|gb|EDO00208.1| SS1G_03068 [Sclerotinia sclerotiorum 1980]
  misc_feature (8)..(260): NCBI GI: 145606242 Blast Desc: MGG_02443 [Magnaporthe grisea 70-15] gi|145013954|gb|EDJ98595.1| MGG_02443 [Magnaporthe grisea 70-15]
  misc_feature (8)..(561): NCBI GI: 225562355 Blast Desc: conserved [Ajellomyces capsulatus G186AR]
MAQSQNAAIGRALVEFSLEGVFPEDDVSSQRIQARHLAPALQSLATAKSRLEAEIHEINEETATDVSQWVANAKSLEDDITRTRTWANEIVRRSDAPDVSGRIIQEAEEKVEFLQRESAYNQQLDHTLKSIKQVGQLLDQVELARDERRILDSLYLLEKSWTALDDVPVSKSCRVMRLLDIRAFELKSAVHDVFNHVWGSLVTVDRDIGQVTIMQSRPDEQMSLADAVIGLKAYKEVDQKMAELWHNLDETIVRPRTDLQLAELSTFQADSSTFSLAGEADRTVPSLFQDLDLFLSYLAAHLPEDLINSLSNIMIPELVSRIVTIWLDSAVPTSLSDMTEFHKITDATKSFCARLKSLKFSGFEELQEWVQNVPRVWLAKCRETALDSVRLKISQGLGDPQEVEHAETQTVTREEGQKLATNGANTTNDEDWGKAWEDGPADNDEHMMDTTDDGAEAWGLGDEDTNDSISQSTKVPAIDDEVKADVEDDGADAWGWDDEDVTAAEPVTMTPKAHGEHSTRELTLKETYNISSMPQPVLALILTILEDGASLIRSVYNVMPLYDIYLTQSLV

SEQ ID NO: 36165 - DNA, 3239 bp, Muscodor strobelii
  misc_feature: SGI EST ID NO. CUFF.86179.1
  misc_feature: Variant of the nucleotide sequence at SEQ ID NO 36163
ccggatccctgtggattcatgtgaacttggtgacctgttcagttgctagacgcctgcgcgttgaagcgatcaagcacgatgacatacccgacgccttcgagagtgtgttgagcgtcgttgtttgttagatggacagattgcagattcgcctcactatcacaataatcagatgaaactaccaatcgaactcatgcgattctgaatcacgacatctggcatggcaatggagcattctttaagcactcacaccctcacttgacacaagccagacaggtatcgattccgcatccacagcatcagacccgccgaaccacgaaccacgatctctaccctcctgctagcgccttcggtatcaccaatacaacccgcccttctgcctcatgagatagatcagagatggcccaatcgcagaatgcagcgattggtcgggccctggtggaattctcgcttgagggtgtatttccagaagatgatgtttcctcgcagcgtatccaagctcgacacctggcgcccgctctccagtcgctagctaccgcaaaatccaggcttgaggccgaaatacatgagatcaacgaagagacggctacggacgtgagccaatgggtcgccaatgccaagtctcttgaggacgacatcacccgcactcgaacgtgggccaacgagatcgtgaggaggtctgatgcgccagatgtttccggcagaatcatacaagaagcggaggagaaggtagaattccttcagcgcgaatctgcatataatcaacagctggatcataccttgaagagcatcaagcaagtcggtcagctcctagaccaggtcgagttggcacgagatgagagaagaatcctagattcgttgtatttgctcgagaaatcatggacagctctggacgatgtccccgtgagcaagtcttgtcgcgtcatgaggcttctcgacattcgagcctttgagcttaagtctgccgttcatgacgttttcaaccacgtttggggttctctcgtgaccgtagacagggacattggacaggtgactattatgcaatctcggccagatgagcagatgagcttagctgatgctgtcattggattgaaagcctacaaagaggtcgatcaaaaaatggcagaactctggcacaacctcgatgaaactatcgtccgtccaaggactgatctgcaacttgcagaattgtccacgtttcaagctgatagttcgactttcagcctagctggagaggcggacagaaccgtcccctctctctttcaggacctagacttgtttttgtcatacctcgctgcccatctgcctgaagatctgatcaactctctgtcaaacattatgatacctgagcttgtgtctcgtattgtcacaatttggctagactccgcggtaccgacgtctttgagcgatatgactgaatttcataaaatcaccgatgccactaaaagcttttgtgctcgtctcaaaagcctgaaattctccgggtttgaagaactgcaagaatgggtccagaatgtgcctcgagtttggcttgcaaaatgcagagaaactgcacttgactcagtgaggctgaaaatatcccaaggactgggtgatcctcaggaggttgagcatgctgagactcaaacagtcacacgggaagaaggccaaaaactcgcaacgaatggtgctaatacaactaacgatgaggattgggggaaggcatgggaagacgggccagctgacaatgatgagcatatgatggacaccactgacgatggtgctgaggcgtggggcttgggcgatgaagataccaacgattcgatatctcaaaacgcctggggttgggacgacgaggacgtaacagctgcagaacctgtgaccatgaccccaaaggcacacggggagcattcaacacgagaactgactctcaaggagacatacaacatttcatcaatgccacaacccgtgctggcgcttattctgacaatcctggaagatggagcatcattgataagtaatgaaagtaatcctatgagctctgcagctgctggactcttctccttaccgacacttgtgttggcgatgtttcgggcagtctcgccatattactatgctttagatgcgggtggtaatatgtttctttacaacgatgcaacgtatatctccaaacaactgtcgaagatcacggccgagtggaagtccagagctgatctcgcgcctcgtgccgtatcattgctccgtctagagaatgatgttaaagccttggagtcatttgctaagcgcgcatacacctctgagatgaatacccatcgcacagtcttgcgtgacctgcttggcggttcgcaaaatatgttacaacaagatgggctggattcgtcagagatcgagtcgcaggtcgataatgccatccatcacgtccgctccattgcaaccttgtggggaaaagtcttagccaagtcggcttggagtcaagcagttggctcgttagtggatgcagtcgcctccaaacttgtcggcgacgtgatggatttagccggtattggccaggacgatgcatttaacatcgccagtttgattgcgcgcgttacaaaattagacgaccttttccttccgcctggagcaagcaaggataccataccagccacagcagaatatgcgagtacttggctgcgcctcaagtatctaagcgaagttttacagagcaacctccaggacgtaagatatctctggatggacagcgacctcagcctgtacttcaccgtcgatgaagtaattgagctgatcgggctaagctttgttgacaatgtgcgtactagggaagtagtgcgagaaattcagagacgaccgaatccacgtggccaaccctccatagatagcgttagtcgaggtccctcgggttgacgtgctatcacattgttcagactgtggttggttctcacggtgcatctgaaaggacactagtttccgagaagactaaggttaattaatattaacgcagtatcgccaacggttcctgttcaggcatatcatagtatcacatcgcactgaatcaaccattcggactagttaagtaatgacttagaattaaaagcctatgttagatagatattggtgtttggtatcgtgcaattatgaagcataaatattctcgagtcttcgtcagaactcgtacatgtaaggtagaatatcggtatggtagtttgcgcaagacaaaccatcaaagtcttgtccgtaacgcagaatgaaaacccagatggccc

SEQ ID NO: 36166 - DNA, 819 bp, Muscodor strobelii
  misc_feature: SGI cDNA ID NO. 572534
  misc_feature: Encodes the peptide sequence at SEQ ID NO 36167
atgtttcgggcagtctcgccatattactatgctttagatgcgggtggtaatatgtttctttacaacgatgcaacgtatatctccaaacaactgtcgaagatcacggccgagtggaagtccagagctgatctcgcgcctcgtgccgtatcattgctccgtctagagaatgatgttaaagccttggagtcatttgctaagcgcgcatacacctctgagatgaatacccatcgcacagtcttgcgtgacctgcttggcggttcgcaaaatatgttacaacaagatgggctggattcgtcagagatcgagtcgcaggtcgataatgccatccatcacgtccgctccattgcaaccttgtggggaaaagtcttagccaagtcggcttggagtcaagcagttggctcgttagtggatgcagtcgcctccaaacttgtcggcgacgtgatggatttagccggtattggccaggacgatgcatttaacatcgccagtttgattgcgcgcgttacaaaattagacgaccttttccttccgcctggagcaagcaaggataccataccagccacagcagaatatgcgagtacttggctgcgcctcaagtatctaagcgaagttttacagagcaacctccaggacgtaagatatctctggatggacagcgacctcagcctgtacttcaccgtcgatgaagtaattgagctgatcgggctaagctttgttgacaatgtgcgtactagggaagtagtgcgagaaattcagagacgaccgaatccacgtggccaaccctccatagatagcgttagtcgaggtccctcgggttga

SEQ ID NO: 36167 - protein, 272 aa, Muscodor strobelii
  misc_feature: SGI Peptide ID NO. 572534
  misc_feature (1)..(259): NCBI GI: 85099603 Blast Desc: NCU01278 [Neurospora crassa OR74A] gi|28922341|gb|EAA31579.1| NCU01278 [Neurospora crassa OR74A]
  misc_feature (1)..(259): NCBI GI: 38566806 Blast Desc: [Neurospora crassa]
  misc_feature (1)..(260): NCBI GI: 171692119 Blast Desc: protein product [Podospora anserina] gi|170946008|emb|CAP72809.1| protein product [Podospora anserina]
  misc_feature (1)..(257): NCBI GI: 261354818 Blast Desc: conserved [Verticillium albo-atrum VaMs.102]
  misc_feature (1)..(257): NCBI GI: 46123043 Blast Desc: FG05899.1 [Gibberella zeae PH-1]
  misc_feature (1)..(257): NCBI GI: 256731540 Blast Desc: NECHADRAFT_96404 [Nectria haematococca mpVI 77-13-4]
  misc_feature (1)..(257): NCBI GI: 145606242 Blast Desc: MGG_02443 [Magnaporthe grisea 70-15] gi|145013954|gb|EDJ98595.1| MGG_02443 [Magnaporthe grisea 70-15]
  misc_feature (1)..(257): NCBI GI: 156061845 Blast Desc: SS1G_03068 [Sclerotinia sclerotiorum 1980] gi|154700469|gb|EDO00208.1| SS1G_03068 [Sclerotinia sclerotiorum 1980]
  misc_feature (1)..(257): NCBI GI: 154311700 Blast Desc: BC1G_06309 [Botryotinia fuckeliana B05.10] gi|150850820|gb|EDN26013.1| BC1G_06309 [Botryotinia fuckeliana B05.10]
  misc_feature (1)..(259): NCBI GI: 116206584 Blast Desc: CHGG_02585 [Chaetomium globosum CBS 148.51] gi|88183182|gb|EAQ90650.1| CHGG_02585 [Chaetomium globosum CBS 148.51]
MFRAVSPYYYALDAGGNMFLYNDATYISKQLSKITAEWKSRADLAPRAVSLLRLENDVKALESFAKRAYTSEMNTHRTVLRDLLGGSQNMLQQDGLDSSEIESQVDNAIHHVRSIATLWGKVLAKSAWSQAVGSLVDAVASKLVGDVMDLAGIGQDDAFNIASLIARVTKLDDLFLPPGASKDTIPATAEYASTWLRLKYLSEVLQSNLQDVRYLWMDSDLSLYFTVDEVIELIGLSFVDNVRTREVVREIQRRPNPRGQPSIDSVSRGPSG

SEQ ID NO: 36168 - DNA, 3239 bp, Muscodor strobelii; identical to SEQ ID NO: 36165
  misc_feature: SGI EST ID NO. CUFF.86179.1
  misc_feature: Variant of the nucleotide sequence at SEQ ID NO 36166

SEQ ID NO: 36169 - DNA, 2544 bp, Muscodor strobelii
  misc_feature: SGI cDNA ID NO. 572535
  misc_feature: Encodes the peptide sequence at SEQ ID NO 36170
atggcccaatcgcagaatgcagcgattggtcgggccctggtggaattctcgcttgagggtgtatttccagaagatgatgtttcctcgcagcgtatccaagctcgacacctggcgcccgctctccagtcgctagctaccgcaaaatccaggcttgaggccgaaatacatgagatcaacgaagagacggctacggacgtgagccaatgggtcgccaatgccaagtctcttgaggacgacatcacccgcactcgaacgtgggccaacgagatcgtgaggaggtctgatgcgccagatgtttccggcagaatcatacaagaagcggaggagaaggtagaattccttcagcgcgaatctgcatataatcaacagctggatcataccttgaagagcatcaagcaagtcggtcagctcctagaccaggtcgagttggcacgagatgagagaagaatcctagattcgttgtatttgctcgagaaatcatggacagctctggacgatgtccccgtgagcaagtcttgtcgcgtcatgaggcttctcgacattcgagcctttgagcttaagtctgccgttcatgacgttttcaaccacgtttggggttctctcgtgaccgtagacagggacattggacaggtgactattatgcaatctcggccagatgagcagatgagcttagctgatgctgtcattggattgaaagcctacaaagaggtcgatcaaaaaatggcagaactctggcacaacctcgatgaaactatcgtccgtccaaggactgatctgcaacttgcagaattgtccacgtttcaagctgatagttcgactttcagcctagctggagaggcggacagaaccgtcccctctctctttcaggacctagacttgtttttgtcatacctcgctgcccatctgcctgaagatctgatcaactctctgtcaaacattatgatacctgagcttgtgtctcgtattgtcacaatttggctagactccgcggtaccgacgtctttgagcgatatgactgaatttcataaaatcaccgatgccactaaaagcttttgtgctcgtctcaaaagcctgaaattctccgggtttgaagaactgcaagaatgggtccagaatgtgcctcgagtttggcttgcaaaatgcagagaaactgcacttgactcagtgaggctgaaaatatcccaaggactgggtgatcctcaggaggttgagcatgctgagactcaaacagtcacacgggaagaaggccaaaaactcgcaacgaatggtgctaatacaactaacgatgaggattgggggaaggcatgggaagacgggccagctgacaatgatgagcatatgatggacaccactgacgatggtgctgaggcgtggggcttgggcgatgaagataccaacgattcgatatctcaaagtacgaaggtccccgctatcgatgatgaagtgaaagctgatgtggaagatgatggcgcagacgcctggggttgggacgacgaggacgtaacagctgcagaacctgtgaccatgaccccaaaggcacacggggagcattcaacacgagaactgactctcaaggagacatacaacatttcatcaatgccacaacccgtgctggcgcttattctgacaatcctggaagatggagcatcattgataagtaatgaaagtaatcctatgagctctgcagctgctggactcttctccttaccgacacttgtgttggcgatgtttcgggcagtctcgccatattactatgctttagatgcgggtggtaatatgtttctttacaacgatgcaacgtatatctccaaacaactgtcgaagatcacggccgagtggaagtccagagctgatctcgcgcctcgtgccgtatcattgctccgtctagagaatgatgttaaagccttggagtcatttgctaagcgcgcatacacctctgagatgaatacccatcgcacagtcttgcgtgacctgcttggcggttcgcaaaatatgttacaacaagatgggctggattcgtcagagatcgagtcgcaggtcgataatgccatccatcacgtccgctccattgcaaccttgtggggaaaagtcttagccaagtcggcttggagtcaagcagttggctcgttagtggatgcagtcgcctccaaacttgtcggcgacgtgatggatttagccggtattggccaggacgatgcatttaacatcgccagtttgattgcgcgcgttacaaaattagacgaccttttccttccgcctggagcaagcaaggataccataccagccacagcagaatatgcgagtacttggctgcgcctcaagtatctaagcgaagttttacagagcaacctccaggacgtaagatatctctggatggacagcgacctcagcctgtacttcaccgtcgatgaagtaattgagctgatcgggctaagctttgttgacaatgtgcgtactagggaagtagtgcgagaaattcagagacgaccgaatccacgtggccaaccctccatagatagcgttagtcgaggtccctcgggttga

SEQ ID NO: 36170 - protein, 847 aa, Muscodor strobelii
  misc_feature: SGI Peptide ID NO. 572535
  misc_feature (4)..(832): NCBI GI: 256731540 Blast Desc: NECHADRAFT_96404 [Nectria haematococca mpVI 77-13-4]
  misc_feature (12)..(832): NCBI GI: 46123043 Blast Desc: FG05899.1 [Gibberella zeae PH-1]
  misc_feature (9)..(832): NCBI GI: 261354818 Blast Desc: conserved [Verticillium albo-atrum VaMs.102]
  misc_feature (7)..(834): NCBI GI: 116206584 Blast Desc: CHGG_02585 [Chaetomium globosum CBS 148.51] gi|88183182|gb|EAQ90650.1| CHGG_02585 [Chaetomium globosum CBS 148.51]
  misc_feature (258)..(834): NCBI GI: 85099603 Blast Desc: NCU01278 [Neurospora crassa OR74A] gi|28922341|gb|EAA31579.1| NCU01278 [Neurospora crassa OR74A]
  misc_feature (9)..(832): NCBI GI: 154311700 Blast Desc: BC1G_06309 [Botryotinia fuckeliana B05.10] gi|150850820|gb|EDN26013.1| BC1G_06309 [Botryotinia fuckeliana B05.10]
  misc_feature (6)..(832): NCBI GI: 156061845 Blast Desc: SS1G_03068 [Sclerotinia sclerotiorum 1980] gi|154700469|gb|EDO00208.1| SS1G_03068 [Sclerotinia sclerotiorum 1980]
  misc_feature (354)..(832): NCBI GI: 145606242 Blast Desc: MGG_02443 [Magnaporthe grisea 70-15] gi|145013954|gb|EDJ98595.1| MGG_02443 [Magnaporthe grisea 70-15]
  misc_feature (9)..(499): NCBI GI: 171692117 Blast Desc: protein product [Podospora anserina] gi|170946007|emb|CAP72808.1| protein product [Podospora anserina]
  misc_feature (8)..(828): NCBI GI: 240281195 Blast Desc: conserved [Ajellomyces capsulatus H143]
MAQSQNAAIGRALVEFSLEGVFPEDDVSSQRIQARHLAPALQSLATAKSRLEAEIHEINEETATDVSQWVANAKSLEDDITRTRTWANEIVRRSDAPDVSGRIIQEAEEKVEFLQRESAYNQQLDHTLKSIKQVGQLLDQVELARDERRILDSLYLLEKSWTALDDVPVSKSCRVMRLLDIRAFELKSAVHDVFNHVWGSLVTVDRDIGQVTIMQSRPDEQMSLADAVIGLKAYKEVDQKMAELWHNLDETIVRPRTDLQLAELSTFQADSSTFSLAGEADRTVPSLFQDLDLFLSYLAAHLPEDLINSLSNIMIPELVSRIVTIWLDSAVPTSLSDMTEFHKITDATKSFCARLKSLKFSGFEELQEWVQNVPRVWLAKCRETALDSVRLKISQGLGDPQEVEHAETQTVTREEGQKLATNGANTTNDEDWGKAWEDGPADNDEHMMDTTDDGAEAWGLGDEDTNDSISQSTKVPAIDDEVKADVEDDGADAWGWDDEDVTAAEPVTMTPKAHGEHSTRELTLKETYNISSMPQPVLALILTILEDGASLISNESNPMSSAAAGLFSLPTLVLAMFRAVSPYYYALDAGGNMFLYNDATYISKQLSKITAEWKSRADLAPRAVSLLRLENDVKALESFAKRAYTSEMNTHRTVLRDLLGGSQNMLQQDGLDSSEIESQVDNAIHHVRSIATLWGKVLAKSAWSQAVGSLVDAVASKLVGDVMDLAGIGQDDAFNIASLIARVTKLDDLFLPPGASKDTIPATAEYASTWLRLKYLSEVLQSNLQDVRYLWMDSDLSLYFTVDEVIELIGLSFVDNVRTREVVREIQRRPNPRGQPSIDSVSRGPSG

SEQ ID NO: 36171 - DNA, 3239 bp, Muscodor strobelii; identical to SEQ ID NO: 36165
  misc_feature: SGI EST ID NO. CUFF.86179.1
  misc_feature: Variant of the nucleotide sequence at SEQ ID NO 36169

SEQ ID NO: 36172 - DNA, 324 bp, Muscodor strobelii
  misc_feature: SGI cDNA ID NO. 572536
  misc_feature: Encodes the peptide sequence at SEQ ID NO 36173
atggctcgcattagcatcatcagcgttttcacatttgccctcacagcgctagctctaagccccaacaatgccggagcccgcgacgtcgggaacggtaacgccgcgcaattcacaactggtggttgtatctccgacgctgactgccagtccgcgtgctgtgcgggcggtgccactgctgccgatggaagtggtggcgaggtcggcatctgcagcgctgaggctgcttcgttgcagaatggcaagactggttgtggctttgtcgaccctaactctgatgctacacttgctgccgctcaggctcaggtcgaggctcaaggcttctaa

SEQ ID NO: 36173 - protein, 107 aa, Muscodor strobelii
  misc_feature: SGI Peptide ID NO. 572536
  misc_feature (1)..(107): NCBI GI: 39973349 Blast Desc: MGG_07969 [Magnaporthe grisea 70-15] gi|145012788|gb|EDJ97442.1| MGG_07969 [Magnaporthe grisea 70-15]
  misc_feature (1)..(107): NCBI GI: 39963018 Blast Desc: [Magnaporthe grisea 70-15] gi|145015528|gb|EDK00065.1| [Magnaporthe grisea 70-15] gi|229473311|gb|ACQ73207.1| biotrophy-associated secreted protein 2 [Magnaporthe grisea
  misc_feature (3)..(107): NCBI GI: 189201305 Blast Desc: [Pyrenophora tritici-repentis Pt-1C-BFP] gi|187984088|gb|EDU49576.1| [Pyrenophora tritici-repentis Pt-1C-BFP]
  misc_feature (3)..(107): NCBI GI: 169618317 Blast Desc: SNOG_12350 [Phaeosphaeria nodorum SN15] gi|111059043|gb|EAT80163.1| SNOG_12350 [Phaeosphaeria nodorum SN15]
  misc_feature (1)..(107): NCBI GI: 116178950 Blast Desc: CHGG_00103 [Chaetomium globosum CBS 148.51] gi|88184400|gb|EAQ91868.1| CHGG_00103 [Chaetomium globosum CBS 148.51]
  misc_feature (19)..(107): NCBI GI: 171679299 Blast Desc: protein product [Podospora anserina] gi|170939275|emb|CAP64503.1| protein product [Podospora anserina]
  misc_feature (1)..(88): NCBI GI: 39972909 Blast Desc: MGG_07749 [Magnaporthe grisea 70-15] gi|145012518|gb|EDJ97172.1| MGG_07749 [Magnaporthe grisea 70-15]
  misc_feature (1)..(86): NCBI GI: 256725304 Blast Desc: NECHADRAFT_83046 [Nectria haematococca mpVI 77-13-4]
  misc_feature (25)..(87): NCBI GI: 256725304 Blast Desc: NECHADRAFT_83046 [Nectria haematococca mpVI 77-13-4]
  misc_feature (1)..(88): NCBI GI: 261352733 Blast Desc: conserved [Verticillium albo-atrum VaMs.102]
MARISIISVFTFALTALALSPNNAGARDVGNGNAAQFTTGGCISDADCQSACCAGGATAADGSGGEVGICSAEAASLQNGKTGCGFVDPNSDATLAAAQAQVEAQGF

SEQ ID NO: 36174 - DNA, 219 bp, Muscodor strobelii
  misc_feature: SGI EST ID NO. CUFF.86071.0
  misc_feature: Variant of the nucleotide sequence at SEQ ID NO 36172
cggcaagcccgactcaattcttacactcgttataagtttaatatcaataccacggcccggcgtcgtctttcacttctataataccgtcgatatccgatatattcattagtaaccgtcgaaatggctcgcattagcatcatcagcgttttcacatttgccctcacagcgctagctctaagccccaacaatgccggagcccgcgacgtcgggaacggtaac

SEQ ID NO: 36175 - DNA, 1596 bp, Muscodor strobelii
  misc_feature: SGI cDNA ID NO. 572537
  misc_feature: Encodes the peptide sequence at SEQ ID NO 36176
atgtcgggttctcccgacctttccctgcccgcaaaggcgctggcgatgaggcaacatcataacgagccctggaatccactacccgtagctctctactctcttgtagatctaagcaatacagatctagaagagctcgcgcgcgagtgcgaactcgcaaaaatcgagacaggcaacgtgcggggcagtgtccgacttgccccacgatcacggtttgtcggccgaccactacgagtcgtcttcgagtaccatcttgagctgggaacgcacgaaacattcgagcccagatatttcatcactgtcgtcgaaaaagactgggagacgaagggtgtgatactcgccacgcttgatgatgatgaacttgattgcaatgttgactcgttccgcatcagggctggtgatgctggcttcactgtactcaaattacaatgtggagatttttcgtgggaagaggaaaaagaggactttgagtttattccagatgatagaggtgacgaaaatagcaacgaggacgcgggaggcgatggcgatgacgatgacgatggcgatggcgatggcgaccccgctaccaacgataagttcaatcttgatgatgggccaccagcaccaacgaagaatgtcccgcttggctactatattccaatctacatccactcaaatctatctgaagacgatgtggttgcgaaactagagccagcattcaatatcaaatcgcccgaaaattacgcctgtcgcgtgcaagccgagttgacgccttcatctaccacctttgacgaagcatcgacatcagaactcatccagcaagccgtagttctacatccccaacgatgtgcaaagaaccgtttccttcatagagactacattcttgtcatagataccgatgaccccgacgaaaacggcatggtgatggtcaagctaccaccacgggatacgcacctttcaaatgtagccagacgaagaggcttgaaccaggtcgaggaaaccccagctctgtccacatcccaatacatacgcattccatattcctgtcacgacggcctacagactcgcttcttaatcttgggtaatggtgatgcaacatggccatcagtagaggtgcgatctcagtcagtcttcatcgtctttcaatataatacgcatggcaaggagctaggcttttgcgataaagatctcgatccaggcgctgcgagacggaatcccggcgaagaacggataatatttgtatcagctgctgcctatcgtcgaagacaggctgcgaagagtttcacgtggaattataataaagctgtgaagcattttccttgcgtctgtcgcaggaatcgctttgttgagtttttggatcgggaatttttcatatgtgtagacagtgacgatgtggctaagaatggtgtcttactggtgtgtaggaggtgggatgagaaagtatggggtcggaacgaggaggatttacttggattgcctatcgggtatgtgaaggatgtacgagtccctatcaaagaagcactaaacctgctggaaaaggggagtcaaggtgatatggctggtatgagtgggagcgtgagagatttcttctggcaaatgtcttgtattatttcttga

SEQ ID NO: 36176 - protein, 531 aa, Muscodor strobelii
  misc_feature: SGI Peptide ID NO. 572537
  misc_feature (4)..(145): NCBI GI: 189194944 Blast Desc: conserved [Pyrenophora tritici-repentis Pt-1C-BFP] gi|187979689|gb|EDU46315.1| conserved [Pyrenophora tritici-repentis Pt-1C-BFP]
  misc_feature (1)..(127): NCBI GI: 145250819 Blast Desc: An15g03860 [Aspergillus niger] gi|134082447|emb|CAK97255.1| protein product [Aspergillus niger]
MSGSPDLSLPAKALAMRQHHNEPWNPLPVALYSLVDLSNTDLEELARECELAKIETGNVRGSVRLAPRSRFVGRPLRVVFEYHLELGTHETFEPRYFITVVEKDWETKGVILATLDDDELDCNVDSFRIRAGDAGFTVLKLQCGDFSWEEEKEDFEFIPDDRGDENSNEDAGGDGDDDDDGDGDGDPATNDKFNLDDGPPAPTKNVPLGYYIPIYIHSNLSEDDVVAKLEPAFNIKSPENYACRVQAELTPSSTTFDEASTSELIQQAVVLHPQRCAKNRFLHRDYILVIDTDDPDENGMVMVKLPPRDTHLSNVARRRGLNQVEETPALSTSQYIRIPYSCHDGLQTRFLILGNGDATWPSVEVRSQSVFIVFQYNTHGKELGFCDKDLDPGAARRNPGEERIIFVSAAAYRRRQAAKSFTWNYNKAVKHFPCVCRRNRFVEFLDREFFICVDSDDVAKNGVLLVCRRWDEKVWGRNEEDLLGLPIGYVKDVRVPIKEALNLLEKGSQGDMAGMSGSVRDFFWQMSCIIS

SEQ ID NO: 36177 - DNA, 1803 bp, Muscodor strobelii
  misc_feature: SGI EST ID NO. CUFF.86077.0
  misc_feature: Variant of the nucleotide sequence at SEQ ID NO 36175
acttgccctgcaactcttccaaacatatcagaacaagtcatttttagatcatcgacattgactggaaatatcttcgagcgtagtcgcccatggttatcaaattcaaaacaagacaagtaatatgtcgggttctcccgacctttccctgcccgcaaaggcgctggcgatgaggcaacatcataacgagccctggaatccactacccgtagctctctactctcttgtagatctaagcaatacagatctagaagagctcgcgcgcgagtgcgaactcgcaaaaatcgagacaggcaacgtgcggggcagtgtccgacttgccccacgatcacggtttgtcggccgaccactacgagtcgtcttcgagtaccatcttgagctgggaacgcacgaaacattcgagcccagatatttcatcactgtcgtcgaaaaagactgggagacgaagggtgtgatactcgccacgcttgatgatgatgaacttgattgcaatgttgactcgttccgcatcagggctggtgatgctggcttcactgtactcaaattacaatgtggagatttttcgtgggaagaggaaaaagaggactttgagtttattccagatgatagaggtgacgaaaatagcaacgaggacgcgggaggcgatggcgatgacgatgacgatggcgatggcgatggcgaccccgctaccaacgataagttcaatcttgatgatgggccaccagcaccaacgaagaatgtcccgcttggctactatattccaatctacatccactcaaatctatctgaagacgatgtggttgcgaaactagagccagcattcaatatcaaatcgcccgaaaattacgcctgtcgcgtgcaagccgagttgacgccttcatctaccacctttgacgaagcatcgacatcagaactcatccagcaagccgtagttctacatccccaacgatgtgcaaagaaccgtttccttcatagagactacattcttgtcatagataccgatgaccccgacgaaaacggcatggtgatggtcaagctaccaccacgggatacgcacctttcaaatgtagccagacgaagaggcttgaaccaggtcgaggaaaccccagctctgtccacatcccaatacatacgcattccatattcctgtcacgacggcctacagactcgcttcttaatcttgggtaatggtgatgcaacatggccatcagtagaggtgcgatctcagtcagtcttcatcgtctttcaatataatacgcatggcaaggagctaggcttttgcgataaagatctcgatccaggcgctgcgagacggaatcccggcgaagaacggataatatttgtatcagctgctgcctatcgtcgaagacaggctgcgaagagtttcacgtggaattataataaagctgtgaagcattttccttgcgtctgtcgcaggaatcgctttgttgagtttttggatcgggaatttttcatatgtgtagacagtgacgatgtggctaagaatggtgtcttactggtgtgtaggaggtgggatgagaaagtatggggtcggaacgaggaggatttacttggattgcctatcgggtatgtgaaggatgtacgagtccctatcaaagaagcactaaacctgctggaaaaggggagtcaaggtgatatggctggtatgagtgggagcgtgagagatttcttctggcaaatgtcttgtattatttcttgaaagttgaaaggcaatttgacaggtccatgatgcaaagattttctagactttcgataaattacaccctgctgctcaggattgccgtc

SEQ ID NO: 36178 - DNA, 1923 bp, Muscodor strobelii
  misc_feature: SGI cDNA ID NO. 572538
  misc_feature: Encodes the peptide sequence at SEQ ID NO 36179
atgcctcgtcctcgtaagctcgtcgcgctcgcttccgcaccggtcaatagaccattagtcccgccaagtgacccagagccctgtgtggtaaggcaacgtcgttctcgccacagaccttcagaatgggagtccaagagagcagacatcattcgaatctacatcgaagaggacaagtctgccgaagaattactccacatattgaactccgagtttggatttgggacgaggcgccggactttgttcaacaagttgaaagagtggggagtcgaaaaaaacacaaaacaccagaatgaagagaatgacgatcttgcgaggaggttcaagtataaaaaggttatcacgcgaagctcaacagttatacgagatgagccggctccggtactccctcttgcacgtcagattgaaattccatcaaggcacttcggttgtgggacagtacggcggttcgctttccaaccgggtccatcttactccatgaaccataaaagtactcaagcgtcggacacggaagctcgaacagtggcaccatctaccccggctgcagaagtccacagtgttccagccatacactccgatgacaacatcaatcaatcttgtatacgagcaaacagtcccttgactattgatccacaactgttggctttgaaatcttcaacccccgtatttggccagactgaggctgaactgaaactatcaagccaggatgccccgatgctagtcctcgggcctcaaacattcgaagaagatccaaacgcaatgcctcacgacgagacctccaacaaactttcagacaactccaacggaggtgcagttgcaaaatggcatttcggagcaaaactcacttttcggcaaaggaatgtgttccaaattcttcgaattgacgtactccaatatgagacttcttctggtgggagcgtgttaatcccgccgagattgattgtcaataacatcgtgcccaatgactccccagtatttcaagttgccaagacgggctcacttgatgatttcctccgtttgttggacgcaaaacaagcgagtctgagagactgcaatgagaatggtgcatctcttctctattatgctgcttcgaatgcgcccgtatgcaaatacctcattgaaaatgggttcgacgaaaatgaattgatcatcaggtccaacggagaacagacaacgccactccatgaagtgttgtgtagtatgtcaccaagtaaccccaagagccattggaatgcgagcggaattcttcttgcagcaggtgcagaccctactactaaactttccggccatgtatatgttaaaaatagattggccggagatcgtgtggtcaataatgagagggctatgcacgactaccatagtgtccgacagatgttcgatcttgcttctcattatggaatctttagggtccgacccgatgcgttcatcaaacttgctctcgacggaggatgcagaccaaacgatatggctgatattggatcacccttacacgcgttcttccgctcacagattccaccaccaagggacgccaattggctcaaggcgctgacccggatcgttcgaagcggaggagacattaacgccattgataatggcggcatctacgtctctgatattgcatatgccgagtgggttaattcgccctccgaacccgacttgggttcatatcgtggagatctttttgacgctctgctggttgcctgcggttatgagatcgcaaattttcggaaaggtcgtgcaagagcagctaggtatacaaaatggtattgcctagaagacttcgaaaagctgtgggaggacgtatggctggccttttcgcaagatgggaaccttggaggatatgtcgacgaggagaacacaagactcgatcgcgatatggagtttggcttccaaatggcggcgatcgagtatcttaacctgccatga

SEQ ID NO: 36179 - protein, 640 aa, Muscodor strobelii
  misc_feature: SGI Peptide ID NO. 572538
  misc_feature (270)..(598): NCBI GI: 256724510 Blast Desc: NECHADRAFT_88161 [Nectria haematococca mpVI 77-13-4]
  misc_feature (305)..(597): NCBI GI: 256725473 Blast Desc: [Nectria haematococca mpVI 77-13-4]
  misc_feature (198)..(597): NCBI GI: 46135745 Blast Desc: FG09388.1 [Gibberella zeae PH-1]
  misc_feature (308)..(600): NCBI GI: 261356804 Blast Desc: [Verticillium albo-atrum VaMs.102]
  misc_feature (41)..(99): NCBI GI: 256728009 Blast Desc: NECHADRAFT_83369 [Nectria haematococca mpVI 77-13-4]
  misc_feature (475)..(600): NCBI GI: 256720147 Blast Desc: NECHADRAFT_89312 [Nectria haematococca mpVI 77-13-4]
  misc_feature (22)..(111): NCBI GI: 156041192 Blast Desc: SS1G_11575 [Sclerotinia sclerotiorum 1980] gi|154695958|gb|EDN95696.1| SS1G_11575 [Sclerotinia sclerotiorum 1980]
  misc_feature (11)..(104): NCBI GI: 46108404 Blast Desc: FG01084.1 [Gibberella zeae PH-1]
MPRPRKLVALASAPVNRPLVPPSDPEPCVVRQRRSRHRPSEWESKRADIIRIYIEEDKSAEELLHILNSEFGFGTRRRTLFNKLKEWGVEKNTKHQNEENDDLARRFKYKKVITRSSTVIRDEPAPVLPLARQIEIPSRHFGCGTVRRFAFQPGPSYSMNHKSTQASDTEARTVAPSTPAAEVHSVPAIHSDDNINQSCIRANSPLTIDPQLLALKSSTPVFGQTEAELKLSSQDAPMLVLGPQTFEEDPNAMPHDETSNKLSDNSNGGAVAKWHFGAKLTFRQRNVFQILRIDVLQYETSSGGSVLIPPRLIVNNIVPNDSPVFQVAKTGSLDDFLRLLDAKQASLRDCNENGASLLYYAASNAPVCKYLIENGFDENELIIRSNGEQTTPLHEVLCSMSPSNPKSHWNASGILLAAGADPTTKLSGHVYVKNRLAGDRVVNNERAMHDYHSVRQMFDLASHYGIFRVRPDAFIKLALDGGCRPNDMADIGSPLHAFFRSQIPPPRDANWLKALTRIVRSGGDINAIDNGGIYVSDIAYAEWVNSPSEPDLGSYRGDLFDALLVACGYEIANFRKGRARAARYTKWYCLEDFEKLWEDVWLAFSQDGNLGGYVDEENTRLDRDMEFGFQMAAIEYLNLP

SEQ ID NO: 36180 - DNA, 877 bp, Muscodor strobelii
  misc_feature: SGI EST ID NO. CUFF.86092.0
  misc_feature: Variant of the nucleotide sequence at SEQ ID NO 36178
ccggccatgtatatgttaaaaatagattggccggagatcgtgtggtcaataatgagagggctatgcacgactaccatagtgtccgacagatgttcgatcttgcttctcattatggaatctttagggtccgtttagatggggaacaaacggttcttcacgcgttttgcagcgggttgcgtgactcttcagtgtatatgactgaaacttctagttcaataggacccgatgcgttcatcaaacttgctctcgacggaggatgcagaccaaacgatatggctgatattggatcacccttacacgcgttcttccgctcacagattccaccaccaagggacgccaattggctcaaggcgctgacccggatcgttcgaagcggaggagacattaacgccattgataatggcggcatctacgtctctgatattgcatatgccgagtgggttaattcgccctccgaacccgacttgggttcatatcgtggagatctttttgacgctctgctggttgcctgcggttatgagatcgcaaattttcggaaaggtcgtgcaagagcagctaggtatacaaaatggtattgcctagaagacttcgaaaagctgtgggaggacgtatggctggccttttcgcaagatgggaaccttggaggatatgtcgacgaggagaacacaagactcgatcgcgatatggagtttggcttccaaatggcggcgatcgagtatcttaacctgccatgatgcgtttacgtgctgtttagtgggttgcgactctctgctagaccgatgttatgatttctactcatattgtctacaaagccaacttatcgaaggataatttccagcttgactgtcaggtcacaagtagtaaaatgccaacgaaa

SEQ ID NO: 36181 - DNA, 1020 bp, Muscodor strobelii
  misc_feature: SGI cDNA ID NO. 572539
  misc_feature: Reduced expression when VOC is produced
  misc_feature: Encodes the peptide sequence at SEQ ID NO 36182
atgctcggccaggactacacccgcaggcggccggttgaccctacgcaaccggcgtactcccactcgagaacaagaacaacatcctccaacacatttcctaaccagccaggcatcatgtcgactccgacgcacctacaacagccacagcccactcagggccacacccgccgttccccctcggttaacaccttcagcacaacctcgagcataccaccgcccgccgcatttcgaacttcgcccaccaccgatctgcgccggagcacctcatcacgttcgtttggaagccagcaagtcagctacgttgccttgcttcggaaacaaaaggctacggtatggtgcgatcgagcccagtttgaggaccctcgtctcgtcgcccaacagaaggccgccaagcagcgagctgcccagcaggttaccgctcgtcaagcccagagccgcacttcgacggggcttggcggtcccggcaaagtcgtcaccaagttccgacacggcgggaaacctggcgttgtagggtacacgcccgaaaataactacattggagtgggtggtgtcccactgcgcctgagcgctacagaggtcgagggcgaagacagcgaagaagacgatgtttctatgcagcggctgcaccaccgtagaacggggagtagcgggcgtagcagcacggctagcggtcgtcgcggtgtcgcataccgcaactcgggtagtatccggaacaagtggagtcccagcgacacgccggagcgaggtagcatggttggtgaagccgagtataagccaggcgatgaccggttacaccgggcgcagagcacacatagcgggagtagtgccgaaagagctgatgccctacctgaactcggtgtttccagtactgcgaagctcgctagcaacagcctgctcaatgcggctttgacgagagagaagagcgtgaagaatccagaggaactcaagagaaggggcagcgtggacgagaggaccatgacgctcacatctggccgacttttcatcgccaatcccgattaa

SEQ ID NO: 36182 - protein, 339 aa, Muscodor strobelii
  misc_feature: SGI Peptide ID NO. 572539
  misc_feature (6)..(339): NCBI GI: 116206368 Blast Desc: CHGG_02477 [Chaetomium globosum CBS 148.51] gi|88183074|gb|EAQ90542.1| CHGG_02477 [Chaetomium globosum CBS 148.51]
  misc_feature (9)..(339): NCBI GI: 46123521 Blast Desc: FG06138.1 [Gibberella zeae PH-1]
  misc_feature (1)..(339): NCBI GI: 85101481 Blast Desc: NCU04199 [Neurospora crassa OR74A] gi|21622343|emb|CAD37043.1| [Neurospora crassa] gi|28922699|gb|EAA31923.1| conserved [Neurospora crassa OR74A]
  misc_feature (9)..(339): NCBI GI: 256731052 Blast Desc: [Nectria haematococca mpVI 77-13-4]
  misc_feature (43)..(339): NCBI GI: 39946290 Blast Desc: MGG_08367 [Magnaporthe grisea 70-15] gi|145019979|gb|EDK04207.1| MGG_08367 [Magnaporthe grisea 70-15]
  misc_feature (1)..(339): NCBI GI: 171693539 Blast Desc: protein product [Podospora anserina] gi|170946718|emb|CAP73521.1| protein product [Podospora anserina]
  misc_feature (1)..(339): NCBI GI: 261358026 Blast Desc: conserved [Verticillium albo-atrum VaMs.102]
  misc_feature (5)..(339): NCBI GI: 154319397 Blast Desc: BC1G_02650 [Botryotinia fuckeliana B05.10] gi|150857081|gb|EDN32273.1| BC1G_02650 [Botryotinia fuckeliana B05.10]
  misc_feature (5)..(339): NCBI GI: 156063106 Blast Desc: SS1G_01669 [Sclerotinia sclerotiorum 1980] gi|154697005|gb|EDN96743.1| SS1G_01669 [Sclerotinia sclerotiorum 1980]
  misc_feature (13)..(339): NCBI GI: 189209914 Blast Desc: conserved [Pyrenophora tritici-repentis Pt-1C-BFP] gi|187977382|gb|EDU44008.1| conserved [Pyrenophora tritici-repentis Pt-1C-BFP]
  misc_feature: Useful for introducing or modulating the production of volatile compounds
MLGQDYTRRRPVDPTQPAYSHSRTRTTSSNTFPNQPGIMSTPTHLQQPQPTQGHTRRSPSVNTFSTTSSIPPPAAFRTSPTTDLRRSTSSRSFGSQQVSYVALLRKQKATVWCDRAQFEDPRLVAQQKAAKQRAAQQVTARQAQSRTSTGLGGPGKVVTKFRHGGKPGVVGYTPENNYIGVGGVPLRLSATEVEGEDSEEDDVSMQRLHHRRTGSSGRSSTASGRRGVAYRNSGSIRNKWSPSDTPERGSMVGEAEYKPGDDRLHRAQSTHSGSSAERADALPELGVSSTAKLASNSLLNAALTREKSVKNPEELKRRGSVDERTMTLTSGRLFIANPD

SEQ ID NO: 36183 - DNA, 3775 bp, Muscodor strobelii
  misc_feature: SGI EST ID NO. CUFF.86152.2
  misc_feature: Variant of the nucleotide sequence at SEQ ID NO 36181
ccctgccaaatttcgacaatcttgaatatttggtctctttgtccgtacattgcatatgacttaagtaacacggcatcaggccgtcaatcaaacacatccgatcaagcaatgttgaatgagcgtgatcagattttagatatatggacgccataaacaaaaccaaccgccgttcggattaggttcagaggagaaaataagttggagccttgctattaggttatcgatcttggacggcgctactgcagcaaaatcccatccaacaatcccatcttgaaatcaattcagcccatgtacctggagagcattggaagcttaccaatcctcgctattcttcgagagcagtctcaacttttttgaagctaacaaaaaagaaggacgcgacaaagacgtagctcaattcagaggcacacccgcgaagcgatagcgtggaatagggtgtcacgcgtttggaatcatagcggtcattatcatgaccgcagctttatagactttagaagcaagtcttatccgcgccagtgacttggatccaggctatccaggcgcgcctcgcccctcaaattagctcctctagcctcatcacattacattactactcataagcccgtctgagcgaacgagcttagtggatcgtcaacgtgagcgacgctggcgacgacattggaagggttgtcctgaagatacatactatctagccccgagctttcgcttggttgcttggtcgatttatcgctcatgccattgccggccggatttgattctacgggtttcgagcgacattccactttgaaaaagtcaacataaaaaacgagctgatcggctctcgtgttgcattttgaagctacgatctacaccggcgcttgacagggaatcgacgattgtggtggttgtgtttacgcatcaagcggcacaaggactttgcagcttgattggttctgctgcaaggcagttcctcggcgaatcgtcacaccagaggtgcattcagcaccgtccatctagcatctccaccacgcgtcaggctatacagtcggagggctccatatatcttatgtttttgtttgtggtttgcggctcatcacggaatattttctgatctgcgtgggaataccatcgacacggccattaccagaggccaccaacgacggcttcaatttagcgcccgttcgtaacgtaaagaggaccaaatacaggctgacgtgaggcttcaacatttcctgttgatcttttgtcgcattgccgtattcgaatttgcaattgctggagacacggaattccggcaaaacaaagaagaacaagcgcaagtgacgatcttgggatagttgatatcagggttgttacgggaagaagggacctcccggaaaacttgtgaccagtgcccgccaagaggtaccctagtggaaacgatcttatcgaaggaacccagcaggtcggcgttcgcgtcggcagggacagagcccggagctaagcggcagcaggctcgcagcgctagactgcgtcggggagggtcttgagaaggcgcgggctgtgagtggacagcgctacgtcgagtctcagcggatttggagcttggcgctgtaattccaaggtctcgtcactggtgtcagggtgacccaacgtgattatctcgtcccccaccagcgaccgcagctccccacctctgaaaagcccaatccttccttctgttaccagcacgcctgcagcacgggtaggcctgtctctgtgctgctgctacattaccacaccattacgctcaacgagtgcaggtgcaagaaggtacatgtgccttatagctgccgcacctcctcccattgttgattgccatatttcaccccaacttttggcagcgaatacctcactttgccatcccaaccgctcctagcccaccgaccagccttcggaatagcccgagtagcggaattggagcagtcaaaggcacacgtcagtcttgaatcatattgtgtgacttcgactgtaaacacccatttcacttcggtcaaaggcacgcgcaacacacattcagcctcccctacaagtccccctcgctttgacaaaggcagcaaacacaaaacgccgatattgtcacaaaagcagcgtcttacgtcactgtgaacaccggcccaaagggtctgggagccatataagatgctcggccaggactacacccgcaggcggccggttgaccctacgcaaccggcgtactcccactcgagaacaagaacaacatcctccaacacatttcctaaccagccaggcatcatgtcgactccgacgcacctacaacagccacagcccactcagggccacacccgccgttccccctcggttaacaccttcagcacaacctcgagcataccaccgcccgccgcatttcgaacttcgcccaccaccgatctgcgccggagcacctcatcacgttcgtttggaagccagcaagtcagctacgttgccttgcttcggaaacaaaaggctacggtatggtgcgatcgagcccagtttgaggaccctcgtctcgtcgcccaacagaaggccgccaagcagcgagctgcccagcaggttaccgctcgtcaagcccagagccgcacttcgacggggcttggcggtcccggcaaagtcgtcaccaagttccgacacggcgggaaacctggcgttgtagggtacacgcccgaaaataactacattggagtgggtggtgtcccactgcgcctgagcgctacagaggtcgagggcgaagacagcgaagaagacgatgtttctatgcagcggctgcaccaccgtagaacggggagtagcgggcgtagcagcacggctagcggtcgtcgcggtgtcgcataccgcaactcgggtagtatccggaacaagtggagtcccagcgacacgccggagcgaggtagcatggttggtgaagccgagtataagccaggcgatgaccggttacaccgggcgcagagcacacatagcgggagtagtgccgaaagagctgatgccctacctgaactcggtgtttccagtactgcgaagctcgctagcaacagcctgctcaatgcggctttgacgagagagaagagcgtgaagaatccagaggaactcaagagaaggggcagcgtggacgagaggaccatgacgctcacatctggccgacttttcatcgccaatcccgattaacacaataccccacatactgtttgctatactacgatggatctactacatactggcttcgcttagtagtcgtggatattctgcattgctacggcgttgatactcatttttaactttattttgaggttagttgagacgcacggtcgttcatggaaacctctgggttggaggagagaaaaatttcgtcgaagcatataccctcgcttccgcttcgactctctatcgtgttgctattttttctttctctttttgcagagcagcgtcatggcccgctgggcgggtgaggatgattggcaacttggctgctagggtaatagtcgtcctgtcagatggttcgctctggatagggagtgaatggtttgtctagctagggtgacaatatcaagcgttttttttaagaaaaagaccccgtgcaagtgcctacaatgatccaaaccgggttgcctcttgtgacacgtgacaaccttgttcctctccgctatatctttcagattcgtcatctcgagacagcgtcccatccagattggcttcatactcacctcaagtgcaccgtctgacctgatctcgtcaaaccttcctcgacgctaaggaaagtttccctgtctcgggtcacggctcc

SEQ ID NO: 36184 - DNA, 3123 bp, Muscodor strobelii
  misc_feature: SGI cDNA ID NO. 572540
  misc_feature: Encodes the peptide sequence at SEQ ID NO 36185
atgactcgcaagacagcgaagtcgctgcaggcggcggagcgaaaggctctagctggtgaaaatgagagccaagacagccaactgcagctgctgcatttaatggagattcacggggttggcgtgaccagtagctcgcctcgtggctcatcacctcccccggaacgccagacgagatcccagggcaaagccaacgcccctgctgcgtccttgcatgcatttttcaagtcgaataagcaagcagacgaggcaggtccatttgacattgtgacacccaaaaacgcggtagacgcgtccgcccaaatctccaagaccgccgttgcaaatggaccacaggatatagcaattgccatccactcgtctctccagcaactcggtcagcaacaccatttacgagtcacacatccattgacatcggggaaagctgccagacgtccccaaaaaggtcaatgcaatgccaattctaacaacgaaccgagctatcccctagctgaagacgactcgtcggcggtcccagcaaagctcaagaaacctgccaagatgtcgacacagtccccgacccagtcgaacgaagacaggagctatgagcagtacaatgatcgcggatcatcacaggctctcgacacgcaatacaccaaccccgaggagcatcggacactccacgaaggagacacgggatatgtgaacctgaatttggggaatgctctcgactctccccactatcccgatacaccctttgcccggcaccgtgatcacaacgaagatgacgggaaccgcgacgacgatgacgacgacgacgacctggacagtgataaccatggcccatccaaggtcacatcccagccgccttcggcgtacaccacacactacgaacccgaaacacccgccgtcttccccaggcctttctttggtgctggtgctggtgtcggtcaagtactgggaggatctcagttgtttgcacagacgcagccaacctctggtctcagaaaacccagtccgacctcatctcgcccctcaccagatatcttccaaaacaacatgacttccccttctcgtcccgcttcttcaccgttgaaagatagaggtgtagacatgacgccgttcggagcctttgcttccacatctccagtctctaatcaacgttcatctggcgcagcaaaccaagtacctccgttttcggacctggtcgaaggatctgacggagacgaagataatgaaaacgatgtcgacctcacaccacatgtacaagcaaggagtcttagacacagaagcagtctcgagccgatcaatgagtacagaccatatcagaaagtgggctcgtcgatggatccaccaagatcgagggatccatacagactgagttctgacacagaacaggacgatgcggaaacccgttatcaccgcgccaagctgaagaaggcgagagcctcaaagtcatttcccgacatcagtgtaccgacaacaagctcagcaaagagcaatattgaagtaccatcaacaaaccgtgctaagcgtatctacacccggactgtctcggacgagtatattgagcaatgccatggaaaatatgcgactgataacgacagtacgcaagagactgtggccgactcacaagatgccgctgcatctaaacagctacccatcgatgatatctcgactccaactccaatacctaacacgggccaggagccttcgagaatagagaaggaagcttcttcagatgagacgccggccaatacggacgacaaagatttgataccagagactagccccgtctgcacgtctgttgatcctccccaaatccatcggggatccaccaggcctaagctccgatcgacagcgcctgagatggatgctgtagaaggtcccggcactggaacatcgatatcgacgctcactgtattgtccaatacgccggtggcctcgtcgagtaccacgcctcagacggagaatgaagacggcgacgaacaagtgcagagcagtatcgttgcagtgtcatcacctatcgtgagtaaacgaaaacgactagagcgtccatcatcatcaatgcctgacccctctccatctgtctcgagaaagaaagcatctggccgatcacgggatagctttggacgaggacgacgccaatcttcaagacacagttccgtatcacttgacgacctcgtggaatcgtcttcggtatcaggaaccagtcgaccctctgatcgaaaggtcgctcgcaaatctacacttcgcgagtttcaacaagcaaaaggtggcatattcagcgaaatggcgtttgcaatatcattacatgcccagcagcctcaaaaaggaaggaataaagcacctatatcggttgctgaactacaaaagatgataaaacaagaagggggacatgttcttcaggacggcttcgaccgattatttacatacgatacctttgccaattcgacttccatagtgtccagctcgctacaactcgtggatgcagacactggattcgttgctctcatcgcggaccagcattcaagaaaggtaaagtacatgcaggcgctggcactcgggatcccttgcttggcaccgcagtgggttaaggcctgcattacaaaaggagagatcgtcagctggtcgccatatctattgtgtgcgggatccagtgcactgttgggagatgctatttgctccagaaatcttcacccatacgacgtcttgacagttaggctggaggatgtggtgaataagaggccgaagttgctggatgggagcaaagtactacttgttatgaagaaatcagcagagcaaagacttccgtatgtctttctaacgcaagtcctgggcgcgtccctgcatcgcgtccacactctcagcgaggccagagccaccttgtgccaagccgaggctgaaagcgaggacttcgactgggtatacgtggagggtcatccgcaagctgcaggaaaagaactattcgggtctggaactgaaggatcgtcgaagaggcgtaagcgtctcagtgccagcacttctgctgacatcgttgatgagcgattgccgaaacgtatcaggattctgaatgacgagctcgttatccaaagcttgataaatggcaggttgattgaggatgcggagatggaggaaatgggatga

SEQ ID NO: 36185 - protein, 1040 aa, Muscodor strobelii
  misc_feature: SGI Peptide ID NO. 572540
  misc_feature (749)..(861): Pfam Id: PF00533 Pfam Desc: BRCA1 C Terminus (BRCT) domain
  misc_feature (179)..(1038): NCBI GI: 171692921 Blast Desc: protein product [Podospora anserina] gi|170946409|emb|CAP73210.1| protein product [Podospora anserina]
  misc_feature (7)..(1037): NCBI GI: 116199085 Blast Desc: CHGG_07698 [Chaetomium globosum CBS 148.51] gi|88178977|gb|EAQ86445.1| CHGG_07698 [Chaetomium globosum CBS 148.51]
  misc_feature (585)..(1037): NCBI GI: 261358050 Blast Desc: conserved [Verticillium albo-atrum VaMs.102]
  misc_feature (638)..(1036): NCBI GI: 46121619 Blast Desc: FG05188.1 [Gibberella zeae PH-1]
  misc_feature (182)..(1038): NCBI GI: 145612091 Blast Desc: MGG_12276 [Magnaporthe grisea 70-15] gi|145019330|gb|EDK03558.1| MGG_12276 [Magnaporthe grisea 70-15]
  misc_feature (638)..(1036): NCBI GI: 256731102 Blast Desc: NECHADRAFT_96362 [Nectria haematococca mpVI 77-13-4]
  misc_feature (753)..(1033): NCBI GI: 156063270 Blast Desc: SS1G_01751 [Sclerotinia sclerotiorum 1980] gi|154697087|gb|EDN96825.1| SS1G_01751 [Sclerotinia sclerotiorum 1980]
  misc_feature (747)..(1033): NCBI GI: 154319389 Blast Desc: BC1G_02646 [Botryotinia fuckeliana B05.10] gi|150857077|gb|EDN32269.1| BC1G_02646 [Botryotinia fuckeliana B05.10]
  misc_feature (585)..(1036): NCBI GI: 38566778 Blast Desc: related to DNA damage checkpoint protein rhp9 [Neurospora crassa]
  misc_feature (585)..(1036): NCBI GI: 164423262 Blast Desc: NCU08879 [Neurospora crassa OR74A] gi|157070015|gb|EAA31374.2| [Neurospora crassa OR74A]
MTRKTAKSLQAAERKALAGENESQDSQLQLLHLMEIHGVGVTSSSPRGSSPPPERQTRSQGKANAPAASLHAFFKSNKQADEAGPFDIVTPKNAVDASAQISKTAVANGPQDIAIAIHSSLQQLGQQHHLRVTHPLTSGKAARRPQKGQCNANSNNEPSYPLAEDDSSAVPAKLKKPAKMSTQSPTQSNEDRSYEQYNDRGSSQALDTQYTNPEEHRTLHEGDTGYVNLNLGNALDSPHYPDTPFARHRDHNEDDGNRDDDDDDDDLDSDNHGPSKVTSQPPSAYTTHYEPETPAVFPRPFFGAGAGVGQVLGGSQLFAQTQPTSGLRKPSPTSSRPSPDIFQNNMTSPSRPASSPLKDRGVDMTPFGAFASTSPVSNQRSSGAANQVPPFSDLVEGSDGDEDNENDVDLTPHVQARSLRHRSSLEPINEYRPYQKVGSSMDPPRSRDPYRLSSDTEQDDAETRYHRAKLKKARASKSFPDISVPTTSSAKSNIEVPSTNRAKRIYTRTVSDEYIEQCHGKYATDNDSTQETVADSQDAAASKQLPIDDISTPTPIPNTGQEPSRIEKEASSDETPANTDDKDLIPETSPVCTSVDPPQIHRGSTRPKLRSTAPEMDAVEGPGTGTSISTLTVLSNTPVASSSTTPQTENEDGDEQVQSSIVAVSSPIVSKRKRLERPSSSMPDPSPSVSRKKASGRSRDSFGRGRRQSSRHSSVSLDDLVESSSVSGTSRPSDRKVARKSTLREFQQAKGGIFSEMAFAISLHAQQPQKGRNKAPISVAELQKMIKQEGGHVLQDGFDRLFTYDTFANSTSIVSSSLQLVDADTGFVALIADQHSRKVKYMQALALGIPCLAPQWVKACITKGEIVSWSPYLLCAGSSALLGDAICSRNLHPYDVLTVRLEDVVNKRPKLLDGSKVLLVMKKSAEQRLPYVFLTQVLGASLHRVHTLSEARATLCQAEAESEDFDWVYVEGHPQAAGKELFGSGTEGSSKRRKRLSASTSADIVDERLPKRIRILNDELVIQSLINGRLIEDAEMEEMG

SEQ ID NO: 36186 - DNA, 312 bp, Muscodor strobelii
  misc_feature: SGI EST ID NO. CUFF.86114.0
  misc_feature: Variant of the nucleotide sequence at SEQ ID NO 36184
gccaacacttcagggtctcgtaccaaacaattgggaggagcaagggcccttatgtacaattcacactcagagccatgaaccagggttgctgatcgctttatctcttgatcctagaccagtagctcgcctcgtggctcatcacctcccccggaacgccagacgagatcccagggcaaagccaacgcccctgctgcgtccttgcatgcatttttcaagtcgaataagcaagcagacgaggcaggtccatttgacattgtggtaagtcgacaaaatacctgagttgacattgcggcgttattaggcgtatctccg

SEQ ID NO: 36187 - DNA, 1185 bp, Muscodor strobelii
  misc_feature: SGI cDNA ID NO. 572541
  misc_feature: Encodes the peptide sequence at SEQ ID NO 36188
atgaccggcattaccgagttcactaccgcaggtggctggggcattgacacgagcaaagaaaacgactggaagatcattatggtcatctggattttcttttcgctcaccctgagccttgtggccctccgtgtctgctatgtggggatgcgaacccatcgttctctccgtgccgacgattggcttcttattgcagccgtggcttgtctaactgccaatggttttactattcgcgagtgggttcaatatacttacgagcctagcatcaccattcctcctccttcgaacgttgtcttggtcggaagtcttctcggaacattcaatgctttcgctcttggcttgagcaagacttcaatcgcagtcaccttcggcaggctcacggatggatggtacaagtctagcctcggtcttgccaccggaatcattgatattctgttgttcatccaaatctatacgttttggcttcaggattgcaacggtgtgcccgaacctcttcgcattagcaacgagaatggtgtttgcatcccatttgatgcagtccaaaacctgcgcagtgttgttcaattgttgtcatgtatcatcgacgcttacttcacgttcttgccctggaaaattgtccgtcccctccgtctgaagaagtttgagaagatcggccttgctatcgggatgagcttcggtatcttgtctcttggtactggtcttgcaagaatgatgtcgttgtgtatgcttaagaaggacgggtctcatttgcctctctatgtcacgggcggttatgtattcaactacctcgagcccgctttcaccatcgtcgccgcctgtgtgcctattctccgcaagcttgtcgtcgacttcctccagtggaagagcgagactacatcttttgattggatcgccaagacattccgtcgcaagagcaagggcaatcagaaacccgggcctgttctgcctctgactgagattcctcaatctccggctgccccggagaaggtggctcagactagcatcaaggggggatctgtctgtagctccaagtcggcccaagctagtgacgcctcttcgatgacgcttcccccgatgactcctaccaactctcgcgaatccaaggaatctgaggattccaacaagagcgctattgctcgcctttaccaagtcggaaagtcctttatgtcattgccccgtgctggctag

SEQ ID NO: 36188 - protein, 394 aa, Muscodor strobelii
  misc_feature: SGI Peptide ID NO. 572541
  misc_feature (25)..(282): NCBI GI: 261354698 Blast Desc: conserved [Verticillium albo-atrum VaMs.102]
  misc_feature (24)..(280): NCBI GI: 149209481 Blast Desc: MGCH7_ch7g224 [Magnaporthe grisea 70-15] gi|86196179|gb|EAQ70817.1| MGCH7_ch7g224 [Magnaporthe grisea 70-15]
  misc_feature (24)..(280): NCBI GI: 145601649 Blast Desc: MGG_09061 [Magnaporthe grisea 70-15] gi|145010157|gb|EDJ94813.1| MGG_09061 [Magnaporthe grisea 70-15]
  misc_feature (24)..(282): NCBI GI: 171694538 Blast Desc: protein product [Podospora anserina] gi|170947511|emb|CAP59672.1| protein product [Podospora anserina]
  misc_feature (38)..(279): NCBI GI: 261359233 Blast Desc: conserved [Verticillium albo-atrum VaMs.102]
  misc_feature (29)..(232): NCBI GI: 261358750 Blast Desc: conserved [Verticillium albo-atrum VaMs.102]
  misc_feature (28)..(312): NCBI GI: 116204215 Blast Desc: CHGG_09991 [Chaetomium globosum CBS 148.51] gi|88176119|gb|EAQ83587.1| CHGG_09991 [Chaetomium globosum CBS 148.51]
  misc_feature (12)..(280): NCBI GI: 171680068 Blast Desc: protein product [Podospora anserina] gi|170939660|emb|CAP64887.1| protein product [Podospora anserina]
  misc_feature (29)..(280): NCBI GI: 261352438 Blast Desc: conserved [Verticillium albo-atrum VaMs.102]
  misc_feature (25)..(337): NCBI GI: 169624236 Blast Desc: SNOG_15374 [Phaeosphaeria nodorum SN15] gi|111056187|gb|EAT77307.1| SNOG_15374 [Phaeosphaeria nodorum SN15]
MTGITEFTTAGGWGIDTSKENDWKIIMVIWIFFSLTLSLVALRVCYVGMRTHRSLRADDWLLIAAVACLTANGFTIREWVQYTYEPSITIPPPSNVVLVGSLLGTFNAFALGLSKTSIAVTFGRLTDGWYKSSLGLATGIIDILLFIQIYTFWLQDCNGVPEPLRISNENGVCIPFDAVQNLRSVVQLLSCIIDAYFTFLPWKIVRPLRLKKFEKIGLAIGMSFGILSLGTGLARMMSLCMLKKDGSHLPLYVTGGYVFNYLEPAFTIVAACVPILRKLVVDFLQWKSETTSFDWIAKTFRRKSKGNQKPGPVLPLTEIPQSPAAPEKVAQTSIKGGSVCSSKSAQASDASSMTLPPMTPTNSRESKESEDSNKSAIARLYQVGKSFMSLPRAG

SEQ ID NO: 36189 - DNA, 351 bp, Muscodor strobelii
  misc_feature: SGI cDNA ID NO. 572542
  misc_feature: Encodes the peptide sequence at SEQ ID NO 36190
atggattcgcccgtaaggccgaggggaaacccattcgagtttgacgacgacatcaagattctgtggaacgactggccgtacgggaccgataagaggatagtacatctagttgtctgggctgagtttggcttggaggaaaaccctgtcattgacgatctcactgacgaggcgagagcagaagtcgatgcctatgttcagaagaccgagagatgggtcatctggtttaaaaactggcgttctctgaaatctatccaggcggtagagcactttcacgtgatgatatttgaaccaaactctgccttcaccgacgagattaccaagggcgatattcctctcgtccggaaggtgtaa

SEQ ID NO: 36190 - protein, 116 aa, Muscodor strobelii
  misc_feature: SGI Peptide ID NO. 572542
  misc_feature (5)..(115): NCBI GI: 70989321 Blast Desc: conserved [Aspergillus fumigatus Af293] gi|66847141|gb|EAL87472.1| conserved [Aspergillus fumigatus Af293] gi|159128921|gb|EDP54035.1| conserved [Aspergillus A1163]
  misc_feature (5)..(115): NCBI GI: 119479967 Blast Desc: NFIA_080590 [Neosartorya fischeri NRRL 181] gi|119408166|gb|EAW18115.1| conserved [Neosartorya fischeri NRRL 181]
  misc_feature (5)..(116): NCBI GI: 238484827 Blast Desc: conserved [Aspergillus flavus NRRL3357] gi|220701702|gb|EED58040.1| conserved [Aspergillus flavus NRRL3357]
  misc_feature (5)..(116): NCBI GI: 255943143 Blast Desc: Pc18g05130 [Penicillium chrysogenum Wisconsin 54-1255] gi|211587073|emb|CAP94737.1| Pc18g05130 [Penicillium chrysogenum Wisconsin 54-1255]
  misc_feature (5)..(115): NCBI GI: 145238526 Blast Desc: An07g08350 [Aspergillus niger] gi|134076399|emb|CAK48217.1| protein product [Aspergillus niger]
  misc_feature (5)..(116): NCBI GI: 121710382 Blast Desc: conserved [Aspergillus clavatus NRRL 1] gi|119400957|gb|EAW11381.1| conserved [Aspergillus clavatus NRRL 1]
  misc_feature (3)..(112): NCBI GI: 261357327 Blast Desc: conserved [Verticillium albo-atrum VaMs.102]
  misc_feature (5)..(116): NCBI GI: 115442652 Blast Desc: conserved [Aspergillus terreus NIH2624] gi|114188002|gb|EAU29702.1| conserved [Aspergillus terreus NIH2624]
  misc_feature (4)..(111): NCBI GI: 46107284 Blast Desc: FG00525.1 [Gibberella zeae PH-1]
  misc_feature (5)..(113): NCBI GI: 261196946 Blast Desc: conserved [Ajellomyces dermatitidis SLH14081] gi|239596121|gb|EEQ78702.1| conserved [Ajellomyces dermatitidis SLH14081]
MDSPVRPRGNPFEFDDDIKILWNDWPYGTDKRIVHLVVWAEFGLEENPVIDDLTDEARAEVDAYVQKTERWVIWFKNWRSLKSIQAVEHFHVMIFEPNSAFTDEITKGDIPLVRKV

SEQ ID NO: 36191 - DNA, 873 bp, Muscodor strobelii
  misc_feature: SGI cDNA ID NO. 572543
  misc_feature: Encodes the peptide sequence at SEQ ID NO 36192
atgttgttccccagcgttaaccaggtcctcaccttcgcggcatgtgtgacgtcggccgtcaacgctgcttcgttgacgcaagtaactaactttggcaccaacccgacgaacctaaagatgtacatctatgtccccgacaagatcgcagagaagccacccgtcatcatcgtgccccacccctgcggcggcagcgcccaagacaccttctcccggatcaccaccaaactgccgggctttgccgacaagcaaggcttcatcctgatctacccccaaacgccaaactcgtgctgggacaacacgagcgtgaaatcgctcacgcacgagggcgggggtgatactcaggggctggccaacatggtgaaatacgcgctaaacaaatatagtggcgacgcgacaaaagtcttcacgacggggtcttcatccggcggcatgatcaccaacgtgctgctagctgcgtacccggacctgtttgccggcggggcgtcgttttccggatcgccggccgggtgctgggatgggaatggtaacggcgccaattgtccgccggcgggaggtagtttcacggcacagcagtggggtgcggttgcgttgaaggggtatccgggtttcaatggcacgaggccgaagatgcaggtgtggcatggaacgatagataatgtcgtcgtgtatcggaatctgaatgatcagctgttgcagtggagtaatgtgcttggtgtggagttcagcaagaatgtgacgaatacgccggagagcggatacacgcagatggtgtatggggatggaacgaagcttgtgggatatagtgcccaaggtgtgggacatatagtcccatttcacgatgaggaagtgttgaagttctttggcctcatgtaa

SEQ ID NO: 36192 - protein, 290 aa, Muscodor strobelii
  misc_feature: SGI Peptide ID NO. 572543
  misc_feature (23)..(290): NCBI GI: 85110055 Blast Desc: feruloyl esterase B precursor [Neurospora crassa OR74A] gi|67476933|sp|Q9HGR3.2|FAEB_NEUCR RecName: Full=Feruloyl esterase B; AltName: Full=Ferulic acid esterase B; Short=FAEB; B
  misc_feature (23)..(290): NCBI GI: 9955721 Blast Desc: ferulic acid esterase, type B [Neurospora crassa]
  misc_feature (20)..(289): NCBI GI: 25090320 Blast Desc: FAEB_PENFN RecName: Full=Feruloyl esterase B; AltName: Full=Ferulic acid esterase B; Short=FAEB; AltName: Full=Cinnamoyl esterase; Flags: Precursor gi|10945109|emb|CAC14144.1| cinnamoyl
  misc_feature (20)..(289): NCBI GI: 242791306 Blast Desc: feruloyl esterase B precursor, [Talaromyces stipitatus ATCC 10500] gi|218718319|gb|EED17739.1| feruloyl esterase B precursor, [Talaromyces stipitatus ATCC 10500]
  misc_feature (8)..(290): NCBI GI: 116197519 Blast Desc: CHGG_06915 [Chaetomium globosum CBS 148.51] gi|88178194|gb|EAQ85662.1| CHGG_06915 [Chaetomium globosum CBS 148.51]
  misc_feature (25)..(290): NCBI GI: 39971957 Blast Desc: MGG_07294 [Magnaporthe grisea 70-15] gi|145019799|gb|EDK04027.1| MGG_07294 [Magnaporthe grisea 70-15]
  misc_feature (20)..(289): NCBI GI: 212541749 Blast Desc: acetyl xylan esterase, [Penicillium marneffei ATCC 18224] gi|210065936|gb|EEA20029.1| acetyl xylan esterase, [Penicillium marneffei ATCC 18224]
  misc_feature (1)..(290): NCBI GI: 171689672 Blast Desc: protein product [Podospora anserina] gi|170944798|emb|CAP70910.1| protein product [Podospora anserina]
  misc_feature (2)..(289): NCBI GI: 171676782 Blast Desc: protein product [Podospora anserina] gi|170936458|emb|CAP61115.1| protein product [Podospora anserina]
  misc_feature (24)..(290): NCBI GI: 116205203 Blast Desc: CHGG_10485 [Chaetomium globosum CBS 148.51] gi|88176613|gb|EAQ84081.1| CHGG_10485 [Chaetomium globosum CBS 148.51]
  misc_feature (23)..(290): SWISSPROT Homolog: EC 3.1.1.73 Feruloyl esterase
MLFPSVNQVLTFAACVTSAVNAASLTQVTNFGTNPTNLKMYIYVPDKIAEKPPVIIVPHPCGGSAQDTFSRITTKLPGFADKQGFILIYPQTPNSCWDNTSVKSLTHEGGGDTQGLANMVKYALNKYSGDATKVFTTGSSSGGMITNVLLAAYPDLFAGGASFSGSPAGCWDGNGNGANCPPAGGSFTAQQWGAVALKGYPGFNGTRPKMQVWHGTIDNVVVYRNLNDQLLQWSNVLGVEFSKNVTNTPESGYTQMVYGDGTKLVGYSAQGVGHIVPFHDEEVLKFFGLM

SEQ ID NO: 36193 - DNA, 1384 bp, Muscodor strobelii
  misc_feature: SGI EST ID NO. CUFF.86132.0
  misc_feature: Variant of the nucleotide sequence at SEQ ID NO 36191
ccgacatagcaccatgagcaaggcggattctagactagggtttggttgcttatatgaagacatggcagctctctgagtgagttcgttgggcctgctcatagtctgtagtacggaacatccttttccctaggagacaacgccaaaatgttgttccccagcgttaaccaggtcctcaccttcgcggcatgtgtgacgtcggccgtcaacgctgcttcgttgacgcaagtaactaactttggcaccaacccgacgaacctaaagatgtacatctatgtccccgacaagatcgcagagaagccacccgtcatcatcgtgccccacccctgcggcggcagcgcccaagacaccttctcccggatcaccaccaaactgccgggctttgccgacaagcaaggcttcatcctgatctacccccaaacgccaaactcgtgctgggacaacacgagcgtgaaatcgctcacgcacgagggcgggggtgatactcaggggctggccaacatggtgaaatacgcgctaaacaaatatagtggcgacgcgacaaaagtcttcacgacggggtcttcatccggcggcatgatcaccaacgtgctgctagctgcgtacccggacctgtttgccggcggggcgtcgttttccggatcgccggccgggtgctgggatgggaatggtaacggcgccaattgtccgccggcgggaggtagtttcacggcacagcagtggggtgcggttgcgttgaaggggtatccgggtttcaatggcacgaggccgaagatgcaggtgtggcatggaacgatagataatgtcgtcgtgtatcggaatctgaatgatcagctgttgcagtggagtaatgtgcttggtgtggagttcagcaagaatgtgacgaatacgccggagagcggatacacgcagatggtgtatggggatggaacgaagcttgtgggatatagtgcccaaggtgtgggacatatagtcccatttcacgatgaggaagtgttgaagttctttggcctcatgtaaatatgtatggtagaggagcatacgaaaggtcagggatgaaaacttctcgcattgcaatcttgagattgaagatgctgaatatatcggacctgaatctctatcgctccatgttcaaagggtctgcgaaggagatgataacttacaccttccggacgagaggaatatcgcccttggtaatctcgtcggtgaaggcagagtttggttcaaatatcatcacgtgaaagtgctctaccgcctggatagatttcagagaacgccagtttttaaaccagatgacccatctctcgctgggttgttattgggggtctgataatgtgtctataacttatacgatcttttgatagtctcgttctaaacgtcttctgaa

SEQ ID NO: 36194 - DNA, 588 bp, Muscodor strobelii
  misc_feature: SGI cDNA ID NO. 572544
  misc_feature: Encodes the peptide sequence at SEQ ID NO 36195
atgcctttgggaaagctgaagagacttgccgcttacataatctgcgctaatagatcatctcaccgttcaaaggaacagaacaagggtgaagacgtggcgcgacctcaagagtctcttccgcttgggtatattcatgtcgattttcaatcccagggcatccaagctacttgccccgatgacgatgcttgggtgaagccaaagctcacgatcatggttaggggggagtcttcagttctcgacagggtcagatggtgccccccggatgaagattgtaaatcggctgacatgcagccattctttcgtcacgagacccctactgaagatattgctgcgcgggaacaggagcttctccgttggaaaaatgcaattgttcgaggcgcagaacgggacctccgaaagaagcatcccgatctgtttggacttgttggcatcaagattcttcacgagtatattgtctggaagccactgttgccatgccagggcgagcataccgaggatgtgacgttgatgcatctggccctcggtgtcaagttcggcttaattgaccacgtcgttgtagagtactctacgaagccgtggctatcttga

SEQ ID NO: 36195 - protein, 195 aa, Muscodor strobelii
  misc_feature: SGI Peptide ID NO. 572544
MPLGKLKRLAAYIICANRSSHRSKEQNKGEDVARPQESLPLGYIHVDFQSQGIQATCPDDDAWVKPKLTIMVRGESSVLDRVRWCPPDEDCKSADMQPFFRHETPTEDIAAREQELLRWKNAIVRGAERDLRKKHPDLFGLVGIKILHEYIVWKPLLPCQGEHTEDVTLMHLALGVKFGLIDHVVVEYSTKPWLS

SEQ ID NO: 36196 - DNA, 1446 bp, Muscodor strobelii
  misc_feature: SGI cDNA ID NO. 572545
  misc_feature: Encodes the peptide sequence at SEQ ID NO 36197
atggccgcacaaccagaggcacctgcgaacgaggtaccgcctgctgcgaacccagctgtggctgaaccgacaacgagcaagcaatctgtcgacccttggaatgtatcaggcgaagttggtgaagatggaaaagttaaggccatcgactatcacaaacttgttgatgagtttggcaccaaactcattgatcagaagctgctggacagattcgagaaaatcactggtcacaagcctcatcgcttcatgagacgccaaatcgtcttcagccacagagatctcgagatcatccttgatcgttacgagaagaaagagccgtttttcttgtatactggtcgaggacccagtagtgactctatgcatatcggccacacacagatctttgatttctgcaagtggttacaagatgtgcttgacgtgccgcttgtcatcatgcttacagacgatgaaaaattcctgttttctgagaagcgcactgttgaagaagttatagggtactcttacgacaatgcaaaggacatcatctctattgggtttgatcctgagaagactttcatcttctctgattatgagtttatgggtggtgctttttacagaaatgtcacccgtttctctaagctagttacttataatgttgccaaggccatcttcggattcaacgaaagttcaaacatcggcaagatccacttcgccagtatacaaggcagtactgcttttgcctcctcattccctcacatcttcggcacaaacgagaagcagaccaacaaaatcccctgtctcatcccctgtgccattgaccaagatccatacttccgactcactcgcgactgtgccacgagattaagatacgctaagccgtctttgattcattcacgtttcttagatgcattgcagggccctggctctaagatgtctgcaagtattgagacatctgctatcttcatgaaggataccgcaaaccagatcaagaataagatcaacaaatacgcattttcaggtggtcaggagacctttgaggagcatcgtgagaagggtggcaacccagatgtagacgtcgcctatcagtatctacagtttttcatggaagatgatgaggaactcgcccgacttggcactgagtacaaagccggcagacttttgactggagaactcaaagcaatttgcatcaaacatctccaggaatatgtcggtgcattccaagagcggagatctaaagtcgacggcgaagtagtcaagacatttatgtcagttcggcctctgagattccggggtaaccctactgctgagaggattgtgccggtttcgggagatggcgctgcccaggctgatggcgccgagggcgatggacagccttctcagagacagctcaagaagcaggagaaggcaaagagattagcggaggaaaaggccgctaaacaagctgccaaggaagctgctaaaacttcatag

SEQ ID NO: 36197 - protein, 481 aa, Muscodor strobelii
  misc_feature: SGI Peptide ID NO. 572545
  misc_feature (101)..(396): Pfam Id: PF00579 Pfam Desc: tRNA synthetases class I (W and Y)
  misc_feature (265)..(384): Pfam Id: PF00579 Pfam Desc: tRNA synthetases class I (W and Y)
  misc_feature (1)..(464): NCBI GI: 85100099 Blast Desc: tryptophanyl-tRNA synthetase [Neurospora crassa OR74A] gi|28922433|gb|EAA31666.1| tryptophanyl-tRNA synthetase [Neurospora crassa OR74A] gi|28950279|emb|CAD71247.1| ligase
  misc_feature (13)..(460): NCBI GI: 154310453 Blast Desc: BC1G_07147 [Botryotinia fuckeliana B05.10] gi|150851478|gb|EDN26671.1| BC1G_07147 [Botryotinia fuckeliana B05.10]
  misc_feature (13)..(460): NCBI GI: 156056190 Blast Desc: SS1G_05447 [Sclerotinia sclerotiorum 1980] gi|154703231|gb|EDO02970.1| SS1G_05447 [Sclerotinia sclerotiorum 1980]
  misc_feature (1)..(464): NCBI GI: 171693919 Blast Desc: protein product [Podospora anserina] gi|170946908|emb|CAP73712.1| protein product [Podospora anserina]
  misc_feature (1)..(464): NCBI GI: 261359865 Blast Desc: tryptophanyl-tRNA synthetase [Verticillium albo-atrum VaMs.102]
  misc_feature (15)..(464): NCBI GI: 39961545 Blast Desc: MGG_09540 [Magnaporthe grisea 70-15] gi|145011043|gb|EDJ95699.1| MGG_09540 [Magnaporthe grisea 70-15]
  misc_feature (9)..(426): NCBI GI: 255944635 Blast Desc: Pc20g05510 [Penicillium chrysogenum Wisconsin 54-1255] gi|211587820|emb|CAP85880.1| Pc20g05510 [Penicillium chrysogenum Wisconsin 54-1255]
  misc_feature (6)..(419): NCBI GI: 156033113 Blast Desc: SS1G_13632 [Sclerotinia sclerotiorum 1980] gi|154699035|gb|EDN98773.1| SS1G_13632 [Sclerotinia sclerotiorum 1980]
  misc_feature (1)..(425): NCBI GI: 238495494 Blast Desc: tryptophanyl-tRNA synthetase [Aspergillus flavus NRRL3357] gi|220695633|gb|EED51976.1| tryptophanyl-tRNA synthetase [Aspergillus flavus NRRL3357]
  misc_feature (21)..(415): NCBI GI: 170094786 Blast Desc: [Laccaria bicolor S238N-H82] gi|164647068|gb|EDR11313.1| [Laccaria bicolor S238N-H82]
  misc_feature (24)..(414): SWISSPROT Homolog: EC 6.1.1.2 Tryptophan--tRNA ligase
MAAQPEAPANEVPPAANPAVAEPTTSKQSVDPWNVSGEVGEDGKVKAIDYHKLVDEFGTKLIDQKLLDRFEKITGHKPHRFMRRQIVFSHRDLEIILDRYEKKEPFFLYTGRGPSSDSMHIGHTQIFDFCKWLQDVLDVPLVIMLTDDEKFLFSEKRTVEEVIGYSYDNAKDIISIGFDPEKTFIFSDYEFMGGAFYRNVTRFSKLVTYNVAKAIFGFNESSNIGKIHFASIQGSTAFASSFPHIFGTNEKQTNKIPCLIPCAIDQDPYFRLTRDCATRLRYAKPSLIHSRFLDALQGPGSKMSASIETSAIFMKDTANQIKNKINKYAFSGGQETFEEHREKGGNPDVDVAYQYLQFFMEDDEELARLGTEYKAGRLLTGELKAICIKHLQEYVGAFQERRSKVDGEVVKTFMSVRPLRFRGNPTAERIVPVSGDGAAQADGAEGDGQPSQRQLKKQEKAKRLAEEKAAKQAAKEAAKTS

SEQ ID NO: 36198 - DNA, 1966 bp, Muscodor strobelii
  misc_feature: SGI EST ID NO. CUFF.86162.1
  misc_feature: Variant of the nucleotide sequence at SEQ ID NO 36196
tggccatctggcattgtggtgttgatacatatacccgggcctgctcttcgggagtggaagttctattggtaattgcgcatcattttcagactttttcagagtcatatacacttgtcaccactcaacagtcatggccgcacaaccagaggcacctgcgaacgaggtaccgcctgctgcgaacccagctgtggctgaaccgacaacgagcaagcaatctgtcgacccttggaatgtatcaggcgaagttggtgaagatggaaaagttaaggccatcgactatcacaaacttgttgatgagtttggcaccaaactcattgatcagaagctgctggacagattcgagaaaatcactggtcacaagcctcatcgcttcatgagacgccaaatcgtcttcagccacagagatctcgagatcatccttgatcgttacgagaagaaagagccgtttttcttgtatactggtcgaggacccagtagtgactctatgcatatcggccacacacagatctttgatttctgcaagtggttacaagatgtgcttgacgtgccgcttgtcatcatgcttacagacgatgaaaaattcctgttttctgagaagcgcactgttgaagaagttatagggtactcttacgacaatgcaaaggacatcatctctattgggtttgatcctgagaagactttcatcttctctgattatgagtttatgggtggtgctttttacagaaatgtcacccgtttctctaagctagttacttataatgttgccaaggccatcttcggattcaacgaaaggtgggtaaccgactttcagtcgtgagtgaagctcttttccccagcaactaactcaaaccagttcaaacatcggcaagatccacttcgccagtatacaaggcagtactgcttttgcctcctcattccctcacatcttcggcacaaacgagaagcagaccaacaaaatcccctgtctcatcccctgtgccattgaccaagatccatacttccgactcactcgcgactgtgccacgagattaagatacgctaagccgtctttgattcattcacgtttcttagatgcattgcagggccctggctctaagatgtctgcaagtattgagacatctgctatcttcatgaaggataccgcaaaccagatcaagaataagatcaacaaatacgcattttcaggtggtcaggagacctttgaggagcatcgtgagaagggtggcaacccagatgtagacgtcgcctatcagtatctacagtttttcatggaagatgatgaggaactcgcccgacttggcactgagtacaaagccggcagacttttgactggagaactcaaagcaatttgcatcaaacatctccaggaatatgtcggtgcattccaagagcggagatctaaagtcgacggcgaagtagtcaagacatttatgtcagttcggcctctgagattccggggtaaccctactgctgagaggattgtgccggtttcgggagatggcgctgcccaggctgatggcgccgagggcgatggacagccttctcagagacagctcaagaagcaggagaaggcaaagagattagcggaggaaaaggccgctaaacaagctgccaaggaagctgctaaaacttcatagatatcacatgggtatagagaagaaaagtaagagaagaagatgatgttagtcttttccaactcattgcgataccaagaacgtggccatcaatgaatggtgaacgctcccctttgtcctaattgcgtttcagattaagtgttgctggaagagcttagttgggagcttcgtatgggaccgcctccctgctcaactgagcagacagatgatagctcgtaatgatgtatcgttcagagcttgaagattatgccacgtccttcattcctcccctgagatagaggaaattagagtcatacttttgatcacttgatcggcacactactcaactagag

SEQ ID NO: 36199 - DNA, 348 bp, Muscodor strobelii
  misc_feature: SGI cDNA ID NO. 572546
  misc_feature: Reduced expression when VOC is produced
  misc_feature: Encodes the peptide sequence at SEQ ID NO 36200
atgacgtccacgattggcatcccgatcaagctcctcaacgaggcccagggccatatcgtcaccctcgagatcacctctggccagacgtaccgaggaaagctgcttgaagccgaggacaacatgaacatccagctcaaggacatcacagtcaccgcccgcgacggtcgcgtcagccacttggatcaggtctatatccgcggcagccacgtccgcttcttcatcgtacctgacatgttgaagaacgcgcccatgttccgaagtcgcaacgctagaggtcgtggtgtcggtctcgccagaggacgtgcaaccgtcagcagagcgcgagccagcggacgcggcggaagatga

SEQ ID NO: 36200 - protein, 115 aa, Muscodor strobelii
  misc_feature: SGI Peptide ID NO. 572546
  misc_feature (10)..(75): Pfam Id: PF01423 Pfam Desc: LSM domain
  misc_feature (1)..(113): NCBI GI: 256731093 Blast Desc: NECHADRAFT_84991 [Nectria haematococca mpVI 77-13-4]
  misc_feature (1)..(115): NCBI GI: 171693559 Blast Desc: protein product [Podospora anserina] gi|170946728|emb|CAP73532.1| protein product [Podospora anserina]
  misc_feature (1)..(113): NCBI GI: 154299390 Blast Desc: BC1G_10957 [Botryotinia fuckeliana B05.10] gi|150857299|gb|EDN32491.1| BC1G_10957 [Botryotinia fuckeliana B05.10]
  misc_feature (1)..(105): NCBI GI: 46123175 Blast Desc: FG05965.1 [Gibberella zeae PH-1]
  misc_feature (1)..(114): NCBI GI: 169614183 Blast Desc: SNOG_10228 [Phaeosphaeria nodorum SN15] gi|160707292|gb|EAT82563.2| SNOG_10228 [Phaeosphaeria nodorum SN15]
  misc_feature (1)..(114): NCBI GI: 189199034 Blast Desc: small nuclear ribonucleoprotein Sm D3 [Pyrenophora tritici-repentis Pt-1C-BFP] gi|187982953|gb|EDU48441.1| small nuclear ribonucleoprotein Sm D3 [Pyrenophora tritici-repentis
  misc_feature (1)..(113): NCBI GI: 225682914 Blast Desc: conserved [Paracoccidioides brasiliensis Pb03] gi|226282930|gb|EEH38496.1| conserved [Paracoccidioides brasiliensis Pb01] gi|226290365|gb|EEH45849.1| small nuclear Sm
  misc_feature (1)..(105): NCBI GI: 261358070 Blast Desc: small nuclear ribonucleoprotein Sm D3 [Verticillium albo-atrum VaMs.102]
  misc_feature (1)..(113): NCBI GI: 119174174 Blast Desc: conserved [Coccidioides immitis RS] gi|258569991|ref|XP_002543799.1| small nuclear ribonucleoprotein SM D3 [Uncinocarpus reesii 1704] gi|237904069|gb|EEP78470.1| SM
  misc_feature (1)..(105): NCBI GI: 116206378 Blast Desc: conserved [Chaetomium globosum CBS 148.51] gi|88183079|gb|EAQ90547.1| conserved [Chaetomium globosum CBS 148.51]
  misc_feature: Useful for introducing or modulating the production of volatile compounds
MTSTIGIPIKLLNEAQGHIVTLEITSGQTYRGKLLEAEDNMNIQLKDITVTARDGRVSHLDQVYIRGSHVRFFIVPDMLKNAPMFRSRNARGRGVGLARGRATVSRARASGRGGR

SEQ ID NO: 36201 - DNA, 994 bp, Muscodor strobelii
  misc_feature: SGI EST ID NO. CUFF.86158.0
  misc_feature: Variant of the nucleotide sequence at SEQ ID NO 36199
cgagcattaggcaattccaccaacactgctataatactccaacatctcactctctcgacgcgcactcttcctacgacttcgccaacatcattacctgcagacaataatacttcgcagccatgacgtccacgattggcatcccgatcaagctcctcaacgaggcccagggccatatcgtcaccctcgagatcacctctggccagacgtaccgaggaaagctgcttgaagccgaggacaacatgaacatccagctcaaggacatcacagtcaccgcccgcgacggtcgcgtcagccacttggatcaggtctatatccgcggcagccacgtccgcttcttcatcgtacctgacatgttgaagaacgcgcccatgttccgaagtcgcaacgctagaggtcgtggtgtcggtctcgccagaggacgtgcaaccgtcagcagagcgcgagccagcggacgcggcggaagatgaggtggcaacgataattcatatggcaaataatacaaatcatcgacccagcgggagttttcagaggaggaagagaccaggcgagaacggcttgtccgatataccattggcgtttggggtgaactggcgaaaaagacctttgtgctgaatggcggcacggaaaataccaacttgcgacccatcagagggtttctgcgaagccaaactcagaagaaatggacgagacggtcaagaccaaggatgcgatccctatgtttgggcccgtccaaggcgaaataagatgacgtttcccatcccattcgaggatttgatacaggcctaatatatcgtagtctggtgattaatggctcgatcacctgagtagaccctttcggggctggaaagcaaaaccgtggactgtctgtggttctgcacctgttgcacaactactttcaaaccgccctcagcgctttgcagctctagcgggctcagataggcccgtagtcatcaatacaagacgaataaaatctactcaatacacttatacgtgc

SEQ ID NO: 36202 - DNA, 363 bp, Muscodor strobelii
  misc_feature: SGI cDNA ID NO. 572547
  misc_feature: Reduced expression when VOC is produced
  misc_feature: Encodes the peptide sequence at SEQ ID NO 36203
atgttcggattcgacgacggccgcgaagctcgtgacgaggtctatgacggccaaccacacgaatccaagctctcccacgagttcatcggcggagccgctggcttcgaggctatgcacttattcgagaagcgacaagaggctgaaggcaagacagtatcccacggcttcgcaaaggagcttctagccggcatcgcggccgctgaggtcgataagctagtcgagaccaagggtctggatgccattgatcgcgagaaggccaagcatcatgctaaaaggcaggccgaggagttgtatgatcaacattatggtggttacgatgagtatagacctgatgtgagccgacatgagcagttgaactactag

SEQ ID NO: 36203 - protein, 120 aa, Muscodor strobelii
  misc_feature: SGI Peptide ID NO. 572547
  misc_feature (1)..(120): NCBI GI: 39940734 Blast Desc: MGG_04873 [Magnaporthe grisea 70-15] gi|145010900|gb|EDJ95556.1| MGG_04873 [Magnaporthe grisea 70-15]
  misc_feature (1)..(118): NCBI GI: 242793001 Blast Desc: CipC-like antibiotic response protein, [Talaromyces stipitatus ATCC 10500] gi|218718661|gb|EED18081.1| CipC-like antibiotic response protein, [Talaromyces stipitatus ATCC 10500]
  misc_feature (1)..(114): NCBI GI: 212535422 Blast Desc: CipC-like antibiotic response protein, [Penicillium marneffei ATCC 18224] gi|210070266|gb|EEA24356.1| CipC-like antibiotic response protein, [Penicillium marneffei ATCC 18224]
  misc_feature (1)..(111): NCBI GI: 126139755 Blast Desc: PICST_37097 [Pichia stipitis CBS 6054] gi|126093682|gb|ABN68371.1| [Pichia stipitis CBS 6054]
  misc_feature (5)..(110): NCBI GI: 261359125 Blast Desc: CipC protein [Verticillium albo-atrum VaMs.102]
  misc_feature (2)..(119): NCBI GI: 85101473 Blast Desc: NCU04197 [Neurospora crassa OR74A] gi|21622345|emb|CAD37045.1| [Neurospora crassa] gi|28922697|gb|EAA31921.1| conserved [Neurospora crassa OR74A]
  misc_feature (2)..(118): NCBI GI: 169763484 Blast Desc: [Aspergillus oryzae RIB40] gi|83770670|dbj|BAE60803.1| protein product [Aspergillus oryzae]
  misc_feature (1)..(111): NCBI GI: 199430001 Blast Desc: DEHA2B15840p [Debaryomyces hansenii]
  misc_feature (1)..(112): NCBI GI: 260945915 Blast Desc: CLUG_02699 [Clavispora lusitaniae ATCC 42720] gi|238849109|gb|EEQ38573.1| CLUG_02699 [Clavispora lusitaniae ATCC 42720]
  misc_feature (1)..(104): NCBI GI: 71018401 Blast Desc: UM03284.1 [Ustilago maydis 521] gi|46099038|gb|EAK84271.1| UM03284.1 [Ustilago maydis 521]
  misc_feature: Useful for introducing or modulating the production of volatile compounds
MFGFDDGREARDEVYDGQPHESKLSHEFIGGAAGFEAMHLFEKRQEAEGKTVSHGFAKELLAGIAAAEVDKLVETKGLDAIDREKAKHHAKRQAEELYDQHYGGYDEYRPDVSRHEQLNY

SEQ ID NO: 36204 - DNA, 811 bp, Muscodor strobelii
  misc_feature: SGI EST ID NO. CUFF.86223.1
  misc_feature: Variant of the nucleotide sequence at SEQ ID NO 36202
tcgagctggtgtttcgtcatgctgttggttccctctcgggcaacggcaagggattgagttgagtatgtaggtgcgtagatggagatggtagaagggcaaggagagccgaggagggttataagagagctcttgacccctctttggcttttgaatccatttttgttctgtatactacacgacgtaagacatcacatcagctttgtatacatttaccaaactactatctacttttactatattcacaatgttcggattcgacgacggccgcgaagctcgtgacgaggtctatgacggccaaccacacgaatccaagctctcccacgagttcatcggcggagccgctggcttcgaggctatgcacttattcgagaagcgacaagaggctgaaggcaagacagtatcccacggcttcgcaaaggagcttctagccggcatcgcggccgctgaggtcgataagctagtcgagaccaagggtctggatgccattgatcgcgagaaggccaagcatcatgctaaaaggcaggccgaggagttgtatgatcaacattatggtggttacgatgagtatagacctgatgtgagccgacatgagcagttgaactactagatatgttgccaccttgtcaccataagctggacggactcttggctcgtactatctaggtagtttagtttgaataaattgttaaagtgtaatccttttttgttatatgatgttgtgtcgtgacatgatagataaggtttattcgaagtatttagtattgtgcgacacgatacgtagacacagattgattgtgcacgttcctcagtt

SEQ ID NO: 36205 - DNA, 474 bp, Muscodor strobelii
  misc_feature: SGI cDNA ID NO. 572548
  misc_feature: Encodes the peptide sequence at SEQ ID NO 36206
atgttcggattcggtatgtttctctccaatattgtcgagatttatctcccctcggtgctactcttagcccagtgcttttaccacggcaaagaaattcacaatactaatactacgaaacatccagacgacggccgcgaagctcgtgacgaggtctatgacggccaaccacacgaatccaagctctcccacgagttcatcggcggagccgctggcttcgaggctatgcacttattcgagaagcgacaagaggctgaaggcaagacagtatcccacggcttcgcaaaggagcttctagccggcatcgcggccgctgaggtcgataagctagtcgagaccaagggtctggatgccattgatcgcgagaaggccaagcatcatgctaaaaggcaggccgaggagttgtatgatcaacattatggtggttacgatgagtatagacctgatgtgagccgacatgagcagttgaactactag

SEQ ID NO: 36206 - protein, 157 aa, Muscodor strobelii
  misc_feature: SGI Peptide ID NO. 572548
  misc_feature (42)..(157): NCBI GI: 39940734 Blast Desc: MGG_04873 [Magnaporthe grisea 70-15] gi|145010900|gb|EDJ95556.1| MGG_04873 [Magnaporthe grisea 70-15]
  misc_feature (42)..(151): NCBI GI: 242793001 Blast Desc: CipC-like antibiotic response protein, [Talaromyces stipitatus ATCC 10500] gi|218718661|gb|EED18081.1| CipC-like antibiotic response protein, [Talaromyces stipitatus ATCC 10500]
  misc_feature (42)..(147): NCBI GI: 261359125 Blast Desc: CipC protein [Verticillium albo-atrum VaMs.102]
  misc_feature (44)..(148): NCBI GI: 126139755 Blast Desc: PICST_37097 [Pichia stipitis CBS 6054] gi|126093682|gb|ABN68371.1| [Pichia stipitis CBS 6054]
  misc_feature (42)..(155): NCBI GI: 238489401 Blast Desc: CipC-like antibiotic response protein, [Aspergillus flavus NRRL3357] gi|220698326|gb|EED54666.1| CipC-like antibiotic response protein, [Aspergillus flavus NRRL3357]
  misc_feature (42)..(151): NCBI GI: 212535422 Blast Desc: CipC-like antibiotic response protein, [Penicillium marneffei ATCC 18224] gi|210070266|gb|EEA24356.1| CipC-like antibiotic response protein, [Penicillium marneffei ATCC 18224]
  misc_feature (50)..(148): NCBI GI: 199430001 Blast Desc: DEHA2B15840p [Debaryomyces hansenii]
  misc_feature (42)..(155): NCBI GI: 169763484 Blast Desc: [Aspergillus oryzae RIB40] gi|83770670|dbj|BAE60803.1| protein product [Aspergillus oryzae]
  misc_feature (50)..(148): NCBI GI: 50417212 Blast Desc: DEHA0B16027g [Debaryomyces hansenii CBS767]
  misc_feature (43)..(156): NCBI GI: 115400221 Blast Desc: ATEG_06521 [Aspergillus terreus NIH2624] gi|114191365|gb|EAU33065.1| ATEG_06521 [Aspergillus terreus NIH2624]
MFGFGMFLSNIVEIYLPSVLLLAQCFYHGKEIHNTNTTKHPDDGREARDEVYDGQPHESKLSHEFIGGAAGFEAMHLFEKRQEAEGKTVSHGFAKELLAGIAAAEVDKLVETKGLDAIDREKAKHHAKRQAEELYDQHYGGYDEYRPDVSRHEQLNY

SEQ ID NO: 36207 - DNA, 811 bp, Muscodor strobelii; identical to SEQ ID NO: 36204
  misc_feature: SGI EST ID NO. CUFF.86223.1
  misc_feature: Variant of the nucleotide sequence at SEQ ID NO 36205

SEQ ID NO: 36208 - DNA, 2424 bp, Muscodor strobelii
  misc_feature: SGI cDNA ID NO. 572549
  misc_feature: Reduced expression when VOC is produced
  misc_feature: Encodes the peptide sequence at SEQ ID NO 36209
atggactccatcaaagtccacaactccctccagccagggccacccgtgcccttctctcctatcaacaagggcaagctgtcgtggtatgcctgcggtccgaccgtctacgatcacagccatctaggccatgcccgcaactatgtctctaccgatatcatccggcgcattctgctgcactacttcggtttcgatattaagttcgttatgaacttcacagacatcgacgacaagattatcctcaaagcccgaagacagcgattgctcgagaacgaaaaaaagaagacatactccgatgccgaactaaatgaaatcggcagggctgccttccaagcctacgcgaagagcaacctatcgaagcttattgaaggccaggatggtcccttggacctaaacaactacgtcgctcgcagagatgcagcatatgggcaggttctggccggaggtactttgacgggagagggaaagccaggagacgacgaggccaaggtgaaaatgcacatcagcaacatgactaccgccaaaatcgccatcgacggaaaccagatattcaaaggcgccgaagagatattactgccctatttcgactctctgcacaaggagacgatcgacaccagcgatcagaccatattcacgtctctgactcagtcaatggaggactcgtttacgagcgatatggatgcactgaatgtcttgcgccccgacgtagtcaccagagtgaccgaatacgtgcctcagattgcagactttgtggcgaaggtcgtcgacaagggctttgcctacgaagctgagggatccgtctactttgatattactgctttcgagaaggctggcaaccgatatgcgaggttgcggccagagagccggaatgataaagctctccaagaagatggagagggctccctgggcaagagtcttgtaggcaagaggtcccctggtgattttgcgctgtggaaaatgtcaaaacctggtgagccttattggcctagtaaatggggcaatggacggccaggctggcacattgaatgctcggtcatggcatcggatgtcttgggctcgcgcatggatttgcactcaggtggtatagatctagccttcccacaccacgacaacgagttggcgcagagtgaggcatactattgcgaacatggctacgaacatacatgggtcaattacttcttacatatggggcatttatcgatatccggttccaagatgtccaaatcgttgaaaaacttccagactatcaaagacgccctagcttccacctacacagctcggtcaatgcgaattgtcttccttcatggaagatggaatgatggcatagaaatcactcccagtatgcggacacaagctgattcctgggaagccaccgtcaataattttttcacgaatgtggaatcattactaggtgaagtggacgtaccgtcggaagcctcaccaaccctgaaggacctagccatcagtgaaggcgcaataccgaccgaaggactacgggccgacttggaacaagccaaaaaggaagttgatgcggcgttgacgagttcattcgacacgcccgcagtaatgcgagcaatcgcggaagtcatccgaaaagccaacattgagatgggtcgcccgcaagggatggtggaattgccggcactggaagcaaccgcgcgatggattaccaagatcattggtattcttggtctcgatgccaacgcctcatatccgtatgagggcctgggttgggcgtcttcggccatcgacaccaacgcagacccaaacgattcagttcaggcttataagtctgcattcgataagatcttggccgaggccaaagctcttagtctacctacatcagaaacgtggacatctcttctcgcacagtcacccaacacagaattccaacagttagtccaggaaggcatccgggatcccaagagattggcacggcccttcttgcgagcgacatctaaacttcgagatgaacttcgacaacaagctgtgtcgtcggccgctgatctgaagaaatctatcttaacactgagtgatcgtattcgcgattacgatctggcgaaccttggggtttggctcgatgacaggccagatgctccgtcccttgttaagtttgtgcccgcagcagagctgatcgctgcgagggacgaaaaagccgcaaaggaggcggagaaagcgagggcaaaagaagaagctagattagcgagagagaaagcagaggctgagaaatgggagaaggctaaagtatcaccagaacaaatgtttaaaggagacgaaagatacagcgagtgggatgcagagggaatgccaacgaagatgaaggatggaagcgagatacccaaggcgcagagcaaaaagctgaagaaagaatgggagaaacagaagaaggcgtatactgaatatgttgcgaaattcggcagcgcgtaa

SEQ ID NO: 36209 - protein, 807 aa, Muscodor strobelii
  misc_feature: SGI Peptide ID NO. 572549
  misc_feature (17)..(453): Pfam Id: PF01406 Pfam Desc: tRNA synthetases class I (C) catalytic domain
  misc_feature (205)..(453): Pfam Id: PF01406 Pfam Desc: tRNA synthetases class I (C) catalytic domain
  misc_feature (17)..(117): Pfam Id: PF01406 Pfam Desc: tRNA synthetases class I (C) catalytic domain
  misc_feature (1)..(803): NCBI GI: 46123171 Blast Desc: FG05963.1 [Gibberella zeae PH-1]
  misc_feature (1)..(803): NCBI GI: 256731491 Blast Desc: [Nectria haematococca mpVI 77-13-4]
  misc_feature (1)..(805): NCBI GI: 171682892 Blast Desc: protein product [Podospora anserina] gi|170941405|emb|CAP67056.1| protein product [Podospora anserina]
  misc_feature (1)..(807): NCBI GI: 164425498 Blast Desc: NCU05642 [Neurospora crassa OR74A] gi|157070948|gb|EAA30967.2| conserved [Neurospora crassa OR74A]
  misc_feature (1)..(807): NCBI GI: 261357968 Blast Desc: cysteinyl-tRNA synthetase [Verticillium albo-atrum VaMs.102]
  misc_feature (1)..(803): NCBI GI: 154312989 Blast Desc: BC1G_05496 [Botryotinia fuckeliana B05.10] gi|150849581|gb|EDN24774.1| BC1G_05496 [Botryotinia fuckeliana B05.10]
  misc_feature (3)..(807): NCBI GI: 39940736 Blast Desc: MGG_04872 [Magnaporthe grisea 70-15] gi|145010901|gb|EDJ95557.1| MGG_04872 [Magnaporthe grisea 70-15]
  misc_feature (1)..(807): NCBI GI: 116203083 Blast Desc: CHGG_09426 [Chaetomium globosum CBS 148.51] gi|88177944|gb|EAQ85412.1| CHGG_09426 [Chaetomium globosum CBS 148.51]
  misc_feature (1)..(803): NCBI GI: 156063134 Blast Desc: SS1G_01683 [Sclerotinia sclerotiorum 1980] gi|154697019|gb|EDN96757.1| SS1G_01683 [Sclerotinia sclerotiorum 1980]
  misc_feature (4)..(801): NCBI GI: 189206896 Blast Desc: cysteinyl-tRNA synthetase [Pyrenophora tritici-repentis Pt-1C-BFP] gi|187975875|gb|EDU42501.1| cysteinyl-tRNA synthetase [Pyrenophora tritici-repentis
  misc_feature (4)..(778): SWISSPROT Homolog: EC 6.1.1.16 Cysteine--tRNA ligase
  misc_feature: Useful for introducing or modulating the production of volatile compounds
MDSIKVHNSLQPGPPVPFSPINKGKLSWYACGPTVYDHSHLGHARNYVSTDIIRRILLHYFGFDIKFVMNFTDIDDKIILKARRQRLLENEKKKTYSDAELNEIGRAAFQAYAKSNLSKLIEGQDGPLDLNNYVARRDAAYGQVLAGGTLTGEGKPGDDEAKVKMHISNMTTAKIAIDGNQIFKGAEEILLPYFDSLHKETIDTSDQTIFTSLTQSMEDSFTSDMDALNVLRPDVVTRVTEYVPQIADFVAKVVDKGFAYEAEGSVYFDITAFEKAGNRYARLRPESRNDKALQEDGEGSLGKSLVGKRSPGDFALWKMSKPGEPYWPSKWGNGRPGWHIECSVMASDVLGSRMDLHSGGIDLAFPHHDNELAQSEAYYCEHGYEHTWVNYFLHMGHLSISGSKMSKSLKNFQTIKDALASTYTARSMRIVFLHGRWNDGIEITPSMRTQADSWEATVNNFFTNVESLLGEVDVPSEASPTLKDLAISEGAIPTEGLRADLEQAKKEVDAALTSSFDTPAVMRAIAEVIRKANIEMGRPQGMVELPALEATARWITKIIGILGLDANASYPYEGLGWASSAIDTNADPNDSVQAYKSAFDKILAEAKALSLPTSETWTSLLAQSPNTEFQQLVQEGIRDPKRLARPFLRATSKLRDELRQQAVSSAADLKKSILTLSDRIRDYDLANLGVWLDDRPDAPSLVKFVPAAELIAARDEKAAKEAEKARAKEEARLAREKAEAEKWEKAKVSPEQMFKGDERYSEWDAEGMPTKMKDGSEIPKAQSKKLKKEWEKQKKAYTEYVAKFGSA

SEQ ID NO: 36210 - DNA, 3254 bp, Muscodor strobelii
  misc_feature: SGI EST ID NO. CUFF.86198.0
  misc_feature: Variant of the nucleotide sequence at SEQ ID NO 36208
gcaattaccagatgtctgacctctgtgtcacacctcctaccatctgctgcagtgtgactcaagaaagaccattccaatacgtgcatcggtccgttggtcgaaatagtacttgcatttcgtgacacgtttctctgcgacttctatcctttctttttctcccctactctccttaccctcccttctctcagtccctccttttttcttccccttcatcgtcttgatgacactgttgtatactcgtctctttggaatatcaatctctatcccaactccatccaagtctgccattttgctgcgccgagcgttcgcgacacatcgcgccatggactccatcaaagtccacaactccctccagccagggccacccgtgcccttctctcctatcaacaagggcaagctgtcgtggtatgcctgcggtccgaccgtctacgatcacagccatctaggccatgcccgcaactatgtctctaccgatatcatccggcgcattctgctgcactacttcggtttcgatattaagttcgttatgaacttcacagacatcgacgacaagattatcctcaaagcccgaagacagcgattgctcgagaacgaaaaaaagaagacatactccgatgccgaactaaatgaaatcggcagggctgccttccaagcctacgcgaagagcaacctatcgaagcttattgaaggccaggatggtcccttggacctaaacaactacgtcgctcgcagagatgcagcatatgggcaggttctggccggaggtactttgacgggagagggaaagccaggagacgacgaggccaaggtgaaaatgcacatcagcaacatgactaccgccaaaatcgccatcgacggaaaccagatattcaaaggcgccgaagagatattactgccctatttcgactctctgcacaaggagacgatcgacaccagcgatcagaccatattcacgtctctgactcagtcaatggaggactcgtttacgagcgatatggatgcactgaatgtcttgcgccccgacgtagtcaccagagtgaccgaatacgtgcctcagattgcagactttgtggcgaaggtcgtcgacaagggctttgcctacgaagctgagggatccgtctactttgatattactgctttcgagaaggctggcaaccgatatgcgaggttgcggccagagagccggaatgataaagctctccaagaagatggagagggctccctgggcaagagtcttgtaggcaagaggtcccctggtgattttgcgctgtggaaaatgtcaaaacctggtgagccttattggcctagtaaatggggcaatggacggccaggctggcacattgaatgctcggtcatggcatcggatgtcttgggctcgcgcatggatttgcactcaggtggtatagatctagccttcccacaccacgacaacgagttggcgcagagtgaggcatactattgcgaacatggctacgaacatacatgggtcaattacttcttacatatggggtatgctctatgctcccgctctttttagcgacggtctcaagccgtggcttagaaacctcagggaacataccggatagttgtgttaatgttgtgcaggcatttatcgatatccggttccaagatgtccaaatcgttgaaaaacttccagactatcaaagacgccctagcttccacctacacagctcggtcaatgcgaattgtcttccttcatggaagatggaatgatggcatagaaatcactcccagtatgcggacacaagctgattcctgggaagccaccgtcaataattttttcacgaatgtggaatcattactaggtgaagtggacgtaccgtcggaagcctcaccaaccctgaaggacctagccatcagtgaaggcgcaataccgaccgaaggactacgggccgacttggaacaagccaaaaaggaagttgatgcggcgttgacgagttcattcgacacgcccgcagtaatgcgagcaatcgcggaagtcatccgaaaagccaacattgagatgggtcgcccgcaagggatggtggaattgccggcactggaagcaaccgcgcgatggattaccaagatcattggtattcttggtctcgatgccaacgcctcatatccgtatgagggcctgggttgggcgtcttcggccatcgacaccaacgcagacccaaacgattcagttcaggcttataagtctgcattcgataagatcttggccgaggccaaagctcttagtctacctacatcagaaacgtggacatctcttctcgcacagtcacccaacacagaattccaacagttagtccaggaaggcatccgggatcccaagagattggcacggcccttcttgcgagcgacatctaaacttcgagatgaacttcgacaacaagctgtgtcgtcggccgctgatctgaagaaatctatcttaacactgagtgatcgtattcgcgattacgatctggcgaaccttggggtttggctcgatgacaggccagatgctccgtcccttgttaagtttgtgcccgcagcagagctgatcgctgcgagggacgaaaaagccgcaaaggaggcggagaaagcgagggcaaaagaagaagctagattagcgagagagaaagcagaggctgagaaatgggagaaggctaaagtatcaccagaacaaatgtttaaaggagacgaaagatacagcgagtgggatgcagagggaatgccaacgaagatgaaggatggaagcgagatacccaaggcgcagagcaaaaagctgaagaaagaatgggagaaacagaagaaggcgtatactgaatatgttgcgaaattcggcagcgcgtaaggagctatgtctagaggtgtgacatagttcaataatgcctgatcatgatatattctaacttcgagagcacgccatccagatcatcgccaatggaaaacaggcactcatgaatcccaggtgataatccgatggatgtattgttatcgtggcgatatgatatgtagctggcgacgatgttacgagaaccgcccaatctcgttcaagttattcgatgcatgtgaagtacaccttgaaataccggtctcctaaagagcactaaatcttcacacgtttcgagaatatgcatatggtgacacgtaatccacccggcctcagttcctccttcgattccgcgcgattacaatacctttttcatagacacattcacttttaatatgtatcaatggattggcgagagggttctggacgttgg

SEQ ID NO: 36211 - DNA, 1497 bp, Muscodor strobelii
  misc_feature: SGI cDNA ID NO. 572550
  misc_feature: Encodes the peptide sequence at SEQ ID NO 36212
atgtccttagtatctcctttcctcgaccctggtctcgtgaccacaccgaatacgcttgcgctcgtccacctctcacgcgacaatgttcagcccgtatacttgcaggagcagtccggcacagtcgatgggtacgtcgagggtgctgtggtaaacacacgcttcggatcattccctcattcaacactcctcaatcaaccgtgggggtcgcaaatccgagcctctattgtcgacaccggaaccagaggcaggaaacgaaagctggctgctataaccgataccgatgccaccggcaatgacaccgaacagcccgcaagagagctcaagcaagctgcgagcggattcatacacattctacccccgaccccagagatatggactgcaagtctaccccacagaacacaagtcgtgtacacacccgactacagctacatcctgcatcgcatccgggcccggccaggcatgcagatcatagaagccggatcagggagtggcagcttcacacatgcttccgtcagagcagtatacaatggatatcccaaaacattggaggacaaacgcggaagggtttggagctttgagtataacgaagagcgcttccacaaaatggagaaagaagtacaggaccacaacttagccggcttagtgcaagtcacccatcgtaacgtctatgaggatggcttcctagttgacggcgagagcccaggggcagagtgcgttttcttagatgttcctgcgccctggcaggccttaccacacttatcacggtcaaagccgagcgctgcgttactagctagcggaggactagatcccctaaaagagacgggatcggagtggaaatctccattacgaccagatcgatctgtgcatttatgtacattctcgccttgcatcgagcaagtcacgaagaccgtggagataatgcgtcggctgggttggatggacatcgagatggtggaagtagcgcaccggaaggtcgccgtgctaagagagaaggttggcctgaacatgcctaatgagcgtggtatcacccagactccggcaaacgtcgctgaggccgtagcacgattaaagcgcgtcgagcagcatcacattgattctaactcccgcgtcagagacggcgacgtagatctggatgaggatgaatcggagatgaattctactccactcaatggcaacatgaaaaccacagacgagacagaagaagctgcgacgtcaagcaagctatcaattgggaaggttgttcatcggaccgaaccagagatcaagacacatacgtcatacttggtgtttgcggttctgccccaagaatggaccgcagagcaagaggctaaagcgttcgaggcttggccttgcggtaaagaggacaaaatcattggcagtctagacaagcaggccaggaaacaggagaaacgcgagatgctcttgggcaagaaacgtaagaaggagaataataagcagaaacatattcctaaccagaagaagactgaggcgaattag

SEQ ID NO: 36212 - protein, 498 aa, Muscodor strobelii
  misc_feature: SGI Peptide ID NO. 572550
  misc_feature (1)..(433): Pfam Id: PF08704 Pfam Desc: tRNA methyltransferase complex GCD14 subunit
  misc_feature (113)..(254): Pfam Id: PF08704 Pfam Desc: tRNA methyltransferase complex GCD14 subunit
  misc_feature (290)..(320): Pfam Id: PF08704 Pfam Desc: tRNA methyltransferase complex GCD14 subunit
  misc_feature (414)..(433): Pfam Id: PF08704 Pfam Desc: tRNA methyltransferase complex GCD14 subunit
  misc_feature (4)..(489): NCBI GI: 164426488 Blast Desc: NCU04196 [Neurospora crassa OR74A] gi|157071355|gb|EAA31920.2| conserved [Neurospora crassa OR74A]
  misc_feature (1)..(484): NCBI GI: 256731092 Blast Desc: NECHADRAFT_48558 [Nectria haematococca mpVI 77-13-4]
  misc_feature (4)..(486): NCBI GI: 116206348 Blast Desc: CHGG_02467 [Chaetomium globosum CBS 148.51] gi|88183064|gb|EAQ90532.1| CHGG_02467 [Chaetomium globosum CBS 148.51]
  misc_feature (1)..(482): NCBI GI: 46123173 Blast Desc: FG05964.1 [Gibberella zeae PH-1]
  misc_feature (4)..(487): NCBI GI: 39940738 Blast Desc: MGG_04871 [Magnaporthe grisea 70-15] gi|145010902|gb|EDJ95558.1| MGG_04871 [Magnaporthe grisea 70-15]
  misc_feature (4)..(489): NCBI GI: 21622346 Blast Desc: related to GCN4 translational repressor GCD14 protein [Neurospora crassa]
  misc_feature (4)..(474): NCBI GI: 171693523 Blast Desc: protein product [Podospora anserina] gi|170946710|emb|CAP73513.1| protein product [Podospora anserina]
  misc_feature (5)..(489): NCBI GI: 156063132 Blast Desc: SS1G_01682 [Sclerotinia sclerotiorum 1980] gi|154697018|gb|EDN96756.1| SS1G_01682 [Sclerotinia sclerotiorum 1980]
  misc_feature (5)..(489): NCBI GI: 154312987 Blast Desc: BC1G_05495 [Botryotinia fuckeliana B05.10] gi|150849580|gb|EDN24773.1| BC1G_05495 [Botryotinia fuckeliana B05.10]
  misc_feature (5)..(490): NCBI GI: 70997890 Blast Desc: tRNA methyltransferase subunit GCD14 [Aspergillus fumigatus Af293] gi|74673277|sp|Q4WUT7.1|TRM61_ASPFU RecName: Full=tRNA (adenine-N(1)-)-methyltransferase catalytic subunit
  misc_feature (5)..(472): SWISSPROT Homolog: EC 2.1.1.36 tRNA (adenine-N(1)-)-methyltransferase
MSLVSPFLDPGLVTTPNTLALVHLSRDNVQPVYLQEQSGTVDGYVEGAVVNTRFGSFPHSTLLNQPWGSQIRASIVDTGTRGRKRKLAAITDTDATGNDTEQPARELKQAASGFIHILPPTPEIWTASLPHRTQVVYTPDYSYILHRIRARPGMQIIEAGSGSGSFTHASVRAVYNGYPKTLEDKRGRVWSFEYNEERFHKMEKEVQDHNLAGLVQVTHRNVYEDGFLVDGESPGAECVFLDVPAPWQALPHLSRSKPSAALLASGGLDPLKETGSEWKSPLRPDRSVHLCTFSPCIEQVTKTVEIMRRLGWMDIEMVEVAHRKVAVLREKVGLNMPNERGITQTPANVAEAVARLKRVEQHHIDSNSRVRDGDVDLDEDESEMNSTPLNGNMKTTDETEEAATSSKLSIGKVVHRTEPEIKTHTSYLVFAVLPQEWTAEQEAKAFEAWPCGKEDKIIGSLDKQARKQEKREMLLGKKRKKENNKQKHIPNQKKTEAN

SEQ ID NO: 36213 - DNA, 1851 bp, Muscodor strobelii
  misc_feature: SGI EST ID NO. CUFF.86164.0
  misc_feature: Variant of the nucleotide sequence at SEQ ID NO 36211
tgcttattggagcgcattcttcagctaaagcaaacgccgtgcagctcataaaaattggctttagcctcgttttcacatcattaatcgaggccgaactcaaggccaagctgatcttagctacacgtgcctcccaatccaagaattacgatacatcacgaccgatcgcgatactgatccaatcactttttcaaatacacatttattgcgatgcaagattgaagccaattcttctgcataatgtccttagtatctcctttcctcgaccctggtctcgtgaccacaccgaatacgcttgcgctcgtccacctctcacgcgacaatgttcagcccgtatacttgcaggagcagtccggcacagtcgatgggtacgtcgagggtgctgtggtaaacacacgcttcggatcattccctcattcaacactcctcaatcaaccgtgggggtcgcaaatccgagcctctattgtcgacaccggaaccagaggcaggaaacgaaagctggctgctataaccgataccgatgccaccggcaatgacaccgaacagcccgcaagagagctcaagcaagctgcgagcggattcatacacattctacccccgaccccagagatatggactgcaagtctaccccacagaacacaagtcgtgtacacacccgactacagctacatcctgcatcgcatccgggcccggccaggcatgcagatcatagaagccggatcagggagtggcagcttcacacatgcttccgtcagagcagtatacaatggatatcccaaaacattggaggacaaacgcggaagggtttggagctttgagtataacgaagagcgcttccacaaaatggagaaagaagtacaggaccacaacttagccggcttagtgcaagtcacccatcgtaacgtctatgaggatggcttcctagttgacggcgagagcccaggggcagagtgcgttttcttagatgttcctgcgccctggcaggccttaccacacttatcacggtcaaagccgagcgctgcgttactagctagcggaggactagatcccctaaaagagacgggatcggagtggaaatctccattacgaccagatcgatctgtgcatttatgtacattctcgccttgcatcgagcaagtcacgaagaccgtggagataatgcgtcggctgggttggatggacatcgagatggtggaagtagcgcaccggaaggtcgccgtgctaagagagaaggttggcctgaacatgcctaatgagcgtggtatcacccagactccggcaaacgtcgctgaggccgtagcacgattaaagcgcgtcgagcagcatcacattgattctaactcccgcgtcagagacggcgacgtagatctggatgaggatgaatcggagatgaattctactccactcaatggcaacatgaaaaccacagacgagacagaagaagctgcgacgtcaagcaagctatcaattgggaaggttgttcatcggaccgaaccagagatcaagacacatacgtcatacttggtgtttgcggttctgccccaagaatggaccgcagagcaagaggctaaagcgttcgaggcttggccttgcggtaaagaggacaaaatcattggcagtctagacaagcaggccaggaaacaggagaaacgcgagatgctcttgggcaagaaacgtaagaaggagaataataagcagaaacatattcctaaccagaagaagactgaggcgaattagacaagttggggtgagaggcagcattatgggaaaatagagtataatacccaatcaagcatttgtatggctctaagatgcaaagagtgacggcgtaaagaatggaagccaaagcttcag

SEQ ID NO: 36214 - DNA, 1530 bp, Muscodor strobelii
  misc_feature: SGI cDNA ID NO. 572551
  misc_feature: Encodes the peptide sequence at SEQ ID NO 36215
atgcgaaagacacgaggatggaccgagggttggtccagtgccaccacggacttgcaacagtcaattgcagctagcattgagatcaccgatcctaaactattctatcaacatggtgacatagtcactgggattgtgaaaaagacgcacatcgagcaagcgcccgaagccgtcacagcgattatcaagttcatttgccgcatcaggagccaggttgagaccgaatcaaaaaagagcgatggtagcaccactacatggcatcatcgtggagagattacgcttttcgaagtcagccaaccccttttccaaggttctatcaaatatggacccaacgtctggccgttttcgatcactattcctacagccacgccttctctgtttcatcaaatcccaccggttaccatagaatctctcccaccaagtcaccattctcttgacgagagcattgcgttcgcagaacgcaactttgtcgtcgtcgaatacatccttgaggcaacggtttcaggggcttcccccaaagcgccttctgcgctcgcaacatttcccttacatattcagctaccatccaccgaggggcccataaatgacaccgaaatcaaggctgtagccatgtatcagacggcgcgtacgctgcacttagatccaaagatcgctgagaagcggctctctctgcgtcagcacatgaagaccgtgttccatccctcatcgatccctagctactcatactccatagttgttgactacccttcactgctgcaactagatcacccaagccctttggtgttccaggttcgggcaatcccggaccttgcaccgcagaagccctctggggtaccggtcgagaaaccgcaggccctgattcttgtcgcagccaagctaatgctcggaagtaagcgcattgtcgacggccttgggggcaatagtaggcacgttagggagaagactgagagtagagtctggaaggagataacccttatcgactggaaagagggaccaaaccccagtcagccccatattatacctgatggtacgaaagaggatgacgcagccaagtcttttgaagccaagaggacccagaacgacgacagccaccgcgccgactacaacgggggagcagatacaaccttggacttgggcgcacggctacaattgcgcctcgcgtcgcggggactgttgatgggacaccagcttgtaccgctagatatgcccatccagccctcgttcacgtctcggcatatcgaacagtatcatcagctacgctggaagctggtcattaattgcgcgggtaagaccaagaaggtcgctggctctgctctagtacgtgtgcttgggccgagcaaggagtctgaacgagctcgcgccatggtccttaacgacaatgacattcaccttgcgtatcgtgcctggcacgctcacgaggctccgaccccagctctagcgcaaaatgtcactcaatttgcatgcgaaccgccaccttggtctccgacccatcaagatggcagggactttctggcaaaaccatcacagagttga

SEQ ID NO: 36215 - protein, 509 aa, Muscodor strobelii
  misc_feature: SGI Peptide ID NO. 572551
  misc_feature (16)..(445): NCBI GI: 261360534 Blast Desc: conserved [Verticillium albo-atrum VaMs.102]
  misc_feature (81)..(452): NCBI GI: 46109416 Blast Desc: FG01590.1 [Gibberella zeae PH-1]
  misc_feature (38)..(447): NCBI GI: 261352755 Blast Desc: conserved [Verticillium albo-atrum VaMs.102]
  misc_feature (31)..(259): NCBI GI: 238502371 Blast Desc: conserved [Aspergillus flavus NRRL3357] gi|220691229|gb|EED47577.1| conserved [Aspergillus flavus NRRL3357]
  misc_feature (31)..(259): NCBI GI: 169775731 Blast Desc: [Aspergillus oryzae RIB40] gi|83771067|dbj|BAE61199.1| protein product [Aspergillus oryzae]
  misc_feature (135)..(443): NCBI GI: 242805436 Blast Desc: conserved [Talaromyces stipitatus ATCC 10500] gi|218715154|gb|EED14576.1| conserved [Talaromyces stipitatus ATCC 10500]
  misc_feature (14)..(330): NCBI GI: 85090049 Blast Desc: NCU05922 [Neurospora crassa OR74A] gi|28919572|gb|EAA28997.1| [Neurospora crassa OR74A]
  misc_feature (35)..(451): NCBI GI: 46133887 Blast Desc: FG09083.1 [Gibberella zeae PH-1]
MRKTRGWTEGWSSATTDLQQSIAASIEITDPKLFYQHGDIVTGIVKKTHIEQAPEAVTAIIKFICRIRSQVETESKKSDGSTTTWHHRGEITLFEVSQPLFQGSIKYGPNVWPFSITIPTATPSLFHQIPPVTIESLPPSHHSLDESIAFAERNFVVVEYILEATVSGASPKAPSALATFPLHIQLPSTEGPINDTEIKAVAMYQTARTLHLDPKIAEKRLSLRQHMKTVFHPSSIPSYSYSIVVDYPSLLQLDHPSPLVFQVRAIPDLAPQKPSGVPVEKPQALILVAAKLMLGSKRIVDGLGGNSRHVREKTESRVWKEITLIDWKEGPNPSQPHIIPDGTKEDDAAKSFEAKRTQNDDSHRADYNGGADTTLDLGARLQLRLASRGLLMGHQLVPLDMPIQPSFTSRHIEQYHQLRWKLVINCAGKTKKVAGSALVRVLGPSKESERARAMVLNDNDIHLAYRAWHAHEAPTPALAQNVTQFACEPPPWSPTHQDGRDFLAKPSQS

SEQ ID NO: 36216 - DNA, 2453 bp, Muscodor strobelii
  misc_feature: SGI EST ID NO. CUFF.86186.0
  misc_feature: Variant of the nucleotide sequence at SEQ ID NO 36214
catagccccgggcctcaactataagagatgcattcatccgcatcaaatattggtgctttgctacaagctaccaattgcgtatcacatatttgctaagcatctttgattgaacgaacggcgttgcgcgcctccactcaatgcgaaagacacgaggatggaccgagggttggtccagtgccaccacggacttgcaacagtcaattgcagctagcattgagatcaccgatcctaaactattctatcaacatggtgacatagtcactgggattgtgaaaaagacgcacatcgagcaagcgcccgaagccgtcacagcgattatcaagttcatttgccgcatcaggagccaggttgagaccgaatcaaaaaagagcgatggtagcaccactacatggcatcatcgtggagagattacgcttttcgaagtcagccaaccccttttccaaggttctatcaaatatggacccaacgtctggccgttttcgatcactattcctacagccacgccttctctgtttcatcaaatcccaccggttaccatagaatctctcccaccaagtcaccattctcttgacgagagcattgcgttcgcagaacgcaactttgtcgtcgtcgaatacatccttgaggcaacggtttcaggggcttcccccaaagcgccttctgcgctcgcaacatttcccttacatattcagctaccatccaccgaggggcccataaatgacaccgaaatcaaggctgtagccatgtatcagacggcgcgtacgctgcacttagatccaaagatcgctgagaagcggctctctctgcgtcagcacatgaagaccgtgttccatccctcatcgatccctagctactcatactccatagttgttgactacccttcactgctgcaactagatcacccaagccctttggtgttccaggttcgggcaatcccggaccttgcaccgcagaagccctctggggtaccggtcgagaaaccgcaggccctgattcttgtcgcagccaagctaatgctcggaagtaagcgcattgtcgacggccttgggggcaatagtaggcacgttagggagaagactgagagtagagtctggaaggagataacccttatcgactggaaagagggaccaaaccccagtcagccccatattatacctgatggtacgaaagaggatgacgcagccaagtcttttgaagccaagaggacccagaacgacgacagccaccgcgccgactacaacgggggagcagatacaaccttggacttgggcgcacggctacaattgcgcctcgcgtcgcggggactgttgatgggacaccagcttgtaccgctagatatgcccatccagccctcgttcacgtctcggcatatcgaacagtatcatcagctacgctggaagctggtcattaattgcgcgggtaagaccaagaaggtcgctggctctgctctagtacgtgtgcttgggccgagcaaggagtctgaacgagctcgcgccatggtccttaacgacaatgacattcaccttgcgtatcgtgcctggcacgctcacgaggctccgaccccagctctagcgcaaaatgtcactcaatttgcatgcgaaccgccaccttggtctccgacccatcaagatggcagggactttctggcaaaaccatcacagagttgaggttgcaatatcgctaaatatagcttcaaagtaattgagccgtgtagctaaagcgtacagagcgatgcggacagcctcggaaatctttatgacctctgcagcgctaacagcaagcggacttctatcgaatctcagctaagctctctttgggttaactgtaaaacccgcaagtctccgagacttattagtcgatgagactcgtcttactgctatactttgaagagagatcggcttatgactgtctttctggatgtctgcaaagcgagaatagatcctcagtcacaattgacagtctctgacatttaacctagaaaacttcacgattcggaagaatgaatctgtcatgaaacgatgacctcaccagcgtatgggatagtaacttgatgaagagtatgaacggcgtatggtagttgactgcagttgctttcggctcttgcttgagaaatgcattctaagttttggagaaactcgactagaattgtacgcgtctctggccttgttgaaaacaccggaagacttgcgttgtatcgcatcaagagacatacttcggattatcaaaccactcaagtgtggccatatgcgccttgattttccatcaccgtgggctttcaatcttcaacgcggccgagagaggtgaagcaggctagatatagttaatcaatgccacaaaaagactgttgatatccggagtattgtccagtaacgatcattccagacatccatcaatgcaagatgtacgcattgaacgctctccgtttcagtgaacttgccgccataggtatcgcg

SEQ ID NO: 36217 - DNA, 1710 bp, Muscodor strobelii
  misc_feature: SGI cDNA ID NO. 572552
  misc_feature: Reduced expression when VOC is produced
  misc_feature: Encodes the peptide sequence at SEQ ID NO 36218
atgggacaaccgactagaccgacgaggagcgcctcaacgaccaaacgcacatctttcctttctcgattgaacccgataccgcgtttcccagagtacactggcccgtatcaggtcgggacagtagacgtggagatacctataagtgaactggagtcgcccgccgacgctccggaaaactccgccgatatagagacagtccagttccgaatattctatccctgtgagcctgatgctaagggcaaaaagataacatggcttccaaatccacagcgggaccatttgtctgcttatatccagtttcttggcgccgggccatttcttgctgaggcggcctcatttcttcctcggcatcttcactatacgaccatacccgttgttaagaatgcgcccatcctcactccacagacgacaaacggccggtggcccacggtaatcttctcacatggtctgggcggtagtcgcaatgcgtactcccaagttgttggctcattagcatcccatgggactatagtaatatgccccgagcatcgagatggcagcgctgtggcatcgtttgtccggataccttccaagcaggaccagttcttcacacggaataccagacgcataataccatacaagcgcattccccacgagacgtctgaagaagtccatgagctgaggaacgagcaattgcgaatcaggctttgggagctcggcttaatacatgaagcgataatgaatatcgacgacagtcaaaaactaacaaatctgaacaaaacaacgccatcacttgatccattcgcttcccggcttcacgtgaaagaccctggcagcatcattttcgctggacatagcttcggagccgcgacaatcgtacaattcctcaagtcagtgtattatgccggtcgaccagaactcgaaaccatgaagacacctctatacaacccgaattgggagtcttctatttgccaacaagtcacgccccagaatataacattactccttgatatgtggtgctttcccctgatgggagagtcaacaaaaccgctatttaatctgccactaccggtttatgacgctgcccctcccccaaatggcgtcccacttctcgccatcgaatcagaagatttctacaagtggcgtgaacacttacaagcaacagcacgcatcctatcgtcaaatccctcagcaccaattgttgccgctacagaagatggcagtagaccccatttcttctacgtagaacgtgcagcccatctaagtcagtctgacttcgcattactcttcccctggctcacgagcaaagtctttggatctgaggcgcccgaacgagctctccgcctcaatatacgggctttgttgcaggttctgcgaataaatggcgtgcccgtcgcggcgacgaggcgcgaggacatgattgatgatatagtgggcgagaagcagaacggagaagatatggtttgttcggatgatactaggattttagaacatgaggggaattcgattcgtgataaagagaaggataaagatgagcttatccgtgcgtggagatggcttgatatcgttggaatgggcgagaaccttgctcgtgagggtaagggaaagaaggatgaaaatcttcaacttgccgagaagggggagccggatatggcgagtgttattgagcctggtgctgccgcgcggtcggactcgggtgcggatatcaaggagggtgtcgtttcgacatag

SEQ ID NO: 36218 - protein, 569 aa, Muscodor strobelii
  misc_feature: SGI Peptide ID NO. 572552
  misc_feature (21)..(466): Pfam Id: PF03403 Pfam Desc: Platelet-activating factor acetylhydrolase, plasma/intracellular isoform II
  misc_feature (21)..(228): Pfam Id: PF03403 Pfam Desc: Platelet-activating factor acetylhydrolase, plasma/intracellular isoform II
  misc_feature (8)..(560): NCBI GI: 261358049 Blast Desc: platelet-activating factor acetylhydrolase precursor [Verticillium albo-atrum VaMs.102]
  misc_feature (18)..(550): NCBI GI: 256731085 Blast Desc: [Nectria haematococca mpVI 77-13-4]
  misc_feature (18)..(520): NCBI GI: 46123119 Blast Desc: FG05937.1 [Gibberella zeae PH-1]
  misc_feature (11)..(550): NCBI GI: 229610242 Blast Desc: phospholipase A2 [Hypocrea koningii]
  misc_feature (17)..(539): NCBI GI: 154313167 Blast Desc: BC1G_05585 [Botryotinia fuckeliana B05.10] gi|150849670|gb|EDN24863.1| BC1G_05585 [Botryotinia fuckeliana B05.10]
  misc_feature (17)..(515): NCBI GI: 156062842 Blast Desc: SS1G_01537 [Sclerotinia sclerotiorum 1980] gi|154696873|gb|EDN96611.1| SS1G_01537 [Sclerotinia sclerotiorum 1980]
  misc_feature (17)..(519): NCBI GI: 39944146 Blast Desc: MGG_04084 [Magnaporthe grisea 70-15] gi|145014808|gb|EDJ99376.1| MGG_04084 [Magnaporthe grisea 70-15]
  misc_feature (18)..(519): NCBI GI: 85091162 Blast Desc: NCU09548 [Neurospora crassa OR74A] gi|28920151|gb|EAA29531.1| conserved [Neurospora crassa OR74A] gi|38566855|emb|CAE76161.1| related to platelet-activating factor
  misc_feature (21)..(522): NCBI GI: 171693533 Blast Desc: protein product [Podospora anserina] gi|170946715|emb|CAP73518.1| protein product [Podospora anserina]
  misc_feature (18)..(498): NCBI GI: 169616312 Blast Desc: SNOG_11326 [Phaeosphaeria nodorum SN15] gi|160703152|gb|EAT81034.2| SNOG_11326 [Phaeosphaeria nodorum SN15]
  misc_feature (28)..(456): SWISSPROT Homolog: EC 3.1.1.47 1-alkyl-2-acetylglycerophosphocholine esterase
  misc_feature: Useful for introducing or modulating the production of volatile compounds
MGQPTRPTRSASTTKRTSFLSRLNPIPRFPEYTGPYQVGTVDVEIPISELESPADAPENSADIETVQFRIFYPCEPDAKGKKITWLPNPQRDHLSAYIQFLGAGPFLAEAASFLPRHLHYTTIPVVKNAPILTPQTTNGRWPTVIFSHGLGGSRNAYSQVVGSLASHGTIVICPEHRDGSAVASFVRIPSKQDQFFTRNTRRIIPYKRIPHETSEEVHELRNEQLRIRLWELGLIHEAIMNIDDSQKLTNLNKTTPSLDPFASRLHVKDPGSIIFAGHSFGAATIVQFLKSVYYAGRPELETMKTPLYNPNWESSICQQVTPQNITLLLDMWCFPLMGESTKPLFNLPLPVYDAAPPPNGVPLLAIESEDFYKWREHLQATARILSSNPSAPIVAATEDGSRPHFFYVERAAHLSQSDFALLFPWLTSKVFGSEAPERALRLNIRALLQVLRINGVPVAATRREDMIDDIVGEKQNGEDMVCSDDTRILEHEGNSIRDKEKDKDELIRAWRWLDIVGMGENLAREGKGKKDENLQLAEKGEPDMASVIEPGAAARSDSGADIKEGVVST

SEQ ID NO: 36219 - DNA, 4523 bp, Muscodor strobelii
  misc_feature: SGI EST ID NO. CUFF.86205.1
  misc_feature: Variant of the nucleotide sequence at SEQ ID NO 36217
ggactgtttgagtagtattgaattggtctacaccatctgtctttcggacttcttttgtatagtacagggtattggatctattttacacttcatgttgtttctcatttataacctcttaatctcgaggggagagtcagatgcgcacgcatttcgtacgcatttcggataaagaaagacacactataacctcttgatctcaccgttttgcgtgatagctccgcggaaatggtcagtgacaatatttccattgacaattgtctcttttataatcccctccgcatgctttggctcaattctgccgtaccagacaccgtggccagctaatggatgtggttctccggcgctggtcttgtgtgtagggggtaagtagatgatgatgttgcctgcgaacttatgaccgccgatatggctgataagtccgactctcgccgtcggcgttctctcaaccttctctcccattgcaggtagcgcggcagagtttgattcatcactagcaggaccttgtagaacagtgagtccaacatttggtagttgtcgctcaaactcagcttggagcacaggtcccataacaccacagcgcatatctcgacctccatgtccgcaaatcagaaccaggacttcattcacatcacaaacacctggtaacagactctgaaacgtctcgttcctgagaagtcggtccttatgcataggcgataatccatcattcataggatgcagtttctccgggagcagatatcccttcacaagtgctgacactgaatcaaacgataccctaggcaagaagggcacgtatttgaaccttggcaacagataggcagatgtagtctgtatctgagggtgtcgcggtatggagggtgggaatgaggagttgaggacggatatgttgtgaaagggctacgagtcacgggacttaccgtcagctacatatttgtgatgggttggtgtatgtaatggaataacgaacatcgctgtattttccgccccgaccaataagctctttcaagtcggccgcgaggttgtcgccagagtgggattcttcgatgcgcgatggccagtcggcttccccggtgcagattacgacttgctccgcgtagctggatattaggccgttgagtttcccgtcgtggtctattggcagcccgtcgggcatctctggggtttgggcacagtcgcatgttggtgacgggcacgattggactgtatttagagaacggcgagagaaaatggccggttgtcgcgtggctttagctgcggacatgacgccgtatcgagacgcgccacggagaagtggccgcgctgacattttggatcggtcggtaataagaaccacgtggcgctatttataagaatggaaaactcgcacagagtctacgaaatccagagcgaatgtcgagaacattgcgattcttgtattttgggattgctcggaggtcaactcggcgtcagcgattagcgcacgtaaatcgcacgtaaatccgacctcgagattctgatgatttgaatcgttcgatcgtcagaggattccggcagctaggatactaattagcgtagtggttccgaataggcttagccccgggacccttcttttgtctgttcaatttctttttgcgcttcgggccatcggactttaagcagaaaaacggtgagatgagatcaatgacgatcaatgatctcctagctaggttttctaggccttttctttgacccatcatagctgtcttcaggcctcgggctactcgagcatccactcgagactgagctctgactggagcgaccgtatattacttgtacgagcggcactcagcgcagaggtcagcgaattcagctagatgacgcaggcgtgtacagggctgaccttttgactcagcctctgacgcagattcaaccgaattcctgcgcggtgcacgagaccaggttgccaggaacaggacatggcggcgctccgattggcaacagtcagctttgcgccaggggaaaagtggctcgaaagtggttcttgaaccaacgaattctgaattgcttctttctctcgtccatccttttttgctcgttgcattcctgtcgggtcctttcctgctgcgtggatcttcgaacccttggctttttatatatccccctgtgtactgtgtaccataccattcgaaaagttctagaatttccaatagaatgttttatctattttagatttccaatttccgtactgggaaccaatttcatgatgctgaggtgacacaaatctgcccacattccggccaactctgacaaccaacttctcaaacgcatttgaaagcaaccgagtaatcgactggcacacttcacacatattgatctgatctcagaattgccatacaacgcgctggatcgcaggcaaccatttacggatcctgcaaatacaaaacatacacgagtccagacaatatggcgaaagacataatggacagtgactatacgggggactcgggaaggacgagcccagcgtctgggaccgcttccggtacagcttccggcagacagagtccatctttaagcttcaaaatgggacaaccgactagaccgacgaggagcgcctcaacgaccaaacgcacatctttcctttctcgattgaacccgataccgcgtttcccagagtacactggcccgtatcaggtcgggacagtagacgtggagatacctataagtgaactggagtcgcccgccgacgctccggaaaactccgccgatatagagacagtccagttccgaatattctatccctgtgagcctgatgctaagggcaaaaagataacatggcttccaaatccacagcgggaccatttgtctgcttatatccagtttcttggcgccgggccatttcttgctgaggcggcctcatttcttcctcggcatcttcactatacgaccatacccgttgttaagaatgcgcccatcctcactccacagacgacaaacggccggtggcccacggtaatcttctcacatggtctgggcggtagtcgcaatgcgtactcccaagttgttggctcattagcatcccatgggactatagtaatatgccccgagcatcgagatggcagcgctgtggcatcgtttgtccggataccttccaagcaggaccagttcttcacacggaataccagacgcataataccatacaagcgcattccccacgagacgtctgaagaagtccatgagctgaggaacgagcaattgcgaatcaggctttgggagctcggcttaatacatgaagcgataatgaatatcgacgacagtcaaaaactaacaaatctgaacaaaacaacgccatcacttgatccattcgcttcccggcttcacgtgaaagaccctggcagcatcattttcgctggacatagcttcggagccgcgacaatcgtacaattcctcaagtcagtgtattatgccggtcgaccagaactcgaaaccatgaagacacctctatacaacccgaattgggagtcttctatttgccaacaagtcacgccccagaatataacattactccttgatatgtggtgctttcccctgatgggagagtcaacaaaaccgctatttaatctgccactaccggtttatgacgctgcccctcccccaaatggcgtcccacttctcgccatcgaatcagaagatttctacaagtggcgtgaacacttacaagcaacagcacgcatcctatcgtcaaatccctcagcaccaattgttgccgctacagaagatggcagtagaccccatttcttctacgtagaacgtgcagcccatctaagtcagtctgacttcgcattactcttcccctggctcacgagcaaagtctttggatctgaggcgcccgaacgagctctccgcctcaatatacgggctttgttgcaggttctgcgaataaatggcgtgcccgtcgcggcgacgaggcgcgaggacatgattgatgatatagtgggcgagaagcagaacggagaagatatggtttgttcggatgatactaggattttagaacatgaggggaattcgattcgtgataaagagaaggataaagatgagcttatccgtgcgtggagatggcttgatatcgttggaatgggcgagaaccttgctcgtgagggtaagggaaagaaggatgaaaatcttcaacttgccgagaagggggagccggatatggcgagtgttattgagcctggtgctgccgcgcggtcggactcgggtgcggatatcaaggagggtgtcgtttcgacatagaagagacctatataggacgagattgtacatagtaccatggtgttttgggcattgtaaaggttatggcgttggttttagagagcattggcgtttggttagaatgaggaacatcagaatgggaatgggctcctaacggaaagattttggatatttgttagcaaaagatagtagacacgacgtcgctatggcttcggaagacagaacgaaagcctacacatactttttctccgccttaattttcaattaggtaaaattatgtatactctttatgccta

SEQ ID NO: 36220 - DNA, 903 bp, Muscodor strobelii
  misc_feature: SGI cDNA ID NO. 572553
  misc_feature: Encodes the peptide sequence at SEQ ID NO 36221
atgcccgacgggctgccaatagaccacgacgggaaactcaacggcctaatatccagctacgcggagcaagtcgtaatctgcaccggggaagccgactggccatcgcgcatcgaagaatcccactctggcgacaacctcgcggccgacttgaaagagcttattggtcggggcggaaaatacagcgatccctttcacaacatatccgtcctcaactcctcattcccaccctccataccgcgacaccctcagatacagactacatctgcctatctgttgccaaggttcaaatacgtgcccttcttgcctagggtatcgtttgattcagtgtcagcacttgtgaagggatatctgctcccggagaaactgcatcctatgaatgatggattatcgcctatgcataaggaccgacttctcaggaacgagacgtttcagagtctgttaccaggtgtttgtgatgtgaatgaagtcctggttctgatttgcggacatggaggtcgagatatgcgctgtggtgttatgggacctgtgctccaagctgagtttgagcgacaactaccaaatgttggactcactgttctacaaggtcctgctagtgatgaatcaaactctgccgcgctacctgcaatgggagagaaggttgagagaacgccgacggcgagagtcggacttatcagccatatcggcggtcataagttcgcaggcaacatcatcatctacttaccccctacacacaagaccagcgccggagaaccacatccattagctggccacggtgtctggtacggcagaattgagccaaagcatgcggaggggattataaaagagacaattgtcaatggaaatattgtcactgaccatttccgcggagctatcacgcaaaacggtgagatcaagaggttatag

SEQ ID NO: 36221 - protein, 300 aa, Muscodor strobelii
  misc_feature: SGI Peptide ID NO. 572553
  misc_feature (12)..(291): Pfam Id: PF06999 Pfam Desc: Sucrase/ferredoxin-like
  misc_feature (1)..(300): NCBI GI: 171693675 Blast Desc: protein product [Podospora anserina] gi|170946786|emb|CAP73590.1| protein product [Podospora anserina]
  misc_feature (1)..(300): NCBI GI: 256731073 Blast Desc: NECHADRAFT_84947 [Nectria haematococca mpVI 77-13-4]
  misc_feature (1)..(300): NCBI GI: 154298874 Blast Desc: BC1G_11684 [Botryotinia fuckeliana B05.10] gi|150857589|gb|EDN32781.1| BC1G_11684 [Botryotinia fuckeliana B05.10]
  misc_feature (28)..(300): NCBI GI: 261351582 Blast Desc: FMI1 protein [Verticillium albo-atrum VaMs.102]
  misc_feature (1)..(300): NCBI GI: 84871654 Blast Desc: FMI1 protein [Magnaporthe grisea]
  misc_feature (1)..(300): NCBI GI: 11595637 Blast Desc: related to sucrose cleavage protein [Neurospora crassa]
  misc_feature (1)..(300): NCBI GI: 121703586 Blast Desc: sucrose cleavage family protein [Aspergillus clavatus NRRL 1] gi|119398201|gb|EAW08631.1| sucrose cleavage family protein [Aspergillus clavatus NRRL 1]
  misc_feature (1)..(300): NCBI GI: 169776953 Blast Desc: [Aspergillus oryzae RIB40] gi|83771679|dbj|BAE61809.1| protein product [Aspergillus oryzae]
  misc_feature (1)..(298): NCBI GI: 258569563 Blast Desc: UREG_03101 [Uncinocarpus reesii 1704] gi|237903855|gb|EEP78256.1| UREG_03101 [Uncinocarpus reesii 1704]
  misc_feature (1)..(259): NCBI GI: 46121539 Blast Desc: FG05148.1 [Gibberella zeae PH-1]
MPDGLPIDHDGKLNGLISSYAEQVVICTGEADWPSRIEESHSGDNLAADLKELIGRGGKYSDPFHNISVLNSSFPPSIPRHPQIQTTSAYLLPRFKYVPFLPRVSFDSVSALVKGYLLPEKLHPMNDGLSPMHKDRLLRNETFQSLLPGVCDVNEVLVLICGHGGRDMRCGVMGPVLQAEFERQLPNVGLTVLQGPASDESNSAALPAMGEKVERTPTARVGLISHIGGHKFAGNIIIYLPPTHKTSAGEPHPLAGHGVWYGRIEPKHAEGIIKETIVNGNIVTDHFRGAITQNGEIKRL

SEQ ID NO: 36222 - DNA, 4536 bp, Muscodor strobelii
  misc_feature: SGI EST ID NO. CUFF.86204.0
  misc_feature: Variant of the nucleotide sequence at SEQ ID NO 36220
taggcataaagagtatacataattttacctaattgaaaattaaggcggagaaaaagtatgtgtaggctttcgttctgtcttccgaagccatagcgacgtcgtgtctactatcttttgctaacaaatatccaaaatctttccgttaggagcccattcccattctgatgttcctcattctaaccaaacgccaatgctctctaaaaccaacgccataacctttacaatgcccaaaacaccatggtactatgtacaatctcgtcctatataggtctcttctatgtcgaaacgacaccctccttgatatccgcacccgagtccgaccgcgcggcagcaccaggctcaataacactcgccatatccggctcccccttctcggcaagttgaagattttcatccttctttcccttaccctcacgagcaaggttctcgcccattccaacgatatcaagccatctccacgcacggataagctcatctttatccttctctttatcacgaatcgaattcccctcatgttctaaaatcctagtatcatccgaacaaaccatatcttctccgttctgcttctcgcccactatatcatcaatcatgtcctcgcgcctcgtcgccgcgacgggcacgccatttattcgcagaacctgcaacaaagcccgtatattgaggcggagagctcgttcgggcgcctcagatccaaagactttgctcgtgagccaggggaagagtaatgcgaagtcagactgacttagatgggctgcacgttctacgtagaagaaatggggtctactgccatcttctgtagcggcaacaattggtgctgagggatttgacgataggatgcgtgctgttgcttgtaagtgttcacgccacttgtagaaatcttctgattcgatggcgagaagtgggacgccatttgggggaggggcagcgtcataaaccggtagtggcagattaaatagcggttttgttgactctcccatcaggggaaagcaccacatatcaaggagtaatgttatattctggggcgtgacttgttggcaaatagaagactcccaattcgggttgtatagaggtgtcttcatggtttcgagttctggtcgaccggcataatacactgacttgaggaattgtacgattgtcgcggctccgaagctatgtccagcgaaaatgatgctgccagggtctttcacgtgaagccgggaagcgaatggatcaagtgatggcgttgttttgttcagatttgttagtttttgactgtcgtcgatattcattatcgcttcatgtattaagccgagctcccaaagcctgattcgcaattgctcgttcctcagctcatggacttcttcagacgtctcgtggggaatgcgcttgtatggtattatgcgtctggtattccgtgtgaagaactggtcctgcttggaaggtatccggacaaacgatgccacagcgctgccatctcgatgctcggggcatattactatagtcccatgggatgctaatgagccaacaacttgggagtacgcattgcgactaccgcccagaccatgtgagaagattaccgtgggccaccggccgtttgtcgtctgtggagtgaggatgggcgcattcttaacaacgggtatggtcgtatagtgaagatgccgaggaagaaatctacaaatgaaaggtacgaattagcaagagttacatcagccaactgcgacaaaattgcactttatggactacgaagtactcacgaggccgcctcagcaagaaatggcccggcgccaagaaactggatataagcagacaaatggtcccgctgtggatttggaagccatgttatctttttgcccttagcatcaggctcacagggatagaatattcggaactggactgtctctatatcggcggagttttccggagcgtcggcgggcgactccagttcacttataggtatctccacgtctactgtcccgacctgatacgggccagtgtactctgggaaacgcggtatcgggttcaatcgagaaaggaaagatgtgcgtttggtcgttgaggcgctcctcgtcggtctagtcggttgtcccattttgaagcttaaagatggactctgtctgccggaagctgtaccggaagcggtcccagacgctgggctcgtccttcccgagtcccccgtatagtcactgtccattatgtctttcgccatattgtctggactcgtgtatgttttgtatttgcaggatccgtaaatggttgcctgcgatccagcgcgttgtatggcaattctgagatcagatcaatatgtgtgaagtgtgccagtcgattactcggttgctttcaaatgcgtttgagaagttggttgtcagagttggccggaatgtgggcagatttgtgtcacctcagcatcatgaaattggttcccagtacggaaattggaaatctaaaatagataaaacattctattggaaattctagaacttttcgaatggtatggtacacagtacacagggggatatataaaaagccaagggttcgaagatccacgcagcaggaaaggacccgacaggaatgcaacgagcaaaaaaggatggacgagagaaagaagcaattcagaattcgttggttcaagaaccactttcgagccacttttcccctggcgcaaagctgactgttgccaatcggagcgccgccatgtcctgttcctggcaacctggtctcgtgcaccgcgcaggaattcggttgaatctgcgtcagaggctgagtcaaaaggtcagccctgtacacgcctgcgtcatctagctgaattcgctgacctctgcgctgagtgccgctcgtacaagtaatatacggtcgctccagtcagagctcagtctcgagtggatgctcgagtagcccgaggcctgaagacagctatgatgggtcaaagaaaaggcctagaaaacctagctaggagatcattgatcgtcattgatctcatctcaccgtttttctgcttaaagtccgatggcccgaagcgcaaaaagaaattgaacagacaaaagaagggtcccggggctaagcctattcggaaccactacgctaattagtatcctagctgccggaatcctctgacgatcgaacgattcaaatcatcagaatctcgaggtcggatttacgtgcgatttacgtgcgctaatcgctgacgccgagttgacctccgagcaatcccaaaatacaagaatcgcaatgttctcgacattcgctctggatttcgtagactctgtgcgagttttccattcttataaatagcgccacgtggttcttattaccgaccgatccaaaatgtcagcgcggccacttctccgtggcgcgtctcgatacggcgtcatgtccgcagctaaagccacgcgacaaccggccattttctctcgccgttctctaaatacagtccaatcgtgcccgtcaccaacatgcgactgtgcccaaaccccagagatgcccgacgggctgccaatagaccacgacgggaaactcaacggcctaatatccagctacgcggagcaagtcgtaatctgcaccggggaagccgactggccatcgcgcatcgaagaatcccactctggcgacaacctcgcggccgacttgaaagagcttattggtcggggcggaaaatacagcgatccctttcacaacatatccgtcctcaactcctcattcccaccctccataccgcgacaccctcagatacagactacatctgcctatctgttgccaaggttcaaatacgtgcccttcttgcctagggtatcgtttgattcagtgtcagcacttgtgaagggatatctgctcccggagaaactgcatcctatgaatgatggattatcgcctatgcataaggaccgacttctcaggaacgagacgtttcagagtctgttaccaggtgtttgtgatgtgaatgaagtcctggttctgatttgcggacatggaggtcgagatatgcgctgtggtgttatgggacctgtgctccaagctgagtttgagcgacaactaccaaatgttggactcactgttctacaaggtcctgctagtgatgaatcaaactctgccgcgctacctgcaatgggagagaaggttgagagaacgccgacggcgagagtcggacttatcagccatatcggcggtcataagttcgcaggcaacatcatcatctacttaccccctacacacaagaccagcgccggagaaccacatccattagctggccacggtgtctggtacggcagaattgagccaaagcatgcggaggggattataaaagagacaattgtcaatggaaatattgtcactgaccatttccgcggagctatcacgcaaaacggtgagatcaagaggttatagtgtgtctttctttatccgaaatgcgtacgaaatgcgtgcgcatctgactctcccctcgagattaagaggttataaatgagaaacaacatgaagtgtaaaatagatccaataccctgtactatacaaaagaagtccgaaagacagatggtgtagaccaattcaatactactcaaacagtcc

SEQ ID NO: 36223 - DNA, 1209 bp, Muscodor strobelii
  misc_feature: SGI cDNA ID NO. 572554
  misc_feature: Encodes the peptide sequence at SEQ ID NO 36224
atgttcctcgtgatgatcgtcattgggtgctttggctcgttcttcgtcaagaggtggctggaggatggagaaggggaaggggatgatgttatgaatacggagaggtttaagggttttagggttgtggcgagggaacaggtttcgcagagtgcttttattattacgctgcgtcctagcggtgtggttagaagtcctgcaggagagagaggtacaagagaggagaagggggatggggaagagggatggacgtcgaagagagtgagagatgcgtggcgtcatgggatgtggagtgttgaggttaaacagccgcagttgcagattgctaggcattatacgcctttgccgcctgtggttcaagatggtgatggaagcgaggggagcgaaaatagtggaaaggagagggacttgagatttttggtcaggaagatggatggtggggagatgtcgagttatctctcgagacaaaaagtcggagatgagatttggttgagggggccgtggttggggttcgatgtccccagaagattgggtatccacgatccagaggcggaaagaccgtgtgagagaaatgtcgtcttcctggctggtggtacgggtgtggcgcctgcgttgcagatcgcgcataaactcctcgacgattccgacactgaggggatgaagagcaagccaaaggtccaaatcttgtgggcgaaccgatatgctgctgatgcgcttggacgcgagaaagagaggactacgagttggtttggaggcggagcgacgaaaataaaaccgcaactagaacttgagaaggaatcaacgcttgcgaagcagataagggatctgaaaagacgacatggggagaacttcagcatcgagtatttcgctgatgaagaggggagattcatcactcctggggatgtcgaaaaagcatgtcgcacgacatccggcatacggagcggcatcgacaagtcgtgtacatggcattccagagctgcggtgcgcaatctgccggatgataaggatacagaacgggctgattcggtctgtaaatgtacatctcccggtgtgaatttgctgtgtgtttcggggcctgatgggttcatacaagcgtatgctggcgcgaagagatggtataaagggaatgagatgcaaggcgctgttggaggcgctgttggaaggttgttagaagggaagggcatggaggattgggtggttttgaagttgtag

SEQ ID NO: 36224 - protein, 402 aa, Muscodor strobelii
  misc_feature: SGI Peptide ID NO. 572554
  misc_feature (138)..(166): Pfam Id: PF00970 Pfam Desc: Oxidoreductase FAD-binding domain
  misc_feature (192)..(242): Pfam Id: PF00175 Pfam Desc: Oxidoreductase NAD-binding domain
  misc_feature (31)..(402): NCBI GI: 11595635 Blast Desc: related to cytochrome-c mitochondrial import factor CYC2 [Neurospora crassa]
  misc_feature (31)..(402): NCBI GI: 145607175 Blast Desc: MGG_12136 [Magnaporthe grisea 70-15] gi|145014769|gb|EDJ99337.1| MGG_12136 [Magnaporthe grisea 70-15]
  misc_feature (29)..(402): NCBI GI: 46121539 Blast Desc: FG05148.1 [Gibberella zeae PH-1]
  misc_feature (1)..(402): NCBI GI: 256731073 Blast Desc: NECHADRAFT_84947 [Nectria haematococca mpVI 77-13-4]
  misc_feature (31)..(402): NCBI GI: 154312023 Blast Desc: BC1G_06045 [Botryotinia fuckeliana B05.10] gi|150850695|gb|EDN25888.1| BC1G_06045 [Botryotinia fuckeliana B05.10]
  misc_feature (31)..(402): NCBI GI: 171693677 Blast Desc: protein product [Podospora anserina] gi|170946787|emb|CAP73591.1| protein product [Podospora anserina]
  misc_feature (1)..(402): NCBI GI: 259480091 Blast Desc: TPA: cytochrome c mitochondrial import factor (Cyc2), (AFU_orthologue; AFUA_6G04980) [Aspergillus nidulans FGSC A4]
  misc_feature (19)..(402): NCBI GI: 70984122 Blast Desc: cytochrome c mitochondrial import factor (Cyc2) [Aspergillus fumigatus Af293] gi|66845207|gb|EAL85542.1| cytochrome c mitochondrial import factor (Cyc2), [Aspergillus c
  misc_feature (19)..(402): NCBI GI: 119467800 Blast Desc: cytochrome c mitochondrial import factor (Cyc2), [Neosartorya fischeri NRRL 181] gi|119405858|gb|EAW15809.1| cytochrome c mitochondrial import factor (Cyc2), [Neosartorya
  misc_feature (35)..(402): NCBI GI: 67540700 Blast Desc: AN6520.2 [Aspergillus nidulans FGSC A4] gi|40738670|gb|EAA57860.1| AN6520.2 [Aspergillus nidulans FGSC A4]
  misc_feature (3)..(242): SWISSPROT Homolog: EC 1.6.2.2 Cytochrome-b5 reductase
MFLVMIVIGCFGSFFVKRWLEDGEGEGDDVMNTERFKGFRVVAREQVSQSAFIITLRPSGVVRSPAGERGTREEKGDGEEGWTSKRVRDAWRHGMWSVEVKQPQLQIARHYTPLPPVVQDGDGSEGSENSGKERDLRFLVRKMDGGEMSSYLSRQKVGDEIWLRGPWLGFDVPRRLGIHDPEAERPCERNVVFLAGGTGVAPALQIAHKLLDDSDTEGMKSKPKVQILWANRYAADALGREKERTTSWFGGGATKIKPQLELEKESTLAKQIRDLKRRHGENFSIEYFADEEGRFITPGDVEKACRTTSGIRSGIDKSCTWHSRAAVRNLPDDKDTERADSVCKCTSPGVNLLCVSGPDGFIQAYAGAKRWYKGNEMQGAVGGAVGRLLEGKGMEDWVVLKL

SEQ ID NO: 36225 - DNA, 1830 bp, Muscodor strobelii
  misc_feature: SGI EST ID NO. CUFF.86191.0
  misc_feature: Variant of the nucleotide sequence at SEQ ID NO 36223
cagctcttcgtcgcatcacccaaatttcatgcatcttgtcacttacacatcacttcacttcatctcatcacaaaccgcaacagatctcgcgcatcgagccgcaaagagtatatctcgatgcatacgaatgcgacgagatggctcaaccacacgggctcggcattacggggcgtcaagccgataagacaggattgtctccgatcgttttcaagggcttcaagggctttgcgaccggcatcgagatattactaccctcactgccccgtctcaagacgtgcgctttctacttcgactatactaggaaaagctgatcctaaaccggaaaatgaatcggcatgggaaaatcagaaatattcgctggacaccaagcgcgctgaggagatactgagagataagcggatccatgtcttccacgactcgaagacacgtaagaggatgttcctcgtgatgatcgtcattgggtgctttggctcgttcttcgtcaagaggtggctggaggatggagaaggggaaggggatgatgttatgaatacggagaggtttaagggttttagggttgtggcgagggaacaggtttcgcagagtgcttttattattacgctgcgtcctagcggtgtggttagaagtcctgcaggagagagaggtacaagagaggagaagggggatggggaagagggatggacgtcgaagagagtgagagatgcgtggcgtcatgggatgtggagtgttgaggttaaacagccgcagttgcagattgctaggcattatacgcctttgccgcctgtggttcaagatggtgatggaagcgaggggagcgaaaatagtggaaaggagagggacttgagatttttggtcaggaagatggatggtggggagatgtcgagttatctctcgagacaaaaagtcggagatgagatttggttgagggggccgtggttggggttcgatgtccccagaagattgggtatccacgatccagaggcggaaagaccgtgtgagagaaatgtcgtcttcctggctggtggtacgggtgtggcgcctgcgttgcagatcgcgcataaactcctcgacgattccgacactgaggggatgaagagcaagccaaaggtccaaatcttgtgggcgaaccgatatgctgctgatgcgcttggacgcgagaaagagaggactacgagttggtttggaggcggagcgacgaaaataaaaccgcaactagaacttgagaaggaatcaacgcttgcgaagcagataagggatctgaaaagacgacatggggagaacttcagcatcgagtatttcgctgatgaagaggggagattcatcactcctggggatgtcgaaaaagcatgtcgcacgacatccggcatacggagcggcatcgacaagtcgtgtacatggcattccagagctgcggtgcgcaatctgccggatgataaggatacagaacgggctgattcggtctgtaaatgtacatctcccggtgtgaatttgctgtgtgtttcggggcctgatgggttcatacaagcgtatgctggcgcgaagagatggtataaagggaatgagatgcaaggcgctgttggaggcgctgttggaaggttgttagaagggaagggcatggaggattgggtggttttgaagttgtaggatagagaggctgggatgtacgatttgtgagatagtgtgaaagactgaagacttgtatatagacagcataaagtggcgcatcaccaattcaaactgtatctcggctactgtctgtactgtatatcacctattgtaagcgagaggaggatcggatgcgcatgcacttcgtacgcatttcgagtcaag

SEQ ID NO: 36226 - DNA, 5211 bp, Muscodor strobelii
  misc_feature: SGI cDNA ID NO. 572555
  misc_feature: Encodes the peptide sequence at SEQ ID NO 36227
atgtctaccgacaagtcgaggcaatcgtcgagcggcaagagcttcttctcccgaagcaagcacaagagcgacaagcgccacaccgggagcgaggaggggcgcttcctcaacccagattacgagccttcgattcgctcctctcgccacgcccgagagtcgtccattgcctccgtcgacaggcccagttcccccgagtcgggcatcaacaacaacgctgcaggtgtgcttcattccgttccctataaccacacacacgacgaccggagcccgatcgtcgtggactatctcccccggccggaccagctccccgtccgccgcgaccctctcccccaccaactaaacaaagcctctacagactaccacaactatcccgctgtcgatgccaacggcttcgctgcagcgcctggatcccacatctctggcccccgcccccctcccggatcgggcaacgtcaccatggcctccaccggccgccagacgcagctgcagcaatgggggccctctccaaatccacctaacaagagtagcgtagggatgaacgtggcattcaacgaaagatgggattcactgcccggatgggggcagccaggctatggcaggacttcgcggcagagtgaccagtccagcgtcttctcaggtaacggccaacctccagactcgttcggcaccaagcgctcatccaagatagccctcccgagcgccacttcgcagagctcgatcacctctagtagagactcgcacagattgacgaagctgccgactgcctcgcagcttaacccaaacccaagtggcccggatggcttctcctttacccgcccggatgatgaccgagtgaccgaacagatgttctacgagctgatgcagaaacgcggctggcacaacttgcccgagcaagctagaaggcagatgatggcatatcctcccgcgaagaaatggacactaatccaccaggaccgcctgactgaatggcaaggtgaacagaaacggaggcagtctgcgcggcctggcccttcatcgtccgctctcgatatcgtcaccaattccgacgaagagggcgcgccggagtggtacgtacggaagttgatggacaacagcttggactcgaaaggattgggaagtttggaagtcaatcttcggacgcaacagatcggttgggtgaggcggttcatcgattgccaaggacaggtggccctcaccaacgttttgcttaagatcaacagaaagacagccatagggccagccgcgcctcaagatgccagatccagcgacagaaatctggataaggaacatgatatcatcaagtgtctgaaggcattgctcaacaacaaatacggggccgacgatgcgctggctcaccaacaggtcgtggtcgctctagccacatcactcatatcctcgcggttgacgacccgcaagcttgtcagcgatgttctgaccttcctctgccactgggaagacggaaacggccatctcaaggtgatccagggcatggactatgtcaagacgcaacagaatgaaaatggccgcttcgatgcatggatgcgcttggtcgaagtcactgtcgacggacgaggaaagatgggcagcctggtgggagccagtgacgaggtcagaagcggcggtattggcatggaaaatcttttgatggaatacgccgttgcgacactgatcttgatcaacatgatcatcgacgcgccggagggagacctccagctgcggatgcatatcagagcccaatttggtgcttgtggtatcaaacgtatactcacgaagatggaagcgttccagtacgatccaatagacagacaaatcgagaggttccgcacgaatgaggccattgactatgaggacatgctggaaagagagaatagtagtatcaaggacaatgtggaaggagaggtcaaagatttgaccgacccaacacaaattgttgatgctatccagcagcgtcttcagggcaccaagacccaggattatttcgtgtccgctcttcagcacttgcttctcataagagagaacgatggagaggagcgactgcgcatgtttcaacttgtcgatgcaatgctcagctatgtggctatggataggcggctacctaatttggatctcaagcagagtctcaattttactgtccagaatctccttgataagctacatacagattccgaagcacgacaggctcaagatgaggctttggaagcccgtcaaatcgccgaagccgccatggcagaacgggatgagatgagagcaagggtcgaacttggtgctgatggacttgtagccaggcaacaaaggcaactggaggagcagcaacgcttcattgacgctcaaagacgacaggctgatggactaaaagctgagatcgagaatatgcagacggttcgcgctaaggaagcccagcgctatgaactcgagactagggagctttacttgatgctgagagatgcgcaggatgtcgccgcttcgcaagctgcaaagggcagtgcgagtggaaaggtgtccgaggaagaccagtctcgtatgcaaggaatcctcgatcgcgagaggcttatggatcggcttgctatgcagctagaacggcagaagacgcagtataagcttgagggtcgcgtctggggcgaagctgctggtccgtccgaccgtcttcgtgctcttcgtgaagaaatggatggttacgaagactcttatcccgatgcaccagaaggatccggtttaccaccgcctggcatgtctagtggtatgctgggctctgttaaacggaataccaagataccgaggaaaccaattggctcttcgggcgatgctcaggccagtgccgagtcgctagacgatatcaatggtgacgatgaaaccgtctacgagaagccgagagtcgtggagattagaagacccgtcatggaccctagacaggctagcaatctcatgaatgaaatccgctcgaaaggtaagaaggacgatattagcgattctgaggaaggcgatggagcaactagtgggccttcacacccgagcatggagtctcaatctcccattactccaggtgaatacgatacacctaagattcagatcaatgatggtgctgcgccgccaccgccgccaccacctccgcccccgatgcctgggcagctacccggagctgcacccccaccccctccacctccacctccacctccgccaatgccgggacaattgcccggcgctgcaccacctccgccgcctccgcctccaccaccaggaatgctcatgggtggtcctcccccgccgccgcctccacctccgcctggcggtcttggtggcatgccccctccaccgccacccccaatgccaggtgctatatctggacatttcctatctgctcagagcaacttaggcaccgcgccgaccagtatgatcgggctacctgctttcaggtctaagaagaaactcaaggctctccattgggagaaagtggacgcaccagagaccagtcattgggccgctcacgctccttcagcagaagccagagaagaaaagtaccttgagctcagcaataagggaattctcgacgaagtcgagaaattgtttatggcaaaagaaatcaagaaactcgggggtggaaactccaagaaggatgataagaagcaaatcatttcttcagatctccggaaagcatatgaaattgcattcgccaagttctcacaacattctgttgagaaggttgttcaaatgatcatccactgcgataaggaggtgctcgataatacggtcgtgatggatttcctgcaaaaagacgatctttgcaacatccctgataatacatcgaaagctatggctccatacagcaaagactggactggacctcaggccaacaccgagactcgtgaatcagatccgacagagctgacccgacaagatcaaatctatcttcatactgctttcgaattacaccactattggaagagcagaatgcgagcattggcacttacaagaagctttgagacagactacgatgaaatctttgagaagatgcaccaagttgtcaacgtgtcagaagccctgcgcgactcggtatctctgatgaatgtacttggacttattcttgacattggaaactatatgaacgacgccaataagcaggcccgtggcttcaaactcagctctctcgctcgtctgggaatggtcaaagacgacaagaatgagtcaacactggctgatctggtcgagcgcattgtccgaaaccagtatccagagtgggaagggttcgccaccgatatccaatttgtcatttccgcgcaaaaaattaacattgagcaactccaaactgatgccaagaaatacatggacaatattcgaaatatccagatgtctctggacagcggaaacctcagcgaccctaagaagttccatccccaggatcgcgtcgctcagattgtgcagcgttgcatgaaggaagccaggcggaaagccgaacaaatggagctttatctcgaagagatgatgcgtacttacaaggatatcatggtcttctacggagaagaccccacagatgataatgctcggcgtgactttttcgccaaactggccacctttcttcaagaatggaagaagagtcgcgagaagaatatcctatacgaggagacaagacgcagaaacgaggctagtatgaagcggaagcatccgcaactcaagttgacgggtaccgcagagggtgctccaccctcaccctcttccgccggtgcaatggattccttgatcgagaaactacgtgccgctgcgccacaggccagagaccagcgagaacgaaggaagcgacttcgtctcaaggatcgacatcaagtacgcatcgcgtctggccagaaaataccggatctcactgagatacccgaggcagaagctggacttcatgccgaagggagtgccggaactgccgacgcgatggatgtggatggcaatgctcctgtgccgccggcagagtctctacctaagactgaggatgaacgggtggcccagagagctgccctcttgctacagtccatgaggagtggtgatggcaatgacgatggcgatgcagaacagcggcagagtctcaggaaatcagcagccgaggagaggcttgctcggcggcgtcgtgtcaagggagcatcgatggctagcacgagcacgactggcgataccgatgagaataaaacaccgaccattgaagaacatccagccacggtagcggaagaatag

SEQ ID NO: 36227 - protein, 1736 aa, Muscodor strobelii
  misc_feature: SGI Peptide ID NO. 572555
  misc_feature (511)..(716): Pfam Id: PF06367 Pfam Desc: Diaphanous FH3 Domain
  misc_feature (270)..(484): Pfam Id: PF06371 Pfam Desc: Diaphanous GTPase-binding Domain
  misc_feature (1133)..(1528): Pfam Id: PF02181 Pfam Desc: Formin Homology 2 Domain
  misc_feature (2)..(1025): NCBI GI: 116199253 Blast Desc: CHGG_07782 [Chaetomium globosum CBS 148.51] gi|88179061|gb|EAQ86529.1| CHGG_07782 [Chaetomium globosum CBS 148.51]
  misc_feature (2)..(1025): NCBI GI: 226407481 Blast Desc: SepA/Bni1 [Epichloe festucae]
  misc_feature (2)..(1023): NCBI GI: 145607193 Blast Desc: MGG_04061 [Magnaporthe grisea 70-15] gi|145014788|gb|EDJ99356.1| MGG_04061 [Magnaporthe grisea 70-15]
  misc_feature (9)..(1020): NCBI GI: 154300825 Blast Desc: BC1G_10712 [Botryotinia fuckeliana B05.10] gi|150856460|gb|EDN31652.1| BC1G_10712 [Botryotinia fuckeliana B05.10]
  misc_feature (1219)..(1684): NCBI GI: 154300825 Blast Desc: BC1G_10712 [Botryotinia fuckeliana B05.10] gi|150856460|gb|EDN31652.1| BC1G_10712 [Botryotinia fuckeliana B05.10]
  misc_feature (20)..(964): NCBI GI: 156048508 Blast Desc: SS1G_08985 [Sclerotinia sclerotiorum 1980] gi|154693382|gb|EDN93120.1| SS1G_08985 [Sclerotinia sclerotiorum 1980]
  misc_feature (4)..(1022): NCBI GI: 145250129 Blast Desc: An15g00390 [Aspergillus niger] gi|134082091|emb|CAK42208.1| protein product [Aspergillus niger]
  misc_feature (2)..(1025): NCBI GI: 238494024 Blast Desc: cytokinesis protein SepA [Aspergillus flavus NRRL3357] gi|220694898|gb|EED51241.1| cytokinesis protein SepA [Aspergillus flavus NRRL3357]
  misc_feature (2)..(992): NCBI GI: 15214279 Blast Desc: SEPA_EMENI RecName: Full=Cytokinesis protein sepA; AltName: Full=Forced expression inhibition of growth A; AltName: Full=Protein FH1/2 gi|13447468|gb|AAB63335.3| FH1/FH2 protein
  misc_feature (2)..(1025): NCBI GI: 169776945 Blast Desc: [Aspergillus oryzae RIB40] gi|83771675|dbj|BAE61805.1| protein product [Aspergillus oryzae]
MSTDKSRQSSSGKSFFSRSKHKSDKRHTGSEEGRFLNPDYEPSIRSSRHARESSIASVDRPSSPESGINNNAAGVLHSVPYNHTHDDRSPIVVDYLPRPDQLPVRRDPLPHQLNKASTDYHNYPAVDANGFAAAPGSHISGPRPPPGSGNVTMASTGRQTQLQQWGPSPNPPNKSSVGMNVAFNERWDSLPGWGQPGYGRTSRQSDQSSVFSGNGQPPDSFGTKRSSKIALPSATSQSSITSSRDSHRLTKLPTASQLNPNPSGPDGFSFTRPDDDRVTEQMFYELMQKRGWHNLPEQARRQMMAYPPAKKWTLIHQDRLTEWQGEQKRRQSARPGPSSSALDIVTNSDEEGAPEWYVRKLMDNSLDSKGLGSLEVNLRTQQIGWVRRFIDCQGQVALTNVLLKINRKTAIGPAAPQDARSSDRNLDKEHDIIKCLKALLNNKYGADDALAHQQVVVALATSLISSRLTTRKLVSDVLTFLCHWEDGNGHLKVIQGMDYVKTQQNENGRFDAWMRLVEVTVDGRGKMGSLVGASDEVRSGGIGMENLLMEYAVATLILINMIIDAPEGDLQLRMHIRAQFGACGIKRILTKMEAFQYDPIDRQIERFRTNEAIDYEDMLERENSSIKDNVEGEVKDLTDPTQIVDAIQQRLQGTKTQDYFVSALQHLLLIRENDGEERLRMFQLVDAMLSYVAMDRRLPNLDLKQSLNFTVQNLLDKLHTDSEARQAQDEALEARQIAEAAMAERDEMRARVELGADGLVARQQRQLEEQQRFIDAQRRQADGLKAEIENMQTVRAKEAQRYELETRELYLMLRDAQDVAASQAAKGSASGKVSEEDQSRMQGILDRERLMDRLAMQLERQKTQYKLEGRVWGEAAGPSDRLRALREEMDGYEDSYPDAPEGSGLPPPGMSSGMLGSVKRNTKIPRKPIGSSGDAQASAESLDDINGDDETVYEKPRVVEIRRPVMDPRQASNLMNEIRSKGKKDDISDSEEGDGATSGPSHPSMESQSPITPGEYDTPKIQINDGAAPPPPPPPPPPMPGQLPGAAPPPPPPPPPPPPMPGQLPGAAPPPPPPPPPPGMLMGGPPPPPPPPPPGGLGGMPPPPPPPMPGAISGHFLSAQSNLGTAPTSMIGLPAFRSKKKLKALHWEKVDAPETSHWAAHAPSAEAREEKYLELSNKGILDEVEKLFMAKEIKKLGGGNSKKDDKKQIISSDLRKAYEIAFAKFSQHSVEKVVQMIIHCDKEVLDNTVVMDFLQKDDLCNIPDNTSKAMAPYSKDWTGPQANTETRESDPTELTRQDQIYLHTAFELHHYWKSRMRALALTRSFETDYDEIFEKMHQVVNVSEALRDSVSLMNVLGLILDIGNYMNDANKQARGFKLSSLARLGMVKDDKNESTLADLVERIVRNQYPEWEGFATDIQFVISAQKINIEQLQTDAKKYMDNIRNIQMSLDSGNLSDPKKFHPQDRVAQIVQRCMKEARRKAEQMELYLEEMMRTYKDIMVFYGEDPTDDNARRDFFAKLATFLQEWKKSREKNILYEETRRRNEASMKRKHPQLKLTGTAEGAPPSPSSAGAMDSLIEKLRAAAPQARDQRERRKRLRLKDRHQVRIASGQKIPDLTEIPEAEAGLHAEGSAGTADAMDVDGNAPVPPAESLPKTEDERVAQRAALLLQSMRSGDGNDDGDAEQRQSLRKSAAEERLARRRRVKGASMASTSTTGDTDENKTPTIEEHPATVAEE

SEQ ID NO: 36228 - DNA, 5936 bp, Muscodor strobelii
  misc_feature: SGI EST ID NO. CUFF.86213.1
  misc_feature: Variant of the nucleotide sequence at SEQ ID NO 36226
gtcgctgtttgctgtgactggctaccgtgttgcaacttgctgcggcatcttcttttttctttggcgacgttctcctgtgaatgtggtgacagtatctgtcacattgagcctcctttgagtgtctctgcccctgtcgtcacttgacagctcaccgatctgtggtagagcatcaatcgcgaatagcccaccactccttgggtcgtatataccagtccctccctttcccatatccacacgtatatcggtcggtttccaaatcgcttcggccctcgctttgcccgtttcgaaaccaacatacggcattctctggacagcctcgatggtgccggtcatttgaacatcttgaaaagcgaggccttgcatcactcactgccctggccgacctgctgccgacctgcacgttttatatgtacagactcttcgtttcatcccatcgccctcacacgcatacacccgacaaatcttccaactgcctctcgctcgctaagcggccatgatgttgcgcgccttgcgctccgaaccgccaatccactgacgacgcttctcctattccgagtcgaatcctgacgacaatccccctcatcactccaaatccgcattgagcacatcgcgggtcgggtaaagccacccaacgacggagatctgggcccgggtgtttcagcgcccagcccgaaccgcaaccgcgaagacatgtctaccgacaagtcgaggcaatcgtcgagcggcaagagcttcttctcccgaagcaagcacaagagcgacaagcgccacaccgggagcgaggaggggcgcttcctcaacccagattacgagccttcgattcgctcctctcgccacgcccgagagtcgtccattgcctccgtcgacaggcccagttcccccgagtcgggcatcaacaacaacgctgcagactaccacaactatcccgctgtcgatgccaacggcttcgctgcagcgcctggatcccacatctctggcccccgcccccctcccggatcgggcaacgtcaccatggcctccaccggccgccagacgcagctgcagcaatgggggccctctccaaatccacctaacaagagtagcgtagggatgaacgtggcattcaacgaaagatgggattcactgcccggatgggggcagccaggctatggcaggacttcgcggcagagtgaccagtccagcgtcttctcagccctcccgagcgccacttcgcagagctcgatcacctctagtagagactcgcacagattgacgaagctgccgactgcctcgcagcttaacccaaacccaagtggcccggatggcttctcctttacccgcccggatgatgaccgagtgaccgaacagatgttctacgagctgatgcagaaacgcggctggcacaacttgcccgagcaagctagaaggcagatgatggcatatcctcccgcgaagaaatggacactaatccaccaggaccgcctgactgaatggcaaggtgaacagaaacggaggcagtctgcgcggcctggcccttcatcgtccgctctcgatatcgtcaccaattccgacgaagagggcgcgccggagtggtacgtacggaagttgatggacaacagcttggactcgaaaggattgggaagtttggaagtcaatcttcggacgcaacagatcggttgggtgaggcggttcatcgattgccaaggacaggtggccctcaccaacgttttgcttaagatcaacagaaagacagccatagggccagccgcgcctcaagatgccagatccagcgacagaaatctggataaggaacatgatatcatcaagtgtctgaaggcattgctcaacaacaaatacggggccgacgatgcgctggctcaccaacaggtcgtggtcgctctagccacatcactcatatcctcgcggttgacgacccgcaagcttgtcagcgatgttctgaccttcctctgccactgggaagacggaaacggccatctcaaggtgatccagggcatggactatgtcaagacgcaacagaatgaaaatggccgcttcgatgcatggatgcgcttggtcgaagtcactgtcgacggacgaggaaagatgggcagcctggtgggagccagtgacgaggtcagaagcggcggtattggcatggaaaatcttttgatggaatacgccgttgcgacactgatcttgatcaacatgatcatcgacgcgccggagggagacctccagctgcggatgcatatcagagcccaatttggtgcttgtggtatcaaacgtatactcacgaagatggaagcgttccagtacgatccaatagacagacaaatcgagaggttccgcacgaatgaggccattgactatgaggacatgctggaaagagagaatagtagtatcaaggacaatgtggaaggagaggtcaaagatttgaccgacccaacacaaattgttgatgctatccagcagcgtcttcagggcaccaagacccaggattatttcgtgtccgctcttcagcacttgcttctcataagagagaacgatggagaggagcgactgcgcatgtttcaacttgtcgatgcaatgctcagctatgtggctatggataggcggctacctaatttggatctcaagcagagtctcaattttactgtccagaatctccttgataagctacatacagattccgaagcacgacaggctcaagatgaggctttggaagcccgtcaaatcgccgaagccgccatggcagaacgggatgagatgagagcaagggtcgaacttggtgctgatggacttgtagccaggcaacaaaggcaactggaggagcagcaacgcttcattgacgctcaaagacgacaggctgatggactaaaagctgagatcgagaatatgcagacggttcgcgctaaggaagcccagcgctatgaactcgagactagggagctttacttgatgctgagagatgcgcaggatgtcgccgcttcgcaagctgcaaagggcagtgcgagtggaaaggtgtccgaggaagaccagtctcgtatgcaaggaatcctcgatcgcgagaggcttatggatcggcttgctatgcagctagaacggcagaagacgcagtataagcttgagggtcgcgtctggggcgaagctgctggtccgtccgaccgtcttcgtgctcttcgtgaagaaatggatggttacgaagactcttatcccgatgcaccagaaggatccggtttaccaccgcctggcatgtctagtggtatgctgggctctgttaaacggaataccaagataccgaggaaaccaattggctcttcgggcgatgctcaggccagtgccgagtcgctagacgatatcaatggtgacgatgaaaccgtctacgagaagccgagagtcgtggagattagaagacccgtcatggaccctagacaggctagcaatctcatgaatgaaatccgctcgaaaggtaagaaggacgatattagcgattctgaggaaggcgatggagcaactagtgggccttcacacccgagcatggagtctcaatctcccattactccaggtgaatacgatacacctaagattcagatcaatgatggtgctgcgccgccaccgccgccaccacctccgcccccgatgcctgggcagctacccggagctgcacccccaccccctccacctccacctccacctccgccaatgccgggacaattgcccggcgctgcaccacctccgccgcctccgcctccaccaccaggaatgctcatgggtggtcctcccccgccgccgcctccacctccgcctggcggtcttggtggcatgccccctccaccgccacccccaatgccaggtgctatatctggacatttcctatctgctcagagcaacttaggcaccgcgccgaccagtatgatcgggctacctgctttcaggtctaagaagaaactcaaggctctccattgggagaaagtggacgcaccagagaccagtcattgggccgctcacgctccttcagcagaagccagagaagaaaagtaccttgagctcagcaataagggaattctcgacgaagtcgagaaattgtttatggcaaaagaaatcaagaaactcgggggtggaaactccaagaaggatgataagaagcaaatcatttcttcagatctccggaaagcatatgaaattgcattcgccaagttctcacaacattctgttgagaaggttgttcaaatgatcatccactgcgataaggaggtgctcgataatacggtcgtgatggatttcctgcaaaaagacgatctttgcaacatccctgataatacatcgaaagctatggctccatacagcaaagactggactggacctcaggccaacaccgagactcgtgaatcagatccgacagagctgacccgacaagatcaaatctatcttcatactgctttcgaattacaccactattggaagagcagaatgcgagcattggcacttacaagaagctttgagacagactacgatgaaatctttgagaagatgcaccaagttgtcaacgtgtcagaagccctgcgcgactcggtatctctgatgaatgtacttggacttattcttgacattggaaactatatgaacgacgccaataagcaggcccgtggcttcaaactcagctctctcgctcgtctgggaatggtcaaagacgacaagaatgagtcaacactggctgatctggtcgagcgcattgtccgaaaccagtatccagagtgggaagggttcgccaccgatatccaatttgtcatttccgcgcaaaaaattaacattgagcaactccaaactgatgccaagaaatacatggacaatattcgaaatatccagatgtctctggacagcggaaacctcagcgaccctaagaagttccatccccaggatcgcgtcgctcagattgtgcagcgttgcatgaaggaagccaggcggaaagccgaacaaatggagctttatctcgaagagatgatgcgtacttacaaggatatcatggtcttctacggagaagaccccacagatgataatgctcggcgtgactttttcgccaaactggccacctttcttcaagaatggaagaagagtcgcgagaagaatatcctatacgaggagacaagacgcagaaacgaggctagtatgaagcggaagcatccgcaactcaagttgacgggtaccgcagagggtgctccaccctcaccctcttccgccggtgcaatggattccttgatcgagaaactacgtgccgctgcgccacaggccagagaccagcgagaacgaaggaagcgacttcgtctcaaggatcgacatcaagtacgcatcgcgtctggccagaaaataccggatctcactgagatacccgaggcagaagctggacttcatgccgaagggagtgccggaactgccgacgcgatggatgtggatggcaatgctcctgtgccgccggcagagtctctacctaagactgaggatgaacgggtggcccagagagctgccctcttgctacagtccatgaggagtggtgatggcaatgacgatggcgatgcagaacagcggcagagtctcaggaaatcagcagccgaggagaggcttgctcggcggcgtcgtgtcaagggagcatcgatggctagcacgagcacgactggcgataccgatgagaataaaacaccgaccattgaagaacatccagccacggtagcggaagaataggatggatgtcatagtagagacgggaacctcagtgttccacttgcattatacccacccactttccaagtacataccatatataatgtctagaacaaacaatgttagtttctcctcccaacggggagttgtggaagggcactcatggaaggagttggttgacgtatgcatctacatggaataggtacaaacaaaggaaatgagagatgttctgagaaagtttc

SEQ ID NO: 36229 - DNA, 453 bp, Muscodor strobelii
  misc_feature: SGI cDNA ID NO. 572556
  misc_feature: Encodes the peptide sequence at SEQ ID NO 36230
atgggggccacaatctccgtgatcaagacattgctcatccccgccatcatctctctcgtcctcttcctcgtctcgacatatctcatcttccccttatatcagcattatagaaatcgctacagccaatacctaccgctcgactcattatcgagccgcactacgtcgcttcgcatacgaatacaagatacgattgcgcagtggatagtaccgtcgagatggaggatagggtctcgtgatcgagtcgtagtcgctggtgacaatgaatcagacataggtttcggctcagaggacggcgaagagctcaacgaggtcgacgaagaccgccgacatgccctctcgctagacacccaccatcagcaatcccatagcgatcgaagactgagcagagatctagaggagggctttcgcgatgactccgaagaggaggccgatactcaggcgagaggacgatag

SEQ ID NO: 36230 - protein, 150 aa, Muscodor strobelii
  misc_feature: SGI Peptide ID NO. 572556
  misc_feature (1)..(135): NCBI GI: 145607191 Blast Desc: MGG_12139 [Magnaporthe grisea 70-15] gi|145014787|gb|EDJ99355.1| MGG_12139 [Magnaporthe grisea 70-15]
  misc_feature (1)..(130): NCBI GI: 85077232 Blast Desc: NCU01432 [Neurospora crassa OR74A] gi|28917031|gb|EAA26756.1| [Neurospora crassa OR74A] gi|28950343|emb|CAD70967.1| [Neurospora crassa]
  misc_feature (1)..(149): NCBI GI: 46121673 Blast Desc: FG05215.1 [Gibberella zeae PH-1]
  misc_feature (3)..(142): NCBI GI: 261351553 Blast Desc: conserved [Verticillium albo-atrum VaMs.102]
  misc_feature (1)..(148): NCBI GI: 156048510 Blast Desc: SS1G_08986 [Sclerotinia sclerotiorum 1980] gi|154693383|gb|EDN93121.1| SS1G_08986 [Sclerotinia sclerotiorum 1980]
  misc_feature (9)..(130): NCBI GI: 171692785 Blast Desc: protein product [Podospora anserina] gi|170946341|emb|CAP73142.1| protein product [Podospora anserina]
  misc_feature (1)..(150): NCBI GI: 121703580 Blast Desc: conserved [Aspergillus clavatus NRRL 1] gi|119398198|gb|EAW08628.1| conserved [Aspergillus clavatus NRRL 1]
  misc_feature (1)..(142): NCBI GI: 238842951 Blast Desc: conserved [Microsporum canis CBS 113480]
  misc_feature (1)..(146): NCBI GI: 258569577 Blast Desc: conserved [Uncinocarpus reesii 1704] gi|237903862|gb|EEP78263.1| conserved [Uncinocarpus reesii 1704]
  misc_feature (1)..(135): NCBI GI: 239613198 Blast Desc: conserved [Ajellomyces dermatitidis ER-3]
MGATISVIKTLLIPAIISLVLFLVSTYLIFPLYQHYRNRYSQYLPLDSLSSRTTSLRIRIQDTIAQWIVPSRWRIGSRDRVVVAGDNESDIGFGSEDGEELNEVDEDRRHALSLDTHHQQSHSDRRLSRDLEEGFRDDSEEEADTQARGR

SEQ ID NO: 36231 - DNA, 1573 bp, Muscodor strobelii
  misc_feature: SGI EST ID NO. CUFF.86398.2
  misc_feature: Variant of the nucleotide sequence at SEQ ID NO 36229
ccgtaatcacaccttaatcagcacaaccagagacatataagcatccagagtatcagcgtcgttgacactccgcagccggctggaatcaacagattaatacaacgaccgactatcacggtgacggtgttctagctggaaagcattggctagagtcgtcctacgccgagctagccgaccccaaacgccaaagcgacatcgacaaggctccgtaccaccaacacacaactcgctctgctcgctctcccctcgtcacataccagagttatagaaataagcacaactgtagagctcgccctacatcgcaatccaagggcgcagctgtgagcaacaatcccaaggcaatcctcttgggctagaccatccctactgcaacgagaataaactccccaagatgggggccacaatctccgtgatcaagacattgctcatccccgccatcatctctctcgtcctcttcctcgtctcgacatatctcatcttccccttatatcagcattatagaaatcgctacagccaatacctaccgctcgactcattatcgagccgcactacgtcgcttcgcatacgaatacaagatacgattgcgcagtggatagtaccgtcgagatggaggatagggtctcgtgatcgagtcgtagtcgctggtgacaatgaatcagacataggtttcggctcagaggacggcgaagagctcaacgaggtcgacgaagaccgccgacatgccctctcgctagacacccaccatcagcaatcccatagcgatcgaagactgagcagagactgaccaagcttgacaagtctagaggagggctttcgcgatgactccgaagaggaggccgatactcaggcgagaggacgatagagagagcatatagcctttttacgatgagcgcgcatccattcctgatttacatcatatgtcatttattaccaaaggcagcatattcccttccatctgatttgcttttttaagcgcatcctagaaaaatcttttacagactataatcagaacattcgtataacgccacttcgcgtcgattttgtggtcccaaacaatttgtgcccatcaaggtatacatgaacatggtggtttgtttactttggctttcaggaggggcttcgtatctgctaagtgtagcacatgcgttcgtcaaactgcgaggcggaatgttgagtattctgatcgcaaaccccgagcatgtggcaatgtcacaatagtcttgacttcatgatacctgggtattgttgggcggagagtatcaggcacaaagtaagattgaaaagcaaaaatgaagccgtctaatgcgaatatttgtgaacaatgaaatcgaaaatttagcactaatgtgtttcgctgacttgcttagtcaagaaggacggattcaattgtgatgctatatacggaaaatcccgtggctaccgcgacatgggaaagtagatgccgatagttgtggccagggtctctggaatttgcagatctgcaaacgtccaacagcacagacccggccaagcctaaaaggtatgccagacgtgcaacccgacgagaacaataagcctatggacaagcctaacg

SEQ ID NO: 36232 - DNA, 912 bp, Muscodor strobelii
  misc_feature: SGI cDNA ID NO. 572557
  misc_feature: Elevated expression when VOC is produced
  misc_feature: Encodes the peptide sequence at SEQ ID NO 36233
atgccttcaataaggataccgaagccgagccttgggttcgtcaaaaggcttctatctcacaagaatggtcaccaggttacatcgaattctgctacggagttcgtatccggcaagactaaaggcaagaagcccgaagtcccacttgaggagtgtcctatctgccacgatccagtcggcgttccaaatccagagggcgttcaagaatcatgggtgacgctgcattgccaacacaagttcggcacgaattgcatccaagcctggttggaggaatccgcggagaacgatcaccactcgagcccgacatgcccaatgtgccgcactaccgcaagacatgcctgtggtcatccggttgcgacacccgtcagcgcacaattcacagtttggttaccacatccaaacccatcgcctccgcctcgccgagcgcgggtccgacgtcgtctgtcgcgttcgcacagggcaggacaagtccaccacgctgcgcactctcatccccgccctcaggtgcagattgtaggccaatgcaccgtttgcaaagccgccgccctggcgaaggcccaggcggagaagtctatgaaggaagtgacaacgcctcaacctagcacgcccgtggagctcgaggcatcgacccctagccggcgcgctggtatcaagtctatgatcttcacgagatctagacggcagaactcaggagagtcatcgacatttacaccaatcttagcgccaaacccgcctaccttggtcattgcgaactcggataccacattcttgcctctcaccgctgctatacaatcggcaacaccccagagcagctcgtatgctggtggcaatccttgccgagtttcacagatgcctgtggtcggtctcccaagaatcgcaacgcccgtcccagagctcagacgatcaagcttttag

SEQ ID NO: 36233 - protein, 303 aa, Muscodor strobelii
  misc_feature: SGI Peptide ID NO. 572557
  misc_feature (51)..(105): Pfam Id: PF00097 Pfam Desc: Zinc finger, C3HC4 type (RING finger)
  misc_feature (42)..(117): NCBI GI: 171693685 Blast Desc: protein product [Podospora anserina] gi|170946791|emb|CAP73595.1| protein product [Podospora anserina]
  misc_feature (38)..(117): NCBI GI: 164426935 Blast Desc: NCU11262 [Neurospora crassa OR74A] gi|157071537|gb|EDO65260.1| conserved [Neurospora crassa OR74A]
  misc_feature (38)..(117): NCBI GI: 11595641 Blast Desc: [Neurospora crassa]
  misc_feature (46)..(117): NCBI GI: 116198253 Blast Desc: CHGG_07282 [Chaetomium globosum CBS 148.51] gi|88178561|gb|EAQ86029.1| CHGG_07282 [Chaetomium globosum CBS 148.51]
  misc_feature (50)..(126): NCBI GI: 261351552 Blast Desc: [Verticillium albo-atrum VaMs.102]
  misc_feature (51)..(106): NCBI GI: 145614458 Blast Desc: MGG_11362 [Magnaporthe grisea 70-15] gi|145021382|gb|EDK05511.1| MGG_11362 [Magnaporthe grisea 70-15]
  misc_feature (51)..(162): NCBI GI: 156049913 Blast Desc: SS1G_07542 [Sclerotinia sclerotiorum 1980] gi|154691944|gb|EDN91682.1| SS1G_07542 [Sclerotinia sclerotiorum 1980]
  misc_feature (51)..(107): NCBI GI: 171684757 Blast Desc: protein product [Podospora anserina] gi|170942339|emb|CAP67991.1| protein product [Podospora anserina]
  misc_feature (11)..(106): NCBI GI: 261355927 Blast Desc: conserved [Verticillium albo-atrum VaMs.102]
  misc_feature (33)..(106): NCBI GI: 154318088 Blast Desc: BC1G_03027 [Botryotinia fuckeliana B05.10] gi|150843685|gb|EDN18878.1| BC1G_03027 [Botryotinia fuckeliana B05.10]
  misc_feature: Useful for introducing or modulating the production of volatile compounds
MPSIRIPKPSLGFVKRLLSHKNGHQVTSNSATEFVSGKTKGKKPEVPLEECPICHDPVGVPNPEGVQESWVTLHCQHKFGTNCIQAWLEESAENDHHSSPTCPMCRTTARHACGHPVATPVSAQFTVWLPHPNPSPPPRRARVRRRLSRSHRAGQVHHAAHSHPRPQVQIVGQCTVCKAAALAKAQAEKSMKEVTTPQPSTPVELEASTPSRRAGIKSMIFTRSRRQNSGESSTFTPILAPNPPTLVIANSDTTFLPLTAAIQSATPQSSSYAGGNPCRVSQMPVVGLPRIATPVPELRRSSF

SEQ ID NO: 36234 - DNA, 4274 bp, Muscodor strobelii
  misc_feature: SGI EST ID NO. CUFF.86464.0
  misc_feature: Variant of the nucleotide sequence at SEQ ID NO 36232
cggcagggttatgtttccacatgccagcattccagcgtggccggacgaatccggtacatgataaggatgcatcgcgatacccctcttgcagctctcatggtggtgtgcagcggtgcttacacactcccacatgatgccatatggaccctttggacccccaagatgcgcaagatgcgagacaagtgaccgtaggactgtatctcgtcgatcagctatagcccgtgattagctggccgtcccctcgctcccaaaaagtgcacatgtctcaaggcagattcccttattagagacgtttgccggctagtcacgtctggtgcgggcttgttgtattcctttcctcccttgttttcatccttgggtcattattacatttgctttcgtgcctgaggtgtccaaaccaggtccaaggcgaagcttagccaagtctatttccggctcgtcgcctaggacatgatgcaaatgccacaggcggcaacctaaaagtaagcctctcgtgcaatcagagggaagacagcttgcggcctacccgaccgatcgagtcagtggctgcccccagcttgcagctcttccgtgtctgtgtttgattcagcccgacacttgactcaacaagcttggaggtttaagcatccgtcctatctttttcctcctcatccgatcgattcaatagctctgtggtgactggtagctccgcatcatcattactacacctattatcgagctttcgataaccccggatcattacaattcttgacagcattttacgtcgctgtgaagttgcgggtgttttcgacccagcagagtgcacaccataaggctaggccgttgccgacctttctagcagcagcccatgagctcagctccccctcaggcatccagctgttcagtgcaagcttatgtagatggtctactacccttaagcgctgctgtgcaacccgatcctttggttcctacgtctatcctgaccattcctctcacgatatttttatctatactctcgagatcattccgactccttcgacgagtctttgttttctttctcgtttttacagctagctatatctggtctccaacagcacttgcgctgctgaagtcaatcacaggcaccgagatgccttcaataaggataccgaagccgagccttgggttcgtcaaaaggcttctatctcacaagaatggtcaccaggttacatcgaattctgctacggagttcgtatccggcaagactaaaggcaagaagcccgaagtcccacttgaggagtgtcctatctgccacgatccagtcggcgttccaaatccagagggcgttcaagaatcatgggtgacgctgcattgccaacacaagttcggcacgaattgcatccaagcctggttggaggaatccgcggagaacgatcaccactcgagcccgacatgcccaatgtgccgcactaccgcaagacatgcctgtggtcatccggttgcgacacccgtcagcgcacaattcacagtttggttaccacatccaaacccatcgcctccgcctcgccgagcgcgggtccgacgtcgtctgtcgcgttcgcacagggcaggacaagtccaccacgctgcgcactctcatccccgccctcaggtgcagattgtaggccaatgcaccgtttgcaaagccgccgccctggcgaaggcccaggcggagaagtctatgaaggaagtgacaacgcctcaacctagcacgcccgtggagctcgaggcatcgacccctagccggcgcgctggtatcaagtctatgatcttcacgagatctagacggcagaactcaggagagtcatcgacatttacaccaatcttagcgccaaacccgcctaccttggtcattgcgaactcggataccacattcttgcctctcaccgctgctatacaatcggcaacaccccagagcagctcgtatgctggtggcaatccttgccgagtttcacagatgcctgtggtcggtctcccaagaatcgcaacgcccgtcccagagctcagacgatcaagcttttagggatcgcaaaatggactgggctcctgtcaagacgcaagtttctccagcgcacaatctgcgtttaatcatttatcacgttacgagctccaacggagaagcattgagatacacacatagtgtgtctatgatgcatacgatacggaactatatctagagggatctcgaattgctccgggatgatgggtggcttgttttggagttatggagtagggcatgagggacacatgcacatgaagacttgtacggggtacgaggcgatctggacaggggtgggtttcgttgcatcgctgggctttctactagatggcttggtctacagagtgggcttttctcaatagcttagggcgtagcgtaggtcacgaataccatgcggaattgatgaatgcgattcacaggcaagacagaaagcccagtgctgattcatgtatatgtgagatttcggcatcatgacgaggacgttgtgctgacgcggggtgagcggcatggtgagcggatcgttggaggggcaggagcttgctagcgcgggcactattccatctgacatgtggatccatatcggcgcagccaggcctagattgcccagctcactgccttttcagggcgtcgcccacactaccatcgatagactatgctcttgctatttggggttaattggctttgattgaccacgctgggacgcgcttccgtcgcgtctcctacaattctgcccctctatccatgtcatacctaccccaacattacacagagtacgagccgggtgtctacatgacgtcctgttatgggaacccagagtcaggatgaggttcaaatcaggactcaagaacgtacggacgttttcaagtacgctctgacccatagctgcatggcgaagcagtccaggctaacgtggggtaaactcgattagaacttgtggcggctctgtcgtcgctcgagaagatcgcctggctgcgcctcgacgacgagaccgtccgcttcaccgtcatcccggacacgggctcacaagtctgggcctctctatccgtcgacttcatcttcgacaactacacgctccaatccgccgagccacacaacaccatcaatctcgaacttcctctcgggcccttgcagcgagcccttaagtcagccacgcacgcgacatccgcttcattgcgcctgaccaagaagaatgacataccagtcttgtccatgacaataacgaccaacacggcacccgcaaacctacctaccggcgtagcacgcttcggtcaaaattcagccaaccgtccaggtagagtacagcccgacgaatacgatgatgaagacgacatatttaccgcagagcccctggagacaaacctacagcgcgagcgcgagaagatcatcacgcaggatatacccgtccgtgtcttacacccagagacagtggaaaccatcatgcagcccaaggtccgagagcccgatgtacatatccaactcccgccgctactccaactcaaagccatctcggaccggtacacgaagctcgccattgcggccggtgcctcgtcccggagccacacgagcgtaaaccccaaactagagctcagcgccaatatgcacggagatctacgcctgcgtctcgatactgataccctagacgtcgagtcgaaatgggacggtctagagaaccccgagctcgacccctcgcaacttaattgtgcgctggaagaccaccccagcactaaattcaagaacgagggcccgaataaatgggcgacggttagggtcgatgggaaggattggagtagggtgcttagtgtcggacgactggatgggagagtcattgcgtgttttgcggatgatcatgcgttgatcttgtatgtttatgtgccgcactatgatgatcctagtgcggacgattcggtcgttacttattatgtgtcttcttatagtttgtaagatcgcatgaagtgtcgtccaccggcatctagaagtggggactcaaggaatcatgtacatcattgctactatttgaggaagatgaggagaaaacttatgacttacgaagttacgagacacatgtcattgctaaatgaagcatcactgttcgcatttgccaggtacaccacatagaatatgcgccgagactacatcggcatagaggtgttagatcgaaaaataagttgctaatgaatagataggttacacttgtgttcgtctacggttgtgtaatcgattaggttcattttgccacgcttacacatgtgttacattacacaataaggcataatttgtg

SEQ ID NO: 36235 - DNA, 1056 bp, Muscodor strobelii
  misc_feature: SGI cDNA ID NO. 572558
  misc_feature: Encodes the peptide sequence at SEQ ID NO 36236
atgaggttcaaatcaggactcaagaacgtacggacgttttcaaaacttgtggcggctctgtcgtcgctcgagaagatcgcctggctgcgcctcgacgacgagaccgtccgcttcaccgtcatcccggacacgggctcacaagtctgggcctctctatccgtcgacttcatcttcgacaactacacgctccaatccgccgagccacacaacaccatcaatctcgaacttcctctcgggcccttgcagcgagcccttaagtcagccacgcacgcgacatccgcttcattgcgcctgaccaagaagaatgacataccagtcttgtccatgacaataacgaccaacacggcacccgcaaacctacctaccggcgtagcacgcttcggtcaaaattcagccaaccgtccaggtagagtacagcccgacgaatacgatgatgaagacgacatatttaccgcagagcccctggagacaaacctacagcgcgagcgcgagaagatcatcacgcaggatatacccgtccgtgtcttacacccagagacagtggaaaccatcatgcagcccaaggtccgagagcccgatgtacatatccaactcccgccgctactccaactcaaagccatctcggaccggtacacgaagctcgccattgcggccggtgcctcgtcccggagccacacgagcgtaaaccccaaactagagctcagcgccaatatgcacggagatctacgcctgcgtctcgatactgataccctagacgtcgagtcgaaatgggacggtctagagaaccccgagctcgacccctcgcaacttaattgtgcgctggaagaccaccccagcactaaattcaagaacgagggcccgaataaatgggcgacggttagggtcgatgggaaggattggagtagggtgcttagtgtcggacgactggatgggagagtcattgcgtgttttgcggatgatcatgcgttgatcttgtatgtttatgtgccgcactatgatgatcctagtgcggacgattcggtcgttacttattatgtgtcttcttatagtttgtaa

SEQ ID NO: 36236 - protein, 351 aa, Muscodor strobelii
  misc_feature: SGI Peptide ID NO. 572558
  misc_feature (1)..(350): Pfam Id: PF04005 Pfam Desc: Hus1-like protein
  misc_feature (166)..(350): Pfam Id: PF04005 Pfam Desc: Hus1-like protein
  misc_feature (1)..(117): Pfam Id: PF04005 Pfam Desc: Hus1-like protein
  misc_feature (1)..(351): NCBI GI: 46121671 Blast Desc: FG05214.1 [Gibberella zeae PH-1]
  misc_feature (1)..(350): NCBI GI: 145607189 Blast Desc: MGG_12138 [Magnaporthe grisea 70-15] gi|145014786|gb|EDJ99354.1| MGG_12138 [Magnaporthe grisea 70-15]
  misc_feature (1)..(351): NCBI GI: 261351551 Blast Desc: checkpoint protein hus1 [Verticillium albo-atrum VaMs.102]
  misc_feature (1)..(346): NCBI GI: 256731470 Blast Desc: [Nectria haematococca mpVI 77-13-4]
  misc_feature (13)..(350): NCBI GI: 116198253 Blast Desc: CHGG_07282 [Chaetomium globosum CBS 148.51] gi|88178561|gb|EAQ86029.1| CHGG_07282 [Chaetomium globosum CBS 148.51]
  misc_feature (1)..(350): NCBI GI: 171693683 Blast Desc: protein product [Podospora anserina] gi|170946790|emb|CAP73594.1| protein product [Podospora anserina]
  misc_feature (15)..(348): NCBI GI: 164426935 Blast Desc: NCU11262 [Neurospora crassa OR74A] gi|157071537|gb|EDO65260.1| conserved [Neurospora crassa OR74A]
  misc_feature (1)..(350): NCBI GI: 156048520 Blast Desc: SS1G_08991 [Sclerotinia sclerotiorum 1980] gi|154693388|gb|EDN93126.1| SS1G_08991 [Sclerotinia sclerotiorum 1980]
  misc_feature (1)..(345): NCBI GI: 154300815 Blast Desc: BC1G_10707 [Botryotinia fuckeliana B05.10] gi|150856455|gb|EDN31647.1| BC1G_10707 [Botryotinia fuckeliana B05.10]
  misc_feature (1)..(348): NCBI GI: 16944577 Blast Desc: related to mitotic and DNA damage checkpoint protein hus1 [Neurospora crassa]
MRFKSGLKNVRTFSKLVAALSSLEKIAWLRLDDETVRFTVIPDTGSQVWASLSVDFIFDNYTLQSAEPHNTINLELPLGPLQRALKSATHATSASLRLTKKNDIPVLSMTITTNTAPANLPTGVARFGQNSANRPGRVQPDEYDDEDDIFTAEPLETNLQREREKIITQDIPVRVLHPETVETIMQPKVREPDVHIQLPPLLQLKAISDRYTKLAIAAGASSRSHTSVNPKLELSANMHGDLRLRLDTDTLDVESKWDGLENPELDPSQLNCALEDHPSTKFKNEGPNKWATVRVDGKDWSRVLSVGRLDGRVIACFADDHALILYVYVPHYDDPSADDSVVTYYVSSYSL

SEQ ID NO: 36237 - DNA, 4274 bp, Muscodor strobelii; identical to SEQ ID NO: 36234
  misc_feature: SGI EST ID NO. CUFF.86464.0
  misc_feature: Variant of the nucleotide sequence at SEQ ID NO 36235

SEQ ID NO: 36238 - DNA, 1461 bp, Muscodor strobelii
  misc_feature: SGI cDNA ID NO. 572559
  misc_feature: Encodes the peptide sequence at SEQ ID NO 36239
atgaaaaagctgctctgggagaatgaggctgagtggcaccgaggcatcgatacgacatctctgtcccaaaattttcaagatgcccttaaagttactaagctcttaggctaccgttacatatggattgatgctctttgcattgtgcaggactcggcggaagactgggcagagcaagcgccgaaaatggcggaaatctatagttgtgccgacatggtcttgtcggcagcctttgcggccgacagtgcagagggatttttaggatatcgaccctcgttagtaacgccaggattaggaccggatccaatatgttccgtgcgtgcagccttcctaatcagtggcatctgcgagggtttccatacggtcgaggatctccacaagggcatactcgatatgggctcgctcaactcgcgaagctggtgtgcgcaagagaggatcctggcgacctccatactacattatactccttacggcatgttctgggagtgctcaaaaggacttcagtctgagaaccctatgctagaagccagtttagaagatttatttcgaaatcggactagatacggctcgcttgatagacgaaaacatggaattcttggatacgtcgagcagtggctgcgaagaaaggagttccaaacctctcagaattgggatattgatgatgatgacaaatctagccaagcctttcgcgcttggtgtcattgcgtgcacgagtactctggacggaatttgacacatgagaaggacaaactccctgctattgcagcgctcgcagatgtgctaggcggcggacttggtgactatctcgccggtctgtggagtagatttccacaacgaagccttgcgtggaaagttacaggagcatcgcgcagctttccggcagcgttccgggctccttcttggagttgggcctctatcggttgtagcgttatatgggattgcgaggaagagagccgacctagtgtgaacccgtggagtgacgaggaagggccccgactaatagactaccacatggtcactgggtcaatcccaaatccttacttgaatgttggagagggttctcatctcgtactcgaggggaaatgtgtcgatgcgcgatccatcccacttcccgttaaaactaatatccactacactggcggttgggaccgcttaacgggtaggtcaaacgcttcgccagactggccgagccgtcaagacatacctgaggaccttattttacttcacttacaacaaacaagatattcgtcgaaacgtgatggggacgtatttgaaaccgtagagattttcacgatactacttcgtgaagtggccattgatgatatcccagagcacggtgggccgacatttcgcagagttgggtcgggtatcatatacatcgcgccttggcaaggctctgaaccgtctgtggaccgactattcgactccattaaatgggaggagcgccgtttgatcctaatatag

SEQ ID NO: 36239 - protein, 486 aa, Muscodor strobelii
  misc_feature: SGI Peptide ID NO. 572559
  misc_feature (11)..(143): Pfam Id: PF06985 Pfam Desc: Heterokaryon incompatibility protein (HET)
  misc_feature (15)..(76): Pfam Id: PF06985 Pfam Desc: Heterokaryon incompatibility protein (HET)
  misc_feature (16)..(486): NCBI GI: 121715796 Blast Desc: HET domain protein [Aspergillus clavatus NRRL 1] gi|119403664|gb|EAW14081.1| HET domain protein [Aspergillus clavatus NRRL 1]
  misc_feature (10)..(359): NCBI GI: 256722781 Blast Desc: NECHADRAFT_5039 [Nectria haematococca mpVI 77-13-4]
  misc_feature (11)..(314): NCBI GI: 46110314 Blast Desc: FG02039.1 [Gibberella zeae PH-1]
  misc_feature (15)..(316): NCBI GI: 256729778 Blast Desc: NECHADRAFT_83568 [Nectria haematococca mpVI 77-13-4]
  misc_feature (8)..(399): NCBI GI: 154304664 Blast Desc: BC1G_08071 [Botryotinia fuckeliana B05.10] gi|150853971|gb|EDN29163.1| BC1G_08071 [Botryotinia fuckeliana B05.10]
  misc_feature (16)..(374): NCBI GI: 119481313 Blast Desc: HET domain protein [Neosartorya fischeri NRRL 181] gi|119408839|gb|EAW18788.1| HET domain protein [Neosartorya fischeri NRRL 181]
  misc_feature (20)..(360): NCBI GI: 171677566 Blast Desc: protein product [Podospora anserina] gi|170936851|emb|CAP61509.1| protein product [Podospora anserina]
  misc_feature (15)..(318): NCBI GI: 156042724 Blast Desc: SS1G_11161 [Sclerotinia sclerotiorum 1980] gi|154695546|gb|EDN95284.1| SS1G_11161 [Sclerotinia sclerotiorum 1980]
  misc_feature (14)..(317): NCBI GI: 116214435 Blast Desc: CHGG_11058 [Chaetomium globosum CBS 148.51] gi|88175413|gb|EAQ82882.1| CHGG_11058 [Chaetomium globosum CBS 148.51]
  misc_feature (11)..(314): NCBI GI: 256728563 Blast Desc: NECHADRAFT_96923 [Nectria haematococca mpVI 77-13-4]
MKKLLWENEAEWHRGIDTTSLSQNFQDALKVTKLLGYRYIWIDALCIVQDSAEDWAEQAPKMAEIYSCADMVLSAAFAADSAEGFLGYRPSLVTPGLGPDPICSVRAAFLISGICEGFHTVEDLHKGILDMGSLNSRSWCAQERILATSILHYTPYGMFWECSKGLQSENPMLEASLEDLFRNRTRYGSLDRRKHGILGYVEQWLRRKEFQTSQNWDIDDDDKSSQAFRAWCHCVHEYSGRNLTHEKDKLPAIAALADVLGGGLGDYLAGLWSRFPQRSLAWKVTGASRSFPAAFRAPSWSWASIGCSVIWDCEEESRPSVNPWSDEEGPRLIDYHMVTGSIPNPYLNVGEGSHLVLEGKCVDARSIPLPVKTNIHYTGGWDRLTGRSNASPDWPSRQDIPEDLILLHLQQTRYSSKRDGDVFETVEIFTILLREVAIDDIPEHGGPTFRRVGSGIIYIAPWQGSEPSVDRLFDSIKWEERRLILI

SEQ ID NO: 36240 - DNA, 1512 bp, Muscodor strobelii
  misc_feature: SGI cDNA ID NO. 572560
  misc_feature: Encodes the peptide sequence at SEQ ID NO 36241
atggctctcgcttcgcttgacgcagcaacgctctcgggaaagccaaagaacctcgagcattcccatcttgccacgaagacactgacgttcgaattacctttttataatgatgataaattagttgaaagtgaccctcaaatcccgcttcaactaaacctcaagattgtccaccattgcacgacaataaatgcgggagagagcaacctagagttcgacgagattgcctcaaagcccctgctaatttacctctgcggcgggcccggcgacatcaatgacccagtgcggaactctagatttgtccaaagacatttgaaaaatgactatcttgtgttattccctgattatcgtggcactggagacttctttgcagaacatattgtccgtctacttggcgtggataacgaccaggcagcgaggattatgtatcgttgttccccacgcgagaatgcaatggatgttgtcaaaatccttcgcgccttccctggtgttgacgaacagtttcttgttttttggagccaatcatacggcggctgggtcatacgctcgctacactctggcttatccctaggcacgctcaagctctcgtctggtggtctaccgccaacactgagtccattggacgcttacaggcatctgttgcagcttaccaaaggcgcaaatgacgagtattatcgaaaatatccagaagacgtgaaaagagtcaaggaaatcgccttatggctactcgataaagagataaagggcgaaacccaacaggttcagttcaaaatagagaccgaaacagagaccgaaaattgggataccggcgacttgactgcaaagaggtttctctgtattgggaggagtctcaataattcggaaatttggggaagcggccttcatgatttatttgtgaagatggagaatgacatcttaacgattaagcatcttagtgatgcaactctgaaatattatcacgataaggatggttggagggttcataagcgaccggcatatgtttgtttgctcgaacaacagtactgctttcgcaaaggtatggcatcaaactgggcagcatacagggcagcacaaactgaagatgccttctggtgggttcacagcgaggtgtcaaccatgagaagcaagataaacatcgatgacgacaaaacactatacctgtcaggagagatggtatatcctttcttcttcgatgtttataaagacctgagacagtacaaagatgccgtgaatatcctccacaagatgaaaaggaccgaagatatgtttgatgtggaagggctggcaagaaatgatagcggccagtggatagccatgtgtggtgatcgagacataagtgtgagctatgaggattcaaaggaaacggcggatgtatttaagcattgcatcaaattgatttccggaccagagatggaacacgtggcaatcaggacgcatccggatcgggtcctagatccattactcgaagcagccgaagagttcggttacataaccaaaaaatacccttggcgctaa

SEQ ID NO: 36241 - protein, 503 aa, Muscodor strobelii
  misc_feature: SGI Peptide ID NO. 572560
  misc_feature (1)..(488): NCBI GI: 261356204 Blast Desc: proline iminopeptidase [Verticillium albo-atrum VaMs.102]
  misc_feature (1)..(488): NCBI GI: 85090437 Blast Desc: NCU07415 [Neurospora crassa OR74A] gi|28919777|gb|EAA29180.1| NCU07415 [Neurospora crassa OR74A]
  misc_feature (78)..(483): NCBI GI: 189194377 Blast Desc: proline iminopeptidase [Pyrenophora tritici-repentis Pt-1C-BFP] gi|187979091|gb|EDU45717.1| proline iminopeptidase [Pyrenophora tritici-repentis Pt-1C-BFP]
  misc_feature (76)..(483): NCBI GI: 171677290 Blast Desc: protein product [Podospora anserina] gi|170936713|emb|CAP61371.1| protein product [Podospora anserina]
  misc_feature (77)..(488): NCBI GI: 171687523 Blast Desc: protein product [Podospora anserina] gi|170943723|emb|CAP69375.1| protein product [Podospora anserina]
  misc_feature (75)..(487): NCBI GI: 256733099 Blast Desc: NECHADRAFT_92718 [Nectria haematococca mpVI 77-13-4]
  misc_feature (78)..(487): NCBI GI: 169624995 Blast Desc: SNOG_15764 [Phaeosphaeria nodorum SN15] gi|111055739|gb|EAT76859.1| SNOG_15764 [Phaeosphaeria nodorum SN15]
  misc_feature (78)..(487): NCBI GI: 240275773 Blast Desc: prolyl peptidase [Ajellomyces capsulatus H143]
  misc_feature (78)..(487): NCBI GI: 225563193 Blast Desc: prolyl peptidase [Ajellomyces capsulatus G186AR]
  misc_feature (75)..(487): NCBI GI: 46124917 Blast Desc: FG06836.1 [Gibberella zeae PH-1]
  misc_feature (78)..(487): SWISSPROT Homolog: EC 3.4.11.5 Prolyl aminopeptidase
MALASLDAATLSGKPKNLEHSHLATKTLTFELPFYNDDKLVESDPQIPLQLNLKIVHHCTTINAGESNLEFDEIASKPLLIYLCGGPGDINDPVRNSRFVQRHLKNDYLVLFPDYRGTGDFFAEHIVRLLGVDNDQAARIMYRCSPRENAMDVVKILRAFPGVDEQFLVFWSQSYGGWVIRSLHSGLSLGTLKLSSGGLPPTLSPLDAYRHLLQLTKGANDEYYRKYPEDVKRVKEIALWLLDKEIKGETQQVQFKIETETETENWDTGDLTAKRFLCIGRSLNNSEIWGSGLHDLFVKMENDILTIKHLSDATLKYYHDKDGWRVHKRPAYVCLLEQQYCFRKGMASNWAAYRAAQTEDAFWWVHSEVSTMRSKINIDDDKTLYLSGEMVYPFFFDVYKDLRQYKDAVNILHKMKRTEDMFDVEGLARNDSGQWIAMCGDRDISVSYEDSKETADVFKHCIKLISGPEMEHVAIRTHPDRVLDPLLEAAEEFGYITKKYPWR

SEQ ID NO: 36242 - DNA, 164 bp, Muscodor strobelii
  misc_feature: SGI EST ID NO. CUFF.86311.0
  misc_feature: Variant of the nucleotide sequence at SEQ ID NO 36240
ggattatgtatcgttgttccccacgcgagaatgcaatggatgttgtcaaaatccttcgcgccttccctggtgttgacgaacagtttcttgttttttggagccaatcatacggcggctgggtcatacgctcgctacactctggcttatccctaggcacgctcaag

SEQ ID NO: 36243 - DNA, 219 bp, Muscodor strobelii
  misc_feature: SGI cDNA ID NO. 572561
  misc_feature: Encodes the peptide sequence at SEQ ID NO 36244
atggcaattcggtacacggcaaatgcacgtgcctatcatttcgacacgccacatgcacacggagtcttccatgctacttgctgtagttatccctgcaacttaattttacccacggaaacgaagaactctctctgtgtggtaccgataattatgccatgggtcggaaaccacataccaaaacgcgcactggctgcgtcgaatgcaaacgaagacatctaa

SEQ ID NO: 36244 - protein, 72 aa, Muscodor strobelii
  misc_feature: SGI Peptide ID NO. 572561
MAIRYTANARAYHFDTPHAHGVFHATCCSYPCNLILPTETKNSLCVVPIIMPWVGNHIPKRALAASNANEDI

SEQ ID NO: 36245 - DNA, 1323 bp, Muscodor strobelii
  misc_feature: SGI cDNA ID NO. 572562
  misc_feature: Reduced expression when VOC is produced
  misc_feature: Encodes the peptide sequence at SEQ ID NO 36246
atgtcggagaatacaatagaccagcaacccgaaaaagaccaaacaaagaatgacgaagtgcgagaagcgcaaccggccgatgagcttggtgccaaacaggaacatgatgattcagaaccgattctcgtcaactgggaagaaccagcttcgcaagacccggcaaatcctatgaattggtcgcacgttcgaaaatggggtactattgggattctgtcttttattgtgtttttaactcccctagcatcagcagctttcgccccaggcgtgccgttggtccaagacgaattcagcaaccactccgtaacgatcgctacattcgtcgtctcggtgttcgtcctcgggttcgccgtcgggaaatctagtgaagatgtgctgacggagaatcttctgacggacagatcggcatatactctgggaccgttgttaggacccataattggaccgattgttggcggattcctcgttgaagcaaaaggttggcggtgggtgttttggttaatcactattcttgccgccgcgattacgatagttgcttttatcgtctttcgagagtcctatcctccgatccttctcgcacgtaaaacggagcaacttcgaaagagtaccggaaatcatgcttatcgctcggcactcgataccggagagaccaatgggcagcggctaaaaaatgccatgattcgacctgttaagctgctcatattctcactacctgtcacgctcatgagtatatatatcgcgattctctacggcctttcttatatcctctttacgacgtttacgttcgtatatgaaggggtatatggattctctgcgtcttccgctgggttggcattccttggctcaggggttggaacgcttattggtcttgcatatgtatcgcccattagcgatatggttgtgaagaaggcgattgcagagaagggaagctccgatccggaggatcgtttaccgcttgttgtcacggtgccagctacacttgcgatccctgctggcttctttctgtatggttgggcggcggagatgaaatatcactggatcgtgccccaaatcggcaatggtctagtaggatttggaacgattgcggtcctgacttgcgttcagacgtacctcatcgacgcgtacacgcagcacgctgcaagtgtcatcgcggccaatgctgtcctcagaagtctacttggtgcgcttctgccgttatttggattggggctttataacgacgtggggctgggatggggcaattcgattcttggtttcattgctctcgcgtttgctcctatgctctggctttttaagatatatggacacaagatccgcggccagtaa

SEQ ID NO: 36246 - protein, 440 aa, Muscodor strobelii
  misc_feature: SGI Peptide ID NO. 572562
  misc_feature (40)..(397): Pfam Id: PF07690 Pfam Desc: Major Facilitator Superfamily
  misc_feature (134)..(397): Pfam Id: PF07690 Pfam Desc: Major Facilitator Superfamily
  misc_feature (36)..(436): NCBI GI: 256721165 Blast Desc: NECHADRAFT_98255 [Nectria haematococca mpVI 77-13-4]
  misc_feature (7)..(438): NCBI GI: 119181306 Blast Desc: CIMG_05771 [Coccidioides immitis RS]
  misc_feature (7)..(438): NCBI GI: 240108931 Blast Desc: Major Facilitator Superfamily protein [Coccidioides posadasii C735 delta SOWgp]
  misc_feature (7)..(438): NCBI GI: 169601800 Blast Desc: SNOG_03776 [Phaeosphaeria nodorum SN15] gi|160706012|gb|EAT88981.2| SNOG_03776 [Phaeosphaeria nodorum SN15]
  misc_feature (7)..(440): NCBI GI: 46111993 Blast Desc: FG02869.1 [Gibberella zeae PH-1]
  misc_feature (11)..(440): NCBI GI: 256723909 Blast Desc: NECHADRAFT_37155 [Nectria haematococca mpVI 77-13-4]
  misc_feature (7)..(438): NCBI GI: 255954417 Blast Desc: Pc21g09220 [Penicillium chrysogenum Wisconsin 54-1255] gi|211589672|emb|CAP95819.1| Pc21g09220 [Penicillium chrysogenum Wisconsin 54-1255]
  misc_feature (1)..(438): NCBI GI: 154280645 Blast Desc: conserved [Ajellomyces capsulatus NAm1] gi|150411314|gb|EDN06702.1| conserved [Ajellomyces capsulatus NAm1]
  misc_feature (12)..(438): NCBI GI: 67524435 Blast Desc: AN2675.2 [Aspergillus nidulans FGSC A4] gi|40743893|gb|EAA63077.1| AN2675.2 [Aspergillus nidulans FGSC A4] gi|259486414|tpe|CBF84231.1| TPA: MFS multidrug transporter,
  misc_feature (4)..(440): NCBI GI: 46116950 Blast Desc: FG04317.1 [Gibberella zeae PH-1]
  misc_feature: Useful for introducing or modulating the production of volatile compounds
MSENTIDQQPEKDQTKNDEVREAQPADELGAKQEHDDSEPILVNWEEPASQDPANPMNWSHVRKWGTIGILSFIVFLTPLASAAFAPGVPLVQDEFSNHSVTIATFVVSVFVLGFAVGKSSEDVLTENLLTDRSAYTLGPLLGPIIGPIVGGFLVEAKGWRWVFWLITILAAAITIVAFIVFRESYPPILLARKTEQLRKSTGNHAYRSALDTGETNGQRLKNAMIRPVKLLIFSLPVTLMSIYIAILYGLSYILFTTFTFVYEGVYGFSASSAGLAFLGSGVGTLIGLAYVSPISDMVVKKAIAEKGSSDPEDRLPLVVTVPATLAIPAGFFLYGWAAEMKYHWIVPQIGNGLVGFGTIAVLTCVQTYLIDAYTQHAASVIAANAVLRSLLGALLPLFGLGLYNDVGLGWGNSILGFIALAFAPMLWLFKIYGHKIRGQ

SEQ ID NO: 36247 - DNA, 2372 bp, Muscodor strobelii
  misc_feature: SGI EST ID NO. CUFF.86330.0
  misc_feature: Variant of the nucleotide sequence at SEQ ID NO 36245
gatttatgttttgcatcggttccgataagtataatgtgaggttatcgccgacaacctggtaaagatccctgaaagccgcgttgctatcccatgcttcgacgttgtaaacgaactgggatacgaacatacgagctctcaccacaccggggtacgcgacaatccagcgcatcgttgaaaaagtcgggatcggccaaatttttttcgaagaggaggattctttacatggctttttctgttgtttgcgcgtttgtttcttattagagagaataatcatggcctaacggcgttatcatatcctattatacacgcctacgttctcgccgtgtatcatcgctaaccccctaagcaccatccaatggtcttggacaaatacagacgcgatgtcggagaatacaatagaccagcaacccgaaaaagaccaaacaaagaatgacgaagtgcgagaagcgcaaccggccgatgagcttggtgccaaacaggaacatgatgattcagaaccgattctcgtcaactgggaagaaccagcttcgcaagacccggcaaatcctatgaattggtcgcacgttcgaaaatggggtactattgggattctgtcttttattgtgtttttaactcccctagcatcagcagctttcgccccaggcgtgccgttggtccaagacgaattcagcaaccactccgtaacgatcgctacattcgtcgtctcggtgttcgtcctcgggttcgccgtcggtccgttgtttctcgcgccgcttagcgagatgtatggacgggttcctgtgtatcacgtttgtaatgtgttgtttgtgatttttacggtggcgtgcgctgtcgcggggagcattgggcagttggttgcttttaggtttttggcgggctttgcgggtgtcgcgagtgttacgattgggggtgggagtattgcggatatgattccgagggaacagagagctagagctatgtgagtcatgaacccgagaaattgtcacttaattgcagggaaatctagtgaagatgtgctgacggagaatcttctgacggacagatcggcatatactctgggaccgttgttaggacccataattggaccgattgttggcggattcctcgttgaagcaaaaggttggcggtgggtgttttggttaatcactattcttgccgccgcgattacgatagttgcttttatcgtctttcgagagtcctatcctccgatccttctcgcacgtaaaacggagcaacttcgaaagagtaccggaaatcatgcttatcgctcggcactcgataccggagagaccaatgggcagcggctaaaaaatgccatgattcgacctgttaagctgctcatattctcactacctgtcacgctcatgagtatatatatcgcgattctctacggcctttcttatatcctctttacgacgtttacgttcgtatatgaaggggtatatggattctctgcgtcttccgctgggttggcattccttggctcaggggttggaacgcttattggtcttgcatatgtatcgcccattagcgatatggttgtgaagaaggcgattgcagagaagggaagctccgatccggaggatcgtttaccgcttgttgtcacggtgccagctacacttgcgatccctgctggcttctttctgtatggttgggcggcggagatgaaatatcactggatcgtgccccaaatcggcaatggtctagtaggatttggaacgattgcggtcctgacttgcgttcagacgtacctcatcgacgcgtacacgcagcacgctgcaagtgtcatcgcggccaatgctgtcctcagaagtctacttggtgcgcttctgccgttatttggattggggctttataacgacgtggggctgggatggggcaattcgattcttggtttcattgctctcgcgtttgctcctatgctctggctttttaagatatatggacacaagatccgcggccagtaatgtagcagtagaaaattccttttattttcaatacctagttctggagcaatgcagtagactttgcgtgttaagataagcgagtcctctcgacaacgataggacgcttcggcatccaggttcggattgtctctgagccccatgcgagcctcggtagcatcgcgactggcttctggcggccatgcgttcacagcgccgtcccaactgttccttcgatgtgtgatattcagactgtatcgaagcataattcggtttgaattcgattggaatagccaatagcaacgacccatccttctcctgtgatcaagttcggtaacgcaaaagagagtcacatttaatgcaacggagggtcggagctgcgattatcttgaaagcagacaactgactcaccgagatgtaatatcgaag

SEQ ID NO: 36248 - DNA, 5607 bp, Muscodor strobelii
  misc_feature: SGI cDNA ID NO. 572563
  misc_feature: Reduced expression when VOC is produced
  misc_feature: Encodes the peptide sequence at SEQ ID NO 36249
atggcttcagataccccgagcgcgtcgtggcatcccgccatgatgcctgactcaccaccccgaaaacagaccaccgccccgtcatccagtaaagaaccacaatcgcctattgcacccagtcatccagatctcgaagagcctaatctcgattcccccgaagtccacggagtctccgccggtgcctcgctagctgagccggccaaggcccccgagttcctcgaccagtttgagaacgacgaagagtctggtgctgatgcatgggatctctccaatccagctcctgcagagccgcctgtcacagaacaagcagagccaccgatatcatacgatgatattgcctctgtagtcgaggctgcggctcccgtcggaaacactgccaagcatgccagtaccatctcgttcgctcgaaccgtctcccatgatgttcccttcaatgatgacgaggacagcgagtggaatctcccgcgatcagacactaatcccttcagcttcatgccggaaaatgtgagaaccaactccttcccagttgtgccacaagtgaacaacatagaacccgagacatattcatctccgccgcctgccagccaggtcgaggagatcttacaggaagtcgagcatgaagatgagcacaaagagaatgcggcgcaatcaggctccttcgagccgcagcacgatggggagaatgatacattccgacagtctattggtggtgattttgcgaccacggagcaggatccatccgacactcggtatgaggaaggattgcctctcatccctcagcaacatgatgaggatcccgaagcgcgccgcgaagagcctccagtgaactcgaatgacttgttttcgcaggaggatggtggcgatggcgatgatttatttgctcaaaaacatcacgactcggatacggatgacgacacacatcgaggcgtgtcattgaaacatcctctgcagaggaaatccaccacaatggcaattgcacgcgcggctgattcggaaccgcctagtcccatcgaagaggaggcatctcaggaactgaccaacggaaatggggagattgcggttgagaatggagcggcacccagaggtgaaacgaacgacgtggatgctaagtgggcagcagccttcgcagatgatgacgacgatgaaggctttctgctagacgacagcacgcaaaccaaggagctcaacccagaagacgtgtttgggagcgacgatgaaggtttcttggatgatgttggagaagaggatactgtgatgcctgcgcaagtccagccagcgcagccgacaacgaatggccgttatacaccgagcgtccaacagcagccatatgcttactcgaattcatacgcgccagctccgggcaccgtgcaggtgctgccacaacagcggccatcttatgctccctctaatactgctcctcctgggacgggatttggcgcgcctcccaagcctgaactgccaaaggctcaaagctttgctagcaaatccaaaggcggctatcagtcgccatatgacctaccgatggatgttgttaaacctatgacgcggcctagcgcacaacaaatgcgaccgagccctccaaccttaccgactggtccgccaaggacaaatagcatgtactcacagccccctccatccagtggctcaatctcaagcctgtcgcctccaagctcaagtcattcgaatcagcagcctccaccccaaaagccgactcctcagcttaagccaaaatccagctttttcgaagagctgccaatgtcatccaaggttcgacctgcatcgcgtcaaagcaatgcttctgtaccacctcagcagagctcttacgctcaagcaccaccacttggacccccgacgagcgctccgccaatccggccacaggcaccaccaacaggacttgctccgtcacagatgtctccagagttggccccgggtggcgtggcactggtagcacctgaacgtgtgagtccctacgcagccttacaagccgacgcgcctgccagacctcaacctccttcgtctgtgaacagtcgatattcacccgctcccgtgtctggattgaacggatccgtacctgttgcaaacaatcgatattcgcctgctccgaattctcgatcatccagtggtagctattctgctgtgccaccacctatgttggcccatcaaccgagaacatcaagtccgcttgcgcacttcgaagtctcgagtgagcattctggcgctaagcttggaagcccaggctttgataatggtgccccattgttgagatccagttcttcacaatacgaacaccgtcttacccgagtgccttcgcttccaccaacacaagaagtagaagaagagcagctcacgtcacctacaacggcgacaaagtcaccagttgctcctccaccaagctcacaatattccccattgaagactcgccatactccgccacccatgggcattcctccttcaaatccactttctcctcctaaacgatctctctccaactacaccccgcagccagctaccacgatgccgccgaaggaggtaacctttgtgccaccgcctagatcgcagacacagtctcctggggcggttcatggaaaccgaggccccatttcacctgaatctgctccccggccatcttcagcacacgcaacgaatgctcgcccagttcgaacacgtggcatgtcccagaacctcaacttggttgcacctactgatggccgagagttggatccacttcaacggtggcgtggagccccctgcatttcatggggagttggcggcgtctttgtctcgacatttcctaaagacatgccacgttatggaattagctccaatatcccgcagatcactcgcactccaggcgaagtcaatatcaaacacatgaaggatatcgagcctttggaggaacgcctcgccaaatttccagggccattgaaaggcaaatccaagaagaaggagacgcttgcttggctgacagctgggatcgagggcctcgaaagagctcagcccaatgtttcattccagcaacaaatctcgcatgatgacaaacgagctgtcgagcgtctactgttgtggaagattctcagagtgctcgtggaaaatgacggtctgcttgagggaaatcctgctgttgaaaaggccgttcgcgatgttatctcgcctggtttggacgtggataatgccgaactgtcatctgctgtgtcgactggaatggacctgactggtatgacaggcaccgctagcgctttgcagggagatgctgttgatcacacggctatcgaatcaatccgaagacttctacttcttggagatcgcgagaaggccgtctgggcagcagcagataagaggctctggggtcatgcacttctcatttcgagctctgtgcagaaccccgagctttatagacaagtcacacaagagttcatcaagaaagaggtgaaccaagccagccgtggtaatgagtcacttgctgctctctatggtgtgctgtctggcaacttcgacgaggctgttgatgagcttgttcctgtccatgctcgagctggtatgcaattgatgtcaacctcgacgtcgaacacatctcaagatactcttgctggattggacaagtggcgtgagactttgggcatgattctcagcaaccgaaggcagggcgatgcacaggcgctgcgttcacttggaaatctcctttccggatatggcagggccgaagcggctcacacatgctacatattcgctaagaattttgccatctttggcggtctcgacgacccaaatgctaattttgtgcttgttggggctgatcatagacgtcaagccgactcattcgccaaggagaccgaggctttgcaactcagcgaagtctacgagttcgggttatcgcttgtcggtagcgcgaacgtggcacagagctgccctcacttagttgcatacaagttgcagcatgctatgattcttgcagagcatgggctcagagataaggcgttgcagtattgcgaaggcatctacaatgccatcactgcccagaccaagaaatcgccatattacaacccggcgcttgaatcggccgttgatgatctcttgaaaaggctgaagctagctgcgggcgacaaatctacctcgtggattcccaatctcaagtcagatcaagtctccagcagcatgtggtcgcgatttaataagtttgtcgctggagacgatgagaatagtgccggcaatggagcttccgccgagggcggagtagagactggtccctttgcacgtattgctggtggaactccatcgattagtcgatcaccttctgtgtcgaactttgaggcatacggcaccagccctgctatgccacccccgaacaaagcttcttctctttatgctcctggtggggctcaactgtcgtcctcgccgtatgaatctcctggatcatacatgcctcaacaacgatcttcgttggatgggccagcaggcgagccgcgtcgaggttcccgggatatccacagtcgaggttccgatgggggcgcaagtctacaccccttttcgcccagcgcatataccacctaccagcccacggctcccgcgagctctgtaggctcgccgcatatgtccacttctcagggaccggcaacgagcctcatatcagaacaggcttccagttacggctatggaggctatcagccatttggtggcaatttgaccccaccagatgagggtccaaaggacaatccatcgaatgcggccgatacgaactcaggttaccagcctccatcatatggaggctatgagccacccccaacgagcagctttgacgcaccagtaactcaaacagaaactccatcgggaggttatgaaccgccatcattccaaccatccagctttgaaccaccatcttaccagccgggtccggcagatgacgataaggaggataagcccaagaagaagagcttcatggatgatgacgatgacgacattcctgggttgcgaccaaaggagaagaccaaggccgaaaaagacaaagagaatgaggaaatgttcagaaaaatcgcagaggaagaatcgaaacgcgccaacgaacagaagctcaataagaagagcagtggctggggcttgagcggttggttttcaggcaagaaggagacaaacgatattgccccgaaagctatcaaagccaagctgggtgaagcaagtagctttgtctacgatcccgacttgaaacgttgggtcaacaagaaggcaggggccgaaaacactccagctaagacagcaacgccaccgccgcctcgtgcaatgagtacgccgcctccttctgcgcctacctccatgccaccacctatcaatattgcaggtgcaccgccgtctgcacctcccatgggccttagtaagactgtatcacaagagaacttgggtatgccaaactttggccatgcaccgcccatggcgcgttctgtttcaggtcagagcaatgctagtatcggcggctctcctctcgcacctcctagtcgacccgctactagtcttagtaacgctagtagcatagacgatcttattggtgctgctggtccgcgaaagggagggaagaagccgcgcaagtcagggcggtatgtggatgttatggcaaagtag

SEQ ID NO: 36249 - protein, 1868 aa, Muscodor strobelii
  misc_feature: SGI Peptide ID NO. 572563
  misc_feature (484)..(1868): NCBI GI: 240280428 Blast Desc: COPII-coated assembly protein SEC16 [Ajellomyces capsulatus H143]
  misc_feature (149)..(1868): NCBI GI: 225683865 Blast Desc: conserved [Paracoccidioides brasiliensis Pb03]
  misc_feature (694)..(1868): NCBI GI: 189195038 Blast Desc: COPII coat assembly protein sec16 [Pyrenophora tritici-repentis Pt-1C-BFP] gi|187979736|gb|EDU46362.1| COPII coat assembly protein sec16 [Pyrenophora tritici-repentis
  misc_feature (126)..(1868): NCBI GI: 74624528 Blast Desc: SEC16_NEUCR RecName: Full=COPII coat assembly protein sec-16; AltName: Full=Protein transport protein sec-16 gi|11595639|emb|CAC18259.1| conserved [Neurospora crassa]
  misc_feature (126)..(1868): NCBI GI: 171693681 Blast Desc: protein product [Podospora anserina] gi|170946789|emb|CAP73593.1| protein product [Podospora anserina]
  misc_feature (70)..(1868): NCBI GI: 46121669 Blast Desc: FG05213.1 [Gibberella zeae PH-1]
  misc_feature (1)..(1868): NCBI GI: 256731075 Blast Desc: NECHADRAFT_84951 [Nectria haematococca mpVI 77-13-4]
  misc_feature (1)..(1868): NCBI GI: 116198255 Blast Desc: CHGG_07283 [Chaetomium globosum CBS 148.51] gi|121781508|sp|Q2GXM1.1|SEC16_CHAGB RecName: Full=COPII coat assembly protein SEC16; AltName: Full=Protein transport protein
  misc_feature (1)..(1867): NCBI GI: 156048554 Blast Desc: SS1G_09008 [Sclerotinia sclerotiorum 1980] gi|154693405|gb|EDN93143.1| SS1G_09008 [Sclerotinia sclerotiorum 1980]
  misc_feature (1)..(1866): NCBI GI: 154300763 Blast Desc: BC1G_10681 [Botryotinia fuckeliana B05.10] gi|150856429|gb|EDN31621.1| BC1G_10681 [Botryotinia fuckeliana B05.10]
  misc_feature: Useful for introducing or modulating the production of volatile compounds
MASDTPSASWHPAMMPDSPPRKQTTAPSSSKEPQSPIAPSHPDLEEPNLDSPEVHGVSAGASLAEPAKAPEFLDQFENDEESGADAWDLSNPAPAEPPVTEQAEPPISYDDIASVVEAAAPVGNTAKHASTISFARTVSHDVPFNDDEDSEWNLPRSDTNPFSFMPENVRTNSFPVVPQVNNIEPETYSSPPPASQVEEILQEVEHEDEHKENAAQSGSFEPQHDGENDTFRQSIGGDFATTEQDPSDTRYEEGLPLIPQQHDEDPEARREEPPVNSNDLFSQEDGGDGDDLFAQKHHDSDTDDDTHRGVSLKHPLQRKSTTMAIARAADSEPPSPIEEEASQELTNGNGEIAVENGAAPRGETNDVDAKWAAAFADDDDDEGFLLDDSTQTKELNPEDVFGSDDEGFLDDVGEEDTVMPAQVQPAQPTTNGRYTPSVQQQPYAYSNSYAPAPGTVQVLPQQRPSYAPSNTAPPGTGFGAPPKPELPKAQSFASKSKGGYQSPYDLPMDVVKPMTRPSAQQMRPSPPTLPTGPPRTNSMYSQPPPSSGSISSLSPPSSSHSNQQPPPQKPTPQLKPKSSFFEELPMSSKVRPASRQSNASVPPQQSSYAQAPPLGPPTSAPPIRPQAPPTGLAPSQMSPELAPGGVALVAPERVSPYAALQADAPARPQPPSSVNSRYSPAPVSGLNGSVPVANNRYSPAPNSRSSSGSYSAVPPPMLAHQPRTSSPLAHFEVSSEHSGAKLGSPGFDNGAPLLRSSSSQYEHRLTRVPSLPPTQEVEEEQLTSPTTATKSPVAPPPSSQYSPLKTRHTPPPMGIPPSNPLSPPKRSLSNYTPQPATTMPPKEVTFVPPPRSQTQSPGAVHGNRGPISPESAPRPSSAHATNARPVRTRGMSQNLNLVAPTDGRELDPLQRWRGAPCISWGVGGVFVSTFPKDMPRYGISSNIPQITRTPGEVNIKHMKDIEPLEERLAKFPGPLKGKSKKKETLAWLTAGIEGLERAQPNVSFQQQISHDDKRAVERLLLWKILRVLVENDGLLEGNPAVEKAVRDVISPGLDVDNAELSSAVSTGMDLTGMTGTASALQGDAVDHTAIESIRRLLLLGDREKAVWAAADKRLWGHALLISSSVQNPELYRQVTQEFIKKEVNQASRGNESLAALYGVLSGNFDEAVDELVPVHARAGMQLMSTSTSNTSQDTLAGLDKWRETLGMILSNRRQGDAQALRSLGNLLSGYGRAEAAHTCYIFAKNFAIFGGLDDPNANFVLVGADHRRQADSFAKETEALQLSEVYEFGLSLVGSANVAQSCPHLVAYKLQHAMILAEHGLRDKALQYCEGIYNAITAQTKKSPYYNPALESAVDDLLKRLKLAAGDKSTSWIPNLKSDQVSSSMWSRFNKFVAGDDENSAGNGASAEGGVETGPFARIAGGTPSISRSPSVSNFEAYGTSPAMPPPNKASSLYAPGGAQLSSSPYESPGSYMPQQRSSLDGPAGEPRRGSRDIHSRGSDGGASLHPFSPSAYTTYQPTAPASSVGSPHMSTSQGPATSLISEQASSYGYGGYQPFGGNLTPPDEGPKDNPSNAADTNSGYQPPSYGGYEPPPTSSFDAPVTQTETPSGGYEPPSFQPSSFEPPSYQPGPADDDKEDKPKKKSFMDDDDDDIPGLRPKEKTKAEKDKENEEMFRKIAEEESKRANEQKLNKKSSGWGLSGWFSGKKETNDIAPKAIKAKLGEASSFVYDPDLKRWVNKKAGAENTPAKTATPPPPRAMSTPPPSAPTSMPPPINIAGAPPSAPPMGLSKTVSQENLGMPNFGHAPPMARSVSGQSNASIGGSPLAPPSRPATSLSNASSIDDLIGAAGPRKGGKKPRKSGRYVDVMAK

SEQ ID NO: 36250 - DNA, 6593 bp, Muscodor strobelii
  misc_feature: SGI EST ID NO. CUFF.86402.0
  misc_feature: Variant of the nucleotide sequence at SEQ ID NO 36248
cgggagacaaggtacttttcgtctatgatagtgtgcttttcttagtaaacccagtaaagctagcgagggtcagggggagagggacccgccgagagccacgcgctactaggtaggtacatttgctgcattttctcacggcgctgtaatccccgtcgccagtccgtcatcaatccatcttgctgcagcatcctgcatgagcgacacccatcaggccaacgttgcctcaactctgttcctctcatgcttcatcccatcgcgagcgtctgaaccgctcccccgcaccatcgcacaactcgacgcgacgcctggagcatggcctgtaccattaccgtctgcacatttctgctctttccaaattcgttgtacaaataggccacatcgccataaccttatttctcctctagcctggagacaggccattattgttcttctaatcttttccgatatatatttaattcgtcattgttatggcttcagataccccgagcgcgtcgtggcatcccgccatgatgcctgactcaccaccccgaaaacagaccaccgccccgtcatccagtaaagaaccacaatcgcctattgcacccagtcatccagatctcgaagagcctaatctcgattcccccgaagtccacggagtctccgccggtgcctcgctagctgagccggccaaggcccccgagttcctcgaccagtttgagaacgacgaagagtctggtgctgatgcatgggatctctccaatccagctcctgcagagccgcctgtcacagaacaagcagagccaccgatatcatacgatgatattgcctctgtagtcgaggctgcggctcccgtcggaaacactgccaagcatgccagtaccatctcgttcgctcgaaccgtctcccatgatgttcccttcaatgatgacgaggacagcgagtggaatctcccgcgatcagacactaatcccttcagcttcatgccggaaaatgtgagaaccaactccttcccagttgtgccacaagtgaacaacatagaacccgagacatattcatctccgccgcctgccagccaggtcgaggagatcttacaggaagtcgagcatgaagatgagcacaaagagaatgcggcgcaatcaggctccttcgagccgcagcacgatggggagaatgatacattccgacagtctattggtggtgattttgcgaccacggagcaggatccatccgacactcggtatgaggaaggattgcctctcatccctcagcaacatgatgaggatcccgaagcgcgccgcgaagagcctccagtgaactcgaatgacttgttttcgcaggaggatggtggcgatggcgatgatttatttgctcaaaaacatcacgactcggatacggatgacgacacacatcgaggcgtgtcattgaaacatcctctgcagaggaaatccaccacaatggcaattgcacgcgcggctgattcggaaccgcctagtcccatcgaagaggaggcatctcaggaactgaccaacggaaatggggagattgcggttgagaatggagcggcacccagaggtgaaacgaacgacgtggatgctaagtgggcagcagccttcgcagatgatgacgacgatgaaggctttctgctagacgacagcacgcaaaccaaggagctcaacccagaagacgtgtttgggagcgacgatgaaggtttcttggatgatgttggagaagaggatactgtgatgcctgcgcaagtccagccagcgcagccgacaacgaatggccgttatacaccgagcgtccaacagcagccatatgcttactcgaattcatacgcgccagctccgggcaccgtgcaggtgctgccacaacagcggccatcttatgctccctctaatactgctcctcctgggacgggatttggcgcgcctcccaagcctgaactgccaaaggctcaaagctttgctagcaaatccaaaggcggctatcagtcgccatatgacctaccgatggatgttgttaaacctatgacgcggcctagcgcacaacaaatgcgaccgagccctccaaccttaccgactggtccgccaaggacaaatagcatgtactcacagccccctccatccagtggctcaatctcaagcctgtcgcctccaagctcaagtcattcgaatcagcagcctccaccccaaaagccgactcctcagcttaagccaaaatccagctttttcgaagagctgccaatgtcatccaaggttcgacctgcatcgcgtcaaagcaatgcttctgtaccacctcagcagagctcttacgctcaagcaccaccacttggacccccgacgagcgctccgccaatccggccacaggcaccaccaacaggacttgctccgtcacagatgtctccagagttggccccgggtggcgtggcactggtagcacctgaacgtgtgagtccctacgcagccttacaagccgacgcgcctgccagacctcaacctccttcgtctgtgaacagtcgatattcacccgctcccgtgtctggattgaacggatccgtacctgttgcaaacaatcgatattcgcctgctccgaattctcgatcatccagtggtagctattctgctgtgccaccacctatgttggcccatcaaccgagaacatcaagtccgcttgcgcacttcgaagtctcgagtgagcattctggcgctaagcttggaagcccaggctttgataatggtgccccattgttgagatccagttcttcacaatacgaacaccgtcttacccgagtgccttcgcttccaccaacacaagaagtagaagaagagcagctcacgtcacctacaacggcgacaaagtcaccagttgctcctccaccaagctcacaatattccccattgaagactcgccatactccgccacccatgggcattcctccttcaaatccactttctcctcctaaacgatctctctccaactacaccccgcagccagctaccacgatgccgccgaaggaggtaacctttgtgccaccgcctagatcgcagacacagtctcctggggcggttcatggaaaccgaggccccatttcacctgaatctgctccccggccatcttcagcacacgcaacgaatgctcgcccagttcgaacacgtggcatgtcccagaacctcaacttggttgcacctactgatggccgagagttggatccacttcaacggtggcgtggagccccctgcatttcatggggagttggcggcgtctttgtctcgacatttcctaaagacatgccacgttatggaattagctccaatatcccgcagatcactcgcactccaggcgaagtcaatatcaaacacatgaaggatatcgagcctttggaggaacgcctcgccaaatttccagggccattgaaaggcaaatccaagaagaaggagacgcttgcttggctgacagctgggatcgagggcctcgaaagagctcagcccaatgtttcattccagcaacaaatctcgcatgatgacaaacgagctgtcgagcgtctactgttgtggaagattctcagagtgctcgtggaaaatgacggtctgcttgagggaaatcctgctgttgaaaaggccgttcgcgatgttatctcgcctggtttggacgtggataatgccgaactgtcatctgctgtgtcgactggaatggacctgactggtatgacaggcaccgctagcgctttgcagggagatgctgttgatcacacggctatcgaatcaatccgaagacttctacttcttggagatcgcgagaaggccgtctgggcagcagcagataagaggctctggggtcatgcacttctcatttcgagctctgtgcagaaccccgagctttatagacaagtcacacaagagttcatcaagaaagaggtgaaccaagccagccgtggtaatgagtcacttgctgctctctatggtgtgctgtctggcaacttcgacgaggctgttgatgagcttgttcctgtccatgctcgagctggtatgcaattgatgtcaacctcgacgtcgaacacatctcaagatactcttgctggattggacaagtggcgtgagactttgggcatgattctcagcaaccgaaggcagggcgatgcacaggcgctgcgttcacttggaaatctcctttccggatatggcagggccgaagcggctcacacatgctacatattcgctaagaattttgccatctttggcggtctcgacgacccaaatgctaattttgtgcttgttggggctgatcatagacgtcaagccgactcattcgccaaggagaccgaggctttgcaactcagcgaagtctacgagttcgggttatcgcttgtcggtagcgcgaacgtggcacagagctgccctcacttagttgcatacaagttgcagcatgctatgattcttgcagagcatgggctcagagataaggcgttgcagtattgcgaaggcatctacaatgccatcactgcccagaccaagaaatcgccatattacaacccggcgcttgaatcggccgttgatgatctcttgaaaaggctgaagctagctgcgggcgacaaatctacctcgtggattcccaatctcaagtcagatcaagtctccagcagcatgtggtcgcgatttaataagtttgtcgctggagacgatgagaatagtgccggcaatggagcttccgccgagggcggagtagagactggtccctttgcacgtattgctggtggaactccatcgattagtcgatcaccttctgtgtcgaactttgaggcatacggcaccagccctgctatgccacccccgaacaaagcttcttctctttatgctcctggtggggctcaactgtcgtcctcgccgtatgaatctcctggatcatacatgcctcaacaacgatcttcgttggatgggccagcaggcgagccgcgtcgaggttcccgggatatccacagtcgaggttccgatgggggcgcaagtctacaccccttttcgcccagcgcatataccacctaccagcccacggctcccgcgagctctgtaggctcgccgcatatgtccacttctcagggaccggcaacgagcctcatatcagaacaggcttccagttacggctatggaggctatcagccatttggtggcaatttgaccccaccagatgagggtccaaaggacaatccatcgaatgcggccgatacgaactcaggttaccagcctccatcatatggaggctatgagccacccccaacgagcagctttgacgcaccagtaactcaaacagaaactccatcgggaggttatgaaccgccatcattccaaccatccagctttgaaccaccatcttaccagccgggtccggcagatgacgataaggaggataagcccaagaagaagagcttcatggatgatgacgatgacgacattcctgggttgcgaccaaaggagaagaccaaggccgaaaaagacaaagagaatgaggaaatgttcagaaaaatcgcagaggaagaatcgaaacgcgccaacgaacagaagctcaataagaagagcagtggctggggcttgagcggttggttttcaggcaagaaggagacaaacgatattgccccgaaagctatcaaagccaagctgggtgaagcaagtagctttgtctacgatcccgacttgaaacgttgggtcaacaagaaggcaggggccgaaaacactccagctaagacagcaacgccaccgccgcctcgtgcaatgagtacgccgcctccttctgcgcctacctccatgccaccacctatcaatattgcaggtgcaccgccgtctgcacctcccatgggccttagtaagactgtatcacaagagaacttgggtatgccaaactttggccatgcaccgcccatggcgcgttctgtttcaggtcagagcaatgctagtatcggcggctctcctctcgcacctcctagtcgacccgctactagtcttagtaacgctagtagcatagacgatcttattggtgctgctggtccgcgaaagggagggaagaagccgcgcaagtcagggcggtatgtggatgttatggcaaagtagagccttttttgcaaccggtcgaagtaccgagactccggctcaaagcttgatttaaactgggattggtgtaaggttacatgttagagtaaacgatggcgcataatcacgctggcacgctgtcacgcctcggattggcgttctgggacgaacttttgctgctactgtattatagacttagcgggttttgtaatacgatgcagcaattcttgactgcattgcacatacggaatcttctatgagccgatgaaaactgtacaagcctgctcattgccaaatatttgaaattgagacacaatcaagatggctaactgcggcattactatcatgctcttacttacagcattatgtcacttggagaagccagcgttcgcgaggctatctttatccgtacatcacagctgccagtcagactgcactaatagtgtgttgtgctgcgatgcagtttcggtatttgctagtccgaaatgcatacatatatgcacaaatccttgtcgactcctgctgtatggtattttgtcc

SEQ ID NO: 36251 - DNA, 1386 bp, Muscodor strobelii
  misc_feature: SGI cDNA ID NO. 572564
  misc_feature: Encodes the peptide sequence at SEQ ID NO 36252
atgacgaccggtccatacccagtgcctaatgccaccgtgccattctggcggacggagcttcatgagctggattcgcataggagcacagctgagctccccgagaaacaagatatcgttatcatcggagcaggctttgccggcgctgcgctggcatattacttgctaaaagacttctccgaatctgagactaagcctagcattactatactagaggctagagaggcttgctctggtgctacaggaagaaatggaggacaactcagaccagacatcttcaacggcacagcatcacgaatgaagaagcatggtctcgacatcgcaaacgaagtcgcccaattcgagctttcgaatcaagaggtcttggtagatctcatcaagagcgagaacatcgattgtgatctcgtgtcattgactaccggagttgcgatcgtcgatgcaaaagaagccgctgataccaaggcactttgggacgagatgcacgagaagggctgccctcccttgaagcaagtaacataccatggacctgacgaggctgaaaaagtcagtggtgtcaaaggtgcgatcgcagcttataactttgctgcgcatgttatttggccatacaagatggtcatgcaccttttgtctgacgccgtggccgcgggggttaatcttcagactcatacaccagtccgttctgtctcggacacggcagacagcgagggatactggaccttggagacctcccgcgggagtatcaaggcgaaacgtgttgtgttcgcaactaatgggtataccagcggacttctggcagagtacatggacgcgattcttccgagtcgtgggtcgtgtgctcgagtcgttgctaccaaatcgccaggaccgaaatttcagtcgtcttctgccgttgtcacacggagtccaaatacacatgattgttattggggtgttcgaccggatggcagctacattgttggaggtgccggcagttatcgagataagagagagctttgggagaggaactttgatgactcgactctgattgagcctgctataccgttctttgagcagtgggcagggaagaactttgttgggtgggagaatgctgagactaagattgcgaatgtttggacgggcattatgggttacacagctgatgacttacctcatgttggtaatgttcctgggaaagatgggttatatatttgcgcaggattcattggccatgggatgccaaatgtgttgctgtgcgcaagggcaatcgcaaagttgctgcaagatgggtcttcgctttctcagtcaggcattcctgcttgttatgagacaagttcgaagcggttgtctgaagcacgcaagctgttggcacggtggcccaagggagtaccttttgtcaaagacgagaactga

SEQ ID NO: 36252 - protein, 461 aa, Muscodor strobelii
  misc_feature: SGI Peptide ID NO. 572564
  misc_feature (37)..(417): Pfam Id: PF01266 Pfam Desc: FAD dependent oxidoreductase
  misc_feature (7)..(447): NCBI GI: 212534044 Blast Desc: conserved [Penicillium marneffei ATCC 18224] gi|210069577|gb|EEA23667.1| conserved [Penicillium marneffei ATCC 18224]
  misc_feature (7)..(444): NCBI GI: 145250913 Blast Desc: An15g04350 [Aspergillus niger] gi|134082496|emb|CAK97302.1| protein product [Aspergillus niger]
  misc_feature (7)..(451): NCBI GI: 255946399 Blast Desc: Pc20g14920 [Penicillium chrysogenum Wisconsin 54-1255] gi|211588702|emb|CAP86821.1| Pc20g14920 [Penicillium chrysogenum Wisconsin 54-1255]
  misc_feature (1)..(455): NCBI GI: 242767481 Blast Desc: conserved [Talaromyces stipitatus ATCC 10500] gi|218724573|gb|EED23990.1| conserved [Talaromyces stipitatus ATCC 10500]
  misc_feature (7)..(443): NCBI GI: 67523549 Blast Desc: AN2230.2 [Aspergillus nidulans FGSC A4] gi|40744759|gb|EAA63915.1| AN2230.2 [Aspergillus nidulans FGSC A4] gi|259487617|tpe|CBF86428.1| TPA: FAD dependent superfamily
  misc_feature (1)..(447): NCBI GI: 256725506 Blast Desc: NECHADRAFT_101156 [Nectria haematococca mpVI 77-13-4]
  misc_feature (4)..(444): NCBI GI: 256725539 Blast Desc: NECHADRAFT_55648 [Nectria haematococca mpVI 77-13-4]
  misc_feature (7)..(444): NCBI GI: 145253565 Blast Desc: An17g00660 [Aspergillus niger] gi|134083863|emb|CAK42994.1| protein product [Aspergillus niger]
  misc_feature (7)..(445): NCBI GI: 238494404 Blast Desc: conserved [Aspergillus flavus NRRL3357] gi|220695088|gb|EED51431.1| conserved [Aspergillus flavus NRRL3357]
  misc_feature (5)..(451): NCBI GI: 145232040 Blast Desc: An02g03490 [Aspergillus niger] gi|134056395|emb|CAK47629.1| protein product [Aspergillus niger]
MTTGPYPVPNATVPFWRTELHELDSHRSTAELPEKQDIVIIGAGFAGAALAYYLLKDFSESETKPSITILEAREACSGATGRNGGQLRPDIFNGTASRMKKHGLDIANEVAQFELSNQEVLVDLIKSENIDCDLVSLTTGVAIVDAKEAADTKALWDEMHEKGCPPLKQVTYHGPDEAEKVSGVKGAIAAYNFAAHVIWPYKMVMHLLSDAVAAGVNLQTHTPVRSVSDTADSEGYWTLETSRGSIKAKRVVFATNGYTSGLLAEYMDAILPSRGSCARVVATKSPGPKFQSSSAVVTRSPNTHDCYWGVRPDGSYIVGGAGSYRDKRELWERNFDDSTLIEPAIPFFEQWAGKNFVGWENAETKIANVWTGIMGYTADDLPHVGNVPGKDGLYICAGFIGHGMPNVLLCARAIAKLLQDGSSLSQSGIPACYETSSKRLSEARKLLARWPKGVPFVKDEN

SEQ ID NO: 36253 - DNA, 3704 bp, Muscodor strobelii
  misc_feature: SGI EST ID NO. CUFF.86360.0
  misc_feature: Variant of the nucleotide sequence at SEQ ID NO 36251
accacctcaacatcgcatccgtagcagcactggctacatcatcaccaagatgccgaaagcagaagctgggtccgttaaggacctgagcaagcgcatgaagatgaaggggttacagcggttgcggttctactgtcaggtctgcgagcgccaaatggtacgtgtaaaaagatcccacgcgaccttttttttgatggtattcctcagacgtcgtactaacttctttatagtaagtaacctaacctgtcaagtatcagaaattagccctttgtcttaaaacccgcggccccgcgaacgtcgtgaaaaagtaactaacgcaacacctttctggctaccaggcgagacgagaacggcttcaagcaacataccatgagcgaaagccacgtccgccagatgatcctcgtcggcgaagaccccaagaagcacatcgaggacttcagcaagcaattctcgaaagacttcctgcagctcctgcgcacctcccacggagagaagtctgtgcacatcaaccatttctaccagaactacatcgccaacaaagagcacgtgcatatgaacgctacgaaatggccttcccttaccgagtatgcgaagtacctgggacgggaaggtatctgtagagtagaagagaccgataagggcctacacattgcctggatcgatgactcgcccgatgctctgcgccgcaaagaagctgtgaagagaaaagagatgcaggacaagggcgatgaggagcgcgagcagcgcatgatacgagagcagattcgtcgcgctaagagggacgccggagagaaagacgaggacgatgctgaggaaacggtcgacaagggattgcaaagacaagaaggcgagaaagtcaaactttcctttggggcaaagcctgccgcgccggctatagatgctacatctgcgccagaaattgttaaggacaattcgaatgcaccagaggagcctgacgatgcctcgaagaccgaagacccagctaccgaagccgcaaagccggcagctgcacccattagtctaaagatgggagccacaaagccgcaaacgaaaaatgtcttcgccgccgcaaaaaaaaatgcactagcaggctcaaagggcaagtcgtctgtcttcgagcaacccaagaagatgagcgaagcggagcgcatcatgagagaggagcaggagaagaagagatcccgtgagggtctggggtttgggggacctaacaaacgccaaaggacgtagatattcggtttcgcccatttgatttcttgttgttttctaaggcgttcgggtatacccaaggaggacatcatcagtggtgtaagcaaggcgttggttggcaatcacatacactctgaagatgattaaaagagcttccatattatgttcgtggttggagggattcgtagcttcaggcaactgtatatccaatgtcaatgtggtgcatttcaagatccatcacctgcaacgatgactgatcaacatcgaggctcagagctgatctttcgtggctttcttattgtattcgcgtctcttacgtacactcgaagttccgtacatgctcaactagctactgcaatgccatttctaaatcctgattgatcatttgtcctagattctttacgcgcgctaccgagtcgaatggttgttgccttagaaaaggggaacttctgctccggtgccccacccaatccgaagccgacgcggcttcgggatagcgaacaccctggtgagataatacagtactcgacttacacgttgcgtagctcatgacgataacatgaaaatgcacatcgatatattggatatataaagaggtgatgttggacttatgctgatcctaagaaaggccaaagcgcataaggtgatttcattccatcatttgcaacaccacagtctacctaggcatccatcagaaacagctagatcaaccgggaaacgattgtctaagacttctatctcgattatcgtaatctcacaaaatgacgaccggtccatacccagtgcctaatgccaccgtgccattctggcggacggagcttcatgagctggattcgcataggagcacagctgagctccccgagaaacaagatatcgttatcatcggagcaggctttgccggcgctgcgctggcatattacttgctaaaagacttctccgaatctgagactaagcctagcattactatactagaggctagagaggcttgctctggtgctacaggaagaaatggaggacaactcagaccagacatcttcaacggcacagcatcacgaatgaagaagcatggtctcgacatcgcaaacgaagtcgcccaattcgagctttcgaatcaagaggtcttggtagatctcatcaagagcgagaacatcgattgtgatctcgtgtcattgactaccggagttgcgatcgtcgatgcaaaagaagccgctgataccaaggcactttgggacgagatgcacgagaagggctgccctcccttgaagcaagtaacataccatggacctgacgaggctgaaaaagtcagtggtgtcaaaggtgcgatcgcagcttataactttgctgcgcatgttatttggccatacaagatggtcatgcaccttttgtctgacgccgtggccgcgggggttaatcttcagactcatacaccagtccgttctgtctcggacacggcagacagcgagggatactggaccttggagacctcccgcgggagtatcaaggcgaaacgtgttgtgttcgcaactaatgggtataccagcggacttctggcagagtacatggacgcgattcttccgagtcgtgggtcgtgtgctcgagtcgttgctaccaaatcgccaggaccgaaatttcagtcgtcttctgccgttgtcacacggagtccaaatacacatgattgttattggggtgttcgaccggatggcagctacattgttggaggtgccggcagttatcgagataagagagagctttgggagaggaactttgatgactcgactctgattgagcctgctataccgttctttgagcagtgggcagggaagaactttgttgggtgggagaatgctgagactaagattgcgaatgtttggacgggcattatgggttacacagctgatgacttacctcatgttggtaatgttcctgggaaagatgggttatatatttgcgcaggattcattggccatgggatgccaaatgtgttgctgtgcgcaagggcaatcgcaaagttgctgcaagatgggtcttcgctttctcagtcaggcattcctgcttgttatgagacaagttcgaagcggttgtctgaagcacgcaagctgttggcacggtggcccaagggagtaccttttgtcaaagacgagaactgagacgtagcgtagctgagaagtttacacgaagtctggtagcaatagtctatacctcatttaaaccccgttgaagttttactagttcacatggagttgttggttatgatgcatgccaaggtgtcttatgtcattggatagaattggatagaattggtacctggcgaccgatccaagaggacagctcattcgtacatgcatgttaaccagccgacagctctgtaatcatgtgctgttggaacagtctaggtgaacaacagagagaagacgaaacaattgcacaagaattaactctcatggtgaaaaaaatttgataggagcgggattgaggctaataaaactgacagatgggca

SEQ ID NO: 36254 - DNA, 1041 bp, Muscodor strobelii
  misc_feature: SGI cDNA ID NO. 572565
  misc_feature: Encodes the peptide sequence at SEQ ID NO 36255
atgccgaaagcagaagctgggtccgttaaggacctgagcaagcgcatgaagatgaaggggttacagcggttgcggttctactgtcaggtctgcgagcgccaaatggtactaagtaacctaacctgtcaagtatcagaaattagccctttgcgagacgagaacggcttcaagcaacataccatgagcgaaagccacgtccgccagatgatcctcgtcggcgaagaccccaagaagcacatcgaggacttcagcaagcaattctcgaaagacttcctgcagctcctgcgcacctcccacggagagaagtctgtgcacatcaaccatttctaccagaactacatcgccaacaaagagcacgtgcatatgaacgctacgaaatggccttcccttaccgagtatgcgaagtacctgggacgggaaggtatctgtagagtagaagagaccgataagggcctacacattgcctggatcgatgactcgcccgatgctctgcgccgcaaagaagctgtgaagagaaaagagatgcaggacaagggcgatgaggagcgcgagcagcgcatgatacgagagcagattcgtcgcgctaagagggacgccggagagaaagacgaggacgatgctgaggaaacggtcgacaagggattgcaaagacaagaaggcgagaaagtcaaactttcctttggggcaaagcctgccgcgccggctatagatgctacatctgcgccagaaattgttaaggacaattcgaatgcaccagaggagcctgacgatgcctcgaagaccgaagacccagctaccgaagccgcaaagccggcagctgcacccattagtctaaagatgggagccacaaagccgcaaacgaaaaatgtcttcgccgccgcaaaaaaaaatgcactagcaggctcaaagggcaagtcgtctgtcttcgagcaacccaagaagatgagcgaagcggagcgcatcatgagagaggagcaggagaagaagagatcccgtgagggtctggggtttgggggacctaacaaacgccaaaggacgtag

SEQ ID NO: 36255 - protein, 346 aa, Muscodor strobelii
  misc_feature: SGI Peptide ID NO. 572565
  misc_feature (1)..(346): NCBI GI: 256731298 Blast Desc: NECHADRAFT_71693 [Nectria haematococca mpVI 77-13-4]
  misc_feature (1)..(344): NCBI GI: 156065109 Blast Desc: SS1G_00565 [Sclerotinia sclerotiorum 1980] gi|154691424|gb|EDN91162.1| SS1G_00565 [Sclerotinia sclerotiorum 1980]
  misc_feature (1)..(346): NCBI GI: 46126029 Blast Desc: FG07392.1 [Gibberella zeae PH-1]
  misc_feature (1)..(346): NCBI GI: 261351539 Blast Desc: zinc finger protein RTS2 [Verticillium albo-atrum VaMs.102]
  misc_feature (1)..(345): NCBI GI: 154311507 Blast Desc: BC1G_06606 [Botryotinia fuckeliana B05.10] gi|150851003|gb|EDN26196.1| BC1G_06606 [Botryotinia fuckeliana B05.10]
  misc_feature (1)..(345): NCBI GI: 39978119 Blast Desc: MGG_06944 [Magnaporthe grisea 70-15] gi|145013482|gb|EDJ98123.1| MGG_06944 [Magnaporthe grisea 70-15] gi|193499287|gb|ACF18586.1| APF1 [Magnaporthe oryzae]
  misc_feature (1)..(345): NCBI GI: 240109268 Blast Desc: CPC735_027730 [Coccidioides posadasii C735 delta SOWgp]
  misc_feature (1)..(341): NCBI GI: 226281384 Blast Desc: zinc finger protein RTS2 [Paracoccidioides brasiliensis Pb01]
  misc_feature (1)..(345): NCBI GI: 119182424 Blast Desc: CIMG_06240 [Coccidioides immitis RS]
  misc_feature (1)..(341): NCBI GI: 261189518 Blast Desc: C2H2 finger domain-containing protein [Ajellomyces dermatitidis SLH14081] gi|239591747|gb|EEQ74328.1| C2H2 finger domain-containing protein [Ajellomyces dermatitidis SLH14081]
MPKAEAGSVKDLSKRMKMKGLQRLRFYCQVCERQMVLSNLTCQVSEISPLRDENGFKQHTMSESHVRQMILVGEDPKKHIEDFSKQFSKDFLQLLRTSHGEKSVHINHFYQNYIANKEHVHMNATKWPSLTEYAKYLGREGICRVEETDKGLHIAWIDDSPDALRRKEAVKRKEMQDKGDEEREQRMIREQIRRAKRDAGEKDEDDAEETVDKGLQRQEGEKVKLSFGAKPAAPAIDATSAPEIVKDNSNAPEEPDDASKTEDPATEAAKPAAAPISLKMGATKPQTKNVFAAAKKNALAGSKGKSSVFEQPKKMSEAERIMREEQEKKRSREGLGFGGPNKRQRT

SEQ ID NO: 36256 - DNA, 534 bp, Muscodor strobelii
  misc_feature: SGI cDNA ID NO. 572566
  misc_feature: Encodes the peptide sequence at SEQ ID NO 36257
atgttccggaagtcggttcgagcttttctattggcagcgcttctgccattggccactgccgacttctggcttacgtatctcaatcagagagtaagtgacaacgatggcgtagacgtttatgaaggaggaacttttacgtcgaagccacctcaatggagctgtgatgactgggacatcttcaatcatccaatctggccgatttccgacgacgtcagtggcgataaacatggcatgcgagtagatcctaagacagataggggctatcctttataccgagatcctctggacgttgtcgagttcaatacatggaagactaatcccggacatcaaacgatctacgcggaaagggggtatgccatggtggatatcgatggctactcgactggacaatgccatctcaacagatcattcactttcgagttgttatgtggtactcacgctaccgacattagtcttcggggttcgtcgatgttcttttgcgaaacacatctgctgccgagtgactctgacaactcgactaaatttggattctaa

SEQ ID NO: 36257 - protein, 177 aa, Muscodor strobelii
  misc_feature: SGI Peptide ID NO. 572566
  misc_feature (1)..(164): NCBI GI: 171693163 Blast Desc: protein product [Podospora anserina] gi|170946530|emb|CAP73331.1| protein product [Podospora anserina]
MFRKSVRAFLLAALLPLATADFWLTYLNQRVSDNDGVDVYEGGTFTSKPPQWSCDDWDIFNHPIWPISDDVSGDKHGMRVDPKTDRGYPLYRDPLDVVEFNTWKTNPGHQTIYAERGYAMVDIDGYSTGQCHLNRSFTFELLCGTHATDISLRGSSMFFCETHLLPSDSDNSTKFGF

SEQ ID NO: 36258 - DNA, 1422 bp, Muscodor strobelii
  misc_feature: SGI cDNA ID NO. 572567
  misc_feature: Encodes the peptide sequence at SEQ ID NO 36259
atggcactccacaaagactccgaaatcctaatcgtcggatccggcgtcttcgggctctcaaccgccctctggcttgcccgttcgggataccgctccgtcacagtctttgacatgcaagacacggaatcaagcggttacgaccctgcagctggaattgactcagcgtctgcggacatcaacaagattattcgcttttcgtacgggaaagaaattgagtatcaacgtcttgcttcacaggctgctgagctgtgggaagagtggaatgagcaggtcagggttgcggaggaggtaccgaaggtgttgagaagtgagaggaagttgtggtataattgtggattcctaagaatggctgctgggaaagagctggcggagtttgaaattgagacgttgcggaatatggagagggagggggttagggatagtcagtttaggtgtgacgatgaaattgatatacagagagcatcacacaccggctgggctcacaaattagatgtttgcaatcggcagcagcgattcggtgttcataaagcggtattggactcgagtgggggatatgtagctgcatataagagctgtgcttgggcacagcatctagctaagcaggccggtgtaaagttcatcttcggttctaaggagggtaaagtcactttgattggtgaaactgttgataataagccttatgttctcacttccgaggggtcgagttatcgagcggacttggtcgttgttgctggtggtggctggacagcaggacttctccccgaagcagcaggtctcatcgaaacaactgctggctccgtggcagctatacaacttcccaaagaccgtacagatctgtgggatcgcttctcgccggagaagtttccggttgtgacttggggtatgaaggaggggaaggatatctatagtttcccccgtgatgagaatggagtgattaaaattggatatcgaaaaacgaagtggacgaactatgactatgtgtgggggcataggatatcggtcccgaagactgctcacgtcacggaagagaaagaggtgaatattccggttgtggctttggatgctgttaaagagtatatctcagtgaatcttccagaacttgctgaattaggaatatcgtctacgaaactctgttggtacacagatagcatcgataattccttcgtggtggacttcgtgccaggacgtccaagcgttgcgatatgttccgggggtagtggtcatggatttaagttcttgcctattcttgggcgggaggttgtcaagattcttgaaggaaagggtgatcatacagtctatgggaagatgtggaagtggagggagagtaaagcggcaaagaggaatggactcgaagatggtgaagatggtccgagagtgttggggaagcagaatatggctagtgaagcggattggactttctga

SEQ ID NO: 36259 - protein, 473 aa, Muscodor strobelii
  misc_feature: SGI Peptide ID NO. 572567
  misc_feature (8)..(423): Pfam Id: PF01266 Pfam Desc: FAD dependent oxidoreductase
  misc_feature (6)..(471): NCBI GI: 134115377 Blast Desc: CNBI0160 [Cryptococcus neoformans var. neoformans B-3501A] gi|50256277|gb|EAL19003.1| CNBI0160 [Cryptococcus neoformans var. neoformans B-3501A]
  misc_feature (6)..(471): NCBI GI: 58261558 Blast Desc: [Cryptococcus neoformans var. neoformans JEC21] gi|57230271|gb|AAW46672.1| expressed protein [Cryptococcus neoformans var. neoformans JEC21]
  misc_feature (9)..(473): NCBI GI: 134118636 Blast Desc: CNBN0030 [Cryptococcus neoformans var. neoformans B-3501A] gi|50254625|gb|EAL17373.1| CNBN0030 [Cryptococcus neoformans var. neoformans B-3501A]
  misc_feature (3)..(467): NCBI GI: 256723636 Blast Desc: NECHADRAFT_52094 [Nectria haematococca mpVI 77-13-4]
  misc_feature (1)..(468): NCBI GI: 67902918 Blast Desc: AN8446.2 [Aspergillus nidulans FGSC A4] gi|40747912|gb|EAA67068.1| AN8446.2 [Aspergillus nidulans FGSC A4] gi|259484391|tpe|CBF80571.1| TPA: conserved [Aspergillus FGSC
  misc_feature (1)..(467): NCBI GI: 256732388 Blast Desc: NECHADRAFT_41526 [Nectria haematococca mpVI 77-13-4]
  misc_feature (3)..(458): NCBI GI: 255946443 Blast Desc: Pc20g15150 [Penicillium chrysogenum Wisconsin 54-1255] gi|211588724|emb|CAP86844.1| Pc20g15150 [Penicillium chrysogenum Wisconsin 54-1255]
  misc_feature (9)..(462): NCBI GI: 256728828 Blast Desc: NECHADRAFT_79853 [Nectria haematococca mpVI 77-13-4]
  misc_feature (9)..(394): NCBI GI: 58262206 Blast Desc: [Cryptococcus neoformans var. neoformans JEC21] gi|57230687|gb|AAW46996.1| expressed protein [Cryptococcus neoformans var. neoformans JEC21]
  misc_feature (5)..(467): NCBI GI: 256723079 Blast Desc: NECHADRAFT_94121 [Nectria haematococca mpVI 77-13-4]
  misc_feature (5)..(441): SWISSPROT Homolog: EC 1.5.3.7 L-pipecolate oxidase
MALHKDSEILIVGSGVFGLSTALWLARSGYRSVTVFDMQDTESSGYDPAAGIDSASADINKIIRFSYGKEIEYQRLASQAAELWEEWNEQVRVAEEVPKVLRSERKLWYNCGFLRMAAGKELAEFEIETLRNMEREGVRDSQFRCDDEIDIQRASHTGWAHKLDVCNRQQRFGVHKAVLDSSGGYVAAYKSCAWAQHLAKQAGVKFIFGSKEGKVTLIGETVDNKPYVLTSEGSSYRADLVVVAGGGWTAGLLPEAAGLIETTAGSVAAIQLPKDRTDLWDRFSPEKFPVVTWGMKEGKDIYSFPRDENGVIKIGYRKTKWTNYDYVWGHRISVPKTAHVTEEKEVNIPVVALDAVKEYISVNLPELAELGISSTKLCWYTDSIDNSFVVDFVPGRPSVAICSGGSGHGFKFLPILGREVVKILEGKGDHTVYGKMWKWRESKAAKRNGLEDGEDGPRVLGKQNMASEADWTF

SEQ ID NO: 36260 - DNA, 1868 bp, Muscodor strobelii
  misc_feature: SGI EST ID NO. CUFF.86348.0
  misc_feature: Variant of the nucleotide sequence at SEQ ID NO 36258
gcgaaggccataggttcaagccctatactgaccatcatgtcttctttttgttgctttttggcggattttggtcattgaaagtataagaatggtttttggtagctagtgggtgttttgattttgcttgatgaaggatcgcgatttaggatgttgacttatgatggtcgagctgtgatgaggatgtctgcttctgtttgtcttgatattgccgtttgttcggggtcggtatacataatgtggggaagtgcaatacatgacggggtctcttcgaaaccatcacaacaaatcggcatcccaagaatcaaatcatctactggatcgatgattttgcgccgccgcgatattaaactctatatctctaggcagacaaaatggcactccacaaagactccgaaatcctaatcgtcggatccggcgtcttcgggctctcaaccgccctctggcttgcccgttcgggataccgctccgtcacagtctttgacatgcaagacacggaatcaagcggttacgaccctgcagctggaattgactcagcgtctgcggacatcaacaagattattcgcttttcgtacgggaaagaaattgagtatcaacgtcttgcttcacaggctgctgagctgtgggaagagtggaatgagcaggtcagggttgcggaggaggtaccgaaggtgttgagaagtgagaggaagttgtggtataattgtggattcctaagaatggctgctgggaaagagctggcggagtttgaaattgagacgttgcggaatatggagagggagggggttagggatagtcagtttaggtgtgacgatgaaattgatatacagagagcatcacacaccggctgggctcacaaattagatgtttgcaatcggcagcagcgattcggtgttcataaagcggtattggactcgagtgggggatatgtagctgcatataagagctgtgcttgggcacagcatctagctaagcaggccggtgtaaagttcatcttcggttctaaggagggtaaagtcactttgattggtgaaactgttgataataagccttatgttctcacttccgaggggtcgagttatcgagcggacttggtcgttgttgctggtggtggctggacagcaggacttctccccgaagcagcaggtctcatcgaaacaactgctggctccgtggcagctatacaacttcccaaagaccgtacagatctgtgggatcgcttctcgccggagaagtttccggttgtgacttggggtatgaaggaggggaaggatatctatagtttcccccgtgatgagaatggagtgattaaaattggatatcgaaaaacgaagtggacgaactatgactatgtgtgggggcataggatatcggtcccgaagactgctcacgtcacggaagagaaagaggtgaatattccggttgtggctttggatgctgttaaagagtatatctcagtgaatcttccagaacttgctgaattaggaatatcgtctacgaaactctgttggtacacagatagcatcgataattccttcgtggtggacttcgtgccaggacgtccaagcgttgcgatatgttccgggggtagtggtcatggatttaagttcttgcctattcttgggcgggaggttgtcaagattcttgaaggaaagggtgatcatacagtctatgggaagatgtggaagtggagggagagtaaagcggcaaagaggaatggactcgaagatggtgaagatggtccgagagtgttggggaagcagaatatggctagtgaagcggattggactttctgatataatagaacagtaaatcaggatgttgaagaatgtcttggaaactgaagaggtcctcgcttactgccagataag

SEQ ID NO: 36261 - DNA, 210 bp, Muscodor strobelii
  misc_feature: SGI cDNA ID NO. 572568
  misc_feature: Encodes the peptide sequence at SEQ ID NO 36262
atgtcgtccggcacacagcaggcaaaggagaagttccagcaagccgttgagaagacacgggcgccggctgaacatgatggtaccaaagaagccgcgcaattgaacgctggaaatcctaagacaggccactttgtgtccaaccttgcgaagggcgatacagtgtcttcgaattatgtccctggacactttgggggtaatggcaagggatag

SEQ ID NO: 36262 - protein, 69 aa, Muscodor strobelii
  misc_feature: SGI Peptide ID NO. 572568
MSSGTQQAKEKFQQAVEKTRAPAEHDGTKEAAQLNAGNPKTGHFVSNLAKGDTVSSNYVPGHFGGNGKG

SEQ ID NO: 36263 - DNA, 534 bp, Muscodor strobelii
  misc_feature: SGI EST ID NO. CUFF.86345.0
  misc_feature: Variant of the nucleotide sequence at SEQ ID NO 36261
gcttgtgtcatgatgacgtcttcactgagactacatatatcattttcgtacatcttaaaggatgcaaccaatctcgcaaattatcaatccaaagttgtaatcattaccatatctagatacatcacttaaatctcaaccaccaatttatatcgtcgtaatgtcgtccggcacacagcaggcaaaggagaagttccagcaagccgttgagaagacacgggcgccggctgaacatgatggtaccaaagaagccgcgcaattgaacgctggaaatcctaagacaggccactttgtgtccaaccttgcgaagggcgatacagtgtcttcgaattatgtccctggacactttgggggtaatggcaagggatagaggattatgtacaggaacgcgatgggttgaacagccatcgtatgataagtgttgaatgttgtgtatcaaaataagaatttctatctctacgaactaaaacacaaaaagagtcgtctctttctggtgaaagcagcaattcagttccttaccctgaccgtcaacccgtg

SEQ ID NO: 36264 - DNA, 1605 bp, Muscodor strobelii
  misc_feature: SGI cDNA ID NO. 572569
  misc_feature: Encodes the peptide sequence at SEQ ID NO 36265
atggccacaaacgggacagcgatgctaggcaataccagccctggaggctggatcgtgcaaaagtttggcgggacgagcgtgggcaagttccctgacaatgttggtttcctactcgaacaccgctccgctagtaggacgcagctaatcacgtccgatttcgcaaacagattgcccgcgacatatgaaaacctagcttcaaacaagattgtggttgtctgctctgctagaagcacgggaaagaaggcgagcggcactacgagtcgattactcgaagtcttcaagaaactccgcgatatttctgctgctacgagcaatgagcagagtcagaccgaactgatcgaagaagctaaggcaacaatccgcgatatatgcagcgagcatatccttgccgttcaaagctctatcacagatcccgatttgcagaaagagacctctaagggaatacaagatgattgtgacgaactgatagactacatcattgctgcaaaacgattcaatctcgaggtcaatgccagatcgaaagaccgggttactagcttcggcgagaaactgagctgtcggttcatggcagctatgttgaaagaccataatgtcgacgccgaatatgtcgatctttccgatgttttaatctacgatagctccgacaggctcaccccagccttcttcaccgacgctgccgctatattccgcaagcgaatagaggcctgtggcgatcgggtacccgtcatcacgggtttctttggaaatgtgcctggaagtttgatgaatggagaaattggacgaggatatactgatctttgcgccgcattggctgctgtcggaatgaaagctacagagctgcaggtgtggaaagaggtggatggcatctttacggccgacccgaccaaagtcccgactgctcgactattgagctccgtcacaccctccgaagccgccgaactcacattctatggttccgaggttatccatcatctgaccatggaccaagtcatcaaggcacatcccccgataccgatccgtatcaagaacgtgaagaacccccgtggaaatggcacaatcgttgtaccagatcctgtacaatctgctggacaaaaaatcaagagatctcgtccgtcggacgcgtcattgaggaagactccgaagcgacctaccgccgttactattaaggataatatcacggtcatcaacgtccattcgaacaagcgatcgatcagccacggattctttgctaaggtgttttcgatcttgaacaatcataggatctccgtcgatctaatctcgacatccgaggtgcatgtctcaatggccatccaccaagtcagctcgtctatccaccacttcgagaaggccaagcaagagctggaagagtgtggcgatgtcagcatactcgttgatatggctatcttgagtctagtcggtgccgagatgaagaatatgatcggtgtcgctggtcgcatgttctctacccttgggcagcatcaagttaatattgagatgatatcacaaggcgctagtgagatcaacatttcttgcgtcattgacgcacgcgatgccacgagagctatgaatgttctgcatacgaatctgtttacgttcttagaatag

SEQ ID NO: 36265 - protein, 534 aa, Muscodor strobelii
  misc_feature: SGI Peptide ID NO. 572569
  misc_feature (470)..(530): Pfam Id: PF01842 Pfam Desc: ACT domain
  misc_feature (16)..(343): Pfam Id: PF00696 Pfam Desc: Amino acid kinase family
  misc_feature (168)..(343): Pfam Id: PF00696 Pfam Desc: Amino acid kinase family
  misc_feature (407)..(459): Pfam Id: PF01842 Pfam Desc: ACT domain
  misc_feature (7)..(534): NCBI GI: 116198233 Blast Desc: CHGG_07272 [Chaetomium globosum CBS 148.51] gi|88178551|gb|EAQ86019.1| CHGG_07272 [Chaetomium globosum CBS 148.51]
  misc_feature (7)..(534): NCBI GI: 171693697 Blast Desc: protein product [Podospora anserina] gi|170946797|emb|CAP73601.1| protein product [Podospora anserina]
  misc_feature (5)..(534): NCBI GI: 261355633 Blast Desc: aspartokinase [Verticillium albo-atrum VaMs.102]
  misc_feature (5)..(534): NCBI GI: 85102134 Blast Desc: aspartokinase [Neurospora crassa OR74A] gi|21622337|emb|CAD36978.1| aspartate kinase [Neurospora crassa] gi|28922817|gb|EAA32038.1| aspartokinase [Neurospora crassa
  misc_feature (9)..(502): NCBI GI: 145605758 Blast Desc: MGG_11805 [Magnaporthe grisea 70-15] gi|145013555|gb|EDJ98196.1| MGG_11805 [Magnaporthe grisea 70-15]
  misc_feature (5)..(534): NCBI GI: 256731279 Blast Desc: [Nectria haematococca mpVI 77-13-4]
  misc_feature (11)..(534): NCBI GI: 46126087 Blast Desc: FG07421.1 [Gibberella zeae PH-1]
  misc_feature (11)..(534): NCBI GI: 156065127 Blast Desc: SS1G_00574 [Sclerotinia sclerotiorum 1980] gi|154691433|gb|EDN91171.1| SS1G_00574 [Sclerotinia sclerotiorum 1980]
  misc_feature (11)..(534): NCBI GI: 154311487 Blast Desc: BC1G_06596 [Botryotinia fuckeliana B05.10] gi|150850993|gb|EDN26186.1| BC1G_06596 [Botryotinia fuckeliana B05.10]
  misc_feature (1)..(534): NCBI GI: 169765293 Blast Desc: [Aspergillus oryzae RIB40] gi|83764972|dbj|BAE55116.1| protein product [Aspergillus oryzae]
  misc_feature (11)..(530): SWISSPROT Homolog: EC 2.7.2.4 Aspartate kinase
MATNGTAMLGNTSPGGWIVQKFGGTSVGKFPDNVGFLLEHRSASRTQLITSDFANRLPATYENLASNKIVVVCSARSTGKKASGTTSRLLEVFKKLRDISAATSNEQSQTELIEEAKATIRDICSEHILAVQSSITDPDLQKETSKGIQDDCDELIDYIIAAKRFNLEVNARSKDRVTSFGEKLSCRFMAAMLKDHNVDAEYVDLSDVLIYDSSDRLTPAFFTDAAAIFRKRIEACGDRVPVITGFFGNVPGSLMNGEIGRGYTDLCAALAAVGMKATELQVWKEVDGIFTADPTKVPTARLLSSVTPSEAAELTFYGSEVIHHLTMDQVIKAHPPIPIRIKNVKNPRGNGTIVVPDPVQSAGQKIKRSRPSDASLRKTPKRPTAVTIKDNITVINVHSNKRSISHGFFAKVFSILNNHRISVDLISTSEVHVSMAIHQVSSSIHHFEKAKQELEECGDVSILVDMAILSLVGAEMKNMIGVAGRMFSTLGQHQVNIEMISQGASEINISCVIDARDATRAMNVLHTNLFTFLE

SEQ ID NO: 36266 - DNA, 2279 bp, Muscodor strobelii
  misc_feature: SGI EST ID NO. CUFF.86396.0
  misc_feature: Variant of the nucleotide sequence at SEQ ID NO 36264
gccagattttgcgaacttgcgagtgtgtagggcgaatgtgcagggatgcagcccctaccgggcgggcacttttaccccactatgatggcaagctagagcatctcgacattttttgtgtatgactcggctcctctagaagagctccgcgattcgggacggaaaatattggatatagatagatggagtgatggacgtaagggacgcgggctagcattctcataccattcatacaatctacacaatattctgctgtctctttgcattgggcggctaattgcacttcgaagcgtgtttctgttcgtgtttaactctcattgagtcgattagtgcccctccattccttaccaaacattcctgggcctcgtgcgccaaaagaataccataatattctcaaacgtctttgcccattgaccatggccacaaacgggacagcgatgctaggcaataccagccctggaggctggatcgtgcaaaagtttggcgggacgagcgtgggcaagttccctgacaatattgcccgcgacatagtgcggtacgactaagcaccaagccattgactctccctacagccttcaacagatctgtactgacgtcagtgacgaagtgaaaacctagcttcaaacaagattgtggttgtctgctctgctagaagcacgggaaagaaggcgagcggcactacgagtcgattactcgaagtcttcaagaaactccgcgatatttctgctgctacgagcaatgagcagagtcagaccgaactgatcgaagaagctaaggcaacaatccgcgatatatgcagcgagcatatccttgccgttcaaagctctatcacagatcccgatttgcagaaagagacctctaagggaatacaagatgattgtgacgaactgatagactacatcattgctgcaaaacgattcaatctcgaggtcaatgccagatcgaaagaccgggttactagcttcggcgagaaactgagctgtcggttcatggcagctatgttgaaagaccataatgtcgacgccgaatatgtcgatctttccgatgttttaatctacgatagctccgacaggctcaccccagccttcttcaccgacgctgccgctatattccgcaagcgaatagaggcctgtggcgatcgggtacccgtcatcacgggtttctttggaaatgtgcctggaagtttgatgaatggagaaattggacgaggatatactgatctttgcgccgcattggctgctgtcggaatgaaagctacagagctgcaggtgtggaaagaggtggatggcatctttacggccgacccgaccaaagtcccgactgctcgactattgagctccgtcacaccctccgaagccgccgaactcacattctatggttccgaggttatccatcatctgaccatggaccaagtcatcaaggcacatcccccgataccgatccgtatcaagaacgtgaagaacccccgtggaaatggcacaatcgttgtaccagatcctgtacaatctgctggacaaaaaatcaagagatctcgtccgtcggacgcgtcattgaggaagactccgaagcgacctaccgccgttactattaaggataatatcacggtcatcaacgtccattcgaacaagcgatcgatcagccacggattctttgctaaggtgttttcgatcttgaacaatcataggatctccgtcgatctaatctcgacatccgaggtgcatgtctcaatggccatccaccaagtcagctcgtctatccaccacttcgagaaggccaagcaagagctggaagagtgtggcgatgtcagcatactcgttgatatggctatcttgagtctagtcggtgccgagatgaagaatatgatcggtgtcgctggtcgcatgttctctacccttgggcagcatcaagttaatattgagatgatatcacaaggcgctagtgagatcaacatttcttgcgtcattgacgcacgcgatgccacgagagctatgaatgttctgcatacgaatctgtttacgttcttagaatagaaaacctaagactccggaagaaaagacgatcgaaaagacggctaaaagcatgctagacggggatgggcataaaaaggcgtattccgggggttggttttggcattttcattctatttcttgttttatttgagtcgataccctgaaaagctgtatatgcatgtttgtgtaaatctgcgaacatatttaagatcgaaggagggagattcgtaattatatatagcggtgaattaggaaaatattttaaaagtggcc

SEQ ID NO: 36267 - DNA, 1542 bp, Muscodor strobelii
  misc_feature: SGI cDNA ID NO. 572570
  misc_feature: Reduced expression when VOC is produced
  misc_feature: Encodes the peptide sequence at SEQ ID NO 36268
atggccacaaacgggacagcgatgctaggcaataccagccctggaggctggatcgtgcaaaagtttggcgggacgagcgtgggcaagttccctgacaatattgcccgcgacatagtgcgtgaaaacctagcttcaaacaagattgtggttgtctgctctgctagaagcacgggaaagaaggcgagcggcactacgagtcgattactcgaagtcttcaagaaactccgcgatatttctgctgctacgagcaatgagcagagtcagaccgaactgatcgaagaagctaaggcaacaatccgcgatatatgcagcgagcatatccttgccgttcaaagctctatcacagatcccgatttgcagaaagagacctctaagggaatacaagatgattgtgacgaactgatagactacatcattgctgcaaaacgattcaatctcgaggtcaatgccagatcgaaagaccgggttactagcttcggcgagaaactgagctgtcggttcatggcagctatgttgaaagaccataatgtcgacgccgaatatgtcgatctttccgatgttttaatctacgatagctccgacaggctcaccccagccttcttcaccgacgctgccgctatattccgcaagcgaatagaggcctgtggcgatcgggtacccgtcatcacgggtttctttggaaatgtgcctggaagtttgatgaatggagaaattggacgaggatatactgatctttgcgccgcattggctgctgtcggaatgaaagctacagagctgcaggtgtggaaagaggtggatggcatctttacggccgacccgaccaaagtcccgactgctcgactattgagctccgtcacaccctccgaagccgccgaactcacattctatggttccgaggttatccatcatctgaccatggaccaagtcatcaaggcacatcccccgataccgatccgtatcaagaacgtgaagaacccccgtggaaatggcacaatcgttgtaccagatcctgtacaatctgctggacaaaaaatcaagagatctcgtccgtcggacgcgtcattgaggaagactccgaagcgacctaccgccgttactattaaggataatatcacggtcatcaacgtccattcgaacaagcgatcgatcagccacggattctttgctaaggtgttttcgatcttgaacaatcataggatctccgtcgatctaatctcgacatccgaggtgcatgtctcaatggccatccaccaagtcagctcgtctatccaccacttcgagaaggccaagcaagagctggaagagtgtggcgatgtcagcatactcgttgatatggctatcttgagtctagtcggtgccgagatgaagaatatgatcggtgtcgctggtcgcatgttctctacccttgggcagcatcaagttaatattgagatgatatcacaaggcgctagtgagatcaacatttcttgcgtcattgacgcacgcgatgccacgagagctatgaatgttctgcatacgaatctgtttacgttcttagaatag

SEQ ID NO: 36268 - protein, 513 aa, Muscodor strobelii
  misc_feature: SGI Peptide ID NO. 572570
  misc_feature (449)..(509): Pfam Id: PF01842 Pfam Desc: ACT domain
  misc_feature (16)..(322): Pfam Id: PF00696 Pfam Desc: Amino acid kinase family
  misc_feature (386)..(438): Pfam Id: PF01842 Pfam Desc: ACT domain
  misc_feature (7)..(513): NCBI GI: 171693697 Blast Desc: protein product [Podospora anserina] gi|170946797|emb|CAP73601.1| protein product [Podospora anserina]
  misc_feature (7)..(513): NCBI GI: 116198233 Blast Desc: CHGG_07272 [Chaetomium globosum CBS 148.51] gi|88178551|gb|EAQ86019.1| CHGG_07272 [Chaetomium globosum CBS 148.51]
  misc_feature (5)..(513): NCBI GI: 85102134 Blast Desc: aspartokinase [Neurospora crassa OR74A] gi|21622337|emb|CAD36978.1| aspartate kinase [Neurospora crassa] gi|28922817|gb|EAA32038.1| aspartokinase [Neurospora crassa
  misc_feature (9)..(481): NCBI GI: 145605758 Blast Desc: MGG_11805 [Magnaporthe grisea 70-15] gi|145013555|gb|EDJ98196.1| MGG_11805 [Magnaporthe grisea 70-15]
  misc_feature (5)..(513): NCBI GI: 261355633 Blast Desc: aspartokinase [Verticillium albo-atrum VaMs.102]
  misc_feature (5)..(513): NCBI GI: 256731279 Blast Desc: [Nectria haematococca mpVI 77-13-4]
  misc_feature (5)..(513): NCBI GI: 46126087 Blast Desc: FG07421.1 [Gibberella zeae PH-1]
  misc_feature (11)..(513): NCBI GI: 156065127 Blast Desc: SS1G_00574 [Sclerotinia sclerotiorum 1980] gi|154691433|gb|EDN91171.1| SS1G_00574 [Sclerotinia sclerotiorum 1980]
  misc_feature (11)..(513): NCBI GI: 154311487 Blast Desc: BC1G_06596 [Botryotinia fuckeliana B05.10] gi|150850993|gb|EDN26186.1| BC1G_06596 [Botryotinia fuckeliana B05.10]
  misc_feature (1)..(513): NCBI GI: 169765293 Blast Desc: [Aspergillus oryzae RIB40] gi|83764972|dbj|BAE55116.1| protein product [Aspergillus oryzae]
  misc_feature (11)..(509): SWISSPROT Homolog: EC 2.7.2.4 Aspartate kinase
  misc_feature: Useful for introducing or modulating the production of volatile compounds
MATNGTAMLGNTSPGGWIVQKFGGTSVGKFPDNIARDIVRENLASNKIVVVCSARSTGKKASGTTSRLLEVFKKLRDISAATSNEQSQTELIEEAKATIRDICSEHILAVQSSITDPDLQKETSKGIQDDCDELIDYIIAAKRFNLEVNARSKDRVTSFGEKLSCRFMAAMLKDHNVDAEYVDLSDVLIYDSSDRLTPAFFTDAAAIFRKRIEACGDRVPVITGFFGNVPGSLMNGEIGRGYTDLCAALAAVGMKATELQVWKEVDGIFTADPTKVPTARLLSSVTPSEAAELTFYGSEVIHHLTMDQVIKAHPPIPIRIKNVKNPRGNGTIVVPDPVQSAGQKIKRSRPSDASLRKTPKRPTAVTIKDNITVINVHSNKRSISHGFFAKVFSILNNHRISVDLISTSEVHVSMAIHQVSSSIHHFEKAKQELEECGDVSILVDMAILSLVGAEMKNMIGVAGRMFSTLGQHQVNIEMISQGASEINISCVIDARDATRAMNVLHTNLFTFLE

SEQ ID NO: 36269 - DNA, 2279 bp, Muscodor strobelii; identical to SEQ ID NO: 36266
  misc_feature: SGI EST ID NO. CUFF.86396.0
  misc_feature: Variant of the nucleotide sequence at SEQ ID NO 36267

SEQ ID NO: 36270 - DNA, 2514 bp, Muscodor strobelii
  misc_feature: SGI cDNA ID NO. 572571
  misc_feature: Encodes the peptide sequence at SEQ ID NO 36271
atgggcatgacccccatctctcctgacaccaatggtgtctcggggtcacaaccgcttcaaccaactcaaccaactcaaccgaaccaacaacagcaggcccgagtcggctcgcatggctctacgtcctctatccacagtatcaatccgcagcacaaccctgaacacaccttctccgcgcctcaccagcatggcggctttgtccaagagtggcatcccaacgccaacgaacaccatgggcagatgatgcctatgcgccaccagcagaccatggccggaggagcacagaggacggcctcgcccatgccgaacgaagagatgatgatgcgggctacctctcatacccctatgccccaggcctttcccatggacgccagcatgcattccgctgtggcatcctctatgtcatttccccagcagtctatgatgcaccatggtatgcccggggacagcttcaacaccaacaacgcgagtttcatcaccgactccgacagtcagatcatggaccgcgacgacgtcgacgaggccgaccagcttgcacccgctccatctggccagaagccaagctcgagccgcacaagcgccaacaacgaattcgagatgcgtcagttatttcaagccaacaaacatcgtcgtctcgaggagatagccagggagctgcacggcaacgaacgtggtccaaattcggagcgcactcgccagatctttgccatgttatggatcaacctagtctgtgataagggcaagggatctgtcccaagaggacgcgtttacgccaactacgcatccagatgtgctacggagagaataacagtcttgaaccccgcatcttttgggaagttggtccgcgtgcttttccctggcttaagaacacgtagattgggagtccgaggcgaatccaagtatcattatgttaatttcacactgaaggacgatcagcctgacttgaaggaacccctgatccaacagccagccctccccattcaggaatcaccacaacttgatggttccttggtcagatctcactctcaacctgtagcagtgaatcctcagcaaccagctttgccatcgcctgttgtatatcactcagagtctttcccgtcagcggcaccgccagttgtcacagaaggcagagtatttggtctttatcaccagcccaatgttgagagcctcgacgagctggagtcatccactcgcaagactatgctacgcctctcgttcccaaaagatagcgactatgcatttgactcagaaaagcgactagctctcccgaaaatcgacccattcttacctgccggcaccgatatcgatgcagcgagctccttggcagcattatatcttacgcattgtacctcattggtcgagtgtatccggttttgcagagagaagacgttcttccatctttatacggcgtttcaaggcaccttaaccatgcctgtccaaaaactatttgcaaatccgagccttgcgctctggatcgagcagtgcgatttcgtcctctaccagacaatgatgcgcattatcggcacgctcgtcttgcaagttgtgcccgtaccggttctcaccaccttgcggaatatctcagaacgtctggtcctccacattcgcgattcgtttcaaagtcaacctaaacacgttgttcaggctagggaggcccctgctgctatttttgctgctcttctcgatcgtgcccttcgagtcaacttgactgcacatgcagccgccaatttactatccaattctcacaatcgtgatcaaatgtatttggaatggatcgccatggtacgaattcgtaagattgctgaatacgttcccgccaggggtatggatgaagtagttcaaatcttgctcctagagatgcgtaacttgctaaacccggttgatgtcgactgggaagaagaacaacggacgctctacggtgatgtcgtccaacgaaacggtaaggagccagtcgaggagtcccgttctggaagctctttattagaagggtgggtgcaattccttcgatcgcttcccgcacgcttcccatacgcatcacctgccgacatcgtatgtttcgtggagaggattggtacggcggtcataagagacatcaccattggcacgggtaagaccttcggttcctggtgggtgacaaaatgctggcttgatgagatggttgcatttctagcagaacagggcggcttcatgcaaagtcgatcatccgttcagtcagtcgaaagggcgattcgtcctagctcagcgaatgccgaaggagagggcactgcacgcctggattctcgacctcagagcagtagtacagacgtcaacgcgacgacgcatataccgatgccccaagcgcagccagatcgcgctcccttcccttctggccacgacttcctcaataatgtcaatccagacgacagtggaatcgggattaggacccctgaagacgactctcctatggacgatttcaagtttgagaaccaccaattgcgcgattcgccgcctttgagtcttgaccaagacatgctttga

SEQ ID NO: 36271 - protein, 837 aa, Muscodor strobelii
  misc_feature: SGI Peptide ID NO. 572571
  misc_feature (221)..(300): Pfam Id: PF02257 Pfam Desc: RFX DNA-binding domain
  misc_feature (104)..(819): NCBI GI: 256731280 Blast Desc: NECHADRAFT_49316 [Nectria haematococca mpVI 77-13-4]
  misc_feature (30)..(820): NCBI GI: 28949939 Blast Desc: related to cephalosporin C regulator 1 (cpcR1 gene) [Neurospora crassa]
  misc_feature (57)..(820): NCBI GI: 164424726 Blast Desc: NCU06701 [Neurospora crassa OR74A] gi|157070635|gb|EAA31780.2| conserved [Neurospora crassa OR74A]
  misc_feature (97)..(819): NCBI GI: 46126085 Blast Desc: FG07420.1 [Gibberella zeae PH-1]
  misc_feature (44)..(808): NCBI GI: 171692829 Blast Desc: protein product [Podospora anserina] gi|170946363|emb|CAP73164.1| protein product [Podospora anserina]
  misc_feature (27)..(820): NCBI GI: 39943978 Blast Desc: MGG_04000 [Magnaporthe grisea 70-15] gi|145014720|gb|EDJ99288.1| MGG_04000 [Magnaporthe grisea 70-15]
  misc_feature (106)..(598): NCBI GI: 261355634 Blast Desc: sak1 [Verticillium albo-atrum VaMs.102]
  misc_feature (104)..(819): NCBI GI: 156065129 Blast Desc: SS1G_00575 [Sclerotinia sclerotiorum 1980] gi|154691434|gb|EDN91172.1| SS1G_00575 [Sclerotinia sclerotiorum 1980]
  misc_feature (110)..(817): NCBI GI: 7406519 Blast Desc: cephalosporin C regulator 1 [Acremonium chrysogenum]
  misc_feature (308)..(819): NCBI GI: 116199217 Blast Desc: CHGG_07764 [Chaetomium globosum CBS 148.51] gi|88179043|gb|EAQ86511.1| CHGG_07764 [Chaetomium globosum CBS 148.51]
MGMTPISPDTNGVSGSQPLQPTQPTQPNQQQQARVGSHGSTSSIHSINPQHNPEHTFSAPHQHGGFVQEWHPNANEHHGQMMPMRHQQTMAGGAQRTASPMPNEEMMMRATSHTPMPQAFPMDASMHSAVASSMSFPQQSMMHHGMPGDSFNTNNASFITDSDSQIMDRDDVDEADQLAPAPSGQKPSSSRTSANNEFEMRQLFQANKHRRLEEIARELHGNERGPNSERTRQIFAMLWINLVCDKGKGSVPRGRVYANYASRCATERITVLNPASFGKLVRVLFPGLRTRRLGVRGESKYHYVNFTLKDDQPDLKEPLIQQPALPIQESPQLDGSLVRSHSQPVAVNPQQPALPSPVVYHSESFPSAAPPVVTEGRVFGLYHQPNVESLDELESSTRKTMLRLSFPKDSDYAFDSEKRLALPKIDPFLPAGTDIDAASSLAALYLTHCTSLVECIRFCREKTFFHLYTAFQGTLTMPVQKLFANPSLALWIEQCDFVLYQTMMRIIGTLVLQVVPVPVLTTLRNISERLVLHIRDSFQSQPKHVVQAREAPAAIFAALLDRALRVNLTAHAAANLLSNSHNRDQMYLEWIAMVRIRKIAEYVPARGMDEVVQILLLEMRNLLNPVDVDWEEEQRTLYGDVVQRNGKEPVEESRSGSSLLEGWVQFLRSLPARFPYASPADIVCFVERIGTAVIRDITIGTGKTFGSWWVTKCWLDEMVAFLAEQGGFMQSRSSVQSVERAIRPSSANAEGEGTARLDSRPQSSSTDVNATTHIPMPQAQPDRAPFPSGHDFLNNVNPDDSGIGIRTPEDDSPMDDFKFENHQLRDSPPLSLDQDML

SEQ ID NO: 36272 - DNA, 3877 bp, Muscodor strobelii
  misc_feature: SGI EST ID NO. CUFF.86357.0
  misc_feature: Variant of the nucleotide sequence at SEQ ID NO 36270
tgactgaccaccaattcctcagccatcgtcgctgctccgcgcatccggcctcaaaacaccatcgccagcgcctcggatgcacgtactaaccctttgcagcgcttctttcctttcgtcgtcgcttttgatataataggtccagtttgtgcctgcgccccggcacaactctatcgcgcagcgcttgccgcttattgtttattctcaacgtaaacaacgctgtccgcccacaacctttgccggcgtagtgaagccgcgcaactctactaccacaatcatgggcatgacccccatctctcctgacaccaatggtgtctcggggtcacaaccgcttcaaccaactcaaccaactcaaccgaaccaacaacagcaggcccgagtcggctcgcatggctctacgtcctctatccacagtatcaatccgcagcacaaccctgaacacaccttctccgcgcctcaccagcatggcggctttgtccaagagtggcatcccaacgccaacgaacaccatgggcagatgatgcctatgcgccaccagcagaccatggccggaggagcacagaggacggcctcgcccatgccgaacgaagagatgatgatgcgggctacctctcatacccctatgccccaggcctttcccatggacgccagcatgcattccgctgtggcatcctctatgtcatttccccagcagtctatgatgcaccatggtatgcccggggacagcttcaacaccaacaacgcgagtttcatcaccgactccgacagtcagatcatggaccgcgacgacgtcgacgaggccgaccagcttgcacccgctccatctggccagaagccaagctcgagccgcacaagcgccaacaacgaattcgagatgcgtcagttatttcaagccaacaaacatcgtcgtctcgaggagatagccagggagctgcacggcaacgaacgtggtccaaattcggagcgcactcgccagatctttgccatgttatggatcaacctagtctgtgataagggcaagggatctgtcccaagaggacgcgtttacgccaactacgcatccagatgtgctacggagagaataacagtcttgaaccccgcatcttttgggaagttggtccgcgtgcttttccctggcttaagaacacgtagattgggagtccgaggcgaatccaagtatcattatgttaatttcacactgaaggacgatcagcctgacttgaaggaacccctgatccaacagccagccctccccattcaggaatcaccacaacttgatggttccttggtcagatctcactctcaacctgtagcagtgaatcctcagcaaccagctttgccatcgcctgttgtatatcactcagagtctttcccgtcagcggcaccgccagttgtcacagaaggcagagtatttggtctttatcaccagcccaatgttgagagcctcgacgagctggagtcatccactcgcaagactatgctacgcctctcgttcccaaaagatagcgactatgcatttgactcagaaaagcgactagctctcccgaaaatcgacccattcttacctgccggcaccgatatcgatgcagcgagctccttggcagcattatatcttacgcattgtacctcattggtcgagtgtatccggttttgcagagagaagacgttcttccatctttatacggcgtttcaaggcaccttaaccatgcctgtccaaaaactatttgcaaatccgagccttgcgctctggatcgagcagtgcgatttcgtcctctaccagacaatgatgcgcattatcggcacgctcgtcttgcaagttgtgcccgtaccggttctcaccaccttgcggaatatctcagaacgtctggtcctccacattcgcgattcgtttcaaagtcaacctaaacacgttgttcaggctagggaggcccctgctgctatttttgctgctcttctcgatcgtgcccttcgagtcaacttgactgcacatgcagccgccaatttactatccaattctcacaatcgtgatcaaatgtatttggaatggatcgccatggtacgaattcgtaagattgctgaatacgttcccgccaggggtatggatgaagtagttcaaatcttgctcctagagatgcgtaacttgctaaacccggttgatgtcgactgggaagaagaacaacggacgctctacggtgatgtcgtccaacgaaacggtaaggagccagtcgaggagtcccgttctggaagctctttattagaagggtgggtgcaattccttcgatcgcttcccgcacgcttcccatacgcatcacctgccgacatcgtatgtttcgtggagaggattggtacggcggtcataagagacatcaccattggcacgggtaagaccttcggttcctggtgggtgacaaaatgctggcttgatgagatggttgcatttctagcagaacagggcggcttcatgcaaagtcgatcatccgttcagtcagtcgaaagggcgattcgtcctagctcagcgaatgccgaaggagagggcactgcacgcctggattctcgacctcagagcagtagtacagacgtcaacgcgacgacgcatataccgatgccccaagcgcagccagatcgcgctcccttcccttctggccacgacttcctcaataatgtcaatccagacgacagtggaatcgggattaggacccctgaagacgactctcctatggacgatttcaagtttgagaaccaccaattgcgcgattcgccgcctttgagtcttgaccaagacatgctttgaagcggcatttgctatgacatcacatcatttgcatttcacctccttcgtttctttcaatggcattgagggcgtctgcgaattttctctcgtcccgagccaatttgacttgtctatactataccactttgatgattcaggcgtttgggatgagcatctagagggttcggcggtactgtctgttccaactgcaatttttctgtttctggcctcggtgatctggcttgtgaacacggcgaacggaagatgaatgacggcacgatacgaatctcacgatgcaatcgagtacgaacaaaataatagaaaggagtcgatttcagcagctgggctggacgcgcttgcctttgtaataattgaagcttgggcaagcaagtggtcggagacacctttcttgttggatttatgtaaagcatggagcgagagcggcttgggaaggaaaggacggcttggtttgctgtggaccatggatcgtggacggtcttttggtgccttgttgagttgctgcacacgagaccatggggtctatatgatggagcaccctggaaggtttatgatggactgtgaggcattgagactttgcgtaacatcaattgttgatacccggaccagagaagaacaactcgtttttaacaaatgtgtctgtatagtatgatgacgtgacatgcttgcccagagtattgaaagtagtcgctggtgtgggttggatcaactttcggattgatagcgttgggtatgaccatgtcgattagagaggaacgcacgaggtatatgcagttgtgtgaagccgtatcatagaaggcttctagtagaagccttagagagatcaattcaatcaaattacttcttttgactccttctgcagactactaattggtagctagcgtaaaaatttccccggaggattccggattatcttcctgagcaacgtcgtctgttacaaaggctcccccgagaaattttttttcccataaggaacaggggcatcaatgttgttggggatctgaggaatctgcgggagctgttggtacaacggagtcggcattcctgacgctgcaggattatgtatcatgggccatctatggaatatgttat

SEQ ID NO: 36273 - DNA, 510 bp, Muscodor strobelii
  misc_feature: SGI cDNA ID NO. 572572
  misc_feature: Encodes the peptide sequence at SEQ ID NO 36274
atgtcggcccaagataaagtccagcactacgtcactcagctcgacaaggagctgagcaagtatcccgccctcaacaacctcgagaagcagacctcagtgcccaaggtctacggtgtcattggccttgcgactctctacttcttcttcatcgtcttcaacctcggtggccagctgttgaccaacttcgctggtttcgtcatccctggttactactctatgggcgctttgttcagctcctccaaagtagatgatacgcaatggctcacttactgggtcgtcttcgcccttttcaccgtgatggagagcgctcttaacgttgtctactggttccccttttactacacatttaagtttgttttcttgctgtggctgtcactcccagcattctccggtgcccagctcatcttccgatcattcctgactcccatgcttgggcgctacttctccgagtctggatcgactgctgccaacctccgtgccaaggccgactctctcggcaaggaccagtaa

SEQ ID NO: 36274 - protein, 169 aa, Muscodor strobelii
  misc_feature: SGI Peptide ID NO. 572572
  misc_feature (41)..(144): Pfam Id: PF03134 Pfam Desc: TB2/DP1, HVA22 family
  misc_feature (1)..(169): NCBI GI: 46126083 Blast Desc: FG07419.1 [Gibberella zeae PH-1]
  misc_feature (2)..(168): NCBI GI: 116199219 Blast Desc: CHGG_07765 [Chaetomium globosum CBS 148.51] gi|88179044|gb|EAQ86512.1| CHGG_07765 [Chaetomium globosum CBS 148.51]
  misc_feature (1)..(169): NCBI GI: 189190524 Blast Desc: PTRG_01268 [Pyrenophora tritici-repentis Pt-1C-BFP] gi|187973207|gb|EDU40706.1| PTRG_01268 [Pyrenophora tritici-repentis Pt-1C-BFP]
  misc_feature (2)..(168): NCBI GI: 85100709 Blast Desc: protein yop-1 [Neurospora crassa OR74A] gi|73921288|sp|Q871R7.1|YOP1_NEUCR RecName: Full=Protein yop-1 gi|28922553|gb|EAA31781.1| protein yop-1 [Neurospora crassa to
  misc_feature (1)..(169): NCBI GI: 256730905 Blast Desc: [Nectria haematococca mpVI 77-13-4]
  misc_feature (1)..(169): NCBI GI: 169624216 Blast Desc: SNOG_15364 [Phaeosphaeria nodorum SN15] gi|111056177|gb|EAT77297.1| SNOG_15364 [Phaeosphaeria nodorum SN15]
  misc_feature (2)..(169): NCBI GI: 145607123 Blast Desc: MGG_12127 [Magnaporthe grisea 70-15] gi|73921287|sp|Q51VY4.2|YOP1_MAGGR RecName: Full=Protein YOP1 gi|145014721|gb|EDJ99289.1| MGG_12127 [Magnaporthe grisea 70-15]
  misc_feature (2)..(163): NCBI GI: 171692827 Blast Desc: protein product [Podospora anserina] gi|170946362|emb|CAP73163.1| protein product [Podospora anserina]
  misc_feature (1)..(169): NCBI GI: 261355635 Blast Desc: yop-1 [Verticillium albo-atrum VaMs.102]
  misc_feature (2)..(169): NCBI GI: 70998558 Blast Desc: membrane biogenesis protein (Yop1) [Aspergillus fumigatus Af293] gi|73921281|sp|Q4WTW3.1|YOP1_ASPFU RecName: Full=Protein yop1 gi|66851637|gb|EAL91963.1| membrane biogenesis
MSAQDKVQHYVTQLDKELSKYPALNNLEKQTSVPKVYGVIGLATLYFFFIVFNLGGQLLTNFAGFVIPGYYSMGALFSSSKVDDTQWLTYWVVFALFTVMESALNVVYWFPFYYTFKFVFLLWLSLPAFSGAQLIFRSFLTPMLGRYFSESGSTAANLRAKADSLGKDQ

SEQ ID NO: 36275 - DNA, 2231 bp, Muscodor strobelii
  misc_feature: SGI EST ID NO. CUFF.86519.0
  misc_feature: Variant of the nucleotide sequence at SEQ ID NO 36273
gtaggcttggtctgcctgtttccccctccgtcatactctggacctcccctccaagctatctatcccctccgctcttcccacaatctcgcattccaacatttcccacctccaataatcaaatttcaacagatattcccattctatatagcctcaccgtcgcgtcctgttatctctcctgcacataacgcaacaacgtttgaccctgcagtaggtttcccccctgcttgccgcgctcctctctacgtggtctgctcgctccgacaagcaaggtggttaggtacctgtttccgctaaccctaacattctagataacgcaatccctcctccattcttgacgcatcccacacattcctctgtgcttctattttttgtcagtcgcagaaatgtcggcccaagataaagtccagcactacgtcactcagctcgacaaggagctgagcaagtatcccgccctcaacaacctcgagaagcagacctcagtgcccaaggtctacggtgtcattggccttgcgactctctacttcttcttcatcgtcttcaacctcggtggccagctgttgaccaacttcgctggtttcgtcatccctggttactactctatgggcgctttgttcagctcctccaaagtagatgatacgcaatggctcacttactgggtcgtcttcgcccttttcaccgtgatggagagcgctcttaacgttgtctactggttccccttttactacacatttaagtttgttttcttgctgtggctgtcactcccagcattctccggtgcccagctcatcttccgatcattcctgactcccatgcttgggcgctacttctccgagtctggatcgactgctgccaacctccgtgccaaggccgactctctcggcaaggaccagtaaacagccgaccgctcccaaagacgacgccagctccgagtagatctgagatctcatgtctaaaattcgaatcggagagacaacatgttggaacgagcatgcttgtcgtcaggggcacatgattataatgagctatggataccctgctgcacgcgtcagcgtctgacagggcatgataacgtgtcaaacacacgacgcatcacggaattggtatttttctcggagccagtatttctctagatcggaaaggtactggcaggttctcatgaatggacggtagtagaatttcatggatgggcggagtcgagtattgtatacatatgagacgggccaggattgtgacaaacattcctgagatttggttcccactcagcaataccacatattgtttcagataaggcaacttctcgagccttggaatgctattgtgcctgaaaattgattgtatgtgatttgatacggcatgtgccaatgagacaggagatttgctcagtgagcaacatccaactcacgtgcttgtagctcaaacagatgaggtactcatcatcacccataatttcatactcatttcgaaaggttaatgccgcagatacatacttcatcttcggtcacaagcataaaatcgagaacgagcagcttgcagaacagaaatcaggagtgacgtgatattcgacagctactacaagcatctagcattcacgttggccttgaaacgcatttgactttgcattcctatctacatcaggtcagcgtttccggccctcctgctttgatgacacattatatgaaggtcgtgatgctgctcagacgcgtgcctatcttccacagactcgaccacgggcatctcagtgctggcatccttcggcagggaagggcgtctcaacacgttggcctggctgagtttggattaccatatttgggctcatcaatgcagatggatgaatgatgcagtatgagacggcaaatgagcttaccttttagaatgtgcatggttaggataatcatgaagtggcacaatggattgtccagatcttgcttcaggtcatcgccgcatcatgggaagccagcagtgaagggccctcgtgacgatggttttaagcaagggattccgagtgggaaagtccatctcgacacacacatcggagtcgccagcagcgtagagagagtaccgtgttacgggtgggcaggctgacgatgatttgagttggtggtcttgcaaatgttatggagggaaaaaagaagagagagaaaaagttcggtgccacgaaaacggtgttaagagggactgcaatggcgcgccccgtttttctgacctgtctcggtgtagcgtgcaagcccacg

SEQ ID NO: 36276 - DNA, 1035 bp, Muscodor strobelii
  misc_feature: SGI cDNA ID NO. 572573
  misc_feature: Reduced expression when VOC is produced
  misc_feature: Encodes the peptide sequence at SEQ ID NO 36277
atggatagacaggaatcaatatggtctcgtcgtaccaacactagcagtggcaatctctcactgggcacctcctcggcctcgaccgataataccaccccccgagacttctccagcctgtcccgcaggaatggcggctcctcctcccacggccgctccaaccccttcgcgccgactacccccggcgctctcgcctcgcccaccagcgctggcggggccaaccagttcggtctaggttccggcgcattcgcctccttcggctcggctaagacccccaaggccaccggcaaccccttcgaccagatgggctccgggtccaagacgcccgcgaccgagaagtcggctaaggacgctttgcggtccgccattggcaagcccgccatgagctccatctccgagacgggacagcagacccccgccgtcacctcgcacaccctccgggacacctgggtcttctggtaccgcccacccatcacaaaggcaaacggctacatcgactacgacaagacactgcacgccatgatgtctgtcaagactgccgaggagtattggcgtgcctatgcccacctcaagcgaccgtccgctctccccaccgtctccgactaccacttattcaaaaagggcatccgtccgatctgggaggacgaggagaacaaacagggcggcaagtggatcctgcgcctgaagaagggcgtggcggatcgctattgggaagaccttctcatggcctgtgtgggcgaccagtttggcgacgagagcgatgaactctgcggtattgtgcttagtgtgcgcaatggcgaagatgttctcagtatctggacgcgcggcactggtcagaaggtcctcaagattcgtgaaacaatgcgccgtgtgcttaactgcccagccgagactaagatcgaatggaagggccacgatgcaagtatgcaacagcgaaacatcatcgaggagtcccgccgcgaaaaggcccacagccaccacgacaagcgtccccacaacaacaaatcaagacttccacaagaagacacacgatcgtag

SEQ ID NO: 36277 - protein, 344 aa, Muscodor strobelii
  misc_feature: SGI Peptide ID NO. 572573
  misc_feature (22)..(313): Pfam Id: PF01652 Pfam Desc: Eukaryotic initiation factor 4E
  misc_feature (22)..(308): Pfam Id: PF01652 Pfam Desc: Eukaryotic initiation factor 4E
  misc_feature (6)..(343): NCBI GI: 164429367 Blast Desc: NCU10582 [Neurospora crassa OR74A] gi|38566857|emb|CAE76163.1| related to translation initiation factor 4e [Neurospora crassa] gi|157073453|gb|EAA29529.2| crassa
  misc_feature (5)..(334): NCBI GI: 171693593 Blast Desc: protein product [Podospora anserina] gi|170946745|emb|CAP73549.1| protein product [Podospora anserina]
  misc_feature (4)..(332): NCBI GI: 116206414 Blast Desc: CHGG_02500 [Chaetomium globosum CBS 148.51] gi|88183097|gb|EAQ90565.1| CHGG_02500 [Chaetomium globosum CBS 148.51]
  misc_feature (5)..(342): NCBI GI: 256731009 Blast Desc: NECHADRAFT_84813 [Nectria haematococca mpVI 77-13-4] gi|256733783|gb|EEU47130.1| NECHADRAFT_36044 [Nectria haematococca mpVI 77-13-4]
  misc_feature (6)..(344): NCBI GI: 46124825 Blast Desc: FG06790.1 [Gibberella zeae PH-1]
  misc_feature (58)..(321): NCBI GI: 145612227 Blast Desc: MGG_08170 [Magnaporthe grisea 70-15] gi|145019427|gb|EDK03655.1| MGG_08170 [Magnaporthe grisea 70-15]
  misc_feature (4)..(339): NCBI GI: 156050479 Blast Desc: SS1G_07827 [Sclerotinia sclerotiorum 1980] gi|154692227|gb|EDN91965.1| SS1G_07827 [Sclerotinia sclerotiorum 1980]
  misc_feature (4)..(329): NCBI GI: 154293936 Blast Desc: BC1G_14147 [Botryotinia fuckeliana B05.10] gi|150845119|gb|EDN20312.1| BC1G_14147 [Botryotinia fuckeliana B05.10]
  misc_feature (1)..(325): NCBI GI: 242792227 Blast Desc: translation initiation factor eIF4E3, [Talaromyces stipitatus ATCC 10500] gi|218718498|gb|EED17918.1| translation initiation factor eIF4E3, [Talaromyces stipitatus ATCC 10500]
  misc_feature (1)..(325): NCBI GI: 212535168 Blast Desc: translation initiation factor eIF4E3, [Penicillium marneffei ATCC 18224] gi|210070139|gb|EEA24229.1| translation initiation factor eIF4E3, [Penicillium marneffei ATCC 18224]
  misc_feature: Useful for introducing or modulating the production of volatile compounds
MDRQESIWSRRTNTSSGNLSLGTSSASTDNTTPRDFSSLSRRNGGSSSHGRSNPFAPTTPGALASPTSAGGANQFGLGSGAFASFGSAKTPKATGNPFDQMGSGSKTPATEKSAKDALRSAIGKPAMSSISETGQQTPAVTSHTLRDTWVFWYRPPITKANGYIDYDKTLHAMMSVKTAEEYWRAYAHLKRPSALPTVSDYHLFKKGIRPIWEDEENKQGGKWILRLKKGVADRYWEDLLMACVGDQFGDESDELCGIVLSVRNGEDVLSIWTRGTGQKVLKIRETMRRVLNCPAETKIEWKGHDASMQQRNIIEESRREKAHSHHDKRPHNNKSRLPQEDTRS

SEQ ID NO: 36278 - DNA, 2305 bp, Muscodor strobelii
  misc_feature: SGI EST ID NO. CUFF.86522.0
  misc_feature: Variant of the nucleotide sequence at SEQ ID NO 36276
gccgactcagaatgcaataccagcacaaaccgaattttcaccactaccgcaaccaccaataccgacaacatcgccacctgccaaactcaacactctacaagtacctaccgtacctacatacatcctgacctccatcattccgatctgcctcgccgctaccatcgacttcgaccgtctctcacctccacactacctactcaaccccatcgtcccatcccggcgccgtcgccgctcccgtgtttcacctgcatttgttacacacgcccaattccgccaatctcgaatagcatcatcgctcaaacacacatatcacataccaccacacacctacacgccagtacttgctgttttgttctaattgacaggatacgccactacccccgtcgcatacgattatcagcacgactgtttaataccctttttcgagtatctgttatctagatcccctgtcctattcgaccaccgttcacctgttcaccgcatcatcctcattctcgactgccactcaccggggcttgcccaactcccatcgcctccacgctgctagcacacggaccacgagtatcgatccccttgtcgtcatggatagacaggaatcaatatggtctcgtcgtaccaacactagcagtggcaatctctcactgggcacctcctcggcctcgaccgataataccaccccccgagacttctccagcctgtcccgcaggaatggcggctcctcctcccacggccgctccaaccccttcgcgccgactacccccggcgctctcgcctcgcccaccagcgctggcggggccaaccagttcggtctaggttccggcgcattcgcctccttcggctcggctaagacccccaaggccaccggcaaccccttcgaccagatgggctccgggtccaagacgcccgcgaccgagaagtcggctaaggacgctttgcggtccgccattggcaagcccgccatgagctccatctccgagacgggacagcagacccccgccgtcacctcgcacaccctccgggacacctgggtcttctggtaccgcccacccatcacaaaggcaaacggctacatcgactacgacaagacactgcacgccatgatgtctgtcaagactgccgaggagtattggcgtgcctatgcccacctcaagcgaccgtccgctctccccaccgtctccgactaccacttattcaaaaagggcatccgtccgatctgggaggacgaggagaacaaacagggcggcaagtggatcctgcgcctgaagaagggcgtggcggatcgctattgggaagaccttctcatggcctgtgtgggcgaccagtttggcgacgagagcgatgaactctgcggtattgtgcttagtgtgcgcaatggcgaagatgttctcagtatctggacgcgcggcactggtcagaaggtcctcaagattcgtgaaacaatgcgccgtgtgcttaactgcccagccgagactaagatcgaatggaagggccacgatgcaagtatgcaacagcgaaacatcatcgaggagtcccgccgcgaaaaggcccacagccaccacgacaagcgtccccacaacaacaaatcaagacttccacaagaagacacacgatcgtagacagatcggtcagaagttgttgaaggaagtctctcctacctattcgtggacccctctaaggtacaattcttaattgacaaagaaagacgcgacgctttgcaactgctctcgacatttccgagcagacgcagaacaaaatcttcatgagtctgcgttgtaacggccgcggaaggtcgaattaatacgagacactcccgagtactgtgcttgcgttccacgttccctgagaatatccgcgataatattgtggggccgggccatgtcgaatattgtattttatggcaatggagagtattgaggggggtcggagcaatgtatgagtatctgggagggagaggccttattaccttatgtcgcttttgacatgggatgcgagcatgatatgggtagcgcttgcttgcgaatatgtttgcgaaaaagcattctcggatgaactgaactgaaacgaaacggtcttggaggggaagcgagctacgtacttcgtcgcgactggacatttgccaacgattagctattagcctgacgagcggacgtgcatggcacggagctgacagacagcctgagagggcttgttgatgtattgtagaaaacagaaatttcatgtctgtttgctgctgccattgtctgtctctggcatttacttgcgaagagcaatattgatgagcttggtagtgaaatgaagactagcc

SEQ ID NO: 36279 - DNA, 420 bp, Muscodor strobelii
  misc_feature: SGI cDNA ID NO. 572574
  misc_feature: Encodes the peptide sequence at SEQ ID NO 36280
actcttgagcatcactctctcatcgatccgttttccagcgcctactggccaagcccggagaagaaggctaccgctgcggctcctccagccacagcaaaagggacgaccaaatcgagtgtccctacttatgcccttaaagaagtagcatgccccaacgtccgtggctctaccacattagacggaagtatggtacgaccagccatcatcgatgatttcaagcgcgctttgatcagcaaagaattccgagatttgacaaagaccaccatcgttgaattgcttgcaaagaagtttactagttgtactaagttgcaagtcaaagcaacggtcgatgcgattgcccatcgtgtagctgcgcctggcggtaagaagtcggcaaagcattgggctttgttgcctgagcatgaactgaaggatgcctga

SEQ ID NO: 36280 - protein, 139 aa, Muscodor strobelii
  misc_feature: SGI Peptide ID NO. 572574
  misc_feature (8)..(128): NCBI GI: 242792590 Blast Desc: chromatin assembly factor 1 subunit A, [Talaromyces stipitatus ATCC 10500] gi|218718573|gb|EED17993.1| chromatin assembly factor 1 subunit A, [Talaromyces stipitatus ATCC 10500]
  misc_feature (8)..(128): NCBI GI: 255952873 Blast Desc: Pc21g01180 [Penicillium chrysogenum Wisconsin 54-1255] gi|211588900|emb|CAP95015.1| Pc21g01180 [Penicillium chrysogenum Wisconsin 54-1255]
  misc_feature (8)..(136): NCBI GI: 145601771 Blast Desc: MGG_08654 [Magnaporthe grisea 70-15] gi|145010279|gb|EDJ94935.1| MGG_08654 [Magnaporthe grisea 70-15]
  misc_feature (8)..(128): NCBI GI: 169776533 Blast Desc: [Aspergillus oryzae RIB40] gi|83771468|dbj|BAE61600.1| protein product [Aspergillus oryzae]
  misc_feature (8)..(128): NCBI GI: 115433042 Blast Desc: conserved [Aspergillus terreus NIH2624] gi|114189510|gb|EAU31210.1| conserved [Aspergillus terreus NIH2624]
  misc_feature (8)..(128): NCBI GI: 121718289 Blast Desc: chromatin assembly factor 1 subunit A, [Aspergillus clavatus NRRL 1] gi|119404358|gb|EAW14734.1| chromatin assembly factor 1 subunit A, [Aspergillus clavatus NRRL 1]
  misc_feature (8)..(128): NCBI GI: 212535274 Blast Desc: chromatin assembly factor 1 subunit A, [Penicillium marneffei ATCC 18224] gi|210070192|gb|EEA24282.1| chromatin assembly factor 1 subunit A, [Penicillium marneffei ATCC 18224]
  misc_feature (8)..(128): NCBI GI: 238503239 Blast Desc: chromatin assembly factor 1 subunit A, [Aspergillus flavus NRRL3357] gi|220691663|gb|EED48011.1| chromatin assembly factor 1 subunit A, [Aspergillus flavus NRRL3357]
  misc_feature (8)..(128): NCBI GI: 70984932 Blast Desc: chromatin assembly factor 1 subunit A [Aspergillus fumigatus Af293] gi|66845600|gb|EAL85934.1| chromatin assembly factor 1 subunit A, [Aspergillus fumigatus Af293] chromatin 1 A,
  misc_feature (8)..(128): NCBI GI: 119498811 Blast Desc: chromatin assembly factor 1 subunit A, [Neosartorya fischeri NRRL 181] gi|119414327|gb|EAW24266.1| chromatin assembly factor 1 subunit A, [Neosartorya fischeri NRRL 181]
TLEHHSLIDPFSSAYWPSPEKKATAAAPPATAKGTTKSSVPTYALKEVACPNVRGSTTLDGSMVRPAIIDDFKRALISKEFRDLTKTTIVELLAKKFTSCTKLQVKATVDAIAHRVAAPGGKKSAKHWALLPEHELKDA

SEQ ID NO: 36281 - DNA, 950 bp, Muscodor strobelii
  misc_feature: SGI EST ID NO. CUFF.86378.0
  misc_feature: Variant of the nucleotide sequence at SEQ ID NO 36279
actcgctccaaatatggtgcgacctgggtttgaggccgacagccaaccaatcagtaccggcgtgtgctttgagaatacaaaacgcttgggaccttgcgcaacgacgtataagtttcgtctcgagttccttctcgagactcttgagcatcactctctcatcgatccgttttccagcgcctactggccaagcccggagaagaaggctaccgctgcggctcctccagccacagcaaaagggacgaccaaatcgagtgtccctacttatgcccttaaagaagtagcatgccccaacgtccgtggctctaccacattagacggaagtatggtacgaccagccatcatcgatgatttcaagcgcgctttgatcagcaaagaattccgagatttgacaaagaccaccatcgttgaattgcttgcaaagaagtttactagttgtactaagttgcaagtcaaagcaacggtcgatgcgattgcccatcgtgtagctgcgcctggcggtaagaagtcggcaaagcattgggctttgttgcctgagcatgaactgaaggatgcctgatttgggaatacagtgaaaaagcatggcgctggagttaggagttgggcctctttgatacctgaggcttttttatgacgaatcacgggcgaaaggcagaagggcattgctgcagtctattagactacaaccaccacaatcaggttgtgtggtttaccattcacacgatgatcacagagcgtttggcgatgcatggcataaccagagcgttattcgctgacttgttccttttacctgacatcgtggacaaaaacaaaacttgtacatatatcggatagaggagatgatgcccttaggtttcccctttgggtggtcttaagggtggttcggttacactgaggatatggttagctaccaaagaataggtgatcgtctgggaatgaatgtcatgaacgac

SEQ ID NO: 36282 - DNA, 408 bp, Muscodor strobelii
  misc_feature: SGI cDNA ID NO. 572575
  misc_feature: Encodes the peptide sequence at SEQ ID NO 36283
atggcagagaaggacattggagcggctatcagaaagttgtcggtcgattctctagactctgcacataacactgagttctctcgcgcattagagaacgttctatcaagtgaggttgctcagttgacctacggccaaatcgtcgatgggctccctattacgtctgtcgagagcgatactgggaacaatggcatgggtgtagggacggagcatccactctatgacgaagacagtcctcacgacaagctatgcccaggtgtcatagaaaggcttcaagagctccgagacgagttcaacatattagatctcaagtttgattcgagtgtaagcgggcgtggtgtcgccgctcaacaccaatttctcaaatatcaggaaaataaactcaaggtctcagctgatgccattgtctag

SEQ ID NO: 36283 - protein, 135 aa, Muscodor strobelii
  misc_feature: SGI Peptide ID NO. 572575
  misc_feature (10)..(108): NCBI GI: 256734181 Blast Desc: NECHADRAFT_67600 [Nectria haematococca mpVI 77-13-4]
  misc_feature (12)..(108): NCBI GI: 171688202 Blast Desc: protein product [Podospora anserina] gi|170944063|emb|CAP70173.1| protein product [Podospora anserina]
  misc_feature (22)..(108): NCBI GI: 256726319 Blast Desc: NECHADRAFT_82106 [Nectria haematococca mpVI 77-13-4]
  misc_feature (12)..(108): NCBI GI: 116178988 Blast Desc: CHGG_00122 [Chaetomium globosum CBS 148.51] gi|88184419|gb|EAQ91887.1| CHGG_00122 [Chaetomium globosum CBS 148.51]
  misc_feature (6)..(104): NCBI GI: 256724889 Blast Desc: NECHADRAFT_66940 [Nectria haematococca mpVI 77-13-4]
  misc_feature (20)..(115): NCBI GI: 171693813 Blast Desc: protein product [Podospora anserina] gi|170946855|emb|CAP73659.1| protein product [Podospora anserina]
  misc_feature (20)..(108): NCBI GI: 171681353 Blast Desc: protein product [Podospora anserina] gi|170940635|emb|CAP65863.1| protein product [Podospora anserina]
  misc_feature (15)..(110): NCBI GI: 256734154 Blast Desc: NECHADRAFT_35598 [Nectria haematococca mpVI 77-13-4]
  misc_feature (12)..(108): NCBI GI: 171683089 Blast Desc: protein product [Podospora anserina] gi|170941504|emb|CAP67156.1| protein product [Podospora anserina]
  misc_feature (14)..(109): NCBI GI: 256722364 Blast Desc: NECHADRAFT_44324 [Nectria haematococca mpVI 77-13-4]
MAEKDIGAAIRKLSVDSLDSAHNTEFSRALENVLSSEVAQLTYGQIVDGLPITSVESDTGNNGMGVGTEHPLYDEDSPHDKLCPGVIERLQELRDEFNILDLKFDSSVSGRGVAAQHQFLKYQENKLKVSADAIV

SEQ ID NO: 36284 - DNA, 1440 bp, Muscodor strobelii
  misc_feature: SGI EST ID NO. CUFF.86383.0
  misc_feature: Variant of the nucleotide sequence at SEQ ID NO 36282
ctcgggtcgattcccgatgttttcattgaccgcgcgggtgagaagtgccccgctaatccctccagtaggacgctgaacgtgcactaacatacagaatttctcccgactccattcaacgacaacagaggtactcgagtctcgaacaccccaacctaccccaaagatcaataacaaacagcctctcgaacctattctctttcattcaattgttgcttcatatctatcttcttaaattcatataagggctgtgttggttgtcaacatttttgacgttcaacccaaaatgacataccttgttacatttcggaccaattatcatggcagagaaggacattggagcggctatcagaaagttgtcggtcgattctctagactctgcacataacactgagttctctcgcgcattagagaacgttctatcaagtgaggttgctcagttgacctacggccaaatcgtcgatgggctccctattacgtctgtcgagagcgatactgggaacaatggcatgggtgtagggacggagcatccactctatgacgaagacagtcctcacgacaagctatgcccaggtgtcatagaaaggcttcaagagctccgagacgagttcaacatattagatctcaagtttgattcgagtctcatatatgattttaatcgtgcatctcccggctctcgagcatttaatacccggttgatcgaaatggttgccgtagcgattcatcaaattgcagtccagttgtatcaatctgaaacgacatttcacgtgggcgatccagttgcatcttgggagccacctgcggactctattttcttgcgaatatatgatgcaatgttcaagacgctattcagacatccgcagtactgtagttatgaacaatatcctcacggagtcgcagacggcgttggctattgggctgaaaatcgaatactcggtggggtagctctttttgacagacgggaacccaactcgccactgaacccgagtaatgatatagaggttgatcccaacgcaatatacttccataccgaccgttccttggtcacttatcgcatttaccgacttcttgatcatcaacggcaagacctaatcaagttcttgcgctctgacgatcattccacagcaaaattttgtccaattcctatccttggaaatgatggaaatacacagagaattgatcctgaagaagctttacttgacactggcgtctttcgagacctatgggaacgcagaacactcagtccagatgaggcagatccacgcatgcgggatgtttgggacaaaatggactacgtcacaatggaagacttccaacagtcgcgtcggcgccgggctttgaggtcggaaaggatcacgcttgaggatagccaatcagaagagcaaaatgattattaagtcttacttgtaaattcattacatcaatacaagacgtatattgctg

SEQ ID NO: 36285 - DNA, 417 bp, Muscodor strobelii
  misc_feature: SGI cDNA ID NO. 572576
  misc_feature: Encodes the peptide sequence at SEQ ID NO 36286
atgctattcctgttgatcgccttcttcttggcccccttcattgccagtgtcgcaatcgatggccctcccggaaatgcttctttgccgggtgttgtccctgatggttacactctggcaaacgtgacctggactattcctattactccaggtggtcagaattacacattccacggcacggttcaggacgtttttatccagctcaacgatgctcttgcttcccagggccttcctaagcgccctgacccgaatgccaacgttaccaacttcgacgccgaactcagtgccctacgtgctgagagggatctcaatgttcgctccttggatcacgtcacttgccaagttcctcttatagggactgccgatggcccggcgatcctgtccgggatcagacatcttaacaccgttggttcgtcataa

SEQ ID NO: 36286 - protein, 138 aa, Muscodor strobelii
  misc_feature: SGI Peptide ID NO. 572576
  misc_feature (4)..(135): NCBI GI: 238486654 Blast Desc: conserved [Aspergillus flavus NRRL3357] gi|220699444|gb|EED55783.1| conserved [Aspergillus flavus NRRL3357]
  misc_feature (35)..(135): NCBI GI: 169770867 Blast Desc: [Aspergillus oryzae RIB40] gi|83767762|dbj|BAE57901.1| protein product [Aspergillus oryzae]
MLFLLIAFFLAPFIASVAIDGPPGNASLPGVVPDGYTLANVTWTIPITPGGQNYTFHGTVQDVFIQLNDALASQGLPKRPDPNANVTNFDAELSALRAERDLNVRSLDHVTCQVPLIGTADGPAILSGIRHLNTVGSS

SEQ ID NO: 36287 - DNA, 1650 bp, Muscodor strobelii
  misc_feature: SGI cDNA ID NO. 572577
  misc_feature: Encodes the peptide sequence at SEQ ID NO 36288
atgtctgcaccagaggaagaaccaccgggcccgccggcagagtcatccgcgacaggcagaagaatccgaaacccattcagaaggaagccacgacccatacctgaccgaacaccagaagccgaggccgaatatgctgctctacaggaccgcgctctacaaactgttgatttctttatcgaaaaggggacatttcagttcatcaggtctttcggcgcagccttcgagatggacgagtatcgggcaaacggaagatttctcagaaaggtgatcgtgaaattcgcagccgtccctttccaagacggcccgatcaaaaacgagtacaatatcttgaagcagttggtaggcgccgagcacattgtccaggtaattacattcgaccaagatagaagtccactaggaagtccgatgagggcgatcagacgatttagtgggaacgtcggcaaagcagtgaaaagagcccttagtagtggcagtagtagtagtaataatagcgatgggcctccgacgtcaaaacgacagaagctactatctatgagtaggaaagtcagtgatacaatcgtgaaagcgtttggccgcaagagcagtggcgagggtagctccgggagcggtgcgaatagctctgggagcggaggaggggatggtgccgaagaaggagaagctggtgctcgtgaaagcggtggcagtgacgaacatgaagacaccgtgattcatcacgaagttcctgacctcggtgacgaagaagtccaggacgagggagccgaagaaggagatggccaggagggcggagatgacaacgaggatagggaggatgatggaaatggagacaatgacgatgacaacgaaaacgacgaaggtgaagatggcggcgacgaagaagaggaggaggagtccgaagagagcagtgagggagaacctccgtttccgttccttctcccgaccggtcaaccgtacttcgtaatggaaaacatcactggtggggatctgagagaatatctggagagaatagttgccaacaactcacaaatctctactcccgaattatggagcattttcctgtgcccgatggcatggccgccttcgcgaccaccgggcgggaaaccaagaagggaaacgcttcgagtcgataccgaacactcgggtattaggcatggcgatctacatctaggtaatgtcatgcttggagtcgccgaaaattacgactcggagcaccaagaagctccgttgatgaaagtcatcgacttcaatatatcatctgagccaaatgagtattcggggagggagcttgaggctacagcagataacatattcgaagttggccggattatgtcctctctcgtcatccggcgtgaagccgtgggacacatcttggagggcgagatgcctgttatcgaaatcaatggagttcaagtctatcagcaggaagctgatgtcgatcccacttccgagtcgccgatgcaggaattcatggcttctcctaacgcccccgatgatcttaaaggccttgcgctgcgttgcatggctgttggttggcaggaccgccctacagttgaagaactcctccacatctgtttaggaaaagtagaggcaaactatactgctcgacgggatcgtgagaatagtgaaaatctgttttatcagccatttttatag

SEQ ID NO: 36288 - protein, 549 aa, Muscodor strobelii
  misc_feature: SGI Peptide ID NO. 572577
MSAPEEEPPGPPAESSATGRRIRNPFRRKPRPIPDRTPEAEAEYAALQDRALQTVDFFIEKGTFQFIRSFGAAFEMDEYRANGRFLRKVIVKFAAVPFQDGPIKNEYNILKQLVGAEHIVQVITFDQDRSPLGSPMRAIRRFSGNVGKAVKRALSSGSSSSNNSDGPPTSKRQKLLSMSRKVSDTIVKAFGRKSSGEGSSGSGANSSGSGGGDGAEEGEAGARESGGSDEHEDTVIHHEVPDLGDEEVQDEGAEEGDGQEGGDDNEDREDDGNGDNDDDNENDEGEDGGDEEEEEESEESSEGEPPFPFLLPTGQPYFVMENITGGDLREYLERIVANNSQISTPELWSIFLCPMAWPPSRPPGGKPRRETLRVDTEHSGIRHGDLHLGNVMLGVAENYDSEHQEAPLMKVIDFNISSEPNEYSGRELEATADNIFEVGRIMSSLVIRREAVGHILEGEMPVIEINGVQVYQQEADVDPTSESPMQEFMASPNAPDDLKGLALRCMAVGWQDRPTVEELLHICLGKVEANYTARRDRENSENLFYQPFL

SEQ ID NO: 36289 - DNA, 2355 bp, Muscodor strobelii
  misc_feature: SGI cDNA ID NO. 572578
  misc_feature: Reduced expression when VOC is produced
  misc_feature: Encodes the peptide sequence at SEQ ID NO 36290
atgagtcgccgctactcctacgactcagacccgggcgagcacgctcccctcgaccaccaacaacatttcggctcttcgtccgcctaccctccacagcacgacagacacacgtcgccgcaacgatatccccaatctcacgcatataacaaccagaaccagcagtactaccaagacgaacctccagcaccctaccaagaccaatctcctagacggcagccagtaccgaacctacctggagcacatcccgactcacactttgcccgattgcgccagaacagagcccaggctgccaactccaacaggaattcagtcaccgaaaccgaagcctttggtgcaggtgccggtattggtgcttcagccttaacacgacccgtaccgccggcccatcaaacctcagtcgagcgaacgtggggacatcaagcccagccgagcattactccaggcgccgacaactttagtgaagctgccgccggcggcatcccaggtctcgccatgagcgtcgccgagcgcaatgcccgagagagcggcctcgaggccatgagggccaccgaagcctatcagcgccaacaaccacaactaccctaccctcaggcatatcagagaggacagccccaatactcacccgacgaagagctccagaatactccctaccaccagaactacgacgcgccgcaaggttacagaggcaatagtggccagagcccgtatgaacaaggccatggttcggctcacagcttagctggtgtcccggcagccggttatgcttactctggctctggccatgacaattctgtgcggagtttcaacagcagtcatcacagcgaccccttcggcgatccacaggtggcttacggtcagcgtatggatcctcatctgggacatttcaatcctaatgatatcgacgatgatggtgatgatgggctcgactatcgacggtctgcgagaaatagcatgcttagcctaggaggctcgggccatcgcaacggaagtggcgccgcggctgccggaaccgctggagctgcagcagctggaggtgtcctgggcggaatcctgggaagaaatcgaaatagctctgtgaaccccaactacgaccctgtacaaaaccccagtaccagctacgccggcgcaagtcagaacgactttgagatgggcaatcagaacgagaaaccgtcagcttggataagcaagcaaagcagcagcagaaagaagtggacatggatcatcgtcataattgttttccttgtcattgctggtgcagtggttggaggagtggttggttccatgttcgccaacaagaagtccaactcagatggttcgggcggttcgagtagtgcgggcggtgacaacggcggtggagagtcggcacaggaagacactgacaagaacggagatcttggtattgactcgagtcagatcaaagcgttgctgaacaacaagaatctccataaagtattccccgctgtcgactacacccctatcggcgctcaatatccggaatgcctgacctatccgccctctcaaaacaacgtgacgcgcgatatggcagtgctctcacagttaaccaatacgattcgactatacggcaccgactgtaaccaaacggccatgaccctgcacgctatcaaccagctgaaaatgcaagacgacattaagatctggattggtgtttggctcgaaaagaatgaaactacaaacaatcgtcaacttgatcagatgtggcaaaccttggacaaatacggagacggtccttttgaaggattgattgttggcaacgaggttttgtttcgcgaggacttgacgttgcaagagctagccgaccagcttgacagtgttcgccaaaacctgaccaagcatggctgggatctaccggtagccacgagcgacttgggagataattggactgatcaactcgcgcagcacagtgattacatcatgggcaacgtgcatcccttcttcgctggcgaacctgccgacaacgcagctaattgggcttggacgttctggcataataaggcagagccattcttcaagaccgataccaagaagaacgttatttccgagattggctggcccacacaaggaggtactgattgtgggtcagataaggttcttgaatgcgacaatggctctgtggccgccatcgatggattgaacacgttgctggatacttgggtctgtcaggcactcgctaacggaactaactatttctggtttgagatgttcgacgagccgtggaaaatcaaatttaacaacggaacccagaactgggaggatcactggggaatcttagatgtcaaccgaaacctcaagaagggtgttaacattcctgactgtggaggcaagacggtgtcctga

SEQ ID NO: 36290 - protein, 784 aa, Muscodor strobelii
  misc_feature: SGI Peptide ID NO. 572578
  misc_feature (145)..(784): NCBI GI: 156064923 Blast Desc: SS1G_00471 [Sclerotinia sclerotiorum 1980] gi|154691331|gb|EDN91069.1| SS1G_00471 [Sclerotinia sclerotiorum 1980]
  misc_feature (130)..(784): NCBI GI: 164424316 Blast Desc: NCU07347 [Neurospora crassa OR74A] gi|157070463|gb|EAA29091.2| conserved [Neurospora crassa OR74A]
  misc_feature (40)..(784): NCBI GI: 171684183 Blast Desc: protein product [Podospora anserina] gi|170942052|emb|CAP67704.1| protein product [Podospora anserina]
  misc_feature (79)..(784): NCBI GI: 154322551 Blast Desc: BC1G_00618 [Botryotinia fuckeliana B05.10] gi|150847952|gb|EDN23145.1| BC1G_00618 [Botryotinia fuckeliana B05.10]
  misc_feature (221)..(783): NCBI GI: 256721908 Blast Desc: NECHADRAFT_122449 [Nectria haematococca mpVI 77-13-4]
  misc_feature (1)..(783): NCBI GI: 261353329 Blast Desc: endo-beta-1,3-glucanase [Verticillium albo-atrum VaMs.102]
  misc_feature (291)..(783): NCBI GI: 46111851 Blast Desc: FG02807.1 [Gibberella zeae PH-1]
  misc_feature (1)..(781): NCBI GI: 39969965 Blast Desc: MGG_10591 [Magnaporthe grisea 70-15] gi|145021731|gb|EDK05808.1| MGG_10591 [Magnaporthe grisea 70-15]
  misc_feature (124)..(781): NCBI GI: 149209303 Blast Desc: MGCH7_ch7g144 [Magnaporthe grisea 70-15] gi|86196099|gb|EAQ70737.1| MGCH7_ch7g144 [Magnaporthe grisea 70-15]
  misc_feature (61)..(784): NCBI GI: 258570785 Blast Desc: conserved [Uncinocarpus reesii 1704] gi|237904466|gb|EEP78867.1| conserved [Uncinocarpus reesii 1704]
  misc_feature: Useful for introducing or modulating the production of volatile compounds
MSRRYSYDSDPGEHAPLDHQQHFGSSSAYPPQHDRHTSPQRYPQSHAYNNQNQQYYQDEPPAPYQDQSPRRQPVPNLPGAHPDSHFARLRQNRAQAANSNRNSVTETEAFGAGAGIGASALTRPVPPAHQTSVERTWGHQAQPSITPGADNFSEAAAGGIPGLAMSVAERNARESGLEAMRATEAYQRQQPQLPYPQAYQRGQPQYSPDEELQNTPYHQNYDAPQGYRGNSGQSPYEQGHGSAHSLAGVPAAGYAYSGSGHDNSVRSFNSSHHSDPFGDPQVAYGQRMDPHLGHFNPNDIDDDGDDGLDYRRSARNSMLSLGGSGHRNGSGAAAAGTAGAAAAGGVLGGILGRNRNSSVNPNYDPVQNPSTSYAGASQNDFEMGNQNEKPSAWISKQSSSRKKWTWIIVIIVFLVIAGAVVGGVVGSMFANKKSNSDGSGGSSSAGGDNGGGESAQEDTDKNGDLGIDSSQIKALLNNKNLHKVFPAVDYTPIGAQYPECLTYPPSQNNVTRDMAVLSQLTNTIRLYGTDCNQTAMTLHAINQLKMQDDIKIWIGVWLEKNETTNNRQLDQMWQTLDKYGDGPFEGLIVGNEVLFREDLTLQELADQLDSVRQNLTKHGWDLPVATSDLGDNWTDQLAQHSDYIMGNVHPFFAGEPADNAANWAWTFWHNKAEPFFKTDTKKNVISEIGWPTQGGTDCGSDKVLECDNGSVAAIDGLNTLLDTWVCQALANGTNYFWFEMFDEPWKIKFNNGTQNWEDHWGILDVNRNLKKGVNIPDCGGKTVS

SEQ ID NO: 36291 - DNA, 3480 bp, Muscodor strobelii
  misc_feature: SGI EST ID NO. CUFF.86462.0
  misc_feature: Variant of the nucleotide sequence at SEQ ID NO 36289
ctctgttcatagcaaatgatcttacctgcattgtgttgactgattgatcaatatctggtctaccactcgtttatttgtcccaacaagaaacactcgacaattcgtgtagaacaggccatcgtcaacaccgtttccaacaacagcaaggaactgtgacgaatgccaagtctggccctctcacctctcatccatcccacattccacatcccatataccatctcttgccagcagagtgcggtgtaacggtcgacggattgcgccacgagtaacacacgcttgtcaagttatttacccattaaacgcctgtgctcactgagcccactggctcgggacttatctcacagtgagatacttacgcacgagattgctgcaaggaaaggcaagacgccatcgagcgcctctcgtatttatcgcccatcgtgtccactgagagggccgcaacaccgccccgtcaggctggccaccgtcacggattcggcactatttgcttgtcttcgtttctttgtgcccgcctcagcgaccccacccgtccgcctgtcacatcgtacacgtctcgttatagcaggcaggtgctcccgttgagacgtcgacgccatgagtcgccgctactcctacgactcagacccgggcgagcacgctcccctcgaccaccaacaacatttcggctcttcgtccgcctaccctccacagcacgacagacacacgtcgccgcaacgatatccccaatctcacgcatataacaaccagaaccagcagtactaccaagacgaacctccagcaccctaccaagaccaatctcctagacggcagccagtaccgaacctacctggagcacatcccgactcacactttgcccgattgcgccagaacagagcccaggctgccaactccaacaggaattcagtcaccgaaaccgaagcctttggtgcaggtgccggtattggtgcttcagccttaacacgacccgtaccgccggcccatcaaacctcagtcgagcgaacgtggggacatcaagcccagccgagcattactccaggcgccgacaactttagtgaagctgccgccggcggcatcccaggtctcgccatgagcgtcgccgagcgcaatgcccgagagagcggcctcgaggccatgagggccaccgaagcctatcagcgccaacaaccacaactaccctaccctcaggcatatcagagaggacagccccaatactcacccgacgaagagctccagaatactccctaccaccagaactacgacgcgccgcaaggttacagaggcaatagtggccagagcccgtatgaacaaggccatggttcggctcacagcttagctggtgtcccggcagccggttatgcttactctggctctggccatgacaattctgtgcggagtttcaacagcagtcatcacagcgaccccttcggcgatccacaggtggcttacggtcagcgtatggatcctcatctgggacatttcaatcctaatgatatcgacgatgatggtgatgatgggctcgactatcgacggtctgcgagaaatagcatgcttagcctaggaggctcgggccatcgcaacggaagtggcgccgcggctgccggaaccgctggagctgcagcagctggaggtgtcctgggcggaatcctgggaagaaatcgaaatagctctgtgaaccccaactacgaccctgtacaaaaccccagtaccagctacgccggcgcaagtcagaacgactttgagatgggcaatcagaacgagaaaccgtcagcttggataagcaagcaaagcagcagcagaaagaagtggacatggatcatcgtcataattgttttccttgtcattgctggtgcagtggttggaggagtggttggttccatgttcgccaacaagaagtccaactcagatggttcgggcggttcgagtagtgcgggcggtgacaacggcggtggagagtcggcacaggaagacactgacaagaacggagatcttggtattgactcgagtcagatcaaagcgttgctgaacaacaagaatctccataaagtattccccgctgtcgactacacccctatcggcgctcaatatccggaatgcctgacctatccgccctctcaaaacaacgtgacgcgcgatatggcagtgctctcacagttaaccaatacgattcgactatacggcaccgactgtaaccaaacggccatgaccctgcacgctatcaaccagctgaaaatgcaagacgacattaagatctggattggtgtttggctcgaaaagaatgaaactacaaacaatcgtcaacttgatcagatgtggcaaaccttggacaaatacggagacggtccttttgaaggattgattgttggcaacgaggttttgtttcgcgaggacttgacgttgcaagagctagccgaccagcttgacagtgttcgccaaaacctgaccaagcatggctgggatctaccggtagccacgagcgacttgggagataattggactgatcaactcgcgcagcacagtgattacatcatgggcaacgtgcatcccttcttcgctggcgaacctgccgacaacgcagctaattgggcttggacgttctggcataataaggcagagccattcttcaagaccgataccaagaagaacgttatttccgagattggctggcccacacaaggaggtactgattgtgggtcagataaggttcttgaatgcgacaatggctctgtggccgccatcgatggattgaacacgttgctggatacttgggtctgtcaggcactcgctaacggaactaactatttctggtttgagatgttcgacgagccgtggaaaatcaaatttaacaacggaacccagaactgggaggatcactggggaatcttagatgtcaaccgaaacctcaagaagggtgttaacattcctgactgtggaggcaagacggtgtcctgatcgatgaggatcatctagcagcatgatcaaaaaggcataccctttgtaatatgaggggcaccaaacgactgagggcggcacggaagctcgcaagaagctgattcctttcgagcgacataacgaaagtgagcattcttcaagtcatgagtgcgacgagatttgtacatatacccatcatacgcgttccaaaaggctacggggcaggactggttgcagtacgacggcgcaaggcacaaggctgagactaggattcgaattcccatatggaagttttgtttaaggttacggacgggacgtgactacggttgcatctacaagccgcgtgaaactaataatggaaaaggaggaaggaagcatggcgcatggcatggcgtacagaggtagattttttcggaatgcttcccacgaggtcagcagggtgactgactgtttggtatgcgattgcgtttgagagacgaggcaaaatgtttatatatgtgacatggcgagaatataccgtttgctgttgtcccacgataagaactggctgag

SEQ ID NO: 36292 - DNA, 513 bp, Muscodor strobelii
  misc_feature: SGI cDNA ID NO. 572579
  misc_feature: Encodes the peptide sequence at SEQ ID NO 36293
atgtcagcaaacagcaaccccgaatctgtcgccggccaaggcgaattccacagccgcgtacctgcctcagagcctctgacccgcaagggccacgcaccaggcgttctcgtaggcaacgaccgcgtgcccgagttccacgccgagacgtatcctgccggtacggcaccgcgagagcacacgttccagcctaagccggaaggtgagaacctaggccaaagttatgagacgatgccctcggcggcggagacccttacgggtgcgtcatcggcagatgtttataaaggtatgggaaagcctatgcaaggtcaggaaaaccgggagctgcgcggtgagcacctcaaggagaaaactggacttttgggtgttggtggcgctagcgtgggtgttgacacagtgagggagaaaggcgcggatttgcctgagggtgtctatcgaggtgtgaaagggcatgagtatgcgggtgccgatgagaaattacccgaaactgctgaggaggtagccgctgagaggtag

SEQ ID NO: 36293 - protein, 170 aa, Muscodor strobelii
  misc_feature: SGI Peptide ID NO. 572579
  misc_feature (1)..(168): NCBI GI: 261353614 Blast Desc: conserved [Verticillium albo-atrum VaMs.102]
  misc_feature (6)..(170): NCBI GI: 46111849 Blast Desc: FG02806.1 [Gibberella zeae PH-1]
  misc_feature (6)..(170): NCBI GI: 256721936 Blast Desc: NECHADRAFT_36929 [Nectria haematococca mpVI 77-13-4]
  misc_feature (1)..(169): NCBI GI: 85090245 Blast Desc: NCU07345 [Neurospora crassa OR74A] gi|28919676|gb|EAA29089.1| [Neurospora crassa OR74A]
  misc_feature (4)..(170): NCBI GI: 116201359 Blast Desc: CHGG_08564 [Chaetomium globosum CBS 148.51] gi|88177082|gb|EAQ84550.1| CHGG_08564 [Chaetomium globosum CBS 148.51]
  misc_feature (4)..(168): NCBI GI: 171684185 Blast Desc: protein product [Podospora anserina] gi|170942053|emb|CAP67705.1| protein product [Podospora anserina]
  misc_feature (1)..(141): NCBI GI: 189208488 Blast Desc: conserved [Pyrenophora tritici-repentis Pt-1C-BFP] gi|187976670|gb|EDU43296.1| conserved [Pyrenophora tritici-repentis Pt-1C-BFP]
  misc_feature (6)..(169): NCBI GI: 115397379 Blast Desc: conserved [Aspergillus terreus NIH2624] gi|114192472|gb|EAU34172.1| conserved [Aspergillus terreus NIH2624]
  misc_feature (1)..(169): NCBI GI: 145230203 Blast Desc: An01g09900 [Aspergillus niger] gi|134055527|emb|CAK37173.1| protein product [Aspergillus niger]
  misc_feature (1)..(169): NCBI GI: 255952651 Blast Desc: Pc21g00020 [Penicillium chrysogenum Wisconsin 54-1255] gi|211588788|emb|CAP94899.1| Pc21g00020 [Penicillium chrysogenum Wisconsin 54-1255]
MSANSNPESVAGQGEFHSRVPASEPLTRKGHAPGVLVGNDRVPEFHAETYPAGTAPREHTFQPKPEGENLGQSYETMPSAAETLTGASSADVYKGMGKPMQGQENRELRGEHLKEKTGLLGVGGASVGVDTVREKGADLPEGVYRGVKGHEYAGADEKLPETAEEVAAER

SEQ ID NO: 36294 - DNA, 230 bp, Muscodor strobelii
  misc_feature: SGI EST ID NO. CUFF.86437.0
  misc_feature: Variant of the nucleotide sequence at SEQ ID NO 36292
cgcggatttgcctgagggtgtctatcgaggtgtgaaagggcatgagtatgcgggtgccgatgagaaattacccgaaactgctgaggaggtagccgctgagaggtaggatactggatgggtgtgcgactatttgcagccttcataatggtggaagtgtcgaagaacatgggaaggaggccacgatcatgttatattagcaggctagagggaacccaataaagtgaggccgg

SEQ ID NO: 36295 - DNA, 1017 bp, Muscodor strobelii
  misc_feature: SGI cDNA ID NO. 572580
  misc_feature: Encodes the peptide sequence at SEQ ID NO 36296
atgccggaatcccaggacaaggaggtccaggacacgcctcgctcgtgccttatatgcgagaagcccgacgcgcatctttgcggtcgctgtaagaacgcagcatactgctccaaagactgtcagaaggccgacttccagacccacaaacatctctgcgtcgccttcgctgcctttgcatcggttgcgagacctactcaaaaccatgttcgcgtcatcttcttccctgtaaatgaggataagcccaagttcatctgggccgctttcacacggaagactaatggacagaagctgaagttcgacgggaagctacaaggatgcacgcagcaattaccttgcgagtacgacgaggtcctatgcaggccactcgctaatgagattcgtctctgtgcacagggcactataccttaccacttcagacacggttcgcatacaaacaagagtatcgccactatcacttgtcataaatggtgtggcccgatcgcagcttacgccgtagtcggaacgggagacgatgtaaaggagctcaaagatgccgacctcaccgacctcagacatgtcattgactatgtcagcgcgcgtgatcattataccttgtgcgcggctaaaccgttcatcccccctggagttatgacgacagttaagggcatcagggtgaactgcgttggcgaccaatttgcgcttggacgtccccagtttgaagaagtggacattgtgtcatacgatttctcgttcagccttcccgacacttcgagcatcgcagcaagagtaggtctccctctcatcactcgacactgctttgctcatccaaagtggttttggggtgatccaggagagatttacggaacccacggtccataccacaacccatgcgctgctattcttcatttgtctgtcgagctggagaaggatccgacgcgaactgccgagcgctaccctctacagccaggacttgccgagtttacaggctggggatctcaggctgagtacagcgattggggctgcgttcgcgatgattag

SEQ ID NO: 36296 - protein, 338 aa, Muscodor strobelii
  misc_feature: SGI Peptide ID NO. 572580
  misc_feature (16)..(52): Pfam Id: PF01753 Pfam Desc: MYND finger
  misc_feature (14)..(271): NCBI GI: 169600037 Blast Desc: SNOG_02848 [Phaeosphaeria nodorum SN15] gi|160705367|gb|EAT89579.2| SNOG_02848 [Phaeosphaeria nodorum SN15]
  misc_feature (3)..(289): NCBI GI: 145230487 Blast Desc: An01g11400 [Aspergillus niger] gi|134055670|emb|CAK44044.1| protein product [Aspergillus niger]
  misc_feature (10)..(263): NCBI GI: 169600053 Blast Desc: SNOG_02856 [Phaeosphaeria nodorum SN15] gi|111068467|gb|EAT89587.1| SNOG_02856 [Phaeosphaeria nodorum SN15]
  misc_feature (16)..(197): NCBI GI: 212538595 Blast Desc: PMAA_098760 [Penicillium marneffei ATCC 18224] gi|210069195|gb|EEA23286.1| PMAA_098760 [Penicillium marneffei ATCC 18224]
  misc_feature (7)..(88): NCBI GI: 116180600 Blast Desc: [Chaetomium globosum CBS 148.51] gi|88185225|gb|EAQ92693.1| [Chaetomium globosum CBS 148.51]
  misc_feature (44)..(280): NCBI GI: 169600035 Blast Desc: SNOG_02847 [Phaeosphaeria nodorum SN15] gi|160705366|gb|EAT89578.2| SNOG_02847 [Phaeosphaeria nodorum SN15]
  misc_feature (26)..(262): NCBI GI: 156061057 Blast Desc: [Sclerotinia sclerotiorum 1980] gi|154700075|gb|EDN99813.1| [Sclerotinia sclerotiorum 1980]
  misc_feature (11)..(52): NCBI GI: 169601910 Blast Desc: SNOG_03831 [Phaeosphaeria nodorum SN15] gi|111067916|gb|EAT89036.1| SNOG_03831 [Phaeosphaeria nodorum SN15]
  misc_feature (16)..(192): NCBI GI: 170091180 Blast Desc: [Laccaria bicolor S238N-H82] gi|164648305|gb|EDR12548.1| [Laccaria bicolor S238N-H82]
  misc_feature (16)..(85): NCBI GI: 169616416 Blast Desc: SNOG_11380 [Phaeosphaeria nodorum SN15] gi|111059968|gb|EAT81088.1| SNOG_11380 [Phaeosphaeria nodorum SN15]
MPESQDKEVQDTPRSCLICEKPDAHLCGRCKNAAYCSKDCQKADFQTHKHLCVAFAAFASVARPTQNHVRVIFFPVNEDKPKFIWAAFTRKTNGQKLKFDGKLQGCTQQLPCEYDEVLCRPLANEIRLCAQGTIPYHFRHGSHTNKSIATITCHKWCGPIAAYAVVGTGDDVKELKDADLTDLRHVIDYVSARDHYTLCAAKPFIPPGVMTTVKGIRVNCVGDQFALGRPQFEEVDIVSYDFSFSLPDTSSIAARVGLPLITRHCFAHPKWFWGDPGEIYGTHGPYHNPCAAILHLSVELEKDPTRTAERYPLQPGLAEFTGWGSQAEYSDWGCVRDD

SEQ ID NO: 36297 - DNA, 327 bp, Muscodor strobelii
  misc_feature: SGI EST ID NO. CUFF.86440.0
  misc_feature: Variant of the nucleotide sequence at SEQ ID NO 36295
gactatgtcagcgcgcgtgatcattataccttgtgcgcggctaaaccgttcatcccccctggagttatgacgacagttaagggcatcagggtgaactgcgttggcgaccaatttgcgcttggacgtccccagtttgaagaagtggacattgtgtcatacgatttctcgttcagccttcccgacacttcgagcatcgcagcaagagtaggtctccctctcatcactcgacactgctttgctcatccaaagtggttttggggtgatccaggagagatttacggaacccacggtccataccacaacccatgcgctgctattcttcatttg

SEQ ID NO: 36298 - DNA, 582 bp, Muscodor strobelii
  misc_feature: SGI cDNA ID NO. 572581
  misc_feature: Encodes the peptide sequence at SEQ ID NO 36299
atgccgccccgcaagaagtctaaggaggaggaccccgccgacaagcccctccagtcagccgacatgtcggccaccggcctctctcagacggagaaggaggctcttgccttggcttggcactgcatggacaccgtcccgaaggtcgacttcaacaagctggctcgcctggttggccacaacaaccctcgctcgactcagaatctttttcaccgcgcccacaagaagctccacgcggagatggccatgaacaatgacaacaagaacgagtcggacgctgtcaatcagcttggagacaccagcgctctgaaggcgaagagcgatgatgtcaagaaacttcttgctgagggcaaagagcgaaccgacgccttcaagacagagggtaatgagtctggtgaggccatggagggtgtcgaggagacaggcgccaaacgcaagagaggcgctgccagcgctggtccttccaccaagcgtgctcgtgccaccaaagccactagcaaggctgctggcaaggctgtcgccaagtccgccactaagaacgaccccatcaagctggatgacagtgacgaggacatttataactga

SEQ ID NO: 36299 - protein, 193 aa, Muscodor strobelii
  misc_feature: SGI Peptide ID NO. 572581
MPPRKKSKEEDPADKPLQSADMSATGLSQTEKEALALAWHCMDTVPKVDFNKLARLVGHNNPRSTQNLFHRAHKKLHAEMAMNNDNKNESDAVNQLGDTSALKAKSDDVKKLLAEGKERTDAFKTEGNESGEAMEGVEETGAKRKRGAASAGPSTKRARATKATSKAAGKAVAKSATKNDPIKLDDSDEDIYN

SEQ ID NO: 36300 - DNA, 291 bp, Muscodor strobelii
  misc_feature: SGI cDNA ID NO. 572582
  misc_feature: Reduced expression when VOC is produced
  misc_feature: Encodes the peptide sequence at SEQ ID NO 36301
atgccgaaccagatcatcgaggacgtaaagaccggcatcaagggcatccgcggggctggcgacgcaatccgagggagcgccatggaggcagcagatcagaccttcgacaacaaccgcaaccatccgaccacccaggcttccgagctcaagaatcaatccatcaccgagaagggcaaacaagacatcaacgccgttgacgatatgattgcgcgacgcgaacaagaacatcgaggaaagaaggccgtcgagactgaggcgcgcgctgggcaccaccctcggcccctgcaataa

SEQ ID NO: 36301 - protein, 96 aa, Muscodor strobelii
  misc_feature: SGI Peptide ID NO. 572582
  misc_feature (3)..(90): NCBI GI: 46114686 Blast Desc: FG03185.1 [Gibberella zeae PH-1]
  misc_feature (3)..(78): NCBI GI: 256728243 Blast Desc: NECHADRAFT_53945 [Nectria haematococca mpVI 77-13-4]
  misc_feature: Useful for introducing or modulating the production of volatile compounds
MPNQIIEDVKTGIKGIRGAGDAIRGSAMEAADQTFDNNRNHPTTQASELKNQSITEKGKQDINAVDDMIARREQEHRGKKAVETEARAGHHPRPLQ

SEQ ID NO: 36302 - DNA, 886 bp, Muscodor strobelii
  misc_feature: SGI EST ID NO. CUFF.86458.0
  misc_feature: Variant of the nucleotide sequence at SEQ ID NO 36300
agaaggcacagattgatttcgattcttcaatcttcaagccacatttatttccagttcattcaaccagcctgcctaccttatctacacaataccgcatccaccatcgaaatcacccacctaccttagatacatacctcactctcaccattcttgagcatagcatacattctatccatttcacctaccgaaacaaacacgcatccaacatgccgaaccagatcatcgaggacgtaaagaccggcatcaagggcatccgcggggctggcgacgcaatccgagggagcgccatggaggcagcagatcagaccttcgacaacaaccgcaaccatccgaccacccaggcttccgagctcaagaatcaatccatcaccgagaagggcaaacaagacatcaacgccgttgacgatatgattgcgcgacgcgaacaagaacatcgaggaaagaaggccgtcgagactgaggcgcgcgctgggcaccaccctcggcccctgcaataagctggcaagcaaacgagcatcgagcggaatgatactgggccggctaagagccacaattacgatgttaatgataacgagaccgaatatgcgcccgttgcatcgcgcatgtcactctgtctatagaaccgcgtagagctggagaatggatacgaagaggcactgtacgcgaccctttatacaatagactaccgaatagatcatacctgtgctgcgcatctcttttgcaccggatgaacatacatacaatcagagaatctcagatcccgaatgaagtctcagtgcgaccgagctgaagcccaagggatggacaaattctgcattccatctcgagtttcttcccagacttgacctgtccttccacgaggaattagtcttgatcttgatcattg

SEQ ID NO: 36303 - DNA, 762 bp, Muscodor strobelii
  misc_feature: SGI cDNA ID NO. 572583
  misc_feature: Encodes the peptide sequence at SEQ ID NO 36304
atggcgcccaacaataatgacggcggaggaaacctcgagaagttccatctcttcactaagttacccgcagagctgcagcttctagtctggaagttttatcgccaagaccaatcagtcatctaccactacttctgtcttactcaatctggacgagtctacggcgcgcgcgatacgcagaagaataagctagtaattacaacagcccaaaccgcaaatcagagtgacgaagacggacaagcactcgatccggcggagtataagattcgattcttcaatggagccacgatcacagtttctgaacacgagcttgacttgtacgctgcccatttaaacaagggaccgtatccttaccctacgccaggaacttggaaaaggcctgccgatacggaagtccccaaagacattccgtgtgatcactgggcccatcgcatccgagaattggtcatctacgtcagcgctcagtactcttccttaaccgacttagatcgccgtgcttttgagcagctccgcggtttacggaaggtgtacttggtggtgcaccggtatcgatactaccggggcagttcaaacatgaggctcagaattatggacgaatcggcggccaaagctcggcagcgtgctaaacgcttttgggacaatggtacggaacagaggtggagtaacgcagagaaaatccgagacgagcttcgccaaacattcgggaacgcgagacatcgtaacgtcgttgtagacatagcggccgaaggagaaggttcgttttga

SEQ ID NO: 36304 - protein, 253 aa, Muscodor strobelii
  misc_feature: SGI Peptide ID NO. 572583
MAPNNNDGGGNLEKFHLFTKLPAELQLLVWKFYRQDQSVIYHYFCLTQSGRVYGARDTQKNKLVITTAQTANQSDEDGQALDPAEYKIRFFNGATITVSEHELDLYAAHLNKGPYPYPTPGTWKRPADTEVPKDIPCDHWAHRIRELVIYVSAQYSSLTDLDRRAFEQLRGLRKVYLVVHRYRYYRGSSNMRLRIMDESAAKARQRAKRFWDNGTEQRWSNAEKIRDELRQTFGNARHRNVVVDIAAEGEGSF

SEQ ID NO: 36305 - DNA, 705 bp, Muscodor strobelii
  misc_feature: SGI cDNA ID NO. 572584
  misc_feature: Encodes the peptide sequence at SEQ ID NO 36306
atgtcaagcagttggacaagtgacgagttcgcagggcctcgtagacggccgcccaagccacaccgcagacttaatgactcgggactgaagctgaagcaaggtggcgctaccgacgctatcaccaaacgtcttgcaaaggatgcattcagtgacagcgaccgtgggacacccaagcgagatgtggctgtgaagcggcggaaaataaccgcgaagtctggctctatccgtcaaacccgcaccgttaattctagatcatatgatgtagacaacaatgacgccgataccactgccaatgacagtgaatcagacaccaaactcaagacttctgcccccaccgaactggtggcaaatggcaccggcgagtatgtgtcgacggccaacaactcccaagctgacgacgtggaatcagaagccgaaaacaacaatgttagagagcacgagtcgagtgttgagtattctaaggctagcgggtatgagtcggagcgcgaggcatttgaggagcacgagacgggattcgaggagtttaacgatgacgaagcagatgagccccctgtggtgtttctggcggaagatgaggtatcagatactgagggcgacgagtcctcctcttctgacgatggtcccaatgatgaagacggagacgctgaagagaatcactcggcaatgatgaattacatctggaagtggctagaggaaatagtttga

SEQ ID NO: 36306 - protein, 234 aa, Muscodor strobelii
  misc_feature: SGI Peptide ID NO. 572584
MSSSWTSDEFAGPRRRPPKPHRRLNDSGLKLKQGGATDAITKRLAKDAFSDSDRGTPKRDVAVKRRKITAKSGSIRQTRTVNSRSYDVDNNDADTTANDSESDTKLKTSAPTELVANGTGEYVSTANNSQADDVESEAENNNVREHESSVEYSKASGYESEREAFEEHETGFEEFNDDEADEPPVVFLAEDEVSDTEGDESSSSDDGPNDEDGDAEENHSAMMNYIWKWLEEIV

SEQ ID NO: 36307 - DNA, 425 bp, Muscodor strobelii
  misc_feature: SGI EST ID NO. CUFF.86452.0
  misc_feature: Variant of the nucleotide sequence at SEQ ID NO 36305
caaacccgcaccgttaattctagatcatatgatgtagacaacaatgacgccgataccactgccaatgacagtgaatcagacaccaaactcaagacttctgcccccaccgaactggtggcaaatggcaccggcgagtatgtgtcgacggccaacaactcccaagctgacgacgtggaatcagaagccgaaaacaacaatgttagagagcacgagtcgagtgttgagtattctaaggctagcgggtatgagtcggagcgcgaggcatttgaggagcacgagacgggattcgaggagtttaacgatgacgaagcagatgagccccctgtggtgtttctggcggaagatgaggtatcagatactgagggcgacgagtcctcctcttctgacgatggtcccaatgatgaagacggagacgctgaagagaa

SEQ ID NO: 36308 - DNA, 807 bp, Muscodor strobelii
  misc_feature: SGI cDNA ID NO. 572585
  misc_feature: Encodes the peptide sequence at SEQ ID NO 36309
atgtcgaacccacgaacaaagagacaattcgccggcgccgcctcggaccctgctcagcgacaaatcacctcattcttcaacaacaccacttcttctacccaaccatcatcgtcgtcatcatcaacaactccctcgccagccatcccttcacaagtccaagccaatctcctatcagtgggcatgcgagtacgcaagtccgtcccagaaggctacaaaacaggaacatacagcggcttctccctctgggacgagcaaaacacaccccatcccacaaaagacacaacaatgggcgagggtcagcgctcccgcgcaaacgccatatcgacacctcgcgaactcatgcccttctgcggcatccacagcatcggtggtttcgcaccacagccagaatcctcatcgcgatatatgagctccagtgctgtcgttgcgccgtcctataatcccatgcctagcatcttcgactctagcatggacgacgacgtgcctggcttgacatctagtcaagagacagtttcttccgatatctcctcatccccaccttcggcatcacgctcgcgaaagcggttcttcgttgaggaggaagatgaggagaaactggctatccctacgtcccttaatttatggtcaaatcataattctcgcgctattgcagtcccacgaaaaggacggcttcgggcgaagttgagcagcagcggatcggaggctggtagtccaggccaggagaatgtcatggtcgtggatagtgatttcgaggacgccgatttcttcgaccagagtaaatgggaggtcgagatgaatgatgcttag

SEQ ID NO: 36309 - protein, 268 aa, Muscodor strobelii
  misc_feature: SGI Peptide ID NO. 572585
  misc_feature (30)..(176): Pfam Id: PF08591 Pfam Desc: Ribonucleotide reductase inhibitor
  misc_feature (30)..(132): Pfam Id: PF08591 Pfam Desc: Ribonucleotide reductase inhibitor
  misc_feature (1)..(256): NCBI GI: 46124061 Blast Desc: FG06408.1 [Gibberella zeae PH-1]
  misc_feature (1)..(268): NCBI GI: 261353286 Blast Desc: conserved [Verticillium albo-atrum VaMs.102]
  misc_feature (1)..(268): NCBI GI: 145609924 Blast Desc: MGG_12575 [Magnaporthe grisea 70-15] gi|145017308|gb|EDK01671.1| MGG_12575 [Magnaporthe grisea 70-15]
  misc_feature (1)..(268): NCBI GI: 149210307 Blast Desc: MGCH7_ch7g631 [Magnaporthe grisea 70-15] gi|86196586|gb|EAQ71224.1| MGCH7_ch7g631 [Magnaporthe grisea 70-15]
  misc_feature (1)..(256): NCBI GI: 256731886 Blast Desc: NECHADRAFT_80708 [Nectria haematococca mpVI 77-13-4]
  misc_feature (1)..(129): NCBI GI: 116193073 Blast Desc: CHGG_06254 [Chaetomium globosum CBS 148.51] gi|88182167|gb|EAQ89635.1| CHGG_06254 [Chaetomium globosum CBS 148.51]
  misc_feature (1)..(257): NCBI GI: 171683945 Blast Desc: protein product [Podospora anserina] gi|170941933|emb|CAP67585.1| protein product [Podospora anserina]
  misc_feature (1)..(257): NCBI GI: 85074783 Blast Desc: NCU00619 [Neurospora crassa OR74A] gi|28927572|gb|EAA36523.1| [Neurospora crassa OR74A]
  misc_feature (5)..(266): NCBI GI: 154322166 Blast Desc: BC1G_01230 [Botryotinia fuckeliana B05.10] gi|150850477|gb|EDN25670.1| BC1G_01230 [Botryotinia fuckeliana B05.10]
  misc_feature (5)..(266): NCBI GI: 156060829 Blast Desc: SS1G_02557 [Sclerotinia sclerotiorum 1980] gi|154699961|gb|EDN99699.1| SS1G_02557 [Sclerotinia sclerotiorum 1980]
MSNPRTKRQFAGAASDPAQRQITSFFNNTTSSTQPSSSSSSTTPSPAIPSQVQANLLSVGMRVRKSVPEGYKTGTYSGFSLWDEQNTPHPTKDTTMGEGQRSRANAISTPRELMPFCGIHSIGGFAPQPESSSRYMSSSAVVAPSYNPMPSIFDSSMDDDVPGLTSSQETVSSDISSSPPSASRSRKRFFVEEEDEEKLAIPTSLNLWSNHNSRAIAVPRKGRLRAKLSSSGSEAGSPGQENVMVVDSDFEDADFFDQSKWEVEMNDA

SEQ ID NO: 36310 - DNA, 3403 bp, Muscodor strobelii
  misc_feature: SGI EST ID NO. CUFF.86515.0
  misc_feature: Variant of the nucleotide sequence at SEQ ID NO 36308
ccaacattcagcttttgatgaacgtcacccttcaaaccaatggacaaggacccctcgacgcatcaacctgtcgcctttacaatttcgtcattcgtttcaagttcgagtccccggctgcctctgttcgcacttccgcggcgtctcgatagtgtctcgtcatcccttctctcgacgaattagtcaactagtcagtattattgtgtcgcagtattgacactatcaccgttttatgcctctatagcctggccagtgcagcagacagtgcaggctgtgtatgctgccgcatagtgcttcattcgttccctggcgatcgtgcttcatcatcccttcaacacagccttgtcgcagccggggtcagtcacccgcctgcattcaacaactcatctctctaagcgacatcctatcgttcaatatgtcgaacccacgaacaaagagacaattcgccggcgccgcctcggaccctgctcagcgacaaatcacctcattcttcaacaacaccacttcttctacccaaccatcatcgtcgtcatcatcaacaactccctcgccagccatcccttcacaagtccaagccaatctcctatcagtgggcatgcgagtacgcaagtccgtcccagaaggctacaaaacaggaacatacagcggcttctccctctgggacgagcaaaacacaccccatcccacaaaagacacaacaatgggcgagggtcagcgctcccgcgcaaacgccatatcgacacctcgcgaactcatgcccttctgcggcatccacagcatcggtggtttcgcaccacagccagaatcctcatcgcgatatatgagctccagtgctgtcgttgcgccgtcctataatcccatgcctagcatcttcgactctagcatggacgacgacgtgcctggcttgacatctagtcaagagacagtttcttccgatatctcctcatccccaccttcggcatcacgctcgcgaaagcggttcttcgttgaggaggaagatgaggagaaactggctatccctacgtcccttaatttatggtcaaatcataattctcgcgctattgcagtcccacgaaaaggacggcttcgggcgaagttgagcagcagcggatcggaggctggtagtccaggccaggagaatgtcatggtcgtggatagtgatttcgaggacgccgatttcttcgaccagagtaaatgggaggtcgagatgaatgatgcttagcttcatgcttgttttgattatgtgtaagaatagagtgagggaataggatgagcagcgagaaggagaaattttatacccagggttgtaaataaggattggggaacggagatgagccggaaggaaacagggggcttagggttggctcggtctgcgaggttgattttctttttctatttttcgtccggaaggacttagcgattcatatggatggtgttcaggatgggttctttgcattttttcggttaggaagatagtgagcgttccaaaggtagatcgcgatgggatatacggacgtggaaactagctgtgctaggtaccatagcgtattcatgataggaacatgggcaaatactgaaatcgtatcaaatatgcttgcaactttcctgtgcgacttcatcatgaaatatcaccaatcgagtgatatataatgtgacacaagtgcaaggattggtacataaaggtacctaggcatggtagaggcacagcaaatcctacttcttgtgctacacatcagacgaaaacaagacaccatgctatggtgaacaaaaggcaacttaggcaatatatcgacatagaccaaaatgttgagagattattgtgttgtattaactacatgtactttacttatgccgtgctccgtcttctcagtgctgcattttgcttatttgccccatggttggatctgggacgaagggtgggttactgatatattagatactaggtttgtgatttgctccatatgagcagagccacgtctcgctcatttgtacaatctcagagacctcccttcttctgctagctctacgtgttgtagctacaaactaaagagatagcaagggcagaatgtttgtgtagaatacttcccttcctggtggcactcaccctgtactcacccgtctcaaaactactagtaagtttatttgttgacatacaagtcgattacccaccgaaaggatcccgaaactcgaggagatccaattgtccgtagaattccccagcgacggtgaggatcatgttaagggttgctcgttcattggcttctctgcgatcgaatgccggctcctgtggatcctccacattatcgtcgctcagttgagccagaagcctagccttcgccatctcgatggtctcggtgtcagtggccggatctgagcgtggtggtgacaaggggtccgctacttccccatcttctcgatcagagtcgagttccatgtctacatctgaggagctagtcgggcgctgtgcttgggagggtactgcaccttcgttcttactgtcggtaggttcctccttgacagcttcaccattcttactggattttggctctcccttggctgtcggccgggcgtcaaattgctcgtcgtgttcttcttcgtagtactcgccgtcttcgtcatactcttctgcattctcatactcgtccccgtcctcgtctccgtcagaagatgttcctgttcttgcgacctctttcagagcgtcgtgctctgcaagactgaccatcatgagcacggctcgcttgcctagctcccttacgcatccgatttcggtgtagtctagttctccctggtctggcaggcgggcaagtagtccccagatccagcgagacgtccgttccctaagctcgtgacctttccgcaggaacttattgttcaggatgaggtgcaggagccggagtacgcagtctttatgcattgcggctagctgtgctggtttgggatccgtggatcgaagtcgagaggaccagtctgcagaggcggatggtgattctctgggtttcgggaatgtggtcgggtgggttgaaggtagtaataggagagcagattgaggaggggcaatttgcaaacgagtgcggagggagaggtaggatgtagaaattgatatgaagtatgcatcgcggatttcgtcgatggtgcttttatatggaccatctataacaggatcaaaaggatcatcgtcgtcgtcgtaatctccttcgtagtcgtcggcgttctcgtcgtaatgcccctctggatatgctgtatatgcaccatcttggtaatagcctctgaagtcaccgacaccagtgttgtatatgctgcgatctactgtctgggtggctgattcctgaggtgggagtgcaggccctgctttctgtgcaacaagcacgtgggggaatgtggatgcttgggttctacactcgccata

SEQ ID NO: 36311 - DNA, 1428 bp, Muscodor strobelii
  misc_feature: SGI cDNA ID NO. 572586
  misc_feature: Encodes the peptide sequence at SEQ ID NO 36312
atggcgaccaaacgaacagctgaagataacggagcacaccatacttccaagcgccatagaacagcaaaaacagactcggcaaatggccaacgtggtgtctttggcgacctgaacagcgaaactactgcacccacaggcgatagcgatctggactgtgaggatgactctgcagccctcgcatatctcaagtccgtcagaacccaagcatccacattcccccacgtgcttgttgcacagaaagcagggcctgcactcccacctcaggaatcagccacccagacagtagatcgcagcatatacaacactggtgtcggtgacttcagaggctattaccaagatggtgcatatacagcatatccagaggggcattacgacgagaacgccgacgactacgaaggagattacgacgacgacgatgatccttttgatcctgttatagatggtccatataaaagcaccatcgacgaaatccgcgatgcatacttcatatcaatttctacatcctacctctccctccgcactcgtttgcaaattgcccctcctcaatctgctctcctattactaccttcaacccacccgaccacattcccgaaacccagagaatcaccatccgcctctgcagactggtcctctcgacttcgatccacggatcccaaaccagcacagctagccgcaatgcataaagactgcgtactccggctcctgcacctcatcctgaacaataagttcctgcggaaaggtcacgagcttagggaacggacgtctcgctggatctggggactacttgcccgcctgccagaccagggagaactagactacaccgaaatcggatgcgtaagggagctaggcaagcgagccgtgctcatgatggtcagtcttgcagagcacgacgctctgaaagaggtcgcaagaacaggaacatcttctgacggagacgaggacggggacgagtatgagaatgcagaagagtatgacgaagacggcgagtactacgaagaagaacacgacgagcaatttgacgcccggccgacagccaagggagagccaaaatccagtaagaatggtgaagctgtcaaggaggaacctaccgacagtaagaacgaaggtgcagtaccctcccaagcacagcgcccgactagctcctcagatgtagacatggaactcgactctgatcgagaagatggggaagtagcggaccccttgtcaccaccacgctcagatccggccactgacaccgagaccatcgagatggcgaaggctaggcttctggctcaactgagcgacgataatgtggaggatccacaggagccggcattcgatcgcagagaagccaatgaacgagcaacccttaacatgatcctcaccgtcgctggggaattctacggacaattggatctcctcgagtttcgggatcctttcggtgggtaa

SEQ ID NO: 36312 - protein, 475 aa, Muscodor strobelii
  misc_feature: SGI Peptide ID NO. 572586
  misc_feature (14)..(473): NCBI GI: 85074785 Blast Desc: NCU00620 [Neurospora crassa OR74A] gi|28927573|gb|EAA36524.1| [Neurospora crassa OR74A]
  misc_feature (22)..(473): NCBI GI: 171683943 Blast Desc: protein product [Podospora anserina] gi|170941932|emb|CAP67584.1| protein product [Podospora anserina]
  misc_feature (1)..(475): NCBI GI: 261353287 Blast Desc: conserved [Verticillium albo-atrum VaMs.102]
  misc_feature (24)..(475): NCBI GI: 145609924 Blast Desc: MGG_12575 [Magnaporthe grisea 70-15] gi|145017308|gb|EDK01671.1| MGG_12575 [Magnaporthe grisea 70-15]
  misc_feature (24)..(475): NCBI GI: 149210307 Blast Desc: MGCH7_ch7g631 [Magnaporthe grisea 70-15] gi|86196586|gb|EAQ71224.1| MGCH7_ch7g631 [Magnaporthe grisea 70-15]
  misc_feature (16)..(475): NCBI GI: 256732273 Blast Desc: NECHADRAFT_80709 [Nectria haematococca mpVI 77-13-4]
  misc_feature (82)..(475): NCBI GI: 46124063 Blast Desc: FG06409.1 [Gibberella zeae PH-1]
  misc_feature (209)..(473): NCBI GI: 116193071 Blast Desc: CHGG_06253 [Chaetomium globosum CBS 148.51] gi|88182166|gb|EAQ89634.1| CHGG_06253 [Chaetomium globosum CBS 148.51]
  misc_feature (20)..(474): NCBI GI: 156060831 Blast Desc: SS1G_02558 [Sclerotinia sclerotiorum 1980] gi|154699962|gb|EDN99700.1| SS1G_02558 [Sclerotinia sclerotiorum 1980]
  misc_feature (58)..(474): NCBI GI: 154322164 Blast Desc: BC1G_01229 [Botryotinia fuckeliana B05.10] gi|150850476|gb|EDN25669.1| BC1G_01229 [Botryotinia fuckeliana B05.10]
MATKRTAEDNGAHHTSKRHRTAKTDSANGQRGVFGDLNSETTAPTGDSDLDCEDDSAALAYLKSVRTQASTFPHVLVAQKAGPALPPQESATQTVDRSIYNTGVGDFRGYYQDGAYTAYPEGHYDENADDYEGDYDDDDDPFDPVIDGPYKSTIDEIRDAYFISISTSYLSLRTRLQIAPPQSALLLLPSTHPTTFPKPRESPSASADWSSRLRSTDPKPAQLAAMHKDCVLRLLHLILNNKFLRKGHELRERTSRWIWGLLARLPDQGELDYTEIGCVRELGKRAVLMMVSLAEHDALKEVARTGTSSDGDEDGDEYENAEEYDEDGEYYEEEHDEQFDARPTAKGEPKSSKNGEAVKEEPTDSKNEGAVPSQAQRPTSSSDVDMELDSDREDGEVADPLSPPRSDPATDTETIEMAKARLLAQLSDDNVEDPQEPAFDRREANERATLNMILTVAGEFYGQLDLLEFRDPFGG

SEQ ID NO: 36313 - DNA, 4833 bp, Muscodor strobelii
  misc_feature: SGI EST ID NO. CUFF.86516.1
  misc_feature: Variant of the nucleotide sequence at SEQ ID NO 36311
aagggaagcatcgcataatcttcaagtacgttgccaccgaacttgatactgcagccgctgttacgtctcatagttgaaagctaccccctggattgcaggcctcacatatatcttcggcgtcattctctcggctttctgagattgtccctaatgcaagccgcttacaaacaagcgatatttataactacgatcttgaaccggcatcgggtggccgggaaggcctccaatatatacccactctagtcatatttgatgttagcttaatactctcgaaatttttcaacgaaaagattgcatgattatgcctatttccgtcgagtggcggtgggaagaatcgcagtttcgatgatgtaaccctctagttcacgtacctgggattgtcagccacagaaacctaccatatcaacctatgaaaggtgcgcgatcgaagaccgcctgaaacccagctggggttccaattcgatacaactatggctgagcctctccaatcgaatataagggtgacaggataccggaactgccgaggtcccgagaacttcctattaccaatgctttcaaatactactcttattctgaagtatttgaatgattgtgttggatatcctgaatcagaaaaagagcttggaggccgccctgagtattcatagccagaccaagctcaacatcatcatgtatgcaagtccagtgtgtttcgtcgtcctctattggactcttggtgcctaccaaattggccggccggacttccgacaatggcggtgtattggatagcaatgtggatgctgaaatttcggccaagaatcaaacaatgcatgttgacatagtgatccagcgaaaagagaacgaatgttgttgagagcaatcaaagtaaagaaatgaggtcaaaaaaatgagattctagatcgccttaaagatcacgggcagtgtgcaggcgcgctagatggggtgggtccagttgcgcatttggtaagtagggcgtgcaagagcaccatattagcaactgcgtatttggaacttcctgggcaccttccgtccattcaatcaaagcatcacgttgttgcctgcaacgccgacggcgacaagcccccagccgtgcatcttccaggaccctgcttgacaacatgtggaaactggaggcacaagttggctgtcgctgagagtcaagtcttcattcttgctattgtaccctgaaattattgttgccgtcatcccaccattgtgccgagctttcaatttgtctactagcaacaatggcgaccaaacgaacagctgaagataacggagcacaccatacttccaagcgccatagaacagcaaaaacagactcggcaaatggccaacgtggtgtctttggcgacctgaacagcgaaactactgcacccacaggcgatagcgatctggactgtgaggatgactctgcagccctcgcatatctcaagtccgtcagaacccaagcatccacattcccccacgtgcttgttgcacagaaagcagggcctgcactcccacctcaggaatcagccacccagacagtagatcgcagcatatacaacactggtgtcggtgacttcagaggctattaccaagatggtgcatatacagcatatccagaggggcattacgacgagaacgccgacgactacgaaggagattacgacgacgacgatgatccttttgatcctgttatagatggtccatataaaagcaccatcgacgaaatccgcgatgcatacttcatatcaatttctacatcctacctctccctccgcactcgtttgcaaattgcccctcctcaatctgctctcctattactaccttcaacccacccgaccacattcccgaaacccagagaatcaccatccgcctctgcagactggtcctctcgacttcgatccacggatcccaaaccagcacagctagccgcaatgcataaagactgcgtactccggctcctgcacctcatcctgaacaataagttcctgcggaaaggtcacgagcttagggaacggacgtctcgctggatctggggactacttgcccgcctgccagaccagggagaactagactacaccgaaatcggatgcgtaagggagctaggcaagcgagccgtgctcatgatggtcagtcttgcagagcacgacgctctgaaagaggtcgcaagaacaggaacatcttctgacggagacgaggacggggacgagtatgagaatgcagaagagtatgacgaagacggcgagtactacgaagaagaacacgacgagcaatttgacgcccggccgacagccaagggagagccaaaatccagtaagaatggtgaagctgtcaaggaggaacctaccgacagtaagaacgaaggtgcagtaccctcccaagcacagcgcccgactagctcctcagatgtagacatggaactcgactctgatcgagaagatggggaagtagcggaccccttgtcaccaccacgctcagatccggccactgacaccgagaccatcgagatggcgaaggctaggcttctggctcaactgagcgacgataatgtggaggatccacaggagccggcattcgatcgcagagaagccaatgaacgagcaacccttaacatgatcctcaccgtcgctggggaattctacggacaattggatctcctcgagtttcgggatcctttcggtgggtaatcgacttgtatgtcaacaaataaacttactagtagttttgagacgggtgagtacagggtgagtgccaccaggaagggaagtattctacacaaacattctgcccttgctatctctttagtttgtagctacaacacgtagagctagcagaagaagggaggtctctgagattgtacaaatgagcgagacgtggctctgctcatatggagcaaatcacaaacctagtatctaatatatcagtaacccacccttcgtcccagatccaaccatggggcaaataagcaaaatgcagcactgagaagacggagcacggcataagtaaagtacatgtagttaatacaacacaataatctctcaacattttggtctatgtcgatatattgcctaagttgccttttgttcaccatagcatggtgtcttgttttcgtctgatgtgtagcacaagaagtaggatttgctgtgcctctaccatgcctaggtacctttatgtaccaatccttgcacttgtgtcacattatatatcactcgattggtgatatttcatgatgaagtcgcacaggaaagttgcaagcatatttgatacgatttcagtatttgcccatgttcctatcatgaatacgctatggtacctagcacagctagtttccacgtccgtatatcccatcgcgatctacctttggaacgctcactatcttcctaaccgaaaaaatgcaaagaacccatcctgaacaccatccatatgaatcgctaagtccttccggacgaaaaatagaaaaagaaaatcaacctcgcagaccgagccaaccctaagccccctgtttccttccggctcatctccgttccccaatccttatttacaaccctgggtataaaatttctccttctcgctgctcatcctattccctcactctattcttacacataatcaaaacaagcatgaagctaagcatcattcatctcgacctcccatttactctggtcgaagaaatcggcgtcctcgaaatcactatccacgaccatgacattctcctggcctggactaccagcctccgatccgctgctgctcaacttcgcccgaagccgtccttttcgtgggactgcaatagcgcgagaattatgatttgaccataaattaagggacgtagggatagccagtttctcctcatcttcctcctcaacgaagaaccgctttcgcgagcgtgatgccgaaggtggggatgaggagatatcggaagaaactgtctcttgactagatgtcaagccaggcacgtcgtcgtccatgctagagtcgaagatgctaggcatgggattataggacggcgcaacgacagcactggagctcatatatcgcgatgaggattctggctgtggtgcgaaaccaccgatgctgtggatgccgcagaagggcatgagttcgcgaggtgtcgatatggcgtttgcgcgggagcgctgaccctcgcccattgttgtgtcttttgtgggatggggtgtgttttgctcgtcccagagggagaagccgctgtatgttcctgttttgtagccttctgggacggacttgcgtactcgcatgcccactgataggagattggcttggacttgtgaagggatggctggcgagggagttgttgatgatgacgacgatgatggttgggtagaagaagtggtgttgttgaagaatgaggtgatttgtcgctgagcagggtccgaggcggcgccggcgaattgtctctttgttcgtgggttcgacatattgaacgataggatgtcgcttagagagatgagttgttgaatgcaggcgggtgactgaccccggctgcgacaaggctgtgttgaagggatgatgaagcacgatcgccagggaacgaatgaagcactatgcggcagcatacacagcctgcactgtctgctgcactggccaggctatagaggcataaaacggtgatagtgtcaatactgcgacacaataatactgactagttgactaattcgtcgagagaagggatgacgagacactatcgagacgccgcggaagtgcgaacagaggcagccggggactcgaacttgaaacgaatgacgaaattgtaaaggcgacaggttgatgcgtcgaggggtccttgtccattggtttgaagggtgacgttcatcaaaagctgaatgttgg

SEQ ID NO: 36314 - DNA, 345 bp, Muscodor strobelii
  misc_feature: SGI cDNA ID NO. 572587
  misc_feature: Encodes the peptide sequence at SEQ ID NO 36315
atgtctgacacaaatgtctcgccgccatcctacgaacctgctcagccagcccagattgagcaggattctgctcttgacgggaagatcgacccagttgccgaaggaatccgtgagctagtcatcggaattgaccagatcgcacgcgtccagcacctgatgcatatcggtctcacggtcatgcatgacaagcaggagcgactgctccaagatcaagttctaatgccccaaaagaatgagagaaacagactgggagtgtttatcgcgtacacgatgatgctactcgttttggtggtgctcctcagcgtcaccgtgtatctcttgtcgacaatgcctggtcgtatttga

SEQ ID NO: 36315 - protein, 114 aa, Muscodor strobelii
  misc_feature: SGI Peptide ID NO. 572587
MSDTNVSPPSYEPAQPAQIEQDSALDGKIDPVAEGIRELVIGIDQIARVQHLMHIGLTVMHDKQERLLQDQVLMPQKNERNRLGVFIAYTMMLLVLVVLLSVTVYLLSTMPGRI

SEQ ID NO: 36316 - DNA, 444 bp, Muscodor strobelii
  misc_feature: SGI cDNA ID NO. 572588
  misc_feature: Encodes the peptide sequence at SEQ ID NO 36317
atgcgcaggaacttgaaccaggtccaacacgaaatctcaggcgagatagctagaaccagagaggagctgtgcattaccaccgcgctcgccatgacaaaccaagacgagcaaaagctccagttcgtctatctctatcataagcagctcgagactcagcgccagaacacggaggctcagcgccagaacaaggaggctcagtgcaagaacaaagaggacctgatccgcatcgagcaaggtcaatctgccatcaagaacgaagtccaccacgcgcaggaccagctgatcgttcaagatcagaagtccaaccaccagcttttcgtctccctcagcgtggtcgtcacccttttcggcctgatctgcatcgtcatgatgcttgtgtggctcttcgtcaatgcggtcacgaagcaagttgcgaccgtctcgactgatctcgtcgtccactag

SEQ ID NO: 36317 - protein, 147 aa, Muscodor strobelii
  misc_feature: SGI Peptide ID NO. 572588
MRRNLNQVQHEISGEIARTREELCITTALAMTNQDEQKLQFVYLYHKQLETQRQNTEAQRQNKEAQCKNKEDLIRIEQGQSAIKNEVHHAQDQLIVQDQKSNHQLFVSLSVVVTLFGLICIVMMLVWLFVNAVTKQVATVSTDLVVH

SEQ ID NO: 36318 - DNA, 1764 bp, Muscodor strobelii
  misc_feature: SGI cDNA ID NO. 572589
  misc_feature: Reduced expression when VOC is produced
  misc_feature: Encodes the peptide sequence at SEQ ID NO 36319
atggacacctcgccgccacctacagcttcaattgctaagaagagcaaagtgaatactacgacactcaccttcgcctcactagattccctctcaaacactgttgctcattccctgcgatccctcggagtaaagaaaggagaccgcgtagccgtcagcctaggaagcgtctcagaatccgtcgtccttacatacgccatcgtcaaactcggagcaatctgggtacccttaaatccgacattcaacacctctcaactaagcgcggcattatcacatctcggcgtagaaaccttgataatcagcgccgtgaccgatctcccattcaagccctgccgcggacgaagtaatctcgaccttctttcatcactcatacccggtctaacaagcggcacgaacaaactcgagtccccagccgtcccatcactgaaaaacgtcatcatagttgacaacgccgtgtcccacctacaatcaggcttcccaccgcttcagtccatgggcatcttgacaccatacacagacctcctctcctcctccccctcgccaatacaaccagacacgcccctatctcccgacgagacgataaacatccaattcacatccgggacgacctctagcccaaaagccgccatgctctcccaccgcggcgtcctaaacaacggacacctaatcgcctcacgcatgggtctcgtaccaggcgacttgatagtcgttccaccccctctattccactgtttcgggtgcgtcctaggtttaatggcaacagcaacaaccggcgcctcaatcctgctcccctccccagctttcgaccctgcagcaacactccaaatggtgtcggagaaccacgcacacggtctgtacggcgtggcgactatgttcgtcgcggagctcgacttgcttcagaatcccgcatttgcttctacgctagcacctgacgcgtttaagaacctgaccaagggcatcgcgtccggatcttccgtcccggaatcgttgatgttgaagttattcgagaagatggggctcaaagatcttacgatttgttatggcatgacggagacttcgcccgtgtcttgtatggttgcgcctcacgatacgtttacacagcgaacttcgacagtcggacgtgtaatgccacatacagccgtgaagatcgtctctcccacaaaccgctccgtaattctcccgcgaggagagtgtggtgagttcgcagccagtggatatctagtcatgaaggggtattacgatgaccccgttcgtacagaattagatcgcatacctgatcctgtcgatgggaggatatggatgtatagcggtgacgaagcacgtatagatgacgagggcttcgttcagatcacgggacggatcaaagatttgattatcaggggtggagaaaacattcatccagccgaggtagagaattgtctgtttcagcttgagggcgtgaaggaggtcagtgtcgtcggggtccctgatgagaaattaggggaggctgttgcggcgttcatcgtgcctagaatgggagtaacttttgttggtggtgatgggggtatcaaggatgggaagactgaagttgccagcggggagattggagtgaaggtcatggagttgaggaaagacgtcgtccaggagtgggtgaggacgaagttgagtaaacatttggtgccgaggtatgtgtttaccattgatgagtatcccaagacggccagtgggaagatacagaagtttaagttgagggatttggctcgagagatacttgggttgaaggcttga

SEQ ID NO: 36319 - protein, 587 aa, Muscodor strobelii
  misc_feature: SGI Peptide ID NO. 572589
  misc_feature (23)..(484): Pfam Id: PF00501 Pfam Desc: AMP-binding enzyme
  misc_feature (20)..(583): NCBI GI: 116192995 Blast Desc: CHGG_06215 [Chaetomium globosum CBS 148.51] gi|88182128|gb|EAQ89596.1| CHGG_06215 [Chaetomium globosum CBS 148.51]
  misc_feature (20)..(584): NCBI GI: 256727651 Blast Desc: NECHADRAFT_99322 [Nectria haematococca mpVI 77-13-4]
  misc_feature (18)..(584): NCBI GI: 46135817 Blast Desc: FG09424.1 [Gibberella zeae PH-1]
  misc_feature (20)..(584): NCBI GI: 85074761 Blast Desc: NCU00608 [Neurospora crassa OR74A] gi|28927561|gb|EAA36512.1| NCU00608 [Neurospora crassa OR74A] gi|38567300|emb|CAE76588.1| related to long-chain fatty-acid-CoA
  misc_feature (18)..(583): NCBI GI: 171683925 Blast Desc: protein product [Podospora anserina] gi|170941923|emb|CAP67575.1| protein product [Podospora anserina]
  misc_feature (20)..(583): NCBI GI: 149210283 Blast Desc: MGCH7_ch7g619 [Magnaporthe grisea 70-15] gi|86196574|gb|EAQ71212.1| MGCH7_ch7g619 [Magnaporthe grisea 70-15]
  misc_feature (20)..(513): NCBI GI: 261353811 Blast Desc: short-chain-fatty-acid-CoA ligase [Verticillium albo-atrum VaMs.102]
  misc_feature (10)..(584): NCBI GI: 154309326 Blast Desc: BC1G_07557 [Botryotinia fuckeliana B05.10] gi|150852381|gb|EDN27573.1| BC1G_07557 [Botryotinia fuckeliana B05.10]
  misc_feature (20)..(583): NCBI GI: 145609944 Blast Desc: MGG_02862 [Magnaporthe grisea 70-15] gi|145017321|gb|EDK01684.1| MGG_02862 [Magnaporthe grisea 70-15]
  misc_feature (15)..(583): NCBI GI: 119479619 Blast Desc: AMP-binding enzyme, [Neosartorya fischeri NRRL 181] gi|119407992|gb|EAW17941.1| AMP-binding enzyme, [Neosartorya fischeri NRRL 181]
  misc_feature (22)..(578): SWISSPROT Homolog: EC 6.2.1.3 Long-chain-fatty-acid--CoA ligase
  misc_feature: Useful for introducing or modulating the production of volatile compounds
MDTSPPPTASIAKKSKVNTTTLTFASLDSLSNTVAHSLRSLGVKKGDRVAVSLGSVSESVVLTYAIVKLGAIWVPLNPTFNTSQLSAALSHLGVETLIISAVTDLPFKPCRGRSNLDLLSSLIPGLTSGTNKLESPAVPSLKNVIIVDNAVSHLQSGFPPLQSMGILTPYTDLLSSSPSPIQPDTPLSPDETINIQFTSGTTSSPKAAMLSHRGVLNNGHLIASRMGLVPGDLIVVPPPLFHCFGCVLGLMATATTGASILLPSPAFDPAATLQMVSENHAHGLYGVATMFVAELDLLQNPAFASTLAPDAFKNLTKGIASGSSVPESLMLKLFEKMGLKDLTICYGMTETSPVSCMVAPHDTFTQRTSTVGRVMPHTAVKIVSPTNRSVILPRGECGEFAASGYLVMKGYYDDPVRTELDRIPDPVDGRIWMYSGDEARIDDEGFVQITGRIKDLIIRGGENIHPAEVENCLFQLEGVKEVSVVGVPDEKLGEAVAAFIVPRMGVTFVGGDGGIKDGKTEVASGEIGVKVMELRKDVVQEWVRTKLSKHLVPRYVFTIDEYPKTASGKIQKFKLRDLAREILGLKA

SEQ ID NO: 36320 - DNA, 2212 bp, Muscodor strobelii
  misc_feature: SGI EST ID NO. CUFF.86549.0
  misc_feature: Variant of the nucleotide sequence at SEQ ID NO 36318
gacgtgtgattctacaagacaattaggtagtttatggcaaacacgattccgtatactctcctgttttgcaacatttattttcagggaggagacagagacagtgatatcaaatttgagatatcgagtatagcgctgacagctctcttagccgcctctactccctcacacaataccagagcacttcgccaccatcgtgtctcaatatggagacctacctgccgtaatggcacgagatcccgtaatgatggacacctcgccgccacctacagcttcaattgctaagaagagcaaagtgaatactacgacactcaccttcgcctcactagattccctctcaaacactgttgctcattccctgcgatccctcggagtaaagaaaggagaccgcgtagccgtcagcctaggaagcgtctcagaatccgtcgtccttacatacgccatcgtcaaactcggagcaatctgggtacccttaaatccgacattcaacacctctcaactaagcgcggcattatcacatctcggcgtagaaaccttgataatcagcgccgtgaccgatctcccattcaagccctgccgcggacgaagtaatctcgaccttctttcatcactcatacccggtctaacaagcggcacgaacaaactcgagtccccagccgtcccatcactgaaaaacgtcatcatagttgacaacgccgtgtcccacctacaatcaggcttcccaccgcttcagtccatgggcatcttgacaccatacacagacctcctctcctcctccccctcgccaatacaaccagacacgcccctatctcccgacgagacgataaacatccaattcacatccgggacgacctctagcccaaaagccgccatgctctcccaccgcggcgtcctaaacaacggacacctaatcgcctcacgcatgggtctcgtaccaggcgacttgatagtcgttccaccccctctattccactgtttcgggtgcgtcctaggtttaatggcaacagcaacaaccggcgcctcaatcctgctcccctccccagctttcgaccctgcagcaacactccaaatggtgtcggagaaccacgcacacggtctgtacggcgtggcgactatgttcgtcgcggagctcgacttgcttcagaatcccgcatttgcttctacgctagcacctgacgcgtttaagaacctgaccaagggcatcgcgtccggatcttccgtcccggaatcgttgatgttgaagttattcgagaagatggggctcaaagatcttacgatttgttatggcatgacggagacttcgcccgtgtcttgtatggttgcgcctcacgatacgtttacacagcgaacttcgacagtcggacgtgtaatgccacatacagccgtgaagatcgtctctcccacaaaccgctccgtaattctcccgcgaggagagtgtggtgagttcgcagccagtggatatctagtcatgaaggggtattacgatgaccccgttcgtacagaattagatcgcatacctgatcctgtcgatgggaggatatggatgtatagcggtgacgaagcacgtatagatgacgagggcttcgttcagatcacgggacggatcaaagatttgattatcaggggtggagaaaacattcatccagccgaggtagagaattgtctgtttcagcttgagggcgtgaaggaggtcagtgtcgtcggggtccctgatgagaaattaggggaggctgttgcggcgttcatcgtgcctagaatgggagtaacttttgttggtggtgatgggggtatcaaggatgggaagactgaagttgccagcggggagattggagtgaaggtcatggagttgaggaaagacgtcgtccaggagtgggtgaggacgaagttgagtaaacatttggtgccgaggtatgtgtttaccattgatgagtatcccaagacggccagtgggaagatacagaagtttaagttgagggatttggctcgagagatacttgggttgaaggcttgagtgccgcaagagtcgatacccaggaaaatggaatgaagtttgaagggatcatagcaagtgttacagtgtggcggtgacaggatgggagatatggctaccgtcgtcatagcggtctagacaagcattgcgaatatctcatgtcaccgtgtatgatactaagaagccaaaagaaaaaggccccagaaaagaaataacgacaacaac

SEQ ID NO: 36321 - DNA, 1110 bp, Muscodor strobelii
  misc_feature: SGI cDNA ID NO. 572590
  misc_feature: Reduced expression when VOC is produced
  misc_feature: Encodes the peptide sequence at SEQ ID NO 36322
atgatgtcctttcggcgagctctcgccttcgcggccttcttcataacagctttcatattgctgcgccgctcccacagctccgacgacgcaggcctcgtccgcaagccccctccgcccaagtccgatgccaatgtcctgcaaaatccgccatcgacctcgaatcctgccacagccggcatggcgcaccgcataaagcccgccccggcccagcatgcgatccaagacatgtcctccatgtcgctgtacgacaagctgggctaccaatacccctacgacgtcgagaccaagttccctgcctacatctggcagacctggaagacggcccccgccgacaaggagttcagattccggtcgcaagaggcctcctggaccgagaacaatcctacctttgtccacgaagtcataaccgacaagaccgccattcccttgctccagctcttgtatgcctccgtccccgaagtgctcgaggcatatgaggccttgcccgaagcagttctaaaggccgatttcttccgctaccttatcctccttgcacgtggcggcatctactcggacattgataccgtatcactcaagggcgtcgagtcatggatcccagaatcagtcccccagcatagcattggccttatcattggcatcgaggctgacccggatcgcccagactgggcagactggtacagtcgtcgaattcagttttgccagtggactatccagtccaagcccggtcacccagtgctacgcgacatcgtgtccaagatcacggctgagacactgcgaaggaagagagacggtgtgttcgtgtctgcagagaagtcgattgtcgagttcactggacccgccatctggaccgacaccatctttgattacttcaatgacccccggtacttcgagatgaagaacagcgctggtgagatctcgtttagaaacttcaccggcatgaacacccccaagagagtgggcgatgtcgttatcctgcccatcaccagtttctcccctggtgtgggccaaatgggcgcgcagggctacgatgaccctcaggcttttgtaaaacacgattttgaaggcacatggaaaccggaacacttgcgacatatcggcgaaacgaattag

SEQ ID NO: 36322 - protein, 369 aa, Muscodor strobelii
  misc_feature: SGI Peptide ID NO. 572590
  misc_feature (132)..(212): Pfam Id: PF04488 Pfam Desc: Glycosyltransferase sugar-binding region containing DXD motif
  misc_feature (1)..(369): NCBI GI: 85074763 Blast Desc: NCU00609 [Neurospora crassa OR74A] gi|28927562|gb|EAA36513.1| NCU00609 [Neurospora crassa OR74A]
  misc_feature (1)..(367): NCBI GI: 39970785 Blast Desc: MGG_02859 [Magnaporthe grisea 70-15] gi|149210279|ref|XP_001522514.1| MGCH7_ch7g617 [Magnaporthe grisea 70-15] gi|86196572|gb|EAQ71210.1| MGCH7_ch7g617 grisea
  misc_feature (1)..(355): NCBI GI: 116192993 Blast Desc: CHGG_06214 [Chaetomium globosum CBS 148.51] gi|88182127|gb|EAQ89595.1| CHGG_06214 [Chaetomium globosum CBS 148.51]
  misc_feature (1)..(367): NCBI GI: 171683929 Blast Desc: protein product [Podospora anserina] gi|170941925|emb|CAP67577.1| protein product [Podospora anserina]
  misc_feature (1)..(367): NCBI GI: 256727652 Blast Desc: NECHADRAFT_105919 [Nectria haematococca mpVI 77-13-4]
  misc_feature (1)..(367): NCBI GI: 46135819 Blast Desc: FG09425.1 [Gibberella zeae PH-1]
  misc_feature (1)..(366): NCBI GI: 154309328 Blast Desc: BC1G_07558 [Botryotinia fuckeliana B05.10] gi|150852382|gb|EDN27574.1| BC1G_07558 [Botryotinia fuckeliana B05.10]
  misc_feature (20)..(366): NCBI GI: 156058294 Blast Desc: SS1G_03158 [Sclerotinia sclerotiorum 1980] gi|154700946|gb|EDO00685.1| SS1G_03158 [Sclerotinia sclerotiorum 1980]
  misc_feature (1)..(367): NCBI GI: 189192316 Blast Desc: initiation-specific alpha-1,6-mannosyltransferase [Pyrenophora tritici-repentis Pt-1C-BFP] gi|187974103|gb|EDU41602.1| initiation-specific [Pyrenophora
  misc_feature (1)..(367): NCBI GI: 169600181 Blast Desc: SNOG_02920 [Phaeosphaeria nodorum SN15] gi|111068531|gb|EAT89651.1| SNOG_02920 [Phaeosphaeria nodorum SN15]
  misc_feature (83)..(358): SWISSPROT Homolog: EC 2.4.1.232 Initiation-specific alpha-1,6-mannosyltransferase
  misc_feature: Useful for introducing or modulating the production of volatile compounds
MMSFRRALAFAAFFITAFILLRRSHSSDDAGLVRKPPPPKSDANVLQNPPSTSNPATAGMAHRIKPAPAQHAIQDMSSMSLYDKLGYQYPYDVETKFPAYIWQTWKTAPADKEFRFRSQEASWTENNPTFVHEVITDKTAIPLLQLLYASVPEVLEAYEALPEAVLKADFFRYLILLARGGIYSDIDTVSLKGVESWIPESVPQHSIGLIIGIEADPDRPDWADWYSRRIQFCQWTIQSKPGHPVLRDIVSKITAETLRRKRDGVFVSAEKSIVEFTGPAIWTDTIFDYFNDPRYFEMKNSAGEISFRNFTGMNTPKRVGDVVILPITSFSPGVGQMGAQGYDDPQAFVKHDFEGTWKPEHLRHIGETN

SEQ ID NO: 36323 - DNA, 2867 bp, Muscodor strobelii
  misc_feature: SGI EST ID NO. CUFF.86618.1
  misc_feature: Variant of the nucleotide sequence at SEQ ID NO 36321
cttggttcccatccatctcacctccagcccatgtcgagagccggaaattcttgtcctagaacagacagcttgaattgaggtttgcgaatttgagaacttggataggccagtcacaagagtgggcacactcaccccagctactataatcagactttatagtggacacaggcgacgtaccacagagacagcatccaagctttggggattgtggcattgtttcaaaccttctggctactaatttctccaagtcgcgtttttcccacagtcgtcacttttgagttttaacgtctttgtttgctattcctatcagacaacacaactttatttcgcattcgagctagaatagccccacgacattccttagacacattcgccagacttatcagctatctctttttcgattcacttacatccctccacaagtcccacgcctggaatcattattccattattccttaccagctgcgcactccgaggtcacccagcccgttccgtatttattatcacaatttgcagattttgttctgattgcagcacttgtcgtaccggtactgtctagctgccggtgggctcaatgtctttgcgcaagtcctgctgatcgtcgcatacatatcaccaagcacccactggctggagagcttcggtgtctcgacccgttggatcccttgatcctctcgcccagcgatctgctttttacctcgacacgtcatctatacctccctatacccgcgttcctccacctgcacgcccaagatgatgtcctttcggcgagctctcgccttcgcggccttcttcataacagctttcatattgctgcgccgctcccacagctccgacgacgcaggcctcgtccgcaagccccctccgcccaagtccgatgccaatgtcctgcaaaatccgccatcgacctcgaatcctgccacagccggcatggcgcaccgcataaagcccgccccggcccagcatgcgatccaagacatgtcctccatgtcgctgtacgacaagctgggctaccaatacccctacgacgtcgagaccaagttccctgcctacatctggcagacctggaagacggcccccgccgacaaggagttcagattccggtcgcaagaggcctcctggaccgagaacaatcctacctttgtccacgaagtcataaccgacaagaccgccattcccttgctccagctcttgtatgcctccgtccccgaagtgctcgaggcatatgaggccttgcccgaagcagttctaaaggccgatttcttccgctaccttatcctccttgcacgtggcggcatctactcggacattgataccgtatcactcaagggcgtcgagtcatggatcccagaatcagtcccccagcatagcattggccttatcattggcatcgaggctgacccggatcgcccagactgggcagactggtacagtcgtcgaattcagttttgccagtggactatccagtccaagcccggtcacccagtgctacgcgacatcgtgtccaagatcacggctgagacactgcgaaggaagagagacggtgtgttcgtgtctgcagagaagtcgattgtcgagttcactggacccgccatctggaccgacaccatctttgattacttcaatgacccccggtacttcgagatgaagaacagcgctggtgagatctcgtttagaaacttcaccggcatgaacacccccaagagagtgggcgatgtcgttatcctgcccatcaccagtttctcccctggtgtgggccaaatgggcgcgcagggctacgatgaccctcaggcttttgtaaaacacgattttgaaggcacatggaaaccggaacacttgcgacatatcggcgaaacgaattagaatagactcgcctggtttgggttcggattattctcttagcattgggttgaggcaccaatcttttgcttatgccactatccgtcactgaagactctagcgacttacactgcgccctcgatgggaggacggaaattagcgttatcgactgcaaaccgacttacgatttccgactacgtcagtcgcacaagatggtctactacctggacacacgtcagacatagaaggtcataggttcgcctgcgccgggctggagcacgatgcttggaggcttgcggtgcgaatcaacagcgatagagtctaggaatcgacgctcgagctgttaatctgcacttcgagctcgcaaagacgctatcatgcctttgcgaatgttgaagcccgatgattggccactggccgagacgatagcagttgtcgctatactgcgctaagaagccatcactgtatataacatgggagaaccaaggtgcatagaaaggcgtttggatgggaaatatgggatgctcggcgttggtcagagcgggacactatatcctaagaaaagaattgaatcggaaagaattgctatcttcttctactccactcttcgcaacttgctatatctctaatcttggtgaaaacaacaataatagctacgatgccgacagcttcaattaggttagtattatgccaagaaaaggggatgtcccacttctccgcagtcttccatctcagccccagccccagctgtagcgaccagtgacatcccgcgacggcctcctcgttttgtgatagctaggtcaatagctcccccgcctgacgtaccttgcaggtgcagatgaaaaatgacactcggtcaagaagcttttattcatttagactcggtatccgaccgaacgagagaactattgctgtggccattggggtcgaagaattgaccaggtctgtaattggagcatactaccacacggacatgctcctcaggtacaaagctactccgacgtaaaccgcgtctgctgaactagccc

SEQ ID NO: 36324 - DNA, 480 bp, Muscodor strobelii
  misc_feature: SGI cDNA ID NO. 572591
  misc_feature: Reduced expression when VOC is produced
  misc_feature: Encodes the peptide sequence at SEQ ID NO 36325
atgcctttcttctccaaccgcagccgcgaagaagaagtcgtcgaggaaccaactcccgtcccagagaaaaagcacggctttttcggctcgcgccaccgctccccatctcccgcctccacaacccgcacgagcaccacctcacacagctcgcgacactcaggtacatatgacgatgcggtatccaacccttcccgtcaccgaagcgtgctatcccgcaccttcggccacggcaacagctccaacccggagatggacccgtctatcgtccaagcccgtgagcgcgttatgagcgccgagaacgccgagcgcgaagccgacaaggctctggcttctgcccgcctgagagtccgcgaagctcgcgatgaggttaagagacttgaggctgaggctgctgaggaggctagacgggccaagatcaagcagtaccatgcccgtgaggtttccaagaggggcaagcagcttggtcgccacgatctgtaa

SEQ ID NO: 36325 - protein, 159 aa, Muscodor strobelii
  misc_feature: SGI Peptide ID NO. 572591
  misc_feature (1)..(159): NCBI GI: 164422607 Blast Desc: NCU10129 [Neurospora crassa OR74A] gi|157069743|gb|EDO64885.1| [Neurospora crassa OR74A]
  misc_feature (1)..(158): NCBI GI: 170940368 Blast Desc: protein product [Podospora anserina]
  misc_feature (13)..(158): NCBI GI: 116194057 Blast Desc: CHGG_06746 [Chaetomium globosum CBS 148.51] gi|88182659|gb|EAQ90127.1| CHGG_06746 [Chaetomium globosum CBS 148.51]
  misc_feature (1)..(157): NCBI GI: 256732410 Blast Desc: NECHADRAFT_100722 [Nectria haematococca mpVI 77-13-4]
  misc_feature (1)..(159): NCBI GI: 149209629 Blast Desc: MGCH7_ch7g297 [Magnaporthe grisea 70-15] gi|86196252|gb|EAQ70890.1| MGCH7_ch7g297 [Magnaporthe grisea 70-15]
  misc_feature (1)..(157): NCBI GI: 46105086 Blast Desc: FG00171.1 [Gibberella zeae PH-1]
  misc_feature (1)..(159): NCBI GI: 39970229 Blast Desc: MGG_02581 [Magnaporthe grisea 70-15] gi|145017639|gb|EDK02002.1| MGG_02581 [Magnaporthe grisea 70-15]
  misc_feature (27)..(156): NCBI GI: 261353780 Blast Desc: [Verticillium albo-atrum VaMs.102]
  misc_feature (63)..(158): NCBI GI: 189196548 Blast Desc: [Pyrenophora tritici-repentis Pt-1C-BFP] gi|187980491|gb|EDU47117.1| [Pyrenophora tritici-repentis Pt-1C-BFP]
  misc_feature (85)..(156): NCBI GI: 119473707 Blast Desc: NFIA_001810 [Neosartorya fischeri NRRL 181] gi|119406882|gb|EAW16832.1| conserved [Neosartorya fischeri NRRL 181]
  misc_feature: Useful for introducing or modulating the production of volatile compounds
MPFFSNRSREEEVVEEPTPVPEKKHGFFGSRHRSPSPASTTRTSTTSHSSRHSGTYDDAVSNPSRHRSVLSRTFGHGNSSNPEMDPSIVQARERVMSAENAEREADKALASARLRVREARDEVKRLEAEAAEEARRAKIKQYHAREVSKRGKQLGRHDL

SEQ ID NO: 36326 - DNA, 2220 bp, Muscodor strobelii
  misc_feature: SGI EST ID NO. CUFF.86554.0
  misc_feature: Variant of the nucleotide sequence at SEQ ID NO 36324
cttagtttcagctcgagcatatagacgatcacgataggcagtgagacaactggatgtactgatcgtgattcttctcgagtgtacatctctaggcatacattgcgggatccatgtttatatgtcctcggccaagtcttgtctgtgtagaacataggaagacaacgaatttggcttgacagtggaatctactcgtctggcagattccgtacaatacccaacgggaaatggccgaaattcgatcaagtctctcgaatttacaaaagcaagtaaagatgcatcatcatctcatgactaatcagctcccaatccaaaatctcccaacccatcatcgacagctgagtcttggcagacgaaccaaccccaagaccctgaactttacctgggctcatccctgtctcacttatctctggcactcgatctcagggtccaaatcccaagcctatttcgtcactcgccctcctctcattggccgctgtctcacgtcgaccccattcattggccagaacacctacctgtacgtcataacggcagatcctccatcacgcactttgaatttagggggtggaaggctcgatagcggaaaaccggtttgcaagacgatgaccgttgacgttgttggtgatacagagatatcacgaaatatagaaatagggacgaaatccactgcattggcattttttccccgccacatttctcatcataaactataaactactagatctacgacgacaggttgcaccgcatcgcgtacctgaataatacctacaactttatcacgacaccacctagaacaaataaatcagatacaatcaccatgcctttcttctccaaccgcagccgcgaagaagaagtcgtcgaggaaccaactcccgtcccagagaaaaagcacggctttttcggctcgcgccaccgctccccatctcccgcctccacaacccgcacgagcaccacctcacacagctcgcgacactcaggtacatatgacgatgcggtatccaacccttcccgtcaccgaagcgtgctatcccgcaccttcggccacggcaacagctccaacccggagatggacccgtctatcgtccaagcccgtgagcgcgttatgagcgccgagaacgccgagcgcgaagccgacaaggctctggcttctgcccgcctgagagtccgcgaagctcgcgatgaggttaagagacttgaggctgaggctgctgaggaggctagacgggccaagatcaagcagtaccatgcccgtgaggtttccaagaggggcaagcagcttggtcgccacgatctgtaaatgccatcacgttttatatatgtgtttaacttggtgatgacgagatgagaaaagaccatgatggactgaaggcgtttagagataatatcattacgctttcctgattccttttgtataattatcagtataccaattagcgcggcgtctgtatgaataatgaagttctggaacacattatgcctgcaccagaacttgcgatatgtgtatcgaggctcgagttgcgtagatttgacctcgcgatgcgggagtggtttgagtttgtgttccgtcgagactggtggaatggcaaagctcagtgccgacttcaaactcaattgaacgtcgtagttccatatcacgggcgcgatatacaccgccgcaactagcgacatgtagaatagttgttccgggtttcttatgtgcatacacgcttgcgcgaacctcagatcgtctcacgtagttggatgaggctcagtggctggcgatgcgatcagctccattccattacgtgggcggacgcgtatacctgcatgagggcaggtttagccctcattggtgatacctcactcgtctgtcgtgatgatccatcctaccctagagaagctggtgcccttgcttgtcacctaggaccactggcatcggaacaaggtcccatccaccaggtcgagtctgagttgacggactctgtctcgtcgaacttgtttcgattagatagctcaagctacattttccccatcagtcatcatccgccacatggatttagaggtgtgaatagtaaaagatgcagaatgctgactccaacttttgaaggatggcactatttcctagcagaagatcggtcgatcaccatatgcaacagcccaagtccgatagccatagattaaacatttcgaaaagtcgggggcttcctggctaatcgaaccgttttgtgttgtattttgtgtcgt

SEQ ID NO: 36327 - DNA, 870 bp, Muscodor strobelii
  misc_feature: SGI cDNA ID NO. 572592
  misc_feature: Reduced expression when VOC is produced
  misc_feature: Encodes the peptide sequence at SEQ ID NO 36328
atggatatcccgttccgccagcgcgaggaccaaaaagtcctccggccggtgcccaaaatctctgcgcccgtacttacgaggaagaacatgtcaagtgagatggcattagccgggcaattatacggagtacacccgggtctggcgacattaccaccgctgatacctattgaggaccagaatatggcgggtgcttcagacatggagtgggatactacgacggtggtgcataatatgaattggccgcagattgataacgatagacggcatagcgggtgggccgaggttgaaaaacgatggacggcacaggagaaagtggcgcatcagcagcagagtgtcggtgcacagtctctaagctcttctaaatcccagccgacgagaaaagatgtcgaggccgctgcaaggttcccttatccacatcttgcaatcccgacgccgagtctggaatcggattttcgaatgagggttacgctgaattcgcagtctgcgtcgatggctgttggggatgggtttaagaagtggactaccttcactgagggggagtggtcaggaaggttggggtatggcactgtggttagtggtggtcaagacagccaagaccagacgcacggcaagacatcagcgacaaaaatcgaagccacgtatcgtatgaagacaggtgacgaaattcccgcttttattgaatgtaagacaaccggttaccgaatacatcagacaaaatcatccggagacaacaccgagtcatacagagtgaccatatccatgaaaacagcagacgagcgatacgcagaaaaagtcagctttggactgtgggtagggagctgtaggtggaggggttcggaagtcgtatttgatgcatataggataacttga

SEQ ID NO: 36328 - protein, 289 aa, Muscodor strobelii
  misc_feature: SGI Peptide ID NO. 572592
  misc_feature (140)..(289): NCBI GI: 226293186 Blast Desc: conserved [Paracoccidioides brasiliensis Pb18]
  misc_feature (140)..(288): NCBI GI: 226277908 Blast Desc: conserved [Paracoccidioides brasiliensis Pb01]
  misc_feature (140)..(289): NCBI GI: 261189137 Blast Desc: conserved [Ajellomyces dermatitidis SLH14081] gi|239591765|gb|EEQ74346.1| conserved [Ajellomyces dermatitidis SLH14081] gi|239614682|gb|EEQ91669.1| conserved [Ajellomyces
  misc_feature (140)..(288): NCBI GI: 169778921 Blast Desc: [Aspergillus oryzae RIB40] gi|83772664|dbj|BAE62792.1| protein product [Aspergillus oryzae]
  misc_feature (140)..(288): NCBI GI: 238499507 Blast Desc: conserved [Aspergillus flavus NRRL3357] gi|220692741|gb|EED49087.1| conserved [Aspergillus flavus NRRL3357]
  misc_feature (140)..(289): NCBI GI: 154277522 Blast Desc: [Ajellomyces capsulatus NAm1] gi|150413187|gb|EDN08570.1| [Ajellomyces capsulatus NAm1]
  misc_feature (140)..(289): NCBI GI: 145247120 Blast Desc: An12g07600 [Aspergillus niger] gi|134080538|emb|CAK48499.1| protein product [Aspergillus niger]
  misc_feature (140)..(289): NCBI GI: 240111746 Blast Desc: CPC735_012090 [Coccidioides posadasii C735 delta SOWgp]
  misc_feature (140)..(289): NCBI GI: 171695800 Blast Desc: protein product [Podospora anserina] gi|170948142|emb|CAP60306.1| protein product [Podospora anserina]
  misc_feature (140)..(289): NCBI GI: 119173076 Blast Desc: CIMG_10073 [Coccidioides immitis RS]
  misc_feature: Useful for introducing or modulating the production of volatile compounds
MDIPFRQREDQKVLRPVPKISAPVLTRKNMSSEMALAGQLYGVHPGLATLPPLIPIEDQNMAGASDMEWDTTTVVHNMNWPQIDNDRRHSGWAEVEKRWTAQEKVAHQQQSVGAQSLSSSKSQPTRKDVEAAARFPYPHLAIPTPSLESDFRMRVTLNSQSASMAVGDGFKKWTTFTEGEWSGRLGYGTVVSGGQDSQDQTHGKTSATKIEATYRMKTGDEIPAFIECKTTGYRIHQTKSSGDNTESYRVTISMKTADERYAEKVSFGLWVGSCRWRGSEVVFDAYRIT

SEQ ID NO: 36329 - DNA, 5175 bp, Muscodor strobelii
  misc_feature: SGI EST ID NO. CUFF.86682.0
  misc_feature: Variant of the nucleotide sequence at SEQ ID NO 36327
ataatacgcatactattagcccggagccacggacttcgtagccaggattgtacacacaccactcatgaccttgcgtgcattcaacatttcgatcatttcatcaataacccacgcgtaccacctcgtcacaatacgtagtcgacacgaaacatttcttggccgaaatcgacggacgacttgaaatggtggcattttgattatcggcattatattagaaagatcgcgcggcattggcgatgggaatggacaccccgcctgccagtcagcacaaaaacacatccattgggatcatttaattaagttcagcccaggctactcgccgccataggacacaatggttccaccgcaggcgaccaactttcaattcattacatcgatcaacactgttgctcgcgatgacgagactcggcgcaaggttcgctcccacgcgaggcgccagaaactctcgaacgagagcggaagccctactcagccgaggaagtcgagcacacaaaaggagcgcacctcgaagtttagagtgaaaccatccaacactcaggaaacggctgatccccgtgctgccgacaatgacaatcatgatagcagtaagaatgatagtgaccatggcaaagccaagaagaatgctcccccgcttctccggctcgatggtcagccactgtcagacgcccagaagcgagacgacaattcgaacttcacgcctactatggtgtctaaggagctagctttagttgtagcgaaagagctacctagttttccaatgttgcgcatcgagacgacgcccttaacggaaccgctactcaagtattgctttacagtttgcctgtgtccacaagagaaaatggtagagaaatggttcaatcgaaatggtgcgccaacgtatatgatgacttattattccggatttctcgcgaatgctttcgccatgaatcccgaaggaaacttcttcgacgtactccacgtcgatacggcaataacccacgcattcatggcattggtagcatctatgcataatgcattggctcgatgggacgatacaagcactttcgatttccatcgcctccaagccatcaaggctatcaacgatcgactaaacgttgagggcaagacgcctggaattccgatttcggatggcattactatggctgtagcattgctggtaaataacgaggcttttacgggatcagtaaacgcagcggcagctcatatgagtggcttgaaacgcataatagatctacgagggggtattctggaaggtttcaagtataatcctgtagtccagagggcattagtttgggctgatttctcctatgcgtctgtcgctgggcaaccgttgatgtttccactggtaccagagctgacctcttcgctgagtctccatgattatcttcaaacgcggtcggcgatggccagcgcggagtcacaatgttctaagagcttgattgttgggaaccaagaggttgtagacaatctcgagcttctgtcttcaatcacggtttgcttgaactctttcgactacacaaacttagctggcatgtcaacagaacgagtacagctgagcgactcgatctatctagcggaattccggctcttccaacttgaggattcgtatcgcaatcttatgcttcccaaggaaggagaagcactctcgctaatactccagaatgacgtaatgagcaacagcagacgtcccccgcctaatgatctatccgaaatccttgtatgggcaagccatctgtatctgcaccttgcactccgtgggcagcctccctcagcccctagacatcgtgcactcacagagtcgcttatgtcatcgttatacgacaccctgtcaacattgaatcttcttgtcagccctgagccttacgggagcccgcagtctcactacagcataaatagtataaacagcattggcagcagctctgtggaaagctggtcgagcaacacgaccaacacttcgattcatagcccactcgagcgaaaacccacgaacgatatccacaagaacatgctgctatgggcactattcattggctcatgtgttcgcttgccaattgcgcccggcgagtaccaagggatccttctcggcgaccaccacgagtttttcatactcgcgttgaagaattattgtgtcacaaggttcatcaccgacaaactgacactggcagcaaagctgaaggatgtggtttggctagatagttggatggaacatcaacttgatctcatttgggccgaaataggcgatcacctcaattcctgatcagtgtatttcggcagcgacatttatatccgatgcgcgtctgagattgatcatcacgtcttcgagtcacggcgcaactatctttgtccattcttcacgaatgatattgacttttcgaaacccgaccctgctttgtttgggcattatgacaaagcgacgaccctccatacaaaagcccagccgggcaaagcagcgtcacgctcggagtctgctcctctgctgcccattacgatgcatgatgaattcacgaaaatcacttacgagtgaaagtgagatatgggaggccgatcgggctcggcgttcaaatgctccttccccggaaccatgcccacggccctcaatgccagccgaaggcgaagaggaatgcacaaagacatctcaatctttgatgacggcgacgtgcatggagcgcctcgatgaagacgagaagtgagcttgatccactgatgaggaagcttaacgatggcaaacgcacttatgaccacaagccaccttgcatcaacaagatgcaccggcgtttaccctatatttctccacccgctgcccacaatcacgaaatcagcgagttcagtatatggctcaaccacttgacgcacgaataatggaactactcagcatttaggaaatgacttacaactcttgtaaccacggctcgcatgtaaatatttggctcttggcttgtatatcaccatgatggacgaatgggcaggaggcactcccggaaaggagatcaacggcatcacaaaaatgaagaaatcatggggtgtatgatacgggacaattgcggaatggcggagtacaggaaaagggagtgtctcgatttcgatgtacatcagatatccgcaatatagcaaatctagcaaacgtcataaaacactcggaaaatcttacaatctatgcctgacgtgatcaagccttgtgcagtttagtcaagatagaatatcctagaacagaagaggtcctgcaatgactaatatcgtatcgcatgaagaaaacatataagtacaacccacgctttgaagcaaagtcaatagtgaaatctcactcgatcggcattcaccagagtcggccaaattgcacgcaaggagcgacggaatgtcaccagaccaagatgctcaaacggcgccgaaaagaggggctcggcacaactgtctctcccgccccgatcggtccttactctctacaagcaattccgtcggaagtcggtgctcacatctcatcgacagaatgcagattcatgatattcctcaactgaagtcctgcatacacttcggaatttgtgctgtatcttcgttcgtcctacggtgatttgtgatcctccgcatctattcatccgtctgtcctaccatacgttcaagttaaggctctcaaccaactgtagcggtcatggatatcccgttccgccagcgcgaggaccaaaaagtcctccggccggtgcccaaaatctctgcgcccgtacttacgaggaagaacatgtcaagtgagatggcattagccgggcaattatacggagtacacccgggtctggcgacattaccaccgctgatacctattgaggaccagaatatggcgggtgcttcagacatggagtgggatactacgacggtggtgcataatatgaattggccgcagattgataacgatagacggcatagcgggtgggccgaggttgaaaaacgatggacggcacaggagaaagtggcgcatcagcagcagagtgtcggtgcacagtctctgtaagttctgttgcttttacttgtgccctctttcgatatatttttctccataggcgtaggtcttggcaatgggtagtaattctggttcaaggggcggccgctggagtgtatggtcttgactaaacctagaagctcttctaaatcccagccgacgagaaaagatgtcgaggccgctgcaaggttcccttatccacatcttgcaatcccgacgccgagtctggaatcggattttcgaatgagggttacgctgaattcgcagtctgcgtcgatggctgttggggatgggtttaagaagtggactaccttcactgagggggagtggtcaggaaggttggggtatggcactgtggttgtaagcattctgtcgtttcctttttatttttatttttttgcctatcttaatgttgtttgtgctaccacattgaaacactctggtcgaatgtgtcgatatcttaattctcgccccaagaccgtcgtggtatatagagggaccaatctaaccctgatggcatagagtggtggtcaagacagccaagaccagacgcacggcaagacatcagcgacaaaaatcgaagccacgtatcgtatgaagacaggtgacgaaattcccgcttttattgaatgtaagacaaccggttaccgaatacatcagacaaaatcatccggagacaacaccgagtcatacagagtgaccatatccatgaaaacagcagacgagcgatacgcagaaaaagtcagctttggactgtgggtagggagctgtaggtggaggggttcggaagtcgtatttgatgcatataggataacttgatctgcaatctagacagcgtgaaattgtaatcgtggcgaaacatctccataaactggctgtgactgaataaattgttgaccactgccaatttcgctaagtcttactgccccgaaggacactgatacatttggtaacccccccgatatcccaccaactgcatcatcgtgaacctcggaattcgaacgtaaaaatgaaagacgagacataaacaatgatccgacatctcttagctcgagatctacacaacggtctgggtctagagaaccaccaacccgaacaagcgcagtccacagcgttggaggcgttggaatacagtcaaccgagtcacgaagctgcatattacaaaatgagaacaccatcattaaatgttc

SEQ ID NO: 36330 - DNA, 1923 bp, Muscodor strobelii
  misc_feature: SGI cDNA ID NO. 572593
  misc_feature: Reduced expression when VOC is produced
  misc_feature: Encodes the peptide sequence at SEQ ID NO 36331
atggttccaccgcaggcgaccaactttcaattcattacatcgatcaacactgttgctcgcgatgacgagactcggcgcaaggttcgctcccacgcgaggcgccagaaactctcgaacgagagcggaagccctactcagccgaggaagtcgagcacacaaaaggagcgcacctcgaagtttagagtgaaaccatccaacactcaggaaacggctgatccccgtgctgccgacaatgacaatcatgatagcagtaagaatgatagtgaccatggcaaagccaagaagaatgctcccccgcttctccggctcgatggtcagccactgtcagacgcccagaagcgagacgacaattcgaacttcacgcctactatggtgtctaaggagctagctttagttgtagcgaaagagctacctagttttccaatgttgcgcatcgagacgacgcccttaacggaaccgctactcaagtattgctttacagtttgcctgtgtccacaagagaaaatggtagagaaatggttcaatcgaaatggtgcgccaacgtatatgatgacttattattccggatttctcgcgaatgctttcgccatgaatcccgaaggaaacttcttcgacgtactccacgtcgatacggcaataacccacgcattcatggcattggtagcatctatgcataatgcattggctcgatgggacgatacaagcactttcgatttccatcgcctccaagccatcaaggctatcaacgatcgactaaacgttgagggcaagacgcctggaattccgatttcggatggcattactatggctgtagcattgctggtaaataacgaggcttttacgggatcagtaaacgcagcggcagctcatatgagtggcttgaaacgcataatagatctacgagggggtattctggaaggtttcaagtataatcctgtagtccagagggcattagtttgggctgatttctcctatgcgtctgtcgctgggcaaccgttgatgtttccactggtaccagagctgacctcttcgctgagtctccatgattatcttcaaacgcggtcggcgatggccagcgcggagtcacaatgttctaagagcttgattgttgggaaccaagaggttgtagacaatctcgagcttctgtcttcaatcacggtttgcttgaactctttcgactacacaaacttagctggcatgtcaacagaacgagtacagctgagcgactcgatctatctagcggaattccggctcttccaacttgaggattcgtatcgcaatcttatgcttcccaaggaaggagaagcactctcgctaatactccagaatgacgtaatgagcaacagcagacgtcccccgcctaatgatctatccgaaatccttgtatgggcaagccatctgtatctgcaccttgcactccgtgggcagcctccctcagcccctagacatcgtgcactcacagagtcgcttatgtcatcgttatacgacaccctgtcaacattgaatcttcttgtcagccctgagccttacgggagcccgcagtctcactacagcataaatagtataaacagcattggcagcagctctgtggaaagctggtcgagcaacacgaccaacacttcgattcatagcccactcgagcgaaaacccacgaacgatatccacaagaacatgctgctatgggcactattcattggctcatgtgttcgcttgccaattgcgcccggcgagtaccaagggatccttctcggcgaccaccacgagtttttcatactcgcgttgaagaattattgtgtcacaaggttcatcaccgacaaactgacactggcagcaaagctgaaggatgtggtttggctagatagttggatggaacatcaacttgatctcatttgggccgaaataggcgatcacctcaattcctga

SEQ ID NO: 36331 - protein, 640 aa, Muscodor strobelii
  misc_feature: SGI Peptide ID NO. 572593
  misc_feature (240)..(634): NCBI GI: 189198231 Blast Desc: PTRG_05120 [Pyrenophora tritici-repentis Pt-1C-BFP] gi|187981401|gb|EDU48027.1| PTRG_05120 [Pyrenophora tritici-repentis Pt-1C-BFP]
  misc_feature (3)..(329): NCBI GI: 115398363 Blast Desc: [Aspergillus terreus NIH2624] gi|114192964|gb|EAU34664.1| [Aspergillus terreus NIH2624]
  misc_feature (4)..(329): NCBI GI: 225560422 Blast Desc: conserved [Ajellomyces capsulatus G186AR]
  misc_feature (8)..(329): NCBI GI: 145256516 Blast Desc: An04g00590 [Aspergillus niger] gi|134058326|emb|CAK38515.1| protein product [Aspergillus niger]
  misc_feature (4)..(366): NCBI GI: 119501266 Blast Desc: NFIA_109870 [Neosartorya fischeri NRRL 181] gi|119415555|gb|EAW25493.1| conserved [Neosartorya fischeri NRRL 181]
  misc_feature (4)..(326): NCBI GI: 121706516 Blast Desc: conserved [Aspergillus clavatus NRRL 1] gi|119399668|gb|EAW10094.1| conserved [Aspergillus clavatus NRRL 1]
  misc_feature (4)..(329): NCBI GI: 240279977 Blast Desc: conserved [Ajellomyces capsulatus H143]
  misc_feature (165)..(335): NCBI GI: 256730301 Blast Desc: NECHADRAFT_45111 [Nectria haematococca mpVI 77-13-4]
  misc_feature (202)..(336): NCBI GI: 238489209 Blast Desc: conserved [Aspergillus flavus NRRL3357] gi|220698230|gb|EED54570.1| conserved [Aspergillus flavus NRRL3357]
  misc_feature (3)..(329): NCBI GI: 239606564 Blast Desc: conserved [Ajellomyces dermatitidis ER-3]
  misc_feature: Useful for introducing or modulating the production of volatile compounds
MVPPQATNFQFITSINTVARDDETRRKVRSHARRQKLSNESGSPTQPRKSSTQKERTSKFRVKPSNTQETADPRAADNDNHDSSKNDSDHGKAKKNAPPLLRLDGQPLSDAQKRDDNSNFTPTMVSKELALVVAKELPSFPMLRIETTPLTEPLLKYCFTVCLCPQEKMVEKWFNRNGAPTYMMTYYSGFLANAFAMNPEGNFFDVLHVDTAITHAFMALVASMHNALARWDDTSTFDFHRLQAIKAINDRLNVEGKTPGIPISDGITMAVALLVNNEAFTGSVNAAAAHMSGLKRIIDLRGGILEGFKYNPVVQRALVWADFSYASVAGQPLMFPLVPELTSSLSLHDYLQTRSAMASAESQCSKSLIVGNQEVVDNLELLSSITVCLNSFDYTNLAGMSTERVQLSDSIYLAEFRLFQLEDSYRNLMLPKEGEALSLILQNDVMSNSRRPPPNDLSEILVWASHLYLHLALRGQPPSAPRHRALTESLMSSLYDTLSTLNLLVSPEPYGSPQSHYSINSINSIGSSSVESWSSNTTNTSIHSPLERKPTNDIHKNMLLWALFIGSCVRLPIAPGEYQGILLGDHHEFFILALKNYCVTRFITDKLTLAAKLKDVVWLDSWMEHQLDLIWAEIGDHLNS

SEQ ID NO: 36332 - DNA, 5175 bp, Muscodor strobelii; identical to SEQ ID NO: 36329
  misc_feature: SGI EST ID NO. CUFF.86682.0
  misc_feature: Variant of the nucleotide sequence at SEQ ID NO 36330

SEQ ID NO: 36333 - DNA, 840 bp, Muscodor strobelii
  misc_feature: SGI cDNA ID NO. 572594
  misc_feature: Reduced expression when VOC is produced
  misc_feature: Encodes the peptide sequence at SEQ ID NO 36334
atgtcttccgttacggctcaccttctgtcactccattcctccgtatcaagagatgcattcgtcacgtctgtgaaggcactgccagcggcacagcgtccacagtggctaggccaaatccatcactggatccacgagcctcatctttcacccaaagctcttctcggaactggatcgcagctcatctcatgggattacgccttcttgggcccggaggatcttccggctgccatcgagtctctgattgctctcaaatggtcaatcactgccaaatctccagaaggcatgccgtcgatccgcgcaaagaccgacgagcttctcgctaaatcgcagccgacactgcccactggctggacggcggaaaattacgatggtctcgcggcatcgtctccgccggccggcgttgcattctccatagactcaacttcgcggcgtctgggggccgaggcgtcatccaaggaagtgacggtgaaagactttacaatcgactgggctccttatcaccccggtccggtagccatgctcaatttgttgtcattccatcctggacagcggtccgtgtacttcgaaggctatggaggcggcttcgctcaaattcttgaaccgctctttggtggtagtccgctcttattcgggaatggagttacggaatggtcatctcgatcagacgatggtgaccaggaaggtgattgggaagactttgctctcatatggtatccaagtctctggcatttctcagcgatgataaactcctcagaatacgcggaacttgaccggcagttcaagccgtctattcgggataacccgttgttgtgctgtaccgagatcaatcttgaagcatag

SEQ ID NO: 36334 - protein, 279 aa, Muscodor strobelii
  misc_feature: SGI Peptide ID NO. 572594
  misc_feature (1)..(278): NCBI GI: 169624064 Blast Desc: SNOG_15282 [Phaeosphaeria nodorum SN15] gi|111056095|gb|EAT77215.1| SNOG_15282 [Phaeosphaeria nodorum SN15]
  misc_feature (1)..(277): NCBI GI: 154319698 Blast Desc: BC1G_02330 [Botryotinia fuckeliana B05.10] gi|150855988|gb|EDN31180.1| BC1G_02330 [Botryotinia fuckeliana B05.10]
  misc_feature (1)..(278): NCBI GI: 189190378 Blast Desc: conserved [Pyrenophora tritici-repentis Pt-1C-BFP] gi|187973134|gb|EDU40633.1| conserved [Pyrenophora tritici-repentis Pt-1C-BFP]
  misc_feature (1)..(277): NCBI GI: 156046240 Blast Desc: SS1G_09379 [Sclerotinia sclerotiorum 1980] gi|154693774|gb|EDN93512.1| SS1G_09379 [Sclerotinia sclerotiorum 1980]
  misc_feature (19)..(278): NCBI GI: 226278729 Blast Desc: conserved [Paracoccidioides brasiliensis Pb01]
  misc_feature (13)..(278): NCBI GI: 225677657 Blast Desc: conserved [Paracoccidioides brasiliensis Pb03]
  misc_feature (159)..(278): NCBI GI: 239612730 Blast Desc: conserved [Ajellomyces dermatitidis ER-3]
  misc_feature (159)..(278): NCBI GI: 261191378 Blast Desc: conserved [Ajellomyces dermatitidis SLH14081] gi|239589863|gb|EEQ72506.1| conserved [Ajellomyces dermatitidis SLH14081]
  misc_feature (1)..(279): NCBI GI: 119481959 Blast Desc: NFIA_090690 [Neosartorya fischeri NRRL 181] gi|119409162|gb|EAW19111.1| conserved [Neosartorya fischeri NRRL 181]
  misc_feature (159)..(278): NCBI GI: 258563262 Blast Desc: conserved [Uncinocarpus reesii 1704] gi|237907883|gb|EEP82284.1| conserved [Uncinocarpus reesii 1704]
  misc_feature: Useful for introducing or modulating the production of volatile compounds
MSSVTAHLLSLHSSVSRDAFVTSVKALPAAQRPQWLGQIHHWIHEPHLSPKALLGTGSQLISWDYAFLGPEDLPAAIESLIALKWSITAKSPEGMPSIRAKTDELLAKSQPTLPTGWTAENYDGLAASSPPAGVAFSIDSTSRRLGAEASSKEVTVKDFTIDWAPYHPGPVAMLNLLSFHPGQRSVYFEGYGGGFAQILEPLFGGSPLLFGNGVTEWSSRSDDGDQEGDWEDFALIWYPSLWHFSAMINSSEYAELDRQFKPSIRDNPLLCCTEINLEA

SEQ ID NO: 36335 - DNA, 3207 bp, Muscodor strobelii
  misc_feature: SGI EST ID NO. CUFF.86532.0
  misc_feature: Variant of the nucleotide sequence at SEQ ID NO 36333
ctcgcgattaatagcttcattcggattatttgataaagtcggcttatgcgacacgatggtgccgcctgtcctaaggatatgttatggtatgatccttcatgtgacgttgttctatctttattcttgcgccttcatctacatacctcgtctatctgtttcatagagttctttttgttgaagttgagttaattggcatgaggttaagtccgtgattttcacttgcctgactgcttaactccggctctaatcccttcagctcatgttgagcaatgccttcgtattgaacacgcgtggctatccttgaataagtcttgtctgaaacgtagaagcctcgccaatcacaatgtttaaagtccgagctgaggcgttgttatactaggtgcaactgtcacggagtccacggggctgataagatccagttaaacgtggagtagctgccgtcccccacggaattccacggcctcatgacggtgtctcattcgcgaatcgctacgagaatcattataaggatcatgataagtcccatcagattgactcaccggggagtcaatcccagaaaattgcattgatcgattcttagcatctcagatcacttgagctctggtatatgatgaaccaaaatgtataaaatcgagtgctcgagctcgaaagcttgagagatggaacaacatgaaaaaaaaattctaactagcttactgtcactatttataaactaccaaggcatcatgtcttccgttacggctcaccttctgtcactccattcctccgtatcaagagatgcattcgtcacgtctgtgaaggcactgccagcggcacagcgtccacagtggctaggccaaatccatcactggatccacgagcctcatctttcacccaaagctcttctcggaactggatcgcagctcatctcatgggattacgccttcttgggcccggaggatcttccggctgccatcgagtctctgattgctctcaaatggtcaatcactgccaaatctccagaaggcatgccgtcgatccgcgcaaagaccgacgagcttctcgctaaatcgcagccgacactgcccactggctggacggcggaaaattacgatggtctcgcggcatcgtctccgccggccggcgttgcattctccatagactcaacttcgcggcgtctgggggccgaggcgtcatccaaggaagtgacggtgaaagactttacaatcgactgggctccttatcaccccggtccggtagccatgctcaatttgttgtcattccatcctggacagcggtccgtgtacttcgaaggctatggaggcggcttcgctcaaattcttgaaccgctctttggtggtagtccgctcttattcgggaatggagttacggaatggtcatctcgatcagacgatggtgaccaggaaggtgattgggaagactttgctctcatatggtatccaagtctctggcatttctcagcgatgataaactcctcagaatacgcggaacttgaccggcagttcaagccgtctattcgggataacccgttgttgtgctgtaccgagatcaatcttgaagcatagaagaggcgaagcagtcggcaggatgcgatgtcgtcgggtatagttgcattgggccatgcagccgcccttgcatttgatcatgtaccagtgattgaaatccgggaggcctcgaaaagacggaacaaggcggaatttctagaaatttgacgaatgagatcgtggggcctgtatagcctcaatctggtgatctgttcttttcattccgcactatgacacgtcaagttacaagatttggcgacattccgcaagatgacatgataaatggtaaataaaagactataggagtcagcgagaggatacgcgtattgttaccacgatatagtcacagctttagaacctcagggtctagattctgggatgttcataattcgacagcatgcataagtctcgtgagactagcttagtctgaggcgttcagcagttcagggcacccgtcagcttcaatattttctgaaaataaataaagccgttaatactctactgactagtgagcactaatgttgctgcagggttatagacataaacacaattgattaccggcgatcgacatgaatagcagcttacccaattcttaacaataatatcgtaatcaattaaacttgttcagcttgctacaagcgcggtcgtcgaagcacggtattttattaacgaacacacgagatcaagttattttagttcaattatatgtaagagtaaatcttaccgtctctagtagccatatcgacttgggtagctattcaagacgcttcgcggctttatgtaaaggtagtgacgcttggtatgatgtttcggcctttttggtctcgataattcggcaatagagttagaggttcatggatgtcccactggcgagacatgcttgactgaagccggtgcatacttagtgcagtttattcatttatgccctagtttaaagctagttctctgtatgattgtggggaagacatggctttaacacaactagaaatcgcctgaataggaaaatcagattccatacccctgaatgcgatcgatctttgaatcgtcaatacagtcaagactgtaccgtaaaaccatgctcgttgctttgaggtcacattgtcgtcttcgctgttcggaaacaaactatcatcgtcaacccactttgatctacgaactgcaccatgaatactcagccaccaccatgcgcatactgcgtgccaaaaatccgagatatcgcgacgatacgagatgaagatgtcgtaatgccatggagccaggctaccggtgtcttacacatctcgcctacgtactcgcttgcccagaccgtcgccaagaagtccctatctgtccgctctgcgtgcggaagaccaagatgacgtgccagagtgccatggagccgatctggccacgaaacaggaagcactttcacacaaatctatggcgcgctcattggagtattgtagcagtagcatgacttgcgcagagatcggcagaggacgacatcaaccacgtggcgcagtgtatttgcacatacacaatgattgaaacaagaaggatgtacggatttgtagcaacgttgctgatggaggataacctcaatgctgaggttggaccagcacgacgagtgaaatcccgacaaagtcccaattctatatccaataaagatccatgcagtgccccg

SEQ ID NO: 36336 - DNA, 3342 bp, Muscodor strobelii
  misc_feature: SGI cDNA ID NO. 572595
  misc_feature: Reduced expression when VOC is produced
  misc_feature: Encodes the peptide sequence at SEQ ID NO 36337
atgccccatcccgtctcaccacccacggtggtcatcaaatccgccgacgcaccgccccaggaagacatctccgccattctaaacaccgtcttcactgcttcgtcttccgccgcctccatcgatgcctcctatgcgctatgtgaggcgcttctcagcactgtcggctttcgcggcctgtacggctacggtgtaatcgccgaggtcaagaaggccgctgctgacaagaagagcggtctgcgacgcgagagtgctcagaatctcctcggcgccatattcgaaaagttcccttcccgccaacctctcagtgaggtcgttctcttactccaggatggcggcatggtcgcctgcgcacttgatgccttggctgataaaggcaccgttgttcgcgacgccgctcagtatggcttggatgctcttttcggccgcttgagtgctgaggcgatggtcgtcggtctgctccctgctcttgtcgcgtatctctccaagagaaccggcaagtggcagggaactgtcggggccctcaagatgatgcagaagatggccgacaaggccaagatggagatcggctgcaccaaagaacaagcccaggaaaaggatctcctgagagaatctatgggcgcaaagctcgccagcctgattcctatcggcgagaacaacatgcacgacttgaaggccgaggtcgagaaacagggtgttgtcactatgcaatctctcactacgttgttgacaaacgacgacgtagctccccggattccgctcctgatcgagactctccaccatccgtcaacccagactctgcaaaaagccatccacgccctctcccagaccaccttcgtcgctatcgtcacctctcccgtactcgcattgctcacccccttcctcgagcgcacattgaacaaccctagtacctcgcaagaagtgctacgtcagtccgtcgttattaccgagaacttgacaaagttggtccatgaccccatagaggcgagaaccttcctccccaagctgcaaccgggtatcaaagctgtcaaggaccgagctcctctccctgaagttcgagagttggccacgagagccctggatgtcatggataaggctatgggtaacgacgcagctgtagtggagcgtaccactgtcaccgatgttgagaagattcttgactctgaaatcaagaagaatggtggccttgccggcgatctagatttttataagctggcccggccatacattgccgagatggtggctgaagatgccaatcatcgccacgtcgccagaattcctgcccgtatcgccccttatctaaaggagctgatgcggcagccggacaccagcgatgctgttgcgtccgctgtccatcaattttacgttgcagaagatgagcgcaaatatggtgtccctgaaaaggaggatgacggcgagattgagatcgttaacgccgacttctcactcgcttacggtggtatgcttctcctgtctcacacgaaccttcgactactcaagggacacagatatggtctctgcggccgaaatggagctggcaagtcaacgctcatgaagagtatcgctggaggcaaactcgagggatttcctccacaagatgtgctccgcacctgttacgtcgaacataatcagggcgaagacgccgatatcagcatcctggagttcatggtcaaagacccgacaatcgcttccgagggacgtgagagaatctcggaggtcttggcagagttcggcttcacggcaggtcccgaaggtcgtcaatctcagaaggtcgggtccctgtctggaggttggaagatgaagctggccttggcacgagccatgttgcagagagcagatgttctactattggacgaacctaccaatcacttggacgtcgccaatattgcatggcttgagaactatctcaagacgcacactgacatcacaagtctgatcgtttcccacgactctggattcttagacaatgtcacgacagacatctaccactacgagcctggtaagaagctcggccatttcaagggcaatcttgatgccttcgtcaaagttcgacccgaggccaaggcctattataccctcacagcttccaatgtccagttcaagttccctcctccaggcatattatcaggcgtcaagtccaacacccgcgccatcattaggatgacaaatgtctcctaccagtacccaaacgcacccaagccttcgcttagtgacgcaagctgccaactgaccctgtcttcccgcgttgctgtcatcggccccaatggtgctggcaagtccaccctgatcaagatattgacgggtgaagtcatccccacagctggccgggtcgagaagcatcccaatctacgtatcggctacatcaagcaacacgccttagaacacgttgaaatgcatttggagaagacacccaatcaataccttcaatggcgatatgctaatggtgatgaccgagaggtgttcttgaagcagactcgcattctttcggacaaagaccgggaacagatggaaaagaagattgatctcggcgacggtaaaggtgagagacaactggaagcccttgtgggtcggcaaaagtggaagaagacattccaatatgaagtaaaatggcgagcctggcttcccaagtacaactcacaagtttcacgcgagactttgattcagtggggtttcgacaagctggtacaggagttcgacgatcacgaggcctcccgagagggtctcgggtaccgagagctccaacctaccgttatctcaaagcacttcgaagatctcggcctcgatccagagatcgctaatcacaacgagattggcagtttgtctggcggtcaaaaggtcaaggttgtcattgctggcgcgatgtggaacaacccgcatttgcttgtactcgacgagcctactaacttcttggaccgcgactccctcggcggtcttgccgttgccattcgggacttcaagggtggtgtcgtcatgatttctcacaacgaggagttcgtgggcgctctctccagcgagcagtggcacatcaatgatggccgcatgactctaaagggccatgttgctagcttagcagatcgctttgaggacagcaaacccggtagtggagtcactagtgccattgccagcactgctgctagtagcgtcgccaacagtgctgtaaacagcgcagtgaacagtggcgccgaggacaatacaccgctcaagttcagagctaagaaaaagaagaagaagactaagaaggagctgaaggagcaggaagtccgacgaagactgcgacacatcgagtggcttagcagtcccaagggcacgccgcaccctaaggatacggatgacgaggacgagtaa

SEQ ID NO: 36337 - protein, 1113 aa, Muscodor strobelii
  misc_feature: SGI Peptide ID NO. 572595
  misc_feature (745)..(1011): Pfam Id: PF00005 Pfam Desc: ABC transporter
  misc_feature (500)..(666): Pfam Id: PF00005 Pfam Desc: ABC transporter
  misc_feature (562)..(666): Pfam Id: PF00005 Pfam Desc: ABC transporter
  misc_feature (5)..(1113): NCBI GI: 39970211 Blast Desc: MGG_02572 [Magnaporthe grisea 70-15] gi|145017647|gb|EDK02010.1| MGG_02572 [Magnaporthe grisea 70-15]
  misc_feature (1)..(1113): NCBI GI: 116194051 Blast Desc: CHGG_06743 [Chaetomium globosum CBS 148.51] gi|88182656|gb|EAQ90124.1| CHGG_06743 [Chaetomium globosum CBS 148.51]
  misc_feature (5)..(1113): NCBI GI: 149209605 Blast Desc: MGCH7_ch7g285 [Magnaporthe grisea 70-15] gi|86196240|gb|EAQ70878.1| MGCH7_ch7g285 [Magnaporthe grisea 70-15]
  misc_feature (26)..(1111): NCBI GI: 170940370 Blast Desc: protein product [Podospora anserina]
  misc_feature (1)..(1112): NCBI GI: 46128309 Blast Desc: FG08532.1 [Gibberella zeae PH-1]
  misc_feature (14)..(1112): NCBI GI: 256734120 Blast Desc: [Nectria haematococca mpVI 77-13-4]
  misc_feature (9)..(1113): NCBI GI: 85089589 Blast Desc: NCU09903 [Neurospora crassa OR74A] gi|28919325|gb|EAA28782.1| NCU09903 [Neurospora crassa OR74A]
  misc_feature (8)..(1111): NCBI GI: 156055112 Blast Desc: elongation factor 3 [Sclerotinia sclerotiorum 1980] gi|154702692|gb|EDO02431.1| elongation factor 3 [Sclerotinia sclerotiorum 1980]
  misc_feature (8)..(1111): NCBI GI: 154290485 Blast Desc: BC1G_15506 [Botryotinia fuckeliana B05.10] gi|150847714|gb|EDN22907.1| BC1G_15506 [Botryotinia fuckeliana B05.10]
  misc_feature (1)..(1112): NCBI GI: 242780705 Blast Desc: mRNA-nucleus export ATPase (Elf1), [Talaromyces stipitatus ATCC 10500] gi|218719799|gb|EED19218.1| mRNA-nucleus export ATPase (Elf1), [Talaromyces stipitatus ATCC 10500]
  misc_feature: Useful for introducing or modulating the production of volatile compounds
MPHPVSPPTVVIKSADAPPQEDISAILNTVFTASSSAASIDASYALCEALLSTVGFRGLYGYGVIAEVKKAAADKKSGLRRESAQNLLGAIFEKFPSRQPLSEVVLLLQDGGMVACALDALADKGTVVRDAAQYGLDALFGRLSAEAMVVGLLPALVAYLSKRTGKWQGTVGALKMMQKMADKAKMEIGCTKEQAQEKDLLRESMGAKLASLIPIGENNMHDLKAEVEKQGVVTMQSLTTLLTNDDVAPRIPLLIETLHHPSTQTLQKAIHALSQTTFVAIVTSPVLALLTPFLERTLNNPSTSQEVLRQSVVITENLTKLVHDPIEARTFLPKLQPGIKAVKDRAPLPEVRELATRALDVMDKAMGNDAAVVERTTVTDVEKILDSEIKKNGGLAGDLDFYKLARPYIAEMVAEDANHRHVARIPARIAPYLKELMRQPDTSDAVASAVHQFYVAEDERKYGVPEKEDDGEIEIVNADFSLAYGGMLLLSHTNLRLLKGHRYGLCGRNGAGKSTLMKSIAGGKLEGFPPQDVLRTCYVEHNQGEDADISILEFMVKDPTIASEGRERISEVLAEFGFTAGPEGRQSQKVGSLSGGWKMKLALARAMLQRADVLLLDEPTNHLDVANIAWLENYLKTHTDITSLIVSHDSGFLDNVTTDIYHYEPGKKLGHFKGNLDAFVKVRPEAKAYYTLTASNVQFKFPPPGILSGVKSNTRAIIRMTNVSYQYPNAPKPSLSDASCQLTLSSRVAVIGPNGAGKSTLIKILTGEVIPTAGRVEKHPNLRIGYIKQHALEHVEMHLEKTPNQYLQWRYANGDDREVFLKQTRILSDKDREQMEKKIDLGDGKGERQLEALVGRQKWKKTFQYEVKWRAWLPKYNSQVSRETLIQWGFDKLVQEFDDHEASREGLGYRELQPTVISKHFEDLGLDPEIANHNEIGSLSGGQKVKVVIAGAMWNNPHLLVLDEPTNFLDRDSLGGLAVAIRDFKGGVVMISHNEEFVGALSSEQWHINDGRMTLKGHVASLADRFEDSKPGSGVTSAIASTAASSVANSAVNSAVNSGAEDNTPLKFRAKKKKKKTKKELKEQEVRRRLRHIEWLSSPKGTPHPKDTDDEDE

SEQ ID NO: 36338 - DNA, 3947 bp, Muscodor strobelii
  misc_feature: SGI EST ID NO. CUFF.86546.0
  misc_feature: Variant of the nucleotide sequence at SEQ ID NO 36336
cgccgtctgacagcgtaatcagagcctagggactggcccattgtcgacctaaaaggcctctcttcccttcacttttatccttcctcattttttttacacagagttgggatacttgggcgacggctgctgtgttttctccgaccagcgcctgaatattctgcgcttctgcgctctgtggtcatctcgtccggatttcccagacacccaagacccctcctttcgagtccctattataaggcgtactctgtttctgcgccttccgcgccttcttctcgacgctggcccaactcatcacgatgccccatcccgtctcaccacccacggtggtcatcaaatccgccgacgcaccgccccaggaagacatctccgccattctaaacaccgtcttcactgcttcgtcttccgccgcctccatcgatgcctcctatgcgctatgtgaggcgcttctcagcactgtcggctttcgcggcctgtacggctacggtgtaatcgccgaggtcaagaaggccgctgctgacaagaagagcggtctgcgacgcgagagtgctcagaatctcctcggcgccatattcgaaaagttcccttcccgccaacctctcagtgaggtcgttctcttactccaggatggcggcatggtcgcctgcgcacttgatgccttggctgataaaggcaccgttgttcgcgacgccgctcagtatggcttggatgctcttttcggccgcttgagtgctgaggcgatggtcgtcggtctgctccctgctcttgtcgcgtatctctccaagagaaccggcaagtggcagggaactgtcggggccctcaagatgatgcagaagatggccgacaaggccaagatggagatcggctgcaccaaagaacaagcccaggaaaaggatctcctgagagaatctatgggcgcaaagctcgccagcctgattcctatcggcgagaacaacatgcacgacttgaaggccgaggtcgagaaacagggtgttgtcactatgcaatctctcactacgttgttgacaaacgacgacgtagctccccggattccgctcctgatcgagactctccaccatccgtcaacccagactctgcaaaaagccatccacgccctctcccagaccaccttcgtcgctatcgtcacctctcccgtactcgcattgctcacccccttcctcgagcgcacattgaacaaccctagtacctcgcaagaagtgctacgtcagtccgtcgttattaccgagaacttgacaaagttggtccatgaccccatagaggcgagaaccttcctccccaagctgcaaccgggtatcaaagctgtcaaggaccgagctcctctccctgaagttcgagagttggccacgagagccctggatgtcatggataaggctatgggtaacgacgcagctgtagtggagcgtaccactgtcaccgatgttgagaagattcttgactctgaaatcaagaagaatggtggccttgccggcgatctagatttttataagctggcccggccatacattgccgagatggtggctgaagatgccaatcatcgccacgtcgccagaattcctgcccgtatcgccccttatctaaaggagctgatgcggcagccggacaccagcgatgctgttgcgtccgctgtccatcaattttacgttgcagaagatgagcgcaaatatggtgtccctgaaaaggaggatgacggcgagattgagatcgttaacgccgacttctcactcgcttacggtggtatgcttctcctgtctcacacgaaccttcgactactcaagggacacagatatggtctctgcggccgaaatggagctggcaagtcaacgctcatgaagagtatcgctggaggcaaactcgagggatttcctccacaagatgtgctccgcacctgttacgtcgaacataatcagggcgaagacgccgatatcagcatcctggagttcatggtcaaagacccgacaatcgcttccgagggacgtgagagaatctcggaggtcttggcagagttcggcttcacggcaggtcccgaaggtcgtcaatctcagaaggtcgggtccctgtctggaggttggaagatgaagctggccttggcacgagccatgttgcagagagcagatgttctactattggacgaacctaccaatcacttggacgtcgccaatattgcatggcttgagaactatctcaagacgcacactgacatcacaagtctgatcgtttcccacgactctggattcttagacaatgtcacgacagacatctaccactacgagcctggtaagaagctcggccatttcaagggcaatcttgatgccttcgtcaaagttcgacccgaggccaaggcctattataccctcacagcttccaatgtccagttcaagttccctcctccaggcatattatcaggcgtcaagtccaacacccgcgccatcattaggatgacaaatgtctcctaccagtacccaaacgcacccaagccttcgcttagtgacgcaagctgccaactgaccctgtcttcccgcgttgctgtcatcggccccaatggtgctggcaagtccaccctgatcaagatattgacgggtgaagtcatccccacagctggccgggtcgagaagcatcccaatctacgtatcggctacatcaagcaacacgccttagaacacgttgaaatgcatttggagaagacacccaatcaataccttcaatggcgatatgctaatggtgatgaccgagaggtgttcttgaagcagactcgcattctttcggacaaagaccgggaacagatggaaaagaagattgatctcggcgacggtaaaggtgagagacaactggaagcccttgtgggtcggcaaaagtggaagaagacattccaatatgaagtaaaatggcgagcctggcttcccaagtacaactcacaagtttcacgcgagactttgattcagtggggtttcgacaagctggtacaggagttcgacgatcacgaggcctcccgagagggtctcgggtaccgagagctccaacctaccgttatctcaaagcacttcgaagatctcggcctcgatccagagatcgctaatcacaacgagattggcagtttgtctggcggtcaaaaggtcaaggttgtcattgctggcgcgatgtggaacaacccgcatttgcttgtactcgacgagcctactaacttcttggaccgcgactccctcggcggtcttgccgttgccattcgggacttcaagggtggtgtcgtcatgatttctcacaacgaggagttcgtgggcgctctctccagcgagcagtggcacatcaatgatggccgcatgactctaaagggccatgttgctagcttagcagatcgctttgaggacagcaaacccggtagtggagtcactagtgccattgccagcactgctgctagtagcgtcgccaacagtgctgtaaacagcgcagtgaacagtggcgccgaggacaatacaccgctcaagttcagagctaagaaaaagaagaagaagactaagaaggagctgaaggagcaggaagtccgacgaagactgcgacacatcgagtggcttagcagtcccaagggcacgccgcaccctaaggatacggatgacgaggacgagtaaatgaatagttgatgatcactcacttggattttctgttttcgggtagaagaagcattcaaaaaggtttttgcttgggatgagcattatagatgcatagagagtctttgcttttcaaggcgttctcatagactgggatggagcgatggtcatgggtctgaactggactgatatcgttatcacttctgcaataatgattttgatttattttactacttaggtagatgcaatgcgccgcatggcttaaagatgttgttttaaattaatatgagactcttgaatgaatgactgtacgaggtctgcacgtgttag

SEQ ID NO: 36339 - DNA, 411 bp, Muscodor strobelii
  misc_feature: SGI cDNA ID NO. 572596
  misc_feature: Reduced expression when VOC is produced
  misc_feature: Encodes the peptide sequence at SEQ ID NO 36340
atgcagctctcttacctcatcgctatcaccaccaccctcgccctaggcgccaacgccgccgtaataggtcgtgccacggctcctgtacgtttcgctcaattccgcatcttcggcgccgacggatgccatgacctaaatgagggtttcttcaccgtcgacgacgttgatgccaatatttgccatgacagcttggctaaccagcccaacggcgtcaaatccgtgaatctggaggttctcaccgctgccgctgcaggatgctccttatcgatatacacagacacaggatgtcagcaaagcgcaacaaccctcgctgtggacacctgccagaacgccacagctgcagaagatggacttcacgattggcagtcatggatgcttgcctgccctactccatattctacttcaaattag

SEQ ID NO: 36340 - protein, 136 aa, Muscodor strobelii
  misc_feature: SGI Peptide ID NO. 572596
  misc_feature (31)..(128): NCBI GI: 256724028 Blast Desc: NECHADRAFT_106450 [Nectria haematococca mpVI 77-13-4]
  misc_feature (1)..(129): NCBI GI: 238493223 Blast Desc: conserved [Aspergillus flavus NRRL3357] gi|220696342|gb|EED52684.1| conserved [Aspergillus flavus NRRL3357]
  misc_feature (1)..(129): NCBI GI: 169783436 Blast Desc: [Aspergillus oryzae RIB40] gi|83774924|dbj|BAE65047.1| protein product [Aspergillus oryzae]
  misc_feature (3)..(128): NCBI GI: 145242912 Blast Desc: An11g00040 [Aspergillus niger] gi|134078675|emb|CAK48237.1| protein product [Aspergillus niger]
  misc_feature: Useful for introducing or modulating the production of volatile compounds
MQLSYLIAITTTLALGANAAVIGRATAPVRFAQFRIFGADGCHDLNEGFFTVDDVDANICHDSLANQPNGVKSVNLEVLTAAAAGCSLSIYTDTGCQQSATTLAVDTCQNATAAEDGLHDWQSWMLACPTPYSTSN

SEQ ID NO: 36341 - DNA, 1033 bp, Muscodor strobelii
  misc_feature: SGI EST ID NO. CUFF.86544.0
  misc_feature: Variant of the nucleotide sequence at SEQ ID NO 36339
gcccctcattagttcgtattgcaacagttgtttgtcatgagtatccttgtaagacatcaagaaaggctatctgagagatgaagaacagtatataagacctcaattgccgcgctctgaattagagttttggcacatccacagtgatatcacatctcattcagctccatctcaataaccactgcaacttgctcgcgactcgtataaaacctcactgattttcagcatatcacactttctcccatatttctcctcaaacactcataagatgcagctctcttacctcatcgctatcaccaccaccctcgccctaggcgccaacgccgccgtaataggtcgtgccacggctcctgtacgtttcgctcaattccgcatcttcggcgccgacggatgccatgacctaaatgagggtttcttcaccgtcgacgacgttgatgccaatatttgccatgacagcttggctaaccagcccaacggcgtcaaatccgtgaatctggaggttctcaccgctgccgctgcaggatgctccttatcgatatacacagacacaggatgtcagcaaagcgcaacaaccctcgctgtggacacctgccagaacgccacagctgcagaagatggacttcacgattggcagtcatggatgcttgcctgccctactccatattctacttcaaattagaatatgtaaactcgtacagggcgctatatggaagcttcgatgacaagagaggaagatgacgggaaattgaaagattcgtgagcattgggaacggcgtttgaatggacatgtaacacattggatggactaagtattttgcctcagggtcctttgactataaagtatgagtgttcgataaaacaaatcgtgtgtctaagtcatagcgtattattcattaactcgaaacacgtccgaactacatgcgcatctagccctcttctcttttatgtacagtctgtgttaatacgactcacgcagtaagtgtgacacagttgaaaacatagagctctggttttacagcgatgctctagatgactt

SEQ ID NO: 36342 - DNA, 693 bp, Muscodor strobelii
  misc_feature: SGI cDNA ID NO. 572597
  misc_feature: Encodes the peptide sequence at SEQ ID NO 36343
atgatggacctatctgctcctcgagagcttagcagagaagtcaaccgaatggacagaaaagccgtacccgctacgcatagcacaccgccgatgaaaacagaaggcgttggacatgagcaggtacaaacagtgctctgggattcagtcaaccacccgctgcctctcaagcaagagcttcccgacgacgaggacgcccaacacagcgacgaagaggatgctacacaacgacaagatgacaccaacgagctctttacacccatagcactgctacaagacctcgaacagaagttgcatgcttcccagcgtgtcataaacgatctcggggtgaatatcgttcgttccgacggtaaaaacatcgagtactcctgtgcaacgacaaagaacctgcaacaggaaatacaaaacctctgctgcacgatcgctgctatggaacgttattgcaaaagccacgaacagaaccgcgcgattctcactcaacaaattcaagatctccagtctcagaacacatacctcgggaatcttcagaattctttgatactcgagagaaaccaaatcatccgcaaagtggcacgtatgcaacaggagtatgctaagtcacagaagatggctgaagcgaattatcaccagaatattggcctcgggaacgccctcgcggagctagcacgagattacggacagtggttttgtagatga

SEQ ID NO: 36343 - protein, 230 aa, Muscodor strobelii
  misc_feature: SGI Peptide ID NO. 572597
MMDLSAPRELSREVNRMDRKAVPATHSTPPMKTEGVGHEQVQTVLWDSVNHPLPLKQELPDDEDAQHSDEEDATQRQDDTNELFTPIALLQDLEQKLHASQRVINDLGVNIVRSDGKNIEYSCATTKNLQQEIQNLCCTIAAMERYCKSHEQNRAILTQQIQDLQSQNTYLGNLQNSLILERNQIIRKVARMQQEYAKSQKMAEANYHQNIGLGNALAELARDYGQWFCR

SEQ ID NO: 36344 - DNA, 737 bp, Muscodor strobelii
  misc_feature: SGI EST ID NO. CUFF.86559.0
  misc_feature: Variant of the nucleotide sequence at SEQ ID NO 36342
ccgatgaaaacagaaggcgttggacatgagcaggtacaaacagtgctctgggattcagtcaaccacccgctgcctctcaagcaagagcttcccgacgacgaggacgcccaacacagcgacgaagaggatgctacacaacgacaagatgacaccaacgagctctttacacccatagcactgctacaagacctcgaacagaagttgcatgcttcccagcgtgtcataaacgatctcggggtgaatatcgttcgttccgacggtaaaaacatcgagtactcctgtgcaacgacaaagaacctgcaacaggaaatacaaaacctctgctgcacgatcgctgctatggaacgttattgcaaaagccacgaacagaaccgcgcgattctcactcaacaaattcaagatctccagtctcagaacacatacctcgggaatcttcagaattctttgatactcgagagaaaccaaatcatccgcaaagtggcacgtatgcaacaggagtatgctaagtcacagaagatggctgaagcgaattatcaccagaatattggcctcgggaacgccctcgcggagctagcacgagattacggacagtggttttgtagatgaaaggaattgcacggtacacgatgatcctatctgactaacgagtaagacctagtataggcagagtggcaggatatcctttagtagctatctttacataaaaaccctatatacatctataagaggctttagag

SEQ ID NO: 36345 - DNA, 1065 bp, Muscodor strobelii
  misc_feature: SGI cDNA ID NO. 572598
  misc_feature: Encodes the peptide sequence at SEQ ID NO 36346
atggtccggcttgatatcctcgcactcacggctgctgctacggcaatgccgcaaggtggttttggcggcgctggaggtactgctatgctgcgctttggttgtagtcaagtcgtcatcgagcgcctcgaccctctcgtgaatcctggagttaacccatcgccacatgtccatcaagtcgtaggcgggaatgtgttcaatgcttccatgccatcagaagatatttcgaagttggctagctgcacaacttgtagctttaaccaagacttctcaaattactggacggcgaacctgtacttcaaggcgcgcaacggcacctataagcgagtgccacagattcccaaccaacaagtgacgggcaacaatggcggcataactgtctactacacatctccaggagcgaagcaaaccactgctttcaagcctggtttccgtatgctcgcgggagattcactccgtcgcaactcgacaggccttggtaagaacatgcagagctgctttcgctgctacactggaccaaatttccaggggaatgtttactcgccatgcttcgactcgaagctcgacacggagcacttcccttcgacaccatgcctcggtggcattcgctccaacatcatcttcccgctttgctgggacggaaagaaccttgacagcccaaatcacatggaccacgttgcgcatccgacgggcggcccgacatcatttgctgtcgttaatggccaatgtccatctacgcaccctgtcaagatcccgcaggtccatttagagatcatgtgggatactacgggcttcaataataaagctgaatggcctgaggatggtagtcagccttttgtgctctccaccggcgaccctaccggatacggacagcatgccgattacgtatttggatggaaagatgacgtcctgcagcaagcaatggacaacagctgtttcggtgccacatgcaagtcgctcacaacacaggccgacgccgctgtgaataagtgcagtgtcaagaataccgtggatgagactacggaaggatggctgaatgaactaccaggtggtggaatgggtgcctaa

SEQ ID NO: 36346 - protein, 354 aa, Muscodor strobelii
  misc_feature: SGI Peptide ID NO. 572598
  misc_feature (43)..(298): Pfam Id: PF09362 Pfam Desc: Domain of function (DUF1996)
  misc_feature (27)..(350): NCBI GI: 116201237 Blast Desc: CHGG_08503 [Chaetomium globosum CBS 148.51] gi|88177021|gb|EAQ84489.1| CHGG_08503 [Chaetomium globosum CBS 148.51]
  misc_feature (1)..(349): NCBI GI: 85090100 Blast Desc: NCU07763 [Neurospora crassa OR74A] gi|28919599|gb|EAA29021.1| conserved [Neurospora crassa OR74A]
  misc_feature (29)..(346): NCBI GI: 171685462 Blast Desc: protein product [Podospora anserina] gi|170942692|emb|CAP68345.1| protein product [Podospora anserina]
  misc_feature (6)..(352): NCBI GI: 164427037 Blast Desc: NCU02341 [Neurospora crassa OR74A] gi|157071579|gb|EAA30531.2| conserved [Neurospora crassa OR74A]
  misc_feature (22)..(349): NCBI GI: 189205016 Blast Desc: conserved [Pyrenophora tritici-repentis Pt-1C-BFP] gi|187985942|gb|EDU51430.1| conserved [Pyrenophora tritici-repentis Pt-1C-BFP]
  misc_feature (6)..(352): NCBI GI: 40804600 Blast Desc: conserved [Neurospora crassa]
  misc_feature (7)..(354): NCBI GI: 171680460 Blast Desc: protein product [Podospora anserina] gi|170939857|emb|CAP65082.1| protein product [Podospora anserina]
  misc_feature (1)..(352): NCBI GI: 145609071 Blast Desc: MGG_09109 [Magnaporthe grisea 70-15] gi|145016512|gb|EDK00942.1| MGG_09109 [Magnaporthe grisea 70-15]
  misc_feature (1)..(349): NCBI GI: 39951429 Blast Desc: MGG_01357 [Magnaporthe grisea 70-15] gi|145020819|gb|EDK04948.1| MGG_01357 [Magnaporthe grisea 70-15]
  misc_feature (26)..(352): NCBI GI: 116205357 Blast Desc: CHGG_10562 [Chaetomium globosum CBS 148.51] gi|88176690|gb|EAQ84158.1| CHGG_10562 [Chaetomium globosum CBS 148.51]
MVRLDILALTAAATAMPQGGFGGAGGTAMLRFGCSQVVIERLDPLVNPGVNPSPHVHQVVGGNVFNASMPSEDISKLASCTTCSFNQDFSNYWTANLYFKARNGTYKRVPQIPNQQVTGNNGGITVYYTSPGAKQTTAFKPGFRMLAGDSLRRNSTGLGKNMQSCFRCYTGPNFQGNVYSPCFDSKLDTEHFPSTPCLGGIRSNIIFPLCWDGKNLDSPNHMDHVAHPTGGPTSFAVVNGQCPSTHPVKIPQVHLEIMWDTTGFNNKAEWPEDGSQPFVLSTGDPTGYGQHADYVFGWKDDVLQQAMDNSCFGATCKSLTTQADAAVNKCSVKNTVDETTEGWLNELPGGGMGA

SEQ ID NO: 36347 - DNA, 239 bp, Muscodor strobelii
  misc_feature: SGI EST ID NO. CUFF.86569.0
  misc_feature: Variant of the nucleotide sequence at SEQ ID NO 36345
tcctgcagcaagcaatggacaacagctgtttcggtgccacatgcaagtcgctcacaacacaggccgacgccgctgtgaataagtgcagtgtcaagaataccgtggatgagactacggaaggatggctgaatgaactaccaggtggtggaatgggtgcctaattagagttggataagtctgtaaaagggatactggctataacgcagagccgtatgtcgtcttttttgacacttcgggat

SEQ ID NO: 36348 - DNA, 624 bp, Muscodor strobelii
  misc_feature: SGI cDNA ID NO. 572599
  misc_feature: Encodes the peptide sequence at SEQ ID NO 36349
atgattaattacttcaagttgaatgacattgacaacgcgcgacgagtaatagaggaaagccgtgcaatacgcgaacgacttatggacccccaagaggaagaaatggctgccacatacgccaatttcgggtctgtcgtattcgcggaaggagacctggacaccgccttgacttactatcggcgagcgcagaagatacgcattgatcgcagtggcgcggaggcgatgcagggcttagaccatatgtgcataggccgtgttctctacgcaaaaggtgattacgaaggagctgttcgcgagtacgagcagtgtgagcagatatattccaaatttggccctgatcactacttgcaagtaagtgatgcattcaacaaggggattgcgattgcgaaaactcatggcgatgatggcctcggcgagatcgcccgcatattgcggaagaaagctcttatgctagaacaatgccaaaacaaagcagaatttctacgggcagagcatataagggaccctgagcatctgaggggagaggcggaggcaattctgcgaaagctccgacataataaggagttggatgacgaggatgaggacaggctctttgataatctggtcaatcctttcaatagatga

SEQ ID NO: 36349 - protein, 207 aa, Muscodor strobelii
  misc_feature: SGI Peptide ID NO. 572599
  misc_feature (5)..(116): NCBI GI: 116205455 Blast Desc: CHGG_10611 [Chaetomium globosum CBS 148.51] gi|88176739|gb|EAQ84207.1| CHGG_10611 [Chaetomium globosum CBS 148.51]
  misc_feature (13)..(127): NCBI GI: 149922550 Blast Desc: serine/threonine kinase family protein [Plesiocystis pacifica SIR-1] gi|149816577|gb|EDM76072.1| serine/threonine kinase family protein [Plesiocystis pacifica SIR-1]
  misc_feature (8)..(111): NCBI GI: 219850534 Blast Desc: Tetratricopeptide TPR_4 [Chloroflexus aggregans DSM 9485] gi|219544793|gb|ACL26531.1| Tetratricopeptide TPR_4 [Chloroflexus aggregans DSM 9485]
  misc_feature (8)..(111): NCBI GI: 219850534 Blast Desc: Tetratricopeptide TPR_4 [Chloroflexus aggregans DSM 9485] gi|219544793|gb|ACL26531.1| Tetratricopeptide TPR_4 [Chloroflexus aggregans DSM 9485]
  misc_feature (8)..(111): NCBI GI: 219850534 Blast Desc: Tetratricopeptide TPR_4 [Chloroflexus aggregans DSM 9485] gi|219544793|gb|ACL26531.1| Tetratricopeptide TPR_4 [Chloroflexus aggregans DSM 9485]
  misc_feature (8)..(111): NCBI GI: 219850534 Blast Desc: Tetratricopeptide TPR_4 [Chloroflexus aggregans DSM 9485] gi|219544793|gb|ACL26531.1| Tetratricopeptide TPR_4 [Chloroflexus aggregans DSM 9485]
  misc_feature (9)..(149): NCBI GI: 219847306 Blast Desc: Tetratricopeptide TPR_2 repeat protein [Chloroflexus aggregans DSM 9485] gi|219541565|gb|ACL23303.1| Tetratricopeptide TPR_2 repeat protein [Chloroflexus aggregans DSM 9485]
  misc_feature (8)..(111): NCBI GI: 219850534 Blast Desc: Tetratricopeptide TPR_4 [Chloroflexus aggregans DSM 9485] gi|219544793|gb|ACL26531.1| Tetratricopeptide TPR_4 [Chloroflexus aggregans DSM 9485]
  misc_feature (4)..(123): NCBI GI: 196011932 Blast Desc: TRIADDRAFT_59928 [Trichoplax adhaerens] gi|190581605|gb|EDV21681.1| TRIADDRAFT_59928 [Trichoplax adhaerens]
  misc_feature (9)..(151): NCBI GI: 219847306 Blast Desc: Tetratricopeptide TPR_2 repeat protein [Chloroflexus aggregans DSM 9485] gi|219541565|gb|ACL23303.1| Tetratricopeptide TPR_2 repeat protein [Chloroflexus aggregans DSM 9485]
MINYFKLNDIDNARRVIEESRAIRERLMDPQEEEMAATYANFGSVVFAEGDLDTALTYYRRAQKIRIDRSGAEAMQGLDHMCIGRVLYAKGDYEGAVREYEQCEQIYSKFGPDHYLQVSDAFNKGIAIAKTHGDDGLGEIARILRKKALMLEQCQNKAEFLRAEHIRDPEHLRGEAEAILRKLRHNKELDDEDEDRLFDNLVNPFNR

SEQ ID NO: 36350 - DNA, 1056 bp, Muscodor strobelii
  misc_feature: SGI EST ID NO. CUFF.86593.0
  misc_feature: Variant of the nucleotide sequence at SEQ ID NO 36348
cgaacgcgaagcgctagagatggtacaaatcgcggtggattcttcaagcgacaagcaaaatcttcttcacgctaacctactcaactcggccatgattaattacttcaagttgaatgacattgacaacgcgcgacgagtaatagaggaaagccgtgcaatacgcgaacgacttatggacccccaagaggaagaaatggctgccacatacgccaatttcgggtctgtcgtattcgcggaaggagacctggacaccgccttgacttactatcggcgagcgcagaagatacgcattgatcgcagtggcgcggaggcgatgcagggcttagaccatatgtgcataggccgtgttctctacgcaaaaggtgattacgaaggagctgttcgcgagtacgagcagtgtgagcagatatattccaaatttggccctgatcactacttgcaagtaaggtatgtacattgtgattttctttgtacagcatctggccaagtatacagaaggctccttaaatatgctcctattgatcgagcctcgcaggattaacttcacatggggctgcacggaacttacacatggaaatctcgatgctgcctatcgtcggctgtctcgcgtactcgaaatagcattaaaacaaacgccctgtgatatgaaagttgctgcaacttatttcaaattgggctgcattgcgatggagtcgagtaattgggatgaatcaattgatgcattcaacaaggggattgcgattgcgaaaactcatggcgatgatggcctcggcgagatcgcccgcatattgcggaagaaagctcttatgctagaacaatgccaaaacaaagcagaatttctacgggcagagcatataagggaccctgagcatctgaggggagaggcggaggcaattctgcgaaagctccgacataataaggagttggatgacgaggatgaggacaggctctttgataatctggtcaatcctttcaatagatgagataacgaggctctggttgcaccctggtgtttgtcctttttcctagtctacgtaatttaattcaaatagtgag

SEQ ID NO: 36351 - DNA, 285 bp, Muscodor strobelii
  misc_feature: SGI cDNA ID NO. 572600
  misc_feature: Encodes the peptide sequence at SEQ ID NO 36352
atggcgtctcatcaatcatcttccgtaagtggacgaccgcccatgccggcgccgcccacgagcgtagctcatctttcttcattcgcggaagtacctgcctttgaatttgaggagggcggcggtaatgtttcgccccatcacgagatggcttgtgattcccatcaagctcagccatggaaagagaagttcgtcatccgccctgctgacaagaaccaagaagtcatggtttgtgtcaatcctaaaggcatctatgttgccgattcgggtggtattggtgcttactga

SEQ ID NO: 36352 - protein, 94 aa, Muscodor strobelii
  misc_feature: SGI Peptide ID NO. 572600
MASHQSSSVSGRPPMPAPPTSVAHLSSFAEVPAFEFEEGGGNVSPHHEMACDSHQAQPWKEKFVIRPADKNQEVMVCVNPKGIYVADSGGIGAY

SEQ ID NO: 36353 - DNA, 3021 bp, Muscodor strobelii
  misc_feature: SGI EST ID NO. CUFF.86614.0
  misc_feature: Variant of the nucleotide sequence at SEQ ID NO 36351
gcattatatcaaatccatgatccgtgaagaggcatgggcattcgtaacctacgattcagcggctgggccgcaagcaagattctgtccgcatgctgcgtttctgcacacaagaccggatagcgaccatcctccacggtacagcgtagagacacggtctattgtcatcactagatagcataactatgaagatctctacagactgtcttcgaagccttttctttttgttttgtttcctttgaaaatcgtttcatcttgctaaaagaagagcgcattggcaggaaatctttgacgtcggcatttcactcttgttcactgctgaatatgtaatttgaaggacttttctcggagaaggggctcagcaataaattaatggaccatcatggaggaaaccatgtcggtgtgttcgccattgtcccatatccactactagcgtcagccagtatcatgcacgtcgctgtgacagtagataagggactcaatagctgtacatggtgggtagcgaatgcaatcgttcggttgcattctgacctcatgtgcgccacgggcggatggattcctgataaagtaagtatgcacccaatacgggcaagccggggttgcctcatttactcgtgaggaagacgacagcgtcatcggctcacatggacgtgagtcttataagtacttgcggttctcccttggagtgactgaactgatccttactttctcctctgatcatttacccctatcgcaagcctcttcttctgaactttctgtgacaaaaaattctctgacaacgtcgactatggcgtctcatcaatcatcttccgtaagtggacgaccgcccatgccggcgccgcccacgagcgtagctcatctttcttcattcgcggaagtacctgcctttgaatttgaggagggcggcggtaatgtttcgccccatcacgagatggcttgtgattcccatcaagctcagccatggaaagagaagttcgtcatccgccctgctgacaagaaccaagaagtcatggtttgtgtcaatcctaaaggcatctatgttgccgattcgggtggtattggtgcttactgaacgcacaaaaccttggtgggcggattgattgcgtgacggaataccaattggttctgaggttgctttgcaggcgatatcaggggttcagataagacttaacagatttgacatggtcgactggacttagtcagctcaatgaataaagctcatttatattgaagttcctgacctctgctgtggctctatcatgctgaccaaatacactcaacgtctgacgatggtttccggtatgcgtacagtagcagcaccttaaactgcttttcgtcatccaaaatacgcagccgggatgagagctgtacatccgattggttgatgatcatggcgctcgctctggtgcttggaccagagtccgtaatgtcttttctccatcatcagagttcttcctgtacgcgcaagggtctgagcgttggggcaagaggtctagaagatcatgccacacgcatcttaaaatcatgaagtgacgaactgccgattgcctcgactgggcaggaagtagcttgtcacgcggcccacatgaggctctaccttcagaccccgctttgttgagtaatcctcgcccagaagctcgccgtcccgtttgacgattcaatgcgctagcagactttcctatattgctttctacatatgtggtaatgcggcgcagccatcgttctcattggactgatctacataatagaagtcttaagtcgagaaccgtctcgcaagtcctgaaggaaccgaatgccagcacaacatgtccggtgttcatggcctgccacgtctttgcttagaggcctcaccattccagtcattccctcagaagcctcgcttaataacattctcatgcatgccctctagggcgcttgagacataggcagcaagccataatgtcaaatgtaatatatgaagcgacaagggagctgcagctagtcttgtacccccaatgtacttgatacattttggagtgagcagtagcaagtacatgtagtgcgatagaatcacacattgcaatgcccaacgtcggaatttcgactacccgccgcatcctgacctacaaaatggtcaaatgttgtatggatgatgactatgactctatcactctgctctggagctgagtatcacagtacatccacttcactcgagagaatattctagtgcggtattgagggcgatttctcgatggctactgcggaaacgaaagaggagcttgcagtgcgacttctgcatcaatcgactgagtcaagtttcgcatcagtttccgtagatcaaatatctttcagagcaacagaggagtgagttcttccagctcgctcttggtagtgatctattgattgatatgtcgttagtgagaaggatcgggcaagtagaaatgaagatgaagatgatacgtttcgcagcacttatgccaagcgatgggctagagcgctcgagcgttgcgagaaaatccttaataaaagggactacgagacagtagcaaaatatgactctcctgaaaagcttctcatgggcttagaagaattgcaacggcaacacgccgcaagtagtgcagccaaagacaccgccctttcacgactcatcgatcagattcgcccaactcaacgctcattctccgagcttttggctgtatttatcagtgccatgatgccgaacgtagtaacctcgacatttgcatttggtttactgtatctctgcgtcaaagtaagtctcgatcagacaaagatctgcattgaacctatgtgccggctatgtactgatcgtggtggtgaagctttgtggagaaggggcaacagcatctaaagatttcgaaggaatgatagcaaaaatcaggcggcgactagccctgatggcgcgctactcaaatagcatctcgtcggatgagaatgacgaaatttgtcttaccttcatcgacgtccttgaagacctaattgttctatggagccattttgcagcgtatatacgcaagcaccctccgc

SEQ ID NO: 36354 - DNA, 903 bp, Muscodor strobelii
  misc_feature: SGI cDNA ID NO. 572601
  misc_feature: Encodes the peptide sequence at SEQ ID NO 36355
atggcatgcgtacaaggtcaaattcgattccttgcccggctggacaagtatgcagatgagaagccctttttcgccttctctcagcctgacaaagacgaggatccacgggagctttcgaatctcgaatttgaagcggagacaatcgatattcaagacattcgtgggcacgagaacgacttcaaagtcgacgagtgtggatttcagatcatccaccgcccacctgcactcgtagaattcacaagcctagatcatgttatccagtatcaaaaagatgttcaggctatactcacagaactattcgatgccgagcatgttctagtctgggatttcagaaggcgcaagacacatcgtgacaagatggtatttgacataaatgacaaattggaaattgacactactgtcaaagactacacattcattagtggacctattgtcataaagaataggctcatagagaatggacttgagcgctacttacgcccaggttaccgctttcgcatggtcaagttcgaagtcgcttgtttcatgacttgggtggactcagatatctggaagctaacatggaccaatagtgtatggaggagccttttgccggtcgtggaagaccaacctctggctctttgcgactttcggtccattgagccatcggacatcatagcttgtgatcgcatccgaccagaccgcacaggggaagccttctacttgcattacaacaagaaccaaagatggcattatatcaaatccatgatccgtgaagaggcatgggcattcgtaacctacgattcagcggctgggccgcaagcaagattctgtccgcatgctgcgtttctgcacacaagaccggatagcgaccatcctccacggtacagcgtagagacacggtctattgtcatcactagatag

SEQ ID NO: 36355 - protein, 300 aa, Muscodor strobelii
  misc_feature: SGI Peptide ID NO. 572601
  misc_feature (41)..(298): NCBI GI: 163794579 Blast Desc: BAL199_05179 [alpha proteobacterium BAL199] gi|159180303|gb|EDP64826.1| BAL199_05179 [alpha proteobacterium BAL199]
  misc_feature (1)..(297): NCBI GI: 27381560 Blast Desc: bll6449 [Bradyrhizobium japonicum USDA 110] gi|27354728|dbj|BAC51714.1| bll6449 [Bradyrhizobium japonicum USDA 110]
  misc_feature (4)..(297): NCBI GI: 186685770 Blast Desc: Npun_F5723 [Nostoc punctiforme PCC 73102] gi|186468222|gb|ACC84023.1| conserved [Nostoc punctiforme PCC 73102]
  misc_feature (8)..(300): NCBI GI: 261193415 Blast Desc: conserved [Ajellomyces dermatitidis SLH14081] gi|239588718|gb|EEQ71361.1| conserved [Ajellomyces dermatitidis SLH14081] gi|239613960|gb|EEQ90947.1| conserved [Ajellomyces
  misc_feature (4)..(298): NCBI GI: 242796618 Blast Desc: conserved [Talaromyces stipitatus ATCC 10500] gi|218719424|gb|EED18844.1| conserved [Talaromyces stipitatus ATCC 10500]
  misc_feature (43)..(297): NCBI GI: 196256911 Blast Desc: conserved [Cyanothece sp. PCC 7822] gi|196202306|gb|EDX97124.1| conserved [Cyanothece sp. PCC 7822]
  misc_feature (39)..(297): NCBI GI: 75906327 Blast Desc: Ava_0102 [Anabaena variabilis ATCC 29413] gi|75700052|gb|ABA19728.1| conserved [Anabaena variabilis ATCC 29413]
  misc_feature (2)..(297): NCBI GI: 91778676 Blast Desc: Bxe_B1430 [Burkholderia xenovorans LB400] gi|91691336|gb|ABE34534.1| conserved [Burkholderia xenovorans LB400]
  misc_feature (60)..(297): NCBI GI: 91780194 Blast Desc: Bxe_C0126 [Burkholderia xenovorans LB400] gi|91692854|gb|ABE36051.1| Conserved [Burkholderia xenovorans LB400]
  misc_feature (24)..(297): NCBI GI: 146341215 Blast Desc: BRADO4289 [Bradyrhizobium sp. ORS278] gi|146194021|emb|CAL78038.1| conserved [Bradyrhizobium sp. ORS278]
MACVQGQIRFLARLDKYADEKPFFAFSQPDKDEDPRELSNLEFEAETIDIQDIRGHENDFKVDECGFQIIHRPPALVEFTSLDHVIQYQKDVQAILTELFDAEHVLVWDFRRRKTHRDKMVFDINDKLEIDTTVKDYTFISGPIVIKNRLIENGLERYLRPGYRFRMVKFEVACFMTWVDSDIWKLTWTNSVWRSLLPVVEDQPLALCDFRSIEPSDIIACDRIRPDRTGEAFYLHYNKNQRWHYIKSMIREEAWAFVTYDSAAGPQARFCPHAAFLHTRPDSDHPPRYSVETRSIVITR

SEQ ID NO: 36356 - DNA, 3021 bp, Muscodor strobelii; identical to SEQ ID NO: 36353
  misc_feature: SGI EST ID NO. CUFF.86614.0
  misc_feature: Variant of the nucleotide sequence at SEQ ID NO 36354

SEQ ID NO: 36357 - DNA, 1236 bp, Muscodor strobelii
  misc_feature: SGI cDNA ID NO. 572602
  misc_feature: Elevated expression when VOC is produced
  misc_feature: Encodes the peptide sequence at SEQ ID NO 36358
atggcatggatcgcaagccgtttccgacagcggtcttctttcaacgcattgactgcttcgcttaccgatgtcacgcaccttctagatgagggcaaagtaactagcgttgacttggtgaacgcgtacatcgctcagatcaacaagtacgataagagcggccccaaattgcacgccatactatctctagttccagatgatgtggtcctcgaaaatgcgcacagaatggatcaagaaagaactgcaggcaagactcggagtcgtttgcatggtgttccctttgtagtcaaggacaatctatggacggacgaatccttcggcatcccaaccacatgcggcgcgatagcatttgagcacacattcgcgaagaaaaacgcagacatcgttcagaagcttattgatgccggaatgatactcctcggcaagacaaacctttcggaacttgctttcgcgaaaagtagtaaagtatggggtggctggtctgccgttgggggtcagagctacacgcaacatctaggcgcatccttcaagggcttaagaatgggattcctagaccccatggattggcaaccagggacaggtatcattcgaccgaatcaagaatacaacgaacaatttatgggtgaattcaatgacatgctgtcaaagctagagtctgcaggggctatcgtccatcgcaatatcgatcttcgccgctggagtccagatgatagtgaaatcctcaatgctctgacttgttttgatcgcgatatagatcgcgactacgccgcgggatttgttgacttcacaaatggcctcataaacccgccagttcatagcatccctaagcttattgaattcaatcaacatcatcgcgacagggccatgcctccggataatcccggccaagatttcttagagaaaactgttgccaacaaggacacgctcacaaaagtacagtatgagagttatcgccaaacggttctcgaacatacaaggcgtgatggtatagatgctacaatgaagaagtacgatctagacgtcataataggtgcaccgacaggacgttccgcaaccatatacgatattgcaggttatcctgttggcaccgttccactcgggtatgcaaaattcaacgggcgcgctttcgggctgtcatttgttgtacagcccggccgagaagatctcctggttagagtcatgggggcttgggaaacgctgttgaaccctcggaagccacctccccaactagtggaatga

SEQ ID NO: 36358 - protein, 411 aa, Muscodor strobelii
  misc_feature: SGI Peptide ID NO. 572602
  misc_feature (37)..(390): Pfam Id: PF01425 Pfam Desc: Amidase
  misc_feature (37)..(149): Pfam Id: PF01425 Pfam Desc: Amidase
  misc_feature (9)..(176): NCBI GI: 242770741 Blast Desc: amidase, [Talaromyces stipitatus ATCC 10500] gi|218725237|gb|EED24654.1| amidase, [Talaromyces stipitatus ATCC 10500]
  misc_feature (174)..(409): NCBI GI: 116205451 Blast Desc: CHGG_10609 [Chaetomium globosum CBS 148.51] gi|88176737|gb|EAQ84205.1| CHGG_10609 [Chaetomium globosum CBS 148.51]
  misc_feature (9)..(176): NCBI GI: 145234599 Blast Desc: An03g00410 [Aspergillus niger] gi|134057619|emb|CAK38019.1| protein product [Aspergillus niger]
  misc_feature (14)..(406): NCBI GI: 189207342 Blast Desc: amidase family protein [Pyrenophora tritici-repentis Pt-1C-BFP] gi|187976098|gb|EDU42724.1| amidase family protein [Pyrenophora tritici-repentis Pt-1C-BFP]
  misc_feature (14)..(171): NCBI GI: 116205451 Blast Desc: CHGG_10609 [Chaetomium globosum CBS 148.51] gi|88176737|gb|EAQ84205.1| CHGG_10609 [Chaetomium globosum CBS 148.51]
  misc_feature (14)..(171): NCBI GI: 169621007 Blast Desc: SNOG_13707 [Phaeosphaeria nodorum SN15] gi|160704155|gb|EAT78731.2| SNOG_13707 [Phaeosphaeria nodorum SN15]
  misc_feature (20)..(166): NCBI GI: 218897063 Blast Desc: amidase family protein [Bacillus cereus G9842] gi|218542623|gb|ACK95017.1| amidase family protein [Bacillus cereus G9842]
  misc_feature (20)..(166): NCBI GI: 228900682 Blast Desc: Glutaminyl-tRNA synthase, glutamine-hydrolyzing, subunit A (Glutamyl-tRNA(Gln) amidotransferase, subunit A) [Bacillus thuringiensis IBL 4222] gi|228858940|gb|EEN03381.1| A
  misc_feature (15)..(171): NCBI GI: 256723754 Blast Desc: NECHADRAFT_52302 [Nectria haematococca mpVI 77-13-4]
  misc_feature (20)..(166): NCBI GI: 228920790 Blast Desc: Glutaminyl-tRNA synthase, glutamine-hydrolyzing, subunit A (Glutamyl-tRNA(Gln) amidotransferase, subunit A) [Bacillus thuringiensis serovar huazhongensis BGSC 4BD1] subunit
  misc_feature: Useful for introducing or modulating the production of volatile compounds
MAWIASRFRQRSSFNALTASLTDVTHLLDEGKVTSVDLVNAYIAQINKYDKSGPKLHAILSLVPDDVVLENAHRMDQERTAGKTRSRLHGVPFVVKDNLWTDESFGIPTTCGAIAFEHTFAKKNADIVQKLIDAGMILLGKTNLSELAFAKSSKVWGGWSAVGGQSYTQHLGASFKGLRMGFLDPMDWQPGTGIIRPNQEYNEQFMGEFNDMLSKLESAGAIVHRNIDLRRWSPDDSEILNALTCFDRDIDRDYAAGFVDFTNGLINPPVHSIPKLIEFNQHHRDRAMPPDNPGQDFLEKTVANKDTLTKVQYESYRQTVLEHTRRDGIDATMKKYDLDVIIGAPTGRSATIYDIAGYPVGTVPLGYAKFNGRAFGLSFVVQPGREDLLVRVMGAWETLLNPRKPPPQLVE

SEQ ID NO: 36359 - DNA, 2440 bp, Muscodor strobelii
  misc_feature: SGI EST ID NO. CUFF.86607.0
  misc_feature: Variant of the nucleotide sequence at SEQ ID NO 36357
ctcagcctcacttcaaccgggcgaagccaagattaccccagccgcagcctgcaggctgcgtcatgggtttccccaaaacgggagctctggggtatggcttgggtgttgtttcaatactactgcacctaaatccgtcgataataatacgtgacccccaccgggaggttgaagtactagaaacgtaccaaggtacctacattgaggttcgatgccgagtaccatacgttgtctaccaggcagacctccagtcaaattatagcgaccgggaacgccagacgtgcatttgtcgcctacaacccagcttgcctggcgacctgactccgcagtgagacctttcgaggcgatcacaacagaagtgaattagcaaagaaccccgcagcgcccgggctcaaaatctagtaggtatacgatgctctaagccttttttttttttttgttccaaatcctcgtagctctttcgccatcccggacacgccgcgctcgcgttcatgagctcagctactaatatgatctgctaaatatggtgaagttgaaatccttgtcttcacggatctttcgaaaagtccataagactctgttcctgttcccagtcgtgttagccatggcatggatcgcaagccgtttccgacagcggtcttctttcaacgcattgactgcttcgcttaccgatgtcacgcaccttctagatgagggcaaagtaactagcgttgacttggtgaacgcgtacatcgctcagatcaacaagtacgataagagcggccccaaattgcacgccatactatctctagttccagatgatgtggtcctcgaaaatgcgcacagaatggatcaagaaagaactgcaggcaagactcggagtcgtttgcatggtgttccctttgtagtcaaggacaatctatggacggacgaatccttcggcatcccaaccacatgcggcgcgatagcatttgagcacacattcgcgaagaaaaacgcagacatcgttcagaagcttattgatgccggaatgatactcctcggcaagacaaacctttcggaacttgctttcgcgaaaagtagtaaagtatggggtggctggtctgccgttggggggcaaactcaatcgccgtatgtcgctggtggaatagatcctagtgatacttgtctgggtcacagtactgctgcaggttcctcaactggaagtgcggttgctgtcgcagcgggcatggctcctattgcaatcgggacggagacagatggttctatcatgatgccggctgatcgagcatcactttactcgatccgactatctccttctacattaaataggggcatgctgcccttcaatacacttggcgactctgtcggctggatgacgaaaggtgctgaagatgcggctctcctttttggacattgtctttgacagtcagagctacacgcaacatctaggcgcatccttcaagggcttaagaatgggattcctagaccccatggattggcaaccagggacaggtatcattcgaccgaatcaagaatacaacgaacaatttatgggtgaattcaatgacatgctgtcaaagctagagtctgcaggggctatcgtccatcgcaatatcgatcttcgccgctggagtccagatgatagtgaaatcctcaatgctctgacttatcgcgactacgccgcgggatttgttgacttcacaaatggcctcataaacccgccagttcatagcatccctaagcttattgaattcaatcaacatcatcgcgacagggccatgcctccggataatcccggccaagatttcttagagaaaactgttgccaacaaggacacgctcacaaaagtacagtatgagagttatcgccaaacggttctcgaacatacaaggcgtgatggtatagatgctacaatgaagaagtacgatctagacgtcataataggtgcaccgacaggacgttccgcaaccatatacgatattgcaggttatcctgttggcaccgttccactcgggtatgcaaaattcaacgggcgcgctttcgggctgtcatttgttgtacagcccggccgagaagatctcctggttagagtcatgggggcttgggaaacgctgttgaaccctcggaagccacctccccaactagtggaatgaagctaggttatgatttcgtgagtcttatccgtagttgaaaaggcaatacgtacctaaggcaagcgagtcacaccccatcatcgaggtgccggtagcacaggctttgagcagcctctctgatactcttgagagcttgcgcgccttaaatgccttaaaaattgaaatttgctatgagcaactagttagactatactgttctgtaggagatgcatcccaggcgcctgagaactgacgggggaaagacgtgaaatcagacttagcatattccgtagttatgcttacagatcgactcgtaatatcaatactga

SEQ ID NO: 36360 - DNA, 1473 bp, Muscodor strobelii
  misc_feature: SGI cDNA ID NO. 572603
  misc_feature: Encodes the peptide sequence at SEQ ID NO 36361
atggctgacacgccagccgaaacgtccaatgcacctgctgccactcacctcaccatagacttggccgctgccgccacagggcccaatgtcgaaaggctgaagacaccaaccaccccgggctcgaggcgcccctctatgcagtcgcggagctctatgaatggccccctctatatgcaaaataggaacaacaaggtctttgtccggagagtcaagaggaaaggcgatggaacagtcaagagcctgacccgttggcttttggataatcagataggactatcctttaatctgatcgctctcatcttccttactcatatgttcatacccaaggcgcgcgcgcatacccacaaattcttcaccttatcctactataatccgcaatcgggaggttatgcaatcggcagcgatgactattatttcattgctttctgtattgtccttttcactggccttcgcgccggcctaatggaacatgtcttggccccactggccaagcattgggggttgtccaacaggaaagacatgactagattctccgagcaagcctggcttctgatctactacacctgcttctggcctgtcggtgtgtatctatactacaattcaccctcatggctcaatatgagggaactgtggacggactggccaaaccgtgaagttactggcctcgtgaaggtctacttcctcggtcaatgggcattctggctgcaacaagttctggttattcacatcgaggagcgtcgcaaggaccactggcagatgttgactcatcatttcatcaccatcgcactcttgactgcttcgtactgctatcactatacgcgagtaggcatcctgattctcgtgctgatggatattgtggacattttcctcccgcttgccaaatgtctcaagtatatgggccactctacgctgtgtgatgtcatgttcggcctgttcatggtatcatggttcgtcgctcggcacgtgctgtaccttgtggtgtgctggagtatctacagagatgcaattcaagttatgcctatcgggtgcttctacggcagcaacactaaccttaccggacctttacccattcccgaaggctggagccactgggttgaaccattcaagaatccggaaggcgctctctgcttctcacaaacggtcgtaaacggtttcctatacaccctcctcggtctgcagaccattaccatagcctggtttttcctgatcatcagggtggcaatacgagtcctgagcggtggctccgccgacgacccacgcagcgacgacgaagcggagactgaggaagaattcgaatacgaggaagctcagccacttgaggaagaagtaggagttgaggctctcgacttaaaaggctgggaacgtcggtcgggtgttaagagagttgcggcagcgtcgggagtcagtcttccgggtcatagtgatcggaaagagctgcttggtcgcattggctgtgagaagcaggtggattga

SEQ ID NO: 36361 - protein, 490 aa, Muscodor strobelii
  misc_feature: SGI Peptide ID NO. 572603
  misc_feature (195)..(428): Pfam Id: PF03798 Pfam Desc: Longevity-assurance protein (LAG1)
  misc_feature (113)..(173): Pfam Id: PF08390 Pfam Desc: TRAM1-like protein
  misc_feature (195)..(324): Pfam Id: PF03798 Pfam Desc: Longevity-assurance protein (LAG1)
  misc_feature (389)..(428): Pfam Id: PF03798 Pfam Desc: Longevity-assurance protein (LAG1)
  misc_feature (36)..(490): NCBI GI: 46135815 Blast Desc: FG09423.1 [Gibberella zeae PH-1]
  misc_feature (58)..(490): NCBI GI: 256727071 Blast Desc: NECHADRAFT_32956 [Nectria haematococca mpVI 77-13-4]
  misc_feature (1)..(490): NCBI GI: 85116500 Blast Desc: NCU02468 [Neurospora crassa OR74A] gi|28926864|gb|EAA35826.1| conserved [Neurospora crassa OR74A] gi|38567119|emb|CAE76415.1| related to protein LAC1 [Neurospora
  misc_feature (39)..(490): NCBI GI: 116193995 Blast Desc: CHGG_06715 [Chaetomium globosum CBS 148.51] gi|88182628|gb|EAQ90096.1| CHGG_06715 [Chaetomium globosum CBS 148.51]
  misc_feature (1)..(490): NCBI GI: 171683189 Blast Desc: protein product [Podospora anserina] gi|170941554|emb|CAP67206.1| protein product [Podospora anserina]
  misc_feature (68)..(489): NCBI GI: 154303168 Blast Desc: BC1G_09604 [Botryotinia fuckeliana B05.10] gi|150855067|gb|EDN30259.1| BC1G_09604 [Botryotinia fuckeliana B05.10]
  misc_feature (67)..(490): NCBI GI: 39971247 Blast Desc: MGG_03090 [Magnaporthe grisea 70-15] gi|149210841|ref|XP_001522795.1| MGCH7_ch7g893 [Magnaporthe grisea 70-15] gi|86196848|gb|EAQ71486.1| MGCH7_ch7g893 grisea
  misc_feature (68)..(489): NCBI GI: 156058610 Blast Desc: SS1G_03317 [Sclerotinia sclerotiorum 1980] gi|154701104|gb|EDO00843.1| SS1G_03317 [Sclerotinia sclerotiorum 1980]
  misc_feature (7)..(436): NCBI GI: 261353754 Blast Desc: sphingosine N-acyltransferase lag1 [Verticillium albo-atrum VaMs.102]
  misc_feature (90)..(464): NCBI GI: 145259463 Blast Desc: An04g10300 [Aspergillus niger] gi|134075009|emb|CAK44810.1| protein product [Aspergillus niger]
  misc_feature (84)..(423): SWISSPROT Homolog: EC 2.3.1.24 Sphingosine N-acyltransferase
MADTPAETSNAPAATHLTIDLAAAATGPNVERLKTPTTPGSRRPSMQSRSSMNGPLYMQNRNNKVFVRRVKRKGDGTVKSLTRWLLDNQIGLSFNLIALIFLTHMFIPKARAHTHKFFTLSYYNPQSGGYAIGSDDYYFIAFCIVLFTGLRAGLMEHVLAPLAKHWGLSNRKDMTRFSEQAWLLIYYTCFWPVGVYLYYNSPSWLNMRELWTDWPNREVTGLVKVYFLGQWAFWLQQVLVIHIEERRKDHWQMLTHHFITIALLTASYCYHYTRVGILILVLMDIVDIFLPLAKCLKYMGHSTLCDVMFGLFMVSWFVARHVLYLVVCWSIYRDAIQVMPIGCFYGSNTNLTGPLPIPEGWSHWVEPFKNPEGALCFSQTVVNGFLYTLLGLQTITIAWFFLIIRVAIRVLSGGSADDPRSDDEAETEEEFEYEEAQPLEEEVGVEALDLKGWERRSGVKRVAAASGVSLPGHSDRKELLGRIGCEKQVD

SEQ ID NO: 36362 - DNA, 2464 bp, Muscodor strobelii
  misc_feature: SGI EST ID NO. CUFF.86611.0
  misc_feature: Variant of the nucleotide sequence at SEQ ID NO 36360
gggcgatccatgaagcaattacactgacgggagggataggggcacaccgacccaacgagtagatgattgccaggcgatttgggagtgtcttcggcttatgttagagcttctaagatgctatgcttgggtacctcttcgacgttgctcaaatacattgcattaggccttgactagcagagctttcgaagtatgtgcagggctagacagcggtactcgcagggtctacggtgatagtcaggggtgccctctccccacacactagcgcactcgcatgcagctcaacatctttccaaaatccgcacttcgcttttcaatatcttgagatctgtcgccagccgcaaaccttactgtcagaccctattatcttctacaaaggagcaaagtcgaatttgtttaccgatgattggcctatgagaagtcgtcttcttttcccccttaccgcttctcgaggtcattctctcgctccgccattatccgcgttgactctgcatttgcatctgcatctttgtgtagcgcctcattttttcaacgttcggcgatattgcgtataggtcccttgtcacacgcctgcctcccccgttgcggcctcgtccacgcgctcgttacctgactgctccctctggtgcagcaatcagcattcattactcactattctttcggccgtgactcaattggcatatactactactttttacagtcattctactacagagaatcgaccgctagtgagcacgacaccccgcgcggaacatggctgacacgccagccgaaacgtccaatgcacctgctgccactcacctcaccatagacttggccgctgccgccacagggcccaatgtcgaaaggctgaagacaccaaccaccccgggctcgaggcgcccctctatgcagtcgcggagctctatgaatggccccctctatatgcaaaataggaacaacaaggtctttgtccggagagtcaagaggaaaggcgatggaacagtcaagagcctgacccgttggcttttggataatcagataggactatcctttaatctgatcgctctcatcttccttactcatatgttcatacccaaggcgcgcgcgcatacccacaaattcttcaccttatcctactataatccgcaatcgggaggttatgcaatcggcagcgatgactattatttcattgctttctgtattgtccttttcactggccttcgcgccggcctaatggaacatgtcttggccccactggccaagcattgggggttgtccaacaggaaagacatgactagattctccgagcaagcctggcttctgatctactacacctgcttctggcctgtcggtgtgtatctatactacaattcaccctcatggctcaatatgagggaactgtggacggactggccaaaccgtgaagttactggcctcgtgaaggtctacttcctcggtcaatgggcattctggctgcaacaagttctggttattcacatcgaggagcgtcgcaaggaccactggcagatgttgactcatcatttcatcaccatcgcactcttgactgcttcgtactgctatcactatacgcgagtaggcatcctgattctcgtgctgatggatattgtggacattttcctcccgcttgccaaatgtctcaagtatatgggccactctacgctgtgtgatgtcatgttcggcctgttcatggtatcatggttcgtcgctcggcacgtgctgtaccttgtggtgtgctggagtatctacagagatgcaattcaagttatgcctatcgggtgcttctacggcagcaacactaaccttaccggacctttacccattcccgaaggctggagccactgggttgaaccattcaagaatccggaaggcgctctctgcttctcacaaacggtcgtaaacggtttcctatacaccctcctcggtctgcagaccattaccatagcctggtttttcctgatcatcagggtggcaatacgagtcctgagcggtggctccgccgacgacccacgcagcgacgacgaagcggagactgaggaagaattcgaatacgaggaagctcagccacttgaggaagaagtaggagttgaggctctcgacttaaaaggctgggaacgtcggtcgggtgttaagagagttgcggcagcgtcgggagtcagtcttccgggtcatagtgatcggaaagagctgcttggtcgcattggctgtgagaagcaggtggattgattacctctgataccccttacttgcatgcttttatgtctttattcttttttctacctcagtctcgagactgagactggggactacagacagtggtagggtaaagggcgacctgtttacgcgatgtgacatggcaaaaggcgtcggatgggacgggatggtatatagacttttgttgcaaattttagtatcatacccctttattactctgaagatggtatttattacgagatattgaatcagg

SEQ ID NO: 36363 - DNA, 837 bp, Muscodor strobelii
  misc_feature: SGI cDNA ID NO. 572604
  misc_feature: Reduced expression when VOC is produced
  misc_feature: Encodes the peptide sequence at SEQ ID NO 36364
atgtcgtccaataccaagtacacaccagcgccaacgcaagacccggacgaggggtcttggtctcaagcgccgccctcctaccaagcggacgaagcatcgacatccgcagcgggcggcatcttcggcgccgctccccgcagcagcgaggacaacatcccagatgacttcaagttcggtggttccgtcgccgaagccacgctcgacatccgaaaccagttcatccgcaaggtctacaccatcctgaccgcgcagctcctcgtcacggccggtgtcagcgcgctctcgttctggagcgctgactacaagtcttggatccagtctcatcccggtcttgtctgggcttctctcttcggctccctaatcttcctcggtctaacctactggaagcgcacctcctacccaacaaacctgctcttcctctccggcttcaccctcctcgaagcctacacaatctccgtcatcgtatctctctacgaaacccgcatcgtcctgaacgccgcgatcctcacaggcggtatattcatattcttgacgctcttcgcctgccagacgaaatacgacttcacatcctggatgccctacctcttcggtgctctctggggcctcctactcttcggtttcatggccgcattcctgccttactcttccactggagagttgatctacggcggtctggcagctttgatcttctccggttatatcctcgttgatactcagctcgtgcttcgcaagcaccatgtcgaggaggagattgcggccgctattagcttgtaccttgatatcatcaacttgttcctcgccattctgaggatccttaacagtcagaataacaactag

SEQ ID NO: 36364 - protein, 278 aa, Muscodor strobelii
  misc_feature: SGI Peptide ID NO. 572604
  misc_feature (66)..(276): Pfam Id: PF01027 Pfam Desc: Uncharacterised protein family UPF0005
  misc_feature (1)..(278): NCBI GI: 226532734 Blast Desc: LOC100273456 [Zea mays] gi|194704196|gb|ACF86182.1| [Zea mays]
  misc_feature (1)..(278): NCBI GI: 46135813 Blast Desc: FG09422.1 [Gibberella zeae PH-1]
  misc_feature (1)..(278): NCBI GI: 171683199 Blast Desc: protein product [Podospora anserina] gi|170941559|emb|CAP67211.1| protein product [Podospora anserina]
  misc_feature (1)..(278): NCBI GI: 116194003 Blast Desc: CHGG_06719 [Chaetomium globosum CBS 148.51] gi|88182632|gb|EAQ90100.1| CHGG_06719 [Chaetomium globosum CBS 148.51]
  misc_feature (1)..(278): NCBI GI: 261353753 Blast Desc: transmembrane BAX inhibitor motif-containing protein [Verticillium albo-atrum VaMs.102]
  misc_feature (1)..(278): NCBI GI: 154303170 Blast Desc: BC1G_09605 [Botryotinia fuckeliana B05.10] gi|150855068|gb|EDN30260.1| BC1G_09605 [Botryotinia fuckeliana B05.10]
  misc_feature (1)..(278): NCBI GI: 39971245 Blast Desc: MGG_03089 [Magnaporthe grisea 70-15] gi|149210839|ref|XP_001522794.1| MGCH7_ch7g892 [Magnaporthe grisea 70-15] gi|86196847|gb|EAQ71485.1| MGCH7_ch7g892 grisea
  misc_feature (1)..(278): NCBI GI: 156058608 Blast Desc: SS1G_03316 [Sclerotinia sclerotiorum 1980] gi|154701103|gb|EDO00842.1| SS1G_03316 [Sclerotinia sclerotiorum 1980]
  misc_feature (1)..(278): NCBI GI: 226277519 Blast Desc: transmembrane BAX inhibitor motif-containing protein [Paracoccidioides brasiliensis Pb01]
  misc_feature (1)..(278): NCBI GI: 261202212 Blast Desc: bax Inhibitor family protein [Ajellomyces dermatitidis SLH14081] gi|239590417|gb|EEQ72998.1| bax Inhibitor family protein [Ajellomyces dermatitidis SLH14081]
  misc_feature: Useful for introducing or modulating the production of volatile compounds
MSSNTKYTPAPTQDPDEGSWSQAPPSYQADEASTSAAGGIFGAAPRSSEDNIPDDFKFGGSVAEATLDIRNQFIRKVYTILTAQLLVTAGVSALSFWSADYKSWIQSHPGLVWASLFGSLIFLGLTYWKRTSYPTNLLFLSGFTLLEAYTISVIVSLYETRIVLNAAILTGGIFIFLTLFACQTKYDFTSWMPYLFGALWGLLLFGFMAAFLPYSSTGELIYGGLAALIFSGYILVDTQLVLRKHHVEEEIAAAISLYLDIINLFLAILRILNSQNNN

SEQ ID NO: 36365 - DNA, 3442 bp, Muscodor strobelii
  misc_feature: SGI EST ID NO. CUFF.86955.0
  misc_feature: Variant of the nucleotide sequence at SEQ ID NO 36363
cgcccatcgccttcccacgcttgtgcaccgcctcatccatccctctgtcccgcgccgtcaacagcaaaggtcagatcaccaccaatagcctcgccttcatcaccctagaatttctattgatccaccaccttcatcgtcttcgctcatcgcgaaaaacttacacacgacaccgaatcaccgaatcgagaatctgcgacgacgagcctactacgaaatagagcagcgaccagtaaccatgtcgtccaataccaagtacacaccagcgccaacgcaagacccggacgaggggtcttggtctcaagcgccgccctcctaccaagcggacgaagcatcgacatccgcagcgggcggcatcttcggcgccgctccccgcagcagcgaggacaacatcccagatgacttcaagttcggtggttccgtcgccgaagccacgctcgacatccgaaaccagttcatccgcaaggtctacaccatcctgaccgcgcagctcctcgtcacggccggtgtcagcgcgctctcgttctggagcgctgactacaagtcttggatccagtctcatcccggtcttgtctgggcttctctcttcggctccctaatcttcctcggtctaacctactggaagcgcacctcctacccaacaaacctgctcttcctctccggcttcaccctcctcgaagcctacacaatctccgtcatcgtatctctctacgaaacccgcatcgtcctgaacgccgcgatcctcacaggcggtatattcatattcttgacgctcttcgcctgccagacgaaatacgacttcacatcctggatgccctacctcttcggtgctctctggggcctcctactcttcggtttcatggccgcattcctgccttactcttccactggagagttgatctacggcggtctggcagctttgatcttctccggttatatcctcgttgatactcagctcgtgcttcgcaagcaccatgtcgaggaggagattgcggccgctattagcttgtaccttgatatcatcaacttgttcctcgccattctgaggatccttaacagtcagaataacaactaggttgctttctatctcgctcttttgtttttttgttcgattaaggtgtatattgttaggaatggattgatctcagatggacgggagtttgacgaccgagtctggcctcgcggaaagaggtgcacagggaaggcagggcattgagtactgaacctgagctgggaagagtacttgggctaaggactacagaagagaaagcatggtttcctagctggttcacttcttcattctttgcatcagaggctctccagagcctcgtcctgttcttgcgatgttacttagttatggcagggaaacaaaacaacgcgaggatgatgagatatcaggctcatcgatcatgtagaaattattcaacatgagtcgttcccagacatggatagccaatcacatcatctgtgacctggatgatgtacttgaagtgtgtattttggaagagtttacatttgcaatgtagtcagacaatgaattaccattgatttctgtattagaatgacactaaaactaggagatgcattaatgcacaaaaacaaggccacttgatagcctcaaatcgtaataaaggacatcgattctcgcaaaggtattttctcaacgtggattcatgacagctccccatccatcttcctccactgggggtatcggcgagaagaagccaagtgacgtgacgcaaccatacaatatggcttatctatacctttcagagggccatcaatacagcatgctttttcgggggaatcgcaactccggtccggtcttgtattcctgacaaatccgccaaactctgctgttctcaagctcgcataagaagaaaccattaagcaatgtccagcctttttatccgtgaaatacgtcaggtcgggtgtgcgcgagcgagaaagtgcgtttctctcgagacacgcaacgccgcaactctgcatttctctctccagctgccgatatcgccaacggcagaaaccacacgcccaggcgtaattacgatctaatggccgttgttcatctgcaaggtactagcctcggataggactgatgagttcgtagtggtggcggacttctagttgccatcatgttcgccattagcctcagatgggaccgatgatccagcagcggcagcctcgcgctgcatacgagcctctatctcgcgaagctgggactcgcgggccaggagctcttgtcgcttctcgttgatctcgcgctgcaccttgatctctatttcgcggagcttctcttcctcacgacggagttgctcttctttgagacggaccgactgagacgcaagatcttcggggttcatggaggagtcgctgtaaagagattcatgttagcaaaatcgaatacaccaatgagcggactaaatacgtacactccagcaccaccctcgacactcttagaaagcttctcggtacgatagttctcgtataggaaatcgtgggtaatctccttgaggtcagccagatggctgtggagcagcgcagagcggatggccaagaagtcggagtggcgggggttgtcgacctcgacgacaccccaggggtactgtcgagcgcggactttgcggccgccgatctcaatggtctcctccgagccgacaatagcgaacggcatgaggcctcggagctcagcgttctcctcgacagtatcctcgtcatcctcctcgatatcgtaggggaagttgtagacagggatgcggtagtgctcgatgtcctccataaccagcttcttggattcagcaagctcaccgggagtaagcgaatcggctcggccaatgacggggataacgttgacgcggggcgcaaggcgcttcatcagctcgatgtcgagttctcgaagactatatagggtatgtgagcaagcgtgtcgtgtagggtggtagttgcaccgggggcaagggggtggggagcatacccatgacctgtaggagcaatgaagtacagcatggcatgtactcggttgtctctgaatctggggttacgcttgatacgcgactcctcggccaagatatcgtcatattgtctctcgaggtatccgacgatctcggaaaagcttgagtgggaccgcagttagtatgcatgtggtgatgtggcaggtggcggctcgggtcttacctggcttcattgtcgatttggtcgccgaagccgggagtgtcgacaatggtcagggagatacgtgttccctcctcgtccagctcgagttctggcaaagttatgagtatcgaattgagggtctaggtttgggttacagggccagtcgtgacataccaacggtgataggcttgatcttaacgccatcctccacgtgagcagcattggcatcatcagagtccttatgattgaggacgctcttgctgcagagagtgttgacgaaggtagttctgcc

SEQ ID NO: 36366 - DNA, 1149 bp, Muscodor strobelii
  misc_feature: SGI cDNA ID NO. 572605
  misc_feature: Reduced expression when VOC is produced
  misc_feature: Encodes the peptide sequence at SEQ ID NO 36367
atgcggtcccagaagatgatgcgtcggaagaagaacgtgaagaagggaatccagttctgtctgatggtctgtggtgcttccggtacaggcagaactaccttcgtcaacactctctgcagcaagagcgtcctcaatcataaggactctgatgatgccaatgctgctcacgtggaggatggcgttaagatcaagcctatcaccgttgaactcgagctggacgaggagggaacacgtatctccctgaccattgtcgacactcccggcttcggcgaccaaatcgacaatgaagccagcttttccgagatcgtcggatacctcgagagacaatatgacgatatcttggccgaggagtcgcgtatcaagcgtaaccccagattcagagacaaccgagtacatgccatgctgtacttcattgctcctacaggtcatggtcttcgagaactcgacatcgagctgatgaagcgccttgcgccccgcgtcaacgttatccccgtcattggccgagccgattcgcttactcccggtgagcttgctgaatccaagaagctggttatggaggacatcgagcactaccgcatccctgtctacaacttcccctacgatatcgaggaggatgacgaggatactgtcgaggagaacgctgagctccgaggcctcatgccgttcgctattgtcggctcggaggagaccattgagatcggcggccgcaaagtccgcgctcgacagtacccctggggtgtcgtcgaggtcgacaacccccgccactccgacttcttggccatccgctctgcgctgctccacagccatctggctgacctcaaggagattacccacgatttcctatacgagaactatcgtaccgagaagctttctaagagtgtcgagggtggtgctggagtcgactcctccatgaaccccgaagatcttgcgtctcagtcggtccgtctcaaagaagagcaactccgtcgtgaggaagagaagctccgcgaaatagagatcaaggtgcagcgcgagatcaacgagaagcgacaagagctcctggcccgcgagtcccagcttcgcgagatagaggctcgtatgcagcgcgaggctgccgctgctggatcatcggtcccatctgaggctaatggcgaacatgatggcaactag

SEQ ID NO: 36367 - protein, 382 aa, Muscodor strobelii
  misc_feature: SGI Peptide ID NO. 572605
  misc_feature (15)..(299): Pfam Id: PF00735 Pfam Desc: Septin
  misc_feature (5)..(382): NCBI GI: 256727070 Blast Desc: NECHADRAFT_103510 [Nectria haematococca mpVI 77-13-4]
  misc_feature (3)..(363): NCBI GI: 116194001 Blast Desc: CHGG_06718 [Chaetomium globosum CBS 148.51] gi|88182631|gb|EAQ90099.1| CHGG_06718 [Chaetomium globosum CBS 148.51]
  misc_feature (5)..(382): NCBI GI: 46135811 Blast Desc: FG09421.1 [Gibberella zeae PH-1]
  misc_feature (5)..(382): NCBI GI: 39971241 Blast Desc: conserved [Magnaporthe grisea 70-15] gi|145017060|gb|EDK01423.1| conserved [Magnaporthe grisea 70-15]
  misc_feature (5)..(363): NCBI GI: 171683195 Blast Desc: protein product [Podospora anserina] gi|170941557|emb|CAP67209.1| protein product [Podospora anserina]
  misc_feature (5)..(382): NCBI GI: 164427950 Blast Desc: NCU02464 [Neurospora crassa OR74A] gi|157071949|gb|EAA35822.2| NCU02464 [Neurospora crassa OR74A]
  misc_feature (7)..(378): NCBI GI: 242790694 Blast Desc: septin AspA, [Talaromyces stipitatus ATCC 10500] gi|218718192|gb|EED17612.1| septin AspA, [Talaromyces stipitatus ATCC 10500]
  misc_feature (7)..(378): NCBI GI: 212534626 Blast Desc: septin AspA, [Penicillium marneffei ATCC 18224] gi|210069868|gb|EEA23958.1| septin AspA, [Penicillium marneffei ATCC 18224]
  misc_feature (7)..(363): NCBI GI: 154285752 Blast Desc: HCAG_00717 [Ajellomyces capsulatus NAm1] gi|150407312|gb|EDN02853.1| HCAG_00717 [Ajellomyces capsulatus NAm1]
  misc_feature (7)..(363): NCBI GI: 261202036 Blast Desc: septin-1 [Ajellomyces dermatitidis SLH14081] gi|225554552|gb|EEH02849.1| septin [Ajellomyces capsulatus G186AR] gi|239590329|gb|EEQ72910.1| septin-1 [Ajellomyces ER-3]
  misc_feature: Useful for introducing or modulating the production of volatile compounds
MRSQKMMRRKKNVKKGIQFCLMVCGASGTGRTTFVNTLCSKSVLNHKDSDDANAAHVEDGVKIKPITVELELDEEGTRISLTIVDTPGFGDQIDNEASFSEIVGYLERQYDDILAEESRIKRNPRFRDNRVHAMLYFIAPTGHGLRELDIELMKRLAPRVNVIPVIGRADSLTPGELAESKKLVMEDIEHYRIPVYNFPYDIEEDDEDTVEENAELRGLMPFAIVGSEETIEIGGRKVRARQYPWGVVEVDNPRHSDFLAIRSALLHSHLADLKEITHDFLYENYRTEKLSKSVEGGAGVDSSMNPEDLASQSVRLKEEQLRREEEKLREIEIKVQREINEKRQELLARESQLREIEARMQREAAAAGSSVPSEANGEHDGN
